United States Patent Application Publication US 2007/0061916 A1 - sequence listing, part 15

SEQ ID NO: 83009 - protein, 170 aa, Gossypium hirsutum
  Clone ID: GOSHI-09MAY01-C100757_1.pep
QSGKPPSVSSRTIPQKDSLSSIVGSQPDDALTADVSKFKDSASGAENISGEHNLELRSSSSDGAAEGQVLFSCAALSSDAPPEKASTSNAKSESISKGKLAPVSGKLAKVEEEMKIVSEVVEPRRSNRKIQPTSRLLEGIQSSLIISKVPVSHDKGQKGQSRSTRGSNQG

SEQ ID NO: 83010 - protein, 292 aa, Gossypium hirsutum
  unsure (1)..(292): unsure at all Xaa locations
  Clone ID: GOSHI-09MAY01-C100177_1.pep
PSTNGQKVYVREQAALFVSMAEMMKKXFQSSTRDLSRPHSSSNMPVLRLTRPKEPEFETAQRMRPVAVKSTAELEEEMMAKIPKFKARPLNKKIFEPSTLTLHYQESTPQDTRVSGNFTLSTMATASKNAETSSVASTEVSRQNTQXKPHLTEPKTPVLQTSLRARPITVKSSIELEQEEREKAPKFKARPLNKKXIFESKGELGIFCNTKKQVTIPQEFHFATHERIPPPPAVFDLFDKLKEVLKKEKKFVMEIIEKQLEEXRARVPNANPYPYTTDYPVLPSKPEPKQCT

SEQ ID NO: 83011 - protein, 63 aa, Gossypium hirsutum
  Clone ID: GOSHI-09MAY01-C100257_1.pep
LRSAPSFTWKSIWAARGLLQDGLGWRVGRGSEISIWNDYFPTEIARKILQIPLAEAEHEDFQV

SEQ ID NO: 83012 - protein, 36 aa, Gossypium hirsutum
  Clone ID: GOSHI-09MAY01-C101967_1.pep
VLGLVHFEPLNWVKGVMGMLMGYLGYQSARSRLNGL

SEQ ID NO: 83013 - protein, 106 aa, Gossypium hirsutum
  unsure (1)..(106): unsure at all Xaa locations
  Clone ID: GOSHI-09MAY01-C101917_1.pep
WLRAAELTCDRAALLVAQDPKLXISVLMKLTGGCPSMADQLNVDAFLEQAHSYEKASSSPIGWYIRNAQTRQLSHPLPVLRAREIDEWSRSREYRSLLERATQMSM

SEQ ID NO: 83014 - protein, 191 aa, Gossypium hirsutum
  Clone ID: GOSHI-09MAY01-C101897_1.pep
LRSQETLAFGTSAYVTQDDALVTTLTVREAVFYSAQLQLPDSMSISEKKERAAMTIREMGLQDSMDTRIGGWSTKGLSGGQKRRVSICIELLTWPELLFLDQPTSGLDSAASYHVMNRIVKLAHLHGRTVFASIHQPSSEVFELFHNLCLLSSGKTVYFGPISMAEMLFAINGFPCPPLKNPSDHYLKTIN

SEQ ID NO: 83015 - protein, 205 aa, Gossypium hirsutum
  unsure (1)..(205): unsure at all Xaa locations
  Clone ID: GOSHI-09MAY01-C101867_1.pep
LPFFGHLLLCRAYAAXGNLKFSKEEYERCLELKTDFLVGWLCXLKLYGISVEEQPVSNVFELAFKEGSEGRNNSWNMWMAVYRLVMGLICLWNRDFLSADEFLEQPCSVTSAESCIFLWHGLTSMEIARRFHDPQFLSSAIRSLSKAHITSSVPIPIVSALLAQPXGSLGSRNKWERDLRLVWGSWPPQIDTRNLVFKSICFKTD

SEQ ID NO: 83016 - protein, 121 aa, Gossypium hirsutum
  Clone ID: LIB3828-029-Q6-N6-B6.pep
IARRYHDSQFLSSAIRSLSKAHITSSVPIPIVSALLAQAEGSIGSRKKWERNLRLEWFSWPPEMRPAELFFQMHLLARQIASESDSSSRVEGCQSPLQWVLRAIHTNPSDLRYWKVLPKLL

SEQ ID NO: 83017 - protein, 90 aa, Gossypium hirsutum
  Clone ID: GOSHI-09MAY01-C101837_1.pep
THSQNSNVLCAPHPLPPLVPRQPTSSRGLTRTCRHCTKMAKAALLSSSLTTRQCPHRSLLPPFGKTNGSSRFAKWSRQKKTESKGSFDLF

SEQ ID NO: 83018 - protein, 199 aa, Gossypium hirsutum
  Clone ID: GOSHI-09MAY01-C101597_1.pep
MRDYQTRKEVFGLTSCGGTHVLAAESAEKGWFLNNSHWWFHVHNELNENDIAFGFKGNRKVIVFRGRKLGFEINDGKKLKNEEHFMTAVEFSMEYPYGKAIALFNLKSAIIEISEEEPLVVPMIILAFLVSESSSTCEKSCNNEGKGGGEAITNGIKYSPPAGEDEVKSSNCAGCGGGCGISCGGSCGGPCSGGDAYRN

SEQ ID NO: 83019 - protein, 85 aa, Gossypium hirsutum
  unsure (1)..(85): unsure at all Xaa locations
  Clone ID: LIB3828-024-Q6-K6-A12.pep
ASPNEQCPQKLPPQXMQQPPPQPPQLILLTSXSPSGGEYLIPLVMASPPPFPSLLQLFSQLLELSETRKANIIIGTTSGSFXTDL

SEQ ID NO: 83020 - protein, 101 aa, Gossypium hirsutum
  unsure (1)..(101): unsure at all Xaa locations
  Clone ID: GOSHI-09MAY01-C101577_1.pep
RPSVRSVRAPSLGCCGHGGXKYNFNNSLRCGGKIXVKGKEILIAKSCGNPSVRVNWDGIHFTEAASRWIFQQIASGSFSDPPLPLKMACHLSKDGAMNKFR

SEQ ID NO: 83021 - protein, 105 aa, Gossypium hirsutum
  Clone ID: GOSHI-09MAY01-C101777_1.pep
TPMTDKFTFCQKVANSSQNNGQTIHNKSAEDQRRETHSLNMGFDQKRGEKRGKNGKNERKKGPGETGNVKGSFWTACSYCYYKFEYEKKYEECRLRCRNLRKGFH

SEQ ID NO: 83022 - protein, 58 aa, Gossypium hirsutum
  Clone ID: GOSHI-09MAY01-C101677_1.pep
ENRIGIYITLVNLSLLLTTFMLVAIKTYHKYLSHSFFFSGGGREKQTMETHTIIYQIA

SEQ ID NO: 83023 - protein, 105 aa, Gossypium hirsutum
  Clone ID: GOSHI-09MAY01-C101657_1.pep
KYAYAVGSALHGVQHILREDFMLQPPWDFEIGKKFIIHYTYGCDYNMKGELMYGEIGEWRFDKRSFLRGPPPRNLSLPPPGVPESVVTLVKMVNEAPANIPNWEA

SEQ ID NO: 83024 - protein, 330 aa, Gossypium hirsutum
  Clone ID: GOSHI-09MAY01-C101337_1.pep
KRVFLVGLVAISHLLFQSFLLPYGNALRSLLLPGIDDSIEGNYGNVVSPVRSGSKSVVVRNTLTINGSDFSTRDVILFNDGNGGGGVGISGRKIGDWVEKGVSNVIFDGNVDDDYAFENGEDLNENAMLEEVIRDQDNYVNATSRIEQVAKHGREVSTGELRDVNTTSQYPALSSMANPTPNAGSSFRSTSLQSDHTVSKSNSLMVAKQGKKKMRCEMPPKTVTTIDEMNRILLRHRRSSRAMRPRHSSIRDQEIFAAKSRIENGPVITNDQDLYAPVFRNVSLFKRSYELMERILKVYVYKDGKKPIFHLPILKGLYASEGWFMKLMQG

SEQ ID NO: 83025 - protein, 164 aa, Gossypium hirsutum
  Clone ID: GOSHI-09MAY01-C101247_1.pep
AWDCLFFLYVFFLAVYRKPEDMNYHSVCLHVLADSVRSAGLILASWFLSLGVNNAEVLCLGLVSVAVFMLVMPLFKASGGVLLQMAPPNISSSALAKCWWQIKSHEDVIEVSQARFWELVPGHVVGSLSLQVKKEMDDRRILEYVHNLYHELGIHDLTVQTDYA

SEQ ID NO: 83026 - protein, 62 aa, Gossypium hirsutum
  Clone ID: GOSHI-09MAY01-C102917_1.pep
DSFLRQRWRYLSLRCWVAESFPEWRLSGKSFLALVWLRGYHMGKYVVFGFIHTLLFLLLIPL

SEQ ID NO: 83027 - protein, 121 aa, Gossypium hirsutum
  Clone ID: GOSHI-09MAY01-C102587_1.pep
RDVFSYTYPRLDMEVSKHMNHLLKAPFCVHPKTGRVCVPIDPNNCDEFDPTTVPTLSQLLEELNRGGPRQDAENEWDRTSLGESVTFFRTSFLQPLLKSCKEEIENSYNAKLQQSKNALSW

SEQ ID NO: 83028 - protein, 142 aa, Gossypium hirsutum
  Clone ID: GOSHI-09MAY01-C102567_1.pep
KTNAPFIRYGCPSMEELQSYSQEYKKRLDEAGQRREIPDDLALQVSSPGAERILKVPDDLDRFKDMAMRVCYIEDAGSNYTEKSGVFLLDLVEEENCVWKLAEVKENRDPNSKGRPFSRKQKDWRLKLPFDKHKMIMLYLEY

SEQ ID NO: 83029 - protein, 99 aa, Gossypium hirsutum
  Clone ID: GOSHI-09MAY01-C102287_1.pep
SNRMSVEKIREFIGCDSLAFLPFESLKKMLGSESPNFCYACFSGKYPVMPREVKVKRVGDFLDDGLNGPMDSIDGGWIQGPRDLNVEKEIDPLYQKSNI

SEQ ID NO: 83030 - protein, 79 aa, Gossypium hirsutum
  Clone ID: GOSHI-09MAY01-C103547_1.pep
EKKKSQSRLASKPICGQCLYPTNLKLQSRVHRIAHRVPQAEEKCIEAPGHTIAILHRHSARPHSCLLQMKYQASNETPF

SEQ ID NO: 83031 - protein, 190 aa, Gossypium hirsutum
  unsure (1)..(190): unsure at all Xaa locations
  Clone ID: GOSHI-09MAY01-C134407_1.pep
MNLLCLLFPMWACSFSLFSLLIHARPQSTVPFTSASVLPSEQEPISQFSSQMEAVSPGVAVVRVCXHQDLNKRILIALIVASTLLAGILLFLLCFWICKQKILNNSNGKSKQKNLEPTKALSLSPIVDRFNSLWMAGKKGSVXVIEYRLLEAATNCFGESNVLGEAXSGLVYKARFDEQFLAAVEKLDNG

SEQ ID NO: 83032 - protein, 205 aa, Gossypium hirsutum
  unsure (1)..(205): unsure at all Xaa locations
  Clone ID: GOSHI-09MAY01-C130647_1.pep
VKQNLLPLVVPLNYETLKLLKDEERKIVLTILNDENEDQSQDLIKLLKAAASANPDLVFSYVGVEQWEDFADKFEANHKTKLPKMIVWNGNEEYFLVIGVESLDAEDQGTQISRFLEGYKEGRXKRKTVKGPSFMDFIHSLVGIRTVYILVFIVAMMMLIQSIGKEDDMPRVGSQMQLIMLGALRLKAVGTDLKKKKIKARYLPG

SEQ ID NO: 83033 - protein, 218 aa, Gossypium hirsutum
  Clone ID: GOSHI-09MAY01-C130137_1.pep
VGRCSIAVLCMEYDDTTGILAAAGKNAVANIWDIRAGRQMHKLLGHTKWIRSIKMVGDTLITGSDDWTAKVWTVSRGTCDAVLACHAGPLLCVEYAASDEGIITGSTDGVLRFWENDEEGIKWVKNVTIHTARILSINAGEQWLGVGAADNSMSLFQRPQERLGVPNTGSKMFGWQLYRTPQKTNAVVRCVVSDLERKRICGGGRNGVFRLWEATINI

SEQ ID NO: 83034 - protein, 339 aa, Gossypium hirsutum
  unsure (1)..(339): unsure at all Xaa locations
  Clone ID: GOSHI-09MAY01-C132857_1.pep
NMPPYYSSAVASGHAPPPYMWGPTQPMMPSYGAPYAAIYSHGGVYAHPAVPLASHSLGVPSSPAAAGPVETPTKSPGNTEQGLMKKLKGFDGLAISIGNGTAENAEGRAKPRPSHSVETAGSADGSDGNTTGTDLSIRKRNREGTPTIGEDEKIEAKSYQVAAGEVTATISPKPIGTVVSPGMTTGTILELRNTPTMNAMSSAMGVHCGVMPTEVWLQNERELKRERRKQSNRESAKRSRLRXQAETEKLARKVESLTSENAALRSEINQLTEMSXKVRLENAILLEELKNAQLGHGQENVLNKXDKEDEMCDKKSDSGAKLHQLLDPSPRNNVWLLAE

SEQ ID NO: 83035 - protein, 104 aa, Gossypium hirsutum
  unsure (1)..(104): unsure at all Xaa locations
  Clone ID: GOSHI-09MAY01-C132297_1.pep
ALEHRYFSSAPPPTDPAKLPRPAPKTQASDFNPQEGPTVLSPPWKSRRVMPDPERFEGNSNQKEKIDERVGEVRQAVGEIAGKXNSADRSHLKRKLDLDFQHNE

SEQ ID NO: 83036 - protein, 188 aa, Gossypium hirsutum
  Clone ID: GOSHI-09MAY01-C133147_1.pep
LDYMIISTGKWFLKAAIYHENDTEVGCHICPGKNLTELGFVYAYNKTLHYVMDFIANSKHKGLIFFRTSTPDHFENGEWHNGGSCPKTTPAKEGEVEIKDLSRILRNVELEEFEKAAAKAADNGVNLKLLDFTNLLLMRPDGHPGPYRQFQPFAENQTAVVQNDCLHWCLPGPMDFWNDVIMEMVVRG

SEQ ID NO: 83037 - protein, 94 aa, Gossypium hirsutum
  Clone ID: AI055471.1.pep
NQNRYHLKDAVLEGGSQFNKAHGVEVSEYMSKDARFGDIFKTSMVDYNKLFVEEMLKSYNGFDGLNSLVDVGGGNGFILHSIVSKYPTIKVLFQ

SEQ ID NO: 83038 - protein, 184 aa, Gossypium hirsutum
  unsure (1)..(184): unsure at all Xaa locations
  Clone ID: uC-gsronu33B019d09b1.pep
FTRPVAKYFITSPSGGSLSPMLDLYQDKVTMDSWYHLKDAVLEGGSPFNKAHGVKTSEYMKKDPRFGSIFKAAMMDYNKLFVEEMLKSYRGFDGLNSLVDVGGGNGFILHSIVSKYPTIKGINXFDLPHVIDKSPSYPGIENVAGDVFKSVPKGDAIFTSWVLHHFEDKQCVEVLRNCYEALPA

SEQ ID NO: 83039 - protein, 202 aa, Gossypium hirsutum
  Clone ID: GOSHI-09MAY01-C129537_1.pep
FRNSLFVCFALSSLKKSFVFSVFGAFFFLGTEKMKGSAENPLHLKSLNHISLVCRSVEESINFYQKTLGFVPIRRPGSFDFNGAWLLGYGFGIHLLQSEDPDNLPKKWKINPKDNHISFQCENMGCVENKLKEMEMDYERAILEESGICVEQLFFHDPNGFMIEICHCDNLPVVPLAGEMARSCSRVDMQLLQHQIQQVIQQ

SEQ ID NO: 83040 - protein, 105 aa, Gossypium hirsutum
  Clone ID: GOSHI-09MAY01-C129757_1.pep
MAHQEEGWPLGLQPLNVRVGLPGKNHDYSGSISFNTILTGSPTSSTDSSSDLDTESTGSFFHDKSITLGSLIGVSTSGNSRKIHKTKDSCSNREKRNNRSKVWLF

SEQ ID NO: 83041 - protein, 102 aa, Gossypium hirsutum
  Clone ID: GOSHI-09MAY01-C125767_1.pep
MVLAATLCLRRAPRARPQMGVVVKLLQGDADVTKWARLQVNASEGSDTLDDEACPGRSNLQSHLSLALLDVEEDSVSMSSIEQPVSLEDYLKGRWSRSSSFD

SEQ ID NO: 83042 - protein, 59 aa, Gossypium hirsutum
  Clone ID: GOSHI-09MAY01-C120357_1.pep
RRLKNSSACPRCGEGVEPMDHLLVLRRECPGYSLSSLAVPAEHIAVRYGPSGGQECSQS

SEQ ID NO: 83043 - protein, 164 aa, Gossypium hirsutum
  Clone ID: uC-gsflnu33B138a12b1.pep
VSGALIATTTLQAILSPPGGLGQGEDNEGKVVMKAWVYMIFIILNGTSFCVTVITIFLLLPHGFFGWLLTVSLGLLSAGYLFSSMVISPNLECALFNLGLFILFVVLLVVGILVLSKRQRFISIKKLCKCSKYDLSFVDGSLSPIIWVHKRYLLTLCEVHFLCN

SEQ ID NO: 83044 - protein, 54 aa, Gossypium hirsutum
  Clone ID: uC-gsflnu33B138a06b1.pep
LSSADAWVLLLKRFAKPGGGLGQGEDNEGKVVMKACLYMIFIIIEWYFVLCDKS

SEQ ID NO: 83045 - protein, 122 aa, Gossypium hirsutum
  Clone ID: GOSHI-09MAY01-C121067_1.pep
HASAHASAHADFHAYDHSLAFPLSYRTLNPSVKHQSTIKNGALCFGPRFITLWPQEPSLQLRFRRSKRGSTADTRGTGDVLAYGGAGVRGLLTWRHERRWGCTVAEGYRASAARARVWQKFA

SEQ ID NO: 83046 - protein, 136 aa, Gossypium hirsutum
  unsure (1)..(136): unsure at all Xaa locations
  Clone ID: GOSHI-09MAY01-C121347_1.pep
FVYASGHASGLQKLVPNSSKTDKASMLDEVIEYLKQLRAQVQMMSRMNXPSMMLQHQLQMSMMAPMGMGMSVMDMNFMGRPNIIGISPVLSRPFMTMNTPWDGSNNNDRLQQGASMTDPRSTLLVSKSQPMTMDAY

SEQ ID NO: 83047 - protein, 149 aa, Gossypium hirsutum
  Clone ID: GOSHI-09MAY01-C122117_1.pep
MIRSHPKPALKTKDQVKDKYSKVTPKPAAKENTKPQEFKLHTGQRAVKRAMFNYSVATKFYLLEIQKKQVEKVQKMIEDEEIRCLRKEMVPKAQLMPFFDRPFFPQRSNRPLTIPREPSFRAVNSKCWSCISENELYYFHHAHAWNPIK

SEQ ID NO: 83048 - protein, 75 aa, Gossypium hirsutum
  unsure (1)..(75): unsure at all Xaa locations
  Clone ID: uC-gsflnu33B062a06b1.pep
KSCRLRRVDYLHPGLKTGKMTPHEQRLVLELTAKRGHTYYXIALSWRTATDNEIKNYWRTHMRYTAPEERQAIPI

SEQ ID NO: 83049 - protein, 79 aa, Gossypium hirsutum
  Clone ID: uC-gsflnu33B062a11b1.pep
KSCRLRWVNYLHPGLKTGKMTPHEERLVLELHAKWGNRRSRIARKLPGRTDNEIKNYWRTHMRKTAQEKKRAIPISPYL

SEQ ID NO: 83050 - protein, 191 aa, Gossypium hirsutum
  unsure (1)..(191): unsure at all Xaa locations
  Clone ID: GOSHI-09MAY01-C118366_1.pep
SFTRPPTRPFCLAVAPVYGQYYSKTIKAGPRVEKMTRLRFFYHDIPVGXDPTTFLIAQANITRKFFAPSPYGSLYSMDDPLTLGPNRTSKMVGNAQGLYLALSRDPTKFSAVFYADFAFTTGKFKGSSFSLFSRYPLTDFVPGPNIIREMAIVGGTGASRMAKGFALFRASSSSAKTGDASLKVDVTLYHY

SEQ ID NO: 83051 - protein, 129 aa, Gossypium hirsutum
  Clone ID: uC-gsflnu33B026h10b1.pep
MESGDPVRTIERLKTSLKAERKALSALYAELEEERSASAIAANQTMAMITRLQEEKAAMQMEALQYQRMMEEQSEYDQEALQLLNELMIKREKEKEELEKELEVYRKKVLYYEAKEKTRIMRISKDGSL

SEQ ID NO: 83052 - protein, 83 aa, Gossypium hirsutum
  Clone ID: uC-gsflnu33B026h04b1.pep
LLWASNPQDKREICLKLPSTPPIGHEVLYMRSLKNRGAALICCKSNNGHDNIGFNEAMAAMQMEALQYQMMMEGQCVYDQEAP

SEQ ID NO: 83053 - protein, 73 aa, Gossypium hirsutum
  Clone ID: uC-gsflnu33B085b12b1.pep
IPGHAFNLGVPIKGVNCCRPADGNLGPLKRPPPLLFFFFFFVFLFFFFFFLFFFFFFFFFFFFFFFFFIFFLA

SEQ ID NO: 83054 - protein, 53 aa, Gossypium hirsutum
  Clone ID: uC-gsflnu33B079b12b1.pep
KGPPLFFFFFFFFFFFFFFFFFFFFFFFFFFFFFFFFFFFFFFGLRNLKFLVI

SEQ ID NO: 83055 - protein, 65 aa, Gossypium hirsutum
  Clone ID: GOSHI-09MAY01-C119576_1.pep
TVKYWTHLITALTQMSTPCNENIQYQHKFSTTCKQVKHLLSYTKSQNQKLQSNHLHLTYNLACTS

SEQ ID NO: 83056 - protein, 222 aa, Gossypium hirsutum
  unsure (1)..(222): unsure at all Xaa locations
  Clone ID: GOSHI-09MAY01-C119646_1.pep
KTDLEDELHRIRVSEMDAVSKVALLEGRVEEREKEIXVLLKTNNEQRASTVKVLQDLLDSERAAHADANNRAEALSLQLQAAQAKLDQLQQELTSVRLNETALDSKLKAASHGKRLRTDDEVGVGSVQDIDTSDRFLRANKKSKSTTSPLRYSPSEDGGSVFKADDDNQNQQNNQEDYTKFTVQKLKQELTKHNFGAELLALRNPNKKEILALYEKCVLQKS

SEQ ID NO: 83057 - protein, 173 aa, Gossypium hirsutum
  Clone ID: GOSHI-09MAY01-C114586_1.pep
MMIGTWAAALKYQEGKEMESNKQIGTSSSFTAHLFGSKESSPSSKGIFSSIFPPPSMVGGRNSSSSQVLESWPKQPLEGSDWRHGMQVAESATYTKANRDSNSVFQEERMEPFHLSSSLYYGGRDIYGHSSSTQASTSYPIFKKDGEDDPNGSNSHDASTGNWVEGSDIIRAI

SEQ ID NO: 83058 - protein, 72 aa, Gossypium hirsutum
  Clone ID: GOSHI-09MAY01-C114546_1.pep
NHQGCLPQVPLRNELESITLVFIYLQANSFMQHTKAHIVPHQDSTYYFHFTNDILVRYLIGSKEKPIFTDHR

SEQ ID NO: 83059 - protein, 72 aa, Gossypium hirsutum
  Clone ID: GOSHI-09MAY01-C114496_1.pep
SASTRYQPNGLLYRQQQTRQESSLLSLGLSLYGRRTMAIPTSSSTTTTRANDTSSPSKTFEIYDHVDTSLHL

SEQ ID NO: 83060 - protein, 146 aa, Gossypium hirsutum
  Clone ID: GOSHI-09MAY01-C114736_1.pep
LRLMIFKFVLSMSASKDVLALASLEVDLSSIEPGSTVTVKWRGKPVFIRRRTEEDIKTANSVDLASLRDPQEDAVRVKNPEWLIVVGVCTHLGCIPLPNAGDYGGWFCPCHGSHYDVSGRIRKGPAPYNLEVPTYSFLEENKLLIG

SEQ ID NO: 83061 - protein, 105 aa, Gossypium hirsutum
  Clone ID: AI731387.1.pep
RGKRVFIRRSTEEDIKTGNSIDFASIRDPQEDAVRVKNPEWLIVVGVCTHLGCIPLPNAGDYGGWFCPCHGSHYDVSGRIRKGPAPYNLELPTYSFLEENKLLIG

SEQ ID NO: 83062 - protein, 73 aa, Gossypium hirsutum
  Clone ID: GOSHI-09MAY01-C114046_1.pep
LSFGDFNFPSPEKVLRENLVEKEKVPEKKAIHNLPHDQPALMDGIMMMKVKQVLLKNEFQFGAAATSIATCSS

SEQ ID NO: 83063 - protein, 79 aa, Gossypium hirsutum
  Clone ID: uC-gsflnu33B073d09b1.pep
YFFSFFKYKTSILLTFVRPFFDSCKIHSSISNTSFPSIAIPSELIETLKMVKYYANTFTRILLNNFISISKGMEMAKIF

SEQ ID NO: 83064 - protein, 241 aa, Gossypium hirsutum
  Clone ID: GOSHI-09MAY01-C114386_1.pep
MEYVSPEGLRLDGRRPMEMRQLRAEIGTVAKANGSAVFEMGNTKVIAAVYGPREVQNRSQQINDQALVRCEYSMANFSTGDRMRKPKGDRRSTEISLVIRQTMEACILTHLMPRSQIDIFVQVLQADGGTRSACINAATLALADAGIPMRDIVTSCSAGYLNSTPLLDLNYIEDSAGGPDVTVGILPKLDKVTLLQMDAKLSVDIFENVMGLAIEGCKAIANYIREVLLENTKQLEYRRGL

SEQ ID NO: 83065 - protein, 65 aa, Gossypium hirsutum
  Clone ID: uC-gsflnu33B082h12b1.pep
EKKNEKELNSEGTESALNSVYNSPFFPTVCFFVFFFFVCVCVLGWRQKGKHPERKFGGDLWFLIT

SEQ ID NO: 83066 - protein, 79 aa, Gossypium hirsutum
  Clone ID: uC-gsflmaxxa045h09b1.pep
SCAQDPKIPPELSFWVFSFLAPSQHSLTKKDQSYLQWVRKVSCKLSLERFQSLQDSARFSFFVPLSRTRGRTRGRTCGN

SEQ ID NO: 83067 - protein, 164 aa, Gossypium hirsutum
  unsure (1)..(164): unsure at all Xaa locations
  Clone ID: GOSHI-09MAY01-C116516_1.pep
MMELLASIHCYFWSPSRTICLWMSLVLLLQYSKTVVSKSDYLIGLGSYDITGPAADVNMMGYANAEQIASGIHLRLRARSFIVAEPQGKRVVFVNLDACMASQLVTIKVIERLKARYGELYTEQNVAISGIHTXAGPGGYLQYVVYLVTSLGVVXQTSDVLVDG

SEQ ID NO: 83068 - protein, 152 aa, Gossypium hirsutum
  unsure (1)..(152): unsure at all Xaa locations
  Clone ID: GOSHI-09MAY01-C116306_1.pep
MGVSANANTGAFLVFFIAAILLALSTTCTALNITKSLAPYSDYSTLSDLFSKTKLTDAINRRQTITILALDNNSIQSITDRSSDELRKILMNHIXLDYYDRQKIQKLGKKSALLTTLYQTTGSAINQQGFVNITRIARSEVVFGSAVKGAHL

SEQ ID NO: 83069 - protein, 84 aa, Gossypium hirsutum
  Clone ID: GOSHI-09MAY01-C116256_1.pep
ACLCFGYMESKGGFIFTIDDDCFAAKDPSGKAINALEQHIKNLLSPSTPFSFNTLCDPFADGADSVRGYPFSLREGVPNSYHTW

SEQ ID NO: 83070 - protein, 87 aa, Gossypium hirsutum
  Clone ID: GOSHI-09MAY01-C117486_1.pep
MAKLATFFVLTLLFVSTLSFAARPGPAFPNQSPTKTQAKGITVVETEVERSTEAVEDSCQGVGEEECLMRRTLAAHVDYIYTQNHKP

SEQ ID NO: 83071 - protein, 59 aa, Gossypium hirsutum
  Clone ID: uC-gsflnu33B060h10b1.pep
LAHASAKTQAMGFTEVETEVERSTEAVEDSCQGVGEEECLMRRTLAAHVDYIYTQNHKP

SEQ ID NO: 83072 - protein, 139 aa, Gossypium hirsutum
  Clone ID: GOSHI-09MAY01-C117786_1.pep
MEGLTLVVQNHYGILIVAVLSIAITSLLLKAWGSTVDSTDEDGIPGRLGLPFFGETFSFFSASYSTKGCYDFVKQRRKQYGKWFKTRILGKTHVFVPSVEGAKTILANDFVHFNKSYVKSMADATGAMSVFSVPHMIHT

SEQ ID NO: 83073 - protein, 96 aa, Gossypium hirsutum
  Clone ID: uC-gsflnu33B013g12b1.pep
LNKIPNFSFFSASYSTKGCYDFVKQRRKQYGKWVKTRILVQTHVYVTSEEGAKTILANDFVHFNKSYVKSMTDATGAMSVFSVPHKIHTRIRRLLS

SEQ ID NO: 83074 - protein, 54 aa, Gossypium hirsutum
  Clone ID: uC-gsflnu33B013g11b1.pep
RFIKCDHQRLLPRNLRQDKIVPCDQACHPHRFSRQCFLTLSIEEMLLLLKALHR

SEQ ID NO: 83075 - protein, 136 aa, Gossypium hirsutum
  Clone ID: GOSHI-09MAY01-C110446_1.pep
FHVMFAHKPHHVHHTCYDKIQGCDLLEGEWGKAWYHYSVWRYVHDGKAKVSKQLVEAIDPSKNLITFREIEGDQLKEYKSFVATLQASPKNKGSGSIVHWTVEYEKLHHGIAHPETLLQFLVDASKDIDAHLTQPN

SEQ ID NO: 83076 - protein, 146 aa, Gossypium hirsutum
  unsure (1)..(146): unsure at all Xaa locations
  Clone ID: GOSHI-09MAY01-C110146_1.pep
MSAMVSLLFHLRGCLTVFSLLPLPSHSADPDPLQDFCVANLSASISVNGFPCKPASEVTSDDSFFDGFTQEGNTTNAFSSFLTPGNVLSFPGLNTLGISMNRVDFAPGGINPPHSHPRASEXGAVIEGRLLVGFVTTNNEYYSKDL

SEQ ID NO: 83077 - protein, 118 aa, Gossypium hirsutum
  Clone ID: GOSHI-09MAY01-C111016_1.pep
MMGSRIKISALGVTMLLLLIAPTSNAAISCSVVIKDLRPCVNYLTKGSGKPPSACCAGASALASAASSSADKKAACECIKSASKNIKPNNQLAQALPSNCGITLPVAISPNVDCSKVG

SEQ ID NO: 83078 - protein, 105 aa, Gossypium hirsutum
  Clone ID: GOSHI-09MAY01-C112946_1.pep
LLSTRTENASFRHVFDIAAIITGTARPKFNIPLGLIEAYGWISVLFARITGKLALISPPTVHVLRHQWAYTCDKAKLELDYRPRSLKDGLEEMLPWLKSLGVIKY

SEQ ID NO: 83079 - protein, 81 aa, Gossypium hirsutum
  Clone ID: GOSHI-09MAY01-C112936_1.pep
SKDKKTKTFTYLKTCSVAKKTIVFQRREVVEILDEVKIPNLIHMISSIFSATKHDQEQPTKKTKRKPRERRISQALDLPRG

SEQ ID NO: 83080 - protein, 232 aa, Gossypium hirsutum
  Clone ID: GOSHI-09MAY01-C112176_1.pep
MGSQTPLKLPVIDFSKPDLKAGSNEWDLVKGQVQQALQEYGCFEALFDKIPLHLREAIFGSLQELFDLPLQAKIRNVSNKPYHGYVGQYPQVPLYESMGVDDANITEKVEALTTTLWPQGNSSFSNTIQSFSEQLSELDQIVRRMILESFDLEKYMDEHMGSTNYLLRVMKYKGPKTTETKLGLHSHTDKNIVTILYQNEVDGLEVLSKEREWINVKPFKQSFTVMIRGIFL

SEQ ID NO: 83081 - protein, 171 aa, Gossypium hirsutum
  unsure (1)..(171): unsure at all Xaa locations
  Clone ID: GOSHI-09MAY01-C112156_1.pep
HAFARSRSRSRSKRFCGXFDVAPPAPAMLAAGAVAAAAAGQIPGTTNPTIPGVFPNMFPIATGQPFGALPVMPGQAMTQQATRHARRVYVGGLSPTANEQSVAPFFSHVMAAIGGNTAGPGDAVVNGSLFHEKKSAFVEMRSVEEASNAMALDGIIFEGAPVKVRRPSDYY

SEQ ID NO: 83082 - protein, 188 aa, Gossypium hirsutum
  unsure (1)..(188): unsure at all Xaa locations
  Clone ID: GOSHI-09MAY01-C112306_1.pep
IAEEVGGAVAAAPLDAQIELFNALVEGCREAVELGNIEPKGPLLDFFGVPVKANDLINRVQELQLLAKRISRYEDPIKQFRVLMYLKPSNWSKGCGWNQIDDARLLLGIYYHGFGNWEKIRLDERLGLTKKIAPXKLQHHETFLPRAPNLKERANALLEMELAAAGGKNAGVKAGRKPSKKEKPNSFN

SEQ ID NO: 83083 - protein, 109 aa, Gossypium hirsutum
  Clone ID: GOSHI-09MAY01-C113936_1.pep
PLVRQISLFVCRIIPMEGLIPFVYRAIIRYKNGRRGHHVLATWFNDSPSASYMRLPTGDSGRFQTSDTQQLFQSDCVNFSTSSPVSSATTTTSSSPLCRRFITSRRVVS

SEQ ID NO: 83084 - protein, 210 aa, Gossypium hirsutum
  unsure (1)..(210): unsure at all Xaa locations
  Clone ID: GOSHI-09MAY01-C113616_1.pep
IISFGKDVAEAHSSKIERVDLLDSMKADMLANLTNCDIWIEYHDIGDHRIKAVADYKVYTAGSILDLLHFVSPRLMARGGAHSSYGIADNSDDPKYQHYKYWSNPLETKLPDAPDMEIYSMYGVGIPTERAYVYKVTTATDCSIPLQIDTSAEGGSEDXSCLKGGVFSADGDETAPVLSAGLMAAKGWRGKTRFNPSGIPAYIREYSHAP

SEQ ID NO: 83085 - protein, 143 aa, Gossypium hirsutum
  Clone ID: GOSHI-09MAY01-C113086_1.pep
MDCCSFSSSLSLSLSLMLKPRPPLMTINYNGNSHWSKRKKKRHCLLQVSAISYQNFIHFSFNETKRHTLLLPSPLQEKYGSMIAMDEQTWLEMLSFETPKIRLLRSMSIGGEAMQVLDFAGFPKPEFDLPILCGNFFTTANMN

SEQ ID NO: 83086 - protein, 215 aa, Gossypium hirsutum
  unsure (1)..(215): unsure at all Xaa locations
  Clone ID: GOSHI-09MAY01-C113066_1.pep
MSDDEGTGEDYLFKIVIIGDSAVGKSNLLSRYARNEFNPHSKATIGVEFQTQTMEINGKEVKAQIWDTAGQERFRAVTSAYYRGAAGALIVYDISRRTTFDSVGRWLDELKTHSDATVARILXVGNKCDLENYQDVSVESKSLAXAKGLFFMETSALNSTNVNKAFXIIIPKIYHHVRTKVLNSDTXKTELTLNRVTLSQTDGLKKTHNFSCCSR

SEQ ID NO: 83087 - protein, 63 aa, Gossypium hirsutum
  Clone ID: GOSHI-09MAY01-C113316_1.pep
PTRPGKPVWIGSASLSAKNLVVFMDTATGDGIEAWINLEEEDMAKFGSDEELLATFKSTFVWE

SEQ ID NO: 83088 - protein, 132 aa, Gossypium hirsutum
  Clone ID: GOSHI-09MAY01-C108986_1.pep
MPVPLAPYPTPPAPYTPPAANGAQSQLVCSGCRNLLLYPVGATSVCCAVCNAVTAVPPPGTEMAQLVCGGCHTLLMYIRGATSVQCSCCHTVNLALEANQVAHVNCGNCRMLLMYQYGARSVKCAVCNFVTS

SEQ ID NO: 83089 - protein, 169 aa, Gossypium hirsutum
  unsure (1)..(169): unsure at all Xaa locations
  Clone ID: AI730975.1.pep
TDAHPYNDPNDVSIAPLLDSKFDSEKCEALKRLLALIAQSFDFSNYFPQVVXNMASQSLEVKKLVYLYLLHYAEKRPNEALLSINCFQKDLGDPNPLVRAWALRTMAGIRLHVIAPLVLVAMGKCAKDPSVYVRXCAAXALPKVHDLRLEEHTSAIEDXHLINLFLHGY

SEQ ID NO: 83090 - protein, 133 aa, Gossypium hirsutum
  Clone ID: LIB3083-017-Q1-L1-G10.pep
MFPQFGATAETLSKASTMVFRIGTDAHLYDDPDDVSIAPLLDSKFDSEKCEALKRLLALIAQGFDVSNYFPQVVKNVASQSLEVKKLVYLYLLHYAEKRPNEALLSINCFQKDLGDPNPLVRAWALRTMAGNR

SEQ ID NO: 83091 - protein, 323 aa, Gossypium hirsutum
  unsure (1)..(323): unsure at all Xaa locations
  Clone ID: GOSHI-09MAY01-C109666_1.pep
MAARKRASAADTKPSPPPQTQETTTQIDPPIAPPKKALIFKFCLFFSIPYFYLLYQHYTIEQELRRSILINASLCVTGFFLTQRMIPVASRYVLKRGLFGFDINKKGTPQGTVKVPESLGIVVGFVFLVLAILFQYFNFTADSNWLVEYNAALASICFMILLGFVDDVLDVPWRVKLLLPSIAALPLLMAYAGHTTIIIPKPLISYVGQEVLDLDXVYKLYMGLLAVFCTNSINIHAGLNGLEVGQTVVIASAILIHNLMQIGASSDPEYKQAHAFSIYLVQPLLATSLGLLSYKLYPSSVFVGDXYTYFAGMTXAVVGILGP

SEQ ID NO: 83092 - protein, 98 aa, Gossypium hirsutum
  Clone ID: LIB3829-024-Q6-N6-G7.pep
AEHAVTEDGNGTASGRRGGSGADEDRVAQRAAALTKFRQKRKERCFEKKVRYQSRKKLAEQRPRVKGQFVRRTVSDWGGKDSSSYDFTSEDRYSDSLR

SEQ ID NO: 83093 - protein, 79 aa, Gossypium hirsutum
  Clone ID: uC-gsronu33B117e03b1.pep
GAFEDRVAQRAAGLTKFRLIWKERCFEKKVRYQSRKKLAEQRPRVKGQFVRRTISDWEGGKDNSSYDFTSEDRYSDSLR

SEQ ID NO: 83094 - protein, 121 aa, Gossypium hirsutum
  Clone ID: GOSHI-09MAY01-C106666_1.pep
QLNLGDEIVGDEELSVLPRHTKVIVTGNNRTKSVLVGLQGVVKKAVGLGGWHWLVLKNGVEVKLQRNALSVLEHPTGNEVDDDHDFDNSSSGSDIASSIEFQRPAKPRVRHMKPWVPSASM

SEQ ID NO: 83095 - protein, 198 aa, Gossypium hirsutum
  Clone ID: GOSHI-09MAY01-C106006_1.pep
MEPLLKKKGDWSESVSGSNGAESKESSSNSNSSSTGSSSLKVRGSGSPPLLGWPIRRAITTPPSKNSDVCNGDDDKVGDQVDKFKKMGSRINEMDMMKERFAKLLLGEDMSGSGKGVCTALAISNAITNLCATIFGQLWRLEPIAEEKKSMWKREMEWLVCVSDHIVELIPSWQNFPDGSKLEVMTCRPRSDIFINLA

SEQ ID NO: 83096 - protein, 167 aa, Gossypium hirsutum
  Clone ID: GOSHI-09MAY01-C106356_1.pep
MLLCRTGHNRRLPFSSLSSAKPKQYSIRSAVSPPEWRESRRSVAISLFLSHLLLAPKHAIAGNFLDKYVKKKKLDPLEVYVPAVILTQIQIKDLEKTLEVDDKPEYATCRSLLRSGPAASLRVNIRAGAQYASDAGNGENAFKDVDQCLRALEELDSLFLHASRNEP

SEQ ID NO: 83097 - protein, 41 aa, Gossypium hirsutum
  unsure (1)..(41): unsure at all Xaa locations
  Clone ID: LIB3543-042-Q1-K6-F7.pep
SGXESVAINCTTRXDERMLADIQRFYNVVIEELPANVADLI

SEQ ID NO: 83098 - protein, 62 aa, Gossypium hirsutum
  Clone ID: uC-gsronu33B126e09b1.pep
SPNNNEINMTQTQTIPRAMNTLTFSLTKQTDNLSFFFLLKQPLLLCMKMLTQSDQIRNICRQ

SEQ ID NO: 83099 - protein, 266 aa, Gossypium hirsutum
  unsure (1)..(266): unsure at all Xaa locations
  Clone ID: GOSHI-09MAY01-C107476_1.pep
GIINSLKYEXHVVSKYLEIRNEERNMSMRTAEAANKQHXEGCNKXIAKLEAECQRLRGLVRKXLPGPAALAQMKLEVESLGRDYGDTRLKRSPVRPSTPHTPAVTDFSLDNAQKFHKENEFLTERLLAMEEETKMLKEALAKRNSELLASRNLCAKTSSKLQTLEAQLAISNQQRSPSKASNSPSVTSVSEDGIDDEKSCADSWATGMISELSQFKKEKSIEKLNKTENVKHLHLMDDFLEGEKLACSLNDSTANGAITNAGCSNN

SEQ ID NO: 83100 - protein, 99 aa, Gossypium hirsutum
  Clone ID: GOSHI-09MAY01-C107636_1.pep
LSFVCWVITRVLICGIVLPFKILLLQYIHLWLLTWFFECWEIFFSLNYCFLFTLLICGLTKLRGGSDCFSSVSHCFCGGCNDFFSEVLTSLILSGFFAK

SEQ ID NO: 83101 - protein, 121 aa, Gossypium hirsutum
  Clone ID: GOSHI-09MAY01-C107256_1.pep
MAKGRRLTTSRSERLLGNYGYGHSQGDSVINEEAELGEEDVWSMVDNVADRGDGGSVDNSRSQWSPHADAESNGNGNFDMRGDRRLIPRGERHVGGLSLAFEDSASTKPRIVHQFRGHDGV

SEQ ID NO: 83102 - protein, 57 aa, Gossypium hirsutum
  Clone ID: GOSHI-09MAY01-C100946_1.pep
EKMKIIILDFQLFPIFVYFRPNLVDRFFFIFYFSFLGERVPKKSKFKKKTNYTIGKH

SEQ ID NO: 83103 - protein, 70 aa, Gossypium hirsutum
  Clone ID: GOSHI-09MAY01-C100536_1.pep
QIVPFAAQCEMMFYNHVEEIRELIPTPSWNMKHNTMVVRNDRNIIAVTETSISLPDFELEQNGPTIFLWH

SEQ ID NO: 83104 - protein, 50 aa, Gossypium hirsutum
  Clone ID: GOSHI-09MAY01-C100506_1.pep
ASNKTDTCIVSPKDQFICTLAIPLFYRRMATRRQTDSKGVKQELHFSKLY

SEQ ID NO: 83105 - protein, 72 aa, Gossypium hirsutum
  Clone ID: GOSHI-09MAY01-C100426_1.pep
YPLVPFYILPHLDREMIEGGGVSNLLKDSKEYFTARIVLFHFTNMTQSVFHSICCEKSQHVTHTRIGFNNLK

SEQ ID NO: 83106 - protein, 85 aa, Gossypium hirsutum
  Clone ID: GOSHI-09MAY01-C100186_1.pep
KILLRKKRLYMLEFYLLCFFGYPNSFNSAFKAACSCHILSSRASTIVVSSLRGCIRLSNQATAPALLSPPPPPPPFIMLPMYSTG

SEQ ID NO: 83107 - protein, 217 aa, Gossypium hirsutum
  unsure (1)..(217): unsure at all Xaa locations
  Clone ID: GOSHI-09MAY01-C100086_1.pep
LWKIYTDYEVRAEFNSISSCFLDSAGFGRSSFFCFFERRKVSSLSRELVFLILQFLEEEKFKESVHRLEKESGFFFNMKYFEEKVQAGEWEEVERYLSGFTKVDDNRYSMKIFFEIRKQKYLEALDRHDKAKAVEILVGDLKVFSTFNEELYKEITQLLTLNNFRXENEQLXSKYGDTKTARSIMLAELKKLIEANPLFRDKLAFPTLKSSRLRTLI

SEQ ID NO: 83108 - protein, 65 aa, Gossypium hirsutum
  Clone ID: LIB3829-033-Q1-N6-F4.pep
VRNQIGAFAAPDKIHWAPGLPKTRSGKIMRRILRKIASRQLDELGDISTLAEPGVVDQLIALADS

SEQ ID NO: 83109 - protein, 38 aa, Gossypium hirsutum
  Clone ID: uC-gsronu33B124e10b1.pep
FMRRILRKMASRQLDELGDISTLAEPGVVDQLIALADS

SEQ ID NO: 83110 - protein, 164 aa, Gossypium hirsutum
  Clone ID: GOSHI-09MAY01-C100266_1.pep
MGHNKPRRFKTHNSHRGQSSRNHQFQREDESLPHDQPPEEEPNVPKVQLAMWDFGQCDAKRCTGRKLARFGLLKDLRVNSGFGGIVLSPVGSQCVSKEDYNLIKRKGLAVVDCSWARLSDVPFVKLRCGAPRLLPWLVAANPVNYGRPCELSCVEALSAALLIC

SEQ ID NO: 83111 - protein, 146 aa, Gossypium hirsutum
  Clone ID: GOSHI-09MAY01-C100246_1.pep
VNKQSSFHAPEIYKGKLFPSSSSEHDSRARDLGSTDLFGHSIGSVQLGFAPPLAAQPVFRTSQELDSSCKSSCRLFGFSLTEGRHDASKEEDVVQATSSLAPGAILPCVREEFHPKPSSVTDTVGSNFSEVSNLYAVRDMVLDIAL

SEQ ID NO: 83112 - protein, 97 aa, Gossypium hirsutum
  Clone ID: GOSHI-09MAY01-C100226_1.pep
QKFGKGDWRSISRNVVVTRTPTQVASHAQKYFLRQSAVKKERKRSSIHDITTVDSKTMDVPVEQNRGSEPHGMVQQAPQLQQMPHTGHFVGKYGYPM

SEQ ID NO: 83113 - protein, 80 aa, Gossypium hirsutum
  Clone ID: GOSHI-09MAY01-C101996_1.pep
FHPPFLSYFPFSALSFIFSYVFFFSKLQRLNAKQPMGEETKKIRKEEVIAKLKDNGDFDKLRLKIIRKLKDNLRFFFFFF

SEQ ID NO: 83114 - protein, 136 aa, Gossypium hirsutum
  Clone ID: GOSHI-09MAY01-C101526_1.pep
LSCDLWSVGCILVELCSGEALFQTHENLEHLAMMERVLGPLPQHMVLRADRAEKYFRRGTRLDWPDGATSRESLKAVGKLPRLPNLIMQHVDHSAGDLIDLLQGLLQYDPIDRLKAREALRHPFFTRDHRRFSYPL

SEQ ID NO: 83115 - protein, 104 aa, Gossypium hirsutum
  Clone ID: GOSHI-09MAY01-C101446_1.pep
MKTGCVALVLCLTISVDPPDVIKILLAQEWSAGLVWLTQCHRFHALVVVGRFLDMGPWAVDLAPSVGIFPYVLKLLQTTTPELRQILVFIWTKILPLHLNEQLI

SEQ ID NO: 83116 - protein, 66 aa, Gossypium hirsutum
  Clone ID: GOSHI-09MAY01-C101746_1.pep
RPRFQRPCGAYHLSCGTLDRKFKTEKKEKRKKKKKIKFFFKKRYPLHCIIPLRISSDIYIIFLFTI

SEQ ID NO: 83117 - protein, 91 aa, Gossypium hirsutum
  Clone ID: GOSHI-09MAY01-C101656_1.pep
KGKIIKSFHEWDLTIRGKEKKTTNPRCWGGRTSSINTTKASTLTSIEHYNPLIFDFVTTHTQHIWGDCKQLSRSENQPQMIQSGGGNRQNN

SEQ ID NO: 83118 - protein, 71 aa, Gossypium hirsutum
  Clone ID: GOSHI-09MAY01-C101096_1.pep
ASPVGVLVLAKVKEIVKEVNAGLECGMGVEDYDQWQEGDILEAFNTVQKKRTLEEASASMAAALEGVGVEL

SEQ ID NO: 83119 - protein, 156 aa, Gossypium hirsutum
  Clone ID: GOSHI-09MAY01-C101376_1.pep
PASASPPVYISPLDLSPKYSDKFTGLQEYCKTYGENYCLGQLVFWYNQTSVDPDSSLFRASRGCLSLPDIGCFYAKVQKPSRHRVYGPKTVKFMLSWMEKQAQRPWPKDRIWTFKGSPRIFGSPMLDAVLNNSSLDREMVQWLKHRPAKFQAMWDR

SEQ ID NO: 83120 - protein, 100 aa, Gossypium hirsutum
  Clone ID: GOSHI-09MAY01-C101226_1.pep
KNFYSMNVKLTYTPLKFFLWYNLRKYMKLSYKLSCYRFWKWCIYKLQIPYSLEKSYSANKNVPWCNNSAWPDYFIAGVLSLSHRYQTDITSCMNTRDSSH

SEQ ID NO: 83121 - protein, 74 aa, Gossypium hirsutum
  Clone ID: GOSHI-09MAY01-C102986_2.pep
WECQSCTLLNPPLAPICKLCCTERPRDIGTKYKFWSCKFCTLENSVKLDKCSACDQWRYSHGAPISTPAPNVGT

SEQ ID NO: 83122 - protein, 73 aa, Gossypium hirsutum
  unsure (1)..(73): unsure at all Xaa locations
  Clone ID: LIB3829-017-Q6-N6-D6.pep
ECQSCTLLNPPLAPICKLCCMERPRDIGTKYKFWSCKFCTLENSVKLDKCSACDQWRXSLGAPISTPTPNVGT

SEQ ID NO: 83123 - protein, 166 aa, Gossypium hirsutum
  Clone ID: GOSHI-09MAY01-C102966_1.pep
RPSVRSDNDEWQGTDDSGNNEAEFSDEDEDSVVESPVCDEDFAHHHSKENGLCVLDEDIADEICDNQSSDFAIKDSETYGGKLFRNCGSDLMDQVHGNTLNDVSRGEREVQDDSCTSSDTGGASQETHVPADNFNGGNRGYVLEPCYPKGWDTRYPTCQTNFRDDS

SEQ ID NO: 83124 - protein, 118 aa, Gossypium hirsutum
  Clone ID: GOSHI-09MAY01-C102576_1.pep
SVELIASAIGVVSAIIDNVPLVAATMGMYDLTSFPQDSEFWQLVAYCAGTGGSMLVIGSAAGVAYMGMEKIDFFWYFRKVSGFAFAGYAAGIAAYLAVNNLHISLPSTLAQVPFLSGS

SEQ ID NO: 83125 - protein, 92 aa, Gossypium hirsutum
  Clone ID: LIB3829-023-Q6-N6-C5.pep
LTSFPQDSEFWQLVAYCAGTGGSMLVIGSAAGVAYMGMEKVDFFWYFQKVSGFAFAGYAAGIAAYLAINNLHISLPSSLAQVPFLSGNKRFK

SEQ ID NO: 83126 - protein, 350 aa, Gossypium hirsutum
  unsure (1)..(350): unsure at all Xaa locations
  Clone ID: GOSHI-09MAY01-C102696_1.pep
IITPITALLLTVVTVYXMSKEEARETRAWKLTAFQKLNFKAEDVLDCLQEENIIGKGGAGIVYRGSMPDGLLVAIKRLVGRGTGRRDYGFSAEIQTLGRIKHRNIVRLLGYVSNKDTNLLLYEYMPNGSLGEMLHGSKGAHLQWERRYSIAVEAAKGLCYLHHDCSPLIIHRDVKSNNILLDEYYEAHVADFGLAKFLQDADASECMSSIAGSYGYIAPEYAYTLKVDEKSDVYSFGVVLLELIAGRKPVGEFGDGVDIVWWVRKTIPQHADPASVLTIVDPRLSEYPLTGVIHLFKVAMKCVEEQSSARPTMREVVHLLTNTPQSTPRPCLLSALMLIAFGQSSAHWPL

SEQ ID NO: 83127 - protein, 78 aa, Gossypium hirsutum
  Clone ID: GOSHI-09MAY01-C102636_1.pep
APSVSLIRTASVDARSPIATERAPTRRFQRKGMKVAEGCRACGGATLAEEASSSELCADRDCWRRRLLLGFLNPSIFH

SEQ ID NO: 83128 - protein, 243 aa, Gossypium hirsutum
  Clone ID: GOSHI-09MAY01-C102396_1.pep
MCSGNDGPCLCDTWVFCGNKDACGSRFGECWLKKQKDTLSPDRQEAGQTVSWTSGIVFGKGEGIVEMETEYGTLHIKLFPDCAPYSVTYILELLTLRHCAGCQIYRAKSRGQSWDPQGNHIKDASYGPPFALIQGILEAQGTPFNKMPTEACPTIRRGSVAWIGSGPEFFISLANHGEWKNSYTVFGSVLPEDLEVAEKIAQLPTKSDVWNNINVSVLEKPVPLIMRRMKKSLGDLNSNVKPK

SEQ ID NO: 83129 - protein, 160 aa, Gossypium hirsutum
  Clone ID: GOSHI-09MAY01-C102336_1.pep
GGTVKANSRREYRPWLHVLLIRLYAQENNLENMEKFIDEAFELKASVFTVPVMRCIISTYFRYNSVDKLASFIKRAECAGWRICRSLYHCKMVMYGLQMRLEEMENVLNEMNNVRINPTKKTFLILSKAYLMCGKRHKVEPVVGLMCKRGYQIPLETFLS

SEQ ID NO: 83130 - protein, 93 aa, Gossypium hirsutum
  Clone ID: GOSHI-09MAY01-C102306_1.pep
QIKAILVVGICTDICVLDFVCSTLSARNRRMLTPLKDVIVYSGACATFDLPVHVAKDINGALAHPQDLMHHIGLYIAKGRGARLVSEVSFAAL

SEQ ID NO: 83131 - protein, 129 aa, Gossypium hirsutum
  unsure (1)..(129): unsure at all Xaa locations
  Clone ID: GOSHI-09MAY01-C103916_1.pep
KCQFELARRSPTYKELADDRPSIFIGSEEKVREIISVVCSAPKQSFRXAGLHVPPWRAASYMHSKWLSATPNVNGGFGKVNGEPKPRGGALGFSKWTPPMVKPKTQNRELGGGGSALPSQFSNMGMNCC

SEQ ID NO: 83132 - protein, 116 aa, Gossypium hirsutum
  Clone ID: LIB3829-029-Q6-K6-D8.pep
VTSFPFFFFFFKKSSNRISLFQKTRRKFKEKRSTLARISLFSRYLGVHRCRYKYFFLFMLQSQENEERNKRINRLENHFLICDLYFFLFLCCMCMCQKKRKIHFFWLYSRNLEKSK

SEQ ID NO: 83133 - protein, 71 aa, Gossypium hirsutum
  Clone ID: uC-gsflmaxxa055h01b1.pep
PIRVWFSMQPPDHHQSDGRRREPQTLSTEVVTMEIWEVTSFPFFYFLKKILQNRIFTSFQKQPRPNKFHKE

SEQ ID NO: 83134 - protein, 210 aa, Gossypium hirsutum
  unsure (1)..(210): unsure at all Xaa locations
  Clone ID: GOSHI-09MAY01-C134736_1.pep
DNPLFFRMEHHSGGSGTNKNKQMVEQLQRYGVISSKKVVEVMETIDRALFVPDGTPAYVDSPMAIGYNATISAPHMHATCLQLLEENLQPGMHALDIGSGTGYLTACFATMVGPQGRAIGVEHIPELVASSIKNIEKSAAASPLKGGSLSXHAGDGRKGWPEHAPYDAIHVGAAAPEIPSPLIDQLKPGGKMVNPVXKIFQDLQVVDKNL

SEQ ID NO: 83135 - protein, 247 aa, Gossypium hirsutum
  unsure (1)..(247): unsure at all Xaa locations
  Clone ID: GOSHI-09MAY01-C134696_1.pep
IATTAVDIIDNARIFQVLVHSQLNLXVPMIGLVMGERGLMXRILAAKFGGFLTFGSLEAGLVSAPGQPTVKELLNLYNMRLIGPDTKVYGVIGNPIGHSKSPHIYNASFKSSSFNGIYLPLLVDDVSTFITTYSAPDFAGYSYTIPHKEAGLKCCDEVDPIANAIGAITCMIKTSTEGKLIGYNIDYLGGIAPIEEDLRVSNGAPLASGSPLAGKTFVLIGARRAGKALAYGAYEKGARIVVAIRTY

SEQ ID NO: 83136 - protein, 161 aa, Gossypium hirsutum
  unsure (1)..(161): unsure at all Xaa locations
  Clone ID: GOSHI-09MAY01-C136056_1.pep
MAKVGFCLTFVLFIVAELTSAAEPPAPAPALSLGADLPQLAPTPVTGSPDSAPYISPVMDASPPAPMGPSPSDLAPGNSPASSPAPSPVDASDINHSDINAEGSEEKSGGDGGMSGGKKAGIVFGXMAAACLVGFGGLVYKXRQENXRRSQYGYAARSEFL

SEQ ID NO: 83137 - protein, 201 aa, Gossypium hirsutum
  unsure (1)..(201): unsure at all Xaa locations
  Clone ID: GOSHI-09MAY01-C136216_1.pep
MSTSELPRKEANVLKGHEGAVLAARFNSDGNYCLSCGKDRTIRLWNPHRGIHIKTYKSHGREVRDVHVTLDNSKLCSCGGDRQIFYWDVSTGRVIRKFRGHDGEVNAVKFNEYASVVVSTGYDRSLRAWDCRSHTXEPIQIIDSFSDTVMSVCLTKTEXIGGSVDGTVRTFDIRIGREISDDLGQPVHCISLSIDNNCILT

SEQ ID NO: 83138 - protein, 81 aa, Gossypium hirsutum
  Clone ID: GOSHI-09MAY01-C130336_1.pep
FYHGLVISNCLELPLNMIINERCMGSFLSNGLLIYLALAKAYAKTSENLSKTLSMHAKNQNLTIHPGLFVHAFEENVVHDC

SEQ ID NO: 83139 - protein, 81 aa, Gossypium hirsutum
  Clone ID: AW187044.2.pep
FFFFFFFFFFFFFFFFFFFFFFFFWVNLLITYLIYFFKKTKSSPTPKKKKIVFPPIHSYTPLYPFTMLKLHLVTYIIFSPF

SEQ ID NO: 83140 - protein, 198 aa, Gossypium hirsutum
  Clone ID: GOSHI-09MAY01-C132846_1.pep
MEFSKSCSSHHVPVMVVLALMSLMMLLLPVNGQTINNPCTPAMLTTFTPCFNFLTNSSANATSPSAACCNALKNLTSSSMGCTCLIVTGSVPFRLPINRTLAVSLPRACNMPSVPLQCNAPRGAPIPAPGPVSLAPKLSPGASPSLSPQSPIVPEPTPSAEVPVSGTTPALTPPSSTAGSGAPTAATGSRPVLTHHCQ

SEQ ID NO: 83141 - protein, 248 aa, Gossypium hirsutum
  unsure (1)..(248): unsure at all Xaa locations
  Clone ID: GOSHI-09MAY01-C132546_1.pep
VEEGTRFREIMRESFLLAGATNMGDFLPMVKWFEKTEKRMINLFKRREAFTQELIDECRHNMKIRKKXSLSTDEKKNMIEVMLSLQEQEPENYKDETIRSLMMVLLLAGTDTSSGTVKWAMSFLLNHPQVFNKARIEIDTVVGQNRLIEESDFPNLPYLHCIINETFRIKPTAPLLVPHESSKECLVGRYRIPHGTMLLVNAWAIQNDPNNWEEPDVFXATEIRGVDPSNIAFNLMPFGNRRRRCSEK

SEQ ID NO: 83142 - protein, 176 aa, Gossypium hirsutum
  Clone ID: GOSHI-09MAY01-C132076_1.pep
MEDDTWSFAFSASSRSYQSTVKSQSDLCIDFEEIEEDDELMTEYPCPYCSEDFDLLGLCCHIDEEHHLEAGYGVCPVCAHRVGMNMVDHITAQHGNIFRSNHKLNFGKGDSYSTLSSLRKELHDAHYQSLLSRSWSSLSSSNTAPDPLLSFLYSATPADSSESVQPVTPTEVTMEK

SEQ ID NO: 83143 - protein, 212 aa, Gossypium hirsutum
  Clone ID: GOSHI-09MAY01-C133506_1.pep
VVSGRKRYLDVLSTFSEMRSLAVNLNEYTFSTVLKSFAGASAFRQGLKAHALLIKYGFINSSMLRTGLIDLYFKCGKIKLAHRVFEEIPERDIILWGAVIAGFAHNRMQREALNYARWMISEGIYPNSVILTTILPVIGEVWARKVGQEVHAYVVKTKSYSKQLSIQSGLIDMYCKCGDMESGRQVFYCSGERNAISWTALMSRYISNGRLD

SEQ ID NO: 83144 - protein, 89 aa, Gossypium hirsutum
  Clone ID: GOSHI-09MAY01-C129806_1.pep
VVTILGHCLFGPSNSQDEKDAASIAIRCLYARASHDLAPQAILALQSLIRLDKSARAAAKAAATVVANAPSNANTPSKAKKPEILLVSK

SEQ ID NO: 83145 - protein, 190 aa, Gossypium hirsutum
  unsure (1)..(190): unsure at all Xaa locations
  Clone ID: GOSHI-09MAY01-C129576_1.pep
MSIAHSSFYNMLKVPKHQVAGHLPXDGKLGPLVNDSGRFYKPLQGDGRGNKELAFYESFSSDTRVPDHIRKYFPVCYGSQLLEASNGSGLLHHLVLQDIVSSHRNPSIMDVKIGSTTWYPEPSDNYIQKCLEKDRRTTTVSLRFRIAGLHLYGGNESRYWKPPRKEVPSFTVHNVRSILKKIVSSNSPIG

SEQ ID NO: 83146 - protein, 116 aa, Gossypium hirsutum
  Clone ID: GOSHI-09MAY01-C129656_1.pep
RVNSILPLAASHGFRLGTPFPKWHRRGLPVLEGFEHLVRTDPVEDKEGFFIALFVREEGSVIHPSLSPDSSHLSLVKRTKRKNLSKKEARIRMPTLYGGMFKMFLYSKPSFRVNLK

SEQ ID NO: 83147 - protein, 95 aa, Gossypium hirsutum
  unsure (1)..(95): unsure at all Xaa locations
  Clone ID: AI054979.1.pep
QYLYLIDLGKKGGLSETRKSLFCQWLLLQKFSPXRVQLKLESGQVVLPRKGRHRRNSRKITIAKGQQQEHSRWVQLDLKIDPERQXXLMHKIXHV

SEQ ID NO: 83148 - protein, 64 aa, Gossypium hirsutum
  Clone ID: uC-gsflnu33B016f04b1.pep
HASAHFKHRRQCLIALAPVCCRKRRVQSTELLTFKVLHTRKSSRRPILHFYPSAQSILGYRLNC

SEQ ID NO: 83149 - protein, 194 aa, Gossypium hirsutum
  unsure (1)..(194): unsure at all Xaa locations
  Clone ID: AI726620.1.pep
MAMGDSVPTPRISVHQAFGGGLVADVLLWRKWCGGVVMLASATTFWCLFELAGYSILSFVANVLLLLVVILFFWAKSASLLNRPLPPLPNLEISERTAGKIADELQVWVNIALSIAHDITLGRNLKLLFKVGVALWFVSFIGSFLXFLTVVYIGVILXLSVPVLYDKYQHHIDEKLSVTNKIIQTQYRKIDETV

SEQ ID NO: 83150 - protein, 165 aa, Gossypium hirsutum
  unsure (1)..(165): unsure at all Xaa locations
  Clone ID: uC-gsronu33B031b01b1.pep
MAMGDSVPTPRISVHQAFGGGLVADVLLWRKWCGGVVMLASATTFWCLFELAGYSILSFVANVFKLLVVILSYRAKFASLLNRPVPPLVLVWLFDWAAGTELTYXQVCAIMALAWVHDITPGRNLEPFLKGGVALWFVSXIGSFFGFLTVVYLGFFLAISSRVFD

SEQ ID NO: 83151 - protein, 270 aa, Gossypium hirsutum
  unsure (1)..(270): unsure at all Xaa locations
  Clone ID: GOSHI-09MAY01-C124076_1.pep
FDFADKYRGSYSDSLNSVVCPFYCSYSGYQDELLWGASWMHRATQDSSYLSYIQSNGHTMGSDNDDFSFSWDDKRAGTKVLLSKDFLEKSTSEFQLYKSHSDNYICSLIPGSSGFQAQYTPGGLLYKASESNLQYVTTTTFLLLTYAKYLSTNGGVVTCGTSTVTAESLIAQAKKQVDYILGDNPPKMSYMVGFGERFPQHVHHRGSSVPSIRAHPDRINCNNGFQYLYANSPNPNVLAGAVIGGPDSKDNFADXDRNNYQQSEPATYIN

SEQ ID NO: 83152 - protein, 174 aa, Gossypium hirsutum
  Clone ID: GOSHI-09MAY01-C120646_1.pep
FSGFCAFCCRRKWVKRDWAIATVAITVIIAAVITVILFYTVFSDSRNRKTSSPTFAPPSAGDFVPLTLLQSAKATGAFCLDGSLPGYHFQKGFGSGSSNWLLHIEGGGWCNSIESCNSRKGTSLGSSNYMGHQVQFSGILSQDPSQNPDFYNWNKVKLRYCDGASFAGHPESEF

SEQ ID NO: 83153 - protein, 143 aa, Gossypium hirsutum
  Clone ID: uC-gsflmaxxa002d04b1.pep
MLCRRILLIKVWNNGRRWLLPSSSLSPVPTTADYKRHFSTHIMAAFSLPQNNQFTLKIPYMENRCKFSSNAVADLHTNGIVDVPLAQTGEGIAECELLKWFIQEGDEVEEFQPLCEVQSDKATIEITSRYKGRVAQVLHVPRN

SEQ ID NO: 83154 - protein, 51 aa, Gossypium hirsutum
  Clone ID: uC-gsflmaxxa040c03b1.pep
PSRTPIIYKVFRWFIIIRSWVVLFLCPYFFRISDIPYLLLDLISSCSYILS

SEQ ID NO: 83155 - protein, 167 aa, Gossypium hirsutum
  Clone ID: GOSHI-09MAY01-C123426_1.pep
DLLTAQAWLSENKQLEQKVAQLSKVTCNISEYTRMVLLEKNKIDKAIESSGAQKVKKTDPHKIEDPLAPRKTLLQSLSVGFGDLTATAENIRPGFEEPKLPDAAEIFLKATSNCCGRMCNRCCCMCCIQCCSKMNDQCAIVLTQIFTALAFIGCIECCTLCCGQNGQ

SEQ ID NO: 83156 - protein, 59 aa, Gossypium hirsutum
  Clone ID: AI732009.1.pep
AGGCLNHSWSAVGCCCMCCIQCCSKMNDQCAIVLTQIFTALAFIGCIECCTLCCGQNGQ

SEQ ID NO: 83157 - protein, 71 aa, Gossypium hirsutum
  Clone ID: uC-gsronu33B145e08b1.pep
RLVTSSAAQSAQPTIPTLPTTQPCLPFPSMPFPTTLPTLPITIPPLRNMPSIPAMIPSIPFFSPPPSKASP

SEQ ID NO: 83158 - protein, 57 aa, Gossypium hirsutum
  Clone ID: uC-gsflnu33B061b03b1.pep
SINVGLAGRHLLQLPNLPQPTIPTLPTTQPCLPYPSMPYPTTLTTLPITIPPLPNMP

SEQ ID NO: 83159 - protein, 100 aa, Gossypium hirsutum
  Clone ID: GOSHI-09MAY01-C118585_1.pep
KVHGKTLEIFHDDHSSQATSIKQRAEETFQQTYMDYEPSGTTPIRSEQDVPTKGTIESLRAMPMEALVEEFRENNSYESFEPKLLKSSVVPTRSPLTEIN

SEQ ID NO: 83160 - protein, 208 aa, Gossypium hirsutum
  Clone ID: GOSHI-09MAY01-C118215_1.pep
LLFEPIVTLCSHVDCWPCIYKWLNVQTSSLDTDPRQKNCPVCKASISSCSLVPLYGHGTSSHSQPKTPHSDLIIPQRPPPSTSNMTAPSSHLNQQLHENFFHSQSQAFHNQQYFPPYGGYATLASSDLSGIPMTNFFHPMIGTLGEMVYARISGSSNTSMFAYPNQASYPLIRNNNLRMRRLEIQADKSLSRVSMFLSCCIILCLLLF

SEQ ID NO: 83161 - protein, 39 aa, Gossypium hirsutum
  Clone ID: GOSHI-09MAY01-C119485_1.pep
YFQLPKNFLPLFLCYVFFSLRDIIFVRFRFLEPSDQYIS

SEQ ID NO: 83162 - protein, 41 aa, Gossypium hirsutum
  Clone ID: GOSHI-09MAY01-C114475_1.pep
PEVLVFVLTTTILIMPNKFPSNTSTQDIQHFMQTKLLNPDA

SEQ ID NO: 83163 - protein, 59 aa, Gossypium hirsutum
  unsure (1)..(59): unsure at all Xaa locations
  Clone ID: GOSHI-09MAY01-C114185_1.pep
SHPPLTLHHFHHHHHCNHHHHHHHHHHHHHHHHHHHPHHHHXHHHHTFLFNEKLDLYSI

SEQ ID NO: 83164 - protein, 60 aa, Gossypium hirsutum
  Clone ID: GOSHI-09MAY01-C114105_1.pep
LFHLSNAFFFQILGFQQLLVCHCSLMGLRCVLIYLQHFVLLTTGLTKGALCGKAHGLINK

SEQ ID NO: 83165 - protein, 183 aa, Gossypium hirsutum
  Clone ID: GOSHI-09MAY01-C114355_1.pep
MDGGEEKPSSRKKMSVVVGPWGGNGGAAWDDGIYNGVREITLVYDRCIDSIRVVYDKNGKPVTAEKHGGVGGNKTAEIKLKFPEEFLISVTGYYCPVVYGGSPVIRSLTFKSNRRTFGPYGVEEGTPFAFSVEGARVAGFNGRSGWYVDSIGFRLCRVQSPKLFQKVQKGFQRLTSSVSKASV

SEQ ID NO: 83166 - protein, 69 aa, Gossypium hirsutum
  Clone ID: GOSHI-09MAY01-C115655_1.pep
SKLWLWLPFTTSGKGEAGTELDLWWISLSGGWIGVFLESGGKEGFGDGLEVQRPIAEQAYLSVSFPQTV

SEQ ID NO: 83167 - protein, 179 aa, Gossypium hirsutum
  unsure (1)..(179): unsure at all Xaa locations
  Clone ID: GOSHI-09MAY01-C115615_1.pep
MATALLTTILLSSFLVVSSAEISSKIGINYGRIGNNLPSPYRTIETMKSMNAGRIKLYDSDPEILKLLSGTNIHVSVMVQNNDIIRIASSQAVAEQWVQDNVLAYYPDTMIRFVLVGNEVLSHQDRRIWISLVPAMRRIKNFVEXHDIKNIKVSTPLAMDVMQSTFPPSSGRFRPDITD

SEQ ID NO: 83168 - protein, 180 aa, Gossypium hirsutum
  Clone ID: GOSHI-09MAY01-C117935_1.pep
VFHKVNHKIIVSDAVLQNRWSSVSSSDLMFLSSEMLNDLSSNRFVSLDINKEQCTKTRTIENEGITKIKRELEIKRLLNKPVSTPDVAFTSDSAASTSHAASRITNQVEKRSMSDITALSRFRDDGRRNRTSECSLPERYTEEERRRLLWLPIARRTVQWFANRETCEQHIQGPTHHLDV

SEQ ID NO: 83169 - protein, 96 aa, Gossypium hirsutum
  unsure (1)..(96): unsure at all Xaa locations
  Clone ID: GOSHI-09MAY01-C117465_1.pep
MNGDDAQSMMESQYIQRHHRHNIRDDQCTSXFVKHIKAPVXLVWSLVRRFDQPQKYKPFVSRCIMKGDLGIGSVREVNVKSGLPATTSTERLELLD

SEQ ID NO: 83170 - protein, 97 aa, Gossypium hirsutum
  Clone ID: GOSHI-09MAY01-C117715_1.pep
NSTVSFYLRQLGFGSDRLPDSISNDETSARASLSRIVMLVEALFEVLDEIPQQSVVLSSRPSVSSIGSVPAPNEVVELLPVKIYNKSHKLHNDEAGQ

SEQ ID NO: 83171 - protein, 103 aa, Gossypium hirsutum
  Clone ID: AI054911.1.pep
GVFPFSFYQWLTEGEVLDWLMSNLYNRDSILEVLGVGINSFEIWPLHAACTCFNLFKHLKFQILIALRTSYHFATSISLSQFAETKEKPGSFLLYHVWSFSIN

SEQ ID NO: 83172 - protein, 88 aa, Gossypium hirsutum
  Clone ID: uC-gsflnu33B012a09b1.pep
LLQWLTEGEVLDWLMSNLYNRDSILEVLVFMRLIKKLWLSMKTFTDKRRNASSDGGNSGFKMKQLSFMGVICSVTLDIVYRTTNYSIL

SEQ ID NO: 83173 - protein, 222 aa, Gossypium hirsutum
  Clone ID: GOSHI-09MAY01-C110455_1.pep
MSNYTVERIKVATPDKVELMPKVFKPNEEIKDNLVVVLVHPYSILGGRQALLKGIASGLAQNGHRAVTFDMRGVGESTGRASLTGFAEVKDVIAVCNWVSEHLDSHRILLVGSSAGAPIAGSAVDQIGQVVGYVSLGYPFGMMAPTLFGRHHKAILQSSKPKLFVMGTRDGFTRVKQLNKRFSSAAGRNEIYLMEGVSHFETEGPAYDAEMVKLILKFISSL

SEQ ID NO: 83174 - protein, 173 aa, Gossypium hirsutum
  unsure (1)..(173): unsure at all Xaa locations
  Clone ID: GOSHI-09MAY01-C110605_1.pep
IVGPNRLIKESEIPNLPYLRAVIRETLRLHPSAPLIIRECGEDCTVNGFMVKAKTRVLVNCYAVMRDPDSWKIPDEFDPERFLDSSDEKIGEHQXMEFKGQNFRFLPFGSGRRGCPGASLAMLVMHAAVGSLVQCFDWEVTXGRKVDLNPGPGFASEMAQPLVCYPILRFNPF

SEQ ID NO: 83175 - protein, 50 aa, Gossypium hirsutum
  Clone ID: uC-gsflnu33B143d02b1.pep
VTIPDRVLLVNTYRNHKLMPWTYSHSYIRILCHDICILAIPKVHTGLCTL

SEQ ID NO: 83176 - protein, 69 aa, Gossypium hirsutum
  Clone ID: uC-gsronu33B011g09b1.pep
LSICLDPNPISLVLDLNIFKLSSFKHMFIQFSPKTRKWENYHFTPDMYIFYNLVPIEQNTKYTRFQYTH

SEQ ID NO: 83177 - protein, 99 aa, Gossypium hirsutum
  unsure (1)..(99): unsure at all Xaa locations
  Clone ID: GOSHI-09MAY01-C110245_1.pep
MVPNLDRGLWQYSRHPNYFGEQLWWWGLVVFAWNLGHGWTFVGSLINSMCLAYVTVLAEQRMLKHEYRAEAXRLYQKTTSVWVPXWFRSSAMAVKDMVT

SEQ ID NO: 83178 - protein, 56 aa, Gossypium hirsutum
  Clone ID: uC-gsronu33B055a11b1.pep
DRFDSRDDRYGSRDRYISDRYPPTGDRFGDRYAGSDPFPHNGFGKERGYRDAAPRG

SEQ ID NO: 83179 - protein, 72 aa, Gossypium hirsutum
  Clone ID: uC-gsronu33B055a05b1.pep
RQGYGGADDRGDRFRDRDRYIDDRYDGGRYGDRDRFDSRDDRYGSRDRYISDRYPPTGDRFGDRYAGYDRFS

SEQ ID NO: 83180 - protein, 223 aa, Gossypium hirsutum
  Clone ID: GOSHI-09MAY01-C112845_1.pep
EALVVLEKIARINGAKLPTGVLVSENEIELVGKSTPTEDTLLLQAEDNGYEAPKEMNPKAGGISTLLQLLSPELVRSTTLLWMVFFGNAFSDYGLVLLTTELHNGRNTCRPEELQTVKYEGVSYKDVFITTFAEFPGLLISAFTVDRFGRKFSMSAMFFLCCIFLFPLVVHQPQGLTTGLLFGARICITASFTVMYIYAPEIYPTSVRSTGVGIASSMGRLGG

SEQ ID NO: 83181 - protein, 178 aa, Gossypium hirsutum
  unsure (1)..(178): unsure at all Xaa locations
  Clone ID: GOSHI-09MAY01-C112045_1.pep
PRVRESERVINGFIGDCPAGFARLTRLLLQAFLSIKNGNKSSQRKLPPGPRRIPIFGNLFDLGDKPHRSLAKFARIHGPAMSLKLGSLITVVVSSETTAKEILQKXDLIFCNRTIVDAARASQHYEFGLPWLPVSPLWRTLRRVSNTHIFSSLKLDSNEYLRRHKIQQLIAKVGESRL

SEQ ID NO: 83182 - protein, 225 aa, Gossypium hirsutum
  unsure (1)..(225): unsure at all Xaa locations
  Clone ID: GOSHI-09MAY01-C113525_1.pep
MEDIKPLIEALKTKLKQALILWAEGFREACCLHRVIVLCRRSKKLMIRTGQCFLLNGFIFLGSLFVLNSVVIPTLQWILPDHYSQTSCEAMSEFHGVFKFYSFLRGFLIQLFYVFWFYPLYVFSFILSNLWYNDIATHGFAAMGRSGPSTVESSKQNDTLTSDSKVHAARPAGLGGIMIGIGEQVFSLLLXTFFFLQVYAARFIPYVGRHSFRPFSWSRYYCLSQ

SEQ ID NO: 83183 - protein, 138 aa, Gossypium hirsutum
  unsure (1)..(138): unsure at all Xaa locations
  Clone ID: GOSHI-09MAY01-C113495_1.pep
MRRVNGLAIVGRTLTCGGAVEKRLAQAALMSTCSSSSLNSHIFSQKLADRLGLSRPSLVRRVAGTMLFSVAASSLAHDALAEEKPRSEKFLPKEXVLYQYEACPFCTKAKAFVDYYNIPYKNGEVNPIKQKEIKWSDY

SEQ ID NO: 83184 - protein, 143 aa, Gossypium hirsutum
  unsure (1)..(143): unsure at all Xaa locations
  Clone ID: uC-gsronu33B147d01b1.pep
SGEARSCSNQDXRTLPSSSSSFLTFNDHEVDGTNSGNEADRIPNQALDDGAIKLEGGIPIMELPDVATDTLVDGHVIAKPSVKIFGAIMTDEMKCLGITKGTDTGEPSLLSPCMAKPERETDFFGIAEGGDAIAYGSGPSDAA

SEQ ID NO: 83185 - protein, 77 aa, Gossypium hirsutum
  Clone ID: uC-gsflnu33B051f01b1.pep
CLGIPKGTDTGEPSLLSPCMAKPDREADFFGIAEGGDAIAYGSGPSDAAGEACCNMITHHQSVSLDLVLSQPYPYAG

SEQ ID NO: 83186 - protein, 198 aa, Gossypium hirsutum
  Clone ID: GOSHI-09MAY01-C113385_1.pep
KIEKDCTDVSNSMLSIPLMIPGTRYYKGMKGREKLNETFGNMIARRRSGEEYFDDFLQTMVNRDSYPEDEKLDDQEIIDNLITLILAGQTTTASAMMWCVKFLSENKDALDKLREEQLPIVRNKAEGASLTLEDLTEKSYGFKVVKETLRMANVLIWLSRVAMDDCILDGFEVKKGWLVNVDATCIHYDLNVYKDPTR

SEQ ID NO: 83187 - protein, 107 aa, Gossypium hirsutum
  unsure (1)..(107): unsure at all Xaa locations
  Clone ID: GOSHI-09MAY01-C108655_1.pep
VVMQTGDAELEMRGRCSAGQKFLASLIIRLALAETFCLNCGILALDEPTTNLDGPNAESLAAALLRIMEARKGLENFQLIVITHDERFAHLIXQRQLAEKYYRVFKD

SEQ ID NO: 83188 - protein, 150 aa, Gossypium hirsutum
  unsure (1)..(150): unsure at all Xaa locations
  Clone ID: GOSHI-09MAY01-C108045_1.pep
EQVTEIPTSDLKRCLQSLACVKGKNVLRREPMSKDIXDTDTFLFNDKYTSKFFKVKIGTVAAQRESEPENQETRQRVEEDRKPQIEAAIVRIMKARRVLDHNNIVAEVTKQLQSRFLPNPVVIKKRIESLIEREFLERDKGDRKLYRYLA

SEQ ID NO: 83189 - protein, 201 aa, Gossypium hirsutum
  Clone ID: GOSHI-09MAY01-C109415_1.pep
MARRRERRGEPSQDRRKERIGPETREEKLNDSDASERKLIGIFILFFIIIPAVSVLVYVYKYGSGTKRLEPVITERGPIKTDINFQEILTENTNVAGNESQRNYDYPVLAYITPWNSKGYEMAKRFNSKFTHLSPVWYDLKSHGNSLILEGRHNADKGWISELKMRGNALILPKIVLEAFPTELLKKKKQMDKAIDLMVTE

SEQ ID NO: 83190 - protein, 166 aa, Gossypium hirsutum
  Clone ID: GOSHI-09MAY01-C109755_1.pep
FQNKYIPLLTGLRKVLLARWPLKINNLLIPYSLNMFFFQKKIKSSLNLGLREVEIEGDSRSVIRKLEEKEDRSDIAVFIHDSKNLCLDFQTCIFLFTNREANKVEHIIASEGIKRRESTYLANQVHSGAAEMVAEDRRTESMREPRRRRAGDEEENVLCSLNLSLK

SEQ ID NO: 83191 - protein, 225 aa, Gossypium hirsutum
  Clone ID: GOSHI-09MAY01-C109635_1.pep
KKPAKGSTKKAEQREKDSTTSVLPPAKQKATLPSKIPLVQDTVTSQAGKTLATRNGSTRVDVHDKLPPRKDLEDVKPVISLRKGMIKVDKRQSDSAQLNHNSGSRKEIQERNHDSIKHREQKYTERSEIKGPVFKDEMQQMIPYMHKRSESTLTLLEKPEYGESMLHGENSSANKLRLGNQQKLQNNHGFQQVHMLQKSEPQKKKRLPQEREHEKHRLREKKQKR

SEQ ID NO: 83192 - protein, 216 aa, Gossypium hirsutum
  unsure (1)..(216): unsure at all Xaa locations
  Clone ID: GOSHI-09MAY01-C104505_1.pep
RSRYAKAPGRAVVDVLKAGMDLNCGSYLQNYTKSAVLQKKLPXIWGDRALHNLFAVRMRLGLFNGNPVPNPFGNIGADHFCSPEHQILALEAARNGIVLLKNDAKLLPLPKSTMSLAVIGPNANSPQTLIGNYAGPPCKSVTPLQALGSYVKNTVYHPGCDTVSCSTGAIDKAVDIAKRADYAVLIMGLDQTEEREALDRVDLFLPGRQQELIVSV

SEQ ID NO: 83193 - protein, 421 aa, Gossypium hirsutum
  unsure (1)..(421): unsure at all Xaa locations
  Clone ID: GOSHI-09MAY01-C104645_1.pep
GGRGGDFSGDPHVRQQKGQHKEETFWEHPVLIIGVLVLGFDLMDPFEIGPAGGIEFXPVKHDIAPYTEVMASWPRDNKSRLGNGKLEFVGGGLGPESLEIDGFGRGPYTGLADGRIVRWMGEDFGWETFAIVTSNWSEKLCARCVDSTTSKQWKHEKWCGRPLGLRFNKDSGDLYIADAYYGLLVVGXPGGGLATPLATHVXGKPILFANDLDIHKNGSIFFTDTSRKYNRVYHFFILLEGETTGRILRYDPPTKTTHVFLDGLAFPNGIQLSKGQSFLLFTETSNCRLMKYWVEGPRAGTTELVAHLPGFPDNVRINDKGQFWVAIDCCRTQAQEILVHNPWMRSLYFRLPIRMKILARXMGMKMYTVISLFDENWRNRRSPLKIEKGVVMRLVSEVREVEGKLWIGTVAHNHIATLSYP

SEQ ID NO: 83194 - protein, 143 aa, Gossypium hirsutum
  Clone ID: GOSHI-09MAY01-C104655_1.pep
HAFAHASVHACAYAGAHANGFRHGSLVMRLPDSEVGQIQTVIFGTVNGAIGVIASLPHDQYVFLEKLQSNLRKVIKGVGGLSHEQWRSFNNEKRTAEAKNFLDGDLIESFLDLSRGKMEEVSKGLGVSVEELSKRVEELTRLH

SEQ ID NO: 83195 - protein, 49 aa, Gossypium hirsutum
  Clone ID: GOSHI-09MAY01-C105205_1.pep
WNFRELPQHLSGTIITYAWKCSTTSTYFIGEKTFGKHKDLIMMSIVSGL

SEQ ID NO: 83196 - protein, 89 aa, Gossypium hirsutum
  Clone ID: GOSHI-09MAY01-C106815_1.pep
LSSSRFLARLSSSRFLARLSSTRFLSRLSSSRFLARLSSSRFLARLSSSRFLARLSSSRFLAQLSSSRFLARLSSSRFLGGLGSFRFLF

SEQ ID NO: 83197 - protein, 294 aa, Gossypium hirsutum
  unsure (1)..(294): unsure at all Xaa locations
  Clone ID: GOSHI-09MAY01-C106525_1.pep
KSRTIEVDITGFRLHLCTLFHAQVNGKWCSTTVESFPSAPVYSSGNGEPPELQKIRVLVGAPLRQPPKHQIVADXLISVENIILYHLIQEKYIRPEGLNDFFIFCTSDFTTASKEVHVRTRRVRLLGLEGAGKTSLFKAILGQGKLSAITNIENLQEADFRDGIAGGLCYSDSLGVNLQELAMEASRFKDELWRGIRDLSKKTDLIVLVHNLSHKIPRYNHPDALQQYPALSLLLDEAKALGIPWVLAITNKFSVXAHQQRAAINTVVQAYQASPSTTEVINSCPYVMPGAVSA

SEQ ID NO: 83198 - protein, 147 aa, Gossypium hirsutum
  Clone ID: GOSHI-09MAY01-C106665_1.pep
MAAAAATIVSSAGGLLAMLNESHPQLKYHALSNLISFVDQFWPEISTSVPIIESLYEDEEFGQHQRQLAALLVSKVFYYLGELNDSLSYALGAGPLFDVSEDSDYVHTLLSKAIDQYVSLRSKAAESSNEAAMVDPRLEAIVERMLE

SEQ ID NO: 83199 - protein, 136 aa, Gossypium hirsutum
  Clone ID: AI725867.1.pep
ESKYKERVRAAIHQKRVAAEKKRLGLLEAEKKKACARILQVRRVANSISHQREVERRKMRDQLEDRLQRARRQRAEYLRQRGRPQKSIRVNCTRMHKQADLLSRKLARCWRRFLRQRKTTLDLAKAFDLICGISFS

SEQ ID NO: 83200 - protein, 176 aa, Gossypium hirsutum
  unsure (1)..(176): unsure at all Xaa locations
  Clone ID: LIB3543-028-Q1-K6-G1.pep
XKRLGLLEAEKKKACARILQVRRVANSISHQREVERRKMRDQLEDRLQRARRQRAEYLRQRGRTQKSIRVNCTRMHKQADLLSQKLARCWRQFLRQRKTTLDLAKAFDSLKINGKSVKSMPFEQLALLIESIATIQTVKALLDRIESRIKASRVGGASDLLSSLDNIDHLLKRVAT

SEQ ID NO: 83201 - protein, 198 aa, Gossypium hirsutum
  Clone ID: LIB3543-028-Q1-K6-G9.pep
RSPSVRPASGQRARTRGVRSNLRLHRSSDLRHRNFSRLLVIRASHLSPFPFLSTKKLARGGAWKFSKEAPRLSLDSRAVVDAKGSLKPREIRTNALILSANQCEDEVDDSDKQRRSPSVIARLMGLEPIPDSNPEPNGKAQLRRSASEARGRDLFQYRFIDGVNFHLKQSQQPNFQNGGVSSNVVRENGAKQDRVIIN

SEQ ID NO: 83202 - protein, 135 aa, Gossypium hirsutum
  Clone ID: uC-gsflmaxxa048a06b1.pep
FFFLKKKKKGKMMTGVVPEQNLEKQIGKQMGCMAGFLQIFDRHQLLSGKRLYSPKRLPPVETPASEKKTEQVKTVETPAMSRELGKQPQGRAAASPDRSKQSPVTSELRSPASELFTPTGNQSKSPLPLSVFEYK

SEQ ID NO: 83203 - protein, 49 aa, Gossypium hirsutum
  Clone ID: GOSHI-09MAY01-C100825_1.pep
FFDNLPNIQIWKLKKKKQLSLYMSYTYPYLIFILNPNNIEHKVQRRRQR

SEQ ID NO: 83204 - protein, 61 aa, Gossypium hirsutum
  Clone ID: GOSHI-09MAY01-C100145_1.pep
GLGPRFGVGQTLATIEMKPILAMIIRQYSLAVSPTYVHAPKLLISLEPQYGVQLLLTRTTL

SEQ ID NO: 83205 - protein, 209 aa, Gossypium hirsutum
  unsure (1)..(209): unsure at all Xaa locations
  Clone ID: GOSHI-09MAY01-C100015_1.pep
VVEEKIQPLRALELNNNMIDYSGFTSLAGALXLENXTIRNXNLNGNYGGXALGANGIGPKGLEXGNKSLRELHVHGNSIGDEGIRSLISSLSSHKGRITLLDFGNNSITAKGAFHVAEYIKRSKNLLWVNLYMNDIGDEGAQKIADALKENQTVTTIDLGGNNIRPKGVGAIXETLKNNTVIKNLELGYNPIGANGARLCLNFLIHGNV

SEQ ID NO: 83206 - protein, 42 aa, Gossypium hirsutum
  Clone ID: GOSHI-09MAY01-C100215_1.pep
LNENFVVLTFIWIRYLHLCVGHKYEFNARIHIEDENRVSQNA

SEQ ID NO: 83207 - protein, 183 aa, Gossypium hirsutum
  Clone ID: GOSHI-09MAY01-C101945_1.pep
MRLVINNVVLFVGIFCLYLSFSPPINAAGGNNPLVAHACEKVKAKDLCVSSLMAEHASKSADLATLALISIKVASNNGTNTSFYIKKSLDTQKLEPAVEQNFQDCEDNYISATQQLDGAVSSLVSKNYKDTKMFLESAIDDAITCDNGLRKMPGNQLELPHRNIMFRQLCINALDVVLFLTTS

SEQ ID NO: 83208 - protein, 141 aa, Gossypium hirsutum
  Clone ID: GOSHI-09MAY01-C101625_1.pep
GSTQRSEKLLENNGIGEAKILKYGDRLLETIEATIKEHYKTDKINSGSSNDSNDSAKRRRNTNANIDNNDDFSRSTGRSKRRTVERQDKDGTSDNNHQYPADENDLDFDDLDYVYDVESKENRPQVEVNINGRMLPSWPRT

SEQ ID NO: 83209 - protein, 187 aa, Gossypium hirsutum
  Clone ID: GOSHI-09MAY01-C101395_1.pep
MEVDDDNGPSTSAAVPDGETPVPTANSTPVQPPAVPPAVVPPTIAPLPAVVPPIAPIPAVRPPVFKPPVPQNGEVKAVDSDSDHEVDGRATAGEYEISEESRLVRERQEKAMQELLMKRRAAALAVPTNDMAVRTRLRRLGEPITLFGEREMERRERLRMIMAKLDSEGQLEKLMKAHEEEEAAISA

SEQ ID NO: 83210 - protein, 113 aa, Gossypium hirsutum
  Clone ID: GOSHI-09MAY01-C101235_1.pep
CTLLAQSAVHGAMAGYTGFTSGLVNGRQTYIPFYRIIEKRNSVVITDRMWARLLSSTNQPSFLCLKDSIEDTGDEEQSNQLLANGHCGEEEEQSNQLLANGHCGEEDSLISKI

SEQ ID NO: 83211 - protein, 145 aa, Gossypium hirsutum
  Clone ID: GOSHI-09MAY01-C102965_1.pep
IEAQIIKPTSQIRLRPDPSPKYKFLTQLKPDPVTENLKQTQFQRPKGRLAQVAWAGDVSGNSGFPRAAVPTPGFLRTTISAIEPESSQSRRRRAFSVAAIGFDKRTESLLPLFLIVAEGLAFKRASKGGLKSSFSTTAATGHDGS

SEQ ID NO: 83212 - protein, 245 aa, Gossypium hirsutum
  Clone ID: GOSHI-09MAY01-C102905_1.pep
GFGSLRASIREKREKLLIYDYLPNRSLHDFLHESRSGKPVLNWARRHKIALGIAKGLAHLHTGLEMPITHGNVRSKNVLVDDFFVARLTEYGLDKLMIPAVADEMVALAKTEGYKAPELQSMKKCNTRTDVYAFGILLLEILIGKKPGKNARSNDVGDLPSIVKAAVLEETTMEVFDVEVLKGIRSPMEDGLVQALKLAMGCCAPVASVRPTMDEVVKQLEDNRPRNRSALYSPSETRSEVGTPF

SEQ ID NO: 83213 - protein, 457 aa, Gossypium hirsutum
  unsure (1)..(457): unsure at all Xaa locations
  Clone ID: GOSHI-09MAY01-C102875_1.pep
MLRKLVFRQASRAYRSLSTQSTLALLSKCSVFSYCSSSRPEIPPSNSIEHLEDQPTNTISIDRSGLCSPPEHSHEPSSDSELVKHLKGIIKFRGGPISVAEYMEEVLTNPKAGFYINRDVFGAEGDFITSPDVSQMFGEMVGVWAMCLWEQMGHPKRVNLVELGPGRGTLMADLLRGASKFKNFTESLHIHMVECSPALQKLQHQSLKCMDDRKYQXKVLIKVPTIIIAHEFYDALPVHQFQRGSRGWCEKMIDVTEDSSFRFVLSPQPTPATLYLMKRFKWAVPKEVEKLNQIEVCPKAMDLTSTLAKRIGVDRGGALIIDYGLNGVVSDSLQAIRKHKFVNILDNPGSADLSAYVDFASIKHSAEEASDDVSVHGPITQSQFLGSLGINFRVEALLQNCPDEQAEALRTGYWRLVGDGEAPXWEGPEEQVPIGMGIRYMAMAIVNKKQGIPIPFQ

SEQ ID NO: 83214 - protein, 202 aa, Gossypium hirsutum
  unsure (1)..(202): unsure at all Xaa locations
  Clone ID: LIB3829-027-Q6-K6-C1.pep
INLAFNCSIIRTLFRGGXDXSVAXNNMEEVLTNPXAGFYINRDIFGAEGDFITSPEVSQMFGEMVGVWAMCLWEQMGQPKRVNLVELGPGRGTLMADLLRGASKFKNFTESLHIHMVECSPALQKLQHQSLKCMDEENTSEGVDKRSLSTLAGTPVSWHATLEXVPTIIIAHEFYDALPVHQFQRGSRGWCEKMIDVTEDSS

SEQ ID NO: 83215 - protein, 132 aa, Gossypium hirsutum
  unsure (1)..(132): unsure at all Xaa locations
  Clone ID: GOSHI-09MAY01-C102715_1.pep
MCRVEDLRGPLGQFGRLKHIYLPXDKYTGEPRGFGXVQYLDPADAADAKYHTDGYVLGPELTVAFAEENRKKPSKMRERERRRSRTDRHSPLHYSQSPXIGXSFSCSPDYYCPSRKRHYSRLISPRDGRYRG

SEQ ID NO: 83216 - protein, 74 aa, Gossypium hirsutum
  Clone ID: GOSHI-09MAY01-C102055_1.pep
MESLTRGSATWPEETLPNTSPAAIASDLWKFELKVLKSAYQSMLSSHKWGLVIVTASFDGRIRTYLNYGLPIRV

SEQ ID NO: 83217 - protein, 246 aa, Gossypium hirsutum
  Clone ID: GOSHI-09MAY01-C102335_1.pep
SLLGSKEDDSAGPSQANVPMDPQGYPISINQQHTLPTLSVPVPSEQPPIDSSLNVGGYDDSMAARMSMQSQNVHLHAQNQFSGSSFALQNPLVSGSHQVQVPGHDNDPALGPCQSSMPGFHEGGTSHIPTYKGIDDFFSEEEIKMRSNEMLDNEDMQHLLRIFNMGSHCHATPPPPPFNAIEDTHPYPSTYMPTPSLAYGFDNDASRSSGKAVVGWLKLKAALRWGIFIRKKAAERRAHLIELDDS

SEQ ID NO: 83218 - protein, 121 aa, Gossypium hirsutum
  Clone ID: GOSHI-09MAY01-C103935_1.pep
EIERMVMEASRAEYLASDKFKPQVGHKESSTSTAEPSSSGARTGTGPAGSETKLEGSKEHGLQDSVLSSGMQLLLSMGFSYLQANEAYSIFGDDVDSMVCYLIETGSSSRSKGKATDLIID

SEQ ID NO: 83219 - protein, 139 aa, Gossypium hirsutum
  unsure (1)..(139): unsure at all Xaa locations
  Clone ID: GOSHI-09MAY01-C103165_1.pep
GVRYSFEAIDRVQRRWRKEASKTTLEASRLKEFASGQLKLAMAEKAYAEKARQEAKRQIEMAELEFASAKRIRQQAQGEREKGPTPERSSXKKISAPIMQIPCQTCKHQFQTSTAAGPDDETSLAMSYMSSATTEGEGE

SEQ ID NO: 83220 - protein, 35 aa, Gossypium hirsutum
  Clone ID: GOSHI-09MAY01-C103115_1.pep
PTTKKVGTPEVMKRQLQCSRCKGLGHNKSTCKELL

SEQ ID NO: 83221 - protein, 214 aa, Gossypium hirsutum
  Clone ID: GOSHI-09MAY01-C103035_1.pep
GNSSSPSTQSHMRTISVVPRNAHPFPWASISSSRTSHPSGSINPLERAAASREEPNVRNIPRNNAEHPMFVPATQDPTGWSLASENISTSGGVPSSNRPGPRSTIQLPSPAWIPPCNPPVHYQQRVSEVAPWSLFPPFDSEPGGSSGRFPSLSSAPSASSWETAVSSRSNSQGNNQTYRRSAFIAERQGDDALGRPHSLRSLAADIEGRHRLIS

SEQ ID NO: 83222 - protein, 145 aa, Gossypium hirsutum
  Clone ID: GOSHI-09MAY01-C135725_1.pep
MASTKESSSEGSNIKGVHTHGGQYVQYNVYGNLFEVSSKYVPPLRPIGRGAYGIVCAAVNSQTREEVAIKKIGNAFDNRIDAKRTLREIKLLCHMDHENVIAIKDIIRPPKKDAFNDVYIVYELMDTDLHQIIRSDQPLTDDHCH

SEQ ID NO: 83223 - protein, 170 aa, Gossypium hirsutum
  Clone ID: GOSHI-09MAY01-C130345_1.pep
LDFLSFFRRIDDGSKLEIETDLFQKSPILFLSGWISLQIHLLVAVPQDSVVVSGDENNISSEPKMSRKLSFSVNLVGKHETKANERTAANDGEKGGQHGVTADAGGRKTKLSNKRGGALIPVYTAGAVNSNRRLRQQTQHHSGSSSDTINRIASSRLVLVIFTSFCFVYT

SEQ ID NO: 83224 - protein, 208 aa, Gossypium hirsutum
  Clone ID: AI727192.1.pep
IIYARSPSKASSLLSQGAHLAHSPHQLARQSDVVFTMVGNPQDVNQIVLQPNGILSTLNPGAVIVDHTSSSPSLARQIYASAREKGCWSVDAPVSGGDIGAREGKLAIFAGGERPVVEWLTPLLDVMGTVTYMGETWCGHTRNIGNQIMVGANLIGFTEWFPFPGESSGSELIHFMEAPTGRSSWSNGIAIYLGGKSSQINFLLGSSR

SEQ ID NO: 83225 - protein, 197 aa, Gossypium hirsutum
  unsure (1)..(197): unsure at all Xaa locations
  Clone ID: AI731221.1.pep
IIYARSPSKASSLLSQGAHLAHSPHQLARQSDVVFTMVGNPQDVNQIVLQPNGILSTLNPGAVIVDHTSSSPSLARQIYASAREKGCWSVDAPVSGGDIGAREGKLAIFAGGERPVVEWLTPLLDLMGKVTYMGEAGCGQSCKIGNQIMVGANLIGLSEGFVFAEKAGLELSKYMEAIXGRCAXSMAMELFGKRMIE

SEQ ID NO: 83226 - protein, 311 aa, Gossypium hirsutum
  unsure (1)..(311): unsure at all Xaa locations
  Clone ID: GOSHI-09MAY01-C132485_1.pep
MAPSFLSFVSLYGIYLRRCFATSGLTSQFIDIDDHTTIHFWAPNPDHQTPQQQKPALLLLHGFGPSAMWQWRRQAQFFSPHFHVYVPDLVFFGDSTTKSKERSEVFQAVSMGKLMEKLQVKKYHVMGTSYGGFVAYHMAKLWPEKVEKVVIASSGVNMRKADNMELLQRANVENVEDIMLPETATQLRTLTRLAISRRVTMVPDFFWKDVVNQLYSQNRNEKLPLLKGITLLAGDDSCKLPPLPQDVLNIWGDKDKIXPLKIAHELEELIGKKTXLELIQNFSCAPNENSTRSTTLSKTPKWVLLIPQYNM

SEQ ID NO: 83227 - protein, 161 aa, Gossypium hirsutum
  Clone ID: GOSHI-09MAY01-C132415_1.pep
VELKELPDPDDRSKIRTFPLLRPSGRPQGKIRVKLGIRERPLPPPPDYHFAPPNYYYTNVPPHPPRYSGLPYVSHPPPPQSPTYSVPDSYSPHFSNHYYPTPPPPMPPRPFLERPYSYTGPSAPLDYSPYDQRPRGGPKFGTGLTVGAAAGALGGLSLKKD

SEQ ID NO: 83228 - protein, 190 aa, Gossypium hirsutum
  Clone ID: GOSHI-09MAY01-C132105_1.pep
ESRRQRAGGKVHAVDPVRKFSREPIAVPAPDFNVELQASIQKRRGQFDAKSISEVCYPEEDRGAGVSIEPSKRTERVVYNSHSGRSMHPGKFESSRNKKTEIESMKTSARPFGFPRKPEELKTQTTCVHRGAVELSRFSNSIAVRGSSRFDMTKENNINPQWPEEHFNSGYNHLDNAESSEKHDLSHGLL

SEQ ID NO: 83229 - protein, 182 aa, Gossypium hirsutum
  unsure (1)..(182): unsure at all Xaa locations
  Clone ID: GOSHI-09MAY01-C132085_1.pep
EIGDFWGDYADGKGEAEYIANGDYSCYTNDKYSRFSNDYSVSENEKNQSLPSSSLPSAGFIEHPVSRFDTLAGVAIKYGVEVXNIKKMNGLVTDLQMFALKTLQIPLPGRHPPSPCLSNGSETPGQSSANQSPGPNLPSDLRGSFQSLRLKTPPRRVSPAMSSLPGYYGLKPSEKNCGVLRF

SEQ ID NO: 83230 - protein, 184 aa, Gossypium hirsutum
  unsure (1)..(184): unsure at all Xaa locations
  Clone ID: AI729452.1.pep
MQMERERRNIANGDYSCYTNDKYSRFSNDYSVSENEKNQSLPSSSLPSAGFIEHPVSRFDTLAGVAINYGVEVXHIKKMNGLVTDLQMFALKTLQIPLPGRHPPSPCLFNGSETPRSSIANQSPSSNFAFRICLAPFSSLKMKNPPPKGPPAIELLSHGFYGPYTLRRNFWLLNGFKKALSLES

SEQ ID NO: 83231 - protein, 155 aa, Gossypium hirsutum
  Clone ID: AW587515.1.pep
MSGKGGGGGNNGIGKGNNSGLSGIPPGSRKMVQSLKEIVNCPEPEIYAMLKDCNMDPNEAVNRLLSQDPFHEVKSKRDKKKESKDSVDARSRGANNLGSRGGRSGSDRYTGRGGSSHYSSNESGPSHGKPAQKRENGGFLLQGLHLLHLVCKEIT

SEQ ID NO: 83232 - protein, 108 aa, Gossypium hirsutum
  unsure (1)..(108): unsure at all Xaa locations
  Clone ID: uC-gsflmaxxa029g03b1.pep
PRFRFGSRKMVQSLKEIVNCPEPEIYAMLKDCNVDPNKAVDRXLLSQDPFHEVKSKRDMKKESRDXTEAWFCGANNHGSHGGGSGSNRYAGRGGSFHYSSNESGPSHG

SEQ ID NO: 83233 - protein, 172 aa, Gossypium hirsutum
  unsure (1)..(172): unsure at all Xaa locations
  Clone ID: AI055530.1.pep
MGASFSALFIVQDGASSSSPCLGDLPESCVASIIQHLDPPEICKLAKLNRAFSAASWADFVWESKLPPNYHILVHKILGFVPQNLGKRDIYRRLCRPNTFDGGAKKVWLHKXTGGVCMSISSKGLQITGIDDXRXXNHIPTNDPGNDLITCHDQTVRLSRRHWLFAKCFWSS

SEQ ID NO: 83234 - protein, 158 aa, Gossypium hirsutum
  unsure (1)..(158): unsure at all Xaa locations
  Clone ID: uC-gsflnu33B141c12b1.pep
SFSPCLGYLPESCVASIIQHLDPPEICKLAKLNRAFSAASWADFVWESKLPPNYHILVHKILGFVPQNLGKRDIYTRLCRPNTFDGGTKKVWLHKSTGGVCMSISSKGLQITGIDDRRYWNHIPTNESRFHSIAYLRQIWWFEVNGEVEFPFPXGTYS

SEQ ID NO: 83235 - protein, 142 aa, Gossypium hirsutum
  unsure (1)..(142): unsure at all Xaa locations
  Clone ID: GOSHI-09MAY01-C129865_1.pep
AAVDRRRRFSSSSSSNSSPDRYLDMPRTKIPKWVDDYIDQIGCVLREGGWAECDVXEIRHVSASGFFEEEMVLLDNQAVLDALLLKVDRFSDSLRKAGWSSEEVSDALGFDYRLEKEKKPAKKLSPQLVEKIGKLAESVTRS

SEQ ID NO: 83236 - protein, 145 aa, Gossypium hirsutum
  unsure (1)..(145): unsure at all Xaa locations
  Clone ID: GOSHI-09MAY01-C129845_1.pep
RNLNYLEVKENKSMLHSEAVRSTHSDGKFGGYELQSSPSALAEASERPKLKLFPRSKRLDGPKSPVVDPKQVFXSDAIQLKFEFTCELMLTHTEIGNHSHEHLHTSKPGLAGSESRNQTVDRPKLNLKRRSQPIEQLEGNIEKER

SEQ ID NO: 83237 - protein, 178 aa, Gossypium hirsutum
  unsure (1)..(178): unsure at all Xaa locations
  Clone ID: GOSHI-09MAY01-C129565_1.pep
EGKVAKMQQRLSASGRPSGTDGYDFSYRMVVDSRYQKVARTKSILRSFFLVQAITLLLGLVLLIFQSASKGLASRVLEISTTACGLISLIIGELGRKRSRVNMLRFFMVASSIAVSLLMFCAIRKGSGFMAAKSPSFWETIWALPEVAPAVVGPVFXLLSMGYTVHLIANMSVPKRAS

SEQ ID NO: 83238 - protein, 78 aa, Gossypium hirsutum
  Clone ID: GOSHI-09MAY01-C129725_1.pep
RAGLFFFRGAKSSPLLIEPSVRRSSSTCYEAPVFGGSPLLDLERRTSGQGKAQCAWCKWLSFFMIYQSEWRALPTYMI

SEQ ID NO: 83239 - protein, 136 aa, Gossypium hirsutum
  Clone ID: GOSHI-09MAY01-C129695_1.pep
VPKVSPHERIVVKKLGLRGVYACVIQYGYADSLNLEGDNFVSQVLDSLQEHIENCSSLPSDHMPVQEEISELSEAKTAGVIHVRGKARFHIGKSTSFFDRFMLAFYEVLHKNCRPALPVLGVPLPQCLEVGMFYEA

SEQ ID NO: 83240 - protein, 211 aa, Gossypium hirsutum
  unsure (1)..(211): unsure at all Xaa locations
  Clone ID: GOSHI-09MAY01-C124585_1.pep
TLLLVSQLKEPKFXYCLTAMDETQKSLLLMGSIASANESLGEMRTTPLIRNPSQPSFYYLSLQGITVGSTRLPIKESTFALEDNGSGGVIIDSGTTITYLEQAAFGVLKKAFILEMKLPVDTLSSTGLDLCFTLPSGSTQVEVPKLVFHFDGADLDLPAENYMIADSSSRVICLAMGGSSGMSIFGNVQQQNMLVVHDLEKGTVFLIQTQC

SEQ ID NO: 83241 - protein, 57 aa, Gossypium hirsutum
  Clone ID: GOSHI-09MAY01-C124185_1.pep
FSIHFNKYTAAREQTPSLQLDQKRGWSCEPILAMGSALALACKPFPFHLGIIYLERD

SEQ ID NO: 83242 - protein, 129 aa, Gossypium hirsutum
  Clone ID: uC-gsronu33B132g11b1.pep
MKLKHHSSITLLPLLSLIFLPSLVSSQACQRTCGNLPIKFPFGTGPGCGDPRFQQYVTCDQQKLTLTTHTGNYPITNIDYSNQVIYISDPSMSTCGCSQPSKGFGLDWDAPFSFTDDNVFTLLDCSTTS

SEQ ID NO: 83243 - protein, 63 aa, Gossypium hirsutum
  Clone ID: uC-gsronu33B132g05b1.pep
NPLNFPFLNKWGLMLVARYWQLMPLGHHGMHRIHRSRMWLRGSALSTVCNLRPTKTHLDNTHR

SEQ ID NO: 83244 - protein, 246 aa, Gossypium hirsutum
  Clone ID: GOSHI-09MAY01-C125265_1.pep
MLSFILLALLAHASPIQCKHPHPKINIIILAGQSNMAGRGGVFNDTITETLTWDGIVPPECQPNPSILRLTANLTWVEAHEPLHADIDYNKTNGAGPGMPFASTVLNKDPNFGVIGLVPCAIGGTNISQWQKGEFLYEQLVKRSQFAMQSGVYRAMLWYQGESDTENQQDAELYKDNLKRFFNDLRFDLKTPKLPIIQYVSFRARGLYKGNERSSVKDRHAVCEMCGRQGSPTRTKWVAPHHSSPI

SEQ ID NO: 83245 - protein, 203 aa, Gossypium hirsutum
  unsure (1)..(203): unsure at all Xaa locations
  Clone ID: GOSHI-09MAY01-C126845_1.pep
MEDSAGGASLRSGPDGKKRRVTYFCEPAIGDYYYGQGHPMKPHRIRMAHNLIVHYSLHRRMEINRPFPAGPDDIRRFHTEEYVDFLNAVTPDSISDPAXSRHLKRSNVGEDCPVFDGLFGFCXASAGGSIGAAVKLNKGDADIAINWAGGLHHAKKSEASGFCYVNDIVLGILELLKYHRRVLYVDIDVHHGDGVXDAFYTTD

SEQ ID NO: 83246 - protein, 112 aa, Gossypium hirsutum
  Clone ID: GOSHI-09MAY01-C120935_1.pep
SLSSAWYTETKLCQGSMPKFYQGHRNTTVLVLPLSGQIQNGTGLIMAVQEQQQRTGNIPLRLRVSQPVRVKLGKLKLMKVKFSVRCGLVVDALSANNTVTIQSSSCKFRLSL

SEQ ID NO: 83247 - protein, 259 aa, Gossypium hirsutum
  unsure (1)..(259): unsure at all Xaa locations
  Clone ID: GOSHI-09MAY01-C120675_1.pep
LSHNEILRLANLFVTSGVDKIRLTGGEPTVRKDIHDICSDLSSLKGLKTLAITTNGITLAKKLPMLKQCGITNLNISLDTLVPSKFEFMTRRKGHHKVIESINAAIDVGYNPVKVNCVVMRGFNDDEICDLVNLTVDKPINVRFIEFXMPFDGNVWNVKKLIPYSEMLHTVVRXKKFPTLKRLCDHPTETAKNFQIDGHVGTVSFVTSMTKHFCAGCNRLRLLADGNLKVCLFGPSEVSLRDPLRSGAGDEELREIIGT

SEQ ID NO: 83248 - protein, 115 aa, Gossypium hirsutum
  Clone ID: GOSHI-09MAY01-C121725_1.pep
MGSQQAGEPFKVYRVLLKAVKNHIGKEEYKKRGSQYIAEQFRKNSQLSDPSLVAQRIKLANDYTYLLNSGHHHKDLLVSYNITGDRSDEMKRIPGKSAASVGLKLPEVYHLDVGG

SEQ ID NO: 83249 - protein, 63 aa, Gossypium hirsutum
  Clone ID: GOSHI-09MAY01-C121305_1.pep
ITVALTQPWRQLVDDRLVHKHARCGACPGHISFLDRHSEVGRSLAVLSFISAQNTACVGGSMG

SEQ ID NO: 83250 - protein, 175 aa, Gossypium hirsutum
  Clone ID: GOSHI-09MAY01-C122895_1.pep
MTRCSRCCLHYSMKIVNLIMNFLGIAIIVYSLWLQKKWNIGVAQLLSFPSIPNPWFIYTCFGVGIAVCLSSLFSFIVSNCISTSVLCIYIFSVCSLLLLEIAVIVTILFKNDWSSLISKYIDENHEFFKNFVVFHEKMCRLITLLILVPQVGVIAFAIILWGGGIESYPRGCHPD

SEQ ID NO: 83251 - protein, 137 aa, Gossypium hirsutum
  Clone ID: GOSHI-09MAY01-C122545_1.pep
MPGNQEVMWPRLVANKILRKRLGSNNFVADFPCNKEIPSLDRPSLSPNSIFSHHKDTHNYRIFVSTWNVGGVAPPEDLDIEDLLDTGNTSCEIYVLGFQDIVPLSASNVLGSENSMVAMKWNSLIRRALHNKKKPHC

SEQ ID NO: 83252 - protein, 155 aa, Gossypium hirsutum
  unsure (1)..(155): unsure at all Xaa locations
  Clone ID: GOSHI-09MAY01-C123855_1.pep
LRLRDYIDITPLAVLDTDLEVDGAVAAAGEAIRQKNMVPDGILVATPDYTAPLTAPLKSALGWPSGPPNVWADIAGAIGSAGGGLARARSHYHVGQVGLHLDLHSMNKPEVYXNASQPAGNCDSDGHLIDEGIKERMNHVLVFLLAFTLRLRPNH

SEQ ID NO: 83253 - protein, 60 aa, Gossypium hirsutum
  unsure (1)..(60): unsure at all Xaa locations
  Clone ID: GOSHI-09MAY01-C118824_1.pep
FASAHASAQCTRDLSSSECXKCLDGLIVELPTCCDGKEGGRVVXGGSCNFRYEIHPFVNA

SEQ ID NO: 83254 - protein, 166 aa, Gossypium hirsutum
  unsure (1)..(166): unsure at all Xaa locations
  Clone ID: GOSHI-09MAY01-C118644_1.pep
FASAHASDPLVQKITDLYDQISTLDSLKPSKDVNMLFTQLVLTCMPPTHIDVTKLCKKVQQMRSXLIRLXGEAEGLLETHFSTILASYDNPLHHLNIFPYYTNYLKLSQLEFNILTKHCSNVPNQVAFLGSGPLPLTSIRLASXYLKTTSFHNYDIDPSLIRKLFD

SEQ ID NO: 83255 - protein, 126 aa, Gossypium hirsutum
  Clone ID: GOSHI-09MAY01-C119854_1.pep
RASSRPKRPISDDEVAWLAKLLIWLSSWLNESLGLNRPEDNDVGSKWFYVNIPGDAVNLNGSGEIVKTLVCLIGSWLLMMGTTTTRLMRKHGLRINLRVLASKKVVMVLLIFVVFSVLKKACGLFH

SEQ ID NO: 83256 - protein, 199 aa, Gossypium hirsutum
  unsure (1)..(199): unsure at all Xaa locations
  Clone ID: GOSHI-09MAY01-C119464_1.pep
MTMYQQDSDFVHWVLGGDPFYHSVYNNDMVRQDAGDIYHHTHYFRGHSHTDTQSSQIENDEVIARTLQEEFSHLAVAEASEFSHAGEEQSQASCEPHDWLTPSTTDYCYSGYEYGRDESDDLVPHSSCSSSSPSDSEDFSGSLELTEGYLLDDEVGMRLNQMVPIPHGPRINGEIPSXDEAMSDHERLLSRLQVYGFME

SEQ ID NO: 83257 - protein, 139 aa, Gossypium hirsutum
  Clone ID: uC-gsflnu33B076e05b1.pep
GGRAGESGGPHAVLTPAPRRRRGRTSDRRTRGDTRHTGGRKRNRQRVREDMARTLQEEFSQLAAAEADEMSHAGEEQAQASCEPHDWLTPSTTDYCYSGYEYGRDESDDSVPHRSCSSPSPSDSEEYPGPLEQTEGKIT

SEQ ID NO: 83258 - protein, 203 aa, Gossypium hirsutum
  Clone ID: GOSHI-09MAY01-C114414_1.pep
GMLLDEGDSGFPREEDTNNADFEEDQASLHLRDSDEETENDSVMMEGDNMTREQIEDEIKKIKEAHAEDEEFPDEVDTPLDVPARKRFAKYRGLKSFRTSSWDPKESLPPEYARIFAFDSFARTQKHVVAQALKVEQEGRDDCAPVGSFARFYIKEVPFHVASNLCVASRTAPIVLCGLLQHESKMSVLHFSIKKHDRYDAPI

SEQ ID NO: 83259 - protein, 215 aa, Gossypium hirsutum
  Clone ID: GOSHI-09MAY01-C114764_1.pep
HLLESPGKKVGIVGLGGLGHVAVKMAKAFGHQVTVISTSPSKENEAKQRLGADYFLVSTDAKQMQGGKRSLDVILDTVSAKHSLGPILELLKVNGTLVVVGAPDRPIELPAFPLIFGKRAVKGSMTGGMKETQEMMDVCGKHNITCDVELIKPDKINQALDRLARNDVRYPFCYRHCPEPLSFEDRISVPLHVPWQSIHLYPIWLHSTLQRVLLV

SEQ ID NO: 83260 - protein, 155 aa, Gossypium hirsutum
  Clone ID: GOSHI-09MAY01-C115854_1.pep
MENPTQVQHAEDEDEHIFRSKYPPVSVPDNLTLPEFVLQDAELYADKVAFVEAVSGKSYTYRDVVRDTRRFAKALRSLGLRKGHVVLVLLPNIAEYGIVALGIMAAGGVFSGANPASHPSEIKKQADAANAKLIVTNGPNYEKVKNLEQPVRVIG

SEQ ID NO: 83261 - protein, 100 aa, Gossypium hirsutum
  Clone ID: GOSHI-09MAY01-C115764_1.pep
MCFSPTQWSMAAVARSFCKSVDVYDQDIHLRTLRTLWYPSSLSFMRNLGHGNESSILAVTEGCQLSVWDLRIKENGGCLNRICGSAGDIFYAVCSLQLVI

SEQ ID NO: 83262 - protein, 157 aa, Gossypium hirsutum
  Clone ID: GOSHI-09MAY01-C115724_1.pep
FEAEAAMLGQPMSMVLPGVVGFQLSGILSNGVTATDLVLTVTQMLRKHGVVGKFVVFYGDGMGELSLADRATIANMSPEYGATMGFFPVDHVTLQYLKLTGRSDETVAMIESYLRANNMFVDYDEPQQKRVYSSYLELNLAEVEPCISGPKRPHDRV

SEQ ID NO: 83263 - protein, 178 aa, Gossypium hirsutum
  unsure (1)..(178): unsure at all Xaa locations
  Clone ID: GOSHI-09MAY01-C115604_1.pep
YSSAPPHLLIRRRLPSFTRLLTLSLHPHDNPHDARRRSSAVSRRAVLLTPFLAAAGSLLLQQSQSLAEEITPPSPPVTSPPPKVVVEEALVSARIYDATAIGEPLAVGKDKSRVWEKLMNARIVYLGEAEQVPIRDDXELELEIVKNLENRCVENQRPVGSGSRSFPSDFQTHSISYA

SEQ ID NO: 83264 - protein, 204 aa, Gossypium hirsutum
  Clone ID: GOSHI-09MAY01-C115344_1.pep
GWFRPDITDTVMAPLLRFLNGTKSFFFIDVYPYLAWSANPKNISLDFALFRSRVNQTDHGSHLVYTNLLDQMLDSVIFAMRKLGYPDIRLAIAETGWPTIGDIDQVGANINNAATYNRKLVQKMTAKPPLGTPARPGSVTPTFIFSLYDENQKTGPTTERHWGLLRSNGTPIYEIDLTGKRPLSSYKPLPAVRNNVPYKGKVWR

SEQ ID NO: 83265 - protein, 156 aa, Gossypium hirsutum
  Clone ID: GOSHI-09MAY01-C116574_1.pep
METISVPKFIFFFITAMFMSINLIHCTITYDKKSIVINGQRRILISGSIHYPRSTPDMWESLIKKAKNGGLDVIDTYVFWNGHEPSPGNYNFEGRYDLVRFIKTVQKMGLYVHLRIGPYVCAEWNFGGFPVWLKYVPGISFRTDNEPFKRAMQGFT

SEQ ID NO: 83266 - protein, 134 aa, Gossypium hirsutum
  unsure (1)..(134): unsure at all Xaa locations
  Clone ID: GOSHI-09MAY01-C116414_1.pep
MGLRDIGATLPPGFRFYPSDEELVCHYLYKKIANEEVLKGTLVEIDLHTCEPWQLPEVAKLDANEWYFFSFRDRKYATGFRTNRATTSGYWKATGKDRMVMDSRTQEVVGMRKTLVFYMNRAPNGIKTGXWIMH

SEQ ID NO: 83267 - protein, 143 aa, Gossypium hirsutum
  Clone ID: GOSHI-09MAY01-C116114_1.pep
MDDDALNMRNWGYYEPSFKGHLGLQLMSSMAERDTKSFIPMRNPNLMVTPNAAFHPRDCIVSEAPNPMNYVRDSWISQREKFFNMLPGISPNYGILPETSAAHSLPILQPSPNSSTRDERVVGRVVEPPATKESVELKKRQSE

SEQ ID NO: 83268 - protein, 111 aa, Gossypium hirsutum
  Clone ID: GOSHI-09MAY01-C116204_1.pep
LGPQRSLPRVGFMIVRRIGALILRRISQLPLPDRTLFHSSAASNRRFSNHFVDDDEGGSAIYRLALKFQRPTTVEVEPSSRNRISLIGTVDEPLKVMNTRSDNFGVQTRLN

SEQ ID NO: 83269 - protein, 73 aa, Gossypium hirsutum
  Clone ID: GOSHI-09MAY01-C110734_2.pep
PSSCKLFTVSYRHCFGVSIKLNTKQLLCFSQLNMNSREPSQKIALGGLEINHKLLGGPKCNFTVILACNFIKI

SEQ ID NO: 83270 - protein, 115 aa, Gossypium hirsutum
  Clone ID: GOSHI-09MAY01-C110734_1.pep
MKFIGCFLVFLAILGIALLNVAEGAGECGRSSPDREAWKLAPCAMVAQDSNAPVSSSCCQQVKKIGQNPRCLCAVMLSNTAKSSGIKPEIAITIPKRCNIADRPVGYQCGEYTLP

SEQ ID NO: 83271 - protein, 270 aa, Gossypium hirsutum
  unsure (1)..(270): unsure at all Xaa locations
  Clone ID: GOSHI-09MAY01-C111804_1.pep
PAEHIYSLTASGNIFLFASNSQKAVIAVNLVSKAVKKIRXCPLGPRGTSSWRRSGMKLVPESSDSGHFRFLFVELVGNSPAVFEYNSETEKWQCREAREGKGNFAGNDCMFLNAHNAPQESLVVAIGSEYIPPKILRPRFGNREQQASWVNVNDRRHVYGDGHVMIMRSRDQRRAKVLCSIEVWGISLRSGNWEYVSNVPSEIMEQIGKPYGVMIGCLEARNGRIRVVLMSNYEGSWDIIWLTYHQQSGVWNWVLLPDCKKKGANLAGIT

SEQ ID NO: 83272 - protein, 150 aa, Gossypium hirsutum
  unsure (1)..(150): unsure at all Xaa locations
  Clone ID: GOSHI-09MAY01-C111164_1.pep
DLREVTRGPPKLERWTSHEKRDYNINSKSSTSSKLKEIENINNVGSSGSYKISDESSKSIEPAENHHSVSDDNGVCELEIRDADTRPSDTVEKLKKRSERVKLPMPXEKDTVAIKRMESEAMPSAKTERTPFDSDIKQERPARXRRWVSN

SEQ ID NO: 83273 - protein, 108 aa, Gossypium hirsutum
  Clone ID: GOSHI-09MAY01-C111254_2.pep
KVFAPRVRLLGLFAFACSSASAYDPSPLQDFCVAIKDIKNGVFVNGKFCKDPKLAVAEDFFFSGLNRPGNTSNPVGSNVTMINVDIIPGLNTLSISLVRIDYSPYGCN

SEQ ID NO: 83274 - protein, 229 aa, Gossypium hirsutum
  Clone ID: GOSHI-09MAY01-C111254_1.pep
QPAKSAYIIVKGIRSILIALGLFAFACSSASAYDPSPPRVRPRARKDITNGVFVNGKFCKDPKLAVAEDFFFSGLNRPGNTSNPVGSNVTMINVDIIPGLNTLGISLVRIDYAPYGVNPPHTHPRGSEILLVVEGTLYVGFVTANPDNRLFTKILNPGDVFVFPFGMVHFQFNIGKTAAVAFAGLSSQNAGVITIANAVFGSNPPINPDVLAKAFQLNKNVVKYLQSRF

SEQ ID NO: 83275 - protein, 134 aa, Gossypium hirsutum
  Clone ID: GOSHI-09MAY01-C112884_1.pep
PTRSPTRRVRVCAKMGLIPMRNIHILLVFTVTIVLLETNGCKAAFLVKSNFSYKCKGRLNECRIAEALDSELELELDMVMNSNVVRILQSSNTPVTSNTGNRNTPVQQTCPSPQYASCLATGGRANCRGTYCRG

SEQ ID NO: 83276 - protein, 59 aa, Gossypium hirsutum
  Clone ID: GOSHI-09MAY01-C112814_1.pep
LGLCYSESLYLIRITKIVLCRYRGLSIIGFISCSVACIRGIFCFNPLFFTLFIYVFLAG

SEQ ID NO: 83277 - protein, 50 aa, Gossypium hirsutum
  unsure (1)..(50): unsure at all Xaa locations
  Clone ID: uC-gsflnu33B051c03b1.pep
REAEDLQGLTCEERWVGYTHCKIQLLYDYEISSYLICVFSTACXKNFFAF

SEQ ID NO: 83278 - protein, 52 aa, Gossypium hirsutum
  Clone ID: uC-gsronu33B138c06b1.pep
TKEPQKANKLSYMLQRIHKLDMTKSHNHIIIESYNECIHPPFLTSKTLKVLC

SEQ ID NO: 83279 - protein, 97 aa, Gossypium hirsutum
  Clone ID: GOSHI-09MAY01-C113414_1.pep
HVIFPLIFPSLERNSQNHGNQAVLNLTQNIRKMFCEMDEELLLACQHKLEEENSQLIEAAEKRKLAWERLETTAAAFKPAATNNVPPVKPATPPVAC

SEQ ID NO: 83280 - protein, 142 aa, Gossypium hirsutum
  Clone ID: GOSHI-09MAY01-C113764_1.pep
MGAFLEIILALPRRKSWYGDDFFLYQGFWCYSFFIEGVMSAQQNFQSQPSDIVICSAPKTGTTWLKSLTFAIVTRTTFDDSTNPLLANLSHDCVPLLEVDLAQSSTNRDPKNPLLATHAPYSSLPRSIIDSSCKIVYIWRDP

SEQ ID NO: 83281 - protein, 188 aa, Gossypium hirsutum
  Clone ID: uC-gsronu33B129c02b1.pep
DRKWNRFESLVRFNPKREFRNGTDLIWQIPDSPKAVLFLAHGCSCRAVNFWDKSHKCPECVGLPEDRLLVLHALARKFAVLTISSVGECWTFGKERLIVEDIITWWVNRQKLGKLPLVALGASSGGYFVSAIANDLKFSSITLMIAEGLFDRMDIKEDYPRLINIQHQSGLVVIDGWLKLTAPAQTAV

SEQ ID NO: 83282 - protein, 155 aa, Gossypium hirsutum
  unsure (1)..(155): unsure at all Xaa locations
  Clone ID: uC-gsronu33B164a01b2.pep
LFITGVALSRLKLNPATKGHPVWYDGRREVHIHPSSINSSLKSFQHLFLVFLEKVETNKVFLRDTTIISPFSILLFGGLINIQHQSGLVVIDGWLKLTAPAQTAVLCKELRSALHSILKELIRKPENATIVDNEVVKSMIHLLLEEDXPSNSSAL

SEQ ID NO: 83283 - protein, 125 aa, Gossypium hirsutum
  unsure (1)..(125): unsure at all Xaa locations
  Clone ID: GOSHI-09MAY01-C108994_1.pep
MGVYLSTXPDSEKFSDDGENDRLRFGLSSMQGWRATMEDAHAAYPDLDSMTSFFGVYDGHGGQAVSKFCAKYLHQQVLQHEAYSAGDIGTSLQKSFLRMDEMMRGQRGWRXLTVLGDKMTRFLAY

SEQ ID NO: 83284 - protein, 217 aa, Gossypium hirsutum
  unsure (1)..(217): unsure at all Xaa locations
  Clone ID: AI729507.1.pep
SGGSDFQASGAYIFRPDGESPTVVSRSVPLNVTRGPLVDEVYQQFNEWIYQVTRLYKDKEHAEIEFTIGPIPLDDGVGKEIITQLTANMVTNKEFYTDSNGRDFLKRVRDFREDWNLTVTQPVAGNYYPINLGIYTVDKKSELSVLVDRATGGSSIXDGEIELMLHRRMLYDDSRXVGEXLDESVCVXNTCEGLTIPRNYYVSIXRKGEGXRWRRTT

SEQ ID NO: 83285 - protein, 113 aa, Gossypium hirsutum
  Clone ID: LIB3083-061-Q1-L1-H1.pep
ILVSKGKNFFKKGGKVQKKWNLTGTSPGTRNYYPNNLGIYTVDKKIELYALVDRATGRSSIKDGEIELMLDRRMLYDDSRGVGEALDESVCVGNTCEGLTIRGNYYVSIDRKG

SEQ ID NO: 83286 - protein, 111 aa, Gossypium hirsutum
  Clone ID: GOSHI-09MAY01-C108634_1.pep
VKSGAETVKKTESERREDVPSAIAISRIAVPLVTRSTLEVVIPDYAVPKLIAKSKTKLAQISELSGANVTLVEDRPNETQKIIQISGTLEQSERAQSLLQGFILSTQEDGP

SEQ ID NO: 83287 - protein, 90 aa, Gossypium hirsutum
  Clone ID: GOSHI-09MAY01-C108304_1.pep
IRIQCLFNLFLLAARIESPSFHISPLKNRKPYHFAGHCKGFHCQNPSGLLQISQCSNLSQKQEISQIVDSRRLDVDAWEIAVRPLVLLLR

SEQ ID NO: 83288 - protein, 90 aa, Gossypium hirsutum
  Clone ID: GOSHI-09MAY01-C109904_1.pep
MMGCGAAAGTQDSRRGEEGIEGQAEDAESAYVDPERMVSSGPSCKACRTRVASVVLLPCRHLCLCTECDRVAQACPLCLAVRNSSVEVFL

SEQ ID NO: 83289 - protein, 179 aa, Gossypium hirsutum
  Clone ID: GOSHI-09MAY01-C109574_1.pep
SKDIQALLDFIQHMDHSRALKWSKQDSVCNAWVGVACNNDHSRVIGLHLPGMGFHGPIPRNTLSRLSALEVLSLRSNAISGSFPSDFAQLKNLTTLYLQFNNFSGPLPDFSIWNNLTILNLSNNGFNGSINPSVSKSSHLTALNLSYNSLSGDIPDINIPSLQQLDLSNNNLTGSSQTP

SEQ ID NO: 83290 - protein, 260 aa, Gossypium hirsutum
  Clone ID: GOSHI-09MAY01-C109624_2.pep
KNANTTIINLKGILIGNAVPRVRPRVRGMYDYLASHALISDETANGIEKHCNFAPKDDSESSSECDAATDEAGQNIYYVDIYNIYAPLCHNSSLTIRPKEPSVANFDPCSDYYVYAYLNRVDVQEAMHANVTKLDHDWEPCSDIIRRWGDSPSTIIPLLQELMANGLRVWIFSGDADGRIPVTSTKYSIKKMKLAVKTKWHPWYLDGEVGGYTQVYKGDLTFATVRAAGHQVPSFQPKRALSLIKHFLDGSPLPDTLNYN

SEQ ID NO: 83291 - protein, 239 aa, Gossypium hirsutum
  unsure (1)..(239): unsure at all Xaa locations
  Clone ID: AI055151.1.pep
YAANVLFLESPAGVGFSYANTTSDYDDSGDSKTAVDNYVFLLNWLERFPEYSIRKFYIAGESYAGHYVPQLAHTILQHNKNANTTIINLKGILIGNXAVINDETDVKGMYDYLASHALISDETANGIEKHCNFAPEDDXESSRECDAATDEAGQDIYYVDIYNIYAPLCHNSSLTIRPKEPFRGXXDPMSDXLGYAYLNRDVSRAMXACNKLDMMGPCTHQRWRCLNIPFQIWYLEWIG

SEQ ID NO: 83292 - protein, 66 aa, Gossypium hirsutum
  Clone ID: GOSHI-09MAY01-C109124_1.pep
NYIHLILSQSSFGLFFKWIISSTNVPHHEETKNANLGVKYINLCQLGLFFSLGLKVCHTERFKPRL

SEQ ID NO: 83293 - protein, 104 aa, Gossypium hirsutum
  Clone ID: GOSHI-09MAY01-C104554_1.pep
NGGFLLKMVFPVSLGSKKKKKMKKNKSKKNDPNTNSNSKVSPKPTVADASGKTVDKDWWKKRSGSSESESSGSTVRSGSTKSIRSSSSGSGRSLPEHQHYSPQA

SEQ ID NO: 83294 - protein, 44 aa, Gossypium hirsutum
  Clone ID: GOSHI-09MAY01-C104034_1.pep
EVISDEFAFGSNATGLVKPWEGERIHEECGSDDLELTGGRGKTR

SEQ ID NO: 83295 - protein, 79 aa, Gossypium hirsutum
  Clone ID: GOSHI-09MAY01-C104384_1.pep
MEVANTKTTPYPQSESSSETHNPNEATTKSLTLLKSCTIHHHMVVSYKECLKNHAASLGGHALDGCGEFMPSPTSTPTD

SEQ ID NO: 83296 - protein, 159 aa, Gossypium hirsutum
  unsure (1)..(159): unsure at all Xaa locations
  Clone ID: GOSHI-09MAY01-C105954_1.pep
MIAAESVVPKHKLKIKFPILRIESVSAPQSLEFGQQLSSSFDGKRKSYPGNSKETYGASKRRPEGVIMGGPQEKRRKMDRSMTQQCTTLLNALMKHPAGWVFNQPVDPIALKIPDYFSIIKNPMDLGTIKSKLGKDAYLGIGALAAXDLDWTFSNAMLY

SEQ ID NO: 83297 - protein, 371 aa, Gossypium hirsutum
  unsure (1)..(371): unsure at all Xaa locations
  Clone ID: GOSHI-09MAY01-C106994_1.pep
MCSIAASDSPLCTAIFFLSSKKVWIWTENSQVMTAAVERGWDTFIFSSLNQGLANEWSKIALIDPLFIKEREIFYNAGERVATIFQVSTPSELKKLHPEAHHVENVVIDLLDWQVIPAENIVAEFQGSKTTVFAVSKSPAEAQLFLEALEHGLGGVVLKVEVVKAVLDLKEYFNRRNEVHNRLSLTKATITQVHAVGMGDRVCVDLCXLMRPGEGLLVGSFARGLFLVHSECLESSYIASRPFRVNAGPVHAYVATPGGLTSSLAELQAGKEVMVVHLSGKMRTAIVGRVKIETRPLILVEAKIDANDQTVYSILLQTAETVALVCPHEGNRTQKTVIPVTSLKAGDEVLLRLQGGARHTGIEIKEFIVEN

SEQ ID NO: 83298 - protein, 77 aa, Gossypium hirsutum
  unsure (1)..(77): unsure at all Xaa locations
  Clone ID: AI728412.1.pep
MSQQRQFQMVGGSNNPXAGQYNDTTFTKIFVGGLAWETQRDTMKRYFEQFGEIIEAVVITDKNTGRSKGYGFVSFKD

SEQ ID NO: 83299 - protein, 96 aa, Gossypium hirsutum
  Clone ID: LIB3543-021-Q1-K1-F1.pep
VLHECLRKLWHLIDLIIQTYFLFPFAILLYLASVVVDFCIGLPFILFLQSLSPWFTWSMSQQREFQMVGGNNPEQFNDTTFTKIFIGGLAWETQRD

SEQ ID NO: 83300 - protein, 123 aa, Gossypium hirsutum
  Clone ID: LIB3543-011-Q1-K6-D6.pep
RPAEICNGYILQIGNAWIDDNICTKGRFDYLWTHALNSDETNEGVNKYCNFASQDLVTNKAVAKNATDQCDQYQSRALTEMGDIDLYGIYSPLCNSSAIKPGSDGNVSITMLHNKSFTKTMKK

SEQ ID NO: 83301 - protein, 165 aa, Gossypium hirsutum
  unsure (1)..(165): unsure at all Xaa locations
  Clone ID: uC-gsflnu33B018h06b1.pep
IAIGNAWIDDNICTKGLFDYLWTHALNSDETNEGVNKYCDFASQDLVTNKAVAKNATDQCDQYQSRALTEMGDIDLYGIYSPLCNSSAIKPGSDGNVLNFDPCSDVHVKSYLNLAKVQAALHAKATKWSACSGVGWTDSPTSTLPEIRDLAKVIRVWIYSXDTDG

SEQ ID NO: 83302 - protein, 281 aa, Gossypium hirsutum
  Clone ID: GOSHI-09MAY01-C107554_1.pep
MQSSTALEPLLFTAHLSTMLKLLNKRIKRLCSRLRWPIRRRSRSVVVIRRLGKLNSKARTDSITKDRAIVVNGSSKVHQDGHSRRPVNSSRPIRVATFNASLFSMAPAMPKADKSSSFDYDNVYKWSPEKLLKQSPLHPSSMNDKENLSQQQKFVKSKLRVSINLPDNEISLLRNRQLSFAEQGKDGSSSAAAGKAWRGKAPLRSAVTFPTNMGNGIEGCESYRSRKTVLEVLRELDADILALQDVKAEEEKAMKPLSDLAAALGMNYVFAESWAPDMATP

SEQ ID NO: 83303 - protein, 63 aa, Gossypium hirsutum
  Clone ID: GOSHI-09MAY01-C107494_1.pep
LVSGRSSVKIYHANTEGYVAQVGNMLVIKLGHFDWNPSKENQLDGRWQKFIDKGADYQIWLRQ

SEQ ID NO: 83304 - protein, 165 aa, Gossypium hirsutum
  Clone ID: GOSHI-09MAY01-C107294_1.pep
MAVSLSHVSYSSTFTSSASKTRVSGPSLSPHSIKVPTFSSLTVKPLNSSFTPHGARAITIAPHATSTPSSIPSDTSTTTFHGLCYVVGDNIDTDQIIPAEYLTLVPSNPDEYEKLGSYALIGLPSSYATRFIEPNETKTKYSIAIGGASFGCGFSREHAPGALGA

SEQ ID NO: 83305 - protein, 144 aa, Gossypium hirsutum
  Clone ID: GOSHI-09MAY01-C100954_1.pep
AFWELASLEVEDAVVQALGRHKRLGLLHQSVSDSKSPGDPKLIDAFELSEEEREDVLFKEAWLTYFWRRAKVYGVEDDIAEERLEFWISHIGQTPPSHDAVDVDRGLYELQKLGIDHQLWEASRKGIDHPALASLSNPKDLANT

SEQ ID NO: 83306 - protein, 60 aa, Gossypium hirsutum
  Clone ID: LIB3825-026-Q6-K6-F8.pep
NLQKLNQKHKFHKKTKNPILIFALHKKNYMLRIKKKKRRPNFDKAKLKKEREISNFLEEK

SEQ ID NO: 83307 - protein, 60 aa, Gossypium hirsutum
  Clone ID: uC-gsflmaxxa090e12b1.pep
MLRKIVAEIKEREKKMVGKDVDDDDLKELSIIIVHEGPSLSRFLDAYPIREPLRIPSFLF

SEQ ID NO: 83308 - protein, 270 aa, Gossypium hirsutum
  unsure (1)..(270): unsure at all Xaa locations
  Clone ID: GOSHI-09MAY01-C100724_1.pep
MGVDYYNVLKVEKNATDDDLKKSYRKLAMKWHPDKNPNDKKEAETKFKQISEAYEVLSDPQKRAVYDQYGEEGLKDMPPPGSXGRLSERGTGGPNGFNPRNAEDIFAQFFGSSPRPRGPSGPTRSARFHSDGAKFGGFNSTDNIFRSHNEATAPRKPPPVESKLPCSLEELYTGSTRKMKISRTVVNAAGRQVQESEILTVDVKPGWKKGTKITFPDKGNEQPNQLPADLVFVIDEKPHDLYKRDGNDPVVNQRVLLAXGTWGTTVNLVT

SEQ ID NO: 83309 - protein, 119 aa, Gossypium hirsutum
  unsure (1)..(119): unsure at all Xaa locations
  Clone ID: GOSHI-09MAY01-C100674_1.pep
MMVKVAGLGKILGPRGLMPNPKAGTVTPNIPQAIEEFKRGKVEYRAXETGIVHIPFGKVDFLEDDLLVNLLAAVKSIETNKPKGAKGVYWKSAHICTSMGPSIKLNIREMLDYKPPSNV

SEQ ID NO: 83310 - protein, 102 aa, Gossypium hirsutum
  Clone ID: GOSHI-09MAY01-C100104_1.pep
LPFNLYGYSPCSPDYSNYATNYYSLYGGATGQYPVYGGGLMTGAGTAFYPYLQFGEGMAGPVYSSGQGYGVQFPHHLFPYSTGSYPQHYGAPMALAPTPPLQ

SEQ ID NO: 83311 - protein, 115 aa, Gossypium hirsutum
  Clone ID: AW187399.1.pep
MDEYCKRSGQIPAFGDWDNANELPITQYFECARKAGLIRFSSSSGESNPYVAAHDLYETANSRKHSRNLAPPKKQASRVREKGGAHVKEQKKAGRVCDVTEPPRKYYQNPHHHLS

SEQ ID NO: 83312 - protein, 66 aa, Gossypium hirsutum
  unsure (1)..(66): unsure at all Xaa locations
  Clone ID: LIB3829-030-Q6-K6-D1.pep
IQVXXTNITLTFPTPTAQTNQTRMSSAFKVLSYSQLICNVPVSKYWYLPPSHAIFIHCWGLAPTPR

SEQ ID NO: 83313 - protein, 151 aa, Gossypium hirsutum
  unsure (1)..(151): unsure at all Xaa locations
  Clone ID: GOSHI-09MAY01-C100394_1.pep
EDGDENEEDKNDSGSEKRPGFDHFNSEESNPIKSNAMRSSLWEIDTLRHHYXPTCIKFVLSLENDLTVRSKTTEMDIKDFSSGSYATIFGDEIRRRVKQVPLAFYKATPTSLFPESDFCGWPLKYEGSNEIKEQNTVEEDDASTKRQRIEC

SEQ ID NO: 83314 - protein, 166 aa, Gossypium hirsutum
  Clone ID: GOSHI-09MAY01-C100344_1.pep
ARQEVIKIFGNQNPNPEGIGKLKIMTMIINETLRLYPPVSSMVRKVVTDVQLGKLILPADLELLVPNLVLPHDPHLWGDDVNVFKPERFAEGIANATKHNSAAFIPFGLGPRSCVGMSFALMEMKMALSMILQRFPIFLSPTYSHSPFTLLLLQPQHGIQVMLHSL

SEQ ID NO: 83315 - protein, 91 aa, Gossypium hirsutum
  Clone ID: GOSHI-09MAY01-C100234_1.pep
MVEHRNGGWDGGRGYGGRGRGRGRGRGRGFRGHGRGYGGGNMQRDSGYYNGNGPSGPLPAQGRGRGRGRGRGRGGGRGQGFTPDGPFQKGA

SEQ ID NO: 83316 - protein, 74 aa, Gossypium hirsutum
  Clone ID: GOSHI-09MAY01-C101834_1.pep
MARDSCLARVTAGVAVGGAVGGAVGAVYGTYEAIRYKVPGLLKIRYIGQTTLGSAAIFGLFLGAGSLIHCGKSY

SEQ ID NO: 83317 - protein, 111 aa, Gossypium hirsutum
  unsure (1)..(111): unsure at all Xaa locations
  Clone ID: GOSHI-09MAY01-C101804_1.pep
PGVRGWIPVSLTVYAHDPFSKDAKMGDSEFEVRSFIEXALKTYTNLEEIPSGPVLSRLKPDPDNCLVDESPIYVNNEGKFIQALFLRLRNVECGEVEIQLQWIHSPGSKPF

SEQ ID NO: 83318 - protein, 88 aa, Gossypium hirsutum
  unsure (1)..(88): unsure at all Xaa locations
  Clone ID: GOSHI-09MAY01-C101484_1.pep
RTPWGVHVNHAHSCCVLLAKXEKFKVNGQWHTWIDYEKFHDLVALGRPFDSEDYMALTPSWAVYGAEEGGFDPDQSRYKKERHHKSKR

SEQ ID NO: 83319 - protein, 70 aa, Gossypium hirsutum
  Clone ID: GOSHI-09MAY01-C101034_1.pep
MQCLSVVPLEIFRWIIAAVAGFMSATFVALNLKAHITSAGERWVLIVAGIFLLQLGLAVVLKLYLFTVSV

SEQ ID NO: 83320 - protein, 91 aa, Gossypium hirsutum
  Clone ID: GOSHI-09MAY01-C102974_1.pep
FLCIQFAFVIPFTVYNRPFYSRTKRKGKREKNNKNVNTNFLFLLLLCCVILFFSQVLWMQEVLYGGRGPGDVEVVRGKPLVGARSPGWLRR

SEQ ID NO: 83321 - protein, 341 aa, Gossypium hirsutum
  unsure (1)..(341): unsure at all Xaa locations
  Clone ID: GOSHI-09MAY01-C102874_1.pep
MEQAFKRTQILTNHLLQSSPSSQTLSSNACLSYSPPELSENYAFDIKDMRKLIDRHNLEERDWLFGLMKQSKLFNPKVRGGKVFVSPDYNQSMEQQREMTLKRIEYLLEKGAFKGWLTEKGEDIEMRKFAGFEVCSIYDHSLFTKLGVHFFLWGGAIQFFGTKHHHDKWLRDTENYSIKGCFAMTELGHGSNVRGLETVTTYDSNTGEFVINTPCESAQKYWIGGAANHATHTVVFSQLHINGTNQGVHAVISPIQGXLDGSLCPNIRMVDCGHKIGLNGVDNGRIWFDNVRVPRENLLNSVADVSPDGKYLSSLENPDQRFAAFMAPLTVGRVNMLFFGY

SEQ ID NO: 83322 - protein, 50 aa, Gossypium hirsutum
  Clone ID: GOSHI-09MAY01-C102494_1.pep
NEYKIQRGYDSRGWKILEPNLTPHESTDSGPLCKFRPFSKLPTTQQHLFN

SEQ ID NO: 83323 - protein, 130 aa, Gossypium hirsutum
  Clone ID: GOSHI-09MAY01-C102024_1.pep
LKDKKLKGRVSGVSCIALDASESWLACGSGRSLSVWNLTASECISSISNSASIQDVVFDNGQILAVGADPVLNRFDMNGMILSQIQCAPQSAFSVSLHPSGVTAIGGYGGLVDVISQFGSHLCTFRSHCV

SEQ ID NO: 83324 - protein, 104 aa, Gossypium hirsutum
  Clone ID: GOSHI-09MAY01-C102014_1.pep
WQCYKSKMDSLPRNTKNNPWKDGKEQVKSLSLRWGKELNSPSKPILEEDEIPKEFDEPTEEEKANHHQPIKGIAESVSGLVITRPSTTKVLIMQEKWINGEILE

SEQ ID NO: 83325 - protein, 97 aa, Gossypium hirsutum
  unsure (1)..(97): unsure at all Xaa locations
  Clone ID: GOSHI-09MAY01-C102334_1.pep
AFCTPCTFKVIATNAGVDGEVVVEKTRKLDWKIGYNAMSGRYEDLINAGVIDPCRVSRCALQXAVSVAGVVLTTQAIMVDKIKTPKPVVPLVPGIRP

SEQ ID NO: 83326 - protein, 291 aa, Gossypium hirsutum
  unsure (1)..(291): unsure at all Xaa locations
  Clone ID: GOSHI-09MAY01-C102254_1.pep
MANSKLTTYLILIICSCFTVPSTAKTSTLVQEIKQQSQVQDKEPFVGVNLGTDVSDLLSATDLVSFLQVQKISHIRLYDANQDILKALAKTKIRVIISVPNNQLLAIGSSNTTAASWIDRYVVAYYPETLITGIAGGDERFNXTVPPSAPLLLPAIQSLYGALVAANLHTQIKVSTPHAASIILDTFPPSQAYFNQSLTSVMVPLLQFLSRTGSPLMMNLYPYYVFMENKGVVPLDNSLFKPLTPSKEMVDPNTLLHYTNVLDAMIDAAYVSMKNLNVTDVVVLVTESGWA

SEQ ID NO: 83327 - protein, 58 aa, Gossypium hirsutum
  Clone ID: GOSHI-09MAY01-C103814_1.pep
MQSTDTIMQIIAEATIPAAGAPGLNHYIVDNLDDEDMDDLDSESELDVDSSGEIVYAM

SEQ ID NO: 83328 - protein, 81 aa, Gossypium hirsutum
  Clone ID: GOSHI-09MAY01-C103674_1.pep
GYVSWDVDNARLEQVFSEHGKVVEARVVYDRETGRSRGFGFVTMSSETELNDAIAALDGQSLDGRAIRVNVAEERPRRGFF

SEQ ID NO: 83329 - protein, 224 aa, Gossypium hirsutum
  unsure (1)..(224): unsure at all Xaa locations
  Clone ID: GOSHI-09MAY01-C103114_1.pep
KISLEEASKQLEADLEEAEVAKEAEIRALDQMKMLSEXTSAARTSTSESGANVTISREEFEALSHKVEESDNLAEMKVIAAIAQVEAIKASESEVLKRLEATQKEIEDMKVATADALKRAEMAEAAKRAVEGELRRWREREQKKAAEAASRILAEAQMSTESSPQHYRLQKPNPPEKIQVHKLEKERSSISKKVLLPNISGIFNRKKNQIEGGSPSYLPGENPF

SEQ ID NO: 83330 - protein, 41 aa, Gossypium hirsutum
  Clone ID: GOSHI-09MAY01-C103004_1.pep
VLSLICQVHYFFLWALMCVQETEINMYYSKCFFTAILPMFW

SEQ ID NO: 83331 - protein, 105 aa, Gossypium hirsutum
  Clone ID: GOSHI-09MAY01-C103354_1.pep
TVNFFWSLRYKLNFKIMRRKDPTLATKCVTRKETEILAFSPQDSKSVFIRSGSSIYLYHIGSGRMEVIQYQGRGSSILSDFSKVVPYFKRAWPQSTLCCGGNSST

SEQ ID NO: 83332 - protein, 194 aa, Gossypium hirsutum
  unsure (1)..(194): unsure at all Xaa locations
  Clone ID: GOSHI-09MAY01-C134324_1.pep
LEICIGAAKGLHYLHTGSDGGIIHRDVKSTNILLDEQYVAKVADFGLSKSGLLNPDEFSTGIKGSFGYLDPEYFRCLQFTEKSDVYSFGVVLLEVLCARPAIINSHRKEEINLAEWGLIWLNKGELEKIIDPSMASQINPNSLRKFSEIVEKCLKPTGASRPXTMLDICWXDLEYTLQLQQNSGAPSTRPRTVP

SEQ ID NO: 83333 - protein, 204 aa, Gossypium hirsutum
  unsure (1)..(204): unsure at all Xaa locations
  Clone ID: GOSHI-09MAY01-C135264_1.pep
QVYDDIARGTRQKFESNRPRAVLFEGPPGTGKTSCARVIANQAGVPLLYVPLEIVVSKYYGESERLLGQVFSLANQLPDGAIIFLDEVDSFATARGGEIHEATRRILSVLLRQIDGFEQDKKVVVIAATNRKQDLDPALISRFDSMIVFGLPDEHNRRQIAAQYAKHLTESELAELAPITDEMSGXDIRDACQQAERSWASKLI

SEQ ID NO: 83334 - protein, 207 aa, Gossypium hirsutum
  unsure (1)..(207): unsure at all Xaa locations
  Clone ID: GOSHI-09MAY01-C135254_1.pep
GRHAFGDQYRATDTIITGPGKLKMVFVPEGGDKPVELDVYNFKGPGIALSMYNVDESIRVFAESSMSLAFSKKWPLYLSTKNTILKKYDGRFKDIFQDAYEKNWKDKFEAHSIWYEHRLIDDMVAYALKSEGGYVWACKNYDGDVQSDLLAQGFGSLGLMTSVLLSSDGKTLKXEAAHGTVTRHFRLYQKGQENSTNSIASIFAWTK

SEQ ID NO: 83335 - protein, 239 aa, Gossypium hirsutum
  Clone ID: GOSHI-09MAY01-C130624_1.pep
ILNSFALLPASPPSKSTPLSLFTLGVVMSLSTGLANVSLKYNSVGFYQMAKIAVTPSIVLAEFIWYKKKVTFSKVVALTVVSIGVAIATVTDLQFSLFGACVAVAWIIPSAVNKILWSNMQQQENWTALSLMWKTTPITLLFLVSMIPFLDPPGVLAFHWSFNNTSAILVSAFLGFLLQWSGALALGATSAISHVVLGQFKTCVILLGSFYLCGSNPGTTSIIGAFITIGGMSFFTYLN

SEQ ID NO: 83336 - protein, 56 aa, Gossypium hirsutum
  Clone ID: GOSHI-09MAY01-C130194_1.pep
LRYSAITSKRREAKFIISHKVKYDQSKHHIRDFQNIRTKFDENLQLIKNLITLAEI

SEQ ID NO: 83337 - protein, 283 aa, Gossypium hirsutum
  unsure (1)..(283): unsure at all Xaa locations
  Clone ID: GOSHI-09MAY01-C130084_1.pep
MSGVSLAVAPRSEPDHTIAPGEKPEHKPPRQQQQQQQQQSGVGSIMGSLRVIELQLVVFIMVFSISGLVPLLDLVFPAIASAYIIALSRFAXPSNGHVSTASQEIFQGSKLFRLYVILGTAVGLFLPLAYVLGGFARGDNHDVRSATPHLFLLSFQILTENVIGGLSLFSPPVRALVPLLYTVXEIFVLVDWIHDVWLNKTLPVNATTEXIVWHWLGERAWRLPTLLYFFYQPLFSFLIPPIPSSEQFEKVFLRRGGEIHCQMSEDKRPIMANKSLATNKKDE

SEQ ID NO: 83338 - protein, 93 aa, Gossypium hirsutum
  Clone ID: GOSHI-09MAY01-C131514_1.pep
RERERKCNRDCNSFLIISYYLRASQVKLIPCFLSCASFLCVFIEGLLGLSKFFSLHVGLVIITRLTKCIEKNMYFVYLTSHLLMCFISLWYSY

SEQ ID NO: 83339 - protein, 228 aa, Gossypium hirsutum
  Clone ID: GOSHI-09MAY01-C131374_1.pep
GPAKAPPTMCSEETPLLLSYDAAPQNLTSSLATPAVNTGIPNCTSNLALLTNSENPATDHEPVSSKTDMATDQSLLEPRALVPVPVPATNVEALTAVAVNQNFQKSELAQHRIWRPFSISEVEALVQALEEIGTGRWRDVKLRAFESADHRTYVNLKDKWKTLVHTAKISPQQRRGDPVPQELLDRVLVAHAYWAQHQLKSSKVSITIIVPELRASQNTTEAEKKGVS

SEQ ID NO: 83340 - protein, 155 aa, Gossypium hirsutum
  unsure (1)..(155): unsure at all Xaa locations
  Clone ID: AI055036.1.pep
RCQYDMLYKQRKIFDRKSVTSYPEKDMIGDKCSTAAMSDRVKFSIKSFRIPELYIEVPETATVGSLKRTVMEAVTALMXGGIRVGLLLXGKKVRDDSRALSQXGISCDDNLDALGFTLEPGPAKAPSPXCSEEPPLLLSYDATLQNLTSSLAAQL

SEQ ID NO: 83341 - protein, 209 aa, Gossypium hirsutum
  unsure (1)..(209): unsure at all Xaa locations
  Clone ID: GOSHI-09MAY01-C132094_1.pep
AIVHVTFCVLTVSFGGLKIREWKRWEDSIAEKNYDSEQVLKKKVTHVQQHAFIQEHFQGLGKNSILLGWVHSFFKQFYASVTKSDYVTLRLGFIMTHCRGNPKFNFHRYMIRALEDDFKQVVGISWYLWVFVVIFLLLNVNGWHTYFWIAFIPFILLLAVGTKLEHVITQLAHEVAEKHVXIEGELVVQPSDDHFWFNRPRIVLFLIHL

SEQ ID NO: 83342 - protein, 202 aa, Gossypium hirsutum
  unsure (1)..(202): unsure at all Xaa locations
  Clone ID: GOSHI-09MAY01-C129414_1.pep
MALLTFLPEPAAEPMKVEQPSKRGRNPVKKQKEKQPSSWDQIKNLLSCKQIEGSKVHDPSKNNQLPHHHGYSKLGSSCKSICSFNDVVHGNTRVVHRADNSPESSTVGQETGLLRRKAGNSSSTRSLSGSTKSNNSSTTYTTSSSSRAMQFRKLSGCYECPMIVDPSRYPSSKTTISACSQCGDVXPKLNLELHQLSPCISD

SEQ ID NO: 83343 - protein, 196 aa, Gossypium hirsutum
  Clone ID: GOSHI-09MAY01-C129304_1.pep
MAEVQVQAEVAPVAAASSPPPQQQQVVNGVASNNGGSVTTSLYVGDLDLSVTESHLYDLFSPLGAVVSLRVCKDSRTRRSLGYGYVNYSNTHEAARALEVLNSTLLNGKPIRIMYSNRDPTVRKTGAGNIFIKNLDKTIDNKALHDTFSTFGNILSCKIATDNTGQSKGYGFVQFDNEESAKNAIDKLNGMLLNDK

SEQ ID NO: 83344 - protein, 56 aa, Gossypium hirsutum
  Clone ID: GOSHI-09MAY01-C126214_1.pep
AFVGYGTTEASDYAVVKNSWGAKWGEKGFIRMKRNTGKAEGLCGINKMASYPTKKN

SEQ ID NO: 83345 - protein, 295 aa, Gossypium hirsutum
  Clone ID: GOSHI-09MAY01-C127574_1.pep
AASTDVIVTGAMAQYIPTLDYYSGGLPKACTMYASSECYFGLNLNPMCKPSEVSYTIMPNMAYFEFLPHDPNSAGFTRDSPPKLVDLVDVEIGKEYELVITTYAGLCRYRVGDILRVTGFHNSAPQFHFVRRKNVLLSIDSDKTDETVLQKAVENASRLLREFNASVVEYTSYADTKTIPGHYVIYWELLVKDAANSPTDDVLKQCCLAMEESMNSVFRQGRVADNSIGPLEIRVVRNGTFEELMDYAISRGASINQYKVPRCVNFTPIMELLDSRVVSTHFSPALPHWTPERRR

SEQ ID NO: 83346 - protein, 127 aa, Gossypium hirsutum
  Clone ID: GOSHI-09MAY01-C120754_1.pep
MARGRGSASQATMSAIALLLCLMVCLETIDAATYTVGGSNGWTFNTATWPKGKRFRAGDVLVFNYDATIHNVVAVNRRGYTNCTTPAGAKVYNSRKDKIKLAKGLNFFMCSTAGHCESGMKIAINAV

SEQ ID NO: 83347 - protein, 118 aa, Gossypium hirsutum
  Clone ID: uC-gsronu33B134e05b1.pep
MAQGRGSASQATMSAIALLLCLMVCLETIDAATYTVGGSNGWTFNTATWPKGKRFRAGDVLVFNYNGTIHNVVAVNRGGYTSCTAPAGAKVYNSGKDKIKLAKGLNFFMCHTAGHCES

SEQ ID NO: 83348 - protein, 141 aa, Gossypium hirsutum
  Clone ID: uC-gsflnu33B113a04b1.pep
HSYAHASAHACAHAYAQGRGSASQATMCAIALLLCLMVSLETIDAATYTVGGSNGWTFNTATWPKGKRFRAGDVLVFNYNGTIHNVVAVNRGGYTSCTAPAGAKVYNSGKDKIKLAKGLNFFMCNTAGHCESGMKIAIMQC

SEQ ID NO: 83349 - protein, 329 aa, Gossypium hirsutum
  unsure (1)..(329): unsure at all Xaa locations
  Clone ID: GOSHI-09MAY01-C122834_1.pep
MVGGGCWRDEGSLVITNTNVFAALETLRKKKKSDKDRRSKKSSSKSEKQQQKSQQEAESQVFWAPAPLTVKSWADVDDEDDDHYYATTAPPQSVWGSSEPSQSHEEKTANVEDSESEEDILDEGDDDIEEDHEHEPEIQVHPEPVLKRDPEIPAPPKEAERQLSKKERKKKELEELEALLADFGVTQKENNSNDESRDVAQEKKGGEREKKDNPPGESKSXKKKKKDKXKEGKESQDQPTSTDTTNGLDDFAGTEQTEEDXTAVDVKERLKKVASMKKKKSXEMDAAAKAAAQKAAARNCELAAAKKREEPFTTACTVKHLFCATYIRI

SEQ ID NO: 83350 - protein, 232 aa, Gossypium hirsutum
  unsure (1)..(232): unsure at all Xaa locations
  Clone ID: AI725912.1.pep
ADVDDEDDDDYYATTAPPQSVWGSSEPSQSHEEKTANVEDSESEQDILDEGDDDIQEDHEHEPEIQVHPEPVLKRDPEIPAPPKEAERQLSQKERKKKELQKLEALLADFGVTQKENNSNDESRDVAPQKKGGEGEKKDHPPGKILKLPEEXNPKDLSPEGAESPDLPTSTDTTTRPDDFAGTEQTEEDVPAVDVKERLKNVASMMKKISTTQMDAAAKAAALHAAAMSADL

SEQ ID NO: 83351 - protein, 247 aa, Gossypium hirsutum
  Clone ID: GOSHI-09MAY01-C122114_1.pep
TWRGTEICKYKGFTCDIRPDVNETAVASVDFNGAKFAGPNGYLPLDGFIDKLDDLAIFHANSNNFTGTIPYEVSKIKYLYELDLSNNQLSGDFPMNVLKATNLTFLDLRFNSIKGLVPQQVFNLDLDVLFINNNNFEQRLPENLGDTPVLYLTFANNKFTGPIPTSIGKAPNLLEVLFLNNKLTGCLPYEIGNLSQATVFDVGSNKLTGPIPYSFGCLKKIELLNLAGNEFYGEVPETVCQLKNLQN

SEQ ID NO: 83352 - protein, 59 aa, Gossypium hirsutum
  Clone ID: GOSHI-09MAY01-C123884_1.pep
QMIRNPGSIVANDFLIQLLRNLALHIEVSLSLISLNFLFLNFFELFIYLLLFLIKKKKT

SEQ ID NO: 83353 - protein, 342 aa, Gossypium hirsutum
  Clone ID: Z68154.pep
MRNAIMHSTMLLLLSGLLLAIFKTTGAEVGVCYGMKANDLPPAAEVIDLFKQKGIKRMRLYDPNPDALQALGGTNIELLLDLPSANLESVAASQANADQWVEDNIKKYNTVNFRYIAVGNEVKPTDSFAQSLFPAMQNIRTAIVNAGLGDQIKVSTATFFAAIDKSSFPPSKGSLDPEYQKLLGQVITFLRDNQAPLLVNTYPYFSHIGDPEHVPLDYALFTAPSAVVQDGSLQYQYLFDAMLDTFYSALEKAGGVSVDIVVSETGWPSDGGQATSVDNAMTYNTKLVQHVNQGKGTPKKPEKAIVAYLFAMFDENEKEPAYEKHWGLFFPKKQEKYSISFN

SEQ ID NO: 83354 - protein, 197 aa, Gossypium hirsutum
  Clone ID: S79309.pep
MMNTSRFIKCVTVGDGAVGKTCMLISYTSNTFPTDYVPTVFDNFSANVVVDGSTVNLGLWDTAGQEDYNRLRPLSYRGADVFLLAFSLISRASYENVHKKWIPELRHYAPNVPIVLVGTKLDLRDDKQFLSDNPGAISITTSQGEELKKMIGAVTYIECSSKTQQNVKAVFDVAIKIALRPPKPKRKPIKRRSCAFL

SEQ ID NO: 83355 - protein, 453 aa, Gossypium hirsutum
  Clone ID: AF034132.pep
MGRAPCCEKVGLKKGRWTAEEDVLLTKYIQANGEGSWRSLPKNAGLLRCGKSCRLRWINYLRADLKRGNFTSQEEEVIINLHATLGNRWSLIASYLPGRTDNEIKNYWNSHLSRKIHSFRRPLTQSMPVIMDLTKTAVIAKRKGGRTSEGSMKENKSCSTQKDTGSCSNKPTENVCVNEVEPFPSTPLLEKETLSTTAIEDRMVLDQHGEDKERTTHVVPSPCHDTVVEGMLGSSEERESLVTEEGTIENSMQCPSGNAEKGTGILAPHESIDSSEIEWFNDILDSELLQPSGHLTFTELGEDRWNVKTHTTAANNEEIVSRNCSADSGGVLSSCTSTTFYFVDDWENVVPRSELWDEKEYMCSWLWEPSDYHGKGERHKVDDNGFEGHNPMIAANVAFLLMLLLVPPALVSSYTSMSIFYLGRQCEHVLPFFLFVLLLDFASLFNSDALFSL

SEQ ID NO: 83356 - protein, 293 aa, Gossypium hirsutum
  Clone ID: AF034133.pep
MFTREVSYLKLQEVKKRWRLRKGPWTEEEDSMLRAYVNIHGEGRWNAVARLSGLRRTGKSCRLRWLNYMRPEIKRGNISLEEQLLILELHSRWGNRWSKIAQHLPGRTDNEIKNYWRTRVQKQAKQLNCDVNSKQFKDAMRYVWIPRLVERIRASSESPSSQPSTTTNTTYNDRISNISSSQMSYANASGSVQVDPSLLPELSGTSSDSLDTQVSSVSDLTDCYNPQSLSNYLHKGLGLEKEGAATWGRDEEFQATEEHSNGWLVGGGESSMDTVWNEENVWFLQQQLHDDGI

SEQ ID NO: 83357 - protein, 170 aa, Gossypium hirsutum
  unsure (1)..(170): unsure at all Xaa locations
  Clone ID: AF037051.pep
MASQSSKPQSIYDFTVKDAKGNDVDLSIYKGKVLIIVNVASQCGLTNSNYTDLTEIYKKYKDQGLEILAFPCNQFGGQEPGSIEESIQNMVCTRFKAEYPIFDKVDVNGDNAAPLYKFLKSSKGGFFGDSIKWNFSKFLVDKEGNVVDRYSPTTTPASMEKDIKKLLXVA

SEQ ID NO: 83358 - protein, 77 aa, Gossypium hirsutum
  Clone ID: AF084206.pep
AINFHRAWLPTFYALYRREPVVIYPLFLNDSFKCLTYTITAEHVALFPGVRKSSVPDDSSYNALSACRMSNACSTQL

SEQ ID NO: 83359 - protein, 65 aa, Gossypium hirsutum
  Clone ID: LIB3146-050-Q1-K1-F10.pep
RDPTYQDLMKRLFLSRQRKLFKKNKFDVDRLKELQNKCKTSLDASASIRNRVGLEVELDDALHKE

SEQ ID NO: 83360 - protein, 57 aa, Gossypium hirsutum
  Clone ID: LIB3582-018-P1-K1-A6.pep
EINNKPNYLWVQSPFTPQKITAQTLKPNLTIKPKPLSPVTKTYPINKQPKSQPKSQT

SEQ ID NO: 83361 - protein, 91 aa, Gossypium hirsutum
  unsure (1)..(91): unsure at all Xaa locations
  Clone ID: LIB3582-018-P1-K1-A8.pep
TFCSIMNKHYLSDPEPSQCRFKTGRISTLNTFXNLHILQQLDLSXRGVLYNRPHFIPQCFIKPHKILYILKDPTPFHPLNHNFNSNFDYNF

SEQ ID NO: 83362 - protein, 96 aa, Gossypium hirsutum
  Clone ID: LIB3582-018-P1-K1-B1.pep
HAPERKARRTRPRTRAWISEYDKRTVPSLSMATMGLLIDRDYHHMLPRSLSSRTDQICSLSHVYSSVSLPKLTIELTKEYYTGMEHTVPKPNTLTE

SEQ ID NO: 83363 - protein, 50 aa, Gossypium hirsutum
  Clone ID: LIB3582-018-P1-K1-B4.pep
YYIAYVFLYNLYYFTNLNPYLKFSAQKQLKCVFQIKLINIFCIFLKPKMS

SEQ ID NO: 83364 - protein, 81 aa, Gossypium hirsutum
  Clone ID: LIB3582-018-P1-K1-B9.pep
LENHIQQRQFVMSLKSTFGQFIQHGNRIKMLENNLGTKNKNIEACMLPGYWHQKISTNNQHNITKQPEITQLEPKRFDKGI

SEQ ID NO: 83365 - protein, 122 aa, Gossypium hirsutum
  Clone ID: LIB3582-018-P1-K1-C7.pep
METPGRCMCIRVFVVSMTIAGFNGVYGTSNYYGPCGKHDIEKEAQKLAPCTYAAKYFRAPVSERCCTIMEKKLNNPSCLCAILQSHTVYNAGVRPEVAVTIPKRCNIAVRPVGHKCGAFPFV

SEQ ID NO: 83366 - protein, 88 aa, Gossypium hirsutum
  Clone ID: LIB3582-018-P1-K1-D9.pep
SHPSHSHNPTLPKLKHLPTNPPYQHLRNLNNHCNAPFTKTLTTFNFKFTPPFTSTLTTTLAPFPFTLYPSFFHTLTTFSFQSLNLFLL

SEQ ID NO: 83367 - protein, 86 aa, Gossypium hirsutum
  Clone ID: LIB3582-018-P1-K1-E6.pep
HNTNQAASYINKTSYNKHAKRMLNNHVSQSKAREDKASVAPKEKHQDHLQHCQTYTYIKVDVQLMPNISYLPNDSCYLYLANNYTL

SEQ ID NO: 83368 - protein, 165 aa, Gossypium hirsutum
  Clone ID: LIB3582-018-P1-K1-E7.pep
VTVKSRVLYPEFRGRMVSTFRSDHFSEVTDYSFTADMETELDNVSVGLTEWKGLLRDYWTRFSSYCSRAESVHIHQVEKMLEKTFGDFLFASLPNKSRTCPSCMEGTLIFKVSRFGAGYFIGCNQHPKCKYIAKTLYGDEEEEESPQKSNTVEEPKLLGLNPRSN

SEQ ID NO: 83369 - protein, 140 aa, Gossypium hirsutum
  unsure (1)..(140): unsure at all Xaa locations
  Clone ID: LIB3582-018-P1-K1-F10.pep
PSTSWSNILKPNSAVIDLQSRGAXLKAVIAKSYDDRTQXRSYCHCLVXGDKKHTLSTVMQKDYIEKTIKKLRVNCFTKLFNYLHLIPTQYTLHDNMKDTVTHYSLQTKDTKLPTCKTIKQTMEXRFKSGKNKWLFTKLRF

SEQ ID NO: 83370 - protein, 175 aa, Gossypium hirsutum
  Clone ID: LIB3582-018-P1-K1-F6.pep
GRNLTMAETLWFNYSAKKSDYWLYCHNILFLFLIFSLVPLPLVFVEMMKSLGFHKYKIQPKVSLSFSEMFKCYKDVMRMFVLVVGPLQLVSYPSVKMIGIQTGLPLPSVWEILSQLTVYFMIEDYTNYWIHRFLHCKWGYENIHRVHHEYAAPIGFAAPYAHWLEILILGIPSFL

SEQ ID NO: 83371 - protein, 124 aa, Gossypium hirsutum
  Clone ID: LIB3582-018-P1-K1-G2.pep
IPIRSWVPSEVGVGIVSETFIWEPSSSVFIFIFFSSFLLLSLFPFYLSKHAPTTKSSSLSDHPFSSSSPRFQLYFLLLYSLASDRRIWLLACAQACLHFSIAVFWILWAPTLVVTSYLLLTTCD

SEQ ID NO: 83372 - protein, 69 aa, Gossypium hirsutum
  Clone ID: LIB3582-018-P1-K1-G5.pep
MKMGSVDRVNDLTFKVNFSGDGAAKLKDRVKEKLKEFMGDYTDDTLVEYVIVLLRNGRRKDEAMNELNV

SEQ ID NO: 83373 - protein, 68 aa, Gossypium hirsutum
  Clone ID: LIB3582-018-P1-K1-H4.pep
VVCFELPQAMSSIFITQHFYNSKITSINPKHLYDSKMASTVHLLPSKSPSSSMEDPSTKATKGKRASY

SEQ ID NO: 83374 - protein, 42 aa, Gossypium hirsutum
  Clone ID: LIB3582-023-P1-K1-A9.pep
MLKGEFFSAHFFFPLCKVIFSWLLIFFLKRNEELSFSFIIEF

SEQ ID NO: 83375 - protein, 176 aa, Gossypium hirsutum
  Clone ID: LIB3582-023-P1-K1-B12.pep
MTTNLETRSLLDELRSFDKGGFFDLGHPLLNRIAESFVKAAGIGAIKGVAREGCYLALEGTKSRSSSTDISAKNNKKNPFPYLRGETNRKSLEAMVKSTGKESLQWGLAAGLYSGITYGLQEARGAHDWKNSAVAGALTGMTVALTCEKPCQEHVLQCAITGAALSTAANLLTGVF

SEQ ID NO: 83376 - protein, 86 aa, Gossypium hirsutum
  unsure (1)..(86): unsure at all Xaa locations
  Clone ID: LIB3582-023-P1-K1-B2.pep
MLVMRVKLTMIDRTTDVLPLSVGLDDAWDLXNAVMFKQHAKDTMKNLSIGHNECLMMSVYTGAYIFHYIIEGHGRYLTMGHAANTK

SEQ ID NO: 83377 - protein, 77 aa, Gossypium hirsutum
  Clone ID: LIB3582-023-P1-K1-B3.pep
VFDTRYELLLCIFYSTKELVHLRIFSLSESISNGAGRETRRRFPCRSQRTITAIICRRKKMRISQAFRLCCKKVCSS

SEQ ID NO: 83378 - protein, 81 aa, Gossypium hirsutum
  Clone ID: LIB3582-023-P1-K1-B9.pep
KGVSLPVIKKVQNPKRARSEIGPFIFDIKNQKAGFHECRFHPITESRTIPGNNLASEGLKMGKKIHTLLLGTMVMILRKRK

SEQ ID NO: 83379 - protein, 192 aa, Gossypium hirsutum
  Clone ID: LIB3582-023-P1-K1-C10.pep
PRYPSPDESVPPMYPSFPTTYEPNLTGRCPVNFSAISNIMGKTASDCSLPLAALVGNVICCPQLGSLLHIFQGYGIDSDKLVLGNAVANDCFSDVISILASRGANKTIPTVCSVKSSNLTGGSCPVKNVNTFEKTVNTSKLLEACSTVDPLKECCRPVCQPAIMEAALQISGTQMMLNDDKTVLGETSHMDA

SEQ ID NO: 83380 - protein, 189 aa, Gossypium hirsutum
  Clone ID: LIB3582-023-P1-K1-C9.pep
LMFGPPGCSKTLMARAVASEAGLNFLAVKGPELFSKWIGESEKAVRSLFAKARANAPSIIFFDEIDSLAVTRGKDNDGVSVSDRVMSQLLVELDGLHQRVDVTVIAATNRPDKIDPALLRPGRFDRLLYVGPPDENDREEIFRIHLSKSPCSSDVSLKELAHLTEGCTGADISLICREAAVIALEESLD

SEQ ID NO: 83381 - protein, 177 aa, Gossypium hirsutum
  unsure (1)..(177): unsure at all Xaa locations
  Clone ID: LIB3582-023-P1-K1-E3.pep
RLTAAVEDWMRSERTRLKRTRLTLLHLPTLLALVPSQTAPKPFSSLPLLFHLLTLSLIQPPRSLCCFPFLEISSVSFCLFHLFFFDGWKKTRKEILKMSLCPVLPATWRVVVWSEIILACLLCVLYVEEVLHLNMRQCLILKPLVYVXTANFYCLRIFIHXLKSIIEDDRLEEAXIG

SEQ ID NO: 83382 - protein, 175 aa, Gossypium hirsutum
  unsure (1)..(175): unsure at all Xaa locations
  Clone ID: LIB3582-023-P1-K1-E9.pep
DLGDHRALEQLRRILRLLTTLKVVSALLPPVRDPTPLSLLPFGRLKVLELRGCDLSTSAAKGLLELRHTLEKIICHNSTDALRHVFASRIAEVKGCPQWNRLSFVSCACNRLLLMDESLQLLPSVETLDLSQNNFAKVXEVCCHVVKLVLRNNALTTLRGIENLKSLXGLDVSYN

SEQ ID NO: 83383 - protein, 182 aa, Gossypium hirsutum
  unsure (1)..(182): unsure at all Xaa locations
  Clone ID: LIB3582-023-P1-K1-G11.pep
IKGKTKHRLWLELCDLLTTHATEVSGLNVDAIIRGGIRKFTDEVGRLWTSLADYYIXKNLFKKARVFFEEGLXNVGTVRDFSVIFDAYSQFEESMVALXMENMCLSDEEEEEEEEDEEDIRLDIALCKSKSKFEKKIFKGFWLHDDKDVDLRLARLEHLMNRRPXLAYSVLLRQNPHNVEQW

SEQ ID NO: 83384 - protein, 50 aa, Gossypium hirsutum
  Clone ID: LIB3582-023-P1-K1-H11.pep
GRVGKKKYKYIKKKIKARYKIQGGVLLDAGGNKRRITYNAITKNPIQSLT

SEQ ID NO: 83385 - protein, 99 aa, Gossypium hirsutum
  unsure (1)..(99): unsure at all Xaa locations
  Clone ID: LIB3582-023-P1-K1-H3.pep
NCLGAFDGTHIKIRVPTVDKARYRTRKGDITTHMLXVCKYNMXFVYVIPGXEGSVADGRILXNAISMRHGLKVLHGCHYLVDAGYTNCEGCLVPYRGQR

SEQ ID NO: 83386 - protein, 75 aa, Gossypium hirsutum
  unsure (1)..(75): unsure at all Xaa locations
  Clone ID: LIB3582-023-P1-K1-H5.pep
WYPSKNMAVIGITGTNGKTTTSYLIKGMYEAMGLRIGLLGTVAYYVYXDNKLESSYTTPDAVXVQKLMAKMLHNG

SEQ ID NO: 83387 - protein, 102 aa, Gossypium hirsutum
  unsure (1)..(102): unsure at all Xaa locations
  Clone ID: LIB3582-024-P1-K1-A10.pep
MMAISQASSNHADEDYIDMEVSSSSNYLCYSISSPPQSREFEFQMCSVSPDGDISSTYPADELFYKGKLLPLXLPPRLQMVQKLRQSSNNAALDSKTQPPIE

SEQ ID NO: 83388 - protein, 75 aa, Gossypium hirsutum
  Clone ID: LIB3582-024-P1-K1-A2.pep
QMQRFKQTDMNLKYSHTQMLKARVRNNHLLIKTELLGIHEMLHIKGLYLFPQLALLLAHQCLTLSHPNLLKILDL

SEQ ID NO: 83389 - protein, 70 aa, Gossypium hirsutum
  Clone ID: LIB3582-024-P1-K1-A4.pep
AVTQLTLVWLVSAFSPVIFQLTIIAFISVLHNDIGDLLCAFSFCLLLFILMLLLRPAAPDVYFWSLSLEF

SEQ ID NO: 83390 - protein, 110 aa, Gossypium hirsutum
  unsure (1)..(110): unsure at all Xaa locations
  Clone ID: LIB3582-024-P1-K1-A5.pep
KLDMKGRCSKQEAKEGMEIDRIRNSHKDEPPQLSGAYIRSLVKQLTTSRSAKDPDYVNGQNLSKFGEGFSATPQTQSQVQPHAPPKQLKKQVRRRFHTRRPYQQRLLNMX

SEQ ID NO: 83391 - protein, 111 aa, Gossypium hirsutum
  unsure (1)..(111): unsure at all Xaa locations
  Clone ID: LIB3582-024-P1-K1-A9.pep
HAFADAYGSILRTLGDNGTIMRCTHRLQXYSPPTLDGDDRGDRHPELRYRHTXRVSQIMAVLETFCFMRIKXNLAYALRADILLPTALRMLTMNXHNTPMLQRLELIAPRG

SEQ ID NO: 83392 - protein, 122 aa, Gossypium hirsutum
  Clone ID: LIB3582-024-P1-K1-B12.pep
PKSKLRSRILGQDHKFIGQKKCPKVQTLLLHLSFVSITSLSTTSAALTPRKGPSLSSIAGGHAHILLLPSRKPLRQFPSSTQLCTMVNVSSSSQISCKPICYAIVMSCIHSIAWTITESAIF

SEQ ID NO: 83393 - protein, 120 aa, Gossypium hirsutum
  Clone ID: LIB3582-024-P1-K1-B2.pep
FSGTIPAKLLLQLTSAFRERGLCDRSGKFFFKDHLHKSNVPVLAIAGDQDLICPPEAVEETVKLLSRNLVTYKIFGEHQGPHYAHYDLVGGRLVSIANREMYTETPFDHYSSSVSKNGQT

SEQ ID NO: 83394 - protein, 135 aa, Gossypium hirsutum
  Clone ID: LIB3582-024-P1-K1-C11.pep
MYNGIGLTTPRGSGTNGYIQSNKFFVKPKTNWVTHSTKPFEADQGTAGLTTRKPDKEILEHDRKRQIELKLVILEDKLAEQGYTESEIADKLVEAREALEDAQHEKDEQEGEVIPIPTRQQKVLDTQTHQIAARK

SEQ ID NO: 83395 - protein, 168 aa, Gossypium hirsutum
  unsure (1)..(168): unsure at all Xaa locations
  Clone ID: LIB3582-024-P1-K1-C2.pep
LLRLCCVCLNFSGLRGCCFGIANMILVKRMRETLYSSLLLQEISFFDGETVGDLTSRLGSDCQQVSRVIGNDLNLIMRNVLQGTGALIYLLILSWPLGVCTLVICSSLAAIMTVYGMYQKKTAKLIQEYAASANEVAQETFSLMRTVRVYGTKKQDXERCNHWLDKLA

SEQ ID NO: 83396 - protein, 52 aa, Gossypium hirsutum
  Clone ID: LIB3582-024-P1-K1-C3.pep
HGCCAENELVTNHHQETPCWHPQQHETRHQDGGPLQNLTALQATHRYQSVRV

SEQ ID NO: 83397 - protein, 136 aa, Gossypium hirsutum
  unsure (1)..(136): unsure at all Xaa locations
  Clone ID: LIB3582-024-P1-K1-C5.pep
PRVRPRVRPRVRPRVRPRVRPRVRSLPVCKEKGLMVSAGTINRDGPLRIGATSTGSNXTIAKIVRMVEDAQGQEAPVQRLADAIAGPFVYSIMTLSAATFAFWYYAESHISPDVLLNDIARPDGDPLLLSLKLAMD

SEQ ID NO: 83398 - protein, 70 aa, Gossypium hirsutum
  Clone ID: LIB3582-024-P1-K1-C7.pep
PTRPPTRPPTRPPTRPPTRPNDNKTATQPYELSSSRLFCRKYLHPKRPALREDKQTEKWIQHLLILHITT

SEQ ID NO: 83399 - protein, 117 aa, Gossypium hirsutum
  Clone ID: LIB3582-024-P1-K1-C9.pep
MATATFPYFTPSDSRSMGVLNVLGGRVLMENPLGRFSCLKIYEGKSGFSSASQKSTMPSFRCSANPRSVSHYQNKDPFLNLHAEVSMLRGEGNNTVTNPRKDSTSGSVIESAGNMSG

SEQ ID NO: 83400 - protein, 55 aa, Gossypium hirsutum
  unsure (1)..(55): unsure at all Xaa locations
  Clone ID: LIB3582-024-P1-K1-D3.pep
TLNHLTDPMTIPSTLILIGQGTHHSXLRKLNQKNGAPFPGVPSLPPLDCHEYPML

SEQ ID NO: 83401 - protein, 178 aa, Gossypium hirsutum
  Clone ID: LIB3582-024-P1-K1-D8.pep
ARFTASEIDGVLDFEEKGKSLSIDEASYFKEAIVALRLAKEVIKMQQKRRANAIADLNRSGRFSRSLANSCTDWPCLMLELLTQAAEIGHFQPKLVINNVEILRNAMLMDDSKVCGSMYHDSLIWRIIALGANERCLPVILVTSDSYYSYQALMDFGFPDICCSRETFGLTPQEAKMH

SEQ ID NO: 83402 - protein, 71 aa, Gossypium hirsutum
  unsure (1)..(71): unsure at all Xaa locations
  Clone ID: LIB3582-024-P1-K1-D9.pep
VEVSFTTKMIIDLNLWLMLTARSLFCTRLLVYKLXVLSISLXMVIKLIVTPYEGLPKLNIHLFSDEVIIYG

SEQ ID NO: 83403 - protein, 88 aa, Gossypium hirsutum
  Clone ID: LIB3582-024-P1-K1-E10.pep
YSLNSLSFICRSKILPLFYESANSKAFLLMDGCSGLNCSAPRRIAARLFSALKRRKVKGRVNVGHRKEDDDDVAPPNHVTRRPDSSSE

SEQ ID NO: 83404 - protein, 41 aa, Gossypium hirsutum
  Clone ID: LIB3582-024-P1-K1-E12.pep
LNPTQSDLVTSISYFFNKSIVGNIKYNTVCLLSFWKDFIMS

SEQ ID NO: 83405 - protein, 45 aa, Gossypium hirsutum
  Clone ID: LIB3582-024-P1-K1-E2.pep
DSLRGCDGSSRSNALHKRKLRVWTLRTLHEACFRNTTTCTPIPRL

SEQ ID NO: 83406 - protein, 150 aa, Gossypium hirsutum
  unsure (1)..(150): unsure at all Xaa locations
  Clone ID: LIB3582-024-P1-K1-E4.pep
MALMVRHKAVSVALLXSLCLSSGLLCSATNFPVTRSXEMSPRQMDYYCQRRCQSLTHGQTEQXKWEDRRERMLMEEQERDSDDPQXRRYQDGRQHCQQEERWLRTQCEQSWQEQYERQHQEPPCKRFRECQHRCQRHEQGPERKQQCVKE

SEQ ID NO: 83407 - protein, 120 aa, Gossypium hirsutum
  Clone ID: LIB3582-024-P1-K1-E6.pep
KKKQFPRKASLLEKPGKIRIRRNGRLRDFPNSIPKGLNSLLLACVTCTYVMHHKKSELHIGKESSGVSCDFNPKPPPFIINSHFITFRSILITIIVYNSNPMQQRRKLSPAPHRFPLSLI

SEQ ID NO: 83408 - protein, 103 aa, Gossypium hirsutum
  unsure (1)..(103): unsure at all Xaa locations
  Clone ID: LIB3582-024-P1-K1-E7.pep
MRKIMGASVLXLFALLSVSAGSAFAQDVAHQGLDRNFYMDSCXHAGHIVKDQVKLLDKLLKNTRFYCVRNILHDCADHSCDASLHVDSTVRCSSEKATDRGSG

SEQ ID NO: 83409 - protein, 58 aa, Gossypium hirsutum
  Clone ID: LIB3582-024-P1-K1-F8.pep
CPSSILFLSLFLLLPQNQIAKSILSTYNSPCEEMAAFNFILIWQFHAEKQNIRLLLLS

SEQ ID NO: 83410 - protein, 127 aa, Gossypium hirsutum
  Clone ID: LIB3582-024-P1-K1-F9.pep
PTRPPTRPIFASYKPNTHLLGFRRSLNSPSASAIQPPFHHYNRRMMRRHSLFPPKQRLKAYFHPKIPIPNFDFDGGDKDLNGASTKVLLMWECTEKKAVTWRGRAWETTRESPIPWLAAVLACSRNL

SEQ ID NO: 83411 - protein, 81 aa, Gossypium hirsutum
  Clone ID: LIB3582-024-P1-K1-G2.pep
KRIGTLYDGLIIFSSIPPDLPLVAFTSMQTFGTFRLLGGCLIDCYFSLTRAGGGLVGSKIVILKDNVRIENGLNMAARPLL

SEQ ID NO: 83412 - protein, 99 aa, Gossypium hirsutum
  Clone ID: LIB3582-024-P1-K1-G6.pep
WPSFSGYMRTLCGLEVYPLVCDFCDTNENRLPIIQVRIRLIILLFICEERNIKSHRYIEREKSVMNLGDAKAADHLDLYSCSLFLLNVCVFYVNIDVRK

SEQ ID NO: 83413 - protein, 105 aa, Gossypium hirsutum
  Clone ID: LIB3582-024-P1-K1-G9.pep
TQGISSFVSLDRGLLRTQTHTKQSNRKRKKDFKVVHSFFLSDFFKVVHLFFSLIFLFHFFFFLIRYTNITNTKERLSHLLTGVDLVGGYFSSSEAYGSLGIRLKP

SEQ ID NO: 83414 - protein, 135 aa, Gossypium hirsutum
  unsure (1)..(135): unsure at all Xaa locations
  Clone ID: LIB3582-024-P1-K1-H11.pep
SIHPSGRHISTLLPINCEGLSKAVKKGDTLFIGHSLFTGSETPPVWLXVIEEHGKNVFSVLKTTEPLTVAWXTWHAAKIILEWPPLFVKNKEVIISXGVKNKINFFFFSSTQQPKNVRHAPENLLKQGDLYKTQI

SEQ ID NO: 83415 - protein, 114 aa, Gossypium hirsutum
  Clone ID: LIB3582-024-P1-K1-H2.pep
YQRAIVVHIRPERYMRESSNNITKRNLVLSVQQVKKKRKEIGSCLLKKTPCNWRYKHYYRRYGRNIAGFIFYIKNRGNKEENKRNGVQDQWNSNDMENIVSKVTKKELGTKFFI

SEQ ID NO: 83416 - protein, 59 aa, Gossypium hirsutum
  unsure (1)..(59): unsure at all Xaa locations
  Clone ID: LIB3582-024-P1-K1-H6.pep
GEHGFTFWLYKPIPYVLKRVVFLQMNTNTHIXNLSNKRKILRSRSKLGRVVGRVDGRVG

SEQ ID NO: 83417 - protein, 169 aa, Gossypium hirsutum
  unsure (1)..(169): unsure at all Xaa locations
  Clone ID: LIB3582-024-P1-K1-H9.pep
MANPRLRGWRKWAKKDWAIAAVGFTIILFALTLLFDSRNPTSSSSSSTFNLPSNHHLIPLTLLHRAKATGFXLDGSLPGYHFQKGFGSGSNNRLLHIEGGGWRNSIETCEIRKRTALGSSKYMDPLIPFDGILSHQSSHNPDFYNWNIVTMRYSDGASLAGHPESEFKN

SEQ ID NO: 83418 - protein, 85 aa, Gossypium hirsutum
  Clone ID: LIB3582-026-P1-K1-B10.pep
IHMMCLINLEEKLSSLKRIKKYVCTETKASVGALSIAKACIHLYDKPLRMTSRGNESHATDYAYRQRRMVISFESQKLISVDIEG

SEQ ID NO: 83419 - protein, 113 aa, Gossypium hirsutum
  Clone ID: LIB3582-026-P1-K1-B11.pep
ISKSKNSISNSRSRPWLALFFSTPFQPYVYQSPQDAVTPFQILGGEAQIVQIMLKPQEKVIAKPGSMCFMSGSIEMENTYVPENEVGMWQWLFGKSITSIALRNNGPNDGFLG

SEQ ID NO: 83420 - protein, 109 aa, Gossypium hirsutum
  unsure (1)..(109): unsure at all Xaa locations
  Clone ID: LIB3582-026-P1-K1-B3.pep
ATHACDRAWMRCAWEAVRXYCMSRVNTAGKGSRGNYMYRAGKPLDDXDSCPTCMADIFRRMGKAGRVALCAIPRHLPLQSEVSKHGLDDTPXPANEVSSSVLVASYSHM

SEQ ID NO: 83421 - protein, 79 aa, Gossypium hirsutum
  Clone ID: LIB3582-026-P1-K1-B5.pep
KCMTQSRDRSQVNAYISNIQSKKAGFQNISFLFTPRWATQLAHIIATISFRKKEEIYLIGAVLEYASHQSELERPREPD

SEQ ID NO: 83422 - protein, 70 aa, Gossypium hirsutum
  Clone ID: LIB3582-026-P1-K1-B6.pep
SLVRFPNARGEGRRKKTEGERAKPYWSSSMHRTYIRIHTHFSLDLLELPVAITMKHTNEPDQAGKYLTTP

SEQ ID NO: 83423 - protein, 161 aa, Gossypium hirsutum
  unsure (1)..(161): unsure at all Xaa locations
  Clone ID: LIB3582-026-P1-K1-B9.pep
ILYVDLPSVELVASSRSERSLPGMVLNTKKSIVYTDYFGNRHXVLGFYPFAGIGLSLVTFKPPFFCRVPXGRIYCTLQTIRVSLLVHIHLGXQGVCEDNLDTFLGYNERRRVTSSAKKKRKPLDTSLHQTPEGSLVDIMRNADDLLSWCDIDLPEVERNDK

SEQ ID NO: 83424 - protein, 122 aa, Gossypium hirsutum
  unsure (1)..(122): unsure at all Xaa locations
  Clone ID: LIB3582-026-P1-K1-C1.pep
TGAPEAPDTEHQPAAANEPKPAEKPAKDKRPRXPKEKKXKQPKPAAQPPQRQTTKEAPXATKEKRGPKADAKAKNTEEKHNARRTATTRKNKRRQXKNTAAKRTPRKTKADNKRNEADKKER

SEQ ID NO: 83425 - protein, 60 aa, Gossypium hirsutum
  Clone ID: LIB3582-026-P1-K1-C10.pep
PRVRPRVRSHIPPEYRREDKESQPVNLYILKCKKYGGIYWQYLQEAIMTWLATGHLHNLL

SEQ ID NO: 83426 - protein, 111 aa, Gossypium hirsutum
  unsure (1)..(111): unsure at all Xaa locations
  Clone ID: LIB3582-026-P1-K1-C4.pep
EFIWPCGDLVHTQEELNEPLIDXGGFIKGDXEATAHAVDLVKTACSKHGFLQVTDHGVDSNIMQAAYQEIEAELKLPLXKRLGLQRKRGGISGYTADHADRLFAKMAWKET

SEQ ID NO: 83427 - protein, 56 aa, Gossypium hirsutum
  Clone ID: LIB3582-026-P1-K1-C5.pep
PKALTWFRLHARETPTTEPQAYLDKLSSISHFMMLKKTTRKLQRRKPIQKRKEKWD

SEQ ID NO: 83428 - protein, 118 aa, Gossypium hirsutum
  unsure (1)..(118): unsure at all Xaa locations
  Clone ID: LIB3582-026-P1-K1-D12.pep
TVYTATAGALSCHILSKVACRGLAFFFWPDKLIFFQAQVAQRRESLLTYMLFLRFTPTLLNTFINVAXTIVDIAYRIFFLATMIKLTPAAYITDKAGIALNESQSLWDLYDYKSIATL

SEQ ID NO: 83429 - protein, 160 aa, Gossypium hirsutum
  Clone ID: LIB3582-026-P1-K1-E10.pep
LRGHKLRAIKTADNNLTNQTSAAEMVESNQDLLTQMLSHYPDKSLLKYRCVYKRWLSLIYDPQFAAEISHLNVNLGPSGLYFYGSPFGFLNFDTNHNMLKEPSLPLLNVTGIEILQSCNGLLLLLCRHSSDNDSGFTYCVRNTTTKNSDTVPLPNATAHR

SEQ ID NO: 83430 - protein, 86 aa, Gossypium hirsutum
  Clone ID: LIB3582-026-P1-K1-E11.pep
SDIAQFIVDEFENHKLRLFKMEDVSMGMWVEKFNSSKAVEYQHSLKFCQFGCIEDYYTAHYQSPRQMLCMWDKLQKQGKPQCCNMR

SEQ ID NO: 83431 - protein, 84 aa, Gossypium hirsutum
  Clone ID: LIB3582-026-P1-K1-E4.pep
NSSISHLKRLICLPNVPHQIMNDVFLESYNQTSLCTEKTISVRKTLKFVHRRQESNVRIPHIKDMKALQCLHTDVDKDKPRANP

SEQ ID NO: 83432 - protein, 140 aa, Gossypium hirsutum
  unsure (1)..(140): unsure at all Xaa locations
  Clone ID: LIB3582-026-P1-K1-E6.pep
SLITIEDNPTISHLWGTTADRSPADPIRNTPSGTLAFTTCASTVLYPGLVLHHRSRYTTRNGAQHVGDCASSTSGSTHQDTEDDQTIDAVVSEEXPKSDGAGARHRPGLAPVPDVPHINSYMPSLHDARADHQRVLKRCR

SEQ ID NO: 83433 - protein, 38 aa, Gossypium hirsutum
  unsure (1)..(38): unsure at all Xaa locations
  Clone ID: LIB3582-026-P1-K1-F11.pep
LLEFQVMTTRCRLQRTPPSLEFGCVYLRLIPPCPYXHL

SEQ ID NO: 83434 - protein, 33 aa, Gossypium hirsutum
  Clone ID: LIB3582-026-P1-K1-F12.pep
LLRFHLLLLSINSRKNTYLMLVVKFFHDFPVKT

SEQ ID NO: 83435 - protein, 65 aa, Gossypium hirsutum
  unsure (1)..(65): unsure at all Xaa locations
  Clone ID: LIB3582-026-P1-K1-F2.pep
ACXFLXAVXVXXPXSPCXXVVGCPSGVALSVFFLFSLXSPPCRPXXVPXXVSLPSXXLXPRPRGS

SEQ ID NO: 83436 - protein, 54 aa, Gossypium hirsutum
  Clone ID: LIB3582-026-P1-K1-F7.pep
ATVELCSRRPSELTEIEEVNTLNSQIHLKTNIQYLPKEEYTHKAVIRTAKGVEE

SEQ ID NO: 83437 - protein, 157 aa, Gossypium hirsutum
  unsure (1)..(157): unsure at all Xaa locations
  Clone ID: LIB3582-026-P1-K1-G2.pep
HAEPGDXPERNHTXXXQPXXRGEXXXRXPTGXQGXHKDEXQTREXXXEDGRXXTGDTGLXXXGGRLKKIDRKKNIFKLAQGEYIAPEKIENVYAKCKFIAQCFIYGDSLNSSLVAIVSVDHDVLKAWAASEGIKYKDLXQLCNDPRARAAVLADMDA

SEQ ID NO: 83438 - protein, 72 aa, Gossypium hirsutum
  Clone ID: LIB3582-026-P1-K1-G3.pep
RFSSLEKIFHSRFKPIRIQSRPFLLALDLNFHYGYGALPPLQEDGVSATGLLYLFFFRYITSIVFIFPVSPS

SEQ ID NO: 83439 - protein, 66 aa, Gossypium hirsutum
  Clone ID: LIB3582-026-P1-K1-H11.pep
NQSDYSLSALPNELVLKIAGSLTLLHLMDHLWRHTTLAIELNDNDTFLSTRMSRSQIFHHGIGCLN

SEQ ID NO: 83440 - protein, 74 aa, Gossypium hirsutum
  Clone ID: LIB3582-026-P1-K1-H3.pep
RHMVRLHIVKEIISAKDAMDLTDELMNATRMTISLLAPCSLPQDRNMNSLMYTARTLFKEKPTGIVELMTGTIT

SEQ ID NO: 83441 - protein, 59 aa, Gossypium hirsutum
  Clone ID: LIB3582-026-P1-K1-H8.pep
CFTFRRCLLSLSCCRHFLASIRPIKTTRCPLRSSFFPPLYSLLQSRLHVLVPVSYYLYI

SEQ ID NO: 83442 - protein, 65 aa, Gossypium hirsutum
  Clone ID: LIB3582-043-P1-K1-A11.pep
DHVKVAKHPLKIFFNVSCITNGCVPLPTVINHQSHIDEGIKTTVHSITDTQNTSDGPTIKDWNRN

SEQ ID NO: 83443 - protein, 134 aa, Gossypium hirsutum
  Clone ID: LIB3582-043-P1-K1-B2.pep
HTVDTRKPAFRWLGLRGKSEKGSADALVLNESRKRAFGTDVTNVSFKKNKVDSSNDQNFNKSQQKHKKVENLVPADDRSRLEDSKQASKSYEFGPFAPVNLTKISNSENDAKPVYDWESLASTYRPQYHNQGIV

SEQ ID NO: 83444 - protein, 206 aa, Gossypium hirsutum
  Clone ID: LIB3582-043-P1-K1-B9.pep
SACEIWSTVNRLFEVSTGAKISRVKHDLHSIKKGELTVREYVAKIENVCALLAASGSTMSEAEKVEVVLAGLSVDFDIVLTLASFLMETLPFQRLVDVLLEFESRQLQVAREVPMQAHLVEQPLVAAVVDSGSSRDVHEGRSHGLGFRLRVQCQICSRFGHLAQCCFYRFNRTYGGPNASNTVRASSSAYGGRKLQGGVYGDSGSG

SEQ ID NO: 83445 - protein, 88 aa, Gossypium hirsutum
  unsure (1)..(88): unsure at all Xaa locations
  Clone ID: LIB3582-043-P1-K1-C11.pep
QHTTSLSVLIFHFLFCISIFFAPGQDXKFFICGQMGHIAANCEGKAKRKEGEFDEKADGKTVARKPYQYLEYEMRIPNPPFEIDLERV

SEQ ID NO: 83446 - protein, 140 aa, Gossypium hirsutum
  unsure (1)..(140): unsure at all Xaa locations
  Clone ID: LIB3582-043-P1-K1-C5.pep
MIIYQAAKELIKDIAVLELEVAYLEKYLLSLYRQKFDKTFLSLKSIDENLKPTSMAHKEMFQEVQTHDFMSGDLVSTRNSIGNPPKECDDVWGAEKLLDSSIYRSHSSLSNDRHXSVNSPQRAVARAEELYHSLPFAMLE

SEQ ID NO: 83447 - protein, 190 aa, Gossypium hirsutum
  unsure (1)..(190): unsure at all Xaa locations
  Clone ID: LIB3582-043-P1-K1-D1.pep
MDQDARKINISKFRXRKTMLLIVTDVAARGIDIPLLDNVINWDFPPKPKIFVHRVGRAARAGRTGTAFSFVTSEDMPYLLDLHLFLSRPIRAAPTEEEVFQDMDGAMNKIDLAIANGESVYGRFPQNIIDLISDRVRDMIDSSAELNNLQRTCANAFRLYSKTKPLPARESIKRAKDLPREGLHPIFRNV

SEQ ID NO: 83448 - protein, 159 aa, Gossypium hirsutum
  unsure (1)..(159): unsure at all Xaa locations
  Clone ID: LIB3582-043-P1-K1-D5.pep
MFRARKLTRAVNIFKHMRNNRKFDCRPSIRTYNILFTTMLSRGKDSYINHMYMEAIRCLFRQMVDDRIEPDVFMLNSMIKGYVLSLHVNDALRVFHQMGVVYKCLPNAFSYDYLIYGLCAQGRTNNARELCDEMKRNGFIPSAKSYNSLVNAXAIAGEV

SEQ ID NO: 83449 - protein, 115 aa, Gossypium hirsutum
  Clone ID: LIB3582-043-P1-K1-D6.pep
HASAHASAHASEGMSAMLEKYRSYDFGRCPRVYCCGQPCLPVGRSDIPRSSTVKIYCPKCEDIYYPPSKYQGNMDGAYFGTTFPHLFLMTYGHLKPQKPTQNYTPRVFGFKIHKP

SEQ ID NO: 83450 - protein, 107 aa, Gossypium hirsutum
  unsure (1)..(107): unsure at all Xaa locations
  Clone ID: LIB3582-043-P1-K1-F2.pep
MIAGGRLSVPTXSPKKREFNSLEXVTYIEPRIXLREIKKADEPHCLWRMDTRXYSYLLYDFILDFLFYDVGTKYFHKPCKGLLYEACTVYXVMQGCIETVVWLIGHE

SEQ ID NO: 83451 - protein, 62 aa, Gossypium hirsutum
  Clone ID: LIB3582-043-P1-K1-G1.pep
PSQAPSWLVTYLFILIHSLSFFLLFLVLYSMFIGFLFGCKAGCLSYLLFPMFPYCVSIVLLI

SEQ ID NO: 83452 - protein, 128 aa, Gossypium hirsutum
  unsure (1)..(128): unsure at all Xaa locations
  Clone ID: LIB3582-043-P1-K1-G7.pep
MALGDLMTSRFPQLSLAVSEXVIDGNVSSGGYHDDDVDSADLMSQRRDLDAASTSSYANAVTFTATVPTTMAYLPQTVVLCELRHAAFEACTPTGPSESGLASKWRPKDKVLSFLGWFLLFFAYHSVD

SEQ ID NO: 83453 - protein, 81 aa, Gossypium hirsutum
  Clone ID: LIB3582-045-P1-K1-A9.pep
PFPLGFGSAHSRRTTTYTMADNEQMASRSRPQKPRPWRLGRPIPFRLLFSKKGVKILCYFVFKKREQNEIQKRKKRKHNTI

SEQ ID NO: 83454 - protein, 79 aa, Gossypium hirsutum
  Clone ID: LIB3582-045-P1-K1-B6.pep
EDELFKEFVEVGIDLGELVVRMIEGIVVGLRLEGLEDRGGLVDVVDGIGHVREEFGMGKVGHLVEYWWRSSGSRGRGSG

SEQ ID NO: 83455 - protein, 140 aa, Gossypium hirsutum
  unsure (1)..(140): unsure at all Xaa locations
  Clone ID: LIB3582-045-P1-K1-C6.pep
NSTTPHASRPLTHTLATTTTSSSATTETFKPDTFSQTLSLHKNSLSSFKFYSNYSLLISSFVYKTLRTYSTSTTFSTLTPIHXYSVHYQLFFNLSFSSNFLFLDSTFYHKTLLLXYVPTTSLIKTLHPHTNYIFFVNFNP

SEQ ID NO: 83456 - protein, 82 aa, Gossypium hirsutum
  Clone ID: LIB3582-045-P1-K1-C9.pep
FHRFDKYLNFSNPHISQNFDPNACGWAYGMNMFDLKVWRKKDITGIYHKWQNMNEDRALWKLGTLPPGLITFYGLTHPLQKS

SEQ ID NO: 83457 - protein, 80 aa, Gossypium hirsutum
  Clone ID: LIB3582-045-P1-K1-D10.pep
KSTTLKKSFVHANEQTSVKNEGTSNATEDMDEEFSPVDVDVNLVKNLLDSFSCQQGLPGPTSNLLGLMGVNLPKDDNKGK

SEQ ID NO: 83458 - protein, 74 aa, Gossypium hirsutum
  Clone ID: LIB3582-045-P1-K1-D2.pep
IHNKAQQEASNLQLPDHLGKRKQKFDDSNGHIANNRASFSLSSYILAIITIIPIISGTWQSPKLCSSIVFVVYL

SEQ ID NO: 83459 - protein, 44 aa, Gossypium hirsutum
  Clone ID: LIB3582-045-P1-K1-D4.pep
STMLFLYHGPVVIFKRLNYHMLSYKVECIVDAYYYTIKHLILPF

SEQ ID NO: 83460 - protein, 50 aa, Gossypium hirsutum
  Clone ID: LIB3582-045-P1-K1-D6.pep
PILVLYFNLLLWLFFKKLKNQQFPIPLLLLIINKMSTSPLEVKAQKLKTI

SEQ ID NO: 83461 - protein, 72 aa, Gossypium hirsutum
  unsure (1)..(72): unsure at all Xaa locations
  Clone ID: LIB3582-045-P1-K1-E2.pep
PTQPKYXPEVHPLLFSLAVIWILHLLFSGLLQCHQLLFFFHRWIICMFVDEVHVENGYYDINSSKNRYSGGL

SEQ ID NO: 83462 - protein, 69 aa, Gossypium hirsutum
  Clone ID: LIB3582-045-P1-K1-E6.pep
SFNLHTQIQYFEFKKPSIFVLLCINHHICFSSNKIFYTWSEYYLHHFRACLCTSIYHFIYNQVCLECLF

SEQ ID NO: 83463 - protein, 155 aa, Gossypium hirsutum
  unsure (1)..(155): unsure at all Xaa locations
  Clone ID: LIB3582-045-P1-K1-F9.pep
GRVGLQIPGIEVRRTRGNVTDQGLDAPWFRATSSVTETIPSQRNGFNVKRGSQNSSVSKSVNADPRLHQTLNISGRNSGGLSSSWKNSEEEEXMWQMHSRLSEHDAANFSNNXSKDCWTPCVSEKMDFESQLHRPQSIHDASRGCRETSADASTE

SEQ ID NO: 83464 - protein, 78 aa, Gossypium hirsutum
  Clone ID: LIB3582-045-P1-K1-G10.pep
GGGFDNGVVDSSIAGFTDSISIKAFNKGERFDIKATCSYSSYAWEKREGHIKALCLFKVTNFYPMIMQCSMLAACHFV

SEQ ID NO: 83465 - protein, 38 aa, Gossypium hirsutum
  Clone ID: LIB3582-045-P1-K1-G7.pep
PQRSTTSPAKTLISLTIYTVPTGGRAVYNYSRVPLTPN

SEQ ID NO: 83466 - protein, 151 aa, Gossypium hirsutum
  Clone ID: LIB3582-045-P1-K1-H3.pep
QKQKKRVNDTTKMEAKKALFNISKLVPQCPFPFTSRACLSTSYQHPQGSNAGVGGMYQVKTREGQPQSPPQQDSRTAEDSAKEGIKKGVEMAENVGDSAKKTLDGAWKAAKDTAKVVKESLSENNKDDEAVDEVKSIEELRVRARGYYNAP

SEQ ID NO: 83467 - protein, 144 aa, Gossypium hirsutum
  Clone ID: LIB3582-045-P1-K1-H4.pep
RHACDVSDAGIEQQISGLHSDLMALQSDLENSLPEDRNRCINELCTLIQSLQQLLFASSTTAQPILTPRPLMKELDEMEKINAKLSAAVEEVTLEHCKKNEIVKHHSQEVGLQRRVFVDFFCNPERLRSQVRELTARVRAFQDS

SEQ ID NO: 83468 - protein, 41 aa, Gossypium hirsutum
  Clone ID: LIB3582-046-P1-K1-A11.pep
IVIILFLVVLLGNLLRVKVCLVFLSFRGKESISKKGKGVWD

SEQ ID NO: 83469 - protein, 118 aa, Gossypium hirsutum
  Clone ID: LIB3582-046-P1-K1-B11.pep
RKLGVRVPHSKARLWEKKVQKPEKLSISSIDFVGLEFADKKKSRGLPPGLVPISDPFTEGDLPDVEILVGDTSQFGEATMPETKPSTEEEDSEFYKPKVSTWGVFPRPGDISKTVRNE

SEQ ID NO: 83470 - protein, 126 aa, Gossypium hirsutum
  Clone ID: LIB3582-046-P1-K1-C6.pep
MEIKVEEEEESHREHGEEKQPLLQHLSPLSQTENKTLIQTAISQTCQSTAHLANLLPTGTVLAFQLLSPIFTNQGNCDSTCRSMKATLLLLCGLSCLLSSFTDSFRDKDGNVCYGFATLNGLWVID

SEQ ID NO: 83471 - protein, 57 aa, Gossypium hirsutum
  unsure (1)..(57): unsure at all Xaa locations
  Clone ID: LIB3582-046-P1-K1-D1.pep
VHIANKPIGSHRETSTHEDAKQVKDCEQRXQWQEQMLERKTHCMKEYRQQGLQDPYK

SEQ ID NO: 83472 - protein, 92 aa, Gossypium hirsutum
  unsure (1)..(92): unsure at all Xaa locations
  Clone ID: LIB3582-046-P1-K1-D2.pep
KITKNEQMNHLQVFLISLYSFAIFFFCVKKVTSKFLWLYSRIHVIXSFLVIWLISLLLVLALFLLYFRLFALVSCFVSFFGFFCRCTMGQRG

SEQ ID NO: 83473 - protein, 203 aa, Gossypium hirsutum
  Clone ID: LIB3582-046-P1-K1-D3.pep
SHVPASPMQSVAPSMPLQQQAEGVLHSQFSHGPPVDQSLSSNRFSDSRTSASSDSSRKFPVATDATITQLPDELGLVEPSSSTIPAASAQHDTKSPSLTKVADAGKNDGIRSSRQSTNTALKAVQSSSQQKNIASPQHYGNSSWYNHQRGNAVSQKNGAGEWTQRRTGFQGRNQSMGGDKNFPTSKMKQIYVAKQTNNGSSSS

SEQ ID NO: 83474 - protein, 149 aa, Gossypium hirsutum
  unsure (1)..(149): unsure at all Xaa locations
  Clone ID: LIB3582-046-P1-K1-D7.pep
MLGGFSHAIESTPDELVAFYXPTPSPKITVDALVKQVLVTNYSRLLMLIQDHVTISYAHYTLYTELPISFAVNDEVLCLSEEALDXLEKCKAXFGLAESADDVTXFIESYKALRDRAPYATNHVGVHLIGSFAFIVFDKCTSTLFVADD

SEQ ID NO: 83475 - protein, 186 aa, Gossypium hirsutum
  unsure (1)..(186): unsure at all Xaa locations
  Clone ID: LIB3582-046-P1-K1-E7.pep
SEGLSALMILAMKDGLLREAGTSRNSPQVSHLLLVDNCVLFVKVTAXTTRGAHTLGTILRKYENCSGQCVNYDKLIVYFSFNTLKGERQVVSDIPGVQSSSDPKRYFGLPNMVGRNKRASFHVLKDRFKRHIDNWSVRLLSXEEMKFLLRLFFKXISIYTMACFLLLKSFCDELESKIANSWWQMG

SEQ ID NO: 83476 - protein, 54 aa, Gossypium hirsutum
  Clone ID: LIB3582-046-P1-K1-F8.pep
MAARSGGSSSSSVPTLPPPCPRSPPEYPDLYGKRREAAKTQMLEREISFLEVCF

SEQ ID NO: 83477 - protein, 46 aa, Gossypium hirsutum
  Clone ID: LIB3582-046-P1-K1-G1.pep
FHIIYRQESLTLCTCKSLAFAIFSIVKAYSIAKPRNSMQSTKNAII

SEQ ID NO: 83478 - protein, 189 aa, Gossypium hirsutum
  Clone ID: LIB3582-046-P1-K1-G10.pep
MTSSPPSKRRRKGQTVDTESPSKSTLTQDNSSPLIVFAHGAGAPSSSDWMIRWKEMLKKALNAVEVVTFDYPYMSEGKRRSPPKAEKLVDFHTNVVKNAVAKYPGHSLILAGKSMGSRISCMVAGREDISPLLIVCLGYPLKGMNGAVRDETLLQLKVPVMFVQGTKDGLCPLEKLEAVRKKMKNMSGL

SEQ ID NO: 83479 - protein, 90 aa, Gossypium hirsutum
  Clone ID: LIB3582-046-P1-K1-G12.pep
SRNNSLLVEHDGVSSEWVESVTETTCNVNAHAFNGSSVIDYRATDTMRSKPYLSKCCHTLLRIDTMLTSGLQTERYNQLIIDIQIYCFYV

SEQ ID NO: 83480 - protein, 73 aa, Gossypium hirsutum
  Clone ID: LIB3582-047-P1-K1-A6.pep
IAVESFPEELFSILRTVHLLRGLSVGLGINFSCAEQWRPIAEEALYNAGRLKGANRKSRVRKPSSFRRFFWRN

SEQ ID NO: 83481 - protein, 60 aa, Gossypium hirsutum
  Clone ID: LIB3582-047-P1-K1-B7.pep
PTRGRTRGQIVHSCLKLSDEPAVSYDFDSAAWIRLSPAKDDDSPRKWEDALEMNTDLINS

SEQ ID NO: 83482 - protein, 118 aa, Gossypium hirsutum
  unsure (1)..(118): unsure at all Xaa locations
  Clone ID: LIB3582-047-P1-K1-C10.pep
PITPYNQQXIANCCKXGVLNSFLQDPSTALSSYHVSLLQSATTNNTLIIPKNFTFNSLAAPLXLTCPPLDFNDLLTFVTAXKRRFTPAFITFNVSCTYSQSLAHKTPTCCVSLSLFYN

SEQ ID NO: 83483 - protein, 62 aa, Gossypium hirsutum
  Clone ID: LIB3582-047-P1-K1-C3.pep
FTHTPQSQWYLVEVVYPFLEIFNLYASACITYGEVHCSSSICLFFKWYGISSFFSLFNYYWY

SEQ ID NO: 83484 - protein, 125 aa, Gossypium hirsutum
  Clone ID: LIB3582-047-P1-K1-D8.pep
MVLPDEASKRLEGKYIAMVVCWFLGNGCLFSWNSMLTIEDYYVYLFPNYHPSRVLTLVYQPFALGTLAILAYHEAKINTRRRNLFGYTLFFLSSLAILVVSSLAIYLVHDGFTLRMATEACSLIL

SEQ ID NO: 83485 - protein, 170 aa, Gossypium hirsutum
  Clone ID: LIB3582-047-P1-K1-E10.pep
MSPDNPSVKPAAKDENQSSGNRKTGSTRAAQDQQAALKCPRCDSPNTKFCYYNNYSLTQPRHFCKTCRRYWTKGGALRNVPIGGGCRKNKKLKPSSRLSSDSKDSISSSEMGGGLKFFHGLSPAMDFQLGGLSLPRLKPSPPAIYNQFASFGDTDTPSPASFTLDPSGSS

SEQ ID NO: 83486 - protein, 85 aa, Gossypium hirsutum
  Clone ID: LIB3582-047-P1-K1-E11.pep
PRVRNIFRSWWEQTNQRGTLTEVLDVQELNVDRLEQLIKNFGGFDLEVGGSACNNLTGSNRYNRDGLEGKDSALFFDLSRILDWV

SEQ ID NO: 83487 - protein, 110 aa, Gossypium hirsutum
  unsure (1)..(110): unsure at all Xaa locations
  Clone ID: LIB3582-047-P1-K1-E12.pep
MGCAVEKINLRSLSDRFYRENRANGEXLERMYMLTTEQMLRLIKRCHMKWGDLINLCTGLRPIKLSCLKVEXKVRKPWWVPSCVLKSFXKVTEPNKQSTVCSLELTPLCY

SEQ ID NO: 83488 - protein, 75 aa, Gossypium hirsutum
  Clone ID: LIB3582-047-P1-K1-E3.pep
ISENSRSCLPASTAKQIENKALPSSVVVEQVKDSRSCIPALTAKQIEDGRFYLNVVTVEYIKASNSTSLDNSGID

SEQ ID NO: 83489 - protein, 156 aa, Gossypium hirsutum
  Clone ID: LIB3582-047-P1-K1-E6.pep
MFGEKDLSSNLPCVGDESSQSKLSRLFQNKESSVEKVSFVEKGIDFLRESKVGLDGGYPLPRSSKPGISGSQELTLSYLCENPKLGFCSEKTQTLLEKVTSYKGKEVVDSENTHQDEKWVERDFLNLSESKGISAKRDGRDDFKKEGLVIGRKSPS

SEQ ID NO: 83490 - protein, 87 aa, Gossypium hirsutum
  Clone ID: LIB3582-047-P1-K1-E7.pep
QFSLFPVPFPTLSLTDADTAKGGGASIVVEVILAGDSLLALPGTSGASPAISAISDPNTSSHHFKYKKKKRRRRKVTLSTQSSSLHI

SEQ ID NO: 83491 - protein, 194 aa, Gossypium hirsutum
  Clone ID: LIB3582-047-P1-K1-F7.pep
MTTITESDVGILCFISNLPGFHGILKQRYSDFIVNEVDTEGNVVHLTSLDAPPEAFQEVETKISDQLNKNYASEIEKFRSLACEIDVDRLEAFINQITSGSEEDISPIVLSPDSDKSHRTAMHNFFKENLRFLVTDTVDGPDSSSKCMRVRLNSGNKNKGRNLNKRKRGDRPYDRRGSSHWPAHVGNFLKFHLF

SEQ ID NO: 83492 - protein, 133 aa, Gossypium hirsutum
  Clone ID: LIB3582-047-P1-K1-H5.pep
IGRAVPARPATRALTYGSYGLGVHGSQSDIDGLCVSPYFATMVLTDLFIVLYNILNSTPEVSHIYCVKDVKVPLMRFAFDGILIDLPFVHLKDLDAPEAMVNHYYLALLYYSTQNRPVNNFGQYKEYFLNGSQ

SEQ ID NO: 83493 - protein, 59 aa, Gossypium hirsutum
  Clone ID: LIB3582-047-P1-K1-H7.pep
PRVRVGLQVLASTIPSAKINLSSIAAINNHLCTTVQQISSALSSNCIGSCNEGDNGKEK

SEQ ID NO: 83494 - protein, 147 aa, Gossypium hirsutum
  Clone ID: LIB3582-049-P1-K1-A10.pep
MDELETRPVEKGGFDSSDGNDDDLLLKTLRWPKKSLLRPKVEAEESLGCEQQNVENVLVSNFGGEEAAEESGLTTPRKNLELKMSKKISLNKCPMTVKELFDTGLLDGVPVVYMGTISSKTAGLRGIITDGGILCSCSLCKGRKVVP

SEQ ID NO: 83495 - protein, 85 aa, Gossypium hirsutum
  Clone ID: LIB3582-049-P1-K1-A4.pep
TRLTLTCMRMHSYSIAIPKPKSMAVAVQRQHWDCDNLAQLNLIGVDAHFASWSCSDKAQADSDCQHQHMLNGNGDWHCSCTLTST

SEQ ID NO: 83496 - protein, 79 aa, Gossypium hirsutum
  unsure (1)..(79): unsure at all Xaa locations
  Clone ID: LIB3582-049-P1-K1-A6.pep
PIHQPAKLPTFLGGYYHEVRFHFSNTDIFGLYISTLSITKPLFKTSITFIAYPHFFSQSSTLIYAVVVSXCLVGQPQHG

SEQ ID NO: 83497 - protein, 155 aa, Gossypium hirsutum
  unsure (1)..(155): unsure at all Xaa locations
  Clone ID: LIB3582-049-P1-K1-B10.pep
MASSPAQDDALKKLEYLSLVSKVSSELESHVGFSDKVLAEFITDMGRHSETVDEFDVKLKENGAELPDYFVRTLLTIIHAILPPKPKAEKESKKAIAGDGKKSKXKALAIADDKDRAKELEKEIEMETRDLKKVEGRDRGRGDQDVKRREKKKEN

SEQ ID NO: 83498 - protein, 81 aa, Gossypium hirsutum
  Clone ID: LIB3582-049-P1-K1-C1.pep
MGKKMKMNPLFIFLLGTIFTSIVAEPVKDKQALLDFIQHIHHSRPLKWSKQDSVCNTWVGVACNNDHSRVIGLHLPGMGFH

SEQ ID NO: 83499 - protein, 178 aa, Gossypium hirsutum
  Clone ID: LIB3582-049-P1-K1-C10.pep
MSAAANATATATASHPHILVFPYPAQGHMLPLLDLTHQLALRGLTITILVTPKNLPFLSPLLSSHPSSITPLVFPFPSHPLIPQGVEHVKDLGNSGNLPVMAALGKLHDPLLNWFNSQSNPPVAIISDFFLGWTQRLATQLQIPRLTFFASGAFVVSLSDYMWSNIEKLKSLSEIKLN

SEQ ID NO: 83500 - protein, 70 aa, Gossypium hirsutum
  Clone ID: LIB3582-049-P1-K1-C11.pep
YLPLEVPCHSLLGVNPFFFFHFFIYNNKYCLICAGATFLVWFGPTVRLTVADPDLIREIFTSKSEFYEKN

SEQ ID NO: 83501 - protein, 54 aa, Gossypium hirsutum
  Clone ID: LIB3582-049-P1-K1-C2.pep
LSGVGGELRVYLERLALAENVQKFLELNPFGQIAITERSHDWGFYSRVIDTCVH

SEQ ID NO: 83502 - protein, 160 aa, Gossypium hirsutum
  unsure (1)..(160): unsure at all Xaa locations
  Clone ID: LIB3582-049-P1-K1-D12.pep
CIVSVRTEPNSSVELPSSYRGENYDAEVQKSHIDAYPLESQKGGRTRSVILNLQKRRRSNFXGPTLFASPLIVSVSNXPSFDAYKHRRLCSSSGEKEMPSATDEDADADVMEQHDQFIGSMQSRLVXLQVVHRLWERNDIKGAIGAMEKMSDHGTLADLI

SEQ ID NO: 83503 - protein, 141 aa, Gossypium hirsutum
  unsure (1)..(141): unsure at all Xaa locations
  Clone ID: LIB3582-049-P1-K1-E6.pep
SFERERGIYLFIEELQNLQLIKKENRSYDAVEDSHILNKASEKHETLXNNLKGTYWTLFYIALTAKTYASPSMMIMRYSMIKSNLVRSTRIVPDKLSNRDSGSVEELTRHIAEHXDQPQMYRLAHYPLQVSVQYLLVLRFA

SEQ ID NO: 83504 - protein, 98 aa, Gossypium hirsutum
  unsure (1)..(98): unsure at all Xaa locations
  Clone ID: LIB3582-049-P1-K1-F6.pep
MTVLMINIICFSSFIQLSDILSALGPWKVIEHKPYDHKADVFSFGVVLWEMLTGKLPYENLTPLQAAVGVVQKDLRPVIPQYTRPKLXELLERCWQQD

SEQ ID NO: 83505 - protein, 177 aa, Gossypium hirsutum
  Clone ID: LIB3582-049-P1-K1-G4.pep
MSLISQNPVSRNKVKVKRDDEVVSINEDTNDTENGLESDSEISKLKKRKKEKEKQIEVEQETEMKKLESFLFGSIYSPLEFGKQVEEKAHDVVAEDGSALFFLDSSTNDVELSEESDYEQKTCKERKAVWVDEEEERTVINIAKVNRLRKLRKEEDESVVSGSEYVSRLRAQHAKLN

SEQ ID NO: 83506 - protein, 36 aa, Gossypium hirsutum
  Clone ID: LIB3582-049-P1-K1-G7.pep
YYKRNPPLNERVSKVGCFIKNGEDLEIVDACGREGY

SEQ ID NO: 83507 - protein, 154 aa, Gossypium hirsutum
  Clone ID: LIB3582-049-P1-K1-G9.pep
MEGFRRVESQTSSEASAPELTLQSSPELARDEQNSTLDSMMSESTSTEWTDEKHSLYLKSMEASFVNQLYDSMSFLGCNSKEKSPGSKSSRKTHCISSGQFKVLRGGSWKKINFERPGVQLNKRDQLNKRDCSHSFVASPWIQHFRSGSKSRVL

SEQ ID NO: 83508 - protein, 125 aa, Gossypium hirsutum
  unsure (1)..(125): unsure at all Xaa locations
  Clone ID: LIB3582-049-P1-K1-H9.pep
MAEEENEEIKSFKDLGLCDELVEACDSLGWKTPTKIQVEAIPHALEGKDLIGLAQTGSGKTGAFALPILHALLESHSKQGYKSAPVFFALVLSPTRELAIQIAEQFEAXGSGISLKCAVLCGGVD

SEQ ID NO: 83509 - protein, 166 aa, Gossypium hirsutum
  Clone ID: LIB3583-054-P1-K1-A10.pep
GKGGPSTSNGLPSTSVGKDQPRHSQLFAYKDSKSDKDRQQVSGKRVKDKVLVSLTDGPMDQMNDGVEVSRKRKADACVGSQLCTGSLQSASDLLQDSKVFVKEEFNENDNNREKKARVSESRRKDSSASKSSGKLEKKGIHEQNQQSGQYLGSLDGTDSLKRDFGS

SEQ ID NO: 83510 - protein, 79 aa, Gossypium hirsutum
  Clone ID: LIB3583-054-P1-K1-A6.pep
IIIKKDSLSIIKKCKVKNPDKSLIGAYIHDIQQLLVKYKKCRFEYIPPMENSLAHILATETLKNKKEFYLVGSVPADAW

SEQ ID NO: 83511 - protein, 64 aa, Gossypium hirsutum
  Clone ID: LIB3583-054-P1-K1-A7.pep
SSFLIQNKDSTYRACLVTCTIKDKLDFPCLNSSLIICTRARIQIENFLTLTKNRIYIKINKKLD

SEQ ID NO: 83512 - protein, 151 aa, Gossypium hirsutum
  Clone ID: LIB3583-054-P1-K1-B1.pep
AVSLEICSQNAPSTNSKSKESSNGNLVLSQSPTASQVGNSKVEKQRGSDPIIRNEDVMFVIENLMKEKRRNFVVVGECISSVQGVVRAVIDKVDKGDAPQSLRDTKFVNLPFSCFGHLNKVEVEQKLEELKSQVRSCLGTGIVLNLGDLKW

SEQ ID NO: 83513 - protein, 165 aa, Gossypium hirsutum
  unsure (1)..(165): unsure at all Xaa locations
  Clone ID: LIB3583-054-P1-K1-C2.pep
MAAASSATAIPSLDKVDFLKLQNGSDIRGVAVSGVEGEPVSLTEPVTEAIAAGFAAWLLDKKKVDASRKLRVSIGHDSRISAQKLQDAVSRGIASAGLDVVQYGLASTPAMFNSTLTEDEAILCPADGAIMITASHLPYNRNGFKFFTNDGGLGKNDIXDILERA

SEQ ID NO: 83514 - protein, 73 aa, Gossypium hirsutum
  Clone ID: LIB3583-054-P1-K1-D6.pep
SHHCELCDSLLCFTFCHFIVLIWFSICHLFFFFFFFSKISCITYYLRNFLPIFNGCLRAVNWGLNFVWEIRLI

SEQ ID NO: 83515 - protein, 159 aa, Gossypium hirsutum
  unsure (1)..(159): unsure at all Xaa locations
  Clone ID: LIB3583-054-P1-K1-D8.pep
TTRSTTRTPTRAIKPGMAINPSTVAIDGLSDQIYTLVMTDPDAPRASEPTMREWVHWIVYDIPGXTNPTRGKEILAYMGPRPPLSIHRYILQLLQQKGPLGAVQQPATRANLRTGFSADHLNXRLPVATVYFNAQKESVSRMRLIYHAHLSLYIYITNI

SEQ ID NO: 83516 - protein, 61 aa, Gossypium hirsutum
  Clone ID: LIB3583-054-P1-K1-E10.pep
DLLNLCEITKGKDNKAVIASNIMYVVGQYPRFLRAHWKFLKTVVNKLFEFMHETHPGVQVN

SEQ ID NO: 83517 - protein, 72 aa, Gossypium hirsutum
  Clone ID: LIB3583-054-P1-K1-E4.pep
HASDDTERVVTINLLDTDSRAGQVVIIHRRFDHAVDPEEDQRQLMRLAHHMHGRSQRGEVLEGEAGGREDAD

SEQ ID NO: 83518 - protein, 184 aa, Gossypium hirsutum
  Clone ID: LIB3583-054-P1-K1-E5.pep
IYTLQWIASREDIEIEKDAVKLIASRSDGSLRDAEMTLEQLSLLGQKISVLLVQELVGLISDEKLVDLLDLALSADTVNTVKSLRVIMETGVEPLALMSQLATVITDILAGSYDFTKERHRRKFFRRQPLSKEDMEKLRQALKTLSEAEKQLRMSNDKLTWLTAALLQLAPDQQYILPISSAGT

SEQ ID NO: 83519 - protein, 42 aa, Gossypium hirsutum
  Clone ID: LIB3583-054-P1-K1-F8.pep
KRYTPYFLVATNSSYNLETLLVIIKHRIHCPLHCPKLKILDK

SEQ ID NO: 83520 - protein, 93 aa, Gossypium hirsutum
  Clone ID: LIB3583-054-P1-K1-F9.pep
NYAFLKKIIFFSLIFLLYQALNGKKVTFSLHFFIFPNKQTNGKNKYISYLLNFHFFQFSVLLPSKVIMNKTNMLTIHPISNILAILMNKNKGK

SEQ ID NO: 83521 - protein, 153 aa, Gossypium hirsutum
  Clone ID: LIB3583-054-P1-K1-G11.pep
REGHNNGPGSEEKASKSAKKQWGFDGFKKWRRNDSEDETAPLPLNERSDSEAFMGSCQLVATPIGEGPDTKQIKRKLLANGAPSDFFIDKVVGDKIKKELSRIQSELSTTNPNLKFSDDQIEAISTTLPVDKADLKKFFPKSWCDRYGEVVLD

SEQ ID NO: 83522 - protein, 188 aa, Gossypium hirsutum
  unsure (1)..(188): unsure at all Xaa locations
  Clone ID: LIB3583-054-P1-K1-G3.pep
NKLGFVDGTYSKDSLPDEMGYQWEPCNVIVLSWILNTVSKELSARIIFASSVAVVWNDLSERLHKIDGSRIYFLHREIISHFQGTTSISVYFTKLRLLXDEYDALLPSSSCGCAQSRLNVEHLLQQRLFQFLMGLNETYNAVRSQILLINPLLSVNHTYSMLVQEESQRQHNYGRCGSDLVSFYSAHM

SEQ ID NO: 83523 - protein, 65 aa, Gossypium hirsutum
  Clone ID: LIB3583-054-P1-K1-G6.pep
LSVVRCEPRPMFLVSVTLLKSFRARLHGFASFIPAARLPVFFFFCFFFFFFFAPPLFFLIESYIY

SEQ ID NO: 83524 - protein, 59 aa, Gossypium hirsutum
  Clone ID: LIB3583-054-P1-K1-G9.pep
NDTEEPLEENQIAYICREALKGLDYLHSIFKVHRDIKGGNILLTEQGEVKLGEYIPIFI

SEQ ID NO: 83525 - protein, 89 aa, Gossypium hirsutum
  Clone ID: LIB3583-054-P1-K1-H4.pep
YHPLIDLRNQCFYSSVSTQKYPLIRQIIKAIIIHSKRRRARSLQADLSRDQVRQERNDKPLVIYRFLSFSMSRLHMHIAHSSFHTKFLC

SEQ ID NO: 83526 - protein, 121 aa, Gossypium hirsutum
  unsure (1)..(121): unsure at all Xaa locations
  Clone ID: LIB3583-054-P1-K1-H8.pep
SWRTXSWRVYALTLLACVLASVFYQYLEHVRYRVRRSRKPAGEPLLSQPNRAAGKWSAKKIAGGLLFGLSSGLGYLLMLAVMSFNGGVFLAIVLGLTIGFLWLRSEDEDEIAGVNSTCACA

SEQ ID NO: 83527 - protein, 72 aa, Gossypium hirsutum
  unsure (1)..(72): unsure at all Xaa locations
  Clone ID: LIB3583-055-P1-K1-A12.pep
TQHYFNQNRRLXNACLRQFWRLMDIKDTVKVEQLNQGSIFALHYKLEATYMILVTEGDGYTQMGSTYLTRHS

SEQ ID NO: 83528 - protein, 140 aa, Gossypium hirsutum
  unsure (1)..(140): unsure at all Xaa locations
  Clone ID: LIB3583-055-P1-K1-A2.pep
REALKLEHRNSKGCNYGPPYEWQVYNTLNGCYGIPGVHYKGRQGDFYILVMDMLGPSLWDVWNSLGQSMSPNMVACIAVEAISILEKLHLKGFVHGDVKPENFXLGQPGSVDEKKLYLIDLGXASKWKGSHSDKHIDYDQ

SEQ ID NO: 83529 - protein, 73 aa, Gossypium hirsutum
  unsure (1)..(73): unsure at all Xaa locations
  Clone ID: LIB3583-055-P1-K1-A3.pep
EERLALERHHHXKQNQSLRPFTSSXLVTHXKKVRNIPQSSTSXLXXTLGFKPKKXKXXKKXXKLRKENLKNXT

SEQ ID NO: 83530 - protein, 81 aa, Gossypium hirsutum
  Clone ID: LIB3583-055-P1-K1-B9.pep
DTSPRILLLTIFVLNGLLWLDGSLCISKGLRSIFARECVSFCFKRNCNPPFVGWVKGDISVIGITYTSLAALEFRLIMGNV

SEQ ID NO: 83531 - protein, 184 aa, Gossypium hirsutum
  Clone ID: LIB3583-055-P1-K1-C3.pep
HQLCKNPRPNPDIKTLFTDHSCSPPNGARAPTPVTLPVAAVAKPSTYAPLGAHGGPFPPAAAAAANANALAGWMANANHSSPVQPAVIAASASSLPVPQNQVSVLKHPRTPPDTLGMTEYGSTDHEQLMKRLRSAQSVDEVTYPAPPQQASLSLDDLPRSCACTIHQGSNVTSMDFHPTHHTLL

SEQ ID NO: 83532 - protein, 64 aa, Gossypium hirsutum
  Clone ID: LIB3583-055-P1-K1-C5.pep
ERCIYIKKRDNSCLLSKCYQLKETGHSQSVALIEKPVHKKLLSSREDIPDSDRFPQRKRLKKLF

SEQ ID NO: 83533 - protein, 124 aa, Gossypium hirsutum
  Clone ID: LIB3583-055-P1-K1-C6.pep
INFDAAFHSPVRLAITAVVARDSTGEIREAETYLFENVVDAFVAEARACERTLIFASSMGFWRIAVEGDSHFVPCMANEVAHLLALEGRKSKFFGYWVDGVLDAVEVRAMKDILDWNQSYHSLP

SEQ ID NO: 83534 - protein, 158 aa, Gossypium hirsutum
  unsure (1)..(158): unsure at all Xaa locations
  Clone ID: LIB3583-055-P1-K1-C8.pep
TNSSSLFQMVCSNTTRFSCDNLCGNLLPCGNHYCTKTCHPLETQPSSSGHQKRSESCEVCNLPCQKVRMPKCSHPCSLPCHPGECLPCKVLVKRSCHCGAMVHAFECIHYNNLSEKDQVAARSCGGPCHRKLPNCTHXCPEICHVDKCQPLIVQQKGT

SEQ ID NO: 83535 - protein, 54 aa, Gossypium hirsutum
  Clone ID: LIB3583-055-P1-K1-E11.pep
ISSWIIQSQRKVPQKLRDRAGKKEANCPGKINLPRRKKNQSLLILFSISIKLLL

SEQ ID NO: 83536 - protein, 183 aa, Gossypium hirsutum
  Clone ID: LIB3583-055-P1-K1-E3.pep
KDLMMVHLLRLACASKGPLTDALPQIITELYNLGMFSEWVRDLALKSSLTFKKTFDHAFHQHMVSSKVSEFWKPTFDLGGPSASLPNSRYLSDFEELQPLGHGGFGHVVLCKNKLDGRQYAVKKIRLKDKNLPVNDRILREVATLSRLQHQHVVRYYQAWFETGVANSFGDNACGSETATGST

SEQ ID NO: 83537 - protein, 89 aa, Gossypium hirsutum
  Clone ID: LIB3583-055-P1-K1-F12.pep
SLFDQAKAFGGSCVVGYFQPVAKWGNPFRSVIKINFDIAFDIYSSRSTSGIRARNMAGQVLISCSIIHNWVPSSFAGKRSHVSGQCKLG

SEQ ID NO: 83538 - protein, 177 aa, Gossypium hirsutum
  unsure (1)..(177): unsure at all Xaa locations
  Clone ID: LIB3583-055-P1-K1-G12.pep
PRGTWEDVYRNAKKADRMRNDLHERDERELERIGQPLCIYEPYFGEGTWPFLHQNSLYRGIGLSTKGRRPGMDDVDGPSRLQLLNNPYYRDTLDEYGAFFAIANRIDRLHRNAWIGFQSWRATARKASLSGIAETSLLDAIEKRKYGDALYFWVRMDTDPRNNMQRDXWSFCDAINA

SEQ ID NO: 83539 - protein, 161 aa, Gossypium hirsutum
  Clone ID: LIB3583-055-P1-K1-G2.pep
MAAELDLLSLTQLQKLAQSQQNHNHHQLDTNLATVGSLMWYPKGQSHEVDDDSWEVRAFAEDTGNVMGTTWPPRSYSCSFCRREFRSAQALGGHMNVHHRDRARLHQAHPAAAAGGNGALNNPTSPSSPSTTSSSTLLIPTQEFVTNGGLCLLYQLHNPSD

SEQ ID NO: 83540 - protein, 136 aa, Gossypium hirsutum
  Clone ID: LIB3583-055-P1-K1-G6.pep
VFIRKKFCGRRLLHFTKKNMGGAVNCPSVMNILFGYIILTVFLVLVCMEPNQVEARVEPPYPPDYELKALHEIAAELGKKDWNFSENPCNNKSSWFTPPPTHGSQAINNSTVTCNCSFTNGECHIVVMYVLLVLRI

SEQ ID NO: 83541 - protein, 123 aa, Gossypium hirsutum
  Clone ID: LIB3583-055-P1-K1-G8.pep
ESHPSAARRSVVVPMLSILLLVLFVANSGEAGGTCTTVDANADACLGFATGMAAKPCDACCNGLWQIAQTGQCGNDKKVICRCLKDGAKFLVMQDRLLCMSSQACNIKVDFPVSVNTNRETIH

SEQ ID NO: 83542 - protein, 75 aa, Gossypium hirsutum
  Clone ID: LIB3583-055-P1-K1-H6.pep
VAHRRCGACTAPLSLYSSHLRISISHLCWSTAFLPNLQETLKFGFPVLSRYITIFYFVFFWLIGLCSVLFWLPCK

SEQ ID NO: 83543 - protein, 83 aa, Gossypium hirsutum
  unsure (1)..(83): unsure at all Xaa locations
  Clone ID: LIB3585-019-P1-K1-A1.pep
KQDTFRILSSISCILSLMACTSRSQFSTSCLTRLPHRNSAFILSSTSLFIAFSWRCFARRSFFLSSSFXVMLYVRTRRISQAL

SEQ ID NO: 83544 - protein, 102 aa, Gossypium hirsutum
  Clone ID: LIB3585-019-P1-K1-A4.pep
THTSVASSIQTHSLSQISLIFLGMLNVYRMYSKLISSIIAESAPCAPNTFYHKLLPAVQRPTLKLIETLFDTADNQPHIAKHCEPAMMDPVLDDYATNMPDA

SEQ ID NO: 83545 - protein, 99 aa, Gossypium hirsutum
  Clone ID: LIB3585-019-P1-K1-A7.pep
RQRLNLEKLEVDKTVRDEEGNGLEERERVLMVEDLKKRGRTVVFIPERRRQRVVKLMNVVAMSIDSVAIFFVFELVIAGIPVWGEKDETEEQERRPHAW

SEQ ID NO: 83546 - protein, 109 aa, Gossypium hirsutum
  unsure (1)..(109): unsure at all Xaa locations
  Clone ID: LIB3585-019-P1-K1-A9.pep
RVAEKHMGDPYYRYPSAAADRGSIPRSAFPGYFSSEAPSLPSHHADMQINQMQPXKYGVNDISNPGVYPESNLGGLSAGANARAYPSSFGDPSLGTQRWNAPVGINSNT

SEQ ID NO: 83547 - protein, 114 aa, Gossypium hirsutum
  unsure (1)..(114): unsure at all Xaa locations
  Clone ID: LIB3585-019-P1-K1-B10.pep
GRTAPSRPTFHPDQLTNNTHDTINNRSRVHITSGKYTVDLXLIVXRILNYNCTVLLSSINCTAVRKATIEYYAISCMAAAHYYLXNDVDSCTDCVYYTRGCYISIIDSHHCDIN

SEQ ID NO: 83548 - protein, 176 aa, Gossypium hirsutum
  Clone ID: LIB3585-019-P1-K1-C6.pep
PRVRGRVGLTPEGDNTALTHDMKAIQRQVVEDQKLLREKVQHLSGDAGIERMECALSETRTKFFQAKERGSPMGSPLTSFLSPNIHGSPSSRNARTHNRSTPTQKPNRVVRSLFKEDGTTPSKSHGSSVASSSHSDAQLGSSIEKHMVTENALIINEFLHGQRVFVDNSVPLMKIK

SEQ ID NO: 83549 - protein, 42 aa, Gossypium hirsutum
  Clone ID: LIB3585-019-P1-K1-C8.pep
WAIGAVLLAMLSADQTRMCCNASQLSCATVLLVLSLCLSASH

SEQ ID NO: 83550 - protein, 79 aa, Gossypium hirsutum
  Clone ID: LIB3585-019-P1-K1-D2.pep
PTLNSTSFPIHKGGQRFPFGEMKPGSYTYYGSCYYQNKGQSNSTGFWNNYGVLRGGRSLLKKEGEGMEIVQKGTGFSKF

SEQ ID NO: 83551 - protein, 176 aa, Gossypium hirsutum
  Clone ID: LIB3585-019-P1-K1-E10.pep
LCYMGQGGNVMQKGKQPEDQKLERGNLALANSRFVKNPVRVIRGETKSSSTLLEARGKTYVYDGLYSVEEFKQEPGPHGKLVYKYKLVRIPGQPELTWKVVKKSKVREGLCVHDISLGKEVIPISAINTIDSEKPPPFEYVCHMIYPDWCCPIPPKGCGCTKGCSELGKCSCVMKN

SEQ ID NO: 83552 - protein, 44 aa, Gossypium hirsutum
  unsure (1)..(44): unsure at all Xaa locations
  Clone ID: LIB3585-019-P1-K1-E6.pep
KVQFVQWISLFQFIVVCKASPVIKGFGICSNHSCNNICVQILPX

SEQ ID NO: 83553 - protein, 136 aa, Gossypium hirsutum
  unsure (1)..(136): unsure at all Xaa locations
  Clone ID: LIB3585-019-P1-K1-E9.pep
ANCNTFLKEEAGRILRIPLTRGPHDDFMVWSGEPSREFSVQSAYKLLQISNPRAYTLQSIYRDLYKKIWLLNLPTKIKITIWKLSWNCVPHXVNMQHRKLVNNSNCPCCGVGAETMDHLFCECPRSLPSTLPLNAD

SEQ ID NO: 83554 - protein, 171 aa, Gossypium hirsutum
  unsure (1)..(171): unsure at all Xaa locations
  Clone ID: LIB3585-019-P1-K1-F10.pep
GRVGRIRSILWAADYELPKTVNRLXGAVLNESGVILDCGASMHWEDGKKATFHCSFLTSLTMNITAIGTHGTLHLTDFVIPYQEQEASYTASAKPGFNELVTGWEPLPSEHTVTVDLPQEVCMVREFATLVQNIKKKGAKPDMKWPTISRKTQLVLDAVKASIEKGFEPVE

SEQ ID NO: 83555 - protein, 181 aa, Gossypium hirsutum
  Clone ID: LIB3585-019-P1-K1-F2.pep
MGSRSMANILKSPLLEKSGTFNVNPSLNDVKRLVSYDLMSSTSGFSSYSSYKLDSETYILDDCKYGSKTMHKRPVSMSSTNSTCSDQSFSLTSTTFSQGMLQCTWNGGIPYFVFLLDNQREVYVANLAKDGAAQNKGLDYMYLFHSSKSSHKEHGISDHEFVGKMTVSTSFSICPQDSKIM

SEQ ID NO: 83556 - protein, 68 aa, Gossypium hirsutum
  Clone ID: LIB3585-019-P1-K1-G1.pep
LVKILSLTNHTSMTKRFYLYLNQIEVPYSTSIHFITYLGLVASSALNNNWKLSLTCYGNIILKMENYS

SEQ ID NO: 83557 - protein, 71 aa, Gossypium hirsutum
  unsure (1)..(71): unsure at all Xaa locations
  Clone ID: LIB3585-019-P1-K1-G12.pep
SFEHLLDECMLFTKRYTIRNRRHTHIHLFILNPKKRXXLEFLSXXLVKKKRNSLCQVIVIQIPCLLXNELT

SEQ ID NO: 83558 - protein, 29 aa, Gossypium hirsutum
  unsure (1)..(29): unsure at all Xaa locations
  Clone ID: LIB3585-019-P1-K1-G3.pep
ALIPCSXTSSKMKRWSSMIKMDLCSDLIA

SEQ ID NO: 83559 - protein, 165 aa, Gossypium hirsutum
  unsure (1)..(165): unsure at all Xaa locations
  Clone ID: LIB3585-019-P1-K1-G4.pep
LLLLAGEIAHFGAGVFLLVQLVSVISFITWLNDWWPSEKXAKRSHIHVMLLATAAYIICIFGIIMMYIWYAPEPSCLLNIFFITWTLVLLQLMTSASLHPKINSGFLTPGLMELYVVFICWCAIRRYEFKLFRFKLICFRVHSLTFHGYKLQPLKPTPSYPVTIL

SEQ ID NO: 83560 - protein, 57 aa, Gossypium hirsutum
  Clone ID: LIB3585-019-P1-K1-G8.pep
TSVSAGETNCNLTSLPSWEEDCAWLLDCQDFGANDFGFDYLNDIELNTLEMGDKSVA

SEQ ID NO: 83561 - protein, 137 aa, Gossypium hirsutum
  Clone ID: LIB3585-019-P1-K1-H7.pep
LEINRKTSSLESETVELSIFWLLPQYVLLGISDIFTVVGMQEFFYNEVPVRMRTMGFALYTSVFGLGSFLSALMISVIEAFTSSGGRQSWFSDDMREDGLDKYYWLLALASTLSLLFYAIFCKFYTTRIELENGNRK

SEQ ID NO: 83562 - protein, 106 aa, Gossypium hirsutum
  Clone ID: LIB3585-020-P1-K1-A9.pep
RDLGLYFLELARLRSSAAPTEMEEDEEEAPEELNTINSSGGFLVVAPDKLSVRYTTVNLHGHDVGVVQANKPAPVKCLLYYFEIYVKDAGAKGQIAIGFTNESFKM

SEQ ID NO: 83563 - protein, 45 aa, Gossypium hirsutum
  unsure (1)..(45): unsure at all Xaa locations
  Clone ID: LIB3585-020-P1-K1-B7.pep
PLXLLXCLGSXRRCSARPARXCXPVLXGCCCAGXCSFGGGGAWVA

SEQ ID NO: 83564 - protein, 62 aa, Gossypium hirsutum
  unsure (1)..(62): unsure at all Xaa locations
  Clone ID: LIB3585-020-P1-K1-C4.pep
EAGMAFILGHSYVRPKKRSSLIKKICDKFXGYDFLRRNSRGPTYALSIAHASTLEVGMVYQV

SEQ ID NO: 83565 - protein, 129 aa, Gossypium hirsutum
  unsure (1)..(129): unsure at all Xaa locations
  Clone ID: LIB3585-020-P1-K1-C5.pep
MDNRNVVVCDNGTGYVKCGFAGENFPTSVFPCVVGRPMLRYEESLVEQELKDIVVGEACADLRHQLDISYPVNNGIVQNWDDMYNIWDHAFYNELKINPSECKILLTDPPLNPSKNREXMVETMFEKYN

SEQ ID NO: 83566 - protein, 115 aa, Gossypium hirsutum
  unsure (1)..(115): unsure at all Xaa locations
  Clone ID: LIB3585-020-P1-K1-D10.pep
MDPERPHRSTSINNSSTSGNNTTSELFICFTSRLSFSSSMKISSKSILSPGRSRESSYISXLSSSLSRRLRNNGSMKGGQALPMFPTHSGXKRGSGFDNPEPSSPKGTXIGQVRV

SEQ ID NO: 83567 - protein, 147 aa, Gossypium hirsutum
  Clone ID: LIB3585-020-P1-K1-F10.pep
MSDWQVGKREEMEQFQRIPRVVVEGVRFSTSKHPDEGPSNLNLDSSYGYRESLQNQTDLDGSSRIHLDQDRAVLLRKLDELKEQLSQSCDVADKPKEKAPVDRGVVPPESYGCTDSWFPNSSSGLQKPSMPFYGPDKHAAEAGPSYF

SEQ ID NO: 83568 - protein, 158 aa, Gossypium hirsutum
  Clone ID: LIB3585-020-P1-K1-F4.pep
NYSSLSSPKAKGPAPFLAKTYALLEEGEEEESGEEGCSKRRKKIVSWNDEGTGFVVWSPAEFSDLTLPRYFKHNNFSSFIRQLNTYGFKKTSSRRWEFKHEKFQRGYKQMLMEITRKKSEPSVFPAFLKASSSSDDHQDHHHHHHHQIMNDSSAVDEE

SEQ ID NO: 83569 - protein, 63 aa, Gossypium hirsutum
  Clone ID: LIB3585-020-P1-K1-G12.pep
PLMLFAIVLFLGGTKVYIYIKPERSVFAAVAHVFVAAYKKRQLNLPSDDGQFYIASFSRSLLP

SEQ ID NO: 83570 - protein, 111 aa, Gossypium hirsutum
  unsure (1)..(111): unsure at all Xaa locations
  Clone ID: LIB3585-020-P1-K1-G9.pep
VVISTNPFQIPRNIFVNRLITSLPPLMATQALSRALLSKPKAVSSFLFPSSRSXSSFSSSSSAASSTKTLITPSPTPSLSLTRRLRAPPATHXFVITFPAVNRLTQQQVSS

SEQ ID NO: 83571 - protein, 83 aa, Gossypium hirsutum
  Clone ID: LIB3585-020-P1-K1-H2.pep
EVDTRPRILAAIWHYVKSKKLQNYEDNSFFSCDPPLQKVFGEEKMKFIMVSQKISQHLTPLPPIHLEHRIKLSGNCAVGSTCY

SEQ ID NO: 83572 - protein, 136 aa, Gossypium hirsutum
  unsure (1)..(136): unsure at all Xaa locations
  Clone ID: LIB3585-020-P1-K1-H9.pep
LVSALTPIDHAKGPTNEVQPALMNTDLLSRESESISLLLSLLSEEDFYVRYYTLQILTALLTNSPNRLQEAILSIPRGITRLMDMLMDREVIRNEALLLLTYXTREAEEIXKIVVFEGAFEKIFSIMKXEGGSDGG

SEQ ID NO: 83573 - protein, 49 aa, Gossypium hirsutum
  Clone ID: LIB3585-021-P1-K1-A4.pep
PCAVPSLIRLQMPLCACNFWRLERARMDRSSKLLFVSSEHFLFYSPRRQ

SEQ ID NO: 83574 - protein, 81 aa, Gossypium hirsutum
  unsure (1)..(81): unsure at all Xaa locations
  Clone ID: LIB3585-021-P1-K1-A6.pep
SSGLFSPMVATPSPLLAVPSAAAIQVKTCAAVGPAVAKERSGFLAGDCGRRFSFSRLSPRXCSSLXGGFRPCLELPAXXRG

SEQ ID NO: 83575 - protein, 48 aa, Gossypium hirsutum
  unsure (1)..(48): unsure at all Xaa locations
  Clone ID: LIB3585-021-P1-K1-B10.pep
VLXXLXLXCLXFXXXPVFXXXWPSXAXXFAXSXLAXXLXXXXXXXXLS

SEQ ID NO: 83576 - protein, 96 aa, Gossypium hirsutum
  Clone ID: LIB3585-021-P1-K1-B2.pep
ESDMENKSQVNGPSSSSSPIHHLFSPKDSPSLSCTSESLGRMVPPPPPGQGKDSIHSDHTTDGKGHSSGTTNNDKSSSIYHTETMEPCYLSSSIYY

SEQ ID NO: 83577 - protein, 140 aa, Gossypium hirsutum
  unsure (1)..(140): unsure at all Xaa locations
  Clone ID: LIB3585-021-P1-K1-B3.pep
PTXXPTXXTTXXXXXXXTXEXXEXRXRTSAAATTARKANXLACTGPFWKKMGPMLNSVSSEDTSFLRQQLNLAEGLDESMSQMFGDGYTVLGGVVPKDASTVCEETAKTHTSTGGFDLKQLDKVTPLCQRGLSASIEQDE

SEQ ID NO: 83578 - protein, 129 aa, Gossypium hirsutum
  unsure (1)..(129): unsure at all Xaa locations
  Clone ID: LIB3585-021-P1-K1-C11.pep
LXKSKAVAADASAAAALAFSDSTIAWAGPLXHGRTEGASYDHESTRPTDYMIGVYNALGQTAFAFAGQAVALEIQATSPSTTERPTQIPTWKGALGAYWIHAICYFPVAMIGYWAFGQDVDDNVLMALK

SEQ ID NO: 83579 - protein, 62 aa, Gossypium hirsutum
  Clone ID: LIB3585-021-P1-K1-C4.pep
QLWCLPDYNISNAELYSVKLCSTNCCHDFNPSAATSYCCCCCSYSSLLWWTLLLSIQFLWCP

SEQ ID NO: 83580 - protein, 94 aa, Gossypium hirsutum
  unsure (1)..(94): unsure at all Xaa locations
  Clone ID: LIB3585-021-P1-K1-C7.pep
PGQXNXDXRKXAXNXXPXXXXHFXKGGXXPXTXRXXQQXRXXNRXEXTQQXXXAKNKXXXXDPRHXXXXTAXAKGRGKKSTKEXXEQXNXXQNK

SEQ ID NO: 83581 - protein, 110 aa, Gossypium hirsutum
  Clone ID: LIB3585-021-P1-K1-D1.pep
GYKYLLHEGQNQLQINYKQLYKRLWNLELPSKIKITIWRCSRNYLPNYSNLHYRRLIGFATCRRCHTGAETREHLFRDCPKRRLHLVRWEAPVGSRVKINFDAAFNRNVG

SEQ ID NO: 83582 - protein, 163 aa, Gossypium hirsutum
  Clone ID: LIB3585-021-P1-K1-D11.pep
VVCKPTTRWELLKKRLVEACPCCSSASEIFYYRSELQPPKPPDVFLLKLCCYDRKGLLHDVTEVLCNLELNIKKVKVSTIPDGTVIDLFFVTDTRELLHTKIRQEETYKALEDIMQRIVINCNIEKVGPEIAACSQASPFLPSGITEDIFHLEVFNELPSVSL

SEQ ID NO: 83583 - protein, 72 aa, Gossypium hirsutum
  Clone ID: LIB3585-021-P1-K1-D12.pep
RCIISCNALSVSPRLLFVCHSSLASVSNIRSICCAIWDGSSYRFLNSELQFSQNICHVMHSPFGSYLQSLIS

SEQ ID NO: 83584 - protein, 112 aa, Gossypium hirsutum
  unsure (1)..(112): unsure at all Xaa locations
  Clone ID: LIB3585-021-P1-K1-D5.pep
ATRAEAARXXQETARDPPXNDAGTRQPDTATAGHGGTKPRRNIRRTGRSQRQAGEGNTLKNKPTATENPRVLTQERPTNGNQKTRQSTCGPQRHAAERPPTALPAMRIRQSQ

SEQ ID NO: 83585 - protein, 108 aa, Gossypium hirsutum
  unsure (1)..(108): unsure at all Xaa locations
  Clone ID: LIB3585-021-P1-K1-D7.pep
RLPLPLLVXXFXLLXPXAPRRFPXPPALGLARRRCPPXXGSWLRVFXVRRXXXWGXALPAWGASXCWVVWXSSARSVSPXXWCWLPAAWVSWVXAWLGVFPRVRVRVG

SEQ ID NO: 83586 - protein, 53 aa, Gossypium hirsutum
  unsure (1)..(53): unsure at all Xaa locations
  Clone ID: LIB3585-021-P1-K1-D8.pep
FLXLFXLLLLXXXFXXAWVFXLLLXXFXXVLGCRCXRFXXXSXPXXFFSSFFL

SEQ ID NO: 83587 - protein, 113 aa, Gossypium hirsutum
  unsure (1)..(113): unsure at all Xaa locations
  Clone ID: LIB3585-021-P1-K1-E10.pep
KRATKXRKGTQXKGRDGGXPEDKGRKSAHXENSXGGHTAAMSRVTLSTIGEKGKLLVSGGNDKLVKVWDRSRCLDAWQTGDTNELLHLNIKLTKKVNRLWTTPAESDNLVVCD

SEQ ID NO: 83588 - protein, 120 aa, Gossypium hirsutum
  unsure (1)..(120): unsure at all Xaa locations
  Clone ID: LIB3585-021-P1-K1-E12.pep
KXREEXXKXXKXEXARPRXERDXTREQXNKDXEXAKXEREDXKKKKXXEQXERATRXQQERXXXXXGXETQKREXEXXXEKRXEEXERXXKEREEXXEREKKXQXEQXXXPKEKAEKEXE

SEQ ID NO: 83589 - protein, 57 aa, Gossypium hirsutum
  unsure (1)..(57): unsure at all Xaa locations
  Clone ID: LIB3585-021-P1-K1-E3.pep
TTRTTTHPEARLXQTMEGAPHCDTKSRQSSEASYRVSMQRQRQHREGLEPPNSRQRM

SEQ ID NO: 83590 - protein, 68 aa, Gossypium hirsutum
  Clone ID: LIB3585-021-P1-K1-E4.pep
TSMGRILSQRRQNKEKWRYNEDFEPEPESDIKGIEEDDLSEDDTLDDYGSSLQIRRILWVRCIWKKVV

SEQ ID NO: 83591 - protein, 52 aa, Gossypium hirsutum
  Clone ID: LIB3585-021-P1-K1-E6.pep
MTEMEPSKKVADRYLKREVLGEGTYGVVYKAIDTKIGQIVAIKKIRLGKQKE

SEQ ID NO: 83592 - protein, 50 aa, Gossypium hirsutum
  Clone ID: LIB3585-021-P1-K1-F12.pep
FTDCLSPAQSSLFIEHAFSNVNQSYITLLSIYRSDVYKCFRGLFVCCGPQ

SEQ ID NO: 83593 - protein, 115 aa, Gossypium hirsutum
  unsure (1)..(115): unsure at all Xaa locations
  Clone ID: LIB3585-021-P1-K1-F7.pep
FGSLALGVFLXXFLCGLLSLGXAPSXLXXXXGSCCLXFFCGFGLGFXVFSPLXLLXLXGVFXALXSLLAFSRSFALXVLGALXXXXXPLSCCSLXPCWVXRVGGRVVXRVVXRVG

SEQ ID NO: 83594 - protein, 155 aa, Gossypium hirsutum
  Clone ID: LIB3585-021-P1-K1-G11.pep
PTRPRTRGLDNKIYLYCGERTGKFVRACELKGHTDWIRSLDFSLPIFSGEVDSVLLVSSSQDKGIRIWKLTLRGSLANIEGTYKRGEIGLASYIEGPVFVAGSFSYQISLESLLIGHEDWVYSVQWQPPSLAAEEDIGFYQPQSILSASMDKTMM

SEQ ID NO: 83595 - protein, 69 aa, Gossypium hirsutum
  Clone ID: LIB3585-021-P1-K1-G6.pep
NASQAEQYVQGSSSERCRQVRLRCNTQSMNQVHQSRFVDIFDSLASDLTLTIAFPAYDSAASCFGALFP

SEQ ID NO: 83596 - protein, 45 aa, Gossypium hirsutum
  Clone ID: LIB3585-021-P1-K1-G9.pep
ALMARYMTVSSACSDPHECRQWPCAASASSTHPYESFSCSACMSL

SEQ ID NO: 83597 - protein, 45 aa, Gossypium hirsutum
  Clone ID: LIB3585-021-P1-K1-H12.pep
MHYLIALTKLIKHGTKHLLGFQNGVNHLRRALHMYPYSILIRDLL

SEQ ID NO: 83598 - protein, 70 aa, Gossypium hirsutum
  unsure (1)..(70): unsure at all Xaa locations
  Clone ID: LIB3585-021-P1-K1-H5.pep
AKQRRGSRAXGKNTRXXKGKKGGKKKAAXPXAKKDRHXSKAXXXXTTRXXGKTXDXPTQXTKSXXEGPKH

SEQ ID NO: 83599 - protein, 85 aa, Gossypium hirsutum
  unsure (1)..(85): unsure at all Xaa locations
  Clone ID: LIB3585-021-P1-K1-H6.pep
TNGKKRKTPXEKPRXEXGAGXQPEXGXGRRRKSTTTPPXXTKXEAAXRATPTXPTTPGTPXTPXXXRRDNXRRSXXXPXSNXATK

SEQ ID NO: 83600 - protein, 98 aa, Gossypium hirsutum
  Clone ID: LIB3585-022-P1-K1-A11.pep
MGGCHSDCRRVCDENLETNAPRWNANVSGYMDTGYTKQARMAYDKMPERDIVSRTSLIDGYIRNNSVNKARATCNETNHKTLVAWTAIINGSVHNERF

SEQ ID NO: 83601 - protein, 97 aa, Gossypium hirsutum
  Clone ID: LIB3585-022-P1-K1-A12.pep
DIEIKGYLIPKGWCFFAYFRSVHLDENHYDWPYQFNPWRWQEKDILSSYNFTPFGGGQRLCPGLDLARLETSIFLHQFVTNFRYSNDIRYHNFQPYD

SEQ ID NO: 83602 - protein, 71 aa, Gossypium hirsutum
  Clone ID: LIB3585-022-P1-K1-A4.pep
ERSIKHVRRALDEAAQSGAQLGILPDTWNRSYINDSYAGYAVYIDARGQATASTGLLLGGARILKHTIVRG

SEQ ID NO: 83603 - protein, 136 aa, Gossypium hirsutum
  Clone ID: LIB3585-022-P1-K1-B1.pep
MAIAVRSSRGGGSGGVGAGFRSLFSYRIFISALFSLLFIATVSVLLTSRPPPTHHHSRLPTGANAYMHRTFLALNSDPLKTRLDLIYKQANDHITLVKTYAAYARKLKLENSKQLKMFDDLTKNFSDLTSKPSLVE

SEQ ID NO: 83604 - protein, 46 aa, Gossypium hirsutum
  Clone ID: LIB3585-022-P1-K1-B3.pep
MLLRFIHMARSMPLKLACLLSLSMAIDAPLTDGAITRADGLVGLSR

SEQ ID NO: 83605 - protein, 147 aa, Gossypium hirsutum
  Clone ID: LIB3585-022-P1-K1-B4.pep
ATRSALLICFLQADVQQKRIIVIAMWSLWFHRNKIVHEGINFSMQAVLGFIRGYEQDIGRCRMLLCPTLRTKVKGIWRPPDLGVIKLNFDAAFVKKKKTATTAVLARNDTGEIVGAETYLFADIADAFVAEARACERALIFASSMCC

SEQ ID NO: 83606 - protein, 115 aa, Gossypium hirsutum
  unsure (1)..(115): unsure at all Xaa locations
  Clone ID: LIB3585-022-P1-K1-B5.pep
PTRPGGINHKPSDTPDPDATIQVTGACGCRREGLVYKKNDVYLDIAASVNLLMFSKGSVVRCDVTGTILMKCFLSGMPDLKLLXNDKIVLVRVSQLKFRPPKSCKTIELDDVTIH

SEQ ID NO: 83607 - protein, 83 aa, Gossypium hirsutum
  Clone ID: LIB3585-022-P1-K1-B6.pep
RPNRITFGGHLATRWFPLLSRGSSNTRFRARQNKANLLHRLDHRNPLRSPDHQQKVPSTGDPSYFHLLHHHLKLICTIKRTEN

SEQ ID NO: 83608 - protein, 96 aa, Gossypium hirsutum
  Clone ID: LIB3585-022-P1-K1-C12.pep
VTSACSIPHCSYSPFPIINKQICAQFWGNGNPSLSLKQATKPSSCTFSNEPQIAFIDAEEKRRFKWVEIGPRITEEQRQAIDKLPLKMTKRCKALM

SEQ ID NO: 83609 - protein, 104 aa, Gossypium hirsutum
  Clone ID: LIB3585-022-P1-K1-C3.pep
ALTYLVGDDGCNVPQTHNYINRRSRDAIVSGPSTSEINGQHSQNDRQCHGFWSDSGIVAAAYMCGAYHADSCCKNIEKLRNAKWCGEISYYALRWLARGLNLLW

SEQ ID NO: 83610 - protein, 95 aa, Gossypium hirsutum
  Clone ID: LIB3585-022-P1-K1-C4.pep
SKSFPVPLKIPASFKQIKTLWPMRPDLQSILQKIQDIKAKLKDHLLTEDTVNEELDTVEAKLKELYQKRSEEQTRDPDAVFSNTKVCTFLIIDIN

SEQ ID NO: 83611 - protein, 67 aa, Gossypium hirsutum
  Clone ID: LIB3585-022-P1-K1-C5.pep
HAPAYKSFPIPTKIIAYFNRINTLRPMRRPLQSILHKDPNIKAENNDHIETQDTGNEELHTVEAQLK

SEQ ID NO: 83612 - protein, 93 aa, Gossypium hirsutum
  Clone ID: LIB3585-022-P1-K1-C7.pep
RCKHESVCRCGLIHNIAVHHVWRAAYKCMRAHNCKRIVTVRTSLDGCKQIKGSEHIERIQLTHWTHRYHRGMSLCYTTGLMRLSDAALFFICF

SEQ ID NO: 83613 - protein, 97 aa, Gossypium hirsutum
  Clone ID: LIB3585-022-P1-K1-D1.pep
RVRDASGHANGHAYAHACAHAFGGKGERQIIWKSRSLLFTWLPPPVSSTTKGAGTDSWWAENQLVKNLETRSKIFDAIIQALVLRYLPRTIDRTMGA

SEQ ID NO: 83614 - protein, 105 aa, Gossypium hirsutum
  Clone ID: LIB3585-022-P1-K1-D3.pep
MFHCPNLKSALHSPFIHSVPSSFQHRVIRPIIMRRSSQVTLSECVCSYMIRPSFLVSLLVSQEHRHSHSCFYKVDRVSASNELLVAALLSSRLRTRIRTRGRTRG

SEQ ID NO: 83615 - protein, 58 aa, Gossypium hirsutum
  Clone ID: LIB3585-022-P1-K1-D9.pep
SCMFHISTILCWCWARLASRNASDIWSMSLCWSTSFSYHHVYSKVSVLSSCDGTIPLI

SEQ ID NO: 83616 - protein, 40 aa, Gossypium hirsutum
  Clone ID: LIB3585-022-P1-K1-E11.pep
PYQICSSILATCFRVLFQKSLEIIFSDLRASHFKSFIILN

SEQ ID NO: 83617 - protein, 160 aa, Gossypium hirsutum
  Clone ID: LIB3585-022-P1-K1-E2.pep
QLTDRHPHLERRSEKSKSVEVIGFATSAISVLSNAELSISDDGYPLVRMDVDQWFLPVPSPVKAAIFESFSRQNMTESEIDVTPCIKQFVQTEYGFPTDSGTEFIFSDCSQALLSKLVLCCIQEGGTMCFPAGSNGNYFSVAKFLKANTVHIPHNFEPGF

SEQ ID NO: 83618 - protein, 75 aa, Gossypium hirsutum
  Clone ID: LIB3585-022-P1-K1-E3.pep
ELSSETVSVRVSLTNPALNVPLQRESHWHIKSALMLDSAIGTVLLDNPPADKKRICCNELHLGAHRVFPCPDIDN

SEQ ID NO: 83619 - protein, 64 aa, Gossypium hirsutum
  Clone ID: LIB3585-022-P1-K1-E5.pep
AVIERAWDLELQPVEVLLFEAHVEQVQHNVWRYVLHKSRPLVLITLSHHTTCLGFHDRYCLSTR

SEQ ID NO: 83620 - protein, 74 aa, Gossypium hirsutum
  unsure (1)..(74): unsure at all Xaa locations
  Clone ID: LIB3585-022-P1-K1-E7.pep
VSDRITSTLYVTGRARSPYYYNACLKGHRGTKVKIHRXSLESRLRTIXKEVADSFYEPANDKCDRMKGGLNDKG

SEQ ID NO: 83621 - protein, 49 aa, Gossypium hirsutum
  Clone ID: LIB3585-022-P1-K1-F1.pep
HYQTAYDSFCVWYTSALSFVLFDTRALSVIIRTEVWVATYVQSRLNIFP

SEQ ID NO: 83622 - protein, 70 aa, Gossypium hirsutum
  Clone ID: LIB3585-022-P1-K1-F5.pep
AGVLSGLAKSIVRIKIPETNRTLPTPTITMEVAENAHKIFLYLNLIPLDKKNMPEPTGKQSPQNPHTITD

SEQ ID NO: 83623 - protein, 24 aa, Gossypium hirsutum
  Clone ID: LIB3585-022-P1-K1-F9.pep
QTTIYGDICQCLSSISSALLTTLW

SEQ ID NO: 83624 - protein, 84 aa, Gossypium hirsutum
  unsure (1)..(84): unsure at all Xaa locations
  Clone ID: LIB3585-022-P1-K1-G10.pep
MLDSLPPELXIKSQSEEECAQLXRLLPPTEAALLDWTINLMADVVELEHLNKMNARNVAMVFAPNMTQLSDPLTALMHAVQVMN

SEQ ID NO: 83625 - protein, 101 aa, Gossypium hirsutum
  unsure (1)..(101): unsure at all Xaa locations
  Clone ID: LIB3585-022-P1-K1-G5.pep
QSKKEAPKRHQPTQPTXRQQEDXTTHDEHXPXTXKRTTTXAQTTTPAPAPXGPTNGTKNHEKAGQNTRDKRXRKTXQAANQRHGQHNNXNKGTTXXAPTDK

SEQ ID NO: 83626 - protein, 66 aa, Gossypium hirsutum
  Clone ID: LIB3585-022-P1-K1-G7.pep
YCLQVLLEFCLLPSPKTLEGFHGKRSTGIIQYMDMRPPIFGHSAHVLMVGGLTPRHDPMMRMLDKG

SEQ ID NO: 83627 - protein, 147 aa, Gossypium hirsutum
  Clone ID: LIB3585-022-P1-K1-H11.pep
PRVRPRVRHRLEEKIFDMESENQVLRQQTLLSTPVKKISEHLQIPVTPNLENGHHIDEANKSNEPQSVTPVKKVGIESNGKLQKSNLERQHENIDALINCVTKDIAFSHGKPVAALTIYKCLLHWTSFEAERTNVFDRLIQMIGTAI

SEQ ID NO: 83628 - protein, 47 aa, Gossypium hirsutum
  unsure (1)..(47): unsure at all Xaa locations
  Clone ID: LIB3585-022-P1-K1-H4.pep
XPRXHPRVAQDPKLLXLYYIPYFLILHPNRRPCRVALTTTTPYTRYQ

SEQ ID NO: 83629 - protein, 106 aa, Gossypium hirsutum
  unsure (1)..(106): unsure at all Xaa locations
  Clone ID: LIB3585-023-P1-K1-A7.pep
MXKNEDPNLQQXREQSLESGNNERHSRFLCGMVXSRISNEFSFRCVFVLFLSLSVLLPGIFWILPFRSSNSGFEAKLAIKLSAPVHACFTLXKPISEACDHIQKVE

SEQ ID NO: 83630 - protein, 119 aa, Gossypium hirsutum
  unsure (1)..(119): unsure at all Xaa locations
  Clone ID: LIB3585-023-P1-K1-B10.pep
VPSKWGNIKSFYLKLLDRXTLPLYQAMPELQTKILADADHHTSSKEEKQEVEEEEDDTSHQQTQKKMKNKGRIHDVQYMDDQEHINDYNSEAARKHEINANISTKKKKTALKKLCSIDI

SEQ ID NO: 83631 - protein, 50 aa, Gossypium hirsutum
  Clone ID: LIB3585-023-P1-K1-B11.pep
RSIILKANGLENFEQLAKVMYPIIFYHRWCMKLIHLTELEYMNRLKWMLY

SEQ ID NO: 83632 - protein, 101 aa, Gossypium hirsutum
  Clone ID: LIB3585-023-P1-K1-B3.pep
PAQLRRNASIESSKELDGGSSKRNKRLDFNSTRVSPFPNGVSQCAPLNNPKTSNALFGSSKKFFSTSLPASRIVSRATSPTSRRASPHRATTPTPTLSSFS

SEQ ID NO: 83633 - protein, 56 aa, Gossypium hirsutum
  Clone ID: LIB3585-023-P1-K1-C1.pep
HDAGVGRRSSCELVFVHLRKVVCGALGLCDVHVRVIPIVGTIICRCLYLMGVLVYT

SEQ ID NO: 83634 - protein, 159 aa, Gossypium hirsutum
  Clone ID: LIB3585-023-P1-K1-C2.pep
AIVMLPDKFGNTALHVATRKKRAEIVSELLRLPDTNVNAPNRDHKTALDIAEELPLSAESSDIKSCLFRCGALRANELNQPRDELRLTVTQIKKDVHTQLEQTRKTNKNVHNISKELRKLHREGINNATNSVTVVAVLFATVAFAAIFTVPGGDQDSGV

SEQ ID NO: 83635 - protein, 168 aa, Gossypium hirsutum
  Clone ID: LIB3585-023-P1-K1-C7.pep
PRVRKELEAYREVHFPLLIERLKNSKPVSPAELRKLGKCPLTPEEAALVLAALGFKRGTYIYLAGSRIYGGSSRMHPFTNLYPNLVTKETLLTYNELAPFRNFSSQLAALDFIACATSDVFAMTDSGSQLSSLVSGFRTYYGDGHAPTLRPNKKRLAAIFSRDSTIGW

SEQ ID NO: 83636 - protein, 100 aa, Gossypium hirsutum
  Clone ID: LIB3585-023-P1-K1-D1.pep
MAKQGSGSILQFAPLQSSVDEGFWHRLSSLKLNKFGIDDSPIPISGFYAPCSHPQVSNHLTLLAESLPSDSNDESTMPPVIRGNRNRCSVPGILYNTNTM

SEQ ID NO: 83637 - protein, 101 aa, Gossypium hirsutum
  unsure (1)..(101): unsure at all Xaa locations
  Clone ID: LIB3585-023-P1-K1-E10.pep
XXIKXPKXPXXRRKXXXGXXKPERXXXXTPEEXAXXERQXEXKEXKDKXXXXXEXXXAPKATTXQXKXGXXXQRKTXXXQXQTRXAXEXXTTXXTXRNXNN

SEQ ID NO: 83638 - protein, 123 aa, Gossypium hirsutum
  unsure (1)..(123): unsure at all Xaa locations
  Clone ID: LIB3585-023-P1-K1-E11.pep
FXXGFXFSLSFLWFPPLXLXSXVXXWXXXXXGPXXXXPXXRWGPXXFLPFFXXLXXXXXLCXPXRVXXSSXXVXXXXXXXXRPXXXLSGXXLLXXRFXLRPSRXXFRXGXLXLXRXXSXPLXX

SEQ ID NO: 83639 - protein, 98 aa, Gossypium hirsutum
  unsure (1)..(98): unsure at all Xaa locations
  Clone ID: LIB3585-023-P1-K1-F8.pep
SLAGTXLPGLPTSYHTARVFKAPSKDVFKVKDPGTHMXRLHYHRFSAPQLNLADSKFHVLVHGLAATTNFSGGGSEGTKVIEHSLGDNSGDDENTNAS

SEQ ID NO: 83640 - protein, 132 aa, Gossypium hirsutum
  unsure (1)..(132): unsure at all Xaa locations
  Clone ID: LIB3585-023-P1-K1-G2.pep
PRVRPRVRTKLIRILTKMEIPMDSYAKLVFNQVENPNPFLCTALIRGYCLQGHVKESVFVYCEMRKKNVLPXSFTFSALFKAXWCCNDVDLGRQIHGQTILIGGFGFDLFGKNSLIEMYVKLGFLGCGRKVF

SEQ ID NO: 83641 - protein, 135 aa, Gossypium hirsutum
  Clone ID: LIB3585-023-P1-K1-G4.pep
TTAGFTTSYPITSPVCMRMTYVPTAAHLESSHGWPEARVRIEIPLTSDGPVNSSMKRRRVRCRRATVRNLSAAGVRGRHGHSWTHSSWTYRRRLAHKITSTLTVRLGVAISSVVRSHWGRKQKFKEELFQEKRRL

SEQ ID NO: 83642 - protein, 134 aa, Gossypium hirsutum
  unsure (1)..(134): unsure at all Xaa locations
  Clone ID: LIB3585-023-P1-K1-H10.pep
LPSSCXCXXCXLLSSWLXSLXXGCCSAXPXXXLXCXXXXXXXXXXLVSXFGGLFLXFXVPXAXXXXLLPLXPLXLLXLSLRVVXXXCXLVFLXLGXVXXXCFXGLXCXXPPPLRCXLXXXXLLXPXAWVARSIP

SEQ ID NO: 83643 - protein, 96 aa, Gossypium hirsutum
  unsure (1)..(96): unsure at all Xaa locations
  Clone ID: LIB3585-023-P1-K1-H2.pep
GRGGRGGRGQPPAPPXAPPPKPXXPPXTXXNPNHGPPXPXPPTASXXGNXXXXPPPXXQASGGKNHHXPPPPXGGXXGXXHXPPTXKNHPTPPPPN

SEQ ID NO: 83644 - protein, 169 aa, Gossypium hirsutum
  Clone ID: LIB3585-023-P1-K1-H5.pep
HASESIIVSTRTGTTYKAMLPDGSALAIKRLTTCKLGERQFQWEMNRLGQLRHPNLTPLLGFCVVEEEKLLVYKHMSNGTLYSLLHENTATIDWSIRFQIALGGARGLAWLHHGCQPPILQQNICSNVILMDEDFDARIMDFGLANLMTSSDVYETSFAKRDIGEFGYI

SEQ ID NO: 83645 - protein, 81 aa, Gossypium hirsutum
  unsure (1)..(81): unsure at all Xaa locations
  Clone ID: LIB3585-023-P1-K1-H7.pep
APCSXXVXRVPXXSLVGLAXXLGLGLXSXXVSGGXLXMXGXVVXXXSXXPFSPXFESSPLFXSSAXSXWFPXSPVVAVLFL

SEQ ID NO: 83646 - protein, 179 aa, Gossypium hirsutum
  unsure (1)..(179): unsure at all Xaa locations
  Clone ID: LIB3585-024-P1-K1-A6.pep
ISGMEQTSFLFQQASKVGFSHSNILRSIISRACLRFPELATYSSKSSQFQKNLNSSKLNGTSKGREGFRKVFVLFGGDTSERQVSLMSGTNVWLNLQGFDDLDVTPCLLARSIDHSSNTDSDKKDAGLNSIEVWSLPYSLVLRHTTEEVLDACMEAIEPARAALTSRLRNQXMNELAEG

SEQ ID NO: 83647 - protein, 131 aa, Gossypium hirsutum
  unsure (1)..(131): unsure at all Xaa locations
  Clone ID: LIB3585-024-P1-K1-B4.pep
MTVAAKAATTDSCFGEDQVWPPGFRFHPTDEELVLYYLKRKICRRKLKLDIIRETDVYKWDPEELPAQSILKSGDRQWFFFSPRDRKYPNAARSNRATGHGYWKATGKDRTVTCNSRTCXVKKTLVFYRGR

SEQ ID NO: 83648 - protein, 108 aa, Gossypium hirsutum
  Clone ID: LIB3585-024-P1-K1-C2.pep
RAREDAKHQVGLLLKIKFDVHENISSVFTAEAMACLQAIRLGINLRLSMVKIEGDAQSVIRKLLTEEENRSEIEAYIEDSKRLCTRFCSFVFRFTHKESNRVPPYAAE

SEQ ID NO: 83649 - protein, 42 aa, Gossypium hirsutum
  Clone ID: LIB3585-024-P1-K1-C9.pep
HLIKWFRVTKCLAFISWVMFDMGNVCQKFTFSFENMCLSRRV

SEQ ID NO: 83650 - protein, 90 aa, Gossypium hirsutum
  unsure (1)..(90): unsure at all Xaa locations
  Clone ID: LIB3585-024-P1-K1-D3.pep
MKFGKSLSSQIEETLPEWRXKFLSYKELKKKVKLINRTSVGRPINRLRLNQNFGDVVYVGDNVGDGNGLSREETDFLNLLEDELEKFNTF

SEQ ID NO: 83651 - protein, 66 aa, Gossypium hirsutum
  Clone ID: LIB3585-024-P1-K1-D8.pep
TLEAAYSCLSNESATDNSDHFLLDYVDVLALIVCNLLSTIIWSLFFLAPTDKGRSGPYMRNILSLT

SEQ ID NO: 83652 - protein, 187 aa, Gossypium hirsutum
  Clone ID: LIB3585-024-P1-K1-E1.pep
RRIEVLNWLAKQANLSECSKSMGSGARGVGSEFTKAEVQRHIVDTLKASVVEPWLAAHGDPSRCVLLGVSCGANIVDYVARKAVEAGKRLDPVKVVAQVLMYPFFIGNVPTQSEIKLANSYFYDKAMCLLAWKLFLPKEEFSLDHPAANPLISDRGPSLKLMPPTLTVVAEHDWMRDRAIAYSETLK

SEQ ID NO: 83653 - protein, 79 aa, Gossypium hirsutum
  Clone ID: LIB3585-024-P1-K1-E10.pep
PLEPLKKGRVKKWDLKRYDILNGIFKALHPSHKTFKITKKLTKKMRQNMPIPNRIRMRTHNTTRNTAKRKHWRRTKLGT

SEQ ID NO: 83654 - protein, 83 aa, Gossypium hirsutum
  Clone ID: LIB3585-024-P1-K1-E6.pep
RTHTCDKAAIRDGQLNTTHWAAEYNADNSETMSGPNDRAAHKILDTPGGVVPIRAHTVGRTNSGTLWLAKDTHAEPAHKAQHV

SEQ ID NO: 83655 - protein, 153 aa, Gossypium hirsutum
  Clone ID: LIB3585-024-P1-K1-E8.pep
MSLAAQKQPKDLPSLLFSDFMLFCSFLLSHPLYFSYFIFFSPYLFKVFSFLSPLFVTTALLLLAFLTLTPTFFNHGGAFHLDSSPDSKASFLLTAYRTLVETLRSKVDDAESDGFGCFEELEAFKIMFEASTTVVETCENPDDVLAVESQGEC

SEQ ID NO: 83656 - protein, 183 aa, Gossypium hirsutum
  unsure (1)..(183): unsure at all Xaa locations
  Clone ID: LIB3585-024-P1-K1-F1.pep
MDSGCVALKVNSHLVNVRNSGFGNGDNTFLGERIRGSLNNNSVWVNRVANSLSTYNKKAMKIKPGAFAVITSNNPREAKTLPSRRFNRQRVDPKNVASVILGGGAGTHLFPLTRRAATPAVPIGGCYKLIDIPMSNCINSGINKIFVLTQFNSASLNRHVARTYYXNGINFGDGFVEILQPLK

SEQ ID NO: 83657 - protein, 99 aa, Gossypium hirsutum
  Clone ID: LIB3585-024-P1-K1-F12.pep
MGNYVTALACPPSDTAGKVILWDGSVQDFIWPLTAAELMLEHPQQVVVEFHEAVNQKRPVPLPADHKLDVKKVYVMLPVKRGKPTTLSFEEARRVLSSA

SEQ ID NO: 83658 - protein, 164 aa, Gossypium hirsutum
  Clone ID: LIB3585-024-P1-K1-F2.pep
RTRGRRFAALYVGKHIVALDNDIDEIVGHTYLFLKEQLELSNMPPPSGILHGTIIDQFITCGKSRDVAHELASQIWLAVLDNLEENQHTFLLLKRLALEGDVFLPFPYSRSIKVQWRVFEKLFTDFRDCFDQADYYDVLAIAKNKFQPIPSAWFKVQRCTSNSL

SEQ ID NO: 83659 - protein, 208 aa, Gossypium hirsutum
  unsure (1)..(208): unsure at all Xaa locations
  Clone ID: LIB3585-024-P1-K1-F3.pep
MIRNGLKANVAVYTTLIDAFAKCGKMEEALELFERMKTDGLEPDXISYGVIVNGLCKSGRLDEAMEYLRFCRANEVAVNAMFYSSLIDGLGKAGRVDEAQKLFEEMVEKDCPRDSYCYNALIDALAKCGRVNEALMLFNRMKDEGCDQTVYTYTILISGLFRERKNEEAMKLWDMMIDKGFTPNCSFFXGLSQLGLCLLGKVTRACKI

SEQ ID NO: 83660 - protein, 64 aa, Gossypium hirsutum
  Clone ID: LIB3585-024-P1-K1-F4.pep
PFISYGINSHTHCKNRSNNMFTPPFKPSLKNNRKHLRNPPVTAKFNPRFNAFNTSFPTCGRTRG

SEQ ID NO: 83661 - protein, 75 aa, Gossypium hirsutum
  unsure (1)..(75): unsure at all Xaa locations
  Clone ID: LIB3585-024-P1-K1-H1.pep
HCVSNSNLCNAQQDWLPLPTTAMMSAYAXTATAPTTTTTTTTTTTTTGSNPINFLLHLNTTAIPRFRTKFSGRVG

SEQ ID NO: 83662 - protein, 82 aa, Gossypium hirsutum
  unsure (1)..(82): unsure at all Xaa locations
  Clone ID: LIB3582-022-P1-K1-A1.pep
XFSVRLLVLFHGCXAQIELLTNRQXHSPWGLPQHPXSRGQYPCQLQNSTDQQTLICAGKQADDTESLDHYDDQNECTVDSVL

SEQ ID NO: 83663 - protein, 163 aa, Gossypium hirsutum
  Clone ID: LIB3582-022-P1-K1-A3.pep
PRVRFRPCGLLNCGNSCFANVVLQCLASTRPLVAYLLEKGHRKECRRNDWCFLCELQTHIERSSQSHHPFSPTNILSRLPNIGGNLGYGRQEDAHEFMRFAIDTMQSVCLDEFGGEKAVDHSSQETTLIQHIFGGHLQSQVICTNCNKISNQCENMMDLTVEI

SEQ ID NO: 83664 - protein, 108 aa, Gossypium hirsutum
  Clone ID: LIB3582-022-P1-K1-A4.pep
PTRPETPNFDHTQEVCSHAPTRRYAHQTQTHHIAPPVLVLLTVAANHGHINSNTAVRDDRIDCRSDIRFMDGSFNHDHDQKGDHHERPRPSAATESLPQCSQPPKHSK

SEQ ID NO: 83665 - protein, 81 aa, Gossypium hirsutum
  Clone ID: LIB3582-022-P1-K1-A5.pep
QTCILTLKLTLVNILRQVEFYLHLPKTPYPIGSGQIGTRQVRGLFYPNILTSLPAFTFNIWKTASYYYAVDLSIDAAHASA

SEQ ID NO: 83666 - protein, 149 aa, Gossypium hirsutum
  Clone ID: LIB3582-022-P1-K1-A9.pep
MDPCHFVRILVGNLALKFPSTQSSSSCYCKIKLKNFPHQVATIPQQDIETNNCSSQKPLAACFSLSKSQIDNIVSKWGSSYKVSIEVYAGGSGSGSTCGLSSGKLLGKVSVPLDLRGAESKPCVAHNGWVTIGKNGSSLQLCLTVRTER

SEQ ID NO: 83667 - protein, 108 aa, Gossypium hirsutum
  unsure (1)..(108): unsure at all Xaa locations
  Clone ID: LIB3582-022-P1-K1-B4.pep
QKIHFGGILHQLLSEVSLKTTLLAKLWCEXQAALHIFHNTVFHEKTKHIEIDYHFVHDKIQNNFISTGYVKIGDLLGYNVNAYKFFSSHNLFLIFYLCNNSNHTLKCY

SEQ ID NO: 83668 - protein, 66 aa, Gossypium hirsutum
  Clone ID: LIB3582-022-P1-K1-B5.pep
QLLWIMNSYRLHTKCRLKTVYYKFLEHHDNMIGKWNEATGTCRELCYLKNHTSDMFKETFPFYNRL

SEQ ID NO: 83669 - protein, 78 aa, Gossypium hirsutum
  Clone ID: LIB3582-022-P1-K1-B7.pep
EPYEPLWIKGGGHCNLELYPDYILHLCKFIYEMENTTTAIRLKRIRQSLSLPTRSNTNSSAQGDGCCKIKICQPKCLK

SEQ ID NO: 83670 - protein, 101 aa, Gossypium hirsutum
  unsure (1)..(101): unsure at all Xaa locations
  Clone ID: LIB3582-022-P1-K1-C12.pep
RGGTGSGVGTLVISKIRDEYIYQIRIPFAGLASPNVFDTASEPYNATLSLHQLVDNADECMDLDNQATVXILFGPTLKLTTMSXRELNHLISATMSGVTCC

SEQ ID NO: 83671 - protein, 135 aa, Gossypium hirsutum
  Clone ID: LIB3582-022-P1-K1-C4.pep
GNRSRIINLSRASNLSSPGRTRSISGRTLQSQIGRERLPDVALEGDKFHHRGRDEAYADSLHRFPRERHHVQPSRNNRISFMRGRDPNFSSYNNGQDGAYFGTGRGGRKILNDDPPIFSQLPPRRRSPGGRDGPC

SEQ ID NO: 83672 - protein, 111 aa, Gossypium hirsutum
  unsure (1)..(111): unsure at all Xaa locations
  Clone ID: LIB3582-022-P1-K1-C6.pep
NITGSKLLDEEEKQNLVETFPFHLSTVRKRVYVQSDXNTSTAYPEYILPYLVHVLAHHSCPNTDECKDVKAFELIYRQLFVAISMLVNRDEDTKSEVGVNKEKQSISGNIS

SEQ ID NO: 83673 - protein, 146 aa, Gossypium hirsutum
  Clone ID: LIB3582-022-P1-K1-C9.pep
MGLLRDAGVVYKPVEQIDLGPCSNESYFKADKAPRMAGFLLKIFAWFLESRIIGALLLYIVKKNNQVHKLVSNATLEEPPMFVPLHPITDLNQQEVKQIDSDASPPERVQQAIKCIPVTSEKSLDDLKSSCFRRLTIADYSRAYST

SEQ ID NO: 83674 - protein, 153 aa, Gossypium hirsutum
  Clone ID: LIB3582-022-P1-K1-D1.pep
PTRPSGHCSLLKCDLEGSEVSETVKKISPESNCIPRSSEESKPSINVLTPEEQSNQRKMVACVGKSSSTSSASIFSVSSVPDSSKPTDSQNNSKQQVMPDNNLSSKKGHATNDVPRDEDRHDLSRKAVKERPKSSYSSTSKVPHQSKISHAFI

SEQ ID NO: 83675 - protein, 163 aa, Gossypium hirsutum
  Clone ID: LIB3582-022-P1-K1-D10.pep
ATTTSGAVNCNRKRTAAEAATGCRRPVKLSSTNGSGRKFRGVRQRPWGKWAAEIRDPARRVRLWLGTYDTAEEAAMVYDNAAIKLRGPDALTNFVTPPAKENNEKPENLNVSSVSGYESGDESAHNLSSPTSVLNFRTQSSEETAVEPKNSPTNPRRESKPLR

SEQ ID NO: 83676 - protein, 154 aa, Gossypium hirsutum
  Clone ID: LIB3582-022-P1-K1-D8.pep
PRVRPRVRKNARLWSSKSWMTQVSSFTQFFTQLYQNGLLKNHSKVLCVSAGAGHDVMALSKMGLKNVIGVELIESLPLVSRANPHNLPFFDGAFDVAFTGHLMAALYPLRNAEEMERTVRNGGVCVVVVDECGEEEVKEIVRLFRRSQLLSFSD

SEQ ID NO: 83677 - protein, 110 aa, Gossypium hirsutum
  Clone ID: LIB3582-022-P1-K1-E11.pep
MKFGKSLSSQIEETLPEWRDKFLSYKELKKKLKLIEPNSGERPNKRVKLDGNSGDVAGAVDKAGVFDGDGMSTEETDFIKLLENELEKFNTFFVEKEEEYIIRLKVIRIL

SEQ ID NO: 83678 - protein, 110 aa, Gossypium hirsutum
  unsure (1)..(110): unsure at all Xaa locations
  Clone ID: LIB3582-022-P1-K1-E7.pep
RSIHDVYFNTLKEXTTNPHLAPRLRCMVRDVIDLRANNCITILEEVKAKTITEIHSEAEKNIGLXTGATASIRNSRVASDNPMRPAPAGYPINRPDTDGMKPEMPGTTTM

SEQ ID NO: 83679 - protein, 118 aa, Gossypium hirsutum
  unsure (1)..(118): unsure at all Xaa locations
  Clone ID: LIB3582-022-P1-K1-F10.pep
MRLLSISESWLDLFHGCCAHIDLLTNQSPDIHLVRQPQQPEPRYQSXRQLQTLDALQPTHRCKAEAGETHSXHQNEDQLRCAEVAVLRHKIHRRGLLLPXFTSASMLXYVVQGEGTHG

SEQ ID NO: 83680 - protein, 55 aa, Gossypium hirsutum
  Clone ID: LIB3582-022-P1-K1-G11.pep
SAYADLAAAYLRGEANYCVTRHIFMLYGETELSDHTIDLATRLPGLTAVDPAYHY

SEQ ID NO: 83681 - protein, 49 aa, Gossypium hirsutum
  unsure (1)..(49): unsure at all Xaa locations
  Clone ID: LIB3582-022-P1-K1-G4.pep
TGSPXXGRQXSGGPSSAGGAXPADPQXXAQLGADRGXPTIKRTQNAAAK

SEQ ID NO: 83682 - protein, 82 aa, Gossypium hirsutum
  Clone ID: LIB3582-025-P1-K1-A11.pep
EALMDTDASTDAGSSNSYANSKGQPKDPLQDQMIHKKNTKQNMPRRIPNRSAKDHDNPHDMLTDGGNITESQPACSPDREDY

SEQ ID NO: 83683 - protein, 116 aa, Gossypium hirsutum
  Clone ID: LIB3582-025-P1-K1-A12.pep
MSKVPMDVVTDIFHRLPVKTLLRFRSLSKPYCSLIDDPDFTNAHLDRSIKTRSNLNIILKGLHLYSVEFDALDNAVPIDYPLSSGAGTEAFGSCNGILAFRLTDKNLALYNPSTRQ

SEQ ID NO: 83684 - protein, 121 aa, Gossypium hirsutum
  Clone ID: LIB3582-025-P1-K1-A4.pep
CLLGETLRIYLKSMRDISRRLYVEHVLRSHETNKKLQPSILSRNIMEYLNNDSYKGLLSASVWEACFKVVYWLLPCGRLAPRFFAHCFLEKTCSEVICWLLQVRGIQLLSQANARCKKATI

SEQ ID NO: 83685 - protein, 177 aa, Gossypium hirsutum
  unsure (1)..(177): unsure at all Xaa locations
  Clone ID: LIB3582-025-P1-K1-B11.pep
PRVQGTGDGAQEPRHNPMDQHLRSSKSPIMEEHVQXRALQGLLATHPMVKLINVYRLCNVQARQXSYLHSHDSDASKHDLDHNRRGTHTFLTHEYKEAYIIKPGVVCKVQAXSTLYLTNQDNYVKTFTTGLYQPVNNPAQCEECFLDARQRPQSYLLAXNRENDQPAFNTRRELIDE

SEQ ID NO: 83686 - protein, 151 aa, Gossypium hirsutum
  Clone ID: LIB3582-025-P1-K1-B3.pep
MAVKTDLNPKVMPNGMPIPMTDEMRDVVRHGVDLKADTNGGSEGGRGIAWGIIYLTDIRVGCAASSPVGNDMALDKPLVDVHDETINQRIFNCDNMYGEVEPEDHENEHWALYFTHSFKIWGNESGCGTFVPLIANLRASVRRDNQQVHHE

SEQ ID NO: 83687 - protein, 68 aa, Gossypium hirsutum
  Clone ID: LIB3582-025-P1-K1-B7.pep
KEIRSPWRVHFKGYLQNRELSKLQRYCKEGLWKVTAPLPTNKLLEISRKVEFGKTSCCDLITLIMTFR

SEQ ID NO: 83688 - protein, 99 aa, Gossypium hirsutum
  unsure (1)..(99): unsure at all Xaa locations
  Clone ID: LIB3582-025-P1-K1-C3.pep
MLRLPLNTFLAAREKLLYKHRQTTVRYGLINIFXDCAAQICNARLLDDYTGRSLAATATPRNHGLATQMYIETGKEAHYRACPDREDRADVLVMSDREC

SEQ ID NO: 83689 - protein, 51 aa, Gossypium hirsutum
  Clone ID: LIB3582-025-P1-K1-D10.pep
KGMTEKPLSIRKSLSQCSETINADRKQWADSMLRKLTTVYCCSILPGTMPA

SEQ ID NO: 83690 - protein, 71 aa, Gossypium hirsutum
  Clone ID: LIB3582-025-P1-K1-D4.pep
GTLLNLNASRLAKSAHMYQKEVYIVPWMEVVTVLRDAGREAKASLDAQMWLTEMRGMRDDQNGRREKVATG

SEQ ID NO: 83691 - protein, 77 aa, Gossypium hirsutum
  Clone ID: LIB3582-025-P1-K1-E5.pep
LHHHIQYHNIREPYKTHMNVSLKHSIEQIRLELDTIKPIQDTHEATESINTIPTPNFQQLEHPMRIPNKKFAANSVA

SEQ ID NO: 83692 - protein, 157 aa, Gossypium hirsutum
  unsure (1)..(157): unsure at all Xaa locations
  Clone ID: LIB3582-025-P1-K1-F11.pep
SFSKRHIDMLVEDKEKRVKWRFTGFYGSPYVQDRNNTWEVLKRLAVGEVIPWLVRGDFNEIMYGFEKKRGLPRNERRMELFWKTLEDCQLYDVGFEGSWXLRRGNLPETNIQERLDRGVANTEWIVLFPKAKVXHLTHTFSDHCPLLIDTRKYEDQV

SEQ ID NO: 83693 - protein, 65 aa, Gossypium hirsutum
  Clone ID: LIB3582-025-P1-K1-F2.pep
MPPIWEYIYRKAKAEAKRKEKSQCNLQREAQKNGNASIYQSELIFSKVIKLKKRTLQMKKRPDAW

SEQ ID NO: 83694 - protein, 139 aa, Gossypium hirsutum
  Clone ID: LIB3582-025-P1-K1-F3.pep
MGSSNRLFNRQRTVHEILGGGLVADVMLWRQGNLTMGILLVTLAAWVVFEKSGYTLLSLVSNVLLLLIGILFLWAKSAAILNRPAPPLPELYLSEETVNEMGAFIRAHVNDILSASKDIALGKDARLFFKVAGYLLLIS

SEQ ID NO: 83695 - protein, 179 aa, Gossypium hirsutum
  Clone ID: LIB3582-025-P1-K1-F8.pep
ENVVQAWSSKYVQGEPTVVLAQPHCGVEKYGELISFRDDKPLGLPVRSLKSRVLSPEFGNGSSDSSGPSAMDSSDGSDKSENGSFSDLTRENFEGKSNKSGALGSPMPWRWRSGRMRQRFDGGSVTRPSHFRPLSVDESQFQSLKSRSLHSQLASQSHSPSSLSPSHPSSSEPPKSKMI

SEQ ID NO: 83696 - protein, 97 aa, Gossypium hirsutum
  Clone ID: LIB3582-044-P1-K1-A11.pep
KKGSQPLPSPSGTGLRLGHRPPGRPTISGASTIVYVRQKRENLRSGPFEAPKRKSELKTLKRFEETPQKPKKPFDFRPYFLGDGSSAGHGDHGLKLK

SEQ ID NO: 83697 - protein, 45 aa, Gossypium hirsutum
  Clone ID: LIB3582-044-P1-K1-A2.pep
RTARRRTKIASTLFTFCIADITQLCRTLLICFHLLPLRKKMIVVC

SEQ ID NO: 83698 - protein, 118 aa, Gossypium hirsutum
  unsure (1)..(118): unsure at all Xaa locations
  Clone ID: LIB3582-044-P1-K1-B3.pep
ATRPSTRSRHQRINPYYVXLRSVQDRFRGEHGDDTDLQRFAVTHDILRGVTXSRIASLEXANRCTFDLPHDRDADKIYFDTNCRGTVPHWTHEDRELYNRCTGVVVRITGGSTVYLVT

SEQ ID NO: 83699 - protein, 173 aa, Gossypium hirsutum
  Clone ID: LIB3582-044-P1-K1-C9.pep
RRKGKKMLERGYIVSPQQCEDKFNNLNKTYRRLNDLLGRGTSCKVVENPKLLDIINVSEKGKEDVRKLLMSKHLFFEEMCSYHNGNRLYLPHDPDLLQSLLFILKNVDDYELLDSNQPVPDKKAGVTAKDNEDFAEFSAKWLELISENGIAPFGSNQTNAEGDATEFNGQIRV

SEQ ID NO: 83700 - protein, 164 aa, Gossypium hirsutum
  unsure (1)..(164): unsure at all Xaa locations
  Clone ID: LIB3582-044-P1-K1-D11.pep
LSRSCDHHHQLSSSFEAQMELLTPSIQIREPSXEELKQSDRSDPKKPLIMAIKGQIDDVDNSITHDGPGGPYASGAXRDASIALAPMSDGEQDLTGHISGLGPFDLDALQDWKYNLMSKCVKVGTIKITGAITGGANENGETSWTTLDDAKPSGDCYHKRSCWN

SEQ ID NO: 83701 - protein, 127 aa, Gossypium hirsutum
  Clone ID: LIB3582-044-P1-K1-E1.pep
VQATKKKSSPLHPNDGSKRKEDNRISKSSETETNKPAELSKGVHGVTKLEDTSTRQNSITSASKPPAVGNGPGLNVRQGTMWRSSGSKKLSMDSIDYPIEEEAAVESLEAEKMDLQKRLTEEIEVYH

SEQ ID NO: 83702 - protein, 61 aa, Gossypium hirsutum
  Clone ID: LIB3582-044-P1-K1-E2.pep
SMLLEKKVLTSGCSVVRLVIDSGCLLPFQQISSFYCYLQPMRTKGTTERHDHEGLMFDMRI

SEQ ID NO: 83703 - protein, 59 aa, Gossypium hirsutum
  Clone ID: LIB3582-044-P1-K1-E6.pep
GKASSTWTSHFQYFLRQYLNPMHQIITTWHAVNNNSQTCILGQFNPRGISVTYLLGIKL

SEQ ID NO: 83704 - protein, 102 aa, Gossypium hirsutum
  Clone ID: LIB3582-044-P1-K1-F7.pep
ATLSHCSTAKETRKRKENKQQRKGKSCIFGYKSRTSLCKKGSFPEIKKEEKIKNTKTEKSLEGLLGFCILILFNFVFFTLPFIYCFFYIREKKKQGIEYQRV

SEQ ID NO: 83705 - protein, 68 aa, Gossypium hirsutum
  Clone ID: LIB3582-044-P1-K1-G11.pep
LSLMSHSKLLTNSFMFSSLMASDLLEFLYYSYNVELFNVRVEIEYLVFFIYRWKLGFMLQYVTFAFYM

SEQ ID NO: 83706 - protein, 74 aa, Gossypium hirsutum
  Clone ID: LIB3582-044-P1-K1-G3.pep
LVLQKTVHLLCETFLSSFLFSDQFQSGFCIQSTFFCFRHTQGCSLAVMAFSLQLLVVAPVSNKACKEYVLYSLN

SEQ ID NO: 83707 - protein, 130 aa, Gossypium hirsutum
  Clone ID: LIB3582-044-P1-K1-G4.pep
DCEVFIGALLLSDMGVFALTLRLFHAEVRKLLLIIGLAVSFIILFQCFSFSYGKIFVPSPTSKISVVKLVINATTLNDSNMAELFINVVANDTNGSDPEEEARYKHNTLEANTSSDSSSEVTDILMGLLV

SEQ ID NO: 83708 - protein, 60 aa, Gossypium hirsutum
  Clone ID: LIB3582-044-P1-K1-H3.pep
RLTSLAILHTCAIKCPVRSHIRAYICDILQDLHRPISFIFSHVLRYANALAHILAMTSTI

SEQ ID NO: 83709 - protein, 51 aa, Gossypium hirsutum
  Clone ID: LIB3582-044-P1-K1-H4.pep
YGRIGSGLSFSIFIQAWAKFYAHFFGPGLSIGPKTLLGSGPAHRQLYSRHI

SEQ ID NO: 83710 - protein, 106 aa, Gossypium hirsutum
  Clone ID: LIB3582-048-P1-K1-B12.pep
MVQLMRSGTPTAEPEACRDKAPVKLEIVEDSLEEEHGPVNKRSKLSPNLQQWSSDGNAFPIPPAQYNPLDEPSPLGLKLRKSPSLLDLIQMRLSQSQSGSSAAQAE

SEQ ID NO: 83711 - protein, 77 aa, Gossypium hirsutum
  Clone ID: LIB3582-048-P1-K1-B8.pep
PRCLDVQYVPVVVVLRRQLVSHGRISHAVRRSGFEFHQGGYRVCLAHAGFFVVGLPSRAFNAPVSFSEFGGLCRTRG

SEQ ID NO: 83712 - protein, 62 aa, Gossypium hirsutum
  Clone ID: LIB3582-048-P1-K1-C8.pep
CAVCERSCIEYMYVVISTSLSRRITVYYCLFLFLLFTSSLVSCICHHGRWFNSHNLNFPKYE

SEQ ID NO: 83713 - protein, 78 aa, Gossypium hirsutum
  Clone ID: LIB3582-048-P1-K1-D2.pep
HPLRGVMITEMEDKRTLFRFYSEVDLKRVIDDMPWFFNRHLIIFHKVVKGKDLATVSYGLQFFGYRFIIYWLVSCQKE

SEQ ID NO: 83714 - protein, 92 aa, Gossypium hirsutum
  Clone ID: LIB3582-048-P1-K1-D8.pep
TKITATKNRAEKEICKFNILYFIWAIKRPIVIQWRGLFFFFSHLPILNIRESNQKLSRGDFEFCFFSLSFFPSFDLPGIFKMKIKRVYLNRR

SEQ ID NO: 83715 - protein, 129 aa, Gossypium hirsutum
  Clone ID: LIB3582-048-P1-K1-E1.pep
PTRPPTRPPTRPQDPKEWPVVEPLPSYGRGRERLGGRHISLIHGDGLTNVVITGQNGTIDGQGGMWWDLWQNKRLTHTRGHLVELMKLYNILISNLTFQNSAFWTIHPIYWSNVGIKGMTILASLNGPN

SEQ ID NO: 83716 - protein, 75 aa, Gossypium hirsutum
  unsure (1)..(75): unsure at all Xaa locations
  Clone ID: LIB3582-048-P1-K1-E2.pep
EVQALNNAFLRAFSCYFHLNDIILDCSHLSLELTRLGGKVWSHPMKELTPFSLDLYLXCMTFQYGQQAFDATGMA

SEQ ID NO: 83717 - protein, 70 aa, Gossypium hirsutum
  Clone ID: LIB3582-048-P1-K1-E3.pep
RPRVRTGFLSSKGWDVVFIMLMVGALIASLLLSHLVIAEFTERSHKSVPSSHGQQTDEATGSQPLLSNQR

SEQ ID NO: 83718 - protein, 42 aa, Gossypium hirsutum
  Clone ID: LIB3582-048-P1-K1-E7.pep
IPSLDIIYLFFLLKQILSLPFFPEPHIFQKYLTSEILTKTFF

SEQ ID NO: 83719 - protein, 69 aa, Gossypium hirsutum
  Clone ID: LIB3582-048-P1-K1-F2.pep
LVFINKYEQTITQRPNFVVKKQLGWNQMGHEQVMHTFSYNSSFINSKFQFSFFLKKTYIRGNHKNSDAW

SEQ ID NO: 83720 - protein, 156 aa, Gossypium hirsutum
  Clone ID: LIB3582-048-P1-K1-F7.pep
HTYEINSQFLVGKGIMVSPASHPGVVSVNAYFPNGIWFDLFHYSNSVSATSGKYLTLAAPPDHINLHVREGNIIAMQGEAMTTKAARETPFQLLVAVSNTENITGELFLDDGEAVEMAEGGGKWSFVRFHGADSGDSVSVRSEVAHASAHASAHAS

SEQ ID NO: 83721 - protein, 80 aa, Gossypium hirsutum
  Clone ID: LIB3582-048-P1-K1-F9.pep
SYHPFDYHHCTAHFTRPSTQIKPNYPNLPKTQLQPGAQTKRLSPIPLTQPNPTQPKWPNAKKGGGESENLSPRCAAPRVF

SEQ ID NO: 83722 - protein, 67 aa, Gossypium hirsutum
  Clone ID: LIB3582-048-P1-K1-G5.pep
LILCAMSAKKGEKNIFRENQGIKPKFFVSEVHSCYISWFIKLILPLKLKGHVLRFCTIVREHIQSFG

SEQ ID NO: 83723 - protein, 119 aa, Gossypium hirsutum
  unsure (1)..(119): unsure at all Xaa locations
  Clone ID: LIB3582-048-P1-K1-G6.pep
KRREREEVLFVRAAAXARKEPQPGRVAVGIEKEIVEEEAGVEKGRGREREREREGGEGLREEVESRGGAEGVLLISFCIPQTHFTIFLSDVRVSSQFKKCKTEEDKTRENRTDAWADAW

SEQ ID NO: 83724 - protein, 84 aa, Gossypium hirsutum
  Clone ID: LIB3582-048-P1-K1-H2.pep
MSTEAAKRSTTGSLTVKQRKTDELKPSPALTAEPKKVIIKSADMKDDMQKEAVNIAISAFEKNNVEKDVAEYIKKEFDKKHGPD

SEQ ID NO: 83725 - protein, 193 aa, Gossypium hirsutum
  unsure (1)..(193): unsure at all Xaa locations
  Clone ID: LIB3582-048-P1-K1-H4.pep
ISKEDAVDGKKSKDKGSKKKKKKGAPSDAKHESEYKKGLRPVLWLTPDFPLKTEELLPLLDILANKVKAIRRLRELLTTKLPLGTFPVKVAIPIVPTIRVLVTFTKFEELQPVEEFSTPLSSPAHFQDSKSKEPEGSTSWISWMRGTRGGQPSDGESHRYKDEVDPFHIXSHYTWVDANEKKRRIKAKKAKAR

SEQ ID NO: 83726 - protein, 50 aa, Gossypium hirsutum
  unsure (1)..(50): unsure at all Xaa locations
  Clone ID: LIB3582-062-P1-K1-A9.pep
PFLVVSXGXXXXGAPFXXXWFXSLCXLXSXXXXXXXFXFSXXXXSSFSWL

SEQ ID NO: 83727 - protein, 82 aa, Gossypium hirsutum
  Clone ID: LIB3582-062-P1-K1-B2.pep
YIFSPALLPAAIAVLMAVAGFLSPGASGWTAQFYLSYIRNRITQATGTKQIDADRSNRGMLDILGHVPQKTNEARPTIQNKA

SEQ ID NO: 83728 - protein, 52 aa, Gossypium hirsutum
  Clone ID: LIB3582-062-P1-K1-B4.pep
HRVIVPLRLSLRFTRTCTSLFGLCAFLKELKYTDRDYSSIFSPPTVICHIDL

SEQ ID NO: 83729 - protein, 41 aa, Gossypium hirsutum
  Clone ID: LIB3582-062-P1-K1-B7.pep
LWTTTRTKMLLLRNSANYYIIPHLKSCIFLKSIFKLLFLLL

SEQ ID NO: 83730 - protein, 147 aa, Gossypium hirsutum
  unsure (1)..(147): unsure at all Xaa locations
  Clone ID: LIB3582-062-P1-K1-C11.pep
GRGGRAGNRXKQXDNXXRRGQXXGNPEEEQRQXRRXAQQXQGRSERGEEXEEEEGEGEEDEDEDNPSRRSRHQEEEEQGRESTTSNTPPGAXDRNXXXQAXNXDHDSNRKNQRERGTRGTXXRGRDRHQGATPPRKGEEEXEERQQE

SEQ ID NO: 83731 - protein, 177 aa, Gossypium hirsutum
  unsure (1)..(177): unsure at all Xaa locations
  Clone ID: LIB3582-062-P1-K1-C3.pep
XXQTSTNXREEKRKNRPPAEIKAAVDHPLEFAGRSVAEKLKALREKLSSEKARGIIITTLDEVAWLYNIRGSDVSYSPVDHAFAIVTLNSAVLYLDKKKASSNVSSSLQANGIEVRQYGAVSSDAAMLASNQLDQATGVNSGQNGVCQNDTRDNDLIWVDPASCCYALYSRLDANKL

SEQ ID NO: 83732 - protein, 98 aa, Gossypium hirsutum
  unsure (1)..(98): unsure at all Xaa locations
  Clone ID: LIB3582-062-P1-K1-C7.pep
ITSGRGPRNHQDDKDDHEYDATTGGGKKTHRYRHTTDALEDTLQCQRSPDLMIRTXHWQRLVSEIAQYCKTDWRXQSHASIAIQDAADAYPATTTEDT

SEQ ID NO: 83733 - protein, 74 aa, Gossypium hirsutum
  Clone ID: LIB3582-062-P1-K1-D7.pep
RHPWWRHIRGRYTRPTPLLTIKLAQTYTTISTSIHSLTIITISNESACTVSEIDAITAKQLITKLTYHAYLTPA

SEQ ID NO: 83734 - protein, 82 aa, Gossypium hirsutum
  unsure (1)..(82): unsure at all Xaa locations
  Clone ID: LIB3582-062-P1-K1-D8.pep
TNXEREQQGXXARRAEQAEQXDXXAEAXKXAAKTEAERTEEERXXTTXGEKXGXGARTAXRRKPPXREQKEEXKAKEQXXKR

SEQ ID NO: 83735 - protein, 118 aa, Gossypium hirsutum
  unsure (1)..(118): unsure at all Xaa locations
  Clone ID: LIB3582-062-P1-K1-E10.pep
PTRPHRKGEHPRHXTQGXXPRKRAXRRRGKXKAXPKEDPTKXSKHTAXQGDKAGTTHRDREXEKPGXKQHKKETXEAATXXETPPREKGAADANAKTPRGXRPKNTXGXQQXXEEGKR

SEQ ID NO: 83736 - protein, 58 aa, Gossypium hirsutum
  unsure (1)..(58): unsure at all Xaa locations
  Clone ID: LIB3582-062-P1-K1-E11.pep
FLLGSLFVSLCPCLXPPARAVLAXSVGLLLFGVPRRCAPPPRXFVLCLXASRGGGGGA

SEQ ID NO: 83737 - protein, 66 aa, Gossypium hirsutum
  unsure (1)..(66): unsure at all Xaa locations
  Clone ID: LIB3582-062-P1-K1-E5.pep
LCCFGCLVCRCLCCPFAPVLAVXLSLALLLRLVXLLVAXLPXCXCSWGSFFFSFALLXXVLGGFSL

SEQ ID NO: 83738 - protein, 80 aa, Gossypium hirsutum
  Clone ID: LIB3582-062-P1-K1-E7.pep
LECMAYSRHGMREPQCSPVSFPLGPSIVLSSTYASPLVRSLAWCHMPPRNNRLSPKPVALLCPIGRPRWFVALNPMKGIL

SEQ ID NO: 83739 - protein, 106 aa, Gossypium hirsutum
  unsure (1)..(106): unsure at all Xaa locations
  Clone ID: LIB3582-062-P1-K1-E9.pep
XKDDDXXGAEXXGTTKXXAQGXAAGERRXGXXPXKGXXGKXXKPXTAXHXDXKXTPXEENXXXKQSXASEPEQGGXRHTXXPXRKGNKXTXXQDXXXPDXXXPQKE

SEQ ID NO: 83740 - protein, 78 aa, Gossypium hirsutum
  unsure (1)..(78): unsure at all Xaa locations
  Clone ID: LIB3582-062-P1-K1-F10.pep
FVALRPFSALSGLCWLXWPFXLCFLLRXCVCXLVLSVPXRRCXXLLLXLXVLGLXPRFPXLXXXSSFPLXRXLWLWVV

SEQ ID NO: 83741 - protein, 92 aa, Gossypium hirsutum
  unsure (1)..(92): unsure at all Xaa locations
  Clone ID: LIB3582-062-P1-K1-F11.pep
PTPPTPKETEGTERKPANXXKXQXXXXXXRRRGRKXXXXRXGXPXXXXTXXGAXGXGQXXQGSKEKAKGKXXQEXEXXETRKAXTRTGPXXA

SEQ ID NO: 83742 - protein, 96 aa, Gossypium hirsutum
  unsure (1)..(96): unsure at all Xaa locations
  Clone ID: LIB3582-062-P1-K1-F12.pep
AXLXLXAXLXXFSVXLXFLVAPPFCFXXFFLXVLXVPLXSXGFFFFXRSXRFXPRLXCXXRFXXSLLRSLPAFRWSLLXXLSGVSXXGAXAFLLLX

SEQ ID NO: 83743 - protein, 140 aa, Gossypium hirsutum
  Clone ID: LIB3582-062-P1-K1-F2.pep
MENWISSKLKVAETLLQQIDQQAAESLKKNEKPLSDEIKIDTPTKTGGVVSLKDQLKKKPQENYDYQGKLFSDQNAKVSSNDDSNSNKAVNVPNLDKEVSSSKASVKPKTSLTDSDWTELLSTPSHGTGSLGNTRGNVVS

SEQ ID NO: 83744 - protein, 164 aa, Gossypium hirsutum
  unsure (1)..(164): unsure at all Xaa locations
  Clone ID: LIB3582-062-P1-K1-F6.pep
SFDMILGAYLIGNMTALIVKGSRKEKFRDKMADVIKYMNRNKLERDLRNQIKGHLRLXTKAHXTEAVVLQDVPISIRAKISQSXYLPYIENASLFKECSLDFINQIVIRLHEEFFLPGEVIIEQRNVVDQLYFVCHGVLEGKESNLRVKQAGIKHFISHRKTRS

SEQ ID NO: 83745 - protein, 147 aa, Gossypium hirsutum
  unsure (1)..(147): unsure at all Xaa locations
  Clone ID: LIB3582-062-P1-K1-F7.pep
RRSEXXXQQRDEDRRKRSQXETXGQTEQDKXEDRXETQKKEEQQRDGEDXQRRNQESRQHGQQEERRXRPXXEQSXREQDEKQQQQQPDKRSKERQQXXQXQEQRPERKQQXXKEXKEQXQEXPXEGERENKXREEEEEEXDERKQQ

SEQ ID NO: 83746 - protein, 86 aa, Gossypium hirsutum
  unsure (1)..(86): unsure at all Xaa locations
  Clone ID: LIB3582-062-P1-K1-G2.pep
NTPXXGXXXXKRAXPEEGXAAXGQGAREEARRXKXNNKNTXXXXXXQXERRAXXTPAAAKRGNGKEKRAEPPEPKEQEDEKKERQG

SEQ ID NO: 83747 - protein, 111 aa, Gossypium hirsutum
  unsure (1)..(111): unsure at all Xaa locations
  Clone ID: LIB3582-062-P1-K1-G8.pep
RKEERXKGPXXPEKEEXXKXXXQTXXXRNRXXXSKXXPXRTGKXXRPRXXNQXTXEGEHRPXXPEEDETXXRAQTRXXNKXXTXXRXPXXRTXNAXKNHXNXTXKRKRTND

SEQ ID NO: 83748 - protein, 90 aa, Gossypium hirsutum
  unsure (1)..(90): unsure at all Xaa locations
  Clone ID: LIB3582-062-P1-K1-G9.pep
FSPRAPXGXAWPLXXXWXXVXXLLXLXXXCXLVCLLXXXPAFFXXXFLLXXXXCFWXXXXXFVXSXXAXRXPFXXXXSXXXAXXXFFXXA

SEQ ID NO: 83749 - protein, 74 aa, Gossypium hirsutum
  unsure (1)..(74): unsure at all Xaa locations
  Clone ID: LIB3582-062-P1-K1-H11.pep
NKQKXADXDRXDRGDQGGXGXRTNXQSGPXTTQXXTDXTXAPSGGTXTAXAGXTXTGTXSGQSXATPRXXNXSP

SEQ ID NO: 83750 - protein, 63 aa, Gossypium hirsutum
  Clone ID: LIB3583-017-P1-K1-A1.pep
IRSFLCYLFFMLIILFLGLRICIVFGFLHCYKLNSEKLNNTQGVYISCLNIGFHKKKKDCVIL

SEQ ID NO: 83751 - protein, 73 aa, Gossypium hirsutum
  Clone ID: LIB3583-017-P1-K1-A2.pep
FMFVLEGATPTSCRTGFVNAQSRHRWATVSSSSLQIGQSASSLSLRDFRLPREGIHIFISYFSIDLFESCWEF

SEQ ID NO: 83752 - protein, 259 aa, Gossypium hirsutum
  unsure (1)..(259): unsure at all Xaa locations
  Clone ID: LIB3583-017-P1-K1-A6.pep
DSSAVTSKGSNATMFIDCPEEDKSAKRNSQKNGRKKGKHKKKHLCDVGSMESEVCAEYTCGSSTSEICESSSGVVTSSQSQNICRGDIDEVETPESIAPSKAHKFSGEHHTDSYEIGSEDQQLSRCQGDIERRHPSHHKVFSDMHDSLVLDSISVGSNSEEGMSGGHIVNPFNDYNHEISQLEVSGSSTNKGSLYRENSSCSISRTCDYTEXTKHGMARKCFDGRKVAPSKRDKQFKSVPWETWKHRELAHSNRNSRTV

SEQ ID NO: 83753 - protein, 147 aa, Gossypium hirsutum
  Clone ID: LIB3583-017-P1-K1-A7.pep
MPSLAVKLYSIFFKFQQRYTLHNLTQIPVHAVDPFGITSRREESTAASNPSFYEGVATKDIHIDPFSSLCIRIFLPATVVNFDPTTIIEDKSKDGAFIYSGYSPQARTKHKRLPVVLQFHGGAFVGGSNDSVRNDAFCSRIANLCGC

SEQ ID NO: 83754 - protein, 93 aa, Gossypium hirsutum
  Clone ID: LIB3583-017-P1-K1-C9.pep
PRVRTLLPVLPYIPMSLDISDGPKYGNKDGQPRNRGYSSYSGGYSPSDLTASDSKGNYSGSLSGGDIYGNHGGRNSSRGLSNLNQVSHRKHGY

SEQ ID NO: 83755 - protein, 212 aa, Gossypium hirsutum
  Clone ID: LIB3583-017-P1-K1-E2.pep
MVINHGDVLKALSQALMKTEEAYLDIADKMLMENPELALMGSCVLVMLMKGEDVYVMNVGDSRAVLAQKTEPDYWLGKARQDLERINEETLHDLEGFDGDRSNVIPDLTAFQLSVDHSTSVEEEVQRIIDEHPDDAYALMNDRVKGSLKVTRAFGAGFLKQPKWNDALLEMFRIDYKGTSSYITCVPSLHHHKLGPKDRILILFSDGLLLIL

SEQ ID NO: 83756 - protein, 177 aa, Gossypium hirsutum
  unsure (1)..(177): unsure at all Xaa locations
  Clone ID: LIB3583-017-P1-K1-F11.pep
PARPDVDLAMHPPSLFLLFNGCLNGWISRQPFSXHECQIEWLITMVRASALHSQVRSTAWTTQSWHQIWQPVMCAVRYAMRPTVEPKALVTTAFNIAYIVLCIGLRGVVQRVGTPACADTXQDPQQWQHQSQDQLQDQHQIAQRVILGVTIAVAHCVYNCSYEHGDATNVTITVLDT

SEQ ID NO: 83757 - protein, 211 aa, Gossypium hirsutum
  Clone ID: LIB3583-017-P1-K1-F4.pep
PVLKANGEAEALCARLNRDGHVDACITADSDAFLFGATCVIKSLRPNSKEPFECYNMSDIEAGLGLKRKHLIAVSLLVGNDHDLNGVQGIGLDKALRLVRGFSEDEIFDKLYEIGKGHVPLFQGEIRCAADATPCSDESSPKAKQSHCSFCGHPGSKKAHFKSCCEYCITDSNEGCLKKSQGFKCNCSSCDKVRKDKDMKKHENWWIMFAT

SEQ ID NO: 83758 - protein, 91 aa, Gossypium hirsutum
  Clone ID: LIB3583-017-P1-K1-G1.pep
YKKNLESVFCFYFFMLMCFFLPKSPPFTFHHILGFIAERKDEKCRKIPSFATVFLVCFHFSLFATCLQVHGKVNLPFRCKAGWWWQASGMV

SEQ ID NO: 83759 - protein, 88 aa, Gossypium hirsutum
  unsure (1)..(88): unsure at all Xaa locations
  Clone ID: LIB3583-017-P1-K1-G2.pep
MDYGLSDSSGTDDDLPPSHQNRFQRGGRTAAGNGRSAVIGSAPLPRMHGDMETXIHLIEQEAYCSILRAFKAQSDALTWEKESLITEL

SEQ ID NO: 83760 - protein, 184 aa, Gossypium hirsutum
  Clone ID: LIB3583-017-P1-K1-G8.pep
MRAYNVLEADPDFENCNGWSLTVDRKDLHILKHSNIGLFMVNLTKGSMMAPHWNPRASEIAIVLQGQGMVRVVCSSNAKECECRDMRYRVKEGDIFAVPRFHPMAQMSFNNDSFVFMGFSTLTTKRNHPQFLVGKKSALRIMDKQILALSFNVFNATIDQLLKPQRESVILDCTSCAEEEERLM

SEQ ID NO: 83761 - protein, 170 aa, Gossypium hirsutum
  Clone ID: LIB3583-017-P1-K1-H4.pep
MDTIAASPHKILHLVRHAEGVHNLESDKSRDPLTSFEFLDAQLSSLGRQQVVAERKHVRETGLLDEVEVVIASPMTRTLETAVGIFGGKEQADALDVSSCQDSNVNSNEASAIFNSRPRIVAYELCRERMGILECDKRASISQYRSHFPTVDFSLIENEDDVLWKSDERE

SEQ ID NO: 83762 - protein, 138 aa, Gossypium hirsutum
  Clone ID: LIB3583-021-P1-K1-C1.pep
LPNFPFYIFSFIFLAAVHSCRSSDRAPSEHSSPPSLFKSSVSFPRIRPKFDETKAKASISFFLRSPFYTVRSPRVSGVWYIVPWFALPPWDRRTEIQSSESELEQRSPLTFLSIFCFSFSFLFLLLILGYLVVVTAFG

SEQ ID NO: 83763 - protein, 143 aa, Gossypium hirsutum
  Clone ID: LIB3583-021-P1-K1-D3.pep
PTRPRTRGIFQACNEIKLLEFKPSIIAVSALLMASHELFPLQFPSFETSILSCRHVNKENQLKCFNAMQEMVANETSDSIIETVSSSSTTTPMSVLDCHCERSSSSMAAIAVPEKREQRKRQKLNGFCSESNRVKISQIQPCG

SEQ ID NO: 83764 - protein, 100 aa, Gossypium hirsutum
  Clone ID: LIB3583-021-P1-K1-E6.pep
IIAGELLMETSISSSIETGLVYVSELGKRDSLCDWMPGNGNWQVSPKLNDTCQSGCKEAEYSCPPLPRSGSQHSSMSVLSEVPVPAFVFSRRKKRQGSSG

SEQ ID NO: 83765 - protein, 50 aa, Gossypium hirsutum
  Clone ID: LIB3583-021-P1-K1-G1.pep
YVASSSRSQTSQQNITPSNLQEPTPYYLSCFHQVLEINIVLTKSFTNHHY

SEQ ID NO: 83766 - protein, 53 aa, Gossypium hirsutum
  Clone ID: LIB3583-021-P1-K1-G10.pep
ITNHILNKPCINFFFKIYSNIKHSTNNEAFHATIIICKLKKEGSILSKFMIMG

SEQ ID NO: 83767 - protein, 213 aa, Gossypium hirsutum
  Clone ID: LIB3583-021-P1-K1-G3.pep
HASAHASAASKKPRDCPFCILEAWITRSLTLDLTLDAPSKIQSCIKIFAEHFRFGRQEDAHEFLRYVIDACHNTCLRLKKLRRQGSEGGGEAVNGNTVVKEIFGGALQSQVKCLGCGAESNKVDEIMDISLDILNSGSLKEAMHKFFQPEVLDGNNKYKCDNCKKLVAARKQLSIRQAPNILVIQLKRFEGILGAKIDRLITFERSLVLSSFM

SEQ ID NO: 83768 - protein, 199 aa, Gossypium hirsutum
  Clone ID: LIB3583-021-P1-K1-H12.pep
RPRVRPRVREVAVSILQEMAACLEQGSINRATGSTNMNNQSSRSHAIFTITLEQMHKIQSVSAVNDTSDEDMREEYLCAKLHLVDLAGSERAKRTGSDGLRLKEGIHINRGLLALGNVISALGDEKKRKEGVHVPYRDSKLTRLLQWTDSKVNFMDSLGGNSKTVMIACVSPADINAEESLNTLKYANRARNIQNKPVV

SEQ ID NO: 83769 - protein, 118 aa, Gossypium hirsutum
  Clone ID: LIB3583-022-P1-K1-A8.pep
KLWKWPILIVGVGDLHNPFSISAMELRNTDIGWPFSTAFFSGCCRIWKIFTVYFIGVLLIHTAPEDLLDGEDGVLLISFFNYFIVCWFGFSQFVFVLIFFRLLVAGGLLLFAGQAQLL

SEQ ID NO: 83770 - protein, 211 aa, Gossypium hirsutum
  Clone ID: LIB3583-022-P1-K1-A9.pep
QSLNQLDQLRVLSFKNNSLSGQIPDLSGLLNLKSLYLNDNNFTGEFPESITSLHRLKTIVLSGNQITGQIPASLLKLKRLYTLYLQDNSFNGTLPALNQTSLRFFNVSNNQLHGQIPVTPALVRFNLSSFSGNIDLCGEQIGNPCRTINLGPAMSPVYPNSSSNPTSKKHSRLIKIVIVSCIGGLALLLISVVLVRFISKRRRGKGKENDV

SEQ ID NO: 83771 - protein, 57 aa, Gossypium hirsutum
  Clone ID: LIB3583-022-P1-K1-B1.pep
GSHGNHQICSVFGFYGIKWEHNEEGSGLCCMHYQPFFLLSRSCIQISYIHLSIVMLT

SEQ ID NO: 83772 - protein, 201 aa, Gossypium hirsutum
  Clone ID: LIB3583-022-P1-K1-C4.pep
PVYCSDVVIRYVTILAPPDSPNTDGIDPDSSSNVCIEDSFISTGDDLVAVKSGWDEYGIAYGRPSSYITVRRVTGSTPFAGVAVGSETSGGVENVLAENINLYNSGVGVHIKTNIGRGGVIKNITVSELFMENVRTGIKVAGDTGDHPDNNFNPNALPYVKDLMLKNICGVNVQRAGWMHGIENATFTGICLSNVTLQGTT

SEQ ID NO: 83773 - protein, 82 aa, Gossypium hirsutum
  Clone ID: LIB3583-022-P1-K1-G12.pep
RSIDGGSVCWEWPRQQEEWETETQTTTTNSTLYFTSNTTNSWLPIHSSPTSTMPYIFNCKKPSSLPLLYTLINADQPHDGLH

SEQ ID NO: 83774 - protein, 114 aa, Gossypium hirsutum
  Clone ID: LIB3583-025-P1-K1-A10.pep
VARLNQDAIAFNNKLNSTSLSLQDRLPGLKLVVFDIYQPLLDMVTKPSDNGFFESRRACCGTGTLETSLLCNSRALGTCSNATSYVFWDGFHPSEAANQVLAGDLLAQGVSLIS

SEQ ID NO: 83775 - protein, 155 aa, Gossypium hirsutum
  Clone ID: LIB3583-025-P1-K1-B10.pep
MACIISLTKLINIVPIFIFVSCFPPLMLSQSFRSLQLPPKVTGPESIAFEFGTSRFYVGVADGRILQYNGPRVGFRDFGFTGPNRSKRMCDGTSDPNLGPICGRPLGLAFHYSLNKLYICDAYFGLMVLGSSGKQATQVSAAADGEPYRLCDALD

SEQ ID NO: 83776 - protein, 156 aa, Gossypium hirsutum
  unsure (1)..(156): unsure at all Xaa locations
  Clone ID: LIB3583-025-P1-K1-B5.pep
GMCGLLKELLLQRYFSKEACGNTEVPESDIVQACRRLLDERHGSNVMQFLQAINGRPDLTSGLKRLRCRTLIFVGXRFSALVEVQACGSMVTEEQPHAMLIPMEYFFMGXGLYRLCHFSDSPRSPLSPSCISPELLSPESSGLNLKPIKTRVSHYT

SEQ ID NO: 83777 - protein, 223 aa, Gossypium hirsutum
  unsure (1)..(223): unsure at all Xaa locations
  Clone ID: LIB3583-025-P1-K1-C4.pep
RTRGSRSYNDTYYVDSQTVLRCHTSAHQAELLRRGHTHFLVTGDVYRRDSIDSTHYPVFHQMEGVRVFTPDNWEASGLDPTSYAAEDLKKSLEGLARHLFGAVEMRWIDAYFPFTNPSYELEIYFQGKWMEVLGCGVMEQEILKISGRSNSVAWAFGLGLERLAMVLFDIPDIRLFWSTDERFTSQFSEGQMGVKFKPFSKYPPCYKDMSXWINDSFTENNLC

SEQ ID NO: 83778 - protein, 241 aa, Gossypium hirsutum
  Clone ID: LIB3583-025-P1-K1-D4.pep
NSSGEITKSINFPYCDNLSLLTVVCSFDGLLCCINYPWKVDSGIVVEDVTDVEICICNPATKKALLLPRGSLSKEKPSIGVAFGPKINEYKIFRFFNAKRISLAKHQSRVNRRQCEVYSSSTGSWSVIGRVPYYPMHSSHSPLGSNHVFVNGKIYWFLASNEDPLIPGSILMADIEETFETINLPKEVTEHSYLVNLEGHLSLVAVYDEDEIVNIWILKDKNEPEWELKCNDHVPFLNDEC

SEQ ID NO: 83779 - protein, 222 aa, Gossypium hirsutum
  Clone ID: LIB3583-025-P1-K1-F3.pep
MTDSGGSLSIESDGYCIAVEHQAGESEKPEQSHQLKAEIFSLKSEVACLRSALETAEIKCHEEETLNTEQIKSANELVEQIKSEASLKEAELLAELQKANFNIADLKANLMDKETELQCISEENEELHMKLEKNLSRQRELELEKELKLLNEAIVDLKANMMDKETELQNISEENEMLRLEISKRDMDKGKTNDKVAAELDEARVAEREAIMKLGQWRRQIR

SEQ ID NO: 83780 - protein, 169 aa, Gossypium hirsutum
  Clone ID: LIB3583-025-P1-K1-F6.pep
PRVRKIPEFVPLNSPNYPSKDAEFPLIAMSSDEITLNVFQDDPIRAFNCGHGTTGRPGSKTRDPTSFIDDKMFSFPPLQPPEFRSSNIYAAAAAAAAASADRRGSPNHHQRNWGSSPGGGSTNSGDDELDGEDADDDEEEDEDDDDDDPNENNISNKNHNININNHINK

SEQ ID NO: 83781 - protein, 168 aa, Gossypium hirsutum
  unsure (1)..(168): unsure at all Xaa locations
  Clone ID: LIB3583-025-P1-K1-F8.pep
VDIILGLFHKRHVRKSAGAIIAKCAYTCHRCLGDKSNVNVKKGGNIMKSKGDTKGQKTITKTARKLPQKGNRANEKSLAVRMSLRSRKDKKGAAAVPLRRSPRKIKYISLQKKKPGRCKKGKKKSKKKATKKIKEITWQRKRTXAYHSYWLNGLXLASKPNDERVMQF

SEQ ID NO: 83782 - protein, 188 aa, Gossypium hirsutum
  Clone ID: LIB3583-025-P1-K1-H3.pep
DAWGNSKELPAIPDTLSEEGKDFVRQCLQRNPLHRPTAAWLLEHPFIKNAAPLERPIFSADASDPSPAVANAMRTLGIGNARNFPCIDSEGTASLPCRALKTGSGSSDIHTPRNMSCPVSPIGSPLPHPRSPQNFSGRMSPSPISSPHALSGSSTPLTGGSGAIPFHHQKQPMAYLHEGLGIIPRSQN

SEQ ID NO: 83783 - protein, 179 aa, Gossypium hirsutum
  unsure (1)..(179): unsure at all Xaa locations
  Clone ID: LIB3583-056-P1-K1-A4.pep
GRVGGRVGFGSHTPMVLGEAKVVRYFPNYERTLDIAKMIMRDKLFVHNKSDEPIDLSKEGKLENIEHAKSCDDLYELVGEDFWLATWCNSTAFEGKQLEGTRITLVKMAQQPGYDFAIRTPCTPSRWEEFDAEMTMAWEAICNAYCGETCGSTDFNALESVREAILRLTYYWYNXMPLT

SEQ ID NO: 83784 - protein, 172 aa, Gossypium hirsutum
  Clone ID: LIB3583-056-P1-K1-B11.pep
FDLHINCALLQSSIAANFPNALHPHPLFFIQNHNNEIEPHCSGCQKPISGPIYHCSDCTYTIFNLHKECAELPLEINHPYDRKHPLTLLPQPPTHPQKCSCYLCRIQWKGFVYSCSLCNFDLSLDDFLFSPPTITVASHEHPWMLVSRKMSVVCDFCGTDGDHSPYHCDTCV

SEQ ID NO: 83785 - protein, 76 aa, Gossypium hirsutum
  unsure (1)..(76): unsure at all Xaa locations
  Clone ID: LIB3583-056-P1-K1-B7.pep
HAYDGQDSRMIXVGGKTNSVRQWDRQAKELAYGVASTMEDDVYNITSTEYYFKSGHNPHAYDESSRGGNSLYDCTG

SEQ ID NO: 83786 - protein, 86 aa, Gossypium hirsutum
  Clone ID: LIB3583-056-P1-K1-B8.pep
PTRPRTRGQVSARQKIEQHLLAEFTHSSDDLFPPSPRRNQVLLHFSSFCSPFLSPLSLVDWQLHSLPFCHVRTCTSKKLYLAKDSL

SEQ ID NO: 83787 - protein, 47 aa, Gossypium hirsutum
  Clone ID: LIB3583-056-P1-K1-C10.pep
QVMCTGVSKMKQTIEPNGHVLCYKTNAANMLYIVQGRVIHGIEIPGC

SEQ ID NO: 83788 - protein, 120 aa, Gossypium hirsutum
  Clone ID: LIB3583-056-P1-K1-C2.pep
YLKRQQRWKDPDRTALCHGRLRRCSGTYPINRATKVIVRIRPSNASSIHAGIQSSKPVDLFLFRLRGDSRGRDSHGCACHSFSIRKIKLFLERNKTLLLLISMAIFFGLHYLKTSNILHS

SEQ ID NO: 83789 - protein, 63 aa, Gossypium hirsutum
  unsure (1)..(63): unsure at all Xaa locations
  Clone ID: LIB3583-056-P1-K1-C3.pep
WDRLRQALDLWLGSTLPLPAGKSLAEPNQAKGREKRKSQTSKTDLVLTINTNRSWNFFXRVRV

SEQ ID NO: 83790 - protein, 58 aa, Gossypium hirsutum
  Clone ID: LIB3583-056-P1-K1-C5.pep
RTRGQQSKNECQINRFRAFEPKSGIRSEAGTHRVGNPNVKQLRGAGVFVRRQTMEPKG

SEQ ID NO: 83791 - protein, 45 aa, Gossypium hirsutum
  unsure (1)..(45): unsure at all Xaa locations
  Clone ID: LIB3583-056-P1-K1-D1.pep
VLWAPHPIGSEIEALTLPLPRPWTLKHIHQRLRSKNAAKPRXAWA

SEQ ID NO: 83792 - protein, 154 aa, Gossypium hirsutum
  unsure (1)..(154): unsure at all Xaa locations
  Clone ID: LIB3583-056-P1-K1-D12.pep
MSLLFCFQVKAADNRIIQEQLNRKICECEGLQETVASLKQQLSDALESPNVHSKASYSQQIKMNGLQMDKEVAAPKEISRDLLIKTQVTEIEELKHKVVGLTESKDQLESQNHKLAEESSYAKGLASAAAVELKELSEEXAKLMNKNERLMAEL

SEQ ID NO: 83793 - protein, 170 aa, Gossypium hirsutum
  unsure (1)..(170): unsure at all Xaa locations
  Clone ID: LIB3583-056-P1-K1-D5.pep
QNSSYVKSGEGTLSNDAVENMAVKVSSADDLLQMEGAVPISLAEDTAPIDGNNTENSQGGENIEIQSTSATDAHYIPGNINGFDPAEVSSISLXKAGSDSSSDRIHNADVLDNFSSSLDGSEPIYEGERCILDSVTTYENREPIYEGEVILAKQADNISVEVCTVRSKEE

SEQ ID NO: 83794 - protein, 133 aa, Gossypium hirsutum
  Clone ID: LIB3583-056-P1-K1-D9.pep
PRVRPRVRSASKQDELGDWVGWIKSRFCCLLFKLEEVQGLCDPNPAEYIDVNIADPHVIFYWGLQAGKTNAIDIKSVKDVFWRNISTGYQGPFGKIELSIVQASQVPKSAQFDTLSQKKKACWKMMDYHQRRI

SEQ ID NO: 83795 - protein, 143 aa, Gossypium hirsutum
  Clone ID: LIB3583-056-P1-K1-E11.pep
MATWRYSTMPGGAEAVSSRNAVGRFVDFSHGGGGGRRVIKPDQLMLIRKWQLRPVKRSFSVRNVSSEQQQKVKDLVTQQQESPGSYNPFPPDASSIASSIKYHSEFTPLFSPEKFDPPKAFFATAQSIRDALIINWDATYDYY

SEQ ID NO: 83796 - protein, 91 aa, Gossypium hirsutum
  Clone ID: LIB3583-056-P1-K1-E12.pep
CVACFGRYSSHSQHQISLSAYVSSSPARQHLYSDLCNIPRSLIAQLSWPSRYVGTYHHSRLTLIAVTSVTVVAQIVSPSFSWYPFPTAPLS

SEQ ID NO: 83797 - protein, 169 aa, Gossypium hirsutum
  Clone ID: LIB3583-056-P1-K1-E6.pep
HASAHASAHASDRKDEIVRRVKEAVLNAKRGSWILGGGWNNDLWGGELPMASWIDEVTPDNPVWLTRMDGHMGLANSVALKLAGVTNLTKDPNGGTIMQTADGEPTGLLIDAAMELILSWIPEVSVDERREAMLRASSFALTRGVTTVVDVGRYFPGSSVEHSWQDFSD

SEQ ID NO: 83798 - protein, 93 aa, Gossypium hirsutum
  unsure (1)..(93): unsure at all Xaa locations
  Clone ID: LIB3583-056-P1-K1-E7.pep
SHFLALSGFSVREPKSNVTCXSVGYGQSGLTRISLSIERSMRAKVYFDAVFNRRSSKFALGLVVCEWGEIVALKMVIHSKIPSPFAAEAHAGL

SEQ ID NO: 83799 - protein, 50 aa, Gossypium hirsutum
  Clone ID: LIB3583-056-P1-K1-E9.pep
SLLAPNSSQTLSTSSNMHKSVIPQRSLATTKHKFNLLIRCHVYSRELCPV

SEQ ID NO: 83800 - protein, 46 aa, Gossypium hirsutum
  Clone ID: LIB3583-056-P1-K1-F11.pep
PRGGGDYYEEQIEKDKKLEYILYNRIDLSVITMKKGLLHAKISHFP

SEQ ID NO: 83801 - protein, 95 aa, Gossypium hirsutum
  Clone ID: LIB3583-056-P1-K1-F12.pep
KKKKKKKKKKKKKKKKRKKKKGEGKLKKKWGGGFRGSGFLDVSLLLTVFFLVLLILNGWPGFFHWPGCKTFGVGKFFWLPDFILLHILPFSQVAL

SEQ ID NO: 83802 - protein, 42 aa, Gossypium hirsutum
  Clone ID: LIB3583-056-P1-K1-F2.pep
AVDSSSPCRSNGWSFVLSCGGCLKSVQSNVLTHVQGVMFSDM

SEQ ID NO: 83803 - protein, 68 aa, Gossypium hirsutum
  unsure (1)..(68): unsure at all Xaa locations
  Clone ID: LIB3583-056-P1-K1-F9.pep
KKLITWGVICGQPCRQKSTADKRLAEALNASQCTQTVLMIDETXAHLDREESCASMPLEKTSRRVLTN

SEQ ID NO: 83804 - protein, 169 aa, Gossypium hirsutum
  unsure (1)..(169): unsure at all Xaa locations
  Clone ID: LIB3583-056-P1-K1-G2.pep
AKDCHRFTEALIIDTLSENVDQCELVPLNTQEAFDKDELLNATAFVLGKSRISIAYKVELEDRLSLAVRRSSDXAGXRCKVFHTDVEAIAXLRHPNIATLRAYYWSVDEKLLIYDYMPNGSIDTALHGTAEMASFTPLSWSARLKIIKGVAKGLDDLHEFRPKGYVHGH

SEQ ID NO: 83805 - protein, 66 aa, Gossypium hirsutum
  Clone ID: LIB3583-056-P1-K1-G7.pep
PHLSSQCHDLFLSSYNPTVNCDDSKTVCSPNFDLCNCIVHCDIKALPIVDIMRRLPCLVPQMHKAE

SEQ ID NO: 83806 - protein, 84 aa, Gossypium hirsutum
  Clone ID: LIB3583-056-P1-K1-G8.pep
SPKQIISTASQRLDIASQMVSMIAGRGGEFTVRDILKKASLNNMMRSVFGCNYQLSSSNCETEELSRLAEEGYELLGKLNWSDH

SEQ ID NO: 83807 - protein, 165 aa, Gossypium hirsutum
  Clone ID: LIB3583-056-P1-K1-H10.pep
DAWADAWGDDNEEDDEESKEEETEEGKRKRKRKMSVVQKALNEMWEEFYNLDYEDTIGDLKTRFKYVKIKPNRFGLKPSELLALDEKELNQYVSLKKLAPYTDKEWKVPNSKRYQQKLRIKELLKEKQRHQKVSKKRSRETAEQSKEDESTKLEDSESSKPWQEK

SEQ ID NO: 83808 - protein, 73 aa, Gossypium hirsutum
  Clone ID: LIB3583-056-P1-K1-H5.pep
RNYIKPNKRMRERRTKSRASEVLTDVNLRMEARILQDILLLYIDFKESLKPYYELYPREYIMVHYTINRRTKT

SEQ ID NO: 83809 - protein, 71 aa, Gossypium hirsutum
  Clone ID: LIB3583-056-P1-K1-H7.pep
PRERGDKRFSFNLLSQTFGYCNQNTQIFKACPRELQQLRDINVTGSSLPKTTGSILLPHYITKVTLTILRY

SEQ ID NO: 83810 - protein, 91 aa, Gossypium hirsutum
  Clone ID: LIB3583-056-P1-K1-H9.pep
PTRPNGTERSDPANTSLGGFWGMDSAKSVLEIFCPETGSCADIGALAARDAIVTAGGPAFEMPTGRRDGRISNAANVRSNIVDTSFTMIEM

SEQ ID NO: 83811 - protein, 182 aa, Gossypium hirsutum
  unsure (1)..(182): unsure at all Xaa locations
  Clone ID: LIB3583-061-P1-K1-A12.pep
PRVRARYVVERMDGDLWEKVLNPENEYRRQLIDQVVSTALPESKSPEQVSAAVKAFMTADLPHELIELLEKIVLQNSAFSGNFNLQNLLILTAIKADPSRVMDYITRLDNFDGPAVGEVAVEAQLYEEAFAIFKKFNLNVQAVNVLLDNIRSIDRAEEFAFRVEEDARWSQVAKAQLXDGLV

SEQ ID NO: 83812 - protein, 69 aa, Gossypium hirsutum
  Clone ID: LIB3583-061-P1-K1-C1.pep
VSLFPVSLFSFCSSSTVVGNRGSNLLGKVVKNYYRNINNKKANPHFVIKTVHLQSGQRAFILSHFGRVG

SEQ ID NO: 83813 - protein, 173 aa, Gossypium hirsutum
  Clone ID: LIB3583-061-P1-K1-C11.pep
MKKEYIPDKGRSLPVDPNLPKWICQNCHHSLCIVGVDSYVDKFPNDSSRSAMQGSSIHGASSVLGSTRMDNSFVVLPKQKPLAPGIPPRPRGMPGQPDTGQARKGMEESFVVVDKSESASDGSGTQLPSSEGGPSSSLQPNNSGFHSTITVLKNAFEIATTQTQVEQPLCLEC

SEQ ID NO: 83814 - protein, 163 aa, Gossypium hirsutum
  Clone ID: LIB3583-061-P1-K1-D1.pep
MENKRQVSGSSSSSSSSSSSSVSLDHLFGPKDSSSSSTTTTGLFGTIFPPPSVVLGRDSTHSGIRGSWNTQGLPHHARYGTDHNTDYSKGQSSSTRNKDKSSSVYHNETVEPSYLSSSIYYGGQENYSPRKKTTESPPYFQKDGGDDDPNGNNSHGASRGNWW

SEQ ID NO: 83815 - protein, 174 aa, Gossypium hirsutum
  unsure (1)..(174): unsure at all Xaa locations
  Clone ID: LIB3583-061-P1-K1-E2.pep
RDLNNSAPSTIQVSSVNQVNLPTKIRSKRKTDVREPAIRKGTKSSDNVVKGKISGPVTLFHDGALDLKEKLCNFLCSYQARRWCAFEWFYSTIDYPWFAKREFVEYLDHVGLGHIPRLTRVEWGVIRSSLGKPRRFSEQFLKEEREKLNQYRESVRRHYAELRAGIGEGLXTDL

SEQ ID NO: 83816 - protein, 48 aa, Gossypium hirsutum
  Clone ID: LIB3583-061-P1-K1-G1.pep
INLTNMSIIYLQRTYKINVIQRNRMKIQCTRAHTHTHTKRQDHCKEVQ

SEQ ID NO: 83817 - protein, 83 aa, Gossypium hirsutum
  unsure (1)..(83): unsure at all Xaa locations
  Clone ID: LIB3583-061-P1-K1-G10.pep
PTRPKKKKKKKKKKKKKKKKKGRAEIWMQGSDRXHATPLFFFCVALIQFSCRRFTHVLTDQTLALPYLISFCNIPLLPADVIT

SEQ ID NO: 83818 - protein, 91 aa, Gossypium hirsutum
  Clone ID: LIB3583-061-P1-K1-H12.pep
LASEMALSIVKGLLEQYVQSLFNEGIINEQFSHIQHLKMVGRTEHFVQLINTYCLDVESILAQLASSIDLPEVDFSKLAALAAEVTERSSR

SEQ ID NO: 83819 - protein, 137 aa, Gossypium hirsutum
  Clone ID: LIB3583-061-P1-K1-H7.pep
PRVRVVLVPVALGLVLNTYAKPIVTILRPVMPFVAMICTSLCIGSPLALNQSQILSKDGLQSVLPVLAFHAVAFAIGYWILKIPAFRQREEVCRTVSLCSGMQSSTMAGLLAIQFLGGCSQAVPAACSVIAMAIMGL

SEQ ID NO: 83820 - protein, 87 aa, Gossypium hirsutum
  Clone ID: LIB3584-003-P1-K1-A4.pep
ASSSGTGKGILLWSSAISISTFPCTSSSSLTSSLMRIFLSPSTTSAEYCFSAICICALFFRFHTKKFTELAIYNQLWILALSFRGFS

SEQ ID NO: 83821 - protein, 191 aa, Gossypium hirsutum
  unsure (1)..(191): unsure at all Xaa locations
  Clone ID: LIB3584-003-P1-K1-A6.pep
ESDVGELVNVGVICYLKQLLDTGFFHADPHPGNLIRTPDGKLAILDFGLVTKLTDDQKYGMIEAIAHLIHRDYPEIVKDFVKLDFIPEGVNLEPILPVLAKVFDQALEGGGAKNINFQDLASDLAQITFDYPFRIPPYFALIIRAIGVLEGIAXVGNPDFAIVDEAYPYIAQRLLTDESPRLRNALRYTIY

SEQ ID NO: 83822 - protein, 46 aa, Gossypium hirsutum
  Clone ID: LIB3584-003-P1-K1-B10.pep
LKSFSLFYLVHVRHETALDNSLNACSIVWIKDLGLVLMFTASTLLF

SEQ ID NO: 83823 - protein, 73 aa, Gossypium hirsutum
  Clone ID: LIB3584-003-P1-K1-C12.pep
QHKSCAKCAEKGGEQLASKAARMRARETGRGMRAITRASKGGVWCKVNKRGKVRDSPVSMETRDGQSMQMRSD

SEQ ID NO: 83824 - protein, 104 aa, Gossypium hirsutum
  unsure (1)..(104): unsure at all Xaa locations
  Clone ID: LIB3584-003-P1-K1-D1.pep
KKXRERKGSHLSFHLPPLSRTTSSTSNISEPIRVLTRVWNVARLKVFLRVSFSFFSISKKYVWFRSRFLKNLKRTKNIFIFSPQQSHDGGSPVSGLKVGKDERE

SEQ ID NO: 83825 - protein, 71 aa, Gossypium hirsutum
  Clone ID: LIB3584-003-P1-K1-E1.pep
ALFYWVSSDPHLRCQQLYSLCEKTIVSISAGKYWAATATTIGDVYMWDGKKSMDKPPIATRLHRVKGKKIP

SEQ ID NO: 83826 - protein, 191 aa, Gossypium hirsutum
  unsure (1)..(191): unsure at all Xaa locations
  Clone ID: LIB3584-003-P1-K1-E6.pep
MAVSLGLNKAKPYLSMISLQFGFAGMYVITMVSLQHGMNHYVLAVYRHLVATIVIAPFALVLERKIRPKLTLPILLRILVLGFLEPVVDQNLYYLGMKYTTATLASATVNVIPAITFVMALIFRLEKVKLKKVHSIAKIIGTVIMVPGAIIMTMYKGPAINFIKLQGGSNDGATNEAEAKHWVXGTLMLLS

SEQ ID NO: 83827 - protein, 149 aa, Gossypium hirsutum
  Clone ID: LIB3584-003-P1-K1-G11.pep
ARNTVDLWYKERQEVLEWQKQRKFEAQKFGCVKTLLGRARRFPSFAHCTRAQKGHIERAAINTPVQGSAADVAMCAMLQISKNECLKELGWRLLLQVHDEVILEGPSESAEIAKAIVVDCMSKPFGGKNTLKVELAVDAKCAQNWYAAK

SEQ ID NO: 83828 - protein, 79 aa, Gossypium hirsutum
  Clone ID: LIB3584-003-P1-K1-H12.pep
YTKTLYKLHLKYPFAKHTIFQMYGKKDEYNHIRSMSIPYIYVRICIMVFIGIKSICLYNLTIIIDRPKESKACLYNGVR

SEQ ID NO: 83829 - protein, 187 aa, Gossypium hirsutum
  Clone ID: LIB3584-003-P1-K1-H2.pep
PIVLSFCEGHRDPAEEVLLPKPYQHDAGNPEQDTREHEVVSSEFKDENPEEVDSLVVPEGQKRIAQLQAKLFQATAEGAVRLKNRKGPHRGEDFTLMQALIKADFWLIMFSLLLGSGSGLTVIDNLGQMSQSLGYDNTHIFVSMICIWNFIGRVGGGFISEIIVRDHAYPRPIVIVVAQLVMAGGHV

SEQ ID NO: 83830 - protein, 65 aa, Gossypium hirsutum
  Clone ID: LIB3584-003-P1-K1-H4.pep
KENFQHGRFRQYLEPQAGSFFELIKLSIFLCFCNVFFIHTISFLFFVFFYFIFFFFFFFFLFFFF

SEQ ID NO: 83831 - protein, 126 aa, Gossypium hirsutum
  unsure (1)..(126): unsure at all Xaa locations
  Clone ID: LIB3584-004-P1-K1-A1.pep
FFALGHQRGLARGMDFRGPPAMPSTPLADVSPISGDSRRLAAGLNGFSSLPERANYGSREEFMPRDMRERFAAPAAYDQLSSQEPGMNFSNRDLRNPNRPLAASPARGQTSGFTQNSPXXAXGEKE

SEQ ID NO: 83832 - protein, 131 aa, Gossypium hirsutum
  unsure (1)..(131): unsure at all Xaa locations
  Clone ID: LIB3584-004-P1-K1-A4.pep
HRFNKSQQDSFLPVIEDGSIVFMGATTENPSFHLITPLLSRCRVLTLNPIKPHHXETLLKRSANDNEKGLSQSVGMRVDVKDDAIDFLSMNCDGDARVALNALEIAASTAAARVAAXLLEPGVAVVSVCVV

SEQ ID NO: 83833 - protein, 155 aa, Gossypium hirsutum
  Clone ID: LIB3584-004-P1-K1-B6.pep
HVINHLSFGKTISPRLLSDAKRLIPYLGRSHDRLNGRLFINHRDLDANVTIEHYLQIVKTEVVTRKSSREHTLIEEYEYTAHSSLAQSIYIPVVKFHFELSPMQVLVTENPKSFSHFLTNVCAIIGGVFTVAGILDSILHNTIRLMKKVELGKNF

SEQ ID NO: 83834 - protein, 180 aa, Gossypium hirsutum
  unsure (1)..(180): unsure at all Xaa locations
  Clone ID: LIB3584-004-P1-K1-B9.pep
YNHVQDWIKKNVLVCRASSLAPTILNRELSTQTGRKLERKVALISGAASGIGKATAXKFISNGAKVVIADIQHRLGQETAKQLGPNATFIPCDVTKESDISDAVDFVISQHKQLDVMYNNAGVPCYTTPSIADLDLAVFNQVMDINVRGALAGIKHASRVMIPRXAGSLLCTAWVTGIMG

SEQ ID NO: 83835 - protein, 203 aa, Gossypium hirsutum
  unsure (1)..(203): unsure at all Xaa locations
  Clone ID: LIB3584-004-P1-K1-C2.pep
KTFFGKGGTDYDFASCDPLKTREELDKLQAEQSSLGKRVNKKVVAMFEKAEDEYNNLMSKKNTVENDKSKIKKTLEELDEKKKETLKVTLVKVNKDFGSIFSTLLPGAMAKLEPPEGCSFLDGLEVRVAFGDVWKQSLSELSGGXRSLLALSLILALLLFNPAPFYILDEFIVVSLKEGMFNNANVLFRTXFMNGVSTVQRTV

SEQ ID NO: 83836 - protein, 99 aa, Gossypium hirsutum
  Clone ID: LIB3584-004-P1-K1-C4.pep
QRPLCLFLTSCFICLEAFRLFICYQRTLYKRLMFVIMFWQKHELPDDRNLLFLLNPMILDFLCLLIFLGFYYTGDCSLLLELLVCLFYLLNETSTAIDF

SEQ ID NO: 83837 - protein, 57 aa, Gossypium hirsutum
  Clone ID: LIB3584-004-P1-K1-C5.pep
LPVSLCPIAYFMYRIILVDDLVYFQSLTYYKIARCFLLALNEFSWENLNTHSSDNHV

SEQ ID NO: 83838 - protein, 168 aa, Gossypium hirsutum
  unsure (1)..(168): unsure at all Xaa locations
  Clone ID: LIB3584-004-P1-K1-D2.pep
KEQDEGPEYTFFVGDLVXDVSDYMLQEIFKADYPSVNGAXVVTDRTTXRSKGYGLGRFGDQSEQMPAMTEMNGIYCSTRAMRFGPASNKKPVTGQPCQKSTYQNAHRNAAENDPCNTTMFVGGSHLTVFVDHLKQVFGQLADGVQWKVPAIKKWRHCSICLLSAWCAA

SEQ ID NO: 83839 - protein, 118 aa, Gossypium hirsutum
  unsure (1)..(118): unsure at all Xaa locations
  Clone ID: LIB3584-004-P1-K1-D5.pep
QKPNKLXTFLFRKSSRDSANKLSKKLSAVGIVEELFEEGSAMLAERLGNDEGAGQTTSGIFTCGVCQVDLAPSEGISVHAGSIFSTSSKPWQGPFLCAACRNKKDAMEGKRPSGVKVA

SEQ ID NO: 83840 - protein, 98 aa, Gossypium hirsutum
  Clone ID: LIB3584-004-P1-K1-F7.pep
MFLGDIDWKLCTKTFIHSQFSTFLTNDCIGGVPMDEEEKVVVDYSCDPLLNDGKFQQSILSSIAGAGKAIEELYRSPQDIEGVIRDGKVYVVQTRPQM

SEQ ID NO: 83841 - protein, 119 aa, Gossypium hirsutum
  unsure (1)..(119): unsure at all Xaa locations
  Clone ID: LIB3584-004-P1-K1-G5.pep
ERNLLSVALQKXVIGARQAFWRIVYYIXYTEEGHANALHVCVIRDYKAXIYALLSELCAGILKLLDEKLVPXAGTGDSMVLYLMINGDCHLCLAALMTGDDRLAAAVNALTVYNSAHDL

SEQ ID NO: 83842 - protein, 197 aa, Gossypium hirsutum
  unsure (1)..(197): unsure at all Xaa locations
  Clone ID: LIB3584-004-P1-K1-G6.pep
RPWXDGGTLPGCLENIRRETLKXVLLGTGSSQPSKYRNVSSVYINLFSKGSLLLDCGEGTLGQLKRRYGVDGADKAIRNLKCVWISHIHPDHHTGLARVLALRRDLLKGVPHEPLLVIGPRQLKRYLDAYQRLEDLDMQFLDCRSTTKASWDTFVRDGASNNDGSSPQSPRHSNANESMPEINQTLFAKGSRMQSYL

SEQ ID NO: 83843 - protein, 201 aa, Gossypium hirsutum
  unsure (1)..(201): unsure at all Xaa locations
  Clone ID: LIB3584-004-P1-K1-G8.pep
VRAXGAYNSGRGLGTNAFVFSFWYLDQLGMASKYDTKTYCRQSLVGGNYGLLNTTNFEPNAGCYSALLWHRLMGRNVLSTSFTGTDKIRSYTHCAKQSKGITLLLINLNNSTTVQAKLAFNSTMSLRHKHRSQISDHKHRIHKTTIIKLPQGIDGXIRREEYHLTAKDGNLQSQSMLLYGNILSVNSSGVIPHREPLHVKS

SEQ ID NO: 83844 - protein, 53 aa, Gossypium hirsutum
  unsure (1)..(53): unsure at all Xaa locations
  Clone ID: LIB3584-004-P1-K1-H12.pep
LHVLNMGVGGGGVCISLLCVNXALWXIXPKTYMYPSYFFFXLFSVFLFEDGNA

SEQ ID NO: 83845 - protein, 87 aa, Gossypium hirsutum
  unsure (1)..(87): unsure at all Xaa locations
  Clone ID: LIB3584-004-P1-K1-H4.pep
SLNSQFFGAKCYIFVQKHWKGTGEGQYFNPLICARMLVKNCFRCHWKKVCPYEEWKCSFYSFFLIFLFELNISACPXSHYVLIFLLF

SEQ ID NO: 83846 - protein, 160 aa, Gossypium hirsutum
  unsure (1)..(160): unsure at all Xaa locations
  Clone ID: LIB3584-004-P1-K1-H6.pep
AHDHLIYLTAAXLALSKLRRFADASTDLDTLDDFNSHYYKYETYPQLYPNRSGSMLPLGGGVIHAQLPIKLGNRQEGLDRFYSLLNFIRQKIKEKESNNLHDSVKIWKRRENFVLNCLIGHHLGDKEFILCLDLIKDLINRDSLDPLXVSPFGFLLLLFG

SEQ ID NO: 83847 - protein, 58 aa, Gossypium hirsutum
  unsure (1)..(58): unsure at all Xaa locations
  Clone ID: LIB3584-004-P1-K1-H7.pep
LKXCMFGIYLYIPHAFFTNXXVSTKNKKFXAKEXSHXPENXNPHXKXXIPFLXPNRXK

SEQ ID NO: 83848 - protein, 157 aa, Gossypium hirsutum
  unsure (1)..(157): unsure at all Xaa locations
  Clone ID: LIB3584-005-P1-K1-A3.pep
PRPGYNFLRKWLQSHPKFITNSLYIAGDSYAXXIVPIIVHAISDGIEDESVPAFNLKGYLVGNPSTGSKYDDNSKIPFYNRMALISDELYESAKRNCKEEYVEVEMSNVKCAKDLQAISECIAYINKPHILEPHCPSDFNTPNSLVNERKYFLETLF

SEQ ID NO: 83849 - protein, 118 aa, Gossypium hirsutum
  unsure (1)..(118): unsure at all Xaa locations
  Clone ID: LIB3584-005-P1-K1-A6.pep
RRRKTPKNWKDEIEAGIVQKPDLWPPXNRADKPSLRNPRLRHERMGCGWIAAIFEWEGVIIKDNPELEKQAWLTLAEEEGRSPIPAFMLRRIEGMKNEQAISEILCWSRDPXSVKRMA

SEQ ID NO: 83850 - protein, 113 aa, Gossypium hirsutum
  unsure (1)..(113): unsure at all Xaa locations
  Clone ID: LIB3584-005-P1-K1-B1.pep
XMGHDTVIDGMLKXGLWDVYNDFGMGVCGELCADQYKITREEQDAYAIRSFERGIAAQKNGHLAWEIVPVEVSRGRGKPSVVVDKDEGLRKFDAAKFRKLRPSFKANGGTXAA

SEQ ID NO: 83851 - protein, 121 aa, Gossypium hirsutum
  unsure (1)..(121): unsure at all Xaa locations
  Clone ID: LIB3584-005-P1-K1-B5.pep
IKXRNLKGXXKNDXMKSKXKKFKSEIPTFKXFVLFFLFQXCASXXPVTNXXFISAFIXRFPXLKYXVILILVLPCLCFXCCHFSFFFQTVCMSCGVFRRVXRPVDWAPLSGGWRAVRRLVA

SEQ ID NO: 83852 - protein, 65 aa, Gossypium hirsutum
  unsure (1)..(65): unsure at all Xaa locations
  Clone ID: LIB3584-005-P1-K1-C2.pep
QLTCLWCLSLNFQWCSFPSSILCCSMHLFGFHFHYLKAALYILNSVLICRLXLWKARSSKTGIYX

SEQ ID NO: 83853 - protein, 75 aa, Gossypium hirsutum
  unsure (1)..(75): unsure at all Xaa locations
  Clone ID: LIB3584-005-P1-K1-D1.pep
MSAVKSIKCVTVGDGAVGKTSLLISYTSNTXFPKDYVPTVFDIFSANVVVNGSTVNLGLGDSAGQDLSVFSFVFL

SEQ ID NO: 83854 - protein, 71 aa, Gossypium hirsutum
  Clone ID: LIB3584-005-P1-K1-D10.pep
LRKRFFVPWIFFFLLNNCLCGCSVWITFQIILSFLIFSYTSSGIWLGVGRSSEVCGLQGLILHEGLLLRWK

SEQ ID NO: 83855 - protein, 128 aa, Gossypium hirsutum
  Clone ID: LIB3584-005-P1-K1-D11.pep
MMKPLSSSSNFLLYFFLGLRGFFRCIQSINAQNATTDPSEVRALNSIFQQWRIQAVDSWNISGEPCSGTALTQSSSVFEDPTNNPAFRCDCSFKNNPLCHITSLGVFALDKPVVVPKELFDFAFFGVS

SEQ ID NO: 83856 - protein, 79 aa, Gossypium hirsutum
  Clone ID: LIB3584-005-P1-K1-D7.pep
FFGSARITVFFLCIQKKKNPCLQSFFSFEISKILPLQMIDFGFLKPMFFLFPLFIISSLLFACLLCSFSVLFCLFAGLA

SEQ ID NO: 83857 - protein, 146 aa, Gossypium hirsutum
  Clone ID: LIB3584-005-P1-K1-E6.pep
KHFDVAFCCGTTKQKIFEPWVGSLKAKSCEMLEDKKVTDFNFDEETGCVTEVVCGNETYSVDAVVVAVGITTLQETIKKSAALCKREEFLKVLNLAGIDVVTVKLWLDRKVAIPNPSNACAGFDDLFGCTIFDLNVIHDEPNDDTE

SEQ ID NO: 83858 - protein, 63 aa, Gossypium hirsutum
  unsure (1)..(63): unsure at all Xaa locations
  Clone ID: LIB3584-005-P1-K1-F10.pep
KKKNHFSSKDFXTKXTKKKKTAHLPLLGFSIVSLTTVGIYDQWSPPSPHDSNVMVRNSSLVLQ

SEQ ID NO: 83859 - protein, 61 aa, Gossypium hirsutum
  unsure (1)..(61): unsure at all Xaa locations
  Clone ID: LIB3584-005-P1-K1-H10.pep
CVPWSSAPPLKGILIHXEWGNVRLYIQWSSNMTYWGGGHGRGTRTKNILNSPFVFMGNQNP

SEQ ID NO: 83860 - protein, 138 aa, Gossypium hirsutum
  unsure (1)..(138): unsure at all Xaa locations
  Clone ID: LIB3584-005-P1-K1-H5.pep
MVSLRRRKLLGLCSGTSSFFTPLSRFFDNGNAPGNSSQSAKLVTVHPMPSDPIHMNGKSIPKVASGSPNVSGSGSSKEHHNQPFPGQPIKRRKRHRRKHVQNQEQCLMRGVYFKNMKWQAAIKVVKKQIHLXNSWFHK

SEQ ID NO: 83861 - protein, 78 aa, Gossypium hirsutum
  Clone ID: LIB3584-005-P1-K1-H7.pep
ELYIYKQIILQLPNDSEVSDELWEEVIELMKFRVVDKVPLIRMLAVRALSRFVNDSENSDILDLFLEVLPLEQNSVSV

SEQ ID NO: 83862 - protein, 174 aa, Gossypium hirsutum
  unsure (1)..(174): unsure at all Xaa locations
  Clone ID: LIB3584-006-P1-K1-A10.pep
SFXEETKKVAVPKVEKARVKSLGFEERAKLAKNPTGERRFEVMVKKHSNLCLAADVGTAAELLDIAEKVGPEICLLKTHVDIFPDFTPDFGSKLCLIAERHNFMIFEDRKFADIGNTVTMQCEGGFFRILXWADIVNAHVISGPGIXAGLKLKVLPXGWGLLPLAVLGSVGFLA

SEQ ID NO: 83863 - protein, 178 aa, Gossypium hirsutum
  Clone ID: LIB3584-006-P1-K1-A6.pep
FGAEPKGGGEDNRRNVRPINQILQPPLTATVLAIVIGIIPQIKATVFGSDAPLDFITGGLAMISNGMVPAVMLVLGGMLWEGPNESKLGLRTTIGIVVARLLILPLAGIGIIYLADKWNCLIADDAMYRFVLLMQYATPSAILLGAIASLRGSAVGEASALLFWQLVFGLVSFSVFFF

SEQ ID NO: 83864 - protein, 47 aa, Gossypium hirsutum
  unsure (1)..(47): unsure at all Xaa locations
  Clone ID: LIB3584-006-P1-K1-B1.pep
SLIFXTFLLXNLXVFNHLSICKCIIQXSNSXXXNXXYXXXCXXYLXG

SEQ ID NO: 83865 - protein, 89 aa, Gossypium hirsutum
  unsure (1)..(89): unsure at all Xaa locations
  Clone ID: LIB3584-006-P1-K1-C12.pep
TPIYYRGVDLPCKKPLNEVSFQQHTFNPHFFATLLRIYIFIPPSENTXIINPCDXWQNCIVKNLICXVKSHQIYEVFDTPSACSAKLLD

SEQ ID NO: 83866 - protein, 158 aa, Gossypium hirsutum
  unsure (1)..(158): unsure at all Xaa locations
  Clone ID: LIB3584-006-P1-K1-C2.pep
XNTLITKFXRASTXXNCTXCKXKXXRFVVIGXNMFCTRTXRIHRRYXILKGSTHGRXXDKDKIHENTTLKDLDLSYEFQMDKSLQKFFFHQISLDCNFLFSQHIIDYSLLLGLHFRAPEQLNGLLEPPMMPIIESSPVGQDGVVLFPSFVLFFAHEPI

SEQ ID NO: 83867 - protein, 188 aa, Gossypium hirsutum
  unsure (1)..(188): unsure at all Xaa locations
  Clone ID: LIB3584-006-P1-K1-C6.pep
QPLXPSLLGELLANIATLSSVYHKPPDAFVTRVKTASQSTEDDDYPDGNEKXYSANVGDGGASPSTSSSSVPYTAARKPSPAQVMPAPAYPVPDLLGDLIGLDNNAIVLADQPAMPSGPPLPILLPASTGQGLQISAQXARQDGQIFYSLMFESYSQITLXGFMIQFTKYSFWSGCLWDLFRFPPLAP

SEQ ID NO: 83868 - protein, 69 aa, Gossypium hirsutum
  unsure (1)..(69): unsure at all Xaa locations
  Clone ID: LIB3584-006-P1-K1-D2.pep
MSWFHHYHQIKQKDGYFQYPSPLLPPPYAPTXXHKDSSPSPPSSSSGSRISPALLFIIVFLAVLFFISG

SEQ ID NO: 83869 - protein, 131 aa, Gossypium hirsutum
  unsure (1)..(131): unsure at all Xaa locations
  Clone ID: LIB3584-006-P1-K1-D4.pep
TVEERNLVYVAYKNVIGSLRAGWRIGSSIEXKEKGRKNEEHVALVKEYRSKXLNPEMSEVCASILTLLESNLILSATASESNAFYLKMKGDNHRYLAEFKVGDERKADADDTMXTYKAAQDMALEDLAPTH

SEQ ID NO: 83870 - protein, 52 aa, Gossypium hirsutum
  Clone ID: LIB3584-006-P1-K1-D6.pep
GLCTGPVTSIGQVGSFLKVAMGELLENTSIMINSEDCELIYLKTLRSCYNII

SEQ ID NO: 83871 - protein, 129 aa, Gossypium hirsutum
  unsure (1)..(129): unsure at all Xaa locations
  Clone ID: LIB3584-006-P1-K1-E10.pep
KNFLKQGXKSLEEKCNQENIRVGQGKVSSGGGKDVNESSQQCPKTLLSRNSSLPKKSKASEEKVAKLPLNARAAEVELAKPAQNRVSELAGKSLQKGTGSGSGGCSQGSINAKPPLSPGACXCSSCGXI

SEQ ID NO: 83872 - protein, 212 aa, Gossypium hirsutum
  unsure (1)..(212): unsure at all Xaa locations
  Clone ID: LIB3584-006-P1-K1-E3.pep
TELKYSWKSAGHPSXWKRIADGKNXSCKQYTPCGCQSMCXKXXPCLNNGTCCEKYCGCSKSCKNRFRGCHCAKSQCRSRQCPCFAAGRECDPDVCRNCWVSCSGDXLGEPPKRGDGQCGNMRLLLRQQQRILLAKSDVAGWGAXLKNSVNKXDYLLEYTGELISHTEADKRGXKIYDRANSSFLFDLNDQFVLDAYRKGDKLKFANHSSNPN

SEQ ID NO: 83873 - protein, 46 aa, Gossypium hirsutum
  unsure (1)..(46): unsure at all Xaa locations
  Clone ID: LIB3584-006-P1-K1-E9.pep
VFPASAPRPXDFAVLRAKEKTSVLDGEQSNLMSSFTDFSLLLHYEL

SEQ ID NO: 83874 - protein, 66 aa, Gossypium hirsutum
  unsure (1)..(66): unsure at all Xaa locations
  Clone ID: LIB3584-006-P1-K1-F11.pep
SRVRYFDWERGRAGTVWVNCFDVFDAAIPFGGYKMSGIGREKGIYSLHNYLQVKAVVTGGRNPXWL

SEQ ID NO: 83875 - protein, 79 aa, Gossypium hirsutum
  Clone ID: LIB3584-006-P1-K1-F2.pep
MDELPTQSTSALASPRLQLNRGSTTATSGPESKPKKKICCACPETKKLRDECIVEHGEEACAKWIEAHRICLRAEGFNV

SEQ ID NO: 83876 - protein, 90 aa, Gossypium hirsutum
  unsure (1)..(90): unsure at all Xaa locations
  Clone ID: LIB3584-006-P1-K1-G11.pep
KAETERKEKETSKKEAQRRQXQTGPQAGKGXKSAMGEXEXEEXXAPPPPPRKETVSNVLSEXLFRQEPKASNDGNGRKRSGDQSIYPRQK

SEQ ID NO: 83877 - protein, 203 aa, Gossypium hirsutum
  Clone ID: LIB3584-006-P1-K1-G7.pep
PRPPSVRPASGDLSVRSTDQVTQMHKLQAMVQDLKDSDGELKLILEMYRREFTDSSDILEARDSEFKAWAHVQSLKSGLDEHNLELRVKTANEAEAISQQKLAAAEAEIAELRHKLEASKRDKSRLTDSLKAKIEENEAYLSEIESIGQAYDDMQTQNQQLLQQITERDDYNIKLVLEGLRAKQLQDTLLLENITWRKNSASQ

SEQ ID NO: 83878 - protein, 57 aa, Gossypium hirsutum
  unsure (1)..(57): unsure at all Xaa locations
  Clone ID: LIB3584-007-P1-K1-B2.pep
GRFGMTELAVTKLSLDATLVNPEFSLLIFFPSILPSYIXAXTINKLXEKEALLVFTK

SEQ ID NO: 83879 - protein, 132 aa, Gossypium hirsutum
  unsure (1)..(132): unsure at all Xaa locations
  Clone ID: LIB3584-007-P1-K1-B4.pep
MLDRSLQMSLNCPSYLLVRQRTLCYKRLNPVRAMPPSSVILHIDESGKFPESRKTCNSLIASLSIYDGPLLSAPNTVGILGGLSVDSTLNFLRKLVHLSKENEAKCMPFVVCXXPVLNRELSSLERSSSSFC

SEQ ID NO: 83880 - protein, 31 aa, Gossypium hirsutum
  unsure (1)..(31): unsure at all Xaa locations
  Clone ID: LIB3584-007-P1-K1-C1.pep
XDVIXXLLLVXHLXIQFTLCRLFYQSSCDWX

SEQ ID NO: 83881 - protein, 61 aa, Gossypium hirsutum
  unsure (1)..(61): unsure at all Xaa locations
  Clone ID: LIB3584-007-P1-K1-C10.pep
FXXLPXXSXXLXXFSXIPNAXXLKXKFXGEWXXYGXNNTXVILNGRCEDDAXGPSTPIXXC

SEQ ID NO: 83882 - protein, 56 aa, Gossypium hirsutum
  Clone ID: LIB3584-007-P1-K1-D5.pep
CLLRFLTQCLFHERFHLKVASCLTSSFLVLMLVDWSLTSSFLGLFRLWKALQFFAG

SEQ ID NO: 83883 - protein, 109 aa, Gossypium hirsutum
  unsure (1)..(109): unsure at all Xaa locations
  Clone ID: LIB3584-007-P1-K1-D7.pep
NPQLESTVGWNCSLSWNIKQWVRGSGCGSLFGTHAWRVATMCGHYHFYHRLASRLVPXLMFRLLSLLSPKLTSLTTFMTFAVMLGCLFALPCLLRGFLVCIFCMVLLFR

SEQ ID NO: 83884 - protein, 64 aa, Gossypium hirsutum
  Clone ID: LIB3584-007-P1-K1-E10.pep
FQQNSSREIYEPCFDLVYMPRGSTYLYTGLVWSDHRRLDFKVMSCARNLCSPLFLAVCLLVSVI

SEQ ID NO: 83885 - protein, 115 aa, Gossypium hirsutum
  unsure (1)..(115): unsure at all Xaa locations
  Clone ID: LIB3584-007-P1-K1-E6.pep
TFKALILRVSFTKLTSTSTWRRNQVKPTYANASRREGTQRNEWKTKXQWXKILMXXISXVSKPVTTXSHYAXXVKQKFXLWNYNYSPSYSLIESQPGFLSLAWNEVPLLTVSSWR

SEQ ID NO: 83886 - protein, 140 aa, Gossypium hirsutum
  unsure (1)..(140): unsure at all Xaa locations
  Clone ID: LIB3584-007-P1-K1-F1.pep
INQKKNLGLPNVXGXRKKEAFXNXKDXIXXXXDGWSXRLLKXKGKEVLIKSVLQAIPAXAMSCFLLPKSFCGEWENIFAKFWWQKGQNRKGIHWCQWKYMCRSKEEGXMEFRNMLQFNISLLAKQGWRIINNQDXTGRRG

SEQ ID NO: 83887 - protein, 153 aa, Gossypium hirsutum
  unsure (1)..(153): unsure at all Xaa locations
  Clone ID: LIB3584-007-P1-K1-H4.pep
RPRVRATFSGRRAGSLPTAISTSSGAPSNLPNGIAKPATAPIPDLLDLSSDDVPAPSSSGGDFPQDLLGVDLSPTLAPSGAGKPPKASTDVLLDLLSIGTYLPVQTGSSASDILSSSQDDKALASLSSLSANATSPXXAAPMMDLLDGLGPGP

SEQ ID NO: 83888 - protein, 113 aa, Gossypium hirsutum
  Clone ID: LIB3584-012-P1-K1-A6.pep
HASAHASGEEPINEIDGKRFEAHGNDSKVNGVTSTSKQEETVWVEGLLPGIDFCNHDLKAVATWEVDGTGSITQIPLSMYLISALQSPLPVDKEVSISYGNKGNEVLCFVLNR

SEQ ID NO: 83889 - protein, 183 aa, Gossypium hirsutum
  unsure (1)..(183): unsure at all Xaa locations
  Clone ID: LIB3584-012-P1-K1-B4.pep
NLRGSCDRAYVKAREDQGGRTVDVMRILLTYGLDSITSSVENKPCQNKSVKESVRALLKEMVDYGSKDQQADMPNAAPSRGDASLHDHSSTQGHIKVPMKPGDWLCPKCNFLNFARNIKCLRCDGLFEERLRQLREDQDHLPLKKGDWICERCNFLNFAKNTICLQCKENPSKRHLNPXEWEC

SEQ ID NO: 83890 - protein, 141 aa, Gossypium hirsutum
  Clone ID: LIB3584-012-P1-K1-C7.pep
LELLEEFEEEWREMIDKYGLHGNKHIIRLYALRTLWALPFLRPYLFAGLTSLCQSETTTTFIQRILSAQSLLDRFVEQVAEVVEFNDRGFKQKQRRKSQKVCLKTGSPIESHAATVLTPHAFGKLQEELLLAPQYASFAVD

SEQ ID NO: 83891 - protein, 56 aa, Gossypium hirsutum
  Clone ID: LIB3584-012-P1-K1-E11.pep
DTRIGSLWRGTMYAVCYKMGSRESNSCRLYLNAITYNLHVIWALYDLCTSYTYLLE

SEQ ID NO: 83892 - protein, 49 aa, Gossypium hirsutum
  Clone ID: LIB3584-012-P1-K1-E2.pep
LIGLLLKVLAKFSLSLGLAIEMSNPYGIEKQAQPLFHNINQMYELQPFK

SEQ ID NO: 83893 - protein, 131 aa, Gossypium hirsutum
  Clone ID: LIB3584-012-P1-K1-E5.pep
MATAEVVTAQTAIHEEKPEEVVKVEEIATQEVVAVAPATEPVAEEPKEAVPEAAFEEPQAPETEATVETESKEVVEEPKAVTEEPEVDKKEEETSDETVADPVAEESKETTEPTVEDTQESTESTEAAVAA

SEQ ID NO: 83894 - protein, 91 aa, Gossypium hirsutum
  unsure (1)..(91): unsure at all Xaa locations
  Clone ID: LIB3584-012-P1-K1-F9.pep
CCRVRLLLPGSGCSFRXGAVLLSXPVSAFRVXXPPLGVXLPVLXXGXWGSCWSFLPXLXPFPPSCXLFPFVLXSAXSXPSFXFLGRVGRPG

SEQ ID NO: 83895 - protein, 105 aa, Gossypium hirsutum
  unsure (1)..(105): unsure at all Xaa locations
  Clone ID: LIB3584-012-P1-K1-G7.pep
SSYPPNTPLGLKRVTLSINSGEKESVVRPTPSGKTTFIQAFFRLVESTAGKIIIDDIDNCMLGLHDLLSRLGIIPQEPVLFERSVRSNIDPARQFSDEXIWKSLE

SEQ ID NO: 83896 - protein, 83 aa, Gossypium hirsutum
  Clone ID: LIB3584-012-P1-K1-H4.pep
EKDAQMCIYDASCDTHFGFCCHIDEQASRELSRLPEVLLVKPDPNYNSKQKDYTASNIEFIANIGNLQLFPAGNTKHWLVRMD

SEQ ID NO: 83897 - protein, 55 aa, Gossypium hirsutum
  unsure (1)..(55): unsure at all Xaa locations
  Clone ID: LIB3584-013-P1-K1-A4.pep
KTSHAFRGHVFYYSLALCIMRESKKGLVLHTLMIYDRCIDNVWCLSFRLLCNXFI

SEQ ID NO: 83898 - protein, 48 aa, Gossypium hirsutum
  Clone ID: LIB3584-013-P1-K1-A7.pep
SYIYNFFSKNNYSYLNATRFYDHCNSFTCVKNLYIIYFFQNKFFNYLF

SEQ ID NO: 83899 - protein, 72 aa, Gossypium hirsutum
  Clone ID: LIB3584-013-P1-K1-B12.pep
TYVIIIIFVGCGIMLALYLHKFCCKLLLNLSYKTWHCICSIHIIEIFCEQLHFLSFSPWVCLCFLLSYWISF

SEQ ID NO: 83900 - protein, 158 aa, Gossypium hirsutum
  Clone ID: LIB3584-013-P1-K1-B6.pep
GVLHTKKLKQHNSAELLPPPLYVIYSQFMAQKEAFGEDIDLEIIGSLKDAQAFARQQANKDNGVSNSIESSRMEDDIPDEEDDGQRRRKRPKRVPSKEAIDQAGVYQVHPLKIILHIYDDEASDPGSTKLITLKFEYLLKLNVVCVGTERSSEGPEYN

SEQ ID NO: 83901 - protein, 96 aa, Gossypium hirsutum
  Clone ID: LIB3584-013-P1-K1-C11.pep
YYLSLHPEAVFIPMFCVIQQHKTTFVLLRYFQAEMAVLIIRISCEVYLCLLLIFLSFRGVLNTKIQIQGDPKKMILVWVQTLQKPLNPLGLPFLCW

SEQ ID NO: 83902 - protein, 136 aa, Gossypium hirsutum
  Clone ID: LIB3584-013-P1-K1-C3.pep
LFSQKVLLGWFWYLFSYMNALLCSLLSAGSLFLCSLLRWFFALISALCWFVLPSADSLFLCPLPNKTIGKISELRQANGDLANEVNILQKSRFDMVEEPVYPRWLNVCLRAEIKEYQTSSRKTSEKGSSEGFRPEN

SEQ ID NO: 83903 - protein, 98 aa, Gossypium hirsutum
  Clone ID: LIB3584-013-P1-K1-C9.pep
KLMLYLVFVCDFQARTVSSAKLRRSKFSSALIGKDISLKVPEERASRLGKPQSPTPPVRRYLSGDKGASTRNKVKFDVVENQPMSKVVVPVKAHGTRS

SEQ ID NO: 83904 - protein, 43 aa, Gossypium hirsutum
  Clone ID: LIB3584-013-P1-K1-D3.pep
KFPGSMFFKLRHIILISCIQLISTASLTRSSVILSLLESVLII

SEQ ID NO: 83905 - protein, 147 aa, Gossypium hirsutum
  Clone ID: LIB3584-013-P1-K1-E12.pep
RRQVEYVKKRVLLLEKGLNAGYQKEFYGEMKTNEVASEQQENGKRVADMSNARTTKTPSQVTDCLPPIEVIASEEISAAACNNDADRLELPQHYNKICKILEDNVHEAIQSSLNLKKNLHTLEEICGDISRILSPAEQPVVSTAARS

SEQ ID NO: 83906 - protein, 62 aa, Gossypium hirsutum
  Clone ID: LIB3584-013-P1-K1-E5.pep
ESRTNIPYLQMLILNGTCDAHYIYAFSSSNDIATLNKTGTVAKNIPPESIALSPCLDATFIE

SEQ ID NO: 83907 - protein, 61 aa, Gossypium hirsutum
  Clone ID: LIB3584-013-P1-K1-E8.pep
ASPMVNSRKRKLGSPPDRQLEGEKRHEYMSSYNHDATEDGQKSGRSSYADKEHRRHAHENH

SEQ ID NO: 83908 - protein, 80 aa, Gossypium hirsutum
  unsure (1)..(80): unsure at all Xaa locations
  Clone ID: LIB3584-013-P1-K1-F3.pep
RKNATTTAGNSSQVNDFTTPIXLVNCCISKRRGLPILXXFKTFTAVSVYPTIIGFGPSVFIYHQLNLLFYXLNNLDLFEI

SEQ ID NO: 83909 - protein, 131 aa, Gossypium hirsutum
  Clone ID: LIB3584-013-P1-K1-G2.pep
APTRPPTRPKLDNLETNHFVLVHGGGVGAWCWYKTIALLEEGGFKATAVDLTGSGIHSFDTNGITSLPQYVKPLTDFLEKLPEGEKVILVGHDFGGACVSYAMELFPFKIAKAVFVAAAMLTNGQSTLDMF

SEQ ID NO: 83910 - protein, 107 aa, Gossypium hirsutum
  Clone ID: LIB3584-013-P1-K1-G3.pep
ESRSTDACDTRQHIRVVRPVNLLILETMIYRAVLSLHRELYSITTWSLLSLHEKIILLLASSNTLALFYHGNAAPSFNQIYIETCILIKLQLITYIMSFEVYILSCC

SEQ ID NO: 83911 - protein, 109 aa, Gossypium hirsutum
  unsure (1)..(109): unsure at all Xaa locations
  Clone ID: LIB3584-013-P1-K1-G8.pep
VSGVPSGDGSEFLNHSSNSSVSVSVSLIAGASIAFAFNLFETPFSSSSVTLLIFLPLFATASQSTITGSSLLLQLSEEALVDLELGPVSKXXSSSEMSRAGNITTSVEL

SEQ ID NO: 83912 - protein, 47 aa, Gossypium hirsutum
  Clone ID: LIB3584-013-P1-K1-H2.pep
LLCSLLEQFLSLKMEIMFYMVIYLLFFLHVDSDAIFSPKFFRVFENI

SEQ ID NO: 83913 - protein, 85 aa, Gossypium hirsutum
  unsure (1)..(85): unsure at all Xaa locations
  Clone ID: LIB3584-014-P1-K1-A11.pep
ESSRAIDEHHTILIFEATPDAATTTQAMNQVDTTXIYEGLSEDAPVQCHNLNQTKLRHDTQACKRMLDQLKHRCAEQHKEGTAYD

SEQ ID NO: 83914 - protein, 182 aa, Gossypium hirsutum
  unsure (1)..(182): unsure at all Xaa locations
  Clone ID: LIB3584-014-P1-K1-A12.pep
NSSRRFWFVTPPAIGPDVPYTFGLIGDLGQTHDSNSTLTHYELNPAKGQTLLFLGDLSYADAYPFHDNARWDTWGRFIERNAAYQPWIWTAGNHEIDVVPAIREVIPFKPYTHRYHVPYTASGSTSXLWYSIKRASTYIXVXSXYSAYGXFTPXYKWLEGSFKVTDRTHAHVYHLFTQYSYI

SEQ ID NO: 83915 - protein, 161 aa, Gossypium hirsutum
  unsure (1)..(161): unsure at all Xaa locations
  Clone ID: LIB3584-014-P1-K1-A3.pep
HAYEIYNKKPVEGSISDRVXQKLAKDRLLEKQXDLLLXAVELHAMRLCLKENRVIDDATGAEKTNYEEMRHNAYACTEHTGSKXDSFNSPXNCMKYEKDESRRIAILPCYPYVMRTDSLTQARIDMSELDEDXDGVLQPHEMRPTFVSYSNLHTTDMLQLV

SEQ ID NO: 83916 - protein, 115 aa, Gossypium hirsutum
  unsure (1)..(115): unsure at all Xaa locations
  Clone ID: LIB3584-014-P1-K1-A7.pep
SPNFSGSLTLGPKGQPIMIKYTQVLKNPRRPSLYFVNQIGIRVGRRAVDIPPKAXAFNPFTGAETIXDSGTCFTRLVKXGYVAVRTRPMRVGCQCTSLEVDNVHVPMCATIYVTA

SEQ ID NO: 83917 - protein, 74 aa, Gossypium hirsutum
  Clone ID: LIB3584-014-P1-K1-A8.pep
TRAEQIKYLLVLDDVQNDEKWDELEDRLEEINEYATNGVIATTRKEAVASPVQVLSNQTHQPGRLVDEDCWSID

SEQ ID NO: 83918 - protein, 66 aa, Gossypium hirsutum
  Clone ID: LIB3584-014-P1-K1-A9.pep
RVHSTARILMKQLVYLHLASKAEAVPRAAVYFERRCRSATRSDARDTAERCPFTRSGFDGRVFGRV

SEQ ID NO: 83919 - protein, 73 aa, Gossypium hirsutum
  Clone ID: LIB3584-014-P1-K1-B3.pep
MNERRIPGMSTVLQRLRSIQALILDHKPYSNVPGWEQSSDTPKGELMCMQYNEETFILSLTTNIYSVRRPPTH

SEQ ID NO: 83920 - protein, 54 aa, Gossypium hirsutum
  Clone ID: LIB3584-014-P1-K1-B4.pep
LFIIMKNVINILKGRITFYCWLLSLFGLCAYALYFILSFKKLGVHFAINLQLNK

SEQ ID NO: 83921 - protein, 61 aa, Gossypium hirsutum
  Clone ID: LIB3584-014-P1-K1-B5.pep
PTSYNQTPKVWNLIYLSVPFHKGQLTVSLSSKQNDQLWLSLVATLTVIVSVTYIYMYLSCM

SEQ ID NO: 83922 - protein, 107 aa, Gossypium hirsutum
  Clone ID: LIB3584-014-P1-K1-C2.pep
SRSRAADLTVAFDVDTRAPEDMETKAPKIIWNNSEDPVSQTVKQVHIIFDLFLDMQCSLSRADGLAKTKTFIHKSAPDLLGIRLQRKGRHVHLALLTKRFGTETMLD

SEQ ID NO: 83923 - protein, 135 aa, Gossypium hirsutum
  unsure (1)..(135): unsure at all Xaa locations
  Clone ID: LIB3584-014-P1-K1-C4.pep
FDRFVRCPLXPWNYSAAAGLMWRGHGVDYSLSLRSNRTVHSWDRLVYEAAFDGKTAVVFAXGLNLRPHKESDPNRFMCQFGLKNSDEEDEGFVVMTEAIVAAQEVVRCSLPSSIRNNRDLAQGIRVTVVLASRND

SEQ ID NO: 83924 - protein, 120 aa, Gossypium hirsutum
  Clone ID: LIB3584-014-P1-K1-C8.pep
MLANLTVASENYIPLPEDMETKMLKIIWNNLEDPLSQTVKQVHLIFDLFLDIQSSLCRAEGSEKIKTFIQKIASDLLRLGLRCKGRYVSLALLTKKFGAKTMLDISPDLLFEIVHAYLLE

SEQ ID NO: 83925 - protein, 88 aa, Gossypium hirsutum
  unsure (1)..(88): unsure at all Xaa locations
  Clone ID: LIB3584-014-P1-K1-D10.pep
NRCQCKGNRGYHLGLGLCXSGWGLFRGLYAIKLERLICMACLIARTVAPYKRILLTVLRGTEARRIALVPALITSSQKWARFDLKFVS

SEQ ID NO: 83926 - protein, 101 aa, Gossypium hirsutum
  Clone ID: LIB3584-014-P1-K1-D11.pep
RETTRENKELNHDHKLGDELFSDTEIYKEMLNEMLGKGDGQGAVHGDIDADTGANRADEGAGEDERADDRADNVDNIRDTEQPHEQTKHDEKHIDKFIKNL

SEQ ID NO: 83927 - protein, 150 aa, Gossypium hirsutum
  Clone ID: LIB3584-014-P1-K1-E12.pep
AILKPSELASITCLELAEVCREVGLPPGVLNILTGLGPEAGAPLASHPDVDKIAFTGSSATGTKIMAAAAQMVKPVSLELGGKSPIIVFEDVDLDKAAEWTAFGCFWTNGQICSATSRLIVHENIVREFLDRLVKWTKNIKDSDPFERKM

SEQ ID NO: 83928 - protein, 58 aa, Gossypium hirsutum
  Clone ID: LIB3584-014-P1-K1-E8.pep
GSCNLFTLHLNHMKMLAVSYLLKAVSVSVSLSLSLLFSSQGRWSLPRDATVFIYVFSH

SEQ ID NO: 83929 - protein, 143 aa, Gossypium hirsutum
  Clone ID: LIB3584-014-P1-K1-F11.pep
PRVRPRVREVASLRQQLNDLQEYHRQLMGEELSGLSIKDLRNLENQLEMSLKSVRMRKGHHIHKENLELQKKLDLICQENTELQRKVDGNGTVEANEGSKSSSHSYGFNNGYDELQAPVVDLRLSLPQQLPDADTSYRNLRLF

SEQ ID NO: 83930 - protein, 124 aa, Gossypium hirsutum
  Clone ID: LIB3584-014-P1-K1-F6.pep
GKRWRDHKSTLKKGYYKTKTTLKEKLQNVPPGMLRYQWKEAVRFWQSKKGKDRERVGKSSRQKQKFTHTAGLKSFTCVAEAEELSSGQKVRRLQLFEITHMKKDGSPMTPKAGEIIEKLKDKKA

SEQ ID NO: 83931 - protein, 156 aa, Gossypium hirsutum
  Clone ID: LIB3584-014-P1-K1-F7.pep
EKGYLPKQESQEEKPVIELPPLKVKDIPVFKTQDQEGLHQTIAALVEQTKSCTGVIWNSFEELEHGSLTDFRYNFRVPIFPIGPLHKYFPVPSTSLLSQDQSAISWLNKQAPKSVIYVSFGSVASIEKSEFVEIAWGLANSEQPFLWVVRPGSVIG

SEQ ID NO: 83932 - protein, 137 aa, Gossypium hirsutum
  unsure (1)..(137): unsure at all Xaa locations
  Clone ID: LIB3584-014-P1-K1-G10.pep
HASDDPDAFSMDGFHGSLVEYILRGTEKLHSKVGRYKSPDEHPFFPDELPDPLLPPLQYPQVLHPIADSININPKVWQMYFRNLIPRLVKEGDDGNCGSTAICDTMCLQALSKRIHYGKFVAECKYQASXDAYKAAI

SEQ ID NO: 83933 - protein, 105 aa, Gossypium hirsutum
  unsure (1)..(105): unsure at all Xaa locations
  Clone ID: LIB3584-014-P1-K1-G5.pep
TGSTAAATIALEIALESNLKPKTIALAGEPACITCDDACEDTAVDLAHEAAHFNQGQSRCAWSCTCAHARVHDRVIEEAIARAXARAFEHAVRDAVKQGAQIGTE

SEQ ID NO: 83934 - protein, 136 aa, Gossypium hirsutum
  unsure (1)..(136): unsure at all Xaa locations
  Clone ID: LIB3584-014-P1-K1-G6.pep
AAFAATGAGFIARDMTFENYAGPAKHQAVALRVGADHAVVYRCNIIGYQDTLYVHSNRQFYRECDVYGTVDFIFGNAAVVLQNCSLYARKPMSQQKNTITAQNRKDPNQNTGISIHACRILPTPELAAXKTSFPHT

SEQ ID NO: 83935 - protein, 156 aa, Gossypium hirsutum
  Clone ID: LIB3584-014-P1-K1-H2.pep
PRVRVNGNLLTKDVATQIYTLLKQPYLNYLVQDDFKPLLQELLATHPGLEFLQSTPEFQERYAETVIYRIYYYINRSGTGHLTLRELKRGNLIDAMLHCDEEEDINKVLRYFSYEHFYVIYCKFWELDTDHDFLIDKENLIRYGNHALTYRIVDRI

SEQ ID NO: 83936 - protein, 114 aa, Gossypium hirsutum
  Clone ID: LIB3584-014-P1-K1-H4.pep
GTVVRRSPRGSQSSGLIRDPSSLSSSEHASFEDASTSGTIVFRGQHDDSDSPPTPRSRLGIQGRPSAASVEDSTSNLAEAKAAMQAGLRKGNARDRSAPSKNNGTGNENQRRDQ

SEQ ID NO: 83937 - protein, 57 aa, Gossypium hirsutum
  unsure (1)..(57): unsure at all Xaa locations
  Clone ID: LIB3584-014-P1-K1-H7.pep
RGRPHAXXGSRNREAXPLXRGXPSXYVPPVHAXTSVSSCLLVGHXXXFKIQLXXVXX

SEQ ID NO: 83938 - protein, 73 aa, Gossypium hirsutum
  Clone ID: LIB3584-014-P1-K1-H8.pep
GSGSCMKWVLGWGPSWFGSPSRGHFWPRLTSVRQSSRPCPGSPLGCFWCRWPALMSMRRPASGVVGLPVREIS

SEQ ID NO: 83939 - protein, 130 aa, Gossypium hirsutum
  Clone ID: LIB3584-014-P1-K1-H9.pep
IENELPQPSSPSVKKSEEKGIVIVHEVKCKLYVKSTDPADKDSWKDKGTGQLSIKRKEGIGKGSKDSKPTIVVRNDVGKVLLNASLYPGIKMIAQKNSVVAIFHTSVIHMEVKYLDLFDIPFSNLGQWWE

SEQ ID NO: 83940 - protein, 90 aa, Gossypium hirsutum
  Clone ID: LIB3584-015-P1-K1-A10.pep
TAALWPFRRVHFLLLACWSRSGLPLYSPAAKMYVCSYLVGSLFSVRRFTAVIIYLVLYRIILHAGTLLFSDAASSNDGRRWVDRDPDGLR

SEQ ID NO: 83941 - protein, 52 aa, Gossypium hirsutum
  Clone ID: LIB3584-015-P1-K1-B1.pep
KCKNTELKNMQILPFICSYIATGFCSFFGSVCCKLFTLIIDHNCFFKYIYMC

SEQ ID NO: 83942 - protein, 40 aa, Gossypium hirsutum
  Clone ID: LIB3584-015-P1-K1-B11.pep
KKKKKKKKKKKKKKKKKKKKKKKKKKKKKKKKKKKKGGGR

SEQ ID NO: 83943 - protein, 50 aa, Gossypium hirsutum
  Clone ID: LIB3584-015-P1-K1-C3.pep
PFSFNSFLFRACLIYLLLLLLFILIFLGLCYFSEFRIHFNALGFSFCVCI

SEQ ID NO: 83944 - protein, 119 aa, Gossypium hirsutum
  unsure (1)..(119): unsure at all Xaa locations
  Clone ID: LIB3584-015-P1-K1-C5.pep
ACXXPXLPXVPSFXXPXLXPXXFLLVPLXGXXXWXXXXPXCXXCCLXSSFXVWASXPCXXXXXVPSXLPSPLGXXXXXLSXXXXXSGLVXWXGXVXXGPXXCVWXGXXXXLXXAXAWAP

SEQ ID NO: 83945 - protein, 44 aa, Gossypium hirsutum
  Clone ID: LIB3584-015-P1-K1-D11.pep
LNIFTSTAFSEIEKTASRRAYLDKLYANTYTMIQRLCKDMLNYI

SEQ ID NO: 83946 - protein, 181 aa, Gossypium hirsutum
  Clone ID: LIB3584-015-P1-K1-E12.pep
AGFAASYCKLYPPLKTYEYGFRVFLLTFCIVLVSGNNSRTFFRTAFYRLLLIFIGAGLCLIINICIYPIWSGEDLHKLVVKNFKNVASSLEGCVNGYLQCVEYERIPSKILTYQASDDPLYSAYRSVVQSSSQEDTLLDFALWEPPHGPYRSFNYPWRNYVKVSGALRHCAFMVMAMHGCI

SEQ ID NO: 83947 - protein, 158 aa, Gossypium hirsutum
  Clone ID: LIB3584-015-P1-K1-E4.pep
KKDLETCGVLGAFLEKGTFYVTTLIIPKQESTSNSCQAINEEEIFAIQNERSLFPVGWIHTHPSQSCFMSSIDLHTQYSYQVMVPEAFAIVVAPTDNSRSYGIFRVSEPNGMSLLKECQEKGSQFHSHEETVDGSPIYERCTHVYKNSNLRFEIFDLR

SEQ ID NO: 83948 - protein, 88 aa, Gossypium hirsutum
  Clone ID: LIB3584-015-P1-K1-E9.pep
FPISTTIHTHTPFPSPLLFGHMPVSSTTFHHQSYPRSTFNHHCSCRPPHFNAVCPYRRLCHRGKQPKFVSPPFLFLYFSSLILFIIYY

SEQ ID NO: 83949 - protein, 176 aa, Gossypium hirsutum
  Clone ID: LIB3584-015-P1-K1-F8.pep
MSAKKVLVVGGTGCLGQHLLQGFSEIQATTPFALAFTYNSFPPQPLLLAFPTSFAFHVDLKTGLGFDSISQQFGQPDVVVNCAALSVPRACENDPDAAISINVPSSLVNWLSSFAQSDNTLVIHISTDQVYKGVKSFYKEEDEALPVNVYGKSKVAAEQFISEKWSNFAILRKSII

SEQ ID NO: 83950 - protein, 56 aa, Gossypium hirsutum
  Clone ID: LIB3584-015-P1-K1-F9.pep
VYSVQVMNFLKTLISKTLREREYSMVEPTEASYLEPFDDDGDQRPSISLGLQTDLR

SEQ ID NO: 83951 - protein, 180 aa, Gossypium hirsutum
  Clone ID: LIB3584-015-P1-K1-G10.pep
PRVRSTTPNLIPPNRTSVRAPVSIPAIDPPNRSRDKRFTADVGQLKVNDIGDQRETSALRDELDMLQEENENLLDKLRSAEERREEAESRARELEKQVASLGEGVSLEAKLLSRKEAALRQREAALKAAKQTKDGREEEIAAFRSELENLKDGAAKAVEQLHEAESETKALRSMTQRMIL

SEQ ID NO: 83952 - protein, 172 aa, Gossypium hirsutum
  Clone ID: LIB3584-015-P1-K1-H9.pep
NSELREAKTIEGASPNDCCSICHGYFNVPCQANCSHWFCGNCIMLVWQHGSPFQTCKCPLCRRQITLLVPGEASLRERHNPAVAEILEKVEKYNRYFGGQSNGLIQRLQDLPFLLRRLLREITDPQRTLPLVIRARIYLAMFLSAIYVFSPIDIIPEAILGVVGLLDDLLIA

SEQ ID NO: 83953 - protein, 191 aa, Gossypium hirsutum
  Clone ID: LIB3583-014-P1-K1-A11.pep
LLSAFLIGQRMNRETDRELKAYCLAFDDELGPAPVADVSSLTHYGEPYDGNTRFFRSTLFVAAVRSCYGESSLLHGVEWMPPKGGVTEEQMLNFMGANTNLSLHQAKELIEDEEVGFAYISQREARPSLYSLIGLREHIKKRPPLATTEKVQQFIRAKGKESIVAGFYHEGYEEPLLMLMKRRGVHSGLVV

SEQ ID NO: 83954 - protein, 139 aa, Gossypium hirsutum
  Clone ID: LIB3583-014-P1-K1-A12.pep
MKLDVDVLRYLSKDDFRVLTAVEMGMRNHEIVPSDLIGRIASLKHGGTYKVLKNLLKHKLVHHDSSKYDGFRLTYLGYDFLAIKTMVNRGVFTAVGRQIGVGKESDIFEVSNEDGTVMAMKLHRLGRTSFRAVKSKRDY

SEQ ID NO: 83955 - protein, 46 aa, Gossypium hirsutum
  Clone ID: LIB3583-014-P1-K1-A6.pep
SQHLSLRSLSHAGKKYYGEIFAGVVGCLVNVNFTCEFYLHLNFVKT

SEQ ID NO: 83956 - protein, 118 aa, Gossypium hirsutum
  unsure (1)..(118): unsure at all Xaa locations
  Clone ID: LIB3583-014-P1-K1-B1.pep
TCVTEERRNRSCCDRTILQQGHLHRWQNIMEEECGDGSNNIIAGGIVSLCQPLAKMDAHSRCQGLRHASMQHTHRMHEQIECGPXPMREAMRKATXNVLSVCEIXPGRRDTPYRSLIK

SEQ ID NO: 83957 - protein, 76 aa, Gossypium hirsutum
  Clone ID: LIB3583-014-P1-K1-B2.pep
MKYMLQVKCCVEAITAGLSRNQCCTCWRQPQLSCIDAGTVEHREPCSFELKSIATTVWADIVLIALGAVAINEEYV

SEQ ID NO: 83958 - protein, 68 aa, Gossypium hirsutum
  Clone ID: LIB3583-014-P1-K1-C12.pep
IKGEIQILGSFFSFFVSPYFLVSSDLHIAHFEQRKIKEKENRNFTFLNVLWRSLSLSSKSKAERGLRG

SEQ ID NO: 83959 - protein, 45 aa, Gossypium hirsutum
  Clone ID: LIB3583-014-P1-K1-C2.pep
YSIHIDSRSALSVSSTRTRAVQYVPYLSFSTYLLLSSSTLLSASP

SEQ ID NO: 83960 - protein, 114 aa, Gossypium hirsutum
  Clone ID: LIB3583-014-P1-K1-D12.pep
QSLMSRYKVQGFPTILAFGADKDGPILYEGARAASSIESFALEQLETNVGPAEVTEVIGPDVMEDKCGSAAICFVAFLPDILDSKAEGRNKYLEMLLSVAEKFKRNPYRQVNRS

SEQ ID NO: 83961 - protein, 175 aa, Gossypium hirsutum
  unsure (1)..(175): unsure at all Xaa locations
  Clone ID: LIB3583-014-P1-K1-E12.pep
MSRPQEPHRPFFHFGNPLPKGSQLSPNLLSLMNAFEVNLSKRLQKLVPKDKDDILSLSWMKLATESLRXHRDINNLIADLEIPLTDWDDKWLDVYLDISVKLLDISLAFTFEIRRLNQSHLLLQRVLHKLESHSPERFMQACSSLDSWRQHIGTKNPRLETCHPILHSLVESLNL

SEQ ID NO: 83962 - protein, 201 aa, Gossypium hirsutum
  unsure (1)..(201): unsure at all Xaa locations
  Clone ID: LIB3583-014-P1-K1-E5.pep
RTRGHCKCSKLQRSGDLLTPKTMPLHQPSPLLRSNSLVSADTGPHEHMLCFSSLNSEVPFINIKDGDFLEISTQNSGFSYYQPKPSSYTRNAGYGSGSLNASMHGGFNGVRGPFSPSQWIELEHQALIYKYITSNVAVPSNLLNPLKKSLYPYGFTSSPAGYLPPNSLXWGSFHLXYSGSNDPEPERCRRTDGKEMXCSRD

SEQ ID NO: 83963 - protein, 133 aa, Gossypium hirsutum
  Clone ID: LIB3583-014-P1-K1-G10.pep
PPYMRARAPPYPNLHNKQAAETTKNGDFVFFLFSFLSAYKTKGQNVCKGINTERISIYTISIEKNRENRVFFEFWKVISFIFAFLCSFFVALLFISNKIIKEKIRLESKGFYLFGRIFVGSVAIGVGRRFKGL

SEQ ID NO: 83964 - protein, 173 aa, Gossypium hirsutum
  unsure (1)..(173): unsure at all Xaa locations
  Clone ID: LIB3583-014-P1-K1-G11.pep
MLKLRDSFFFLPILCFCFVFIVDGSVHEYNGEKFVGKGNAFVVHGGSEGIYSSFADPYNVTATIGDSYIRFEKVTFRRPKEAANFSSKAIQAVAFEVEDRDSIGGSAYGGQRAVCCTADLAKLGVCLEGEVIYRPSTENPNWPKVFGISXNGDDEVATLRSRSIKITKTGMYN

SEQ ID NO: 83965 - protein, 193 aa, Gossypium hirsutum
  Clone ID: LIB3583-014-P1-K1-G12.pep
ALNSSLQLQMQKTQESNAELILAVHNLEEMLDAKNMEASNPPNNKSGSHVSAEELRVIISGNHTDDDDDDEQRELEQLVKEYRDTKETSVLEQKIMDLHREMEVYKRDKDDLEAQMEQLALDYEILKQENHNISYKLEQSQLQDQLNMQYDCPSSFANINELEARIECLESELNKKSKESSGSLTTINELETH

SEQ ID NO: 83966 - protein, 147 aa, Gossypium hirsutum
  unsure (1)..(147): unsure at all Xaa locations
  Clone ID: LIB3583-014-P1-K1-H3.pep
NSQSQVESTLKEILEVVKPLHEDWVTRFKIINELREVVQSIENLRGATVEPFGSFVSNLFSRWGDLDISIEVSFGQCVSSAGKKRKQTLLGELLRAXRKQGGWLRLKFFPSARIPILKIVSKWKNIFGDIQMVIIKAEIKSRSWFGL

SEQ ID NO: 83967 - protein, 114 aa, Gossypium hirsutum
  Clone ID: LIB3583-014-P1-K1-H9.pep
MGQCYGKVSQTQVNETTSNATTTVTEVIPADPGGQTPLQSSNGAVNYFQSVKNTPARSSSQSPWPSPYPHGVTASPLPPGVSPSPARASRGSTPRRFFRRPFPPPSPAKHIKAS

SEQ ID NO: 83968 - protein, 137 aa, Gossypium hirsutum
  Clone ID: LIB3583-016-P1-K1-A4.pep
KKKGRAESLKKTKGKSPYFVYCLFVLLLHMFSVYFQKGNPFTIRIRRLYSQMLIKNTMFFFSFFLFVVGSVVVLSISLQVQVRGARVRDCVGVRRLCLTVRRPGLAWTEALGGSDCCGASRQLGLCLILVFWAYRAL

SEQ ID NO: 83969 - protein, 191 aa, Gossypium hirsutum
  Clone ID: LIB3583-016-P1-K1-C7.pep
EDDELSSLFTKEERNQLYDSLQTGGNLAGARREAVEWVLKVSAHYSFSALTALLTVNYLDRFLFSFRFQSEKPWMTQLAAVACLSLAAKVEETQVPLLLDLQVEETRYVFEAKTIQRMEILVLSSLQWKMNPVTPFSFLDYITRRLGLKDHLCWEFLRRCHRILLSLISDSRFMCYLPSVMATATMLHVVD

SEQ ID NO: 83970 - protein, 64 aa, Gossypium hirsutum
  Clone ID: LIB3583-016-P1-K1-C8.pep
ILRFQFPFEELFEFPFNKLNYQSETWSSQFISLSVKFATRNSSPILACFCLLSVMVMRHDLLTE

SEQ ID NO: 83971 - protein, 125 aa, Gossypium hirsutum
  Clone ID: LIB3583-016-P1-K1-D10.pep
PTRPVPPPDPFRSTPPPCLPLCGAGRKISLNHQCRRFCSRQHFMPSHAFLFFTAVRTHPAGHRCRVCHFPMTNEAQCLVSAVGFDWCILVVPLLRRGTGLLLSTFPPSFDNGRRNSERSRCSGPK

SEQ ID NO: 83972 - protein, 191 aa, Gossypium hirsutum
  Clone ID: LIB3583-016-P1-K1-E12.pep
IGVKVPMTSGTYLRRLSFSSEVLASDKSLHDSSLCNEVFTKDQVLDIASDCSVSDVHLHVPSSLTGVLEMDAEELGNGHNAPGANLENSSLSSGIETTMDANPDENSGLLGPSFLFPAGKFSSLRGDIIAVHGFDQGFSDMCSSREDYGDLYRYGFCDRTKNCCIHVSVADQTVKIFGSVDQHHFPTGFGS

SEQ ID NO: 83973 - protein, 99 aa, Gossypium hirsutum
  unsure (1)..(99): unsure at all Xaa locations
  Clone ID: LIB3583-016-P1-K1-F6.pep
RAGGQWKSQXTQSFSXPMQXXILGMTHGEWTNXXQLSATXXEVXLQPXCXXMXXLCXXRCXSEPFYIGXXVQSGXISLFTLQPRHXXEXWEXRHXXNTX

SEQ ID NO: 83974 - protein, 54 aa, Gossypium hirsutum
  Clone ID: LIB3583-016-P1-K1-F7.pep
NSGLMSLRLDQPIKYLKQHERVTFEPRESSDRLLFKVKQPPLLPDDNQVNFMLA

SEQ ID NO: 83975 - protein, 92 aa, Gossypium hirsutum
  Clone ID: LIB3583-016-P1-K1-G3.pep
HAHGEELGVKMCIISWIIALGNVVGISIAVRITVLCIMVCQMVKLFVKTAYDAEGNQEGVRIVVRNIEGDSQGSCLELCQQVSPVLASVALA

SEQ ID NO: 83976 - protein, 187 aa, Gossypium hirsutum
  Clone ID: LIB3583-016-P1-K1-G8.pep
PTRPPTRPQKGPHSPNTSSPLDAGKVIAESGYEDQKDDVQFGKACDFNDNKNNDKSLVDKKQLIRQESGSAEISGDPSCKTDLETVDGSAVNLDVKSSEITERSSPQLSNNKFLMYTFKRKRKKDSLSSPDRDCSHDDDILHKKIKENQNGSLDSEKSTLTSEESRDSRRLVQVARQLISLSEKKLR

SEQ ID NO: 83977 - protein, 78 aa, Gossypium hirsutum
  unsure (1)..(78): unsure at all Xaa locations
  Clone ID: LIB3583-018-P1-K1-A1.pep
MRPCVLEPPRHYEAATNGWGDPTCQQLRTAAVFVMCGTREPNGLVLTFFTNALEVVYIAQGGRIQXLVMAGYAHTLQD

SEQ ID NO: 83978 - protein, 193 aa, Gossypium hirsutum
  Clone ID: LIB3583-018-P1-K1-A12.pep
LKEVSFRSKDPRHISEVVQQIKTLRRQVMARESEKAERATLVTQEKLQLAGNRFKPIRLSDLWIRPVFGGRGRKIPGTLEAHVNGFRYSTTRADERVDIMYGNIKHAFFQPAEKEMITLVHFHLHNHIMVGNKKTKDVQFYVEVMDVVQTLGGGKRSAYDPDEIEEEQRERDRKNKINMDFQSFVNRVNDLWG

SEQ ID NO: 83979 - protein, 120 aa, Gossypium hirsutum
  Clone ID: LIB3583-018-P1-K1-A8.pep
MVQRLTYRTGRGYATKSNQHRVVKTPGGKLVYQTTKKRASGPKCPVTGKRIQGIPHLRPAEYKRSRLPRNRRTVNRAYGGVLSGSAVRERIIRAFLVEEQKIVKKVLKIQKAKEKVSSKS

SEQ ID NO: 83980 - protein, 189 aa, Gossypium hirsutum
  unsure (1)..(189): unsure at all Xaa locations
  Clone ID: LIB3583-018-P1-K1-B7.pep
SHLSKSSSSSSCHNQLCKQGPGAVAGVVTAGAFVLALFAGALIWVYSKKLKHVKKSESFPSEIIKMPKEFRYKELKAATRCFDANRIIGHGAFGTVYKGILPDNGNIVAVKRCSHTSQGKNEFLSELSIIGTLRHRNLVRLQGWCHEKGEILLVYDLMPNGSLDKALFEARTPLPWAHRQKXLLGSASA

SEQ ID NO: 83981 - protein, 49 aa, Gossypium hirsutum
  unsure (1)..(49): unsure at all Xaa locations
  Clone ID: LIB3583-018-P1-K1-C10.pep
HKNCRQFSKTYNANCMPSWNIFIDIFLITLPFNFTLPXYFLKFLPLKLP

SEQ ID NO: 83982 - protein, 66 aa, Gossypium hirsutum
  Clone ID: LIB3583-018-P1-K1-C2.pep
MFGISYGELFLLIGATAALVGPKDLPKIAKVAGRFAGRSIGYVQLARGQFDNAMQQSQARQVLLFL

SEQ ID NO: 83983 - protein, 76 aa, Gossypium hirsutum
  Clone ID: LIB3583-018-P1-K1-D2.pep
MSSRERILSVIIGVHEISINAKLETLIRALQSMSDQSIYVDHSTNSDAYSTHNLSSEKLSQFLSKTWAVAFDSVFT

SEQ ID NO: 83984 - protein, 192 aa, Gossypium hirsutum
  Clone ID: LIB3583-018-P1-K1-D7.pep
RSKDIMKLEKRINEIVDRLFKSVSQSVGVANIREYEENQLKAAQNMAEERLSLSNQLAKLKYQLEYERKRDVDSRIKKLESSISSLENDLKLVHKKEAEVKLATEKASEDINRWKEEVKEWKSKSEDCEKEIQEWKKQASAATTSISKLNRQINSKETQINQLDEWKGEIIEKCDLEHIELPLIADPMETES

SEQ ID NO: 83985 - protein, 86 aa, Gossypium hirsutum
  Clone ID: LIB3583-018-P1-K1-D8.pep
GPKKKLLPCKHGVVNFDPLKGAPLLIIYFFYPTPYIDFINLFFLFFFLFFFFFFFFFFFFFFFFITHTPLISLFIYVIYPPLTVAA

SEQ ID NO: 83986 - protein, 52 aa, Gossypium hirsutum
  unsure (1)..(52): unsure at all Xaa locations
  Clone ID: LIB3583-018-P1-K1-E7.pep
KSGVLYVYNIIMARLKISKSFQSRMGCLFREDSKRIYEHALILVLILLYGXG

SEQ ID NO: 83987 - protein, 193 aa, Gossypium hirsutum
  Clone ID: LIB3583-018-P1-K1-E9.pep
GKPEIDDVRKLIGPVVDKLPVLCSDASILRFLRARNWNTKKASKMLKETLKWRLQYKPEAIRWEDIAQEAETGKVYRANYCDKLGRPVLVMRPGLQNTNSPVGQIKYLVYCIENAIMNLVQDQEQMVWLVDFQGWAMTSISVKVTRETARILQDHYPERLGIGILYNPPKIFESFWTIVKPFLETKTYKKMKF

SEQ ID NO: 83988 - protein, 141 aa, Gossypium hirsutum
  Clone ID: LIB3583-018-P1-K1-G12.pep
AAILARNSDGHCMGAYTYPLNDVVDAFAAEARACKRAMSFAAEMGFTRVLLEGDSLTIIEKLNSNGEDRSLLGPIINSIHVMERQFEKVSYLFVPRAGNRAAHALVMEGWRHLSPSFWNLDPPESVRMVLAANWRAWVQRS

SEQ ID NO: 83989 - protein, 59 aa, Gossypium hirsutum
  Clone ID: LIB3583-018-P1-K1-G3.pep
EVGWITMAPALGSLQQKRLGNALTFMALLLILFFGNVHLSLSLVIIFILHFLFLLMASL

SEQ ID NO: 83990 - protein, 183 aa, Gossypium hirsutum
  Clone ID: LIB3583-018-P1-K1-G5.pep
HASAHASGATLWGSVRHIISPSVADGAFHYYEKISYQLFFITKEKVRHFKRLPVDLRALQDGLSSLLIPSQKVMFSQHVLALSEDPALAMAFSVARRAAAVPYLLVNGTYRKSTRSYIDSSILQYQLRRLNTHGSLKGSHAHSRSTLEVPIFWFIRTDPLLVDKHYQAKALSDMVIGVQSESS

SEQ ID NO: 83991 - protein, 62 aa, Gossypium hirsutum
  Clone ID: LIB3583-018-P1-K1-G6.pep
PTRPLIMPYLLKRLQEMGTGKLHPSEVIPSCKAVITKHDKITEVTFLNIYIGRLFSHYQALI

SEQ ID NO: 83992 - protein, 76 aa, Gossypium hirsutum
  Clone ID: LIB3583-018-P1-K1-H10.pep
RRIYLNFFNNSLFFFFIEVCSLGLTGSTHSQTLLDLTFIYSTKKHINFTSKSTIIFHFWITFGNSLCLTMHVNCSI

SEQ ID NO: 83993 - protein, 39 aa, Gossypium hirsutum
  Clone ID: LIB3583-018-P1-K1-H7.pep
GEVVLYRYDLISSTYRLVSLDSANYSMQISSTPLECYSV

SEQ ID NO: 83994 - protein, 59 aa, Gossypium hirsutum
  Clone ID: LIB3583-050-P1-K6-A4.pep
RQPSVLKPPSDIVLHFKYFTNTTAATTKRVFNHPMPFQPLIIPNFLFSKSTMYKLLTSF

SEQ ID NO: 83995 - protein, 176 aa, Gossypium hirsutum
  unsure (1)..(176): unsure at all Xaa locations
  Clone ID: LIB3583-050-P1-K6-A5.pep
MGRAKAITSIILIQFILLHVTKSQQGFEESSAARTLKQESHDTHEVHCSRERSRAAWQIIDDYLMPFVEEEGYQISTDCRLHPDNDLFRDQERHKIHLDVNEWRCGYCKKSFRAERFLDQHFDNRHYNLLNVNQSKCLADLCGALHCDFVINSNLLKAKCNPAAAARNRHLCXGCF

SEQ ID NO: 83996 - protein, 156 aa, Gossypium hirsutum
  unsure (1)..(156): unsure at all Xaa locations
  Clone ID: LIB3583-050-P1-K6-A6.pep
MKTKIMVXNNNNNNIEDQRLFPLTNHSPFPGLLNNGMPLNSYYHWEPSSLSLSQFGNHGLMAPQTENFFNGNTTSVPLPCSTTVPSATMASFFPTYPPYGTNPGSNDSRQMNYLQLLSTNFLSNSMKPFSLNVNAGLTHTQNDDENHGDDQDNTDS

SEQ ID NO: 83997 - protein, 65 aa, Gossypium hirsutum
  unsure (1)..(65): unsure at all Xaa locations
  Clone ID: LIB3583-050-P1-K6-B10.pep
HQRGLKALTKLCGFFSLXIVILVHDCICYLVEEWVMDIKYTLKKTTSVPITLPHLSQDFPSWCRP

SEQ ID NO: 83998 - protein, 149 aa, Gossypium hirsutum
  Clone ID: LIB3583-050-P1-K6-B6.pep
SRSTSGFCVFLGGNLVSWSSRKQQVISRSTAEAEYRSVAHITAEIMWIQALLAELYVSVPQKALVWCDSSAAVAVAGNPVMHSKFKHVEMDLLFVREKIADGVLHIGHIPGSEQTADILTKPLSIGAFTKFRDRLGVASREELDKHGAC

SEQ ID NO: 83999 - protein, 174 aa, Gossypium hirsutum
  unsure (1)..(174): unsure at all Xaa locations
  Clone ID: LIB3583-050-P1-K6-C6.pep
WXQCVARLXVAMFNAVLRDSGDEIPTDPVSDPISDLLVLPVPAGKASFGAGAQLKNAIGNWSRWLTDLFGIDDEIDQDGCDKRQDTSIKSFYLLNALSDLMMLPKDMLLSKPIREEVCPTFGATLIKRVLDNFVPDEFCPDPVPDVVLEALEAEVSLLIMSYAAPVLYCLNINV

SEQ ID NO: 84000 - protein, 103 aa, Gossypium hirsutum
  Clone ID: LIB3583-050-P1-K6-C7.pep
INRKTENACQMTFSFSLPHQLSEHMYTLRFYKGPFKVVMVQNQGQLVHHGRTPPKKTYCPISYQRNKKQDIIMPSMAQKAVGQISAISTQADKQCVDCRPKLG

SEQ ID NO: 84001 - protein, 153 aa, Gossypium hirsutum
  Clone ID: LIB3583-050-P1-K6-E1.pep
MDIANSGIVTDEDREADRDASEKLAGMIEERLKTNPLPPPPPQTAPDGSGKSNSDLPAKSRDGNSDIDLMRNDGAEGKNDDETTSESKATTENDRPETSSPDRRYDRSRDREQDLKRDKEREIERLERETERERMRKEREQRRKIEEAEREYE

SEQ ID NO: 84002 - protein, 78 aa, Gossypium hirsutum
  Clone ID: LIB3583-050-P1-K6-E9.pep
HLHISRGIASHIYTSLMLWYNQVKLTKFFRKRNREFSEAKDLFYLPCTTHPSQKMHKAKVENSSRLPPPPTGYHPTRP

SEQ ID NO: 84003 - protein, 155 aa, Gossypium hirsutum
  unsure (1)..(155): unsure at all Xaa locations
  Clone ID: LIB3583-050-P1-K6-F10.pep
SAKLPLLRGCLLHHHLLLLLLPSPLPPLSLSSQLGTHPFSPALLSIPRLTPKNTQLIPISHHCGGDLQVRRRKSVPSKTQKDQERIVEEEEVEVEEEVPWIQEKALDLVEFTGSVTQAIPGPRVGTSSLPWILAXPLAYAGITFVIAFVKTVKKF

SEQ ID NO: 84004 - protein, 130 aa, Gossypium hirsutum
  unsure (1)..(130): unsure at all Xaa locations
  Clone ID: LIB3583-050-P1-K6-F3.pep
SKKFRAAVSKVGSIYHKGLAKLEGYCCEFNHRYLVYEYAENGSLEKSXNPTLAERLTWRKRXDISINVGRAIFYLHTECREFLCHGNLECENVVLDENLRPKXKEFGLGMLYGEASSRRASAQKDVERFW

SEQ ID NO: 84005 - protein, 77 aa, Gossypium hirsutum
  unsure (1)..(77): unsure at all Xaa locations
  Clone ID: LIB3583-050-P1-K6-F7.pep
LXIDVGLKSLXKPSRLRFYNLYVKPYPECEKMFGRFAEGAAIQGRHPVGMWKLFKPXSMQNQKEDVNNTKSFMEPLV

SEQ ID NO: 84006 - protein, 73 aa, Gossypium hirsutum
  Clone ID: LIB3583-050-P1-K6-F9.pep
LMIGRRSCFMKYPSYSGGSFVPKKNCKNIKQITLRCNFISIRCTDGGRTELLNHMILTEARKRRFETVMTYYT

SEQ ID NO: 84007 - protein, 168 aa, Gossypium hirsutum
  Clone ID: LIB3583-050-P1-K6-G6.pep
MALATTCSSLPLFHLHLQSSSPVLFFPSSSRFNSKKRFHARSTTRFTRVLAVSNTALDSNNGAAAAIGSESEDPSSSYGRRYFPLAAVVGQDAIKTALLLGAIDREIGGIAISGRRGTAKTVMARGLHAVLPPIDVVVGSMANADPTCPEEWEDGLAQRAEFDSNGNV

SEQ ID NO: 84008 - protein, 191 aa, Gossypium hirsutum
  unsure (1)..(191): unsure at all Xaa locations
  Clone ID: LIB3583-050-P1-K6-H2.pep
RRVGAYELAEECADDDEDKKAIRNLRKXVQAKLKSHDSLVREWGFELPEERSLTNATVKYTDFLSATASGRIEGERVPGKLATPFEKTKVAAYTLGAIAPCMRLFAFINKEIQALLDPNDSTHIYKKWIDHYCSENFEAYAFRIEELLDTLSISLTGEELDVIEKLYHQSMRLEVDXFSSEPILQEAVVPL

SEQ ID NO: 84009 - protein, 97 aa, Gossypium hirsutum
  unsure (1)..(97): unsure at all Xaa locations
  Clone ID: LIB3583-051-P1-K6-A4.pep
SNLDKMISSVSFAASLAPYHHTKSSNPYHRLLISPKPIQHKPSLHKFHGXKSLLLQQFPFTVFEAAFGSGELHFAARGLLVPPDAKNRVRVRERRIR

SEQ ID NO: 84010 - protein, 164 aa, Gossypium hirsutum
  unsure (1)..(164): unsure at all Xaa locations
  Clone ID: LIB3583-051-P1-K6-B6.pep
RPTCTVHLMDNGDALELGKXEFKLVRVLDDDVPLATIVKVTDDLQWPLTKDEPVVKLDSVHYLFSLPXXKDGKPLSYGVTFVGRGHGNSLSSLDSFLKEHSCFAAGVGSTGDKHVDWKAYAPRIEDYNNVLAKAIAGGTGQIVKGIFTCSNAYISQVQKEEKPL

SEQ ID NO: 84011 - protein, 174 aa, Gossypium hirsutum
  unsure (1)..(174): unsure at all Xaa locations
  Clone ID: LIB3583-051-P1-K6-C4.pep
RVGKGDNISIFNHAWIQGSDNYRLNHPVDNCNLEFVVELIDNNIREWRAEIITNTFDAVDAGRNLRIPLAKVPHEDXMAWRGEPSGMFSVCSAYKLLQLGFSTXXLNTSQLISRDFYRKLWSLKLPSKVKIIVWRISKKIIPTMLXLRCKRLVTNVECPRKGKKIKTDAWADAG

SEQ ID NO: 84012 - protein, 227 aa, Gossypium hirsutum
  Clone ID: LIB3583-051-P1-K6-D8.pep
SHLPQPTGAAPTTTTTTSDTTSTTRKCKGKGGPDNNKFRYRGVRQRSWGKWVAEIREPRGRTRKWLGTFASAEEAARAYDRAAIVLYGSKAQLNLQPSISSSSSSSSSRSSSSSSSSSTTQSLRPLLPRPSGFSFSYSNPTSYQASLMSAAASNGGSGGGYSRFMPYGVYQQQPMVYPSMVQNPLQIVQSEPSLVVDPTVTTTSYMNNPNPQQVQQHDQQGALYDDV

SEQ ID NO: 84013 - protein, 213 aa, Gossypium hirsutum
  unsure (1)..(213): unsure at all Xaa locations
  Clone ID: LIB3583-051-P1-K6-E2.pep
LLFLITANISTSTLRTQDESFTSILVSQNGLDFVKDLLVNEAISSIIPLQLPXTIEKSARIPFLGNVHMVISNVTIYKIDVLASYVKLGNSGIAIVASGTTCNLTMNWHYSYSSWLVPIEISDGGRASVEVEGMEVGLTLGLENHEGTLKLSLLESGCYVKEXTIKLDGGASWLYQGMINAFEEQIGSAVESAITSKLKDGILKLDSFLQSLP

SEQ ID NO: 84014 - protein, 118 aa, Gossypium hirsutum
  Clone ID: LIB3583-051-P1-K6-E9.pep
SIFAAEAMACLQAINLGLNLRLKAIKIEGDSRSVICKLQAKEEDRSEIEVYIKDSKQLNLGFGYCVFRFTHKESNKVAHILATEGIKKRETTYQMNMVPSVAEEAVDADRRCPRSMKE

SEQ ID NO: 84015 - protein, 143 aa, Gossypium hirsutum
  unsure (1)..(143): unsure at all Xaa locations
  Clone ID: LIB3583-051-P1-K6-F2.pep
HALTDFGGRQPPXYPDLTTVWGSLARIKAKGYRVGPVYDDVLAMAWFFLELIVKSMALXEQTRLFYHSLPLDEDVPPMQLKEGVFRCIIQLYDCLLTEVHERCKKGXSLAKRLNSSLAFFCYDLLSIIEPRQVFELVCFYLIQ

SEQ ID NO: 84016 - protein, 210 aa, Gossypium hirsutum
  unsure (1)..(210): unsure at all Xaa locations
  Clone ID: LIB3583-051-P1-K6-G1.pep
PGSFLFTCECIISYWLNDCCQPDKTXXKCHIHVMLLATAAYIICIVGIIMMYVWYAPEPSCLLNIFFITWTLVLIQLMTSVSLHPKVNAGILTPGLMGLYIVFICWCAIRSEPAGENCIRKAEASNRTDWLTIIVXFILSKMFNGXDTVKKEAPVGDAVPYGYGFFHFVFATGAMYFAMLLIGWNTHHIIKKWTIDVGWTSTWVRIVNEG

SEQ ID NO: 84017 - protein, 59 aa, Gossypium hirsutum
  Clone ID: LIB3583-051-P1-K6-G11.pep
ECLGMVLFLILGWAIFYKGGWLWAFLVFGHLGKVGFYVKRLNWGYARFLTVRLFLKNGQ

SEQ ID NO: 84018 - protein, 218 aa, Gossypium hirsutum
  unsure (1)..(218): unsure at all Xaa locations
  Clone ID: LIB3583-051-P1-K6-H8.pep
QKALGRGVQSHIYFLCWRCSKKKAKTCAMGLISALAAASASSSLLSQTNQNVAFAEGPFNFPLFSSSSPSPSPSPSPSGSPQSSTGQLPSQPSASPASTTDKEGSGNVKARNDNPRTSSAGFDPEALERGAKALREISSSSNAKKAFELMKKQEETRQAELAERAAEFKAMQAQAETERQRVIYDEQKXLTQHQAQTKSQMARYEDELARERMQAENE

SEQ ID NO: 84019 - protein, 126 aa, Gossypium hirsutum
  unsure (1)..(126): unsure at all Xaa locations
  Clone ID: LIB3583-052-P1-K6-A4.pep
SVPGLVQSNPLMLSSMPXSIMANGENKMNDNTRETGTREKLADDKINVETETMEEVTDGNSGRTAVVNFPSNYHDLVAGNSYNDEKPAGNLSDNELCRQGEFEGDINNEDVNHGSLDDEPYPPGXV

SEQ ID NO: 84020 - protein, 217 aa, Gossypium hirsutum
  Clone ID: LIB3583-052-P1-K6-C11.pep
SESQEHQNDRANVADADLSSDAEIVLAVSDSYAGGRWILDTGATFHISTSKDAFSTYEKHSGSVLMGNDHACQVMGIGTVRIKMFDGIVRPLTDVRHIPEMKKNLISLSTLDKKGFRYSAEGGVLKVFSGALTVIRGNLERGLYFLDGSSVTGVAGVSSSDDLDSDTTKLWHMRLGHMSERGLSVLRKRGLLSGQCTGKLNFCEPCASGKQTRVKSD

SEQ ID NO: 84021 - protein, 74 aa, Gossypium hirsutum
  unsure (1)..(74): unsure at all Xaa locations
  Clone ID: LIB3583-052-P1-K6-C5.pep
AHQRHPIQTXKCCPKLLVTAAINIYIIDSXIKIYTLKRKMLTLKTLFHFYNYDMVNSNSTFNPDTSIETTSKLQ

SEQ ID NO: 84022 - protein, 190 aa, Gossypium hirsutum
  unsure (1)..(190): unsure at all Xaa locations
  Clone ID: LIB3583-052-P1-K6-C8.pep
GRVGLSLTIGCWGQLYTLWILVQLHEAVPGKRYNRYVELAQAAFGERXGVWLALFPTVYLSGGTATALILIGGETMKLFFQVVCGPLCSSNPLTTVEWYLVFTSLCIVLSQLPNLNSIAGLSLVGAITAITYSTMVWVLSVSQQRPPTISYEPFSLPSSFAVFFSVMNCLVIVAFGFRGPDFVFGFLALC

SEQ ID NO: 84023 - protein, 202 aa, Gossypium hirsutum
  unsure (1)..(202): unsure at all Xaa locations
  Clone ID: LIB3583-052-P1-K6-D7.pep
RTLSHSLKPCFSAESVRTHFSGLIFFQNYQRNLWVKPSHRYGKYNERRRXDKDPKLRNTKENQLDHFYLYKSKGQHLLTNTRILDAIVRRSNIKPTDTVLEIGPGTGNLTVKLLEAAEKVVAVEIDKRMVDFLHKRVAENGLQERLNVICKDAMKVEFPQFDLVVANIPYGISXPLIAKLVYGRNPFRXATLLLQKELHVGY

SEQ ID NO: 84024 - protein, 59 aa, Gossypium hirsutum
  Clone ID: LIB3583-052-P1-K6-F6.pep
KKKKKKKKKKKKKKKKKKKKKKKKKKKKKKKKKKKKKKKKKKKKLKKKKQKKKLKGGGT

SEQ ID NO: 84025 - protein, 74 aa, Gossypium hirsutum
  Clone ID: LIB3583-052-P1-K6-F7.pep
HLWSKVLFRNLNVCFISPFNSNRAMCFSRLCLPNKAGTFLLNVFLICWPRVCAKICISTLGIILVYAVETRIYI

SEQ ID NO: 84026 - protein, 208 aa, Gossypium hirsutum
  Clone ID: LIB3583-052-P1-K6-F9.pep
NVKYLPGIKLGKNVIADPDLDNAVKDANMLVFVTPHQFMEGVCKRLVGKVRGDVEAISLIKGMEVKMEGPCMISNLISEQLGINCSVLMGANIANEIAVEKFSEATVGYRDNREIAEQWVKLFSTPYFMVTPVQDVEGVELCGTLKNVVAIAAGFVDGLEMGNNTKAAIMRIGLREMRAFSKLLFSSVRDSTFFESCGVADVITTCLG

SEQ ID NO: 84027 - protein, 58 aa, Gossypium hirsutum
  unsure (1)..(58): unsure at all Xaa locations
  Clone ID: LIB3583-052-P1-K6-H7.pep
CTLCYKADNFXTSCSLGIWLHQFFSQLKIKIFSHITWYLLLIYHSRKLYGYYSPLHNH

SEQ ID NO: 84028 - protein, 85 aa, Gossypium hirsutum
  unsure (1)..(85): unsure at all Xaa locations
  Clone ID: LIB3583-053-P1-K6-A2.pep
NPQRRYXEWQQECPPPEERPQPPCPQRGLKPFQPGPPPSQRPFQEWQQHCHQPGQRPEKXQQCVRECKEKDHENSWRGEREEEAQ

SEQ ID NO: 84029 - protein, 58 aa, Gossypium hirsutum
  unsure (1)..(58): unsure at all Xaa locations
  Clone ID: LIB3583-053-P1-K6-A8.pep
AFGWQTMSRTGARLANTAISRPSLSFXVTTSDGRTAVSYNVAPPNWSFGQTFTGNHFQ

SEQ ID NO: 84030 - protein, 56 aa, Gossypium hirsutum
  unsure (1)..(56): unsure at all Xaa locations
  Clone ID: LIB3583-053-P1-K6-B1.pep
YYLQXEXMSHHHTICHALGNYTSFGLLKEFAVSLVSIWQEGTARVAGLVYQLFKRV

SEQ ID NO: 84031 - protein, 75 aa, Gossypium hirsutum
  unsure (1)..(75): unsure at all Xaa locations
  Clone ID: LIB3583-053-P1-K6-B12.pep
KFLWYTPHNGLRNQLSDFKNALLMAGILNRTLIIPPILSHHAIALGNYPKFMVQSPKESXVSVRDHIIELITSGR

SEQ ID NO: 84032 - protein, 154 aa, Gossypium hirsutum
  unsure (1)..(154): unsure at all Xaa locations
  Clone ID: LIB3583-053-P1-K6-B4.pep
AATGKLLQVRRLLNPANTLLQAVPKSRETMSDVPDCEDRLHRIQMYSHHETELRLYITLTGSPPMFSMMLSIEDEFMDSPDLKNSPPRAHPAAAXNSPITDPNVCMDPTASFKHDFRLRHKMHAWLPKLLCIIKLTCYLFCTCSCNIQTTLLKE

SEQ ID NO: 84033 - protein, 183 aa, Gossypium hirsutum
  Clone ID: LIB3583-053-P1-K6-B5.pep
KRRRTQIQFLWTRENLKHEQKKKGGLRESWCFCKGVSKTERMKGTIFSNKAPAMARITGAAADGISVTGFLIHRNLLLTTHVNLPSVAAAESSEIRLQNGVAATLVPQRFFITSSVLDLTIVGLDAVDGESNTQGHQPHYLKTCSKPNLYLGSAVYLLGYTEKQEVTVGEGKVVIATDNLIKL

SEQ ID NO: 84034 - protein, 131 aa, Gossypium hirsutum
  unsure (1)..(131): unsure at all Xaa locations
  Clone ID: LIB3583-053-P1-K6-C11.pep
KQTVLLTCEKVASWRCWGRKDADADDEDSGNASEAGDNASGNESAGDECSREEHEEEEEMGRDEVDGKAESEGEAEGMTDAHVGGDGMSSFSEHFLFTVKPLAKHVPAVLXEKDRNSSCVFYANDDFYILF

SEQ ID NO: 84035 - protein, 87 aa, Gossypium hirsutum
  Clone ID: LIB3583-053-P1-K6-C12.pep
RGLSLVLVALSLDASESWLVRPLEGKNLYMILSYFGLKISCNYDTARHTNIWPFFKLDENPVFNRGLGPVKSLNTQLPGCFLLDFNI

SEQ ID NO: 84036 - protein, 229 aa, Gossypium hirsutum
  unsure (1)..(229): unsure at all Xaa locations
  Clone ID: LIB3583-053-P1-K6-C5.pep
KRLADENIRDEARRHRFIANNTFSAKYVPFNAGPDSTESYSLDEIVYRSLSGGLLDVQHDIEALKKFDGAYWRELFDSRVXKTTWPYGSGVWSKKEWVLPEIDPNDIVSAFEGNSNLFWAERYGKQFLGMNDLWVKHCGISHTGSFKDLGMTVLVSQVNRLRKLKRPVVGVGCASTGDTSAALSAYCAAAGIPXIVFLPANKIXIAPLIQPIANGSFVLSIDTDFDGCM

SEQ ID NO: 84037 - protein, 205 aa, Gossypium hirsutum
  unsure (1)..(205): unsure at all Xaa locations
  Clone ID: LIB3583-053-P1-K6-C7.pep
MGEKALLVGGRTDPANDKVSVWSFDTETECWSVMEAKGEIPVARSGHTVVRASSVLILFGGEDAKKKKLNDLHMFDLKSLTWLTLQCTGTRPSPRSNHIATLYDDKTLFVFGGASKSRTLNDLYSLDFETMVWSRIKIRGFHPSPRAXCXGILCGTKWYIAGGGSRKKRXAETFIYYILKSEWSVAITPLFTXITTNKGFSLALV

SEQ ID NO: 84038 - protein, 162 aa, Gossypium hirsutum
  Clone ID: LIB3583-053-P1-K6-F4.pep
MHLMMDDQGGNNAVTREYRKGNWTVNETMVLIEAKEMDYERRMKRSGDHSEGRNKPTELRWKWVEDYCWGKGCLRSQNQCNDKWDNLMRDYKKVREYQRKVAEREGNDSKQRSYWEMEKNERKEKNLPSNMLRQIYDRLEEVVEKKGAQTVAATAGGGGGSD

SEQ ID NO: 84039 - protein, 56 aa, Gossypium hirsutum
  Clone ID: LIB3583-053-P1-K6-H12.pep
SLYPRNQMKITQIQKYKVHYTYQEQLTQWRTEWRWKDGSIKTHNLVEGVPAWLKNW

SEQ ID NO: 84040 - protein, 183 aa, Gossypium hirsutum
  Clone ID: LIB3583-053-P1-K6-H2.pep
YLLAYEILHSMRNKRVGKKGSMAIKIDMSKAYNQVEWEFLEQMMGKIGFNRSWIRLIMHCISTVSYSIVLNGEVGKTFWPMRGLRQGDPLSPFLFLISSEGLSTLLRLAREEGSLRGIKACRRSPQITHLLFADDCILFGEASEEGTIVLFAYSSESKNQKVNKRGSMSKMQARPGEQGAHIP

SEQ ID NO: 84041 - protein, 77 aa, Gossypium hirsutum
  unsure (1)..(77): unsure at all Xaa locations
  Clone ID: LIB3583-053-P1-K6-H7.pep
ETHSKIASYSKILSCSKFSAFGLTMVLFLPLPXXXXTQVKAHXLGIWAFAHRXKPPIGAENHLRSPRIMHFFFPIAS

SEQ ID NO: 84042 - protein, 56 aa, Gossypium hirsutum
  Clone ID: LIB3584-038-P1-K1-A5.pep
MRDSLRREKLYRLYLYSTNGIWIYTMCCRVMSVKVTELFGTCYKTLSSYECYVECV

SEQ ID NO: 84043 - protein, 90 aa, Gossypium hirsutum
  Clone ID: LIB3584-038-P1-K1-A9.pep
PRVRPRVRNFVIYYVVVPCAVLALCIHPTTSHNLLNRISWAFCVYLEAASVLPQLRVMQNTKIVEPFTAHYVFALGVARFLSCAHWVLQV

SEQ ID NO: 84044 - protein, 75 aa, Gossypium hirsutum
  Clone ID: LIB3584-038-P1-K1-C5.pep
TPASSNVVQPTYRHEAPPIYDRMTTPLSSISSVQCLHPSIICRSSTTSLLKQLDTCIQISLMSIEQRHWTLAEPA

SEQ ID NO: 84045 - protein, 77 aa, Gossypium hirsutum
  Clone ID: LIB3584-038-P1-K1-C6.pep
SNVEHRMYVYVAPSIFVLVIKPLISIFSCECYPKSFICRFTTTVCLEVVRNIGSDIDHVNRGGWLDIISVMIRVLFK

SEQ ID NO: 84046 - protein, 66 aa, Gossypium hirsutum
  Clone ID: LIB3584-038-P1-K1-C7.pep
MDSWDPFVGFRDSMEAMVEAQGLKYWGSLEEHFGWYLKATSESSHGYILGAFIDLLLDVSKLHLGD

SEQ ID NO: 84047 - protein, 143 aa, Gossypium hirsutum
  unsure (1)..(143): unsure at all Xaa locations
  Clone ID: LIB3584-038-P1-K1-D10.pep
MSILFLNNFLAESTLSSEPMATTDANLGGFRPFGGSQHSGELENLARFGVDEHNKKEKRTHEYVRAVKATEHVVAGTLHHLTVEAIDGGKKNVYEANVWIKPWXNVKESQEFKHADDSPSFTTSDLGIKKDGHGHRLKACEYM

SEQ ID NO: 84048 - protein, 47 aa, Gossypium hirsutum
  Clone ID: LIB3584-038-P1-K1-D8.pep
HVLDLISWVVRKCSSQFLQMFVLYHLQQKITTFILSGALTNNDPIVC

SEQ ID NO: 84049 - protein, 157 aa, Gossypium hirsutum
  unsure (1)..(157): unsure at all Xaa locations
  Clone ID: LIB3584-038-P1-K1-D9.pep
ACLSLNIWRSLICMLDAAVPTSRIIKQGLNNNTIYAVTLQDYTISEMLFHSLYLVDVDEERIGRALKPNSKRNGYHWTNNDGSVSNTRLWWHRRGLKHQWGYVNDERGITTDIDRMTAFRTALTAXSKWADSYVDTNTTKXYMXGIYPSHYNGSDMN

SEQ ID NO: 84050 - protein, 69 aa, Gossypium hirsutum
  Clone ID: LIB3584-038-P1-K1-E6.pep
MRLYSHNHLCISSKSTIFNKSFIILAIYFFTYYYLFIRLFLFLFNNSLSEMSKPLHGCSKDRFYFIILV

SEQ ID NO: 84051 - protein, 84 aa, Gossypium hirsutum
  Clone ID: LIB3584-038-P1-K1-F2.pep
HASGAVHIDARLARLEERSRLVQINDESLCDSCHARLGTKLFAMYPDDTVVCYKCFRRQGESTSVTGLDFKQDVLFKPGWLVTR

SEQ ID NO: 84052 - protein, 189 aa, Gossypium hirsutum
  unsure (1)..(189): unsure at all Xaa locations
  Clone ID: LIB3584-038-P1-K1-F8.pep
VKSGRNGMSMWLEGLRRSNVVSVSGIPEYSYKDLQKATYNFTTLIGQGAFGPVYKAQMSTGETVAVKVLATDSKQGEKEFQTEVMLLGRLHHRNLVNLVGYCAEKGQHMLVYVYMSKGSLASHLYSENLEPLSWNLRVYIALDVAXGLEYLHDGAAPPVIHRDIKSSNILLDQSMRARVADFGLSREEM

SEQ ID NO: 84053 - protein, 83 aa, Gossypium hirsutum
  Clone ID: LIB3584-038-P1-K1-G6.pep
PVRIPGHAAYGNCNCLSPNLNSTDYILLNRAVTLTNQCSYYILPINLLMTITKGPPLAIPTRLSPKQQLYSIPIQPFPLPTLL

SEQ ID NO: 84054 - protein, 48 aa, Gossypium hirsutum
  Clone ID: LIB3584-038-P1-K1-G7.pep
ISFLPSQETNHSYSRMLNHQGGYYVSNLNSLHVDYLLVHYKNHGSTQL

SEQ ID NO: 84055 - protein, 90 aa, Gossypium hirsutum
  Clone ID: LIB3584-038-P1-K1-H5.pep
ILLFLLRKQKLYYKYIYVLLGFLVFEHLLHEFCRVFIFHWKYPLLLHMLNLFYFIFFSYCPVKYDKFKFGTKFITTFDGFPKKTLKSKSP

SEQ ID NO: 84056 - protein, 130 aa, Gossypium hirsutum
  Clone ID: LIB3584-038-P1-K1-H7.pep
HTRSPVGEEIQLWYTRFCIQKILETAMDTARVELDQTARHKEKTEEPVKRARVYNRRRRSTKVMERKQLLEQTKEAEPDAPAVYGAEASDDADTKEVVTELDVVTDEPVFEETTNETVPEPEAEEINEAT

SEQ ID NO: 84057 - protein, 138 aa, Gossypium hirsutum
  Clone ID: LIB3584-039-P1-K1-B1.pep
PTIPRASSEFFSDSLTSPDVLTTSPLIFPTLCPVTAELFESVTEAFHSGSSSGSYNSPSSLTSCCTTTTQRRSLMQRSVSSHSLQIQKNGFHNCHLATSLNESIDSYSVPVRRVFSTGDLDQGNSMGQRNWRWESPLG

SEQ ID NO: 84058 - protein, 187 aa, Gossypium hirsutum
  Clone ID: LIB3585-066-P1-K1-A11.pep
LTALHFSSTSLVSLSLVGCRDITTLGLACPCLEKICLDGCDHLERASFCPVALRSLNLGICPKLNTLRINAPDMVSLELKGCGVLSDASINCPPLKSLDASFCSQLKDDCLSATTASCSLIKSLILMSCPSIGSDGLYSLRWLPNLTTLDLSYTFLTNLQPGFCSGFHLKVLKLQACKYLSDLSLEP

SEQ ID NO: 84059 - protein, 54 aa, Gossypium hirsutum
  Clone ID: LIB3585-066-P1-K1-B10.pep
MYQLHHIKSVNLKITNLNPKRSINISQSIHALSEFFNDSQNLVIAKFGIHKFQI

SEQ ID NO: 84060 - protein, 169 aa, Gossypium hirsutum
  Clone ID: LIB3585-066-P1-K1-B12.pep
DAWADAWADAWGRTLALEECALWMPTRTGLELQLSYTLRQQNPVGYTVPIHHPVINQVFSSNRAVKISPNCPVARLLPARKYMPGEVVAVRVPLLHLSNFHINDWPELSTKRYALMVLMLPSDSARQWHVHELELVELVLIRWLLLFSHAAILEESMRASDLLMEQNVG

SEQ ID NO: 84061 - protein, 57 aa, Gossypium hirsutum
  Clone ID: LIB3585-066-P1-K1-B9.pep
DPASSYPYNRTSCCVNPRPQSFDQSVLRVLTLKLNPLIIVAWARGLYRSMVRSLISL

SEQ ID NO: 84062 - protein, 114 aa, Gossypium hirsutum
  unsure (1)..(114): unsure at all Xaa locations
  Clone ID: LIB3585-066-P1-K1-D4.pep
LRFMMSGMPRPVRARAAVADMSGDRPRKPGRQIRICWMHTVNPDFTVASKLKQLVKRHATETAAMLXHQLEKEEKLAKQQGETLNAHYKKYDMIDSLMADGAARRLARCYNMRA

SEQ ID NO: 84063 - protein, 168 aa, Gossypium hirsutum
  Clone ID: LIB3585-066-P1-K1-E10.pep
MQNDNFATVYGDLAAKQSKDHQSDGVFSSSTTSSSTSAASVFALYHPRILMQQHQDMINRHNLCLTRLREAAKEAEALRQENTSLRSANRDLNKQLSALIQVSVQNHFSSSDYNTTPIELVNALRGLCLGSGGGGEVDVSDESPTSVMEGGAVDVERVMLPKIISVRF

SEQ ID NO: 84064 - protein, 79 aa, Gossypium hirsutum
  Clone ID: LIB3585-066-P1-K1-E2.pep
PRVRVNAIAWAPHSYKHICSARDDTHALIWESPTVAGPNGICPLSMYSASSEINQLQWSATQPDWIVIALYNKMHLLKV

SEQ ID NO: 84065 - protein, 144 aa, Gossypium hirsutum
  unsure (1)..(144): unsure at all Xaa locations
  Clone ID: LIB3585-066-P1-K1-E6.pep
MDTSTVADGSSFLSLFAALSYGIASMAMVFINKAIIMQYAHSMTLLTLQQLATTLLIHFGRQMGYTRAKGVDITTARRLLPISLFYNANVAFALASLRGVNIPMYIAIKRLTPLAVLIAGFFSGKGKPTTQVTXSVVLTAVGVY

SEQ ID NO: 84066 - protein, 33 aa, Gossypium hirsutum
  Clone ID: LIB3585-066-P1-K1-F1.pep
HNTRQIIIVRTMLCYIFVLFGSGLSDRWRTLLS

SEQ ID NO: 84067 - protein, 111 aa, Gossypium hirsutum
  unsure (1)..(111): unsure at all Xaa locations
  Clone ID: LIB3585-066-P1-K1-F10.pep
ERXRXNRGEQXDKKRQNHANTTPNVAETLRKRRSSKTPREGVATGAETGKGSTKRTTAAASVAKRSRGRRRRPTRAKSTTGATEKQRGQHEQREKNTKKRQGKTKRPEHGG

SEQ ID NO: 84068 - protein, 47 aa, Gossypium hirsutum
  Clone ID: LIB3585-066-P1-K1-F4.pep
PTRPVFPSFALFFYEICILIPWRLIWVVLVYFVPVIILRFFSHDEMQ

SEQ ID NO: 84069 - protein, 190 aa, Gossypium hirsutum
  Clone ID: LIB3585-066-P1-K1-F8.pep
CLLKGISLFPKISSPWVLPFVYVTFVHRAYSLAEFLWCGGTFRGWCNDQRMWLIKRTTSYLFAFFETILKLLGYSQLNFVVTAKVADEDVSKRYDQELIEFGAASPMFDILATLAMLNLFGSLGAIKKATMDADQDSKVLDQFGLQILLCLVLVTINLPVYQALLFRKDNGKMPTSVMYKSIVFALLACI

SEQ ID NO: 84070 - protein, 150 aa, Gossypium hirsutum
  unsure (1)..(150): unsure at all Xaa locations
  Clone ID: LIB3585-066-P1-K1-G12.pep
PFKYRRHLLHLFTGIAGNISITILSYPPTPPPIPLPHSVSTDLLRSTSRRLGRTTKTKSLSAMATEHEEYMGRLKAQLAKLFEGPLKVTDPNELDVEPXGCSLXGKNGDNQCNNAKTLWTKIKEKGAPYRGPPAVGEAIKKNLPTSKIIE

SEQ ID NO: 84071 - protein, 133 aa, Gossypium hirsutum
  unsure (1)..(133): unsure at all Xaa locations
  Clone ID: LIB3585-066-P1-K1-H3.pep
MAVASASARIMLSMFTTTCMGEARIPRVYPSGTXLNAHATCYGGSNAAVTILRARGYENSYSQXYEINTAAFNTALYNKGIIYGACYEIXVLHEHRGAMQGPQPYPVHSTNFRPPDYAVSCHNXSWCNPAFPH

SEQ ID NO: 84072 - protein, 42 aa, Gossypium hirsutum
  Clone ID: LIB3585-067-P1-K1-A6.pep
SIRVGFIQFRVSVITRYRKSMRKCHIYVINASCLNLNIQPLL

SEQ ID NO: 84073 - protein, 82 aa, Gossypium hirsutum
  Clone ID: LIB3585-067-P1-K1-A8.pep
NLMPNTHSDHKKDQMLIGLVAYYIHSYALGLLHHPHCNDYPDASFLRSCHNRPTTVTYATLQCIASFSPSGILCARVGARVG

SEQ ID NO: 84074 - protein, 54 aa, Gossypium hirsutum
  Clone ID: LIB3585-067-P1-K1-B12.pep
VRGKILINGLAVSSVYAIIRADNHLLALVGFPKNVIFCVSQFLIIKKCLPKLLH

SEQ ID NO: 84075 - protein, 153 aa, Gossypium hirsutum
  Clone ID: LIB3585-067-P1-K1-C1.pep
PTRPGSLCEVQESPNPWQFWMIMVKNGNFDKNTTLCPENGKKISKIVTDRNFPCFGEGCMNQPVVYHKYSMLGGNQKVYLTGEFNGTYDLDANLGENVGNNSFFSVSWRKNTSTGSWIFSHRLTTSTKYPWLMLYLRADATEGFNGGYHYNGR

SEQ ID NO: 84076 - protein, 145 aa, Gossypium hirsutum
  Clone ID: LIB3585-067-P1-K1-C2.pep
KTPQSKMSCNLFKIYTHLSLKLAARAESNTHSSGTKCQNEREKAAWSHCVNLYELTMLRFNKTVDSSTNLNKDDAQTWLITALTNLHTCRTGSMELGVPDYLLSMMYNSGFQVISNTLALNKGPYKVPTYKDWFLSWVKPRDRKL

SEQ ID NO: 84077 - protein, 57 aa, Gossypium hirsutum
  Clone ID: LIB3585-067-P1-K1-C3.pep
MWGIELDDVERIFCRSTCEARWLDWHYLVRERGSYHICVELEGSKNFVYIMAKRDSF

SEQ ID NO: 84078 - protein, 71 aa, Gossypium hirsutum
  Clone ID: LIB3585-067-P1-K1-C6.pep
LLDLDIHIPNTWIRVLLGFLQHLTLFSAYNSSVLNTNRLLAVISRSLKGSVKSCSHRLSVRLGYFKDMDWK

SEQ ID NO: 84079 - protein, 82 aa, Gossypium hirsutum
  Clone ID: LIB3585-067-P1-K1-D11.pep
LIIFIKEVWFSTVICLVGCKLLQSFQLLNSDDHANFLRKNNRNPADYRPDITHQALLSILDSPVNKAGRLQAVYVRTEKGVL

SEQ ID NO: 84080 - protein, 44 aa, Gossypium hirsutum
  Clone ID: LIB3585-067-P1-K1-D4.pep
YNCVRNLKDKCGSNNLRLEYFAVIKSLVIWIIIPSTLRVHWKQT

SEQ ID NO: 84081 - protein, 80 aa, Gossypium hirsutum
  Clone ID: LIB3585-067-P1-K1-E10.pep
PTRPDKTNKRLLFYYSILRPRAFNLKPRGMLHTNNNYMTLVHNATTCITHALTTSITLYQITFSPPAAVTKTPTPITTSK

SEQ ID NO: 84082 - protein, 54 aa, Gossypium hirsutum
  Clone ID: LIB3585-067-P1-K1-E12.pep
NIVLHDCKSKIKMKNSNSHTELILLHPCIQKQGSSIRLWPSCHTINFFTIALSF

SEQ ID NO: 84083 - protein, 83 aa, Gossypium hirsutum
  Clone ID: LIB3585-067-P1-K1-E2.pep
RRETTPSSELRAEPEALDSTSRRSEANSRRRSTAEKMPTEAELEEFFAAAEKKVKEQFAEKYNYDIVKDEPLEGRYQWVRLNS

SEQ ID NO: 84084 - protein, 64 aa, Gossypium hirsutum
  Clone ID: LIB3585-067-P1-K1-E4.pep
MGKIMIIINGLTRIRRLDARVALQRNDLELDPVNDSSMTTDYMTYMCNLDSAHSQCKHHEHNVK

SEQ ID NO: 84085 - protein, 115 aa, Gossypium hirsutum
  Clone ID: LIB3585-067-P1-K1-E5.pep
RTFADIDLDDDNICSVPIDCENGATEEVRGNVSSSGTSKRKRKKAQESVEDEQIKLVSEQLGEIANVLKQFTADKTPHLYKEVMSMEVERFDDDFLCSVFDYLVSHESEAKAFLV

SEQ ID NO: 84086 - protein, 75 aa, Gossypium hirsutum
  Clone ID: LIB3585-067-P1-K1-F5.pep
HKGRPVKEFFSFRFYIICFSISSPHTYCSIIDWREGAKGFDEIGGGEKQIDHRLLMIITILWAIRKIFGSCANMR

SEQ ID NO: 84087 - protein, 77 aa, Gossypium hirsutum
  Clone ID: LIB3585-067-P1-K1-F7.pep
MASSRFMASPTSYVLINWLTPRVPVLLTGVAHGIYSLYRYVDFSLLIRELAKTVKVRSVLCSDADRNVPVRYGNKTG

SEQ ID NO: 84088 - protein, 41 aa, Gossypium hirsutum
  Clone ID: LIB3585-067-P1-K1-G1.pep
DAWGRFSLVYMTEREINSMYYLEKDCNKQGCHFICILLLID

SEQ ID NO: 84089 - protein, 74 aa, Gossypium hirsutum
  Clone ID: LIB3585-067-P1-K1-G10.pep
MAIDIAIKPLLDKARYPMDNSNPDREPDDIDSDRKDYSYFYSHRKPISYADAVANNIAAASAGQDSCVWTNPSN

SEQ ID NO: 84090 - protein, 125 aa, Gossypium hirsutum
  Clone ID: LIB3585-067-P1-K1-G5.pep
YIGQPLCMLACWVEDPNGIYFKKHLARVVDCLWVGEDGMKLQGVASQSWDASLLLQALLATNLYDEIGPTLMKGHNFLKNSQVRDNPPGDFKRMFRHISKGSWTFADQDHGWQVSDCTAESLKCC

SEQ ID NO: 84091 - protein, 99 aa, Gossypium hirsutum
  Clone ID: LIB3585-067-P1-K1-H3.pep
DAWVVIVAIISSFILAEQMFLGRVIGATVIIVGLYLVLWGKNKDYMKSPPPPSPLMDGQIIEAAKIDMGITVDDGTKGTSIRGGKLQEKRGSIIGLKIF

SEQ ID NO: 84092 - protein, 110 aa, Gossypium hirsutum
  Clone ID: LIB3585-068-P1-K1-B12.pep
HASAHASAHASGRPGSKVPKLQYSENIDSSILLLRDEYAWHIGGALSHEELEEWKLLYHSSLNGLSFNTFLGNISRNGDEPTVLIIKDREGYIFGGIASQPWERHGDFYG

SEQ ID NO: 84093 - protein, 59 aa, Gossypium hirsutum
  Clone ID: LIB3585-068-P1-K1-B2.pep
VSHTIQLTHMPSNMAVETPAQIPPMASARPTASCGTVTDSYSAADIENQDRSPSSHVPS

SEQ ID NO: 84094 - protein, 94 aa, Gossypium hirsutum
  unsure (1)..(94): unsure at all Xaa locations
  Clone ID: LIB3585-068-P1-K1-B7.pep
RNSTYIDGAQEGYXQLELPIGVIEDKPTGFXAGRCAAIADSGTALVAGPTTAITMISYAIGVTGVVGQECMADVQQYGQTIIYLVLAGTQPLKI

SEQ ID NO: 84095 - protein, 110 aa, Gossypium hirsutum
  unsure (1)..(110): unsure at all Xaa locations
  Clone ID: LIB3585-068-P1-K1-C11.pep
MVDVDRRMSGLNPAHVAGLRRLSARASAPSTPTSLPLRNGLQSLSSLADKVITHLRDSGFQVQPGLLDAEFARAEAEFGFVIPPDLRAILSAGLPVGPGFPDWRSXGARL

SEQ ID NO: 84096 - protein, 79 aa, Gossypium hirsutum
  Clone ID: LIB3585-068-P1-K1-C12.pep
ASANNKTSLTSYTSCLTTSPLLLSYVIPILPSSLDDTTSYVVFFNIDLLYLFRIRHYYFNSALHFALSRISASALPSHD

SEQ ID NO: 84097 - protein, 139 aa, Gossypium hirsutum
  unsure (1)..(139): unsure at all Xaa locations
  Clone ID: LIB3585-068-P1-K1-D12.pep
YLFYLVTRAAIGSCFSKIRTALPLLVFFHGRTNAPLSTNYYSKSCPNLLPTEKFIDHSAIMNEARMGATLLRLFFHDCFANGCDGSILLDDDISDFIAQKNAAPNRNSAXGYNVVDYITSAGXIVRPGHVSCADILAIS

SEQ ID NO: 84098 - protein, 60 aa, Gossypium hirsutum
  Clone ID: LIB3585-068-P1-K1-E12.pep
TSEICISKKNRRLLRLLSGLYIIAKLTYIYGCYLGKCYLLHIVRQEKMLECVRPINKLLK

SEQ ID NO: 84099 - protein, 76 aa, Gossypium hirsutum
  Clone ID: LIB3585-068-P1-K1-E4.pep
RRDLAKLSDARMCNGGGKVIIGHGLCIPMTYVGGSTMMADDRSPLLLNDLMHVPDAGKNLLTAFKFAKDTQSMLRV

SEQ ID NO: 84100 - protein, 75 aa, Gossypium hirsutum
  Clone ID: LIB3585-068-P1-K1-F7.pep
LLSISRHDFQWPSGRRALHCAQLLTRQLAKKDMLSLMQGHETAGKTTNSSKIKHDKQPPHKRTLDLKCQRGRDNT

SEQ ID NO: 84101 - protein, 158 aa, Gossypium hirsutum
  Clone ID: LIB3585-068-P1-K1-G12.pep
SSDSESGAAKASSPVLEAVDSGNQLDEKTSADNPLDRNKCNGFDQLEQTSQAKSSSVESDCHQDGDSAPNERPVSPEKRYRAAILKNRFADTILKAREKALTTQGEKGDPEKLRREREELEYQRKKEKARLQAEAKAGEDAHRQAEAEAATDARLKRE

SEQ ID NO: 84102 - protein, 94 aa, Gossypium hirsutum
  unsure (1)..(94): unsure at all Xaa locations
  Clone ID: LIB3585-068-P1-K1-G4.pep
LLCGFGLSLLPXSPAXLFAGGSGFAFLFXASLSFFXACVVVLVRPVXPLLVVLFGVXVGLVFCLXLASPXRGRLCFPPXFSLFLVXGRVGGRVG

SEQ ID NO: 84103 - protein, 61 aa, Gossypium hirsutum
  unsure (1)..(61): unsure at all Xaa locations
  Clone ID: LIB3585-068-P1-K1-G7.pep
ALXPXLFLSCGVFSXXALSLFFPXXGFXRSLVCXAPFFFPFAXAAXXXLXLXXXXXALCLR

SEQ ID NO: 84104 - protein, 151 aa, Gossypium hirsutum
  Clone ID: LIB3585-068-P1-K1-G9.pep
SCKRLDADQEQPLEHERSSSDESETSGKLKNTLYNPAVEISLCKHLLYEGMGAEAACEVFDAEKLDSKKISSLGAAVVKNDKLVVRIGGHYFPWDEAVPIILGMVAFGSEKIFEPKGMIPVDRVEKSIEGDPSTDVSRSASWRLWPFSLKR

SEQ ID NO: 84105 - protein, 162 aa, Gossypium hirsutum
  Clone ID: LIB3585-068-P1-K1-H10.pep
VISIAAMLSEGNSIFYRPKDKQVHADNARMNFHTGNVGDHIALMKVYNSWRETNFSTQWCYENYIQVKSMKRARDIRDQLEGLLERVEIELTSCPNDLEAIKKAITSGFFPHSARLQKNGSYRTVKHPQTVYIHTSSGLAQVLPRWVVYHELVLTTKEYMRQ

SEQ ID NO: 84106 - protein, 35 aa, Gossypium hirsutum
  Clone ID: LIB3585-068-P1-K1-H12.pep
DAFYYAFCEKMWASKEWIKICSLMRLDVNRVAWTA

SEQ ID NO: 84107 - protein, 68 aa, Gossypium hirsutum
  Clone ID: LIB3585-068-P1-K1-H3.pep
HFHIHRKRMKPMVSNYADNIVVNLPSLMTEIFTTSFVSNPALHLRRILNSTAAFRRALIVPVLNSTAA

SEQ ID NO: 84108 - protein, 142 aa, Gossypium hirsutum
  unsure (1)..(142): unsure at all Xaa locations
  Clone ID: LIB3585-068-P1-K1-H4.pep
ATDSYSQWLQIFYELQNIPAGVSLPRVVHSATSIIGGRLLIHGGEDSLRHRKDDFCILDISHISLEKMHPTRLNSXRMLANTWRRLKPEGYKPGCRSFHRASVDDSGRYLHVFGRMVDGXVQPAEPVGLRYDSELFLVELVL

SEQ ID NO: 84109 - protein, 83 aa, Gossypium hirsutum
  Clone ID: LIB3583-003-P1-K1-A2.pep
YFEALKDILNNFKSFHQLAKSFTIIYLKNWTLTTTNYKTTLSHQPVESSNTCASHSFFFFLVLSFSFTVKAKHIYKIDFITTG

SEQ ID NO: 84110 - protein, 129 aa, Gossypium hirsutum
  Clone ID: LIB3583-003-P1-K1-B11.pep
TQHHHSLALVSTEAPSNKSPCRHRNPYPASHHATIDPAPMPHFYFYLIFPIIPRRPMPWPPPNHDRTPTSHPRRTIVIERNPIAVRHHSFSSKPYSPFLSLLFPWNTQTPTHHLNQNPQKHPFKKFGPT

SEQ ID NO: 84111 - protein, 165 aa, Gossypium hirsutum
  unsure (1)..(165): unsure at all Xaa locations
  Clone ID: LIB3583-003-P1-K1-B4.pep
ISSARCRCSRFTFTCVRLRRYSIAIATSKLMAVAVQRQHWDCQNLAQLKLNALDAHFPSCSCRNNEQADTDCQYXHMLNLNGDWHSPCTLTSSAVVVTLTLTVTVAIAIALAPAAFAPFFFFMVTGFGCPALALKLRLRLRFRARAELDLNQLELDDGERSGTGP

SEQ ID NO: 84112 - protein, 222 aa, Gossypium hirsutum
  Clone ID: LIB3583-003-P1-K1-B6.pep
GKVTQANFQGGFSHKRKDVGRGMESPRDKGKKHLIQEKDTKLAQFPFPNGELANDNLHPEEYLSYYNCLLRCGRLSDCVDLLEDMEQKGLLDMDKVYHAKFFKICSKQKAVKEAFRFTKLIANPTLSTFNMLMSVCGCSKDSEGAFQVLRLVQEAGFQADCILYTTLISTCAKSGKVDTMFEVFHEMVNSGVEPNVNTYGALIDGCARAGQVPKAFGANGIM

SEQ ID NO: 84113 - protein, 103 aa, Gossypium hirsutum
  Clone ID: LIB3583-003-P1-K1-C12.pep
MGRRKIEMKMVKDSGSRQVTFSKRRSGLFKKANELATLCAAQVAIVVFSPGGKPYSFGHPSVEAVAEQFLTLNLRPRVSTPRQLVAQPQREAKVERLSRRLNA

SEQ ID NO: 84114 - protein, 212 aa, Gossypium hirsutum
  unsure (1)..(212): unsure at all Xaa locations
  Clone ID: LIB3583-003-P1-K1-E2.pep
GISYVRLRIRWPSSDMTHRLGTPNYMAPEQWQPEIRGPLSFETDSRGFACSIVEMLTGIVPWHGKSADEIHDLVVRQQEKPLIPSGLPSAVEKVLLGCFESDFRSRPLMKDISHVFKSSXNGGEDDGRWTDLGSTIVSHRKHSTTGYTEWLLSKDHELVGDTVRATKLSNSCKPENMDVPQGNVVGVEYSTDRDVTGMVNDHGIHDPLRANV

SEQ ID NO: 84115 - protein, 123 aa, Gossypium hirsutum
  Clone ID: LIB3583-003-P1-K1-E3.pep
RATAEEAPIQSKITNDVVVDIRIGNPVGELAGKIVIALYGDDAPKTTENLRALCSGETGVGYKGSGFHRVIKDFMSQGGDFDIGDGTGRRSIYGRSLRDESFKLSHAAPGDDSMAHAGANTNG

SEQ ID NO: 84116 - protein, 106 aa, Gossypium hirsutum
  Clone ID: LIB3583-003-P1-K1-E5.pep
MAMASEKLLVQCLVATLLLIAAVEGAKETTICNIPLKKLEQCKPAVTGENPPPPTKECCSLIKQADLTCLCNYKDALPAFQIEPSRAFALPQKCKCKHAVPPQCKP

SEQ ID NO: 84117 - protein, 64 aa, Gossypium hirsutum
  Clone ID: LIB3583-003-P1-K1-F10.pep
YTCMLTRAVNKYAFTSYENRPAHTSCRSKRSYTMLLTSYGVSATHARPQPSIGHSRPTLESCKP

SEQ ID NO: 84118 - protein, 228 aa, Gossypium hirsutum
  Clone ID: LIB3583-003-P1-K1-F5.pep
NYLHTGSDGGIIHRDVKSTNILLDEQLVAKVADFGVSKFNLPDEEHSVDVKGTFGYLDPEYFLSLQLTNKSDVYSFGVVLLEVLCARPAVMASNRREEVNLAEWGMLWLRKGQLEKIIDPMLVDTINPNSLRKFVETTEKCLRPSGNERPMMRDVLWDLEYALQLQLIPMNNGTFEDSTTNVSLEFSMTPVLHRLPSNSFPAVEEEGAALLSRDAFDVFSLLSVGEAR

SEQ ID NO: 84119 - protein, 189 aa, Gossypium hirsutum
  unsure (1)..(189): unsure at all Xaa locations
  Clone ID: LIB3583-003-P1-K1-G1.pep
DMASWGIRPNTVTYNTLIDAYGKAKMFQEMEMTLVEMLRGKDCEPDVWTMNSTIRAFGSSRQIETMEKCYEKFQSAGIQPNIKTFNILLDSYXKTGNYXKMSAVMEYMQKYHYSWTIVTYNVVIDAFGRAGGLKQMEYLFKLMRSERIKPSCVTLCSLVRAYGQAGKAEKIAGVLRIIENSDVTLDIGV

SEQ ID NO: 84120 - protein, 174 aa, Gossypium hirsutum
  unsure (1)..(174): unsure at all Xaa locations
  Clone ID: LIB3583-003-P1-K1-H1.pep
LIEHTFSTGDAQKILQIQLIKNPHDDFLAWRGESTGEYTVRSGYKILLHGNLLNDNRYSPIEIRKCYKKLWNSXLPFKLLITVWRATLNNLPTLVNLRIKRLTNKAVYPRCMQGLENKEHIFCDYAVTKKTWDKLNYAWPQELSQLEFLDWFTWIMLNSEKDVCRAYVCAIWAI

SEQ ID NO: 84121 - protein, 107 aa, Gossypium hirsutum
  Clone ID: LIB3583-003-P1-K1-H5.pep
RHDISSAAKMNSMFKFIFVLEQMTSALLLRITNPEHDSLLWLLKVASKFTFNLSPMGEVHLSTQILFRKTFPKCMFPHFCSCLTPWTHGGSHHSVKVKITKTRQIGA

SEQ ID NO: 84122 - protein, 89 aa, Gossypium hirsutum
  Clone ID: LIB3583-005-P1-K1-A11.pep
MQYYFYAFRYYFQYLHAYIEAAEIMLDDDVASNKAIGSYGPRFLQDQRKIVPRFSVLTHCNTGSLATAGYGTALGVICALHAEGVLERA

SEQ ID NO: 84123 - protein, 103 aa, Gossypium hirsutum
  Clone ID: LIB3583-005-P1-K1-A3.pep
MSDDMLLHFSSNSSNQSDNSLPTKMAKLEARLVGKVSSATVSQQPPQTQQLLQQQQPVWASLSSASKFVSAEDLSEASSSSDSDDENGREFLIQANTLKRQKI

SEQ ID NO: 84124 - protein, 108 aa, Gossypium hirsutum
  Clone ID: LIB3583-005-P1-K1-A6.pep
AKGPNLCQTSYRFEISKTLPDFSSVLASVHSRSPSSSLHPSGLLLTLGLPSTFRSPLTLFRAPFPPLISGSFYTSIRGFSASLAEVFGLSSADFLHRLAWVLFRSLYL

SEQ ID NO: 84125 - protein, 144 aa, Gossypium hirsutum
  unsure (1)..(144): unsure at all Xaa locations
  Clone ID: LIB3583-005-P1-K1-A9.pep
PTPPTPPGSAETXQEPQQXRQGSRGRXQDQHQKXRRNRQGDNTAEPQGGXHXSXXEGXEXGGTTKRXDTGNXANQRDNSPRRGQRAGNPQEEQRQXRRRAQQTQGRXERGEEXEEEEGEGEEEEEEDNPSRRNRHQEEEEHGRE

SEQ ID NO: 84126 - protein, 58 aa, Gossypium hirsutum
  Clone ID: LIB3583-005-P1-K1-B4.pep
SFSTSFCVSLYVLIECNFVLTLVTYYSFEMETIYHKSLGGGDQRILLMVPSSPPHINL

SEQ ID NO: 84127 - protein, 44 aa, Gossypium hirsutum
  Clone ID: LIB3583-005-P1-K1-B5.pep
LAQSEGAVIPMIGSKTLFCQIPTITYNSHLTLLHVKKLTIRLYS

SEQ ID NO: 84128 - protein, 141 aa, Gossypium hirsutum
  Clone ID: LIB3583-005-P1-K1-C10.pep
MDVDWDLHAVVRGCATVTTTTSSSGGGCGGVAANSSLMADLYPQSRFSSFGSQEEPFQGQFSCFPNQFEAKNAMEELHKLYKPFFPKSQPQTKQQQEHQQVKPKLSQVGSVTTTSSSTSTNNSRSKRRKNQLKRVCHVPPE

SEQ ID NO: 84129 - protein, 165 aa, Gossypium hirsutum
  Clone ID: LIB3583-005-P1-K1-D6.pep
MAMSCKDGKPGSLDGGKYVRYTPEQVEALERLYHECPKPSSIRRQQLIRECPILSNIEPKQIKVWFQNRRCREKQRKEASRLQAVNRKLTAMNKLLMEENDRLQKQVSQLVYENGCFRQHTQNATLATKDPSCESAVMSGQQRETHQHPPRDASPAGLLSIAEET

SEQ ID NO: 84130 - protein, 72 aa, Gossypium hirsutum
  Clone ID: LIB3583-005-P1-K1-E2.pep
ITLIGTDVSLRVRREGGQERHTYSGRASTLHTTCLSSHQWSNYSLLSGLELIMCILIAQADITFGLTGSAYS

SEQ ID NO: 84131 - protein, 173 aa, Gossypium hirsutum
  unsure (1)..(173): unsure at all Xaa locations
  Clone ID: LIB3583-005-P1-K1-E6.pep
AVLITGDLTDGKSKDLLVMKQNEEEWVEYKNVMEDVVKRSGLDKNIFYDLRGNHDNFGVPVIGGLLDFYSKYSINGQLGRSGHVNSVTLTLQAGQRKYLFVGLDSTMSVELRGPTNLFGHPTDQLLAEVDMXLSQWDSQPLKPASKISFGHLPLSFSASSQSGKTLKDIFLKH

SEQ ID NO: 84132 - protein, 147 aa, Gossypium hirsutum
  Clone ID: LIB3583-005-P1-K1-F1.pep
RKFNGFSLLSTEFPIHRYVAALGMALRYPCKRMTNVQSHSHAAYKCAIQSAPWSQLDETKRAFKSRITPMKAPYSFLHVYSEIDKSLAALEFMKSGKDIGALKQTLEEMQMCKQMSNTRKEEQASSLISHTSSILGQSSEAPNVIVN

SEQ ID NO: 84133 - protein, 174 aa, Gossypium hirsutum
  Clone ID: LIB3583-005-P1-K1-F10.pep
DENVLRLVEEQKREKEEALKKIRVLEKQLDIKQKLEMEIEDLKGKLQVMKHLGQDDAAVQKKMEEMNNELQEKIDDLQDLESTNKALIYKERQSNDELQEARKVLIQGLPELLGNRTNIGLKRMGDLDPKAFHDTCKSRFPPDEAEIQATTLCSSWQENLKNPDWHPFKVIVEG

SEQ ID NO: 84134 - protein, 92 aa, Gossypium hirsutum
  Clone ID: LIB3583-005-P1-K1-F5.pep
MAEISGEAAVIGSNGRSDSPARMSLTTAVVAPPLAVSASFKESGGKGSSRRKVARPSFDADNEFITLLHGSDPVKVELNRLENETRDQDREL

SEQ ID NO: 84135 - protein, 176 aa, Gossypium hirsutum
  Clone ID: LIB3583-005-P1-K1-F6.pep
AHAYGDMSLTNITDLPPGRIPVETYGIEGTDNGFKNIYVMMLEELEAGGRLYIVYPVIEQSEQLPQLRAASADLETISNQFQNYNCGLLHGRMKSDEKEEALRKFRSGETDILLSTQVIEIGVDVPDATMMVVMNAERFGIAQLHQLRGRVGRGARKSKCILVASFSSSLNRLKVL

SEQ ID NO: 84136 - protein, 110 aa, Gossypium hirsutum
  Clone ID: LIB3583-005-P1-K1-F7.pep
DAVSNFQPSLAVVIGILCVMFALTFFLLVYAKFCHSAATVHADHHRRILNRTRSRSSGIDKKVVESLPFFKFSSLKGSKQGLECAVCLSKFEDIEILRLLPQCKHGFHID

SEQ ID NO: 84137 - protein, 42 aa, Gossypium hirsutum
  Clone ID: LIB3583-005-P1-K1-G1.pep
MINTANGTISTSSSSANAQSPGLKTYFKTPEGRYKLHYEKTH

SEQ ID NO: 84138 - protein, 77 aa, Gossypium hirsutum
  Clone ID: LIB3583-005-P1-K1-H11.pep
GQGPEIAINQLINREKMIDQKQKKSKRLSMFFHSWSRFLLERVDSHFILDSTIFLLSQFPVYSRWILLIKDGSCHGF

SEQ ID NO: 84139 - protein, 175 aa, Gossypium hirsutum
  unsure (1)..(175): unsure at all Xaa locations
  Clone ID: LIB3583-005-P1-K1-H6.pep
RPRVRDFGLELNYAQVWRGIEACSGXLQGSYTDAYNQPPWYCEKIEKTNPGSFTKLVIADDXRFQRVFLYFNALIRGYQSGCRPLLFLEAIPMKSKYHEILLTATELNGDDGISHVAFAVVDDENEDSRHWFFEQSRSAEYTSSSITFVSDRDKGLMKHVLEIFENAHHSYSIYY

SEQ ID NO: 84140 - protein, 113 aa, Gossypium hirsutum
  Clone ID: LIB3583-005-P1-K1-H7.pep
MASLLLRQRRVSVLGVSRILQAVNGDSSRLQPESNCRTFARFGVIIRNYSSGKGTAKFDFTDLTRPHTWYPNARKKQRKVFLHVGPTNSGKTYHALKRLESSSSGVYCGPLRL

SEQ ID NO: 84141 - protein, 73 aa, Gossypium hirsutum
  Clone ID: LIB3583-006-P1-K1-A2.pep
TKGPPSIRLSQHFPTFIVKWTPPFLCLLTLLNLFFTPTCATYICKPPKPRSFHFFTFLSSNVPHFPLKIFKKG

SEQ ID NO: 84142 - protein, 225 aa, Gossypium hirsutum
  Clone ID: LIB3583-006-P1-K1-A4.pep
GRVGSFQSFDEICSIAEEKRVDFLLLGGDLFHENKPSRSTLVKAIEILRRHCLNDQPVQFQVVSDQTVNFQNAFGHVNYEDPHFNVGLPVFSIHGNHDDPAGVDNLSAVDILSACNLVNYFGKMILGGSGVGQITLYPILIRKGSTTLALYGLGNIRDERLNRMFQTPHAVQWMRPEPQEGCEVSDWFNILVLHQNRVKMNAKNAINERFLPRFLDFIVWGHEHE

SEQ ID NO: 84143 - protein, 121 aa, Gossypium hirsutum
  Clone ID: LIB3583-006-P1-K1-B4.pep
RRSSVFCHRYAARPIGHPHLHLTSAAPTVCRHLLYQDRSRKPVPGDRLQCWNQTEKWMKGLSFFGSLRLEDRALRWRSRTGLKTPLFLLRPPPVTEPRPQNGRSPAWPCLAGGNFEGRRER

SEQ ID NO: 84144 - protein, 211 aa, Gossypium hirsutum
  unsure (1)..(211): unsure at all Xaa locations
  Clone ID: LIB3583-006-P1-K1-B6.pep
HCETVTDGTDTLDPWKFKISYDKLVIASGAQASTFGIHGVKEHAIFLREVHHAQEIRRKLLLNLMLSDVPGLPEEEKRRLLHCVVVGGGPTGVEFSGELSDXIRRDVHERYTHVKDYIHVTLIEANEILSSFDDRLRRYAIKHLTKSGVRLVRGIVKDVKPENLVLTDGSEVPYGLLVWSTGVGPSPFVNSLGLPKSPGGRIGVDEWLRVL

SEQ ID NO: 84145 - protein, 229 aa, Gossypium hirsutum
  unsure (1)..(229): unsure at all Xaa locations
  Clone ID: LIB3583-006-P1-K1-B9.pep
TCTSLQRVRLQNQXLSGELSSEFRKLPLVYFLDVSNNDLSGNIGDQEWDMPALEMLSLAGNRFSGRLPNSFGSQKIEDLDLSGNGFSGTIPRSFGSLTELMQFSLSANKLIGEIPEELSSCKKLVSLDLSHNQLSGQIPSGFAEMPVLSQLDLSDNQLSGEVPPQLGKMESLIQVNVSHNYLHGSLPSTGAFLAINSSAVSRNDLCGGAETSGLPPCKKVKNLNWWFYV

SEQ ID NO: 84146 - protein, 230 aa, Gossypium hirsutum
  unsure (1)..(230): unsure at all Xaa locations
  Clone ID: LIB3583-006-P1-K1-C5.pep
KISPTERQELQNKXTRLLSMLDEVDRRYRQYYHQMKILVSSFDSAAGCGAAKPYTSLALQTISRHFRCLRDAISNQIQLTQRSLGEHDNSLNNQGSVIPRLRYVDHQLRQQRALQQFGVMRNAWRPQRGLPESSVSVLRAWLFEHFLHPYPKDSEKIMLAKQTGLTRNQVANWFINARVRLWKPMIEEMYKEEFGEMDSNFKSSLENAAKATGENSSAFKDRGEELHENI

SEQ ID NO: 84147 - protein, 97 aa, Gossypium hirsutum
  Clone ID: LIB3583-006-P1-K1-C8.pep
RLFTLFQEFGHRVRLATHANFRNFVKLADIDFYPLGGDPRVLAGCKKFLMWKLFHFIILMLVFMLVIAFKHKSHIAVSCQTNLEDLPETLHLVCLLS

SEQ ID NO: 84148 - protein, 148 aa, Gossypium hirsutum
  Clone ID: LIB3583-006-P1-K1-D1.pep
MKGTLDRTKVILRHLPPSITESVLLEQVDSAFSGRYNWLSFRPGKSSQKNLSYSRAYVDFKRPEDVLEFAEFFNGHVFVSEKGAQFKAVVEYAPSQRVPKQFSKKDGREGTISKDPEYLEFLEFLEKPGENLSSAEIQLERRGGRKSW

SEQ ID NO: 84149 - protein, 68 aa, Gossypium hirsutum
  Clone ID: LIB3583-006-P1-K1-D5.pep
PCGCLCRVDCVVVVEDNMHGMGACYCCYLLQCFILRFLMFFLSMKWQPIVLQKKKKKKKKKLSSNSIT

SEQ ID NO: 84150 - protein, 158 aa, Gossypium hirsutum
  Clone ID: LIB3583-006-P1-K1-E4.pep
IWSLGCKLYQMVYGRTPFADYKTFWSKFKVITDPNHEISYEPVSNPWLLDIMKKCLVWDRNKRWRIPVLLQHPFLVPPVPPQPSLAQDQSCQLLELIAKACSNNQDASMLCSRLTRLLKDPMSQVTSESLTSLEQQCKLLSQMSKLCFQLQEHLSQSG

SEQ ID NO: 84151 - protein, 174 aa, Gossypium hirsutum
  unsure (1)..(174): unsure at all Xaa locations
  Clone ID: LIB3583-006-P1-K1-F4.pep
MAAAVETSPVLEILVREPDGYSIWNGPPFKNNNQPGIKLEKVPCNNAKYSEDGSRIMVTKMDSAIGIYDSNTLKEIRCFQIPNVVASALSPCGAYLQTFQKSTTPQEKNVVLWSIETGDPVYEQFQKNMTKATWPSIRFSSDEAVACRLATNEIXFFDAADFSKGILHRLRVPG

SEQ ID NO: 84152 - protein, 57 aa, Gossypium hirsutum
  Clone ID: LIB3583-006-P1-K1-G11.pep
VGRVYENNIWCKIPVVEIQTRLKKFFIFFFSPQKVGVLVLFDCFSILLWHTLASNHS

SEQ ID NO: 84153 - protein, 133 aa, Gossypium hirsutum
  Clone ID: LIB3583-006-P1-K1-G12.pep
MAAKKPKSSTPNPGNMSPRVWFYSILLTLQYGFQPIISKRFTRREVIVTSSVLTCEVAKVVCALILMAKDGSLKKLAKEWTLVGSLTASGLPAAIYALQNSLLQISYRNLDSLTFSMLNQTKIIFTCIFTYII

SEQ ID NO: 84154 - protein, 68 aa, Gossypium hirsutum
  Clone ID: LIB3583-026-P1-K1-A1.pep
FLGHECYDRAPLLVKISPSISFLDFYNGVFVESSVEEEEKTLFLLHIYNVLLMMIVSLIPPVLHSPYQ

SEQ ID NO: 84155 - protein, 29 aa, Gossypium hirsutum
  Clone ID: LIB3583-026-P1-K1-A3.pep
ATDNCTGLQGLLVFHAVGGRTGSGLGSLL

SEQ ID NO: 84156 - protein, 58 aa, Gossypium hirsutum
  Clone ID: LIB3583-026-P1-K1-A4.pep
YSLCMLIRVPFVDKITYNHHINYVYCHAFRFLLFICWLFHATSIVNFLHFEVNIFIGL

SEQ ID NO: 84157 - protein, 94 aa, Gossypium hirsutum
  Clone ID: LIB3583-026-P1-K1-A7.pep
SRRDVFTSSSFHQRAADDDSNSNSTSFTLMVPVICHHLCLLVDSKIPSSLFEGRNFEFSVVAFSRMQEINSSLGNPIAIGQAVGLQRLDEGIPG

SEQ ID NO: 84158 - protein, 172 aa, Gossypium hirsutum
  unsure (1)..(172): unsure at all Xaa locations
  Clone ID: LIB3583-026-P1-K1-A8.pep
LIVRLLSATTAIKERYKILEELGEGTXGSEFKAFNIETFEIVAVKKMKRKFYFWEESMNLREVKALCKLNHPNIVKFKVVVRENNELFFIFEYMEHNLYQIMKEQQRPFSEXEIRIFMSQMLQGLVHMHGNGYFHRDLKPENLLVTKDFLKIADFGLAREALWLCGRSLTDF

SEQ ID NO: 84159 - protein, 168 aa, Gossypium hirsutum
  unsure (1)..(168): unsure at all Xaa locations
  Clone ID: LIB3583-026-P1-K1-A9.pep
PSRPLISQFLLYPLKLFSYFPLLTNKRESISVHXIGQAGILVGYACRELYCLVHGIQPVGLKPSVFSVGGGDEAFNSFFRVTGAGLHVPRAVFXDLVPSVIDVVRSGAYRLLFHPELLICGXVDAAYIFARSLYSIGKXIVDLCLDRICKLADNCTGSXGFLVFHAVG

SEQ ID NO: 84160 - protein, 133 aa, Gossypium hirsutum
  unsure (1)..(133): unsure at all Xaa locations
  Clone ID: LIB3583-026-P1-K1-B10.pep
HINPKLPVGDTEDKIVSSYQFLYCSLMDEEVIFSKCKKAISCMEKVDKEICTDVNSRQFXGSALVEEVLGQHAALKDCIEQLTAVASSRVNLISHLREALKELEFKLEQVRSQLQAAQSRAEQAGNICRQLLN

SEQ ID NO: 84161 - protein, 85 aa, Gossypium hirsutum
  Clone ID: LIB3583-026-P1-K1-B12.pep
LARTNPTMVRHGTKILQQRLLWEHNLLLTSTQTHPLEDTRIPKRIPPRNNRKTLKPEEPLKLKRNLPYGTLATNPMNGTLWLGTL

SEQ ID NO: 84162 - protein, 105 aa, Gossypium hirsutum
  Clone ID: LIB3583-026-P1-K1-B4.pep
PQTSKFSLGEESNQNYNEGVGNPVLPTFISTQKMSLSDQAFYLMAFIAFTTSEAFTSMVIAAVPTLSAMGRAAVSLSKLADTAREELPSTMAAIRLSSMEIRDLT

SEQ ID NO: 84163 - protein, 94 aa, Gossypium hirsutum
  unsure (1)..(94): unsure at all Xaa locations
  Clone ID: LIB3583-026-P1-K1-B5.pep
VVVSAVFFLLHHRNRFPDVRDGFIYWLRSVFAAAXAMIDSLCHHLREVGVVGEYVAVIACILLRXCLWNPELHMLQYFSIAEVSYALHQVAWRC

SEQ ID NO: 84164 - protein, 38 aa, Gossypium hirsutum
  Clone ID: LIB3583-026-P1-K1-B8.pep
ERVVLMKKICVVDLHRLHHCVLHLENHPLKAPSTESEL

SEQ ID NO: 84165 - protein, 65 aa, Gossypium hirsutum
  Clone ID: LIB3583-026-P1-K1-B9.pep
VFYLSLAREQKSLPILAASSVERSPSMSEPVILSSVKSIPSLFLFDFRIVIIKRKKRCFLLLYPF

SEQ ID NO: 84166 - protein, 45 aa, Gossypium hirsutum
  Clone ID: LIB3583-026-P1-K1-D1.pep
FIITSYFTCHNIYVVHFTTSFDSLKIIINHHHKTNNLNFVTDAMG

SEQ ID NO: 84167 - protein, 63 aa, Gossypium hirsutum
  Clone ID: LIB3583-026-P1-K1-D11.pep
VCVSDVTELQALAILMFAFRVRVVSLFSPSGWVPESPTLLSQELSPFSALSMMRSLQRFLLIR

SEQ ID NO: 84168 - protein, 171 aa, Gossypium hirsutum
  unsure (1)..(171): unsure at all Xaa locations
  Clone ID: LIB3583-026-P1-K1-D12.pep
VKRLENLHSSRLRAVRNXARAEXAVEPAKRISASXVGRDKVIQYISEEKEVXAFLSKLDFDNIHFSXSPPXEAKQSVHLIASDEXWRAYLPLADMVDISAEEQSLSKRLSXMQTEYVGLKARLNSPKKTKVSLLRMSAIHIYPRARKNSNTHYIEILSTVFVFGILGLPCL

SEQ ID NO: 84169 - protein, 171 aa, Gossypium hirsutum
  unsure (1)..(171): unsure at all Xaa locations
  Clone ID: LIB3583-026-P1-K1-D3.pep
GRVGGRVGSRVGLVLASAMKSFEEEISAVPSSSSESMPVVVLSSDSGVSHPDLGYLLEASDDELGLPPPTASSTVAEGRSVATDLVRAVSNSSGIHDLWGFEVLFPNYDSFELGFXIISIVGTVAYDGLFEYSDVYFDSSDISGLLWRPETLSAKFKSKLIILNIEYLESS

SEQ ID NO: 84170 - protein, 165 aa, Gossypium hirsutum
  unsure (1)..(165): unsure at all Xaa locations
  Clone ID: LIB3583-026-P1-K1-D4.pep
DFSNISLTGEIPXSLTLLKSLISSYSCFATFSSSAGIPLYVXRYLCSRGLQYNLLSSFPPSLYLSYNRLNGSIFPVIGLLKQLHVXDLCRNNISGVIPASISDMMIXEILDLSYNDLHGSIPLSFAELTFLSKFSEAYNHLQGVIPSGGHIYSFSSSSFEGYPGL

SEQ ID NO: 84171 - protein, 146 aa, Gossypium hirsutum
  unsure (1)..(146): unsure at all Xaa locations
  Clone ID: LIB3583-026-P1-K1-D5.pep
SLSFSWRENKSASVVLLFSLFLSXASLVLAIDFPGRREXDDPPKRFXSSRRALRLGFLVVXECYCCELKVVNXLYGELDLLLRLRPEDPQKRFEESQLVCRLLVVRLRPQCQLKSLIRFEHVQHLSQKQFQESLLHCHQLDHKPVR

SEQ ID NO: 84172 - protein, 167 aa, Gossypium hirsutum
  unsure (1)..(167): unsure at all Xaa locations
  Clone ID: LIB3583-026-P1-K1-D6.pep
RFLAFSAIGCFLAEAEFQDLLLLVRQFRQGVIIALPQGEVLWIFYDGFVRVVSIFLLDSGFXANLLDYIPRRFHLAGFPVEVLRLLXRLALLLLGCCVWGEVSEVVVSVGVVVVVVVFPSRRSRLQEEEEQGRVSSSCNYLLXAFDRFFLALAFFVDHDIIRLILRV

SEQ ID NO: 84173 - protein, 80 aa, Gossypium hirsutum
  Clone ID: LIB3583-026-P1-K1-E12.pep
QLKKVYLIISIKETKSLKTETRRPILEVTITEKRKAGKYITNKGREKQRKKERKKLKYSRKTMIRMRNKENSDQKNLEMS

SEQ ID NO: 84174 - protein, 53 aa, Gossypium hirsutum
  Clone ID: LIB3583-026-P1-K1-E5.pep
TLSFFYFLMSKFRVFPKLFFSFRFVLFSYLSGYHPSITFGLIFFSMRKKNFNG

SEQ ID NO: 84175 - protein, 70 aa, Gossypium hirsutum
  Clone ID: LIB3583-026-P1-K1-E6.pep
KKKKKKNFWGKFFNLYILNKAGTSRTKHGGYAKARINSRQYRETETDKHGDITLTKIMPATNPERYQRKN

SEQ ID NO: 84176 - protein, 75 aa, Gossypium hirsutum
  unsure (1)..(75): unsure at all Xaa locations
  Clone ID: LIB3583-026-P1-K1-E9.pep
RHIEYKKFSKTVLKKVIPLSFSFSPIWKSFLSCFWLNNWENKRNXEKEANFSIRFPRIFAHFVAIGVLEGGFRGF

SEQ ID NO: 84177 - protein, 41 aa, Gossypium hirsutum
  Clone ID: LIB3583-026-P1-K1-F1.pep
RPLSTASTASAVPWNQIGFSGLCCAARACAGSYDVVATPCN

SEQ ID NO: 84178 - protein, 53 aa, Gossypium hirsutum
  Clone ID: LIB3583-026-P1-K1-F10.pep
EFSSYFIVCSVIHMISRVKSYFMQSYFYCLIFELVSFLHGCVIAVSVIVRELR

SEQ ID NO: 84179 - protein, 107 aa, Gossypium hirsutum
  unsure (1)..(107): unsure at all Xaa locations
  Clone ID: LIB3583-026-P1-K1-F12.pep
HPSSSPLSELRSFHASGDYCCMVRDPVSNXVTRTYSHALPLEAQXLNLLLSSTPTMITSASHVAERTRLLLSLRGHRDIVIAVYDYDPASIISYALSSKEYDERVSG

SEQ ID NO: 84180 - protein, 45 aa, Gossypium hirsutum
  Clone ID: LIB3583-026-P1-K1-F5.pep
TSTAVNSESMHRNASNSTNKKEQRGIEMITRNSRERPPQRININQ

SEQ ID NO: 84181 - protein, 69 aa, Gossypium hirsutum
  unsure (1)..(69): unsure at all Xaa locations
  Clone ID: LIB3583-026-P1-K1-F7.pep
ECFAARIFCXDSCACDICLYXPDYVDIVLDIRHQIELRNPLAFVPNDSPNSMILHVFPFKFELFDLCLT

SEQ ID NO: 84182 - protein, 42 aa, Gossypium hirsutum
  Clone ID: LIB3583-026-P1-K1-F8.pep
GIDALISYPPFRCFLLHLLLIYLFKTRNRDIHLCWRLLRIYL

SEQ ID NO: 84183 - protein, 60 aa, Gossypium hirsutum
  Clone ID: LIB3583-026-P1-K1-G11.pep
VMSRMAWRAVVQRSHEGSHPSAALPEYSKSFWSSRLLKFFFLLSSLGFELSFRYGFLNLG

SEQ ID NO: 84184 - protein, 33 aa, Gossypium hirsutum
  Clone ID: LIB3583-026-P1-K1-G2.pep
LLWDTNFYILYLFGSLTETTSKNILLKELEIWD

SEQ ID NO: 84185 - protein, 191 aa, Gossypium hirsutum
  unsure (1)..(191): unsure at all Xaa locations
  Clone ID: LIB3583-026-P1-K1-G4.pep
PFFYAFGVSSFXRARLYFVSFSLPSSLSVLYFSFGXSLSSLGVPVGVAGFGFGRLSFPALLSSVSPLLGYXFSYCFVSHSFDSNXSXRPSPLILGRFEDIVSLFGYVLVVFVYTGMLSNPKHPYFYSVGFVRISVGYWYIPAPEYFLRVVCXGSGGMVVDSSTTFTMLPASLYVSEASEFDHRVGRFFLRA

SEQ ID NO: 84186 - protein, 55 aa, Gossypium hirsutum
  Clone ID: LIB3583-026-P1-K1-G6.pep
PHFSPLVRSRVRTLPISFSHTPNRGVCILSSFSFLLLYSSNLHLNLCNFLVSRFT

SEQ ID NO: 84187 - protein, 113 aa, Gossypium hirsutum
  unsure (1)..(113): unsure at all Xaa locations
  Clone ID: LIB3583-026-P1-K1-G7.pep
VPDSFERPFQYDDTRPILDWICSSLRPSKVLSLSQLSLYELIVLEGXLLEGEDXDFAYDSISAFSSRRVFLEAVFGAVVRFXDIKDASVAYKAEAXELQXQLKHLQSQFDMLT

SEQ ID NO: 84188 - protein, 74 aa, Gossypium hirsutum
  Clone ID: LIB3583-026-P1-K1-H1.pep
SYICSEFFRFFYLSLYFEKIVIVFSLFFFTKSICVVLFYCYPCSMISSELYLYGHVLSEKLLLLVLFRVLFLGF

SEQ ID NO: 84189 - protein, 71 aa, Gossypium hirsutum
  Clone ID: LIB3583-026-P1-K1-H10.pep
VYACRWVDDKLFLILVVAVVVSVEVLLIPFVFVDIHFSTAIKSGKGRADLLTLLQLISVFFRGFVNNCLAL

SEQ ID NO: 84190 - protein, 164 aa, Gossypium hirsutum
  unsure (1)..(164): unsure at all Xaa locations
  Clone ID: LIB3583-026-P1-K1-H4.pep
YKFVPRVCIFRGLAFASYVLAXSLEFFISNVGASVIHDPDIRDFLLVIFVPVFFEYVAVLLIPARELSHHISSAGMEASGSCYMLFAMXGSIFIGSLDGAYVVFRVEVGVVFFFLFGAXAHVFAGLQXVRAEGXFVPDPQFEEVMKFIKRGVFRSSYYNVLLGS

SEQ ID NO: 84191 - protein, 47 aa, Gossypium hirsutum
  unsure (1)..(47): unsure at all Xaa locations
  Clone ID: LIB3583-026-P1-K1-H8.pep
SPRRSSVFEGSVEVPSCIICLLYLYLSAVVCRCXPSAFVCLEHRELL

SEQ ID NO: 84192 - protein, 124 aa, Gossypium hirsutum
  unsure (1)..(124): unsure at all Xaa locations
  Clone ID: LIB3584-045-P1-K2-A2.pep
MRKNPDSRPDRHLGPPPGHSHVPAKPQSESESATHXENPLMDDHSWMDGYQLTPSLKSSGLDRSLNHASHVDPSDVNNSSNGWNGMRRFPHPVIQGPTAQYQMEKQKGWQGYHTLEHLKNRHEL

SEQ ID NO: 84193 - protein, 182 aa, Gossypium hirsutum
  Clone ID: LIB3584-045-P1-K2-A5.pep
VFYRRQIPSQVAEWGRMSMCDAKRRLLANALLDISNEWFILLSESCIPLYNFSVIYQYIMKSKHSFMGAFDDPGPFGRGRYNYNMVPEVNISKWRKVSQWFEVNRKLAINIVEDVTYYPKFERFCRPACYVDEHYFPTMLTIQTPNLLANRSITWVDWSRSGPHPGTSGRSDITKDFFKRIL

SEQ ID NO: 84194 - protein, 98 aa, Gossypium hirsutum
  Clone ID: LIB3584-045-P1-K2-B4.pep
ERWKNGNFLSIHNLVKLKNGKKENKTFEWIGFYALGGKMFIPLIFFPLTFLPNQANSKFTFLPFFHSLLPSFHFSTQPSTPIVPLCLRKITTKIYISY

SEQ ID NO: 84195 - protein, 69 aa, Gossypium hirsutum
  Clone ID: LIB3584-045-P1-K2-B6.pep
LMIQISTLQGNVGRYNLSPAFMKHYPKTALICGKVIRDAITQTKNDYWLIINEMGPSVSGRCAAPVFRG

SEQ ID NO: 84196 - protein, 98 aa, Gossypium hirsutum
  unsure (1)..(98): unsure at all Xaa locations
  Clone ID: LIB3584-045-P1-K2-D11.pep
MFRIRWSESKYWLYALQDNEDVGLGQARWSYVNKAENLLTRLENINLAFHFEVEXQQGNGVFLNFFGFNGTAGVWRIKAMEESGGGSERTTVEDMDIA

SEQ ID NO: 84197 - protein, 79 aa, Gossypium hirsutum
  Clone ID: LIB3584-045-P1-K2-E11.pep
DNQILCFMLSTLTPTVEKYYLTHQHNYLTLDGVLTGASRAGLEGLVGAALGGLSLEEIFDWEETLNDLRHTISIHELVF

SEQ ID NO: 84198 - protein, 137 aa, Gossypium hirsutum
  Clone ID: LIB3584-045-P1-K2-E5.pep
HAVCISKLFFYNPRSQHRQPYRSLSYPSQITLIMVVHHLSCLPTPPTLTPPSSHPSFFLSLSIPPFFFFEYSVHFRPPLACYYSISHLLIVKPTTSQKHPRQGPQHNPPFLFFFSLLSSFSFPWFLVSVLSVFGNQI

SEQ ID NO: 84199 - protein, 159 aa, Gossypium hirsutum
  unsure (1)..(159): unsure at all Xaa locations
  Clone ID: LIB3584-045-P1-K2-F1.pep
ITDTSLSPYQRLLVYSSLSPVVHIANVRSAASESTANITEIHDGWNFSDDGYNDDDYDALVISYVKXSTDGKELVAARSDNSIYVYDHQSXKPTLRIPAHKPDAYTACFADXTGRLLFSGSYDHLCKVCDRLCFGTRGKATXVLIGHLERITFIDSRGD

SEQ ID NO: 84200 - protein, 119 aa, Gossypium hirsutum
  unsure (1)..(119): unsure at all Xaa locations
  Clone ID: LIB3584-045-P1-K2-F6.pep
TFGKDHQTLTSGLPENGLELAYDRATXATLQRXILPEIVWKLRKWLXLGMEVKYSQKLKHMDKYLSEIINTRKRELVSQHQSGIQHDDELCRFMKKKESYSDEFLQHVALNVILDGRDT

SEQ ID NO: 84201 - protein, 50 aa, Gossypium hirsutum
  Clone ID: LIB3584-045-P1-K2-F8.pep
VYIRSWGLSATYQSYGSLISCLHEMLVYPLSLGQLDLLKDGDCSFAHHLS

SEQ ID NO: 84202 - protein, 130 aa, Gossypium hirsutum
  unsure (1)..(130): unsure at all Xaa locations
  Clone ID: LIB3584-045-P1-K2-G12.pep
AELPPVQENIDKLEKAINEGSSYGAHQMYKSISARYVSAERYSEGLDLLESCSCLQLKHGQATCGAXLSLYLFVDTLVKGKIPYNXHILDRVKKMYEVSTKEHLASNMSDDEDVRESTEALVAAKTRLEG

SEQ ID NO: 84203 - protein, 137 aa, Gossypium hirsutum
  Clone ID: LIB3584-045-P1-K2-G7.pep
KNRFQAFGFVDGGWWSCESLGAEIHGFHTLQGGTIVLFDRKMPRNFRKDGYNWKKKKDGKTIKEAHEHLKVGDKDRIHVYYAHGEDNSTFVRRCYWLLDKSLEQIVLGHYRETKEVSLATHSNSSLLTDQSTPLLVT

SEQ ID NO: 84204 - protein, 62 aa, Gossypium hirsutum
  Clone ID: LIB3584-045-P1-K2-G8.pep
HESNTIDVINCIEGSSSSLKIARGQHALIMTLAGSVRQCLKPSAASVAQHSIHRRVGDRNRP

SEQ ID NO: 84205 - protein, 77 aa, Gossypium hirsutum
  unsure (1)..(77): unsure at all Xaa locations
  Clone ID: LIB3584-045-P1-K2-H1.pep
GRSVSASSVNNQLTTCGRSTSRSASWPSGLVASTRSKTTGSESTIRATIEESMSRALGAGRSGSVEQSPPVSTXTRG

SEQ ID NO: 84206 - protein, 167 aa, Gossypium hirsutum
  unsure (1)..(167): unsure at all Xaa locations
  Clone ID: LIB3584-045-P1-K2-H11.pep
MARSRINAAISHSHPHPNFQALTFVKNFRHIRSLLTQVDHISSGVDGILMDLGMSSMQVNNPARGFSVLANGPLDMRMDPQASLKAEDILNSWPDSEVGRILRDYGEERNWRLLQNKLAQARLQGGLHSTGELGDVIRSTTPGTKGGRQGWIKTATXVFQALRIAVN

SEQ ID NO: 84207 - protein, 152 aa, Gossypium hirsutum
  Clone ID: LIB3584-045-P1-K2-H5.pep
AEVSSEWSIVPGRGGRPTLASLQPGGTVSFEHRNLKGLNRSILGSLTTSNCVNPQDDLAFKLEYVHPYVDGVYNPRNRTLRANCFNSRKLSPAFTGVPGVDEVPPIWVDRAGVKFNITENFTRQSIFTYRLVMEEITTRDESRHISTNGQRV

SEQ ID NO: 84208 - protein, 47 aa, Gossypium hirsutum
  Clone ID: LIB3584-046-P1-K2-A8.pep
FIIFCYIHDIDFLCGPRQNGLDTLPLYAHYRVMRIHQKLFLIFFWCL

SEQ ID NO: 84209 - protein, 88 aa, Gossypium hirsutum
  Clone ID: LIB3584-046-P1-K2-B2.pep
LPINLTLKTECFFSLSFVTLAAATTPASSPTRAPPNDNLKPPLCLCLFGFPGNLVQMLKLNLKIQLLIRSQISIVGLILVCHSSSFAS

SEQ ID NO: 84210 - protein, 183 aa, Gossypium hirsutum
  Clone ID: LIB3584-046-P1-K2-C8.pep
LVKEELECEQQWKSAMERSFKRMDNEVIKWNESVVGANCRCDLQSPECDAVGSTAVVSIVTSDKIVVANCGDSRAVLCRKGKPVPLSSDHKPDRPDELDRIQEAGGRVIYWDGPRVLGVLAMSRSIGDTYLKPYVSCEPEVTVTDRTVDDECLIIASDGLWDVVSNDTACRVARMCLRGKVDV

SEQ ID NO: 84211 - protein, 182 aa, Gossypium hirsutum
  Clone ID: LIB3584-046-P1-K2-D10.pep
PRVREHILQKSGKPPLPWFIRFRIVFEVASGLAFLHNSKPDPIVHRDLKPGNILLDRNYVSKIGDVGLAKLISDVVPDNITTYKDSILAGTLFYMDPEYQRTGTVRPKSDLYALGLTTLQLVTARHPNGLLLAVENAIKNCCLADILDKSITDWPLAETEELARIALKCSKLRCRDRPDLDT

SEQ ID NO: 84212 - protein, 46 aa, Gossypium hirsutum
  unsure (1)..(46): unsure at all Xaa locations
  Clone ID: LIB3584-046-P1-K2-D4.pep
GSQVLRYRPCMXERHSICLLVVSARIQFTRAARFTSVSDLGKTPGR

SEQ ID NO: 84213 - protein, 190 aa, Gossypium hirsutum
  unsure (1)..(190): unsure at all Xaa locations
  Clone ID: LIB3584-046-P1-K2-D5.pep
KLDDLCDLLNIPIMRTTVRKEELFAKLLEFLESPHATTDILLAEKEQKGKKRNATPSKNIASGETSDTSAKKRQSTPQGGEKRKRSSEVEEKDEDVESPASEDDSDEDDVDTTVKEESDDEXTNSKEEEDAPKKSSNKNTFKKNAMDRPDSKLXETSASGKKLTSAKSNRKSSGSTFKQGASDGERDSKL

SEQ ID NO: 84214 - protein, 64 aa, Gossypium hirsutum
  Clone ID: LIB3584-046-P1-K2-D8.pep
LRLIIQKSLAFNSIREHTTMPYKLHFSLKKENQAALVIQNQNALRNQVGQQMKKKLMMQLLENI

SEQ ID NO: 84215 - protein, 146 aa, Gossypium hirsutum
  Clone ID: LIB3584-046-P1-K2-E3.pep
LQAFLMEEPLAPEDMWYCARCKEHHQASKESDLRRLPEIAVIHLKRFYYNRFSKNKLETYVWTSPLDKCTNLSRSSLASREWRGYLDRYMLYAASNHYGSMGGGHYTALAHHGGGQWCEFDDSHVSPISLEKITTSAAYLLFTEEL

SEQ ID NO: 84216 - protein, 60 aa, Gossypium hirsutum
  Clone ID: LIB3584-046-P1-K2-E6.pep
HVLKTRISVYMIHKSSGYLINITQGGEEYHKGKENPINVLFYGYGHYYILESLPELISSK

SEQ ID NO: 84217 - protein, 156 aa, Gossypium hirsutum
  unsure (1)..(156): unsure at all Xaa locations
  Clone ID: LIB3584-046-P1-K2-E7.pep
ISIQSLIYLILVFHEIFYYYLLIYFLLQIQLFMQFFLLLFTHLLLSYFLFFLKLMLFILVHFSLXLVHFSLVIYLYIFSYIFHFICFKLPYLFYHYYDLIINIIMIIIVTLVLLYHSLIYLLYIIPILSFYIISSSLHYTLCLSIIGRLYTIPQVR

SEQ ID NO: 84218 - protein, 170 aa, Gossypium hirsutum
  Clone ID: LIB3584-046-P1-K2-E9.pep
DLDSPMVKRLRDDLLDLLEDSDSLPVTQDLASFIKSFEEEISAASSTSNAQEPLLNPKSDSSEPQPDLVYLLEASDDDLGLPPPMATTSSSEEIRSEVTELLRLDTDSSGTGELWEFGDQIPNNDLFEFGIADNYGGGHVTYGGLFEYPDVYYDSSEFSALLCRPETLSA

SEQ ID NO: 84219 - protein, 34 aa, Gossypium hirsutum
  Clone ID: LIB3584-046-P1-K2-F12.pep
EKGYDVASSGNDSFCSKKLSPHVIQQYSTSCRSS

SEQ ID NO: 84220 - protein, 71 aa, Gossypium hirsutum
  Clone ID: LIB3584-046-P1-K2-F4.pep
RCRSRIALIANGSASLRFAAYRAQSVSVTIQQRNIAKGASARARATVSVTVRVTSTAFEFNVQRQCESPFR

SEQ ID NO: 84221 - protein, 156 aa, Gossypium hirsutum
  unsure (1)..(156): unsure at all Xaa locations
  Clone ID: LIB3584-046-P1-K2-G12.pep
MHDLPFVYQENTCIRLDISYILGFLAXREDCIILHVSEKMKKDAHPFYPHGLMVDEDGSLHPXGHGWTFNVGGIAHCTTIVSAKNVHDTDGLTQHGVRKXLQAVEIKSMGIITLRGNLRFMLYAAMXSERGSLKPVFASAGHRVSLETADVMGNMT

SEQ ID NO: 84222 - protein, 184 aa, Gossypium hirsutum
  unsure (1)..(184): unsure at all Xaa locations
  Clone ID: LIB3584-046-P1-K2-G5.pep
IIKSLIWVLGCEFNTQVMVKSHAVSALKSIIEIASSVVLERLEPKFFEMIVGVLKQCTTRITQRGINSALHVLLDACPXGRNRLMMVESGAVSALIELELGSPEKRTTELILGILFHLCSCADGRVEFLRHKGGIAVVTKRIMRVSPAADDRAVMILSLISKFSATSWVVHEMLGGGTVTKLCM

SEQ ID NO: 84223 - protein, 173 aa, Gossypium hirsutum
  unsure (1)..(173): unsure at all Xaa locations
  Clone ID: LIB3584-053-P1-K2-A10.pep
LRRAELKTFVDFHGNEAGKGGDLTHDETTIIAGALEMTEKTAKVAMTPISNAFSLDLDTTLDLETLNKVMTMGHSTVPVYYGNPKNIIGLVLVKNLLTIDSEGPAPMRKIIIRKIPRVXADMPLYDILNESQKGHSHIAEEYKDLNKSKERLEFNDSCKKRRGEPEMSRNDDR

SEQ ID NO: 84224 - protein, 62 aa, Gossypium hirsutum
  Clone ID: LIB3584-053-P1-K2-A3.pep
QDSGYPCFKGGPRAIQNLRKRFHLSLTEEQCVSLVLSLISSSLDAWRTRQYDYYQRVLNGIL

SEQ ID NO: 84225 - protein, 64 aa, Gossypium hirsutum
  Clone ID: LIB3584-053-P1-K2-A5.pep
EAMGLSMDLVTLPWWLQGDEFGETGSNTVTLPYSCCIDLPALLAGKLYSIDFCMCISLQFVLSD

SEQ ID NO: 84226 - protein, 45 aa, Gossypium hirsutum
  Clone ID: LIB3584-053-P1-K2-C11.pep
QKNVPIILDQTYRHNFYKALWILHIPKKIIIHIWRLFDNLLSLFL

SEQ ID NO: 84227 - protein, 55 aa, Gossypium hirsutum
  Clone ID: LIB3584-053-P1-K2-C2.pep
HFCRFPQYRFETIVASSLINPRLHRRSVHQPVCVCGCIPIDTSITATDAWVTGNP

SEQ ID NO: 84228 - protein, 176 aa, Gossypium hirsutum
  unsure (1)..(176): unsure at all Xaa locations
  Clone ID: LIB3584-053-P1-K2-C8.pep
HASGLVLDATAATWLRVVTPTCVWKTMRCLDLGTEKKLKKSIKGVDEFAEEVIRTRKKELSLQTEDKKQRSDLITVFMRLKDEQRKPFSDKFLRDIXLNFILAGRDTSTGAWSWFFWLLEKNPVVEXKILAEICKNINERDDMKNGADLKSPLIFRPEEDQEMDYLKASLSEALRL

SEQ ID NO: 84229 - protein, 124 aa, Gossypium hirsutum
  unsure (1)..(124): unsure at all Xaa locations
  Clone ID: LIB3584-053-P1-K2-D11.pep
EKEDDNSEAEHDQEEERRSAHFRKIRSWLTRGDIFVVSANFPGTXVAYQNQNLTITGFSLYNQNIIPDHSQRIYATVKIXHVKQWDRQSHALAFGMSLRLLDDIFNSDRXECYFLTRQRQRAFE

SEQ ID NO: 84230 - protein, 175 aa, Gossypium hirsutum
  unsure (1)..(175): unsure at all Xaa locations
  Clone ID: LIB3584-053-P1-K2-D12.pep
HACGSESGSLSTVSREDNMVVSSEDSSCPDESELELALGLCLDGFKMHQVSXGGQFARISTAKDFPSVISASPSPSSSSSSSSSSSSSSLSTANVTAGTKRTADSVAAANSSSQVAGWPPIRVYRMNSMVNQAKNQTTEGFISTMENHKSETSTVEKGTTGISSYHNSGNAKLIK

SEQ ID NO: 84231 - protein, 51 aa, Gossypium hirsutum
  Clone ID: LIB3584-053-P1-K2-D4.pep
LLKLSSPPYLPFMFKHLQQQLLVGPTPSPIFFFNQRVEVIFGLSALMSTFF

SEQ ID NO: 84232 - protein, 181 aa, Gossypium hirsutum
  Clone ID: LIB3584-053-P1-K2-D9.pep
NSFAEAATEALKLGFGEPIAISAETGLGMTALHESLQPMLENYMAKVLDGKSSQDENLSQDNDSSKDDESKLPLQLAIVGRPNVWKSTLLNVLLQEDRVLVGPEAGLTRDSVRAQFQYQGRTVYLVDTAGWLQRGDRHKGPNSLSVMQSRKNLMRAHIAALVLDAEEIAKARRSMTHAEVV

SEQ ID NO: 84233 - protein, 62 aa, Gossypium hirsutum
  Clone ID: LIB3584-053-P1-K2-E1.pep
QKSFYLKGNKYSYDNIFVLDFYIKSIIQKKKQINPKKNHKWRLEPKTPKSSKSQNCHFNIKM

SEQ ID NO: 84234 - protein, 173 aa, Gossypium hirsutum
  Clone ID: LIB3584-053-P1-K2-E3.pep
PTRPKQAKQHSKGLSILHSNTDLLAYLQSTLDTLDDEAGIKDCYLDLGSFPEDHQTPATALIDMWVEQYKLDEDCDAFIKLHELSIRNLVNLVVMRKDDASEADSFYNDHFVMQHDLLRELAIYQSSFDPIEKRRRIIVELSRNNFPNWWSEEKQQPLGAHLLSISTDETFSY

SEQ ID NO: 84235 - protein, 78 aa, Gossypium hirsutum
  Clone ID: LIB3584-053-P1-K2-E9.pep
FYSFMHSCFYFFFFGSGIFCKRLSCSYFFFFQSSEKYVAYKMPPLIQIANTWPIVSHSFSFQICTFPRKNVIKNYKKH

SEQ ID NO: 84236 - protein, 166 aa, Gossypium hirsutum
  Clone ID: LIB3584-053-P1-K2-F7.pep
MAPTKNVRTISQEAFDELVKENIDDLGMDPAEALEDAIQTLSLQGVDLSGIVKCVPGEGGIKDHPAMQCLDKLKQLNADSKDQFGGQDLVQITALLNDLSELCISNKEDSGNAVIVAKNGGIELVCLICSKIPTESRQCLVSCFKAMASLLTDVQSTESFRASGGP

SEQ ID NO: 84237 - protein, 77 aa, Gossypium hirsutum
  Clone ID: LIB3584-053-P1-K2-F9.pep
ISDIQYHLLCMASAFLFCATLNALSQFAFFSMTEISILLFIFIKKLHNCIQLCIFPLDDGYMLYNLTPREKIEYPKY

SEQ ID NO: 84238 - protein, 167 aa, Gossypium hirsutum
  unsure (1)..(167): unsure at all Xaa locations
  Clone ID: LIB3584-053-P1-K2-G10.pep
SSVPAADDFKVTGILTNGPCLFTAITHGTGLRSREEAPYQNRQRELAXDELXAQVVNELLKRREETQWYIEGDFDAYVKEIQQPYVRGXQPELLIASHVWKTQIPAYMIHRSSTNLINIAIYGEEYLKEKENPINVLFHRYGHYYILESWPELMSSISRHRSLGLVY

SEQ ID NO: 84239 - protein, 65 aa, Gossypium hirsutum
  Clone ID: LIB3584-054-P1-K2-A12.pep
AWIEHHRIIPKPIIIRYLLSSPFDDINDHRSTTFLPLNPLLASACNQTNPSDTGPISVYAKHIIK

SEQ ID NO: 84240 - protein, 83 aa, Gossypium hirsutum
  Clone ID: LIB3584-054-P1-K2-A4.pep
KHLKTLKFEGDALLVCINCRSELKLKCAWNGRPKDDCPWQAWKEESILEVMQSHGYPVRSDFSLPLLIMKCIPFANVYNFFFH

SEQ ID NO: 84241 - protein, 88 aa, Gossypium hirsutum
  Clone ID: LIB3584-054-P1-K2-A8.pep
ISLTQKQLHEEHDNQHKMDELLETHIKFLETLGIAGVSHHSLLFSKTAPVQVVEERRRRLMGKKKIWVVPNIQSSSFFLVETGKPDGG

SEQ ID NO: 84242 - protein, 142 aa, Gossypium hirsutum
  Clone ID: LIB3584-054-P1-K2-B10.pep
RNLLRLYGFCITATERLLVYPYMSNGSVATRLKAKPALDGGTRKRMALGAARGLLFLHDQCDPKIIHRDVKAANILLDDDCEAIVGDFGLAKLLDHQESHVTTAVRGTVGHIAPEYLSTGQSSEKTDVFGFGILLLELISGL

SEQ ID NO: 84243 - protein, 144 aa, Gossypium hirsutum
  unsure (1)..(144): unsure at all Xaa locations
  Clone ID: LIB3584-054-P1-K2-B2.pep
PTRPITMKLKAKGEICSVPHGLVVWSTGVETRPFVKDFMGQIGQANRRVLATDEWLRVKGCEDVYALGDCATINQRKVMEDIAAIFXAADKDNSGFLTVEEFKDVIDDILERYPQVEHYLKSXHLRDVTDLMKDSIGNDIDAVD

SEQ ID NO: 84244 - protein, 146 aa, Gossypium hirsutum
  Clone ID: LIB3584-054-P1-K2-C12.pep
LQGHFPLDGPGRPLPSNLSLSQLMNYGPRIFPVAPLQSVSSRPASLYQRYVDEMPRYRSGTGTYLPNLKASVRERHSANSRREKHNYDRNGQQGDREGNWNGNSKYRAAGRSQSRNQNEKSKFSFDQLADVGGESRTERPGSRRHD

SEQ ID NO: 84245 - protein, 152 aa, Gossypium hirsutum
  Clone ID: LIB3584-054-P1-K2-C6.pep
QFMENWCYHRDTLMSIAKHYQTGESIPEEVYLKLLAARTFRAGSLSLRQIRFASLDLELHTKYIPDGPESVYDVDQRVSRKTQVIPPLPEDRFLCGFNHIFAGGYAAGYYSYKWAEVLSADAFSAFEDAGLEDSKAVKETGHKFRETVLALG

SEQ ID NO: 84246 - protein, 140 aa, Gossypium hirsutum
  Clone ID: LIB3584-054-P1-K2-D10.pep
MASQSPPTTAFFTRATLSTFTRRPWRVFLSLSSFARPISFGDASARMKRNLNYFRVNYAMIILVILFLSLLWQPISMIVFLVVFVAWFFLYFFRDDPLVILNRSIDDRIVLAILAVITIVALVLTGVWLNVLVSVLIGAF

SEQ ID NO: 84247 - protein, 161 aa, Gossypium hirsutum
  Clone ID: LIB3584-054-P1-K2-D4.pep
MPPTLGLGQLPPISSFPENHRRVLENIMMRTGSGSGSGNLYKKKSKVEGWSEDELDFLWIGVRRHGRGSWDAMLRDPRLRFSKYKTSEDLAARWEEEQLKILDGPAFPVQKFPKLTKTTKPSSLFPSIPDGMMTRALQGSRFVAPSKFQTHLTDMKLGFGD

SEQ ID NO: 84248 - protein, 66 aa, Gossypium hirsutum
  unsure (1)..(66): unsure at all Xaa locations
  Clone ID: LIB3584-054-P1-K2-E5.pep
QRHMGLVKILSKPQFLSTFSFTRKKTSLRRGELGRHVCHFFXASGCTHNXTPPAPPLLYNIERWFT

SEQ ID NO: 84249 - protein, 136 aa, Gossypium hirsutum
  Clone ID: LIB3584-054-P1-K2-E7.pep
YLIMEYLPGGDMMTLLMRKDILTEDEARFYVAETVLAIESIHKHNYIHRDIKPDNLLLDRHGHLRLSDFGLCKPLDCSTIQENDFIVGGNSNESGESDERPAALKRTQQEQLEHWQKNRRTLAYSTVGTPDYIAPE

SEQ ID NO: 84250 - protein, 52 aa, Gossypium hirsutum
  Clone ID: LIB3584-054-P1-K2-F5.pep
NFYLTFTLISNLILTKPIYFSFSIHTFLLLNFLSNSHLTCWSQFIPGPDPNI

SEQ ID NO: 84251 - protein, 121 aa, Gossypium hirsutum
  unsure (1)..(121): unsure at all Xaa locations
  Clone ID: LIB3584-054-P1-K2-G12.pep
GRVGKPLATSRTKSYRLILLAMRLALGGAVDKGHNIPSLWPKRKRLWKLLGALVAAAEXVPESAYTLNIACNDLWEDLQSESHQISNQMNHISKIVRSNEXSHSFIKANVRVTVGVTRGYM

SEQ ID NO: 84252 - protein, 128 aa, Gossypium hirsutum
  Clone ID: LIB3584-054-P1-K2-G8.pep
DILGTIDFIFGNAAVVFQSCNILPRQPLANQFNTITAQGKKDPNQNTGICIQKCSITAFGNLTAKTYLGRPWKEFSTTVIMQSKIGALLDPVGWKGWVANVDPPISIFYAEYQNSGPGSNVDNKVKWA

SEQ ID NO: 84253 - protein, 135 aa, Gossypium hirsutum
  Clone ID: LIB3584-054-P1-K2-H1.pep
PTRPREIYLQRCAKGYWDFLDSPKIDRHPVLVAASVGSYGAYLADGSEYSGNYGASVTLETLKEFHRRRLQILANSGADLIAFETIPNKLEAQAYVELLKEENIDIPAWFSFSSTDGTNVVSGDPITECAKIADS

SEQ ID NO: 84254 - protein, 48 aa, Gossypium hirsutum
  Clone ID: LIB3584-054-P1-K2-H10.pep
MIGIMINKNLLQLCKYLIYELIFEMLIIIMFIYVYWESMYGYNDKWNI

SEQ ID NO: 84255 - protein, 70 aa, Gossypium hirsutum
  Clone ID: LIB3584-054-P1-K2-H6.pep
NTTHQVYVLCIFQIRVELGLEPLAKEYGWTQSERTNEFRTPCPVFDNENFIDDGNEVSSNHQSQVRTLFL

SEQ ID NO: 84256 - protein, 62 aa, Gossypium hirsutum
  Clone ID: LIB3584-055-P1-K2-A3.pep
GTSLKNKKRAEKWDLFKKHELEVLNKKKVHNLMLIYTRAKQNSKESNLLDVGGDRLKESTNL

SEQ ID NO: 84257 - protein, 104 aa, Gossypium hirsutum
  unsure (1)..(104): unsure at all Xaa locations
  Clone ID: LIB3584-055-P1-K2-A7.pep
MSAEHLLLTVDDVDDHNHDGGVMKFQIRDLRKVSDAGVPVLNGINIGSPKGMIVGIIAPSGRGXSTLLTALNRLWEPPCDTVFLDGRDIVDLDVLGLRRKVGML

SEQ ID NO: 84258 - protein, 52 aa, Gossypium hirsutum
  Clone ID: LIB3584-055-P1-K2-C3.pep
IWLYLPLFIFYRADKKIICLIFLTSIKLNFLWGVLFLINKFLQRFFFPNFNI

SEQ ID NO: 84259 - protein, 108 aa, Gossypium hirsutum
  Clone ID: LIB3584-055-P1-K2-D7.pep
QAPPGNAKAGEKIFKTKCAQCHTVDKGAGHKQGPNLNGLFGRQSGTTPGYSYSAANKNMAVIWEEKTLYDYLLNPKKYIPGTKMVFPGLKKPQDRADLIAYLKESTAS

SEQ ID NO: 84260 - protein, 55 aa, Gossypium hirsutum
  unsure (1)..(55): unsure at all Xaa locations
  Clone ID: LIB3584-055-P1-K2-E1.pep
EVSNTCPFCFQLSNQFLSRIVCLIPLSLFTGFIIFFLDFFSSINXVXSKFLEQDD

SEQ ID NO: 84261 - protein, 154 aa, Gossypium hirsutum
  Clone ID: LIB3584-055-P1-K2-E11.pep
HNSQGKNEFLAELLIIGTLRHRNLVRLQGWCHEKGEILLVYDLMPKGSLDKALFEAKTPLPWPERQKILLGVASALAYLHQECDRQVIHRDVKTSNIMLDEAYNAKLGDFGLARQVEHDKSPDATVAAGTMGYLAPEYLLTGRATDKTDVFSYG

SEQ ID NO: 84262 - protein, 173 aa, Gossypium hirsutum
  Clone ID: LIB3584-055-P1-K2-E7.pep
NKATAFGGVGILVKSTAALTRIDNCYLDFTAIVMEDPVQVHVTNGLFLGDANVVFKPIKGKISGLNIVNNMFNGNPGKMVPNIQLDGTFSTVDQVVIQHNNVNGMSLKSTVGEMTVAGNGTKWVADFSSLLVFPDRINHFQYSFHIQKEVSAGFPVHAVTNTSNNIVVVESDN

SEQ ID NO: 84263 - protein, 60 aa, Gossypium hirsutum
  Clone ID: LIB3584-055-P1-K2-E8.pep
LCIPHSLLTNPTPNNLVSYFHSNFFLPSKSSTNPIITVQHPFSCTPTRPRTYLDNNYKFT

SEQ ID NO: 84264 - protein, 122 aa, Gossypium hirsutum
  unsure (1)..(122): unsure at all Xaa locations
  Clone ID: LIB3584-055-P1-K2-F11.pep
VKSEIQTRLIPLLNSVSGQVLDIQDVFRRFSLDNXCKISFGFDPCCLELSLPMPASEFAEAFDLASKLSAXRGLSSSSLIWKVKRVLNLGSEKELKSAIKMVDQFAQRMINQRRELGFFRQE

SEQ ID NO: 84265 - protein, 163 aa, Gossypium hirsutum
  Clone ID: LIB3584-055-P1-K2-F2.pep
GDRVAQLLHVQSVIPFLQNNDDSMQQEILIVNTHLLFPHDSSLSIVRLHQVYKILQYLETYQRENKLSQVPVMLCGDWNGSKRGHVYKFLRSQGFVSSYDIAHEYTDSDHKWVSHRNHRGNICGVDFIWLRNPNKSIKPLKISWAEAAFGIIKYQLQKAQLNE

SEQ ID NO: 84266 - protein, 91 aa, Gossypium hirsutum
  unsure (1)..(91): unsure at all Xaa locations
  Clone ID: LIB3584-055-P1-K2-H1.pep
EGEAFNRRAKSLSKNRMKFGHVCKSRNLPDQHYSSKCTERGIRXITNKFLNGIPKFVKIVEVGPRDGLQNEKNIVPTSVKXELIRRLVSSG

SEQ ID NO: 84267 - protein, 52 aa, Gossypium hirsutum
  Clone ID: LIB3584-055-P1-K2-H12.pep
SIMNTAKGLKTWITKKVRYLDTFISCFFLVHNFLFDADVTHDDVNFNALNRY

SEQ ID NO: 84268 - protein, 119 aa, Gossypium hirsutum
  unsure (1)..(119): unsure at all Xaa locations
  Clone ID: LIB3584-055-P1-K2-H2.pep
PRVRLVLLGLVCIGYTFYLRSCVLKQRFILLSYFSGPWIIRITFILFTIWWGFGEIIRLNYLRRPGRVLNVLDFKWQENVCKFYIVSNLGXAEPCLFLTLMFLLRAPLQNIDTGILSXK

SEQ ID NO: 84269 - protein, 115 aa, Gossypium hirsutum
  Clone ID: LIB3583-057-P1-K1-A6.pep
MDTDDTNHGGKGSMSTVGGFVRVGGESLAVEKDSDNLNLNFRHSMLQMILEKEIYSKDDLRELLNCFLQLNSPYYHGIIIRAFTEIWNGVFNVKPGGGGAGASPEQHFGFRPRDF

SEQ ID NO: 84270 - protein, 71 aa, Gossypium hirsutum
  Clone ID: LIB3583-057-P1-K1-B10.pep
YIYICKNNFSGKYFQEIYQITENILHRLIQTPKIFFSKSFSRKVNYFLKIIFRKIFLLPNKQTLIILSIWI

SEQ ID NO: 84271 - protein, 89 aa, Gossypium hirsutum
  Clone ID: LIB3583-057-P1-K1-B2.pep
KFVVSAKNGGVESRKSSLHDFPPKSRGKKGKSGVGFPLSINRSPFDQSTSSPACSRRRSTLFFQNTLVISFRNHNPVMFHSISCSNLKH

SEQ ID NO: 84272 - protein, 190 aa, Gossypium hirsutum
  unsure (1)..(190): unsure at all Xaa locations
  Clone ID: LIB3583-057-P1-K1-B3.pep
XVEMPYESYNGVNVRLRYILKVTVSRNYVSNIVEYQDFVVRNYTPPPSINNSIKMEVGIEDCLHIEFEYSKSKYHLKDVIIGKIYFLLVRIKLKNMELEIRRRESTGSGPNTYVETETLAKFELMDGAPVRGESIPIRLFLSPYELTPTYRNINNKFSVKYYLNLVLVDEEDRRYFKQQEITMYRNLEAS

SEQ ID NO: 84273 - protein, 173 aa, Gossypium hirsutum
  Clone ID: LIB3583-057-P1-K1-B4.pep
DALEVIYDHYCNHIQIDDDEDLYTAAVRFRLLREHGFNVQCETFNKFKNEKGKFKESLISDVKGMLELYEAAHFQLHEENLLEEALSFTTFHLKLAETTVDYPLSTQIANALKRPLRKSLPRLVAWSYISIYEGYGTQDKNLMKFAKLDFKMVQHLHMKEISEIYRWWKGLDV

SEQ ID NO: 84274 - protein, 108 aa, Gossypium hirsutum
  Clone ID: LIB3583-057-P1-K1-B5.pep
KLAPPFKNVEFELEFGKGISRERESIDLATKHKLVTKSGAFYSFNDWKLHGKEAFRRFLAENRSALEELVMKLREKLLDAESKKERQTDISDDCGGNCGVEKFCVFNG

SEQ ID NO: 84275 - protein, 151 aa, Gossypium hirsutum
  Clone ID: LIB3583-057-P1-K1-D11.pep
PRVRDECGFTDRKITGVCDPSVGHVAITLDVVYLRGSIAAVHSILQHSLCPENIFFHFIVSDADLETLVRSTIPQLKFKVYYFDPEIVRNLISSSVRQALEQPLNYARNYLADLLEPCVRRVIYLDSDLVVVDDITKLWITNLGSRTIGAP

SEQ ID NO: 84276 - protein, 74 aa, Gossypium hirsutum
  Clone ID: LIB3583-057-P1-K1-D12.pep
EGDPPIVHRKNQLQSIHLKANRHSLKMFLQGYFLRFSNQGLKALGWHDKSYYVGISLFIIQLLYVSHQGVLEIE

SEQ ID NO: 84277 - protein, 118 aa, Gossypium hirsutum
  Clone ID: LIB3583-057-P1-K1-D5.pep
PGFPDNIKYDGDGHYWIALPSANSVPLDIAFRYPFIRKVMAIAMKYIGRLPTEKDAGVLVVDLEGKPVAHYHDHRLSMITSGMKIGNRVYCGSVRHPHILKLDLAKENLWLSSTITMQ

SEQ ID NO: 84278 - protein, 45 aa, Gossypium hirsutum
  Clone ID: LIB3583-057-P1-K1-E10.pep
VLSLLNLLNSLLNKMTLYFLNYKLCQIGSNMLLNNELNGFSIIGT

SEQ ID NO: 84279 - protein, 101 aa, Gossypium hirsutum
  Clone ID: LIB3583-057-P1-K1-F12.pep
ACQAIWIRRILDDLKQTQVEATTIYCDNQSTIAMTKNPVYHSRTRHIETRHHFIRELVAKGDIKLEHCCTEEQVADLFTKPLPPKKFMYLRELLGVGEFLP

SEQ ID NO: 84280 - protein, 195 aa, Gossypium hirsutum
  unsure (1)..(195): unsure at all Xaa locations
  Clone ID: LIB3583-057-P1-K1-F2.pep
VEANYSVSAPKVMYYSARGPDPEDGGLDNADIMKPNLVAPGNSIWAAWSTLGMESVEFQGESFAMMSGTSMAAPHIAGLAALIKQKFPHFSPAAIASALSTTASLYDKNGSPIMAQRAYTNPDLNQSPATPXDMGNGFVNASSALDPXLIFESTYEDYMFFLCGINGSIPIVFNHTGQNCQLYNSTVTVADLNLP

SEQ ID NO: 84281 - protein, 41 aa, Gossypium hirsutum
  unsure (1)..(41): unsure at all Xaa locations
  Clone ID: LIB3583-057-P1-K1-F5.pep
SGXXXLWMAPISDNSPTDAARAXLVIVLMSSFTVQTRRVGG

SEQ ID NO: 84282 - protein, 88 aa, Gossypium hirsutum
  Clone ID: LIB3583-057-P1-K1-F6.pep
NQTFTSLSISCSKLNPTFSDGILIIAEIPPKQDKKERLSTCVNITTDEVISRSYGRDLERGNNILKEGFNLRNRPPFRLVELLNFPVR

SEQ ID NO: 84283 - protein, 54 aa, Gossypium hirsutum
  Clone ID: LIB3583-057-P1-K1-G4.pep
RNEGVKVTTNKSLNSRGHICIKSTGKMSIKPKQEKNKSQVLISCTNNPGNFVCP

SEQ ID NO: 84284 - protein, 147 aa, Gossypium hirsutum
  unsure (1)..(147): unsure at all Xaa locations
  Clone ID: LIB3583-057-P1-K1-H9.pep
IYCSYGVGIPTERSNVYKLSPSSECKHIPYQIDTLVDEEDGSCLKSGVYFADGDESVPVLSAGFMCAKGWKGRTRFNPSGINTYVREYQSKPPTSGIKSTAHVDIMGNIALIEDKLRVAAGATGEEIGGDKVYSDILRMSERINXQL

SEQ ID NO: 84285 - protein, 165 aa, Gossypium hirsutum
  Clone ID: LIB3583-058-P1-K1-A1.pep
RFRAYDFGQKIDRKVEFGPTLDMKPFVSGSNEGDLKYTLYGVLVHCGWSTHSGHYYCFVRTSSGMWYSLDDNRVVQVSERTVLEQKAYMLFYVRDRRNTAPRKTTGILQRDNLKANVNGRSVLNQNLKEHMQTCSVGKKLSASGTCAAMTPKVIVNGDLSKETIM

SEQ ID NO: 84286 - protein, 66 aa, Gossypium hirsutum
  Clone ID: LIB3583-058-P1-K1-A10.pep
RNRRDASKNLLLSQPYLTLWVRASFDYTMVNQAYCQKLGLLTPMSYNWQQRSKLNRSLCYHKGSRS

SEQ ID NO: 84287 - protein, 93 aa, Gossypium hirsutum
  unsure (1)..(93): unsure at all Xaa locations
  Clone ID: LIB3583-058-P1-K1-B4.pep
MESSRNAIEASSPATSPLEKETTPATSPPEKVTTAATSPPEKGTTPATSPPENETTPATSPPEKETTPVTFPPEKVTTSSTSPLEKVTTXATA

SEQ ID NO: 84288 - protein, 124 aa, Gossypium hirsutum
  unsure (1)..(124): unsure at all Xaa locations
  Clone ID: LIB3583-058-P1-K1-B5.pep
GVYKSNYNXIMDALTLIHTVIDTGAAKRAGTLPGTXPHREYRSGSNSXLDQLLGGGWGGSMSTSMYPRETRRETTTYMDTHMPXTVLLTEIARENADYITCYRNKLRYRDGACDTAYSTDDGAH

SEQ ID NO: 84289 - protein, 34 aa, Gossypium hirsutum
  Clone ID: LIB3583-058-P1-K1-B7.pep
AHYDALPYARLMGLFMPSLHPVLVLCSRLEPVIA

SEQ ID NO: 84290 - protein, 78 aa, Gossypium hirsutum
  Clone ID: LIB3583-058-P1-K1-C7.pep
SDEIRSFEQDGDAWDSICTVNGYSDCLSLSLSLFLFCLENKISGYVKKAFLVCSTFVLNNKESLPTAEVGTRGARVPT

SEQ ID NO: 84291 - protein, 127 aa, Gossypium hirsutum
  Clone ID: LIB3583-058-P1-K1-D4.pep
GRFTHSITTYLCLMNHSELDKTLGYSHIIQCQRPRRGLTCNHISMPLSQTGSYSHIYIGVTYRCHGLTRTSHIRILCHGICIPAIPKVHTGLSDVVTRSKRIHEHGYQACTHSTFAYIYSYISFQHI

SEQ ID NO: 84292 - protein, 66 aa, Gossypium hirsutum
  Clone ID: LIB3583-058-P1-K1-D9.pep
KVNYGRGLIICNFFSRILDHRCFVHFYYIEEMKNLLITKKKKKKKKKKKKKKKKKKKRRENKKKRK

SEQ ID NO: 84293 - protein, 190 aa, Gossypium hirsutum
  Clone ID: LIB3583-058-P1-K1-E12.pep
VPMTAFLATNIFIYTAPFKAVAEACEVDNSIFNMPLLLFVALIGATVGGLLARQRKGELRRLNEQLRQINAALKRQAKIESYAPTLSYTPVVGRISEEDIIVDPRKEELISCLKSGKNFLRNQEHEKAFLKFQTALELAKSLKDPIEEKKAARGLGASLQRQGKYRDAIKYHSMVLAISDREREESGNTE

SEQ ID NO: 84294 - protein, 111 aa, Gossypium hirsutum
  unsure (1)..(111): unsure at all Xaa locations
  Clone ID: LIB3583-058-P1-K1-F2.pep
QICRHYSLTKHNLRSVHFLKLKLITIMLEAHHHSTHFDPDKRLMTHYLHFKKEKSDKNPDLYRALAKGQIPXLIDIPCYDSRLCPXTSLNLQPGXVLIVRNITSMVPSYDN

SEQ ID NO: 84295 - protein, 55 aa, Gossypium hirsutum
  Clone ID: LIB3583-058-P1-K1-F6.pep
IGKKLNSMHANCMLQQLPRQLKISLKFHLIPSLILAQRCNKTTKKEKVKNPLSFI

SEQ ID NO: 84296 - protein, 121 aa, Gossypium hirsutum
  Clone ID: LIB3583-058-P1-K1-F8.pep
MTDELTSRSEIQKELERVRHRLRDRQRRQSMSLEEKDKHLARRQMNYQLPRQRAVMARINPTISPIQLPLTNALTCDAGSDVSARCNADVAAAADAFLRTDHGLHLRLILYTRNFHSQLPF

SEQ ID NO: 84297 - protein, 48 aa, Gossypium hirsutum
  Clone ID: LIB3583-058-P1-K1-F9.pep
DNMFIRICILNKNLFFFKVCNDNDHNGCTTQSLSRINITSQLEYTKLK

SEQ ID NO: 84298 - protein, 112 aa, Gossypium hirsutum
  Clone ID: LIB3583-058-P1-K1-G4.pep
PNKDVVDLNLHDRILHLIFTWIMVPTNKHYDNWIQHCFHINRHFDLVLVIFLNIVNIIRFSVSSNKTLRYGTFFSNIFRALKLKVHVDLGRASTFYFDISASYSCDWIKRDS

SEQ ID NO: 84299 - protein, 89 aa, Gossypium hirsutum
  unsure (1)..(89): unsure at all Xaa locations
  Clone ID: LIB3583-058-P1-K1-G6.pep
FVKINFDAAYNWRSCHSALEIVVRNSEGKDLLACSEIHQQVASAFVAEALACRRATXIGIDMQWKNIIIEGDSVSIIIKNARRTVRINH

SEQ ID NO: 84300 - protein, 124 aa, Gossypium hirsutum
  unsure (1)..(124): unsure at all Xaa locations
  Clone ID: LIB3583-058-P1-K1-H3.pep
MLKAPKDQGSCPYNKPHYYRKASTPHMFTALNKHICSXFAKISTLKKKSTHLQDTITTXHSATWLSLINQXEALSLQLYPDSCSPSSSAXGRSSSDIYDCNEYDVQGAEYDPNFSVQDLKPRAS

SEQ ID NO: 84301 - protein, 158 aa, Gossypium hirsutum
  Clone ID: LIB3583-058-P1-K1-H4.pep
MMYPLQNCLRSIWFLVKPSILCSLFHASHESSSLALPVESSHYTGSGSGAIGRCDVDVLVSKVHAGTSEDEVFQCLVNDGECNSIQLSHDLIDKLLHRFRDDWKSALGAFKWAASRPDYKHSHQAYDTMVDILGKMKQMDRMKDFLEEMRKVTLYAYT

SEQ ID NO: 84302 - protein, 59 aa, Gossypium hirsutum
  Clone ID: LIB3584-026-P1-K1-A11.pep
ENLYCTLYCLMTPLTICNLSYTRHRHANFKLALALSGCWQIVSEDRDLESYACHEKDIK

SEQ ID NO: 84303 - protein, 78 aa, Gossypium hirsutum
  Clone ID: LIB3584-026-P1-K1-C2.pep
LPSSLFFPKLKTHLQSPPIHHPTCGLRSSSTPPPLHDTRWLFSSLRFFCNFRVRPKPFKSTSSSLQDFEVILIYLKSL

SEQ ID NO: 84304 - protein, 189 aa, Gossypium hirsutum
  Clone ID: LIB3584-026-P1-K1-C4.pep
IDMESISLGGKEYLVKTHHGTVSVAVFGDQDKPALITYPDLALNHISCFQGLFFCPEASSLLLHNFCIYHISPPGHEFGAPPICPDGFMPSVDDLADQIVEVLNFFGLGAVMCMGVTAGAYILTLFAMKYRQRVLGLILISPLCRAPSWTEWLLNKVMSNLLYFYGMCGVVKELVLKRYFNKEVRGNVQ

SEQ ID NO: 84305 - protein, 180 aa, Gossypium hirsutum
  unsure (1)..(180): unsure at all Xaa locations
  Clone ID: LIB3584-026-P1-K1-D8.pep
EEVVSLLMHSVREIACSGLPKQRXDKLKRSKNGMKYGQVSLAAAMTRVKLAASLAASIVWLSGGHGLVQSLIKETLPSWFISVHRSDRDQGSGLVAMLGGYALAYFTVLCGAFAWGVDSSSSASKRRPKILGSHMEFLASALDGKISLGCDGATWHAYVSGFVSLMVGCTPNWVLEVDVD

SEQ ID NO: 84306 - protein, 157 aa, Gossypium hirsutum
  Clone ID: LIB3584-026-P1-K1-E10.pep
RLQLFYLSGILTVFFCGIVMSHWTWHNVTESSRVTTKHAFATLSFVAETFLFLYVGMDALDTEKWRFVSDSPGTSVAVSAVLMGLVMVGRAAFVFPLSFLSNLAKKSASEKISFREQIIIWWAGLMRGAVSMALAYNQFTRGGHTQLRGNAIMITST

SEQ ID NO: 84307 - protein, 146 aa, Gossypium hirsutum
  unsure (1)..(146): unsure at all Xaa locations
  Clone ID: LIB3584-026-P1-K1-E12.pep
ERTRVHPPLLTGLPDDLAIACLXIRVPRAEHRKLRVVCKKWYRLLAGNYFYSFTTSLETTEEWVHALKRDLDGKISWNASHPMHYMWQPLTAVSREYSEALGFGCAVLTGXHLYLLGGKDRQRSSMRHVILYKAQTNKWYRTPDML

SEQ ID NO: 84308 - protein, 48 aa, Gossypium hirsutum
  Clone ID: LIB3584-026-P1-K1-E5.pep
CEIPRKHLYFDERIGLGSYVQVYHADWNGTKFTVNKFLYQNFSGSAFP

SEQ ID NO: 84309 - protein, 107 aa, Gossypium hirsutum
  unsure (1)..(107): unsure at all Xaa locations
  Clone ID: LIB3584-026-P1-K1-G1.pep
KIVPPRSSFCVNEKVSDLLGDSPYAVXIKPGRHSVEIVATDDHRRIRDLRISTSMSSESSNRRKDSSWENEYKKGLRPILWLSPNFPLQTEELLPLLDILANRSKAF

SEQ ID NO: 84310 - protein, 34 aa, Gossypium hirsutum
  Clone ID: LIB3584-026-P1-K1-G3.pep
PSSGSALYITHTKATFMNSGLETTCRKKAASEWA

SEQ ID NO: 84311 - protein, 61 aa, Gossypium hirsutum
  unsure (1)..(61): unsure at all Xaa locations
  Clone ID: LIB3584-026-P1-K1-G7.pep
ISVAVPRDYTLLIERERXNIGIGYGTDDSGKDDRNLTYELSRTVTIMGTNNTAHVGRIYTL

SEQ ID NO: 84312 - protein, 143 aa, Gossypium hirsutum
  unsure (1)..(143): unsure at all Xaa locations
  Clone ID: LIB3584-026-P1-K1-H11.pep
FTIEFFRSVFLVQHGWMPRHAPXRVRSTLKLDKLDDVSNEWINADVLIFNTGQWWVPGKLFETGCYFQVGNSVKLGMSIPAAFKMALGTWASWVENTIDTNRTLVFFRTFEPSHWSEKSRRFCNVTQNPLLETEGRERSIFSE

SEQ ID NO: 84313 - protein, 71 aa, Gossypium hirsutum
  Clone ID: LIB3584-030-P1-K1-A5.pep
RGRADPRVRWVLSGLGHDYGLSTQSIKKAAVLHDNGNMKPWLDLGIPKYKVYWIKFLNPENQFLNECNVNP

SEQ ID NO: 84314 - protein, 185 aa, Gossypium hirsutum
  unsure (1)..(185): unsure at all Xaa locations
  Clone ID: LIB3584-030-P1-K1-A6.pep
RVRSYEAEEGGDDRTGAFTSGVGTRWVRAPDLLYGSIDYGLKVDWWSWGCIFSELLTVEPLFLGVSDIDQLGRIINVLGNXTEKVWPSCSKLPDYRTIFFAKIENPVSLEACLPNRSPDEISIVKRLVCYNPPNRATAMELLNDKYFNEEPLPLPVSELHVPLTKNDHDEDSPGGWNDYDGMGSD

SEQ ID NO: 84315 - protein, 55 aa, Gossypium hirsutum
  Clone ID: LIB3584-030-P1-K1-B5.pep
ATSFCSLASISWSGPDHHKILRQLPRLVQSNSHSNSDLESLTRRVTRRSARALPF

SEQ ID NO: 84316 - protein, 174 aa, Gossypium hirsutum
  Clone ID: LIB3584-030-P1-K1-C9.pep
HASADAWGGTQDLLEKVRVIEADTLSVIQGGMTAGSTTSESSCEAVRLCCKVLVERLVPLKQRLMEQIGSLEWETLILEAYRNSVNLSASSLYVPNFSTMHYLNYAATVSEVEVNLITGETTILQTDIIYDCGESLNLAVDLGQIEGAYVQGMGFFMLEEYTKNLDGLVITNNT

SEQ ID NO: 84317 - protein, 193 aa, Gossypium hirsutum
  Clone ID: LIB3584-030-P1-K1-D12.pep
HASAHASAHASDTVATPAANNNSNNNLSIIFDSPDEMGNDISASIDFSESPSFSVPPFLTHQDHFNLSLVQSQMQLPDVSAEGLSQYTTDTVGPLLGPPLPSVFDEDCLSSVPSYVPLNSSSPSGSFLGPPMTSFMPAGTIADSSGVFAERILLNSELQPQDLEFQGDNAGIFCPDTVQRVFKPGDLQGLSSD

SEQ ID NO: 84318 - protein, 43 aa, Gossypium hirsutum
  Clone ID: LIB3584-030-P1-K1-D4.pep
AYPASWVFHHSELILIRLPNKNGYMLPPHQCHVLNPHVIVYIK

SEQ ID NO: 84319 - protein, 72 aa, Gossypium hirsutum
  Clone ID: LIB3584-030-P1-K1-D8.pep
TDAYAHAYHPKPPAYTLHYQILHTPTCERVYKLYYSQNTIHSLYNIQHSKNPNPTQHTSLSPYTTSPLNHIT

SEQ ID NO: 84320 - protein, 84 aa, Gossypium hirsutum
  unsure (1)..(84): unsure at all Xaa locations
  Clone ID: LIB3584-030-P1-K1-E11.pep
GXPPRPRRVRKNLTNFYLLKTQLLISNYAKNACCLSTRTCGNRCPICQIFPYIIKNTTTETIILPFTTPTMHFDVSYIEVVVKN

SEQ ID NO: 84321 - protein, 193 aa, Gossypium hirsutum
  Clone ID: LIB3584-030-P1-K1-E12.pep
HASVDAECFIVSTVNALRTPMVNAGMVLCDRHFGGINYPVGGVGGIAKSLAEGLIDQGSEILYKANVTNIIIDQGKAVGVKISDGREFFAQTTISNATRWDTFGKLLKAENLPKEEENFQKVYVKAPSFLSIHMGVKAGVLPPDTDCHHFVLEDDWTRLEEPYGSIFLSIPTVLDSSLAPKRRHILHIFTTSS

SEQ ID NO: 84322 - protein, 49 aa, Gossypium hirsutum
  unsure (1)..(49): unsure at all Xaa locations
  Clone ID: LIB3584-030-P1-K1-E2.pep
VRAKSGQNGGDDVVQKAFVKYLNPRLVDRSLAFDQXLITQLKKKKLPGN

SEQ ID NO: 84323 - protein, 45 aa, Gossypium hirsutum
  Clone ID: LIB3584-030-P1-K1-E3.pep
VMGYFGNGCVLKIVNDFFNYLVLTYSYWVIIAIIKARQMLLHKAV

SEQ ID NO: 84324 - protein, 44 aa, Gossypium hirsutum
  Clone ID: LIB3584-030-P1-K1-E4.pep
AFISSSNTILVVTLNQPTELGITISVLINSFESPSLSALQLLPL

SEQ ID NO: 84325 - protein, 102 aa, Gossypium hirsutum
  unsure (1)..(102): unsure at all Xaa locations
  Clone ID: LIB3584-030-P1-K1-E6.pep
ATRPLTGDIFGSARCDCGNQLTLARGHMEEADRRVLVNLRGHEGRAIVXGHKFRAYTXQDACLHTVEANVELGLPVDTREYGIXSQILRDLVCDNELILTIF

SEQ ID NO: 84326 - protein, 79 aa, Gossypium hirsutum
  Clone ID: LIB3584-030-P1-K1-E9.pep
ASTHASTHTSAHAYFHATFYSSHNFLSLGRCLLPSLYHIKLPIQTLPPHFKILILFLKILLIKSTYLTIYPITSNYIQH

SEQ ID NO: 84327 - protein, 195 aa, Gossypium hirsutum
  unsure (1)..(195): unsure at all Xaa locations
  Clone ID: LIB3584-030-P1-K1-F12.pep
ATSVVVNSTISNADHSKQIVFHIITNGVSYGAMQAWFLSNDFKGATIEVQNIEEFSWLNVSYAPIVKQLLDVGSRTYYFGENPNIEPKLRNPKYISLLNHLRFYIPEIYPQLEKIVFLDDDVVVQKDLTPLFSLDLHGNVNGAVETCLEAYHRYYKYLNFSNPIISSKFDPQACGWAFGMNVXDLIAWRKANVTA

SEQ ID NO: 84328 - protein, 83 aa, Gossypium hirsutum
  unsure (1)..(83): unsure at all Xaa locations
  Clone ID: LIB3584-030-P1-K1-F4.pep
RVLLHPETGLFGHSTNTAAASLRFKKLNYGKGYSTGFSAVSKAISLNPDSQIXRLNIADDVTQLIGKTPMVYLNNIVKCSVSN

SEQ ID NO: 84329 - protein, 193 aa, Gossypium hirsutum
  unsure (1)..(193): unsure at all Xaa locations
  Clone ID: LIB3584-030-P1-K1-F8.pep
NLEQIHEGLQGYDXLQKSSLMARKNFXKRFGQSPVLITSTLMENGGLPEGTNTNSLIKEAIHVISCGYEEKTEWGKEIGWIYGSVTEDILTGFKMHCRGWKSVYCVPKRPAFKGSAPINLSDRLHQVLRWALGSVEIFLSRHCPLWYGYAGKLKWLERLAYINTIVYPFTSIPLLAYCTNPAVCLLTGKFIIP

SEQ ID NO: 84330 - protein, 76 aa, Gossypium hirsutum
  Clone ID: LIB3584-030-P1-K1-H11.pep
ERLALVKAGREDRCQYQARTGGEQKKTGGLSNPQKEHKKYMPLAAKKAKAQRSRQEKNKKKSRSGKQFRGKKAWKQ

SEQ ID NO: 84331 - protein, 165 aa, Gossypium hirsutum
  unsure (1)..(165): unsure at all Xaa locations
  Clone ID: LIB3584-030-P1-K1-H4.pep
MGFIPISALMPNSPISHFTRQRGQFAPSVSFNASGNFDLSLYGDEDDSSQAEPTMPPSEGRLETIIDNDVIPRLDLSPFQSATGITSPLSAEPKEYLEKTIGFTINYTRDDPHDPRXLSESPDIRLWFVRLDAVYPWLPELIDWRADELARYAAMLVPHQMSMTM

SEQ ID NO: 84332 - protein, 124 aa, Gossypium hirsutum
  unsure (1)..(124): unsure at all Xaa locations
  Clone ID: LIB3584-030-P1-K1-H8.pep
HTLAVISMRCDNEATRGFWPLWGGHIKXDMGDSLALKTIINEHGHTILXFNIEPIQREAAVIILTDGXYIKAVRHLYSKYNEIMIADQIQIGLTRTLKMNSCNRESARSXCVTLRKAICASILP

SEQ ID NO: 84333 - protein, 67 aa, Gossypium hirsutum
  Clone ID: LIB3584-031-P1-K1-A2.pep
VEHYSKLTNELKQNIQIVTTLSFAHSGQINITMAISLKTSNSLLLNVNQIQSKSQSIEAIKIFKQAL

SEQ ID NO: 84334 - protein, 100 aa, Gossypium hirsutum
  unsure (1)..(100): unsure at all Xaa locations
  Clone ID: LIB3584-031-P1-K1-A6.pep
NNIXLYVILIFIIYNCNYSMPGFLIXNKGILHSKYLTFNISTXMLQQNNIFKLILNNLLNNCIDLFFXISHNKEYYNNFYYTFSNNLNLCIHYYSHNITK

SEQ ID NO: 84335 - protein, 39 aa, Gossypium hirsutum
  Clone ID: LIB3584-031-P1-K1-A8.pep
PISDYILSTPHTPSLLYSKQFISITTIKSTLSLTYFQPT

SEQ ID NO: 84336 - protein, 63 aa, Gossypium hirsutum
  Clone ID: LIB3584-031-P1-K1-B10.pep
KIQIYKTDLDQLQYTKINLNQTLRLYTPTPMLITTAIITHPNIHNIYILTTPLILNTKSAIAI

SEQ ID NO: 84337 - protein, 50 aa, Gossypium hirsutum
  Clone ID: LIB3584-031-P1-K1-B5.pep
NAITASTIYTNERERLKLIDRFGPIQEVVQVVTQISKCTSSKAVAQINQQ

SEQ ID NO: 84338 - protein, 98 aa, Gossypium hirsutum
  unsure (1)..(98): unsure at all Xaa locations
  Clone ID: LIB3584-031-P1-K1-B6.pep
LYFEINGIYIHCLFFIHTNIQSKGLWVFHMIHLNSPLPKLIYNLSIILWLLNLLRAHLMISPYKIQRSIXLSLIINHHNEFFIINSSSQYNFTNSNYT

SEQ ID NO: 84339 - protein, 130 aa, Gossypium hirsutum
  unsure (1)..(130): unsure at all Xaa locations
  Clone ID: LIB3584-031-P1-K1-B7.pep
KFXIGLALELIQKYKVTIAGIGRPIMFTIXXSXETDKYDLSSVRMVKSWGAPLGKELYDSVRAKFPGAKLGQGYCMTDAXPVLAMCLXFAKEPFEIKSRACGTVLRNAYIKIFYPHTGSSLPKNQTRRDL

SEQ ID NO: 84340 - protein, 76 aa, Gossypium hirsutum
  unsure (1)..(76): unsure at all Xaa locations
  Clone ID: LIB3584-031-P1-K1-B8.pep
HITKSXSNTKNAKLSVKSKTSKKSRKADNHPNNPKRPATSFLPFIEELRDQYNNDHPKNISISPFTKTNKYKYNIF

SEQ ID NO: 84341 - protein, 54 aa, Gossypium hirsutum
  Clone ID: LIB3584-031-P1-K1-C12.pep
PCKWMALNRATYTRTSVQGGAADDYEGALVTLIPFIRALSEHSSLHILVVVANI

SEQ ID NO: 84342 - protein, 65 aa, Gossypium hirsutum
  Clone ID: LIB3584-031-P1-K1-C5.pep
AEIYLPTNLQPLYQHFSYNPDITWDQGSYQLQRHFHIDYNNAPLSLKNQPVTDEKSYGSKKPIII

SEQ ID NO: 84343 - protein, 57 aa, Gossypium hirsutum
  Clone ID: LIB3584-031-P1-K1-C8.pep
SNRIYLVKRPQALVVCLLFILAPFYLQFQELQVEMSQHLHLFLSVDFHLRSHTLPVL

SEQ ID NO: 84344 - protein, 108 aa, Gossypium hirsutum
  unsure (1)..(108): unsure at all Xaa locations
  Clone ID: LIB3584-031-P1-K1-D11.pep
HSSSLRFDGTLNLNVTXFHTSLGPYPSIHFILSSYAPDITTQNAXHDQLSVAEITNTAFQPSSMMAKSYPRHGKYMAFFLIYRGYVSPKDVTADLATINTKPTIQFFD

SEQ ID NO: 84345 - protein, 97 aa, Gossypium hirsutum
  unsure (1)..(97): unsure at all Xaa locations
  Clone ID: LIB3584-031-P1-K1-D12.pep
MDKVMRLATERGVVLFSKSSCCLCYAVKILFQELGVTPTIHEIDQDPEGLXMERALMRIVCKAPAPAFYIGGKLVLSTNEVMFLHLGRGLIPLLEPY

SEQ ID NO: 84346 - protein, 54 aa, Gossypium hirsutum
  Clone ID: LIB3584-031-P1-K1-D3.pep
IGDGVTLFELTLMNQDTVLLESPYYYKDDSLYGTIPFNTVYVMTKCPHHVTYPT

SEQ ID NO: 84347 - protein, 64 aa, Gossypium hirsutum
  Clone ID: LIB3584-031-P1-K1-D4.pep
NIASSKASLVNTFLVNYVLWLFSIFINFFNLVRNGNEPGLEGTMSSWNLWIQILYLFSAGVSEQ

SEQ ID NO: 84348 - protein, 62 aa, Gossypium hirsutum
  Clone ID: LIB3584-031-P1-K1-E12.pep
PEVLELVESHLGTGNLLLYIIQHCVKMEDAIFPYSEHSLFVCNLIHHSSSNVLKCNSVFGIR

SEQ ID NO: 84349 - protein, 47 aa, Gossypium hirsutum
  Clone ID: LIB3584-031-P1-K1-E5.pep
STYSLLYSDGIIVNWSVPFSLSNMGTVCMAIGTLSENVHESRWLWWL

SEQ ID NO: 84350 - protein, 37 aa, Gossypium hirsutum
  Clone ID: LIB3584-031-P1-K1-E7.pep
ENRALRIKLSYKAQCLPDAKDNYSLIIQKPTETTTKD

SEQ ID NO: 84351 - protein, 42 aa, Gossypium hirsutum
  Clone ID: LIB3584-031-P1-K1-F5.pep
SSYIARPQAITPKLTYTPILPKSSDVLSPKVKTLTDCIQHQD

SEQ ID NO: 84352 - protein, 177 aa, Gossypium hirsutum
  unsure (1)..(177): unsure at all Xaa locations
  Clone ID: LIB3584-031-P1-K1-F8.pep
HHHHHHHHHTQDPIMSNDQISGPSASTALGVGVGVFPLLTAAPCLAPLNVEDPDLFNNNGRTKLSGMQLWQDQNSSPHNYLKKPSSFPDSNNSSSMKLIQSSGGGGIGDGESGGSGSSSATTCQDCGNQAKKDCSHKRCRTCCKSPGFDCPTHVKSTXVPAVRRRERQLMAAAVTTA

SEQ ID NO: 84353 - protein, 37 aa, Gossypium hirsutum
  Clone ID: LIB3584-031-P1-K1-G10.pep
RVMVIIFIEKLRIELFYPLNWIYPCPMEWKVRIQCSR

SEQ ID NO: 84354 - protein, 53 aa, Gossypium hirsutum
  Clone ID: LIB3584-031-P1-K1-G11.pep
KIYIIYTIFYYFIDLISQPNNLLRKMTKIIYYKLTNFIKRVILSFLYYQIYKN

SEQ ID NO: 84355 - protein, 152 aa, Gossypium hirsutum
  unsure (1)..(152): unsure at all Xaa locations
  Clone ID: LIB3584-031-P1-K1-G12.pep
TGAEGVETALKLARKWGYEKKKMGKNEAIIVSCCGCFHGRTLAVISMSCDNEATRGFRPLLPGHIKVDFGDAVALEKIFKEHGDRIAGFLFEPIQGEAGVIIPPKGYLKAVRDLCSKYNVIMIADEIQXGLPRSGKXMLACDWEGVRPNVVI

SEQ ID NO: 84356 - protein, 106 aa, Gossypium hirsutum
  Clone ID: LIB3584-031-P1-K1-G7.pep
TRVRLLAAIVEQPPSHTLLYGVVVVYYEHHNSIDFKHADIITSTIMSTLLTRTNVKLINAVAADDLIMKEGRIGLVNTNSALMSKNHHTQSCLYPHVMEAKLAASS

SEQ ID NO: 84357 - protein, 60 aa, Gossypium hirsutum
  Clone ID: LIB3584-031-P1-K1-H6.pep
SNVLCQVKALNKDLCHRSIQSVHKAFVTSYTLVQVSRCSWQSKMLSCAPMLPQWIRYVYT

SEQ ID NO: 84358 - protein, 35 aa, Gossypium hirsutum
  Clone ID: LIB3584-031-P1-K1-H9.pep
VAHSMLEERLRDSLLALRCFWTKYHAVQPTGKLYP

SEQ ID NO: 84359 - protein, 37 aa, Gossypium hirsutum
  Clone ID: LIB3584-034-P1-K1-A11.pep
PLYYKTLCPYRTNPITNHHLNLFLIEHITITNLKFHP

SEQ ID NO: 84360 - protein, 124 aa, Gossypium hirsutum
  unsure (1)..(124): unsure at all Xaa locations
  Clone ID: LIB3584-034-P1-K1-A12.pep
VAAIFRFLFSVIFKLVLATILRAAKDPGPSIFSPLIKKAQDLSFLEKEDGLASLEIIQKGGCGEVYKSELPATDCKNMSKHNIXKTPNQITLFTYNHFHHHNKKMLQIKSXITTLRQIPHKNLL

SEQ ID NO: 84361 - protein, 82 aa, Gossypium hirsutum
  unsure (1)..(82): unsure at all Xaa locations
  Clone ID: LIB3584-034-P1-K1-A7.pep
NHSILHFISPIQFINAXCXKTRFLPLQTPPFLDTTILKPRNQPIIDFEHHEFYEIEDILNTNKLYXKQKIIYQTLLFNPHNL

SEQ ID NO: 84362 - protein, 127 aa, Gossypium hirsutum
  unsure (1)..(127): unsure at all Xaa locations
  Clone ID: LIB3584-034-P1-K1-A9.pep
THAYGDLKREREIYRLHLNHHPSNADEFIYKNCFLNXXXPXLNTDQPLFSLDRSLNKRRNESTFSFLTPATTPTITTIIALIIIITPQSTLLLTVITIPIFSFLNSHLYPKPKPNTTIITITSITTP

SEQ ID NO: 84363 - protein, 203 aa, Gossypium hirsutum
  unsure (1)..(203): unsure at all Xaa locations
  Clone ID: LIB3584-034-P1-K1-C9.pep
TTSICSYSHSHTKRRLIKTNLTGQRVLQQNRQVNSDPLSKPQAEPAQADQQPMNNALQMGTTTTAAVSEVGIDSANNTVQNVPSAGSQWKSSDPVYNPGMPTVATQVGSIGSPPLTNSAASVPVPSVSQGLGQRQLPGGLPLHGSKAGAQLPQLPQIQQSSTPAPSQQHYQPQEQLQQDLHNSPXQQLPLQQQSQQQTPHLQA

SEQ ID NO: 84364 - protein, 102 aa, Gossypium hirsutum
  unsure (1)..(102): unsure at all Xaa locations
  Clone ID: LIB3584-034-P1-K1-D10.pep
WSFCTTKISLKEILKIVFPFLNGVDLPTCIVICKQCIHIPKYNYFYKCVCTNKFPSIYKPTNPSTVTYYXLYKTFYKLXINQPFFPQDLSFIIFQFFIYTFD

SEQ ID NO: 84365 - protein, 172 aa, Gossypium hirsutum
  Clone ID: LIB3584-034-P1-K1-D6.pep
DSVFEAIKNADLDFENGAWRSICRPARDLVARMLARDVSVRLTADEVLGHPWILFHTEATLGMAAFETKMGNHEKPASPQLTISPGVVSERSKMIPNGFLNDDSFLFLSSNSSYTRSEVQDSALVDALTVAISRVAISEPKRTRLCGPTGPIQQELSSNIKVNNNNHHLCTA

SEQ ID NO: 84366 - protein, 58 aa, Gossypium hirsutum
  Clone ID: LIB3584-034-P1-K1-D7.pep
LYILISRCNIILQYDRFLIQICTHIKIFILNQYLLPSLKLLSHHFSHSFLIHYNLILT

SEQ ID NO: 84367 - protein, 75 aa, Gossypium hirsutum
  Clone ID: LIB3584-034-P1-K1-D9.pep
KLVPCLSKRDLLVNLVLNSLQLFAICRHFFFRQYRYYLCKRLKHSLFNTFVLVVAFLSIYSVMDDTLSLSISSIE

SEQ ID NO: 84368 - protein, 154 aa, Gossypium hirsutum
  Clone ID: LIB3584-034-P1-K1-E10.pep
PRVRLKPGKHVFAVYGDNFFKSGSYTIEAICAAPFIEEKENLRAVEAEILSKRAELSKFETEYREVLAQFTEMTGRYTKEMQEIDELLKQRNEIHASYTTIPLIKRSSSRKKSRAASKEAKEDGEVRDRKPSTRDRTKKKWYNIPLKVDKRKPC

SEQ ID NO: 84369 - protein, 192 aa, Gossypium hirsutum
  unsure (1)..(192): unsure at all Xaa locations
  Clone ID: LIB3584-034-P1-K1-E11.pep
GNAEELDTNWQEGSVSEYRQEDAGNVNGEESHSQGAQRVWREDGSREAVDNWSEGPSGPPRPRRSIPVRRFNRFHPPEDDNVYSMELRELLSRRSVSNLLRSGFRESLDQLIHSYVERQGRSPIDWDLHRNLPTPASPERDQEQQRDGINDDQNNAISRPSLVLPSXSVPPPQPVWHQRLHHTSLSRXSMHR

SEQ ID NO: 84370 - protein, 56 aa, Gossypium hirsutum
  Clone ID: LIB3584-034-P1-K1-F11.pep
GEAMICREHMEMGIIDNIQFVPSSGLQPQVRCYCHRGTDSIGHPTRLTEERIILSS

SEQ ID NO: 84371 - protein, 74 aa, Gossypium hirsutum
  unsure (1)..(74): unsure at all Xaa locations
  Clone ID: LIB3584-034-P1-K1-F4.pep
GTPAMTSRGCLESDFDTIASFLLRAAHIASMMXRDHGKPLKASVKSLQEHKDILELRMQVETFASQFSMPGFDI

SEQ ID NO: 84372 - protein, 180 aa, Gossypium hirsutum
  Clone ID: LIB3584-034-P1-K1-F8.pep
KNQPHVQVALRMKQSGYSTGWWGGDTIPYIICCEQGTSSSNSTGIAYRARHPDELKKDEGKWMIDIDYYLSQQIHPVVSRLCASIQGTSPERLADCLGLDSSKFQSKSSVAVSNDTANTLLFAVDDEERYRGCEPLTLSCPSCSATFTCPAVFSSIHTIGEKPKKMQQEESTSNFWLNVA

SEQ ID NO: 84373 - protein, 68 aa, Gossypium hirsutum
  unsure (1)..(68): unsure at all Xaa locations
  Clone ID: LIB3584-034-P1-K1-G7.pep
TYKVLIISHCDSTLQSLTDNVQNNPTSFPKLLTVFTLKAFSDNTXSIISPKSILDIKPYSALKNPFWS

SEQ ID NO: 84374 - protein, 105 aa, Gossypium hirsutum
  unsure (1)..(105): unsure at all Xaa locations
  Clone ID: LIB3584-034-P1-K1-G9.pep
LFYPHLNKIFTNQLSQNAYSXFXVRFTPMPTDIIIISTRTQNILNENGTMITXFTSVVHKQFKFPENSVYLYAQKVNNTNLFSITQAYFLLYKLLAGLSVPSSFY

SEQ ID NO: 84375 - protein, 78 aa, Gossypium hirsutum
  Clone ID: LIB3584-034-P1-K1-H4.pep
NSPIFNTLRTSFKVVQPNTITSLSRSLTPPTTPFTHCLHPHSFLLFPPFSISSTSLYFSLFISYTITSPSKITSFISY

SEQ ID NO: 84376 - protein, 51 aa, Gossypium hirsutum
  Clone ID: LIB3584-034-P1-K1-H7.pep
AGCQCLFVLWLRYKLTVYTITSIDSILLIVRCLHLSHCFCCAELELLTLYC

SEQ ID NO: 84377 - protein, 189 aa, Gossypium hirsutum
  Clone ID: LIB3584-034-P1-K1-H9.pep
ALPPFNHPAPNRIKSNGGNERLRVGYVSSDFGNHPLSHLMGSVFGMHNRENVEVFCYALSQNDGTEWRQRIQSEAEHFIDVSAMSSDVIAKMINEDGIQILINLNGYTKGARNEIFAMQPAPIQVSYMGFPGTTGADYIDYLVTDEFVSPLCYSHIYSEKLVHLPHCYFVNDYKQKNRDVLDPTCQHKR

SEQ ID NO: 84378 - protein, 98 aa, Gossypium hirsutum
  Clone ID: LIB3584-036-P1-K1-A3.pep
SMSPSPYFDQSLFRFDEKLISATDRPRQSTDHPIRFISRRQPNILKFKIKTGPEFGGADGRSKKYSHFLFHPAWPLALSFIQPSLFLPPSAVNIHFRR

SEQ ID NO: 84379 - protein, 166 aa, Gossypium hirsutum
  Clone ID: LIB3584-036-P1-K1-A6.pep
KKSDYVQEPISKENLEGIWNKMIELKRPALTLNPYGGKMSEISEFETPFPHRAGNIYKIQYSVTWKDDGVEASGRSLDQIRKLYDYMTPYVSKSPRSSYLNYRDVDIGINENGNASYSEGVIWGRKYFKGNFERLVQVKSKVDPGNFFRYEQSIPCLGSWKSITAE

SEQ ID NO: 84380 - protein, 73 aa, Gossypium hirsutum
  unsure (1)..(73): unsure at all Xaa locations
  Clone ID: LIB3584-036-P1-K1-B2.pep
SKISGSLVKKLITSDPQKKFFRNVNFLLYSKVILIVIFVFFFSRKRKPQXLEFLNGEAKAGQAWRXLGHDVLY

SEQ ID NO: 84381 - protein, 96 aa, Gossypium hirsutum
  Clone ID: LIB3584-036-P1-K1-B6.pep
HASAHCKIAKFEWNFLRQIMTITENSFTTLKTRLKIETVMGEAIAQVREITDHLQTLAVQADILSLKYDSESDRGRSLAWLLKKVKTLGIRAKSYM

SEQ ID NO: 84382 - protein, 65 aa, Gossypium hirsutum
  Clone ID: LIB3584-036-P1-K1-B8.pep
THTRTTHKLDLTFNCQNSHRGASVYTHHSITHIQLSTVNITHNTLMASPNTTIPATPSSTPLLKP

SEQ ID NO: 84383 - protein, 158 aa, Gossypium hirsutum
  unsure (1)..(158): unsure at all Xaa locations
  Clone ID: LIB3584-036-P1-K1-C4.pep
TTRTDNTDDSDEEMASGQKSKASSKLRSXSSTLRSKKTRIAYNSLPDDLLDQLKYEPLNLLDRYKTRSVLXHLKIXKRKQDSYYEPXFNPEGRLIINEGRKPKNGAVSHPDSYRRNEVPSHFLGXSSRNNHKKRKTSESGWAXYTESEYACKKAGGDV

SEQ ID NO: 84384 - protein, 200 aa, Gossypium hirsutum
  unsure (1)..(200): unsure at all Xaa locations
  Clone ID: LIB3584-036-P1-K1-C8.pep
MDFGVFTSEGTTIFVSAFLAMNMNEKXLSAISLWALWYKRNKLVNKGLNFELHDLVSFIQSYYQDLSFAKAKDLTVSMKRNALWRPPMPGVIKLNFDASFASISNLSVSAVLVRDSEGLIMGACTYPMVGIVDAIVAKARACERVVYFALDIGFRKVVLEGDSLIVIKKLVSNDTDRSILCHISQHIQGLAGAFEEITYN

SEQ ID NO: 84385 - protein, 68 aa, Gossypium hirsutum
  Clone ID: LIB3584-036-P1-K1-C9.pep
EKNRNMLCSRRMMLNIMILNQKTIQKWALCICISYQQSFLMSLTSTIKPKNKTEIKANTENAKDNKIY

SEQ ID NO: 84386 - protein, 201 aa, Gossypium hirsutum
  Clone ID: LIB3584-036-P1-K1-D12.pep
PRVRPRVRAYQAIDLSILVLLFGTMVVSGYLERADAFKYLGKLLTWKSKGAKDLICRICLISAISSALFTNDTSCMVLTEFVLKIARQNNLPPQPFLLALASSANIGSTATPIGNPQNLVIATQSGVSFGEFLIGILPATVLGLVCNALLLIFMYGDLLSVKKGQQDSTVAFNGDGVDHQFSPATMSHVETTNVDSVHHHE

SEQ ID NO: 84387 - protein, 79 aa, Gossypium hirsutum
  Clone ID: LIB3584-036-P1-K1-D8.pep
RCTSLKRYQLSLGTILISKSGGVSRYMITHTLFSSPKPHSLKKTIIALSTASHQKTANIHLHNNRLLMILVFDSNTYFP

SEQ ID NO: 84388 - protein, 127 aa, Gossypium hirsutum
  unsure (1)..(127): unsure at all Xaa locations
  Clone ID: LIB3584-036-P1-K1-E4.pep
PALSLNTKPYNPSQIRPDQSLRRVRSITGVPICSCNSLSSQYRSLPLCPKKISEYIXNXTAKQWKGLPITCKLTGQNRLAKVTSVLSFGVLVIKAFMEPARVLRKTXNIQHNRNIKPQRHSSKSLMY

SEQ ID NO: 84389 - protein, 144 aa, Gossypium hirsutum
  unsure (1)..(144): unsure at all Xaa locations
  Clone ID: LIB3584-036-P1-K1-F2.pep
PRVHEVRIRFIYTSLCYSHITFWKCTVPTACLPTILGHEAVXVVKSLRDNINEVSPTDVVIPTFLSEXGQYQYCFSTRSHLCSKFPFKIHPWIPRYXNSRFSHLNGYVLYHFLFLSIFSQYTVVDINHVLKIDPAIPFKQGHPF

SEQ ID NO: 84390 - protein, 164 aa, Gossypium hirsutum
  Clone ID: LIB3584-036-P1-K1-G12.pep
MQTSLEYSPPDLNKGITEIFGKLVNIYRALGDDRRSFSYYKAIAVVEKLPFKVESADQVKDLPGIGKSMQDHIQEIVTTGKLSKLQHFETDEKVKTITLFGEVWGIGPATALKLYEKGHRTLDDLKNEDSLTNAQVIGLKYFDDIKTRIPRHEAQEMELVLQKV

SEQ ID NO: 84391 - protein, 138 aa, Gossypium hirsutum
  unsure (1)..(138): unsure at all Xaa locations
  Clone ID: LIB3584-036-P1-K1-G4.pep
DYSYISRSRATGLKHTSSRTRPCGGGVVLYRNIKLIHCPQLYNCETAKTTQLNNLIAYQHIPISPDSVIANTHRPIEHSNSLTGXWTLPLALYQPIXALVVSRILTASLVHLLAPYPLVFLLSFLAMFARFPPYSLNL

SEQ ID NO: 84392 - protein, 53 aa, Gossypium hirsutum
  Clone ID: LIB3584-036-P1-K1-G7.pep
NYIFKTQICARFQLPNIKSPQFLSSFFRKNCGANTFTFIEGKNLFFIYIIYIV

SEQ ID NO: 84393 - protein, 192 aa, Gossypium hirsutum
  unsure (1)..(192): unsure at all Xaa locations
  Clone ID: LIB3584-036-P1-K1-G9.pep
LTEVITSAEFHPIHCNLLAYSGXRGFIRLVDMRQSALCDYSARIFQDEECHGSRSFLTEIVASITDIKFPVDGRHILSRDYMNLKLWDMHMDSSPVATFKIHEHLRPKLCDLYNNDSIFDKFECCLNGDGLHFATGSYSNLLQIFFHSGGSDXGSSIEASKNPNSFKNRKPLSRARKSFLSNLTRGFYKQGH

SEQ ID NO: 84394 - protein, 118 aa, Gossypium hirsutum
  unsure (1)..(118): unsure at all Xaa locations
  Clone ID: LIB3584-037-P1-K1-A2.pep
PLLQINFINPNYTXIQFPHIKPQALRKILQKRSPPQTXNLYYTSTHSSPNLQYTSFHTYIHPFFDQLRHPNLHLPTLLPLPPLFNFNPQQLSTIPPQLVNKLIPAHAFNHNFYIALHT

SEQ ID NO: 84395 - protein, 57 aa, Gossypium hirsutum
  unsure (1)..(57): unsure at all Xaa locations
  Clone ID: LIB3584-037-P1-K1-A6.pep
MNTKSIGFGCVRLDRFRSFCSVENYVSVQVMCCFGRPCLCNTRAWICVSLRKYVKAX

SEQ ID NO: 84396 - protein, 37 aa, Gossypium hirsutum
  Clone ID: LIB3584-037-P1-K1-A7.pep
IQQPPYSINGELISTVDYTLNTKPSNDLNMAQQKIYT

SEQ ID NO: 84397 - protein, 85 aa, Gossypium hirsutum
  Clone ID: LIB3584-037-P1-K1-B2.pep
RRVNGRKISFDSIFIRMLQCTSNSWKLRSQHGNHAKINRKRTSALFIVCNSNMVEQCNSLHIFCALFKATLLSVDILVLQCRLNI

SEQ ID NO: 84398 - protein, 88 aa, Gossypium hirsutum
  unsure (1)..(88): unsure at all Xaa locations
  Clone ID: LIB3584-037-P1-K1-B3.pep
SFNNXSSPHTFPIYTIASTTTLAYLLSLILYFHSSTLPPSHNQHFNPPIHTPPQLKHLLILTIYKTQPLSTFNQSVQAFILTPPFSKC

SEQ ID NO: 84399 - protein, 47 aa, Gossypium hirsutum
  Clone ID: LIB3584-037-P1-K1-B8.pep
KTTTVTLAHINPRTTTHTLIHIVSSSNIDTSKMSSCILNIIHKPQIA

SEQ ID NO: 84400 - protein, 66 aa, Gossypium hirsutum
  Clone ID: LIB3584-037-P1-K1-C10.pep
KILLIPPFTYILINIYFQSLFFQYHQKPALTHQLNLTSSSSIAAPIYLYTFSVPLTLILSIFANSQ

SEQ ID NO: 84401 - protein, 180 aa, Gossypium hirsutum
  Clone ID: LIB3584-037-P1-K1-D1.pep
LIVLSEWYTSDSVAPTPSPAPSPGLLIAPSPISSPAHSPAPSPEEHHLLPCPNCKSPAPSSHSPLRSPDPGSGSYPTFPPLVSPAPSSAATHPPPPCYLPRPHPSQTSNHQPVMSPLSKLSPNLPPLPSVSYGSRTDQGMNGMKGPVSAPPAQSSSSIATSVLPKQLWLLAFLGILTFHL

SEQ ID NO: 84402 - protein, 79 aa, Gossypium hirsutum
  unsure (1)..(79): unsure at all Xaa locations
  Clone ID: LIB3584-037-P1-K1-D10.pep
FVXXXRFXXASAVFXGVGVRXPAAXXSSGXXXFXLLXPPXXFFPXXXXXXLLXXXARFSSSFFSFSFVGXXXXXXXLCL

SEQ ID NO: 84403 - protein, 159 aa, Gossypium hirsutum
  unsure (1)..(159): unsure at all Xaa locations
  Clone ID: LIB3584-037-P1-K1-D2.pep
AARSHVVMDHFSTVRAKVLTACQSRDTDNLEGEENVKEKEETSYGSLMIERLTGSEGRIDHVLQDKTFEHPYLQAIGSHTNYWRDYDTALFILKHLYRDIPEDPNFLGESIEGSLKDENASMGWSDERETIDEELPLTFSARDMVKNFSRKAKKXIKKP

SEQ ID NO: 84404 - protein, 49 aa, Gossypium hirsutum
  Clone ID: LIB3584-037-P1-K1-D3.pep
MLVCGARVLVLLDVPPSDHRGLYRSVLQLRFACVSLVNHVVSRRSLYCF

SEQ ID NO: 84405 - protein, 95 aa, Gossypium hirsutum
  unsure (1)..(95): unsure at all Xaa locations
  Clone ID: LIB3584-037-P1-K1-D5.pep
AVLVALLRGSSSSSFLLRCCWGRSLVPSSLFCRLLAGGCCAARFFCVVPGFFPSXRCCXXAGGLFFVGATLAPXCRXLAAVGLVPLVGRLAXLXY

SEQ ID NO: 84406 - protein, 64 aa, Gossypium hirsutum
  Clone ID: LIB3584-037-P1-K1-D7.pep
GMKTDQIPIFPTEPSRYSRNTRMEEIQSTTIIQLIKIEKNDIITSSNFQPRKYYTYIKITLQFR

SEQ ID NO: 84407 - protein, 156 aa, Gossypium hirsutum
  unsure (1)..(156): unsure at all Xaa locations
  Clone ID: LIB3584-037-P1-K1-D8.pep
MPKETEKSTGHAKYYINPPPSPLIDASXLKKSSFYRALIAKFIATMLXLYITVXTDIGHKNQNATSSDSCSDIGHYDISTDLDGMIFILDYXTAGISKCHINPTXTFALFFARKDSLIRAITYMLAQTLGSIYWVELVNAFQSKYYNMYGSGLNTL

SEQ ID NO: 84408 - protein, 60 aa, Gossypium hirsutum
  Clone ID: LIB3584-037-P1-K1-E4.pep
DTPSFTSLPCPISWQILPSEKYRDFGSNIGTVDRSSFYKDYQIDHYFTVTTYTLQWCRHH

SEQ ID NO: 84409 - protein, 145 aa, Gossypium hirsutum
  unsure (1)..(145): unsure at all Xaa locations
  Clone ID: LIB3584-037-P1-K1-E6.pep
LFFSFFFWLFFSLFFFFVLXCXFVLWASXXVALVFXPXVGXXRVXXLPCXXXXXXGXXXVXXGXXXXLXRLXXXXSVSVPXXXXXXXXALXXXXXXRSPFAGXFXVXPXPXXXVXVLFXSPPVXLLXGPAXXXPPXCLXLVWARP

SEQ ID NO: 84410 - protein, 155 aa, Gossypium hirsutum
  unsure (1)..(155): unsure at all Xaa locations
  Clone ID: LIB3584-037-P1-K1-F10.pep
AIQADIIVSKNGTVKTISXASERAHXNSTLQIIIYVRAGRYEQNDLKVGRKKINLMFIGDGKGKTIISGGKSIFDNITTFHTAAFAATGAGFIARDMTFENWAGPAKHQAVALLVWADHAVVYRCNIIGYQDTLYVHSNRLFYRECDIYGTVDFI

SEQ ID NO: 84411 - protein, 85 aa, Gossypium hirsutum
  unsure (1)..(85): unsure at all Xaa locations
  Clone ID: LIB3584-037-P1-K1-F4.pep
RARVLPRVRPRFLQSSATKVKDVADKSINGTSASYITINIDCNIDSSLPXIVLQNVNLQEHXDRTAKAICNNVKLTDNGTVSPQC

SEQ ID NO: 84412 - protein, 110 aa, Gossypium hirsutum
  Clone ID: LIB3584-037-P1-K1-F7.pep
GLTIRHGVNNIHTLIKQSTDAIGVRKNTMLASLLTNMWRAKTNSGIKTRMYDKIMPIMINIMSHCQARSAPNMRVPSKRHIQGLTSSSILKMIQRKIVLYDLNNMDERSI

SEQ ID NO: 84413 - protein, 182 aa, Gossypium hirsutum
  Clone ID: LIB3584-037-P1-K1-G12.pep
ETLGGLMIWLTATFAVLQNGKAEDQAAFASTMGLLLSYSLNITSLLSGVLRQASQAENSLNAVERVGSYINLLSEAPDVIESHRPPPGWPSSGSIQFEDVVLRYRPELPPVLCGLSFTTSPSEKIGIVGRTGAGKSSMLNALFRIVELEKGRILIDGCDTSRFGLSELRKALSIIPQSPVLF

SEQ ID NO: 84414 - protein, 136 aa, Gossypium hirsutum
  Clone ID: LIB3584-037-P1-K1-G2.pep
PSHKRPRKGAFSMSPSPLMQQLSCEVVNVIQDGSKSAWEKKHWMKMRLVQLEEQQVSYQYQAFQLEKQRLKWVKFSGKKEREMERAKLENERRRLENERMVLLVKQKELELVDVQQQHLSQQHSCSKRRDPSNISG

SEQ ID NO: 84415 - protein, 154 aa, Gossypium hirsutum
  unsure (1)..(154): unsure at all Xaa locations
  Clone ID: LIB3584-037-P1-K1-G7.pep
HAPDHAAHANAHANDTAGAGGKPTPQGNTKATAEGAAAQTAXQEEKXEEPXKEQEATTXEXXAEAPAAEAAAEEPKEAEXAAEAXEEPEAXREAETKEXREEPKXXTEEPXXEETXKETXPEPXAEENKETTEQTXETKKTTKTKEAAAEAPKE

SEQ ID NO: 84416 - protein, 99 aa, Gossypium hirsutum
  unsure (1)..(99): unsure at all Xaa locations
  Clone ID: LIB3584-037-P1-K1-H10.pep
PTRPEGPNYSRPTLPKPEIKQRPGITNPVVQNNFRNPXGFWGKRSRRNHVLRTSRISTRAFTCTARKEIYGKKIKDLQNQIDMNRFASLYCFIMAIKSH

SEQ ID NO: 84417 - protein, 94 aa, Gossypium hirsutum
  unsure (1)..(94): unsure at all Xaa locations
  Clone ID: LIB3584-037-P1-K1-H11.pep
YAFITAILHTTCLMYMGIGLCWGKTFLVAYIFLXFFRSIGALDYSASIIXYLEGLEFPYHLALIFXNIMYVWHYXTLKKYEFQIQNKVSINMVL

SEQ ID NO: 84418 - protein, 71 aa, Gossypium hirsutum
  Clone ID: LIB3584-037-P1-K1-H2.pep
WVSQSRDLVNYKFWSIVMRNYNVPYKRRISIIFLLRIFKTLVILVPTRGIRFALIIKRQTIVTAMIQVAVC

SEQ ID NO: 84419 - protein, 109 aa, Gossypium hirsutum
  Clone ID: LIB3584-039-P1-K1-B10.pep
NQNASTTLAALLRMLLVMIEVVLGVPKLHHWRHDFSFPKVAIIRLLLLLLIVGNQRIQKQTEHMVFVTIFNQVSPVPAAAWLPHAIVTNLLLVLIYLMRFQVSSFHGIS

SEQ ID NO: 84420 - protein, 92 aa, Gossypium hirsutum
  Clone ID: LIB3584-039-P1-K1-B5.pep
HSQLKSSIYMIFFQGKKEKKKHPSKKKKKKPHQNRFFYHGPTLHGSPCHYSCMVDMLDYNHCEVILSSSNSACIERVILSFVWRIRFPRTRG

SEQ ID NO: 84421 - protein, 60 aa, Gossypium hirsutum
  Clone ID: LIB3584-039-P1-K1-F6.pep
QTQRDWYRACFSVDPMVITDLETAMHAHQYDDYRGGRERCRGTGGGPRKEISRAATNFTG

SEQ ID NO: 84422 - protein, 59 aa, Gossypium hirsutum
  unsure (1)..(59): unsure at all Xaa locations
  Clone ID: LIB3584-039-P1-K1-H11.pep
KIVKQKLCFRLGMITFSLDLKRSGKCRFLKTTACVXFGRSDLFYTWKVEKHLKWEKHQS

SEQ ID NO: 84423 - protein, 93 aa, Gossypium hirsutum
  unsure (1)..(93): unsure at all Xaa locations
  Clone ID: LIB3584-039-P1-K1-H8.pep
NMGKVAQGHRRYLEFKQTILLXDRLLYSRXIYQCNTGSISWIQFSNTENETYXRRRGQPNKKLAIPDRPKDEAYFYANSEACLQQRDGQLMIT

SEQ ID NO: 84424 - protein, 173 aa, Gossypium hirsutum
  Clone ID: LIB3585-045-Q6-K1-A11.pep
MQKGSTQIALILASLIISNIVVLVVSQGQLRVGFYSKSCPNAESIIRKVVQKAVADNPRNAAILLRLHFHDCFVQGCDGSILIRNDEDGELKAQGNLGVVGFDIIDSAKARLENLCPGIVSCADIVSLAARDAVSLVNGPFYDVPTGRRDGRVSKMSLAKNLPDVDDSINVLK

SEQ ID NO: 84425 - protein, 58 aa, Gossypium hirsutum
  Clone ID: LIB3585-045-Q6-K1-A2.pep
IKKSFTIDFWIYMVPSRLRIGVDFSCKNGYILTLAVSLHRLKHVKLHSLHALQFEYRT

SEQ ID NO: 84426 - protein, 67 aa, Gossypium hirsutum
  Clone ID: LIB3585-045-Q6-K1-A6.pep
QSPQAPNGPLNSKTDETPKEIPLVRQQKVKLPASPKASNKDVTSTVKKPLGAKRTVKTVRLVARKLT

SEQ ID NO: 84427 - protein, 120 aa, Gossypium hirsutum
  unsure (1)..(120): unsure at all Xaa locations
  Clone ID: LIB3585-045-Q6-K1-A9.pep
MIQLLFLVLFAEGAMAFLLLVKIGPLRELVIKSIDQLKMGKGPATVKTVAGTMSVILLSSLMSIVKIQNKGAKLGTMSPMDQVLWRTHLLEASLIGFTLFLXFIIDRMHHYIKKLIGLRS

SEQ ID NO: 84428 - protein, 59 aa, Gossypium hirsutum
  Clone ID: LIB3585-045-Q6-K1-B1.pep
LSFPRSATWTSPMAYAVYATDYHELTTILLYVASYWLFMCVICLLNNLCFLLSASMSDE

SEQ ID NO: 84429 - protein, 126 aa, Gossypium hirsutum
  Clone ID: LIB3585-045-Q6-K1-B11.pep
MDGAKETGLRNVSSTCSISESDDYDLSRLLDKPRLNIERQRSFDERSLGELSIVLTRGAHDNYETTHSPGWRSGFNTPASSARNSFEPHPMVADAWEALRRSLVYFKGQPVGTIAAYDHAFEEVLN

SEQ ID NO: 84430 - protein, 75 aa, Gossypium hirsutum
  unsure (1)..(75): unsure at all Xaa locations
  Clone ID: LIB3585-045-Q6-K1-B6.pep
FSMARTLLHLSSSIIVCALIXFNFFTVYAKNHHTGPMLLPIQLTLRNNSQQRHYNNIPRKTLKSPNFFFLSTHSP

SEQ ID NO: 84431 - protein, 196 aa, Gossypium hirsutum
  Clone ID: LIB3585-045-Q6-K1-D5.pep
HASVLFQKMFTFGGFLLVSISALFFSLFDFFSKVFSRASIFKLKPEEAMLDAIELEDEESEVFEEIESPKLVFKFQFQTQTFEEFSKKFRDIGMETDPSTSTNKYEFNSRNDFEFTMENPNDISFCVKELYTDSNNGLFPKQDFLEENIKDEEAVIIEEVTKEDGGIMEEESREVVNGNECANALDHSSNSNELET

SEQ ID NO: 84432 - protein, 77 aa, Gossypium hirsutum
  unsure (1)..(77): unsure at all Xaa locations
  Clone ID: LIB3585-045-Q6-K1-E2.pep
NRKGHHHVKPWTYKYNLVAVLVHTILLXYINRENIVALQAFFVKHFISWVTXAFCLRGLLMSGPTNDLPTCGTRIVY

SEQ ID NO: 84433 - protein, 108 aa, Gossypium hirsutum
  Clone ID: LIB3585-045-Q6-K1-G1.pep
PFRLFYRYFLPMLKDWFPGLAFRCGEALAFWVFVLMRDLRIRFLIKLFKRSLFAAFICIFALGGAVLGTVVGAMNGQTTDTGFFRGAAIVAVACAITDVQLLEASADG

SEQ ID NO: 84434 - protein, 183 aa, Gossypium hirsutum
  Clone ID: LIB3585-045-Q6-K1-G4.pep
MAGPDHTRPVDFLPAFDSVLLMSDGEILQAASDDHLLASSQEFQDLVHAHKETAGGGRAAEVNPAKGHGTSTTEIKKSYVEKEFKEPVGDQLIKQEEREKGDTGLKPYLQYLNQNKGFVFFFLSTFFHLLFVCGQIAQNSWMAANVDNPNVSSLKLITVYLAIGVFSTLLVLSRSLFTVTLGM

SEQ ID NO: 84435 - protein, 54 aa, Gossypium hirsutum
  Clone ID: LIB3585-045-Q6-K1-H10.pep
FFFFTHTTYNGPDLLINLIQFPLLHFFMVRFPPLTSLGSHKYISLTVPHLIQKI

SEQ ID NO: 84436 - protein, 115 aa, Gossypium hirsutum
  unsure (1)..(115): unsure at all Xaa locations
  Clone ID: LIB3585-045-Q6-K1-H7.pep
CNIYFINAVNHSRGSICRLRQCSSILHCLLAAILLNTECTSLSITYLQDTIPKCAICYTGSPPSYHFDIVSRARLDNIIDHMEDRXCSENVPTCLSRKNTYLGSSQQMVNLSVFY

SEQ ID NO: 84437 - protein, 60 aa, Gossypium hirsutum
  Clone ID: LIB3585-046-Q6-K1-A7.pep
PEFHARPRHSASYVNTRVILYNSSPSMPSHTRRALIFPYLLILLLYYNIHIIGYPIKLKR

SEQ ID NO: 84438 - protein, 33 aa, Gossypium hirsutum
  unsure (1)..(33): unsure at all Xaa locations
  Clone ID: LIB3585-046-Q6-K1-B1.pep
YIIHTSIIHKFDKTNFLLDGLIIIXGIISSHPL

SEQ ID NO: 84439 - protein, 61 aa, Gossypium hirsutum
  Clone ID: LIB3585-046-Q6-K1-B11.pep
PIPVDHASIIIILLSPLSVPHSVPLLLWFTQAEIPATDHSHHSWFCHPSMEPCNGLHMTVS

SEQ ID NO: 84440 - protein, 84 aa, Gossypium hirsutum
  Clone ID: LIB3585-046-Q6-K1-B6.pep
DEVDSLRKSEEEEGVTEPLLGSNTELKEKAVGFIEAWKIPGVAPFAFCLFFAKLVAYTFLYWLPYYISHTGILLYFLLLCISLL

SEQ ID NO: 84441 - protein, 150 aa, Gossypium hirsutum
  Clone ID: LIB3585-046-Q6-K1-B9.pep
DLLISTGESETFLQKAIQEQGRGRILDTINEIQERHDAVKDLERHLKELHQVFLDMAVLVEAQGEQLDDIESQVNRANSFVMGGTERLQRARTYQKNTRKWICYAIILLLSIIFFVVIFTVRPWENNGGSGGGHNNPTPPAPATTSPSPS

SEQ ID NO: 84442 - protein, 68 aa, Gossypium hirsutum
  Clone ID: LIB3585-046-Q6-K1-C1.pep
LLKKKRDFYTNTTTQYKTPDRRIASLVCPIPMLTIRWSTNRRYQTDMADSKTDAELIEIILTKGWYGD

SEQ ID NO: 84443 - protein, 143 aa, Gossypium hirsutum
  Clone ID: LIB3585-046-Q6-K1-C9.pep
PRVRLFRRLMVNPAYYGLESGEDETLSSYLSSLLQSTFEDLEDSGCIKMTEDSVEPMMLGTIASQYYLSYMTVSMFGSNIGPDTSPEVFLHILSGASEYDELPVRHNEENYNETLSNRVRYMVDQNLLDDPHVKAYLLFQAHF

SEQ ID NO: 84444 - protein, 41 aa, Gossypium hirsutum
  Clone ID: LIB3585-046-Q6-K1-D11.pep
CADIIVHESNSQKRFSEMSFHELCCICNFSDCTFTEYRGNI

SEQ ID NO: 84445 - protein, 122 aa, Gossypium hirsutum
  Clone ID: LIB3585-046-Q6-K1-D12.pep
PPSQTSSPTTPLARDLSSELPPSIPLTTSLTLIYHYLLHYHLNQHLNDRLNSLPGLLPALISALILAHPLSTPTLTPTLSVAPWLSLIQTLMQTTLQLRLILFINNIKNNGITHFVTPLPSQ

SEQ ID NO: 84446 - protein, 107 aa, Gossypium hirsutum
  Clone ID: LIB3585-046-Q6-K1-D2.pep
MKGGRKNLKRAAKDQILNLQHGQSVMQVLSLRGSNLIEVIDARGQKSLALFPAKFQKSMWIKRGSFVVVDESGKEKALESGSKVACIVSQVLFFDPVRALQKSSGRP

SEQ ID NO: 84447 - protein, 191 aa, Gossypium hirsutum
  Clone ID: LIB3585-046-Q6-K1-D5.pep
MGSIDTPTITQNGSTQSQAGAAPADDNQRPLASSNGAPESEATKKRRSGILPLEVGTRVMCRWRDGKYHPVKVIERRKLQSTEPSDYEYYVHYTEFNRRLDEWVKLEQLDLDSVETVVDEKVEDKVASLKMTRHQKRKIDETHVEGHEELDAASLREHEEFTKVKNIATIELGRYEIETWYFSPFPPEYND

SEQ ID NO: 84448 - protein, 100 aa, Gossypium hirsutum
  Clone ID: LIB3585-046-Q6-K1-D8.pep
IAAHKERNIRSLQRKCSKNIQRCYENLPLFHNKKTGKIKCPTVGKDYNMENEQISFQIMNLFLFLSILPALGYSWKNMENEEEKKNMNKKRADAWSTWNT

SEQ ID NO: 84449 - protein, 175 aa, Gossypium hirsutum
  Clone ID: LIB3585-046-Q6-K1-E11.pep
DTLTEDEARFYVGQTVLAIESIHKHNYIHRDIKPDNLLLDRNGHMKLSDFGLCKPLDSSSFPDLREDDHGGGRNLKPSAESCRHSNVPTTPTRTQQEQLLHWQKNRRTLAYSTVGTPDYIAPEVLLKRGYGMECDWWSLGAIMFEMLVGYPPFYSEEPLSTCRKIVNWRTHLKFP

SEQ ID NO: 84450 - protein, 60 aa, Gossypium hirsutum
  Clone ID: LIB3585-046-Q6-K1-E12.pep
QLNMRPLPNSKIITPDSIAPELFIYTAYITECHCYSLVAHMSEMLVVSPSFYSEEPLSTC

SEQ ID NO: 84451 - protein, 49 aa, Gossypium hirsutum
  Clone ID: LIB3585-046-Q6-K1-E2.pep
TTLASQRNIAAFLESLWTLRTIIPGRLPTEYSLIYQTIEPLLARERLLG

SEQ ID NO: 84452 - protein, 142 aa, Gossypium hirsutum
  unsure (1)..(142): unsure at all Xaa locations
  Clone ID: LIB3585-046-Q6-K1-E4.pep
MTLLTLRHNSGLGRSLAFIDRLFHVFFTTKELATGMPTLRHNLTVTXLQDLINDIDADGNGTIAFPEIXNLIAKKLKDTTSEEELKESFMLIDNDQNGFISPAELSYVITHLGENLTDEDVDEMTREAYVDSDGQINYYKFV

SEQ ID NO: 84453 - protein, 104 aa, Gossypium hirsutum
  unsure (1)..(104): unsure at all Xaa locations
  Clone ID: LIB3585-046-Q6-K1-E7.pep
FNRTKGGLIHLNHGRPXPLQEVGNASFLAALYSDYLDAAETLGWYCETNSYXLMCLREYGXSXMDDILGKETQRMSYVAVYGNHYPGHVHPRGAGKARSTIRYL

SEQ ID NO: 84454 - protein, 102 aa, Gossypium hirsutum
  Clone ID: LIB3585-046-Q6-K1-F4.pep
NYHFFYLSLWLLHTKMMAYLGRIEHDNDSESKLDDNVASLSNSIDLQGSIRKGDVSSLSSQDCSGLYSATALFLSKPYDSRGYTMDRLALMADLLFDTISKL

SEQ ID NO: 84455 - protein, 63 aa, Gossypium hirsutum
  unsure (1)..(63): unsure at all Xaa locations
  Clone ID: LIB3585-046-Q6-K1-G1.pep
PCTSTDYAARYFKNAYYMGLTPYEMVEHMXRTAYDYSVIAHKIKRGVNRNQRIKLLQLFDNTN

SEQ ID NO: 84456 - protein, 44 aa, Gossypium hirsutum
  Clone ID: LIB3585-046-Q6-K1-G2.pep
TKGTKSKVMMCTDLCHHNSRSHKNILPSLTKNDHSSPIVSLILT

SEQ ID NO: 84457 - protein, 119 aa, Gossypium hirsutum
  unsure (1)..(119): unsure at all Xaa locations
  Clone ID: LIB3585-046-Q6-K1-G8.pep
SHFGWRTITDSYSISIFLSTHXRVDHNSVYNRSYPLVDAAIGSTVITIXNNHCTHHNELLQLGHHHSYTPDNLMPATIAYDHFGKGLIQRMPMCRHGYFHVVNNDYTHWEMYTLARSPI

SEQ ID NO: 84458 - protein, 65 aa, Gossypium hirsutum
  Clone ID: LIB3585-046-Q6-K1-H5.pep
IKLPEIKCREKVDTGANSASFIERAGSASSIQSSSFVSQGFRVLFIYWIIFCLVAEKKRGKKLLL

SEQ ID NO: 84459 - protein, 43 aa, Gossypium hirsutum
  Clone ID: LIB3585-046-Q6-K1-H6.pep
PNFKLSLHDLLNDSKVVPLSAYRDLGVHITLLHRHSTGHYALD

SEQ ID NO: 84460 - protein, 53 aa, Gossypium hirsutum
  unsure (1)..(53): unsure at all Xaa locations
  Clone ID: LIB3585-046-Q6-K1-H9.pep
ICKTTLIYKXDILYYLIRSVYSLVILKANLLPHLINSTYRKNILKLPYVLYKY

SEQ ID NO: 84461 - protein, 78 aa, Gossypium hirsutum
  Clone ID: LIB3583-027-Q6-K1-B10.pep
FCLILFIDRFGGYSIYFLLQRFKTMGSVSYLELSSFHLVMLYFFSIFLLYLPVEASHVNTEWKAMCLVFTCFQHSLDR

SEQ ID NO: 84462 - protein, 46 aa, Gossypium hirsutum
  Clone ID: LIB3583-027-Q6-K1-B9.pep
LHILRNTSGLLNFIMDCGRAVGIKNHNHSQYKKVGSRCPPGEWMCI

SEQ ID NO: 84463 - protein, 155 aa, Gossypium hirsutum
  unsure (1)..(155): unsure at all Xaa locations
  Clone ID: LIB3583-027-Q6-K1-C12.pep
GRVGDHVSDEESEKKLDLFSEHASGLLKTIYGGAIQALPSSFSLRKQFLEILESIEVADSEELRIEILRDMKRDFSADPEYWDWLARLEMPDASITXEKNEDAMYSRLQKAVQVYEEAIKAVPSATMFKLYINFLLDAIASERGEVEAFSLSNHA

SEQ ID NO: 84464 - protein, 122 aa, Gossypium hirsutum
  unsure (1)..(122): unsure at all Xaa locations
  Clone ID: LIB3583-027-Q6-K1-C3.pep
MGRTMEWAGREKHMRGIPRKMVFLAVGAFAKAVATLLNTTSVHNADTLIRLVRSRPPGIPLLTVSNHMSTLDDPLLXGFKGFPSLXAHLARWVLAAEDICFKISVLTNFFRLGKCIPITRGA

SEQ ID NO: 84465 - protein, 64 aa, Gossypium hirsutum
  Clone ID: LIB3583-027-Q6-K1-C9.pep
QSTVPLKTSDVDHTQHVDTRLSRLGVIKVTKKFFSLESRRQQPNSQVSHPHAHILECISPAHAS

SEQ ID NO: 84466 - protein, 58 aa, Gossypium hirsutum
  Clone ID: LIB3583-027-Q6-K1-D12.pep
EDNDDDNDDGYGGGGEYGMGRDLPGGVIQLNLLLEDLPSAAGEVDLAEQMVKTIRRYD

SEQ ID NO: 84467 - protein, 66 aa, Gossypium hirsutum
  Clone ID: LIB3583-027-Q6-K1-D3.pep
LKLLLFSLLTVKDHGWFLLFNSLKSVSFRAFKVSKKRESLPISSVIFFRSCFSGEIVKNGEKTGFF

SEQ ID NO: 84468 - protein, 49 aa, Gossypium hirsutum
  Clone ID: LIB3583-027-Q6-K1-D6.pep
ASSVFIVFVAYLSAVVSLGIPSILFAYCWQISALNSDVGKILLVASVIE

SEQ ID NO: 84469 - protein, 43 aa, Gossypium hirsutum
  Clone ID: LIB3583-027-Q6-K1-D7.pep
PSIRRPTSAPHQSQATRSPPNGRERNPAEPSATRARMPRTLLT

SEQ ID NO: 84470 - protein, 63 aa, Gossypium hirsutum
  Clone ID: LIB3583-027-Q6-K1-D9.pep
RVGRSCGNDSGNGMAHFIFHHKGTTCDRNPNGKITGFSSISLFQSSTLTKTLDLNLKFLQALS

SEQ ID NO: 84471 - protein, 46 aa, Gossypium hirsutum
  unsure (1)..(46): unsure at all Xaa locations
  Clone ID: LIB3583-027-Q6-K1-E3.pep
FATAKGQVPGNKLVPFFGYPGVAMWQFMPXASLDTSEDHVLRPPVX

SEQ ID NO: 84472 - protein, 92 aa, Gossypium hirsutum
  Clone ID: LIB3583-027-Q6-K1-E5.pep
SRAWNWNCPNTRRWMKIKLSISLIHKYFIMLRKSLTYIISVHTIYTNKLTGLFRHTINITNVDTSVADIPATVLNCLRMREGGETLYYSYIK

SEQ ID NO: 84473 - protein, 85 aa, Gossypium hirsutum
  Clone ID: LIB3583-027-Q6-K1-E7.pep
DPSHASQWQPSSFSTSHLEESQMTGRASTLWQSWARCTPTARLPTMVFTQRYHRHMDIIWRLPGAALHQPSLLFHFYDHVFLLGG

SEQ ID NO: 84474 - protein, 63 aa, Gossypium hirsutum
  unsure (1)..(63): unsure at all Xaa locations
  Clone ID: LIB3583-027-Q6-K1-E8.pep
KKINRLQTLCRPSISRLMQIXISRMKKPNKLHVSSPGPVSICNKSQKPITESFNRTRGRPGYG

SEQ ID NO: 84475 - protein, 71 aa, Gossypium hirsutum
  unsure (1)..(71): unsure at all Xaa locations
  Clone ID: LIB3583-027-Q6-K1-F2.pep
HASGYAGSGRHLIEENQSHHPRTDIARGYMTNSELERPVKEFGRRCSHISRIYSIWRKCAWVXHCGVIEDF

SEQ ID NO: 84476 - protein, 61 aa, Gossypium hirsutum
  Clone ID: LIB3583-027-Q6-K1-G10.pep
KCFFREWFPCKSNGFYLSTLMFGSVFPNHDVGHACLHNVGASPLALLPCLKEWTEKMVIFR

SEQ ID NO: 84477 - protein, 105 aa, Gossypium hirsutum
  Clone ID: LIB3583-027-Q6-K1-G9.pep
PRVRTDSGNKVTKFQQCLLLNISYCPSSEVDLSSGKNLVVVVYNPLGWKREDIIRIPAIDENVIVKDHKRNEIESQIVPLLNASLVIRHYYSMAYVGRLPRATPK

SEQ ID NO: 84478 - protein, 179 aa, Gossypium hirsutum
  Clone ID: LIB3583-027-Q6-K1-H12.pep
MKRALPWSDQVDVISSDESSSSSSSSSSYSSLDVEVQVNDGTKNVAVDQPPKELSSDGLLIRKAEIYQEYMKQLPIPTQRGSVIPFTTWMGLGRSIKQLYGQPLHYLTNILLKQWDHSRVGSEDEHRPLDIIVHPCKAEATVWLVEELHRQTSSHHHMAKLWQSDPMHHAFIDSIFPQL

SEQ ID NO: 84479 - protein, 115 aa, Gossypium hirsutum
  unsure (1)..(115): unsure at all Xaa locations
  Clone ID: LIB3583-028-Q6-K1-A10.pep
DRRVRLCSAKDFRRRGRVVDPRQRYYDCERRYQSETRGQTVQYLCXDWRDRLLKEEHQRDEDEFKMRYQDCRQHCQQEERRLRTQGEHSCQEQCERQQQEEPDKRFKECQQRCQR

SEQ ID NO: 84480 - protein, 59 aa, Gossypium hirsutum
  Clone ID: LIB3583-028-Q6-K1-A8.pep
MKDFPGKAYSVDSSLYNVKIEVKANYRPQHVPLVSLMSKLNGKAIIGHPLMVKGLSDDH

SEQ ID NO: 84481 - protein, 70 aa, Gossypium hirsutum
  Clone ID: LIB3583-028-Q6-K1-A9.pep
MGLFESGCSLNSVVAILMEESDLPLSKLLEAIHEKVKDRMGNVSLAAVKSAVLLVGQRVKYGLDNDEADI

SEQ ID NO: 84482 - protein, 62 aa, Gossypium hirsutum
  Clone ID: LIB3583-028-Q6-K1-B10.pep
LIHFVSLSFSLTAFIGLNYDVKVPIFEFLSHAKPFLFEYPKPTTALTTTSSGKLPTAVHSTL

SEQ ID NO: 84483 - protein, 49 aa, Gossypium hirsutum
  Clone ID: LIB3583-028-Q6-K1-B12.pep
FFRSCEEYESQHWYYYINSDTLFKCSRNSITQPTVRDGGRTVGRPGYGR

SEQ ID NO: 84484 - protein, 56 aa, Gossypium hirsutum
  Clone ID: LIB3583-028-Q6-K1-B4.pep
PTRPIFSFSLVFVFLFLILSIPCGIFKRELKGMQTIPPTPPSYGTNRLFSFNYEVI

SEQ ID NO: 84485 - protein, 83 aa, Gossypium hirsutum
  Clone ID: LIB3583-028-Q6-K1-B9.pep
ATRPQSHLSPLFSLCSLSLLRTLTLPTNQDNMKEENQADTKRPSFRKSKAGKKRGRLQGSKQAKEAARLFVHGGVRSNTRGSP

SEQ ID NO: 84486 - protein, 141 aa, Gossypium hirsutum
  unsure (1)..(141): unsure at all Xaa locations
  Clone ID: LIB3583-028-Q6-K1-C2.pep
ADRRIEAIPALLQDAIDRLVDSQVMTAKPDSCIIDVYNEGDHSMPRMWPPWFGKPICVMFLTECDITFGRMISVDHPGDFRGSLKLSLAPGSLLVMHGKSADFAKHALPSVRKQRILXTFTKYQPKKSMSDNPRLXSPLLS

SEQ ID NO: 84487 - protein, 61 aa, Gossypium hirsutum
  Clone ID: LIB3583-028-Q6-K1-C3.pep
YAISSHTLPHATSSLGCGDSSKSPAVFSEDLNNPYNEGHSEIIMKDFLNLPADASSDGCFI

SEQ ID NO: 84488 - protein, 93 aa, Gossypium hirsutum
  Clone ID: LIB3583-028-Q6-K1-D1.pep
SHCIESKDLSISQDMKPVLNTGGTSSLCSDYFLIDAQETKADCSVSRTPDSNLCADSHINSLASHYSAFKEWQPLSDASEYHENQRMHLEVLF

SEQ ID NO: 84489 - protein, 76 aa, Gossypium hirsutum
  Clone ID: LIB3583-028-Q6-K1-D11.pep
VRIPVAHRRFYLIILKTDECLLDRKKKQVCEVAWVHTQMFNGTDCTVNQLSFNCMRHGNRQSHPHFNLTKPPINTI

SEQ ID NO: 84490 - protein, 64 aa, Gossypium hirsutum
  Clone ID: LIB3583-028-Q6-K1-D2.pep
VIDSVQRPRTLVSHGLINGNNLCKIGFSVCSMTAQETELVHSLSADRFSVMEVVVRVGGRVADA

SEQ ID NO: 84491 - protein, 57 aa, Gossypium hirsutum
  unsure (1)..(57): unsure at all Xaa locations
  Clone ID: LIB3583-028-Q6-K1-D5.pep
RLHFFAFFYVCCLFSSWLLARXSVLTRPDPXGTSHLTTTIHALRLNALPSSVSQAVK

SEQ ID NO: 84492 - protein, 51 aa, Gossypium hirsutum
  Clone ID: LIB3583-028-Q6-K1-D7.pep
VSLPTTDRRVFKAVQPCKYTVITPGTILPICSALSHRDKPHRTRGRPGIRT

SEQ ID NO: 84493 - protein, 109 aa, Gossypium hirsutum
  Clone ID: LIB3583-028-Q6-K1-D8.pep
MARRLAGFLVLLLVVSICEAAFLFQPISDSHRSTALELFTPDHGSFKSLEETYEALRTFQILGIEKKPDLTATACRSISETVGSSSSTAKDLFYALKANSIAECKIDKK

SEQ ID NO: 84494 - protein, 43 aa, Gossypium hirsutum
  Clone ID: LIB3583-028-Q6-K1-E1.pep
SRSRAAPRDLDLDLPSFQAQGSEHFCADLPSSLNTTICGGPII

SEQ ID NO: 84495 - protein, 79 aa, Gossypium hirsutum
  Clone ID: LIB3583-028-Q6-K1-E3.pep
YIIISMGRINECISRLFKYCCLDTVRFLQYECYSRAHRYCSQNIIKWVNVINYVVCMFSYNVQRLVFLSPNFFNYWFYL

SEQ ID NO: 84496 - protein, 45 aa, Gossypium hirsutum
  Clone ID: LIB3583-028-Q6-K1-E7.pep
NITTDRWNLNCQHFKGAAVSVMRQTIEPNGLDLPYFTNASKIIYF

SEQ ID NO: 84497 - protein, 42 aa, Gossypium hirsutum
  unsure (1)..(42): unsure at all Xaa locations
  Clone ID: LIB3583-028-Q6-K1-E8.pep
LLVLFHGCCAHIDLVTNHHQEPAVXHPQRPQPXHQSKCQLHN

SEQ ID NO: 84498 - protein, 48 aa, Gossypium hirsutum
  Clone ID: LIB3583-028-Q6-K1-F2.pep
CFSLYVSLVLCAVWCDFVFSLFCEDFFAFVGVSQGSLCLHVSRQSHFL

SEQ ID NO: 84499 - protein, 52 aa, Gossypium hirsutum
  unsure (1)..(52): unsure at all Xaa locations
  Clone ID: LIB3583-028-Q6-K1-F9.pep
LRHDRIKTTSATTMVXLNTSVAGRGSYIPRNCLFIFIPCQYMTHNCPSALSD

SEQ ID NO: 84500 - protein, 66 aa, Gossypium hirsutum
  Clone ID: LIB3583-028-Q6-K1-G10.pep
DSCPSFFLSLFSSLHDLLVCLHLPMCSVGFVSLHAVTLLMPSGAAAAVCIVPAALFACGRRVSTDR

SEQ ID NO: 84501 - protein, 36 aa, Gossypium hirsutum
  Clone ID: LIB3583-028-Q6-K1-G3.pep
TNSLYTTAHNLFLIICLVPTPNYGPLTLSSCDACRR

SEQ ID NO: 84502 - protein, 54 aa, Gossypium hirsutum
  unsure (1)..(54): unsure at all Xaa locations
  Clone ID: LIB3583-028-Q6-K1-G7.pep
HASVLSLTPRYSNQFGRFYEAXCPRDDQQQLREAHLSSVAFEINKGSIFVPHYN

SEQ ID NO: 84503 - protein, 49 aa, Gossypium hirsutum
  unsure (1)..(49): unsure at all Xaa locations
  Clone ID: LIB3583-028-Q6-K1-G8.pep
GSLLVHDHHALXLDTFHMDGLPPPSTPXRLLLIAANIKLLSSKGCSXGR

SEQ ID NO: 84504 - protein, 73 aa, Gossypium hirsutum
  Clone ID: LIB3583-028-Q6-K1-H8.pep
SYEEVRAQHETKPTGHNQTDRDTQLERTTGYYNEPGCATFDPRADKKELEPKTMHSIRPVHVGQNVRTENLIF

SEQ ID NO: 84505 - protein, 66 aa, Gossypium hirsutum
  Clone ID: LIB3583-029-Q6-K1-A2.pep
VDIVNFALCYSDLGVSVKNGYVFNTSIVRLFKGFPCNIHISNTSASRKMKSMSNIALCDRLLSIVS

SEQ ID NO: 84506 - protein, 171 aa, Gossypium hirsutum
  Clone ID: LIB3583-029-Q6-K1-A7.pep
MEVAQLSSLAAVDSHAGSCEAEMPSRLLNDAVRSLPYHVVKDLLSIGVCSRCVLRILGTEDHIYCHSSFSQSMLCSVLEEVTSFKSEGDFQFCSVCSGILQLSYRDDKETLVKMKSPNDMALVIAELVKKEGHQVDGFSLEVSIPQFILENESSLLSGMKKRYESEPWFQE

SEQ ID NO: 84507 - protein, 45 aa, Gossypium hirsutum
  Clone ID: LIB3583-029-Q6-K1-A8.pep
QEEKHNPYVFEDKHFSAAVKTGKGRVYLITRLTHFIGSDLFNVLK

SEQ ID NO: 84508 - protein, 42 aa, Gossypium hirsutum
  Clone ID: LIB3583-029-Q6-K1-B2.pep
FNSIPSCFASNQTEIFTSISLSTYIISRKKKSLNSNLNTHLG

SEQ ID NO: 84509 - protein, 51 aa, Gossypium hirsutum
  Clone ID: LIB3583-029-Q6-K1-B3.pep
NHIKMEKNILKKNTNVLRAKAYTLSSPPEKKRRDHIEKIISVCIVSVCWCV

SEQ ID NO: 84510 - protein, 46 aa, Gossypium hirsutum
  Clone ID: LIB3583-029-Q6-K1-B6.pep
HRVLMMWDRAWITRLMMVVVLIGHKWTFQLLSDICIKLIYLLEFEY

SEQ ID NO: 84511 - protein, 50 aa, Gossypium hirsutum
  unsure (1)..(50): unsure at all Xaa locations
  Clone ID: LIB3583-029-Q6-K1-B8.pep
SVSRRPRVRPPPPRHSAEKHNLTLHFILERYLSGEWSXNKHGRGHVKFIL

SEQ ID NO: 84512 - protein, 148 aa, Gossypium hirsutum
  Clone ID: LIB3583-029-Q6-K1-B9.pep
DAAVKDSLIKSIQLQLSDAKIKLADKQAALEKTQWEAMTSKQKVEELQNNIDSMQGEFSSFMLLLNGLTKNNPTTHADDYDLEPYPLDPLPCMDDVNDEELQKMEEARQAYVAAVAATKEKQDEESLAAAASARLYLQSFLFRSESME

SEQ ID NO: 84513 - protein, 82 aa, Gossypium hirsutum
  unsure (1)..(82): unsure at all Xaa locations
  Clone ID: LIB3583-029-Q6-K1-C2.pep
NAGRLTSVVLSIASQPPGRGTTFQCLKXTTIPISSSSSPFIFQTLPKTLNLALFSPHSTPKPPPFSALIITLSPSILAPSPL

SEQ ID NO: 84514 - protein, 56 aa, Gossypium hirsutum
  Clone ID: LIB3583-029-Q6-K1-C3.pep
LSKSRQPSVRFLVPGPKYLNESDRSSCYLKHTRILSSVLKFRQPRKTPFVEYEVAQ

SEQ ID NO: 84515 - protein, 64 aa, Gossypium hirsutum
  Clone ID: LIB3583-029-Q6-K1-C5.pep
FYFSEGQEKNFKIKKEPSAAMAGHDQQLRGADDIKNFLHENEPSTSNVIIYDTLVPFYDILLFI

SEQ ID NO: 84516 - protein, 121 aa, Gossypium hirsutum
  Clone ID: LIB3583-029-Q6-K1-C6.pep
PFFFQFAGFLDMGKLNSSLFLRSFVTGGRNLSSLHPSFSCSFNTIGTHIEALSKNSMTEKGNPTKDDRFHNVDEASNLEDTMSRQYPTPQGGAMTNNGRVFMERATSAVPRHINHRPNKLS

SEQ ID NO: 84517 - protein, 47 aa, Gossypium hirsutum
  Clone ID: LIB3583-029-Q6-K1-C8.pep
PTVAHRRQQSSSLISPVAVVRHIWRATFTFPLIIKSIFIEKYYEIPL

SEQ ID NO: 84518 - protein, 48 aa, Gossypium hirsutum
  Clone ID: LIB3583-029-Q6-K1-C9.pep
LSAQPLKCTPSQASVRIGTSNAACNLPSQHHSLSCRNEQKASRSDACE

SEQ ID NO: 84519 - protein, 40 aa, Gossypium hirsutum
  unsure (1)..(40): unsure at all Xaa locations
  Clone ID: LIB3583-029-Q6-K1-D8.pep
SIPQXXXQELKQVPSNRCIRANLLTIQSKQFWHETSVMTS

SEQ ID NO: 84520 - protein, 77 aa, Gossypium hirsutum
  Clone ID: LIB3583-029-Q6-K1-E1.pep
NSCPAEVFALLLSTLCLGEQTPHPSSPICIVNRVCIIIIYVFSCLMYYFNINIGIHYFVYFFLPAYNLPLSVITYYF

SEQ ID NO: 84521 - protein, 54 aa, Gossypium hirsutum
  unsure (1)..(54): unsure at all Xaa locations
  Clone ID: LIB3583-029-Q6-K1-E2.pep
FSHVQPTYSQKHATAIYMTRVGSKQYTLLYHFFFXVRQIPSWYYHLSFHNVSLF

SEQ ID NO: 84522 - protein, 58 aa, Gossypium hirsutum
  Clone ID: LIB3583-029-Q6-K1-E7.pep
KTQPDPYLFLGRITAYVGPIKIALALSYAYQFLNSLSLNYPSLSFCSNHVSVRGGRGG

SEQ ID NO: 84523 - protein, 65 aa, Gossypium hirsutum
  Clone ID: LIB3583-029-Q6-K1-F6.pep
TTIRKNRTFINAEHIYMDVYAELYSDRTKIMRLIFLADHCHNTQMHLEALRMAHHDLNIGQSTHV

SEQ ID NO: 84524 - protein, 67 aa, Gossypium hirsutum
  Clone ID: LIB3583-029-Q6-K1-G7.pep
CSQFQTQQIYCVRNREGKITEGGKDTIHTVYYAWAMQQVDVEELGEGALYPIWKLREMQQIGIQALI

SEQ ID NO: 84525 - protein, 41 aa, Gossypium hirsutum
  Clone ID: LIB3583-030-Q6-K1-A2.pep
QIIAYRVRENNEFTSTSLFISFYMTKQCARICWVEQNLYGI

SEQ ID NO: 84526 - protein, 69 aa, Gossypium hirsutum
  Clone ID: LIB3583-030-Q6-K1-A9.pep
KTCLLFNCDYGTLGMLISESGTSIQHSQLELRVLRNHYALISIIHLHSTHTSSRSCHSKCANASPIAII

SEQ ID NO: 84527 - protein, 40 aa, Gossypium hirsutum
  Clone ID: LIB3583-030-Q6-K1-B7.pep
RAAVNRAMFKVDKAFEFQLKRRRWRRWRRVGGRWVDGIGR

SEQ ID NO: 84528 - protein, 70 aa, Gossypium hirsutum
  Clone ID: LIB3583-030-Q6-K1-C7.pep
SVSRSPTRRGPWADLGFQHNFESGFLRGPGNKQRIDLLPTTLKATFWSSHRRNGHYKWSVLTFLGIITLS

SEQ ID NO: 84529 - protein, 35 aa, Gossypium hirsutum
  Clone ID: LIB3583-030-Q6-K1-C8.pep
FLPNLPRAALYLFIASCVMYKYASPLNWVKERFCH

SEQ ID NO: 84530 - protein, 110 aa, Gossypium hirsutum
  unsure (1)..(110): unsure at all Xaa locations
  Clone ID: LIB3583-030-Q6-K1-D2.pep
TICAMTINXNLAYPERANIFNPQSGRFSTLYTFHQHILQRLQLSADIXDLYHSTHIIPHSNDNPHIILYLLICSSKIQTINHSGYSIFDHYLNQGHLLTVPHNFTFMKHP

SEQ ID NO: 84531 - protein, 64 aa, Gossypium hirsutum
  unsure (1)..(64): unsure at all Xaa locations
  Clone ID: LIB3583-030-Q6-K1-D6.pep
ARKPCFSIDTLPKPHHQQADLKKLCFSTHPINLVLNFDLVSQNHSIYVXELYQSSFYFSFSSCS

SEQ ID NO: 84532 - protein, 166 aa, Gossypium hirsutum
  unsure (1)..(166): unsure at all Xaa locations
  Clone ID: LIB3583-030-Q6-K1-D8.pep
PRVRSTSAKAKXRAKKEAEQKANAEKSSGLESSSSSLNTGKGKPSSEKDGEAMQVDSLPEKKAEPEPEPEPTFEILTNPARVVPAQEKFIKFLEDSRYVPVKSAPSGFVLLKDLRPNEPEVLSLTDAPASAASRTTGRPAVGQQSSSSAMAVDDERQVPQPFEYTS

SEQ ID NO: 84533 - protein, 53 aa, Gossypium hirsutum
  Clone ID: LIB3583-030-Q6-K1-E2.pep
PRVRSCTTTTDKRVILNKSVVVLCCFFYFARVSFSEVPPSFFYLFNIVKDRPR

SEQ ID NO: 84534 - protein, 56 aa, Gossypium hirsutum
  Clone ID: LIB3583-030-Q6-K1-F4.pep
LATHASLFCSNDNAERSSCAFRMLRIPAYDVSRNGCFMSTVCAGEWTRKMTEQESA

SEQ ID NO: 84535 - protein, 75 aa, Gossypium hirsutum
  Clone ID: LIB3583-030-Q6-K1-F8.pep
INKHLDNGKYVMYTAEQVEPLERVYAECRKPNSLHRLHPIIDIHILYKPLPGPTMTNVFSQTTYGHRELSRFLHA

SEQ ID NO: 84536 - protein, 72 aa, Gossypium hirsutum
  Clone ID: LIB3583-030-Q6-K1-G5.pep
FQMLWDSSEKWRCNTDMVFFLNLYLLHKLCADFLFLLNIRIYIWSETIDLMILYLKCRKSLPKVILDLIEFV

SEQ ID NO: 84537 - protein, 62 aa, Gossypium hirsutum
  Clone ID: LIB3583-030-Q6-K1-G8.pep
NIYSTIKKKSKISSYVFLKQRTATPQTRSSSYIGTYFIPHYMPYNYLRTASSPERPRSAHGP

SEQ ID NO: 84538 - protein, 54 aa, Gossypium hirsutum
  Clone ID: LIB3583-030-Q6-K1-H4.pep
PLRMQKLRFKVKKRCLTSPKQRNTLRFEISMPKFPLTKCVDACIINYLIHKINK

SEQ ID NO: 84539 - protein, 75 aa, Gossypium hirsutum
  Clone ID: LIB3583-030-Q6-K1-H7.pep
PVPTRPLFTADPHNDNSFQKRLYSRLSEIAILFFSDLATFRAATANPLQTFFSNPSDMTISFWDKEPLELLYLES

SEQ ID NO: 84540 - protein, 60 aa, Gossypium hirsutum
  unsure (1)..(60): unsure at all Xaa locations
  Clone ID: LIB3583-059-P1-K1-A10.pep
SYSCKHTGTNKILSLILXNEILNSLKKSSHTDSSPFXFLVSISIHKTFIYLILTLYHNNP

SEQ ID NO: 84541 - protein, 121 aa, Gossypium hirsutum
  Clone ID: LIB3583-059-P1-K1-B9.pep
TKQKPDAKEKFHSPLKLCFSFEYFFSFNICFCVHRFQYSNGFFIAENCKINNNNNNLKIQSVLRFCYFFRCSCVCILQVHAGVEMAHTRGGATRAGIWFEFAYDAEAEACCCCCTRKIRNP

SEQ ID NO: 84542 - protein, 101 aa, Gossypium hirsutum
  Clone ID: LIB3583-059-P1-K1-C1.pep
VSFACLWAMCTSDAWMCVCDVQTCGWVCFSVWICDLYSWDLGGGVLSSHMIFTFYLCVFVSVSIDRSAVLYFWRIISLFFRKVLADKASQGKKKPSAKYAS

SEQ ID NO: 84543 - protein, 82 aa, Gossypium hirsutum
  Clone ID: LIB3583-059-P1-K1-C10.pep
FSEHQPTHRHILIAISPFPPDLSRHSKKPSLSRVVNALHKILIIYPIFLKLKEGFQLSVSPQLVGSLLLLPFSFVCLDAWDP

SEQ ID NO: 84544 - protein, 57 aa, Gossypium hirsutum
  Clone ID: LIB3583-059-P1-K1-D12.pep
LVQCCLYIQRVGCTLPYIQLDWVAGQVVPSCLSLNPWFSFTTSNKLNRKCPVIRYSD

SEQ ID NO: 84545 - protein, 72 aa, Gossypium hirsutum
  unsure (1)..(72): unsure at all Xaa locations
  Clone ID: LIB3583-059-P1-K1-D3.pep
RYFNEDSDEXDTSSESRTRKVQSQTWLXYGVAASCPSLSPRSGGLVDYEDYEDDEYYRPPPKKHTETSEDDE

SEQ ID NO: 84546 - protein, 164 aa, Gossypium hirsutum
  unsure (1)..(164): unsure at all Xaa locations
  Clone ID: LIB3583-059-P1-K1-D8.pep
FLRCYDFSTQREAQVIPIRRPGVXSLNQSARTLSYSPTENAVLICSDVDGGSYELYVIPKDSFGRGEMQEAKKGLGSSAIFVARNRFAVLDKGNNQVLIKNLKNEVVKKSGLPVPTDAIFYAGTGNLLCRSEGRVVIFDLQQRLVLGDLXTPLVKYVVWSNDME

SEQ ID NO: 84547 - protein, 133 aa, Gossypium hirsutum
  Clone ID: LIB3583-059-P1-K1-E2.pep
KNTDRKSVLATSRTTKNPLPPSRKCLPVLKKDKATEASRNTSKAKVCESASHQASYGKNHLSRNRGSDSFVMMATKSGSNSAARILPRSFKPSVKTALRPSNAQRASKSKCSSSLKKQASCAAILSKKDIKCT

SEQ ID NO: 84548 - protein, 54 aa, Gossypium hirsutum
  Clone ID: LIB3583-059-P1-K1-F11.pep
YIVYYKSAFVIVLEFTLLYTVCMLGLQKLLWKGLTVGRDAGVFSHWSEHYCYDV

SEQ ID NO: 84549 - protein, 64 aa, Gossypium hirsutum
  unsure (1)..(64): unsure at all Xaa locations
  Clone ID: LIB3583-059-P1-K1-G11.pep
SFCVVGLFLEANKGISSIQLFGSLFCFSCNFLCQLVTVHSPFLXKASKLISLFLSLPLVLEMSV

SEQ ID NO: 84550 - protein, 86 aa, Gossypium hirsutum
  Clone ID: LIB3583-059-P1-K1-H10.pep
PRVRIYFPFFFLSPSHFISSPCCFSPNSYGDAIFHVSVFILYENPIQNYLRRYNFYSTLFCPLFLLFKPCFPFFFLACSSAFSLLF

SEQ ID NO: 84551 - protein, 131 aa, Gossypium hirsutum
  Clone ID: LIB3583-059-P1-K1-H3.pep
RAPTRTRILRASIERKEAKPYLFFVETAALSLFTDIPSHSPLLFDDCGCWGEREEGFAVEISDEVEGAVAVAVILVFVMGGAKAWMFSVVSVNLNGSVLSNKHVCWRWRSSAAQQSKPISWSLVFWLDAFS

SEQ ID NO: 84552 - protein, 92 aa, Gossypium hirsutum
  Clone ID: LIB3583-060-P1-K1-A5.pep
RHGPPLVKVSTWFLSLRSRNPGGSVRRIQPQNEDSDRERARVDDMCVDSPCIAREALLCRCLACCSWQICRSCMYSRLPACWECCRLRWYLL

SEQ ID NO: 84553 - protein, 149 aa, Gossypium hirsutum
  unsure (1)..(149): unsure at all Xaa locations
  Clone ID: LIB3583-060-P1-K1-A6.pep
PRVRHASHASDRLSRRYHDRRQHCHRREDAVIQRVQIXQEQYARQQHKQPDRRFKDVXHRCQRHEQGPGPKHHSVNECLXQYHQDLIEGEREXTKWIDXQEADRDEGEQHQRNNPYYFHLRSLHKRFXKNMCNFRVLQRFAVKHHLLKG

SEQ ID NO: 84554 - protein, 105 aa, Gossypium hirsutum
  Clone ID: LIB3583-060-P1-K1-A7.pep
VYLTKESIIRCTSILLRILRRESGSKWVLQSPVYMVGSALGGVDIQLLASIKLATKSSQVQKREQRPKLLKDFSQTPNPQNEVKTGVRFSLITQNPRLKFFGLFF

SEQ ID NO: 84555 - protein, 169 aa, Gossypium hirsutum
  Clone ID: LIB3583-060-P1-K1-B3.pep
MAMSGLVSTRNFGHFIGSGILCRGEQAILLHRGERSSLAVVHGNIVKPISVSPNGRQFILLSLHHSDKSHRVYPQHRSKGSFACCSFSSSSPGGWLEAGDKDKIVENRTSAFYKSEEYDITEAKLDSLPSPDETNEAILVERDIPWWQSFPKRWVIVLLCFATFLLCNM

SEQ ID NO: 84556 - protein, 92 aa, Gossypium hirsutum
  Clone ID: LIB3583-060-P1-K1-B4.pep
HASVWICAATAVDSGRRALQYLRLDEEIQKKETNGFDGLKVDLIITDYCMPGMTGYELLKKVKESSAFREIPVVIMSSENVIARIDRYCFFK

SEQ ID NO: 84557 - protein, 122 aa, Gossypium hirsutum
  unsure (1)..(122): unsure at all Xaa locations
  Clone ID: LIB3583-060-P1-K1-B9.pep
VVDSLQFLPAXRLTSEYLYDILTKASVVKKKIPVLICCNKNYKVTAHTKEFIRKQMEKEIDKLRASRSAISAADISNDFTLGVPEESFTFSQCRNKVTVAESSGLTGEVGQVEQFIWECVKP

SEQ ID NO: 84558 - protein, 187 aa, Gossypium hirsutum
  unsure (1)..(187): unsure at all Xaa locations
  Clone ID: LIB3583-060-P1-K1-C3.pep
MERRWHYCLPFEGNLAISCSHKNCILHVHTSTIFIVKVIDQLRDLWPCKIHIYNGDFFFVDKKDXLLNLVMILIANRDLISSNSKLSKKRGWWTPLMFTAGLTSAKYLFKHVLRQNTLTQARKNMSRHYDLSNDLFALFLDETMTYSCAVFKTEDEDLNDAQHTKISLLIEKAGIDSXHEILEIGCG

SEQ ID NO: 84559 - protein, 130 aa, Gossypium hirsutum
  Clone ID: LIB3583-060-P1-K1-C8.pep
MIFSKLGRSAPRSSHSRKLLYRGGGGAITGGTSTSLPLLSGSVYRIIGQSGYLIRYLSLIGAQKEFTSKAYLSDLNIFLANPRIRHFFSSETPKNKNYENFYPKEKKEIPKQNDQKPDFQNDSKTDYQCN

SEQ ID NO: 84560 - protein, 78 aa, Gossypium hirsutum
  Clone ID: LIB3583-060-P1-K1-D12.pep
MAGIIYQLLASSTLLSLGLYHLICTTRNFLKSPQSYSAKPLYPFPFSSNLRLKHLAVYLLMLCLFIAFLHQSFIYSDP

SEQ ID NO: 84561 - protein, 71 aa, Gossypium hirsutum
  unsure (1)..(71): unsure at all Xaa locations
  Clone ID: LIB3583-060-P1-K1-E11.pep
CRCILITRSKLKSFNSTNSFLGYQAAKPSIPKRENGKTERLPGPFMFGLATXNSCGDDIMICSEVIVDLSK

SEQ ID NO: 84562 - protein, 174 aa, Gossypium hirsutum
  Clone ID: LIB3583-060-P1-K1-E12.pep
ELARIIFGGQTSFASISPSNSGSDSNEDNKRKRDESGGNSYVLQRFGEALNENPHRVFLMEDMEQVDYCSMKIIKHAIETGKVTVSDGVTIPVMDAIVIFSCESFSSLSRACSSRKRPNCNDPEEIKEPEMAQEKNPSVSLDLNIAIGDNNEKDQSRTDDATGILKHVDKQIIF

SEQ ID NO: 84563 - protein, 189 aa, Gossypium hirsutum
  Clone ID: LIB3583-060-P1-K1-E5.pep
PTRPEELDASAAAPWSGWGTKDSCPKKSLDKTSKSSSWDTVSSWGTKTAAVHESGFIGNDNQPGQGRIENEWDNKASQVKPVQSASGWNNKVTEEMVVQSTSSWDEKASWEKPVQSMSDWVSSSAAGSDESPTKGWSKNSAWDQQKSQTMNNAWDQQKSPATDSSWDRQKSSTANNSWDQQKPPANSSW

SEQ ID NO: 84564 - protein, 167 aa, Gossypium hirsutum
  Clone ID: LIB3583-060-P1-K1-E6.pep
APTRPHKISPQIVHYGCMVDLLGRAGGLEEALDLIKLMPMEPNDVIWGSLLAACRMHRNLDMAGYATERMKELASDRTGIQVLLSNIYASAGKWTDVAKVRLQLKEKGARKVPGSSSIEVNGQIHEFTSGDESHPERMHIAAMLDEMHCRVEAAGHAPDLNNVLLNV

SEQ ID NO: 84565 - protein, 110 aa, Gossypium hirsutum
  unsure (1)..(110): unsure at all Xaa locations
  Clone ID: LIB3583-060-P1-K1-E8.pep
MGIKXFPKXLISVCASVSSNPVDALCLHPIXXNXXGSNLXXSNPRPEXXYSXXSXPNPXXLXNIXXVXMTLXLXEXXXXSPLSLHXSLTSXNXXIRXLAFXAGQRPRIXK

SEQ ID NO: 84566 - protein, 73 aa, Gossypium hirsutum
  Clone ID: LIB3583-060-P1-K1-F11.pep
NHENHGNVSPSRRYFLFLLRQGDGDQLSCSCFVLCRQSQFSFPFSFLPLAAFRKNRHYFFTFYGAISIYATIE

SEQ ID NO: 84567 - protein, 134 aa, Gossypium hirsutum
  unsure (1)..(134): unsure at all Xaa locations
  Clone ID: LIB3583-060-P1-K1-F12.pep
MMGSNSGQPQFIASTGNRSFSNAPLIQNADTNQIVVPDRKSWKNFFAYMGPGFLASIAYIDPGNFETDLQAGAQYIYGLLWIILVPSCAALVIQTLAVNLCVLTGKHLSXHCTTEYPRCPNFGIWVLAAIAIVA

SEQ ID NO: 84568 - protein, 154 aa, Gossypium hirsutum
  unsure (1)..(154): unsure at all Xaa locations
  Clone ID: LIB3583-060-P1-K1-F2.pep
HASAHASALFEKSRKRKMPRYDDRRGSGTRLYVGHLSSRTRSRDLEDMFRRYGRSLGFCLTWRSMVRGSMVDLASLSSVIACFYRNGTISKVVFLIQLXGANSQPFDXLCLDGLSVSGTPLRRIRDVDMKRDYAFVEFSDPRDAVDARYSLNGR

SEQ ID NO: 84569 - protein, 160 aa, Gossypium hirsutum
  unsure (1)..(160): unsure at all Xaa locations
  Clone ID: LIB3583-060-P1-K1-F3.pep
GAEILRHANLVRKLXGNLAFAERKLLKAERALSKVEDYLKPADRQADPESITDEERFMFRKLGLRMKAFLLLGRRGVFDGTIENMHLHWKYRELVKIIMKAKNFDQVKKVAIALEAESGGVLVSVDKISKGYAIIVYRGKDYERPFTIRPKNLLTKRRAL

SEQ ID NO: 84570 - protein, 130 aa, Gossypium hirsutum
  unsure (1)..(130): unsure at all Xaa locations
  Clone ID: LIB3583-060-P1-K1-F4.pep
GQRPQXQQRXWKRFXQEQQQXXXQGQGSQQHGHQQQQRPERKQQXXRECRERXQEXPRRREREEEAEEEETEEGEQEQSXNXXHXQRRTNQXRXREEXGXXRXPQRXXXRQPRXRGNXEXRXTNXEANPN

SEQ ID NO: 84571 - protein, 61 aa, Gossypium hirsutum
  unsure (1)..(61): unsure at all Xaa locations
  Clone ID: LIB3583-060-P1-K1-G12.pep
HQTNNHYYLHNKSLQXQFREKHIKFIVLHRFADKHHLLRGINQFPIAILXANPNTFFLPHH

SEQ ID NO: 84572 - protein, 70 aa, Gossypium hirsutum
  Clone ID: LIB3583-060-P1-K1-G8.pep
QLPMFFLVVHLSILIILTDAMASAANCLLYYTKYTNCLTVSELAKPFFACCPCHVTTHQSHSCEDISSQS

SEQ ID NO: 84573 - protein, 164 aa, Gossypium hirsutum
  Clone ID: LIB3583-060-P1-K1-H5.pep
MGSIKGVFTGKKASPDDPNISAESFTLLRFADELKNARKLGKFKQYVVGRSSDATFADVFEKQEAIVRYLGGCDPTGMNLQPSQKKEAAKQCDCTLLDVENALAKFTWAKEAHQKMAQLKEEGKPMPKSFAEVQKLMGSTPLDHARSNMANSGQISRNALCPCG

SEQ ID NO: 84574 - protein, 33 aa, Gossypium hirsutum
  Clone ID: LIB3585-047-Q6-K1-A1.pep
NDQTKKNLARSTVRKEEQHYNIINSFINTETSA

SEQ ID NO: 84575 - protein, 100 aa, Gossypium hirsutum
  Clone ID: LIB3585-047-Q6-K1-A2.pep
LSWINLSNNLILPYHNLIVVYGDLSTTPLYVYSITFITNLQDHQNEDAIFGTFSLIFCTLTLIPLHKYVFIMLGAHDSHEGGTFALYSLLLTHAKFNLLS

SEQ ID NO: 84576 - protein, 79 aa, Gossypium hirsutum
  Clone ID: LIB3585-047-Q6-K1-A5.pep
RSSDIVVELTTSSCLSNHKDFIRAGPWIDIQGIQHQQMKLLNPSHDLLTNIINDHDETPYDRQQKPHYLHLVINYKYNY

SEQ ID NO: 84577 - protein, 66 aa, Gossypium hirsutum
  Clone ID: LIB3585-047-Q6-K1-A6.pep
AMPNLTVLSWPNLQSLAMATTNLQFLQNPFPRPTFSSKYLVMRAPKMVFKCGCSKISSVGGDALYF

SEQ ID NO: 84578 - protein, 68 aa, Gossypium hirsutum
  unsure (1)..(68): unsure at all Xaa locations
  Clone ID: LIB3585-047-Q6-K1-B10.pep
MREALVHIGQAGIQVGNACXLYCLEHGXQPDGQMPSDKTVGGGDDAFNTFXSETGAGKHFPSAGFVDL

SEQ ID NO: 84579 - protein, 90 aa, Gossypium hirsutum
  Clone ID: LIB3585-047-Q6-K1-B12.pep
VIVQKLNVLLEAKMVKQKRKKFALQVVETMRQEVAKLLSTGFIKEVEYPDWVSIVAMVKKANDKWRMYIVFTNLNNACPKVCRLVDSWVS

SEQ ID NO: 84580 - protein, 79 aa, Gossypium hirsutum
  Clone ID: LIB3585-047-Q6-K1-B4.pep
ILLPNFFESENLDDAASAINDYTKQGKKKLYESFEISQLQMYSFALVNKKKLILSLQLPPPSIVFCCCQGMLSLTNSEY

SEQ ID NO: 84581 - protein, 31 aa, Gossypium hirsutum
  Clone ID: LIB3585-047-Q6-K1-B5.pep
ESQEAPPSTNIRIKCFSQSAIKITTRFKNEN

SEQ ID NO: 84582 - protein, 65 aa, Gossypium hirsutum
  unsure (1)..(65): unsure at all Xaa locations
  Clone ID: LIB3585-047-Q6-K1-B9.pep
DFLFLNSMAYSFVKNPLSLCSCVVLTDLGALYTADPAXPSNKQNKDFAVMSMPPTIPAAIVXQKX

SEQ ID NO: 84583 - protein, 47 aa, Gossypium hirsutum
  Clone ID: LIB3585-047-Q6-K1-C10.pep
KEIYPSHGICIKLSFWLERRQEDPFKYHAFDIIINSYSFNILFYRRV

SEQ ID NO: 84584 - protein, 66 aa, Gossypium hirsutum
  Clone ID: LIB3585-047-Q6-K1-C11.pep
NHKTNMKTKPIVPSITRAVTSKNITGPDIYSSHSHITGLKQITSETTAPFSVCHKHLAIFASPKGK

SEQ ID NO: 84585 - protein, 54 aa, Gossypium hirsutum
  unsure (1)..(54): unsure at all Xaa locations
  Clone ID: LIB3585-047-Q6-K1-C12.pep
GHLCIMFIYNKSXRLCCLFSLDFAMLIKPPNFWVFYIMLNKGYCFFVYEICLPI

SEQ ID NO: 84586 - protein, 96 aa, Gossypium hirsutum
  unsure (1)..(96): unsure at all Xaa locations
  Clone ID: LIB3585-047-Q6-K1-C4.pep
PTRPPTRSTHPLDQSFIASGSEDGQVYIWHRCSRELLLTXPGHSGAENXLSWNAGNLHMLASXNDDGSIQIWRLDRFNLKGGEQSNGSNHQCNGRS

SEQ ID NO: 84587 - protein, 180 aa, Gossypium hirsutum
  Clone ID: LIB3585-047-Q6-K1-C6.pep
PTRPVGEKCFQHCKFSSDGKPIDGPWYLQEPLYQKWKQWDCRTDCQYHCMITREEQREKLGNKPIKYHGKWPFQRVYGIQEPVAVAFSALSLAVQFHGWLSFFILLNYKLPLRPDKKTYYEYTCLWHIYAILAMNFWFWSAIFHSRDVELTEKLDYSSAVALVGYGLILAILRVFNLRDE

SEQ ID NO: 84588 - protein, 62 aa, Gossypium hirsutum
  unsure (1)..(62): unsure at all Xaa locations
  Clone ID: LIB3585-047-Q6-K1-D7.pep
ARDVVIASVTCLKWREASRKQAWTLSFNSNDSPPYXDITPKQFXILITQTVFQTTLLHCLSI

SEQ ID NO: 84589 - protein, 92 aa, Gossypium hirsutum
  unsure (1)..(92): unsure at all Xaa locations
  Clone ID: LIB3585-047-Q6-K1-D8.pep
RTRGLVPEWLRSTGPVTGGGGGWAHHFASSSFNSNISPLVHHGRHXNFXNIGDSDSPRYAFLDRASSLNSRRSSSNGFAKHAYSSFSRNHRD

SEQ ID NO: 84590 - protein, 64 aa, Gossypium hirsutum
  Clone ID: LIB3585-047-Q6-K1-E6.pep
CCSLEYKQLSPFHVLSISLRHPCALERSISFGINVRSDTSKPGHIVMHRASYAASSARLVLHKP

SEQ ID NO: 84591 - protein, 109 aa, Gossypium hirsutum
  Clone ID: LIB3585-047-Q6-K1-F10.pep
MCLSEEGSTAIHGCIGRVLMCDVCEQVPAAFTCKADAAALCVACDADIHSANHLARRHYRVPIDPFLGPQKEDVVLMGSWSLLPAFNHTLGETHDLVISYLDPFIVLQY

SEQ ID NO: 84592 - protein, 94 aa, Gossypium hirsutum
  unsure (1)..(94): unsure at all Xaa locations
  Clone ID: LIB3585-047-Q6-K1-F12.pep
ITHFPFDTVFLTLFFFKNFERRWMLSASHHHPPXYSTTKRWYLKHHTEDPTIPINETNIYPRRNEYIHTNPSYINHTRHTLRSAFTLWISCWYG

SEQ ID NO: 84593 - protein, 77 aa, Gossypium hirsutum
  Clone ID: LIB3585-047-Q6-K1-F6.pep
MNHNMDDPSNIAVLDLIFNAAKTCPTMPALFSDHTFRHYAYLRDSLSHLVPALRLPGRKLVSSAVSPSIAPHEDPSH

SEQ ID NO: 84594 - protein, 99 aa, Gossypium hirsutum
  Clone ID: LIB3585-047-Q6-K1-F7.pep
VFIVLLQVRNCLGLTIAKENGSKWFWWDADNFDWDTEDELEIDNYAIASAQECTYQWEAVLGTAEVSSSADSPNSKVIDHFVGMGFSQELVTKAIEENG

SEQ ID NO: 84595 - protein, 85 aa, Gossypium hirsutum
  unsure (1)..(85): unsure at all Xaa locations
  Clone ID: LIB3585-047-Q6-K1-G12.pep
IPPIVFRFRPTDXRLIHFYLRATHKPNXNNDIEIIREIDVCKCXPCDLPDLSAIKTQDPEWYFFYPLEHKHTTDNMLKTPTQANY

SEQ ID NO: 84596 - protein, 64 aa, Gossypium hirsutum
  Clone ID: LIB3585-047-Q6-K1-G7.pep
CCCNFHKCCYDVSRYWEMNTHLYLQSLKKRKVLVRNISNTGAIMPALLNCMVPSNFTPPERKLD

SEQ ID NO: 84597 - protein, 38 aa, Gossypium hirsutum
  Clone ID: LIB3585-047-Q6-K1-H4.pep
PSWCPEARPSAHMNCSLYRALASNQKFVQSPAACADAW

SEQ ID NO: 84598 - protein, 192 aa, Gossypium hirsutum
  unsure (1)..(192): unsure at all Xaa locations
  Clone ID: LIB3585-047-Q6-K1-H9.pep
ILLAALLLQGDNAAXAIQEHLVCTIIQISSFVNQSWVQHRGSGWLGDMQTHGWDTDSGTIIFLHTWSKGNFSDEELLDLELLFRVYLIGLTREAQEYVSQLHFTYPFEIQVVGGCELRSSDFSKGFLRSAYEGSDFVTFQNMSLVPSPGADSKAQSVCYLINQYEGIKEIVYRLITNTCPRFVLGFFDATKV

SEQ ID NO: 84599 - protein, 108 aa, Gossypium hirsutum
  Clone ID: LIB3585-048-Q6-K1-A12.pep
YIGYYPKKLHFTVAAVKEAIDTLRSNNVNAFVLDLRDNSGGLFPEGIETAKIWLDKGVIVYICDNRGVRDIYDTDGRSAISASKPLAVLLSLVVTKIPFFTGSMANIF

SEQ ID NO: 84600 - protein, 57 aa, Gossypium hirsutum
  Clone ID: LIB3585-048-Q6-K1-B10.pep
KKFLIYSHCKYISFHVFLYQNLTRVIRIFLKAFTLSSSPLLVIKSCTIPTNQCVLNS

SEQ ID NO: 84601 - protein, 89 aa, Gossypium hirsutum
  Clone ID: LIB3585-048-Q6-K1-B9.pep
TKIHRCTKIDFVFSHRVNTEKRVATRKRKQLYLQFLFLKKQTTIQLRGMVYHHSPPAERSNGTVVITYWFQAYALTHQDVHCKGYRNRA

SEQ ID NO: 84602 - protein, 48 aa, Gossypium hirsutum
  unsure (1)..(48): unsure at all Xaa locations
  Clone ID: LIB3585-048-Q6-K1-C1.pep
RPPPRSLHDCLGVLGSEDNVAEYYQQEVXMLEGFSKMDALAKRDLFLA

SEQ ID NO: 84603 - protein, 93 aa, Gossypium hirsutum
  Clone ID: LIB3585-048-Q6-K1-C5.pep
FSLTQKNKITCLLNSTDFCSPDSATSMNTFVILSIKTLTIYYKCPALAVIVSFYRPLVRPNFSELKMTGEDVSMKKSVLSPWTDATRQLHNAL

SEQ ID NO: 84604 - protein, 65 aa, Gossypium hirsutum
  Clone ID: LIB3585-048-Q6-K1-C6.pep
RPRVRPHVHTKQHSQQQYRFFYRLFCPHVWLETLIPTLPPTLPITLRMNLMLILQLTRHLISHTI

SEQ ID NO: 84605 - protein, 37 aa, Gossypium hirsutum
  unsure (1)..(37): unsure at all Xaa locations
  Clone ID: LIB3585-048-Q6-K1-D3.pep
LRPIIDPIASIFHLMFCAKSXPSGXASFLYIDRPTIT

SEQ ID NO: 84606 - protein, 154 aa, Gossypium hirsutum
  unsure (1)..(154): unsure at all Xaa locations
  Clone ID: LIB3585-048-Q6-K1-E5.pep
SAVRRNHLRRAPPPFSXTPAAPSPGSVNSCSLFNPLHRXPACPIMSDPAVDTSSEITTKDLKEKKEVVEEAENGRDAPANGNANEENGEQEADNEVDEEEEEGGEEEEEEEEGDGXEEDGDEDEEAEAATVKRAAXDDEDDDVYTKKQKTDEDD

SEQ ID NO: 84607 - protein, 71 aa, Gossypium hirsutum
  Clone ID: LIB3585-048-Q6-K1-F10.pep
TSYFPSSALTHWRTERLETSRRRDEFFTFIERQTSSWILVCTEIDLEAVFFNHLDLSIYRLTLLRPWIFKA

SEQ ID NO: 84608 - protein, 71 aa, Gossypium hirsutum
  Clone ID: LIB3585-048-Q6-K1-F8.pep
KIKKQFKINHLISSTIWNNLSRKAILENTPKSKNGKSYKTIKLGNLKDLTVFKLTQTTNINNLDNINKKYK

SEQ ID NO: 84609 - protein, 66 aa, Gossypium hirsutum
  Clone ID: LIB3585-048-Q6-K1-F9.pep
KQYSRKMKLFLCFSSDAVRIPKLSYVHFTCVTKVVQKGHVKELVISPVEGIITGGEAMTPLVRQDL

SEQ ID NO: 84610 - protein, 106 aa, Gossypium hirsutum
  Clone ID: LIB3585-048-Q6-K1-G2.pep
DSATRGWSGCPLILCPSFPTGGLQSCTGPALLPQADLCPQGLAEYFEPGFLGHMICRQVSCPGALGGAPRQSRPGPGVSLAFKGWSSCPCHPQVPQSSKDLLPQMH

SEQ ID NO: 84611 - protein, 59 aa, Gossypium hirsutum
  unsure (1)..(59): unsure at all Xaa locations
  Clone ID: LIB3585-048-Q6-K1-G3.pep
LKIEIINKNTCSFLNGDDSSNYXCTVFLCLLSPIXFSTSHDRLFIIGLKNRKFYRNNSL

SEQ ID NO: 84612 - protein, 94 aa, Gossypium hirsutum
  Clone ID: LIB3585-048-Q6-K1-H10.pep
PPSLYLSNPSFISFNYHCTRVFISGSINLFHCLCAVIFEIQILQLPFPREQSFWIHSRKDGHKYGEVLLSLPRSVLAHQASPFSNPRRGHSKFL

SEQ ID NO: 84613 - protein, 42 aa, Gossypium hirsutum
  unsure (1)..(42): unsure at all Xaa locations
  Clone ID: LIB3585-048-Q6-K1-H5.pep
WKLNFCFNYHXQGSFVILTNCQQSLKPFVKMLNGNKLCDKGC

SEQ ID NO: 84614 - protein, 102 aa, Gossypium hirsutum
  Clone ID: LIB3585-048-Q6-K1-H8.pep
PNLCDAETANGGCCWVDDYKEAARIRDSLKIFEEEEPVLRFRRLIKEAVADERFEDAARYRDELKEIAPHSLLKCSSDATTLGIRVQVRSVVYMRGVVCPDE

SEQ ID NO: 84615 - protein, 152 aa, Gossypium hirsutum
  Clone ID: LIB3165-001-Q1-K1-C6.pep
PTRKQSEGRSTSSTYSQAPATNGSTPPAPVNPKMDLLSGDDYNMPKADDSLALVPVGEPQQTTPASSQQMALVLFDMFPNSNNTSNSVNTQSSGLSGQLYPLAPQIQQQNILAPQIQQQNGNAPNIRLPRYEQSFAQGTGPAWNNQLVQQQQ

SEQ ID NO: 84616 - protein, 65 aa, Gossypium hirsutum
  Clone ID: LIB3165-001-Q1-K1-D2.pep
FYFMQHALTHQTTYRYSKKRHACFHEGNTNLFYAHTHTIFHYCKSQHMTQWKFAYMALAHSSASF

SEQ ID NO: 84617 - protein, 59 aa, Gossypium hirsutum
  unsure (1)..(59): unsure at all Xaa locations
  Clone ID: LIB3165-001-Q1-K1-D7.pep
GKVFRIGHLXYLNELQLLGCLAGVEMILKDVGYPVKLGSGVAAASAYLQNNIPMIPSRI

SEQ ID NO: 84618 - protein, 142 aa, Gossypium hirsutum
  unsure (1)..(142): unsure at all Xaa locations
  Clone ID: LIB3165-001-Q1-K1-D8.pep
EKSVKVLKNAAKTRKVPAEEVLSAFSVIEKAKIDPSAFLETLGGLDSPEKIEXGRYFPLTAVQRFDAAGRRIENGIFLGPIGFLTFEGKFSWKNRILSFIFERIRVKIGLFNPLEIGLGQKDDREPNTKDPFFIWFYIDEEI

SEQ ID NO: 84619 - protein, 117 aa, Gossypium hirsutum
  Clone ID: LIB3165-001-Q1-K1-E6.pep
MGFPASYAEVTLPKPLLFALSLLCFIGNLISALLNRLGLSDFIESDMVWPENRTRTFETTTVPALLFPVIKFEELVVDPPENCAVCLNEFERGEEIRCLKNCRHVFHRACLDPWMDH

SEQ ID NO: 84620 - protein, 84 aa, Gossypium hirsutum
  Clone ID: LIB3165-001-Q1-K1-F10.pep
RINCLANFTLISQNRSTTCEICASFTKLKRTMIWCEARARTKNGFTAVLGCLNQCSSKLKGRQWRSLWQQCDPIFEWFKRLIQG

SEQ ID NO: 84621 - protein, 46 aa, Gossypium hirsutum
  Clone ID: LIB3165-001-Q1-K1-F4.pep
SYQVSKVNSLWSMEQCTLWISSKCFRNLRIKIVSHGWSRTFHSLTR

SEQ ID NO: 84622 - protein, 77 aa, Gossypium hirsutum
  Clone ID: LIB3165-001-Q1-K1-F7.pep
SCLITLRNYRSVQKASLGKWLGVVQDPSLAPSCLPPELHRSAPLRLCLASVSLLPQLPAFSHAVSPSPLPGIWENWD

SEQ ID NO: 84623 - protein, 66 aa, Gossypium hirsutum
  Clone ID: LIB3165-001-Q1-K1-G12.pep
AWPRSRGRGRGCALKSKQLLGLIYKRAELKATNQSLSIPMAAVFQSRILPCFRRKKKKLFLEKIRF

SEQ ID NO: 84624 - protein, 78 aa, Gossypium hirsutum
  Clone ID: LIB3165-002-Q1-K1-B10.pep
QELGSAFLLAFPCKTKQSIRGRLNSRKRIHQDPRLRKKRHPLSISYSNIIPHPPSPPTLFFSDTSPSPFSFLSTSASS

SEQ ID NO: 84625 - protein, 123 aa, Gossypium hirsutum
  Clone ID: LIB3165-002-Q1-K1-B9.pep
GCGINMLVSPEARVVRCSECHTLTNLVPMNARPGRTRYNGPPRMHENPYGNGPSPQHPQYPQPRPSLSPVPIYGRKRALLCGVNYHGKSYKLKGSINDVKSMKYLLVETLGFPNDSILMLTEN

SEQ ID NO: 84626 - protein, 132 aa, Gossypium hirsutum
  Clone ID: LIB3165-002-Q1-K1-D10.pep
LLQVAVEVFVSCRGISRSTQLHSVRSMASLHPTISPQSLLSLTKPRKPISRHLSASSLTTSKLPEGLAFSGTKQKNKRENSVVVVKSLAEELDVIPVQSEDVTDIQEGVAVSQAPRESSGGELVTQVGGFSN

SEQ ID NO: 84627 - protein, 128 aa, Gossypium hirsutum
  unsure (1)..(128): unsure at all Xaa locations
  Clone ID: LIB3165-002-Q1-K1-D5.pep
GLVLTSHLLVLLKGKIFSRDRVLSRDEVLXSIFKFDFANARAGKGXKLDDLDIKDHEIDIYLDLHTITNTSPYTELDTISLAKARGLFHHLCLLHMCVVPKSHVRPAIXXILTQHHFLAEHILGLDPY

SEQ ID NO: 84628 - protein, 121 aa, Gossypium hirsutum
  Clone ID: LIB3165-002-Q1-K1-E2.pep
LKHFILLQISAEALFLSLKHHFFYFFIYFSSYYMASIRRTLSPAFHGRSTQNGAAVFSSSPSNKLLHKHFPSSTSSTLLNLVYRRGWRRSFRRCLFFFLIGVLFGITPVGQMDADIRPKDF

SEQ ID NO: 84629 - protein, 107 aa, Gossypium hirsutum
  Clone ID: LIB3165-002-Q1-K1-F9.pep
MAAFRCKPSAETASLTVSQFRHFLSNYMHYGRMASSSHCTTIRNKWDDHFVNTPYHFTSFKPVSLRGELVEKGSRFLDIRRNSHDLSKDVDRELREKLGCNSFRVLS

SEQ ID NO: 84630 - protein, 79 aa, Gossypium hirsutum
  Clone ID: LIB3165-002-Q1-K1-G12.pep
SLRIGRELCAPDAFNHWLHQIQRPMGLCESQVISVLKQPIDGSSSQSSLWSRKCYNLLASIAEGFHHEFPKASHRSAIV

SEQ ID NO: 84631 - protein, 108 aa, Gossypium hirsutum
  Clone ID: LIB3165-002-Q1-K1-G2.pep
MATKTHTDPEKPNAEGTAENEDTSPVEEVALVVPETDDPTLPVLTFRAWFLGLVSCVLLIFLNTFFTYRTQPLTISAILMQISVLPIGKFMARTLPTTQYSLLGWHFS

SEQ ID NO: 84632 - protein, 124 aa, Gossypium hirsutum
  Clone ID: LIB3165-002-Q1-K1-H4.pep
VLWRSGRSFGGFDSANRVGAEARKGDFNIFRTKSTLSKQNSLLPTRKEKEMETQRAEGATGLNEPVNKSVPVGRYFDALRGPELDQVKDSEDILLPKDEIWPFLLRFPINCFGICLGLSSQAVL

SEQ ID NO: 84633 - protein, 75 aa, Gossypium hirsutum
  Clone ID: LIB3165-002-Q1-K1-H9.pep
QSCRYLVHCHSTSMHTLSESCLFFRTRQPLQRLRYFFTFLYLFNLIIFGISHFLLACGLVEEALGRERAKPKERE

SEQ ID NO: 84634 - protein, 74 aa, Gossypium hirsutum
  Clone ID: LIB3165-003-P1-K1-B11.pep
GNARPCYTQMPFLSSSHLSHPIAITLCFSELSHVMGDLVLQKIAISGPTLASMIQRLSSSPADLDGLLFRPRHF

SEQ ID NO: 84635 - protein, 63 aa, Gossypium hirsutum
  Clone ID: LIB3165-003-P1-K1-B4.pep
KIQISKDPKKKILFFPFGEAFVNLPVNQLYIYIYNLLGHLPALCFDQNFSHYPKRNSMIKPKH

SEQ ID NO: 84636 - protein, 40 aa, Gossypium hirsutum
  Clone ID: LIB3165-003-P1-K1-B8.pep
DSWSDACSDAWAEIVCRLQTVIGFSTLYVVKPGPIILLYF

SEQ ID NO: 84637 - protein, 69 aa, Gossypium hirsutum
  unsure (1)..(69): unsure at all Xaa locations
  Clone ID: LIB3165-003-P1-K1-C9.pep
RIGYTLTMEMEDDMDKMVAWYKKEWGNRQRVVDLEKLVERKWTGMQAGGSSDPMKELCKTXIXGESSSV

SEQ ID NO: 84638 - protein, 82 aa, Gossypium hirsutum
  unsure (1)..(82): unsure at all Xaa locations
  Clone ID: LIB3165-003-P1-K1-E5.pep
SXTGSDSILTTNLHLMPHLNIVSPYTSLTSLCFPNLLPRLHLHHYYLMQLETDSKPNISIHLFGRISSNTLISSIATTTHPS

SEQ ID NO: 84639 - protein, 112 aa, Gossypium hirsutum
  Clone ID: LIB3165-003-P1-K1-F8.pep
MMVSLRPFNGVFPYPSKHSLVHRNRQTALRGTIYMSAQTQAVPSRTQRIMESISVSGEVGGAGGAYSYNALKRLDGIWSSICSTQTVQQAPQQVVSSFPGVSSHSVLAEKQL

SEQ ID NO: 84640 - protein, 52 aa, Gossypium hirsutum
  Clone ID: LIB3165-003-P1-K1-H4.pep
SALLASSFKQQEALLSGFSHRILLSNTQCYPEDLRTSLAHLSEVWRWFQNEL

SEQ ID NO: 84641 - protein, 74 aa, Gossypium hirsutum
  Clone ID: LIB3165-003-P1-K1-H5.pep
IPGRGHHHVPSWQHCFIRLWDHHQAWVDSDIGSTLIRFGTTTGDVSLTLGLRHAGNMPENTSSFSARDVGGLLN

SEQ ID NO: 84642 - protein, 122 aa, Gossypium hirsutum
  Clone ID: LIB3165-003-P1-K1-H7.pep
ESQIISHLWRLSSYPYAVYPSAACLRRSPLSSRHNLIPASTCRPLYHQNTTSLCKPSLISKTRNLKVHSQLRCPIISPEDRWGTWASLFAIGAFGLWSEKTKIGSMVSAALVSTLWGLAASN

SEQ ID NO: 84643 - protein, 123 aa, Gossypium hirsutum
  Clone ID: LIB3165-004-P1-K1-A9.pep
EKLQTGKWNVYRSARSPLKLVSRFPNHPDIGTLHDNFLLAVDFFGDNNYLGTRIRVDGTVGEYKWMTYREAATARTAIGCGLIHHGILKGSCIGLYFINRPEWIIVDHACSAYSLISVPLYDT

SEQ ID NO: 84644 - protein, 107 aa, Gossypium hirsutum
  unsure (1)..(107): unsure at all Xaa locations
  Clone ID: LIB3165-004-P1-K1-B9.pep
HVPVIMDRNGRRAPQRGLATSTGHXAVFKALRELIRLCXQWQIQVLTVFIXSYQNWIRPKVEVSFYVXNQTERSSIEAIQSLQLCMIISCVGDSTKLSTLVQDVFNE

SEQ ID NO: 84645 - protein, 54 aa, Gossypium hirsutum
  unsure (1)..(54): unsure at all Xaa locations
  Clone ID: LIB3165-004-P1-K1-C2.pep
LSQLHQPIFLVIARCMVIDSVKDIFXKQKPISYPLLVTQFTVKRIFVSTLSPRL

SEQ ID NO: 84646 - protein, 42 aa, Gossypium hirsutum
  Clone ID: LIB3165-004-P1-K1-C6.pep
CNVRLGNVVWVDVKDEPVHENCDVLGKKFAVERKKSGKSWTQ

SEQ ID NO: 84647 - protein, 33 aa, Gossypium hirsutum
  Clone ID: LIB3165-004-P1-K1-E4.pep
PIQKKTRQATAPSKPKKGAVSSPLNVNDTVLPI

SEQ ID NO: 84648 - protein, 86 aa, Gossypium hirsutum
  Clone ID: LIB3165-004-P1-K1-E5.pep
DLFNTIILTAEITHISIRYVRVLTIAPSILYYTLICHSKKQQTYRLPLLTLLHISLPLYILNPPFVLLQILDSDVHLCRYFAAATP

SEQ ID NO: 84649 - protein, 54 aa, Gossypium hirsutum
  Clone ID: LIB3165-004-P1-K1-F10.pep
VWLNLIINFDLKIWIAFFGSVPLTKTFIKFTYGICSLALRPLDFFCRQTEFQVF

SEQ ID NO: 84650 - protein, 36 aa, Gossypium hirsutum
  Clone ID: LIB3165-004-P1-K1-G11.pep
ISRNESDGVCIVSWHKTAHIVKIFLALYPLRHAKYR

SEQ ID NO: 84651 - protein, 33 aa, Gossypium hirsutum
  Clone ID: LIB3165-004-P1-K1-G12.pep
SSSCSSRLCWPLTCPFNLARRRVHTWCSSTRMS

SEQ ID NO: 84652 - protein, 33 aa, Gossypium hirsutum
  Clone ID: LIB3165-004-P1-K1-H12.pep
SSPCSCRFSWALTCPFNLASRRGYTMCSSTRKS

SEQ ID NO: 84653 - protein, 62 aa, Gossypium hirsutum
  Clone ID: LIB3165-004-P1-K1-H4.pep
MAFVTSGELLATLVPIAFYWIYSGMYVMFESRFEKYKLHSKKEEGEKNLGFKKGGFKGSLWP

SEQ ID NO: 84654 - protein, 117 aa, Gossypium hirsutum
  Clone ID: LIB3165-005-P1-K1-A5.pep
MNIGLPGLSYLPPANAVAPPPPPTAGSPYLEDPSKKIRKPYTITKSRESWTDQERDKFLEALQLFDRDWKKIEAFVGSKTVIQIRSHAQKYFLKAQKNGATEHVPPPRPKRKAAHPY

SEQ ID NO: 84655 - protein, 112 aa, Gossypium hirsutum
  unsure (1)..(112): unsure at all Xaa locations
  Clone ID: LIB3165-005-P1-K1-B7.pep
MSMATSISCLKIPNPSSASPPCSSSTSSSTSCRLSVPPKPYIVTIRSSQTEGPLRRPVAPSPPPPLKPVPPSSPSASPPPQPTPXSFSSPPSPPPSAAAVGDQNVITLEFQR

SEQ ID NO: 84656 - protein, 123 aa, Gossypium hirsutum
  Clone ID: LIB3165-005-P1-K1-E6.pep
MMVQTLTRLYSTRNVGSFRLCDNAMRHHHHQQQNATAAGGNNEHVDDVHDHLQPSEDKSMGQQNIGEPAVETPQERPQTDMEQMKERFSKLLLGEDMSRGGKGVPSALALSNAVTNLAASDFG

SEQ ID NO: 84657 - protein, 67 aa, Gossypium hirsutum
  unsure (1)..(67): unsure at all Xaa locations
  Clone ID: LIB3165-005-P1-K1-F11.pep
MSNFFSKAEVTSSGRPVLPRNEVECHLLSAVDLEPEDHRHFSLLKSGLLILTTHXLIWLPSSSATPT

SEQ ID NO: 84658 - protein, 131 aa, Gossypium hirsutum
  Clone ID: LIB3165-005-P1-K1-F4.pep
PTRPGALAIATKLPQLRPPPCHASASHTCKPANGFQMGILYVALYLIALGTGGLKSSVSGFGTDQFDDKDEKEKAQMTYFFNRFFFFISTGTLTAVTVLVYLQDEVGRSWSYGICSVSMFVAILIFLSRTK

SEQ ID NO: 84659 - protein, 54 aa, Gossypium hirsutum
  Clone ID: LIB3165-005-P1-K1-G12.pep
PRVLYRLLMVLAVCLTDWKGLLQTVGPIAALNSCLELNTYHRLQMMQTKTFNMS

SEQ ID NO: 84660 - protein, 63 aa, Gossypium hirsutum
  Clone ID: LIB3165-005-P1-K1-H1.pep
PRVRPRVRDGRMYYQYELEPPHVLITATAAGNRLYLFSVTGSGLQWKRHYQDLKRISESFRVI

SEQ ID NO: 84661 - protein, 86 aa, Gossypium hirsutum
  Clone ID: LIB3165-005-P1-K1-H6.pep
HWGWAMLGAAGVFMPGLLTKVGILNTPSGYSAGTADYFTDTTSFFMVELINIGCDEGRRSADIIKPGRVNTDPILPNNKVTGTDVG

SEQ ID NO: 84662 - protein, 68 aa, Gossypium hirsutum
  Clone ID: LIB3165-006-P1-K1-A4.pep
EWKIRTNELLTFWSPRRFWSWLSSSRDTWVIFKKMCGPSQPPNLTMSSAGIAGLKPALGQKKGTVPGF

SEQ ID NO: 84663 - protein, 41 aa, Gossypium hirsutum
  Clone ID: LIB3165-006-P1-K1-B10.pep
GQSPKYMILFISYHSKKGTSFNSARSTLYVEELFRTKHLYS

SEQ ID NO: 84664 - protein, 108 aa, Gossypium hirsutum
  unsure (1)..(108): unsure at all Xaa locations
  Clone ID: LIB3165-006-P1-K1-B6.pep
LTSRSNHKSLVLAAAVKTMGDRSRDFLGGEIRNTIRFXSIDAVVKADFKACWXPTGCAPMGHIVFKGFMTYNPXNPYWFNRDRVILGAGHSCMLQTALLYLARYDSVL

SEQ ID NO: 84665 - protein, 58 aa, Gossypium hirsutum
  Clone ID: LIB3165-006-P1-K1-H2.pep
KIREFDAMSLWKDLAKRLHGRVRPIKCAHITESTHFNQLVRDGAMAVVTDTGLYNLCV

SEQ ID NO: 84666 - protein, 46 aa, Gossypium hirsutum
  Clone ID: LIB3165-006-P1-K2-A3.pep
ISCLVYACSFHPDQRWLEKPSGHLNARKHGNNLPSGRVADAWSPGI

SEQ ID NO: 84667 - protein, 42 aa, Gossypium hirsutum
  unsure (1)..(42): unsure at all Xaa locations
  Clone ID: LIB3165-006-P1-K2-B10.pep
QALVYDSFIFAXKKGRSRVMNHQGCGCKATGKDAERRVICTT

SEQ ID NO: 84668 - protein, 50 aa, Gossypium hirsutum
  Clone ID: LIB3165-006-P1-K2-G10.pep
GSTIVRETSRNQLLTVDNLRPYPESTTNLQSVSCEPPQSFLWFAPPAAVW

SEQ ID NO: 84669 - protein, 97 aa, Gossypium hirsutum
  Clone ID: LIB3165-006-P1-K2-G6.pep
QCFYLSKTNGLTVSPGSRLPASKVFSNPKILFPSNRFGQSGTLCSQSLSAISNQQSVGSAKLYVRGGITRFNQGGCFCWISRPSKFQGNRTSAPNIA

SEQ ID NO: 84670 - protein, 43 aa, Gossypium hirsutum
  unsure (1)..(43): unsure at all Xaa locations
  Clone ID: LIB3165-006-P1-K3-B12.pep
QLSHPNSGKHLKWKARNIGSAPHIVKEGSFLRXKYEKNHILGL

SEQ ID NO: 84671 - protein, 75 aa, Gossypium hirsutum
  unsure (1)..(75): unsure at all Xaa locations
  Clone ID: LIB3165-006-P1-K4-G1.pep
RLTGPYVRLLVQWGLRELRDRLDSVKITQTITEAMNLVADDQAWRAHEAAVNGGPFCEXMDEALYIMNEQFQTAE

SEQ ID NO: 84672 - protein, 121 aa, Gossypium hirsutum
  unsure (1)..(121): unsure at all Xaa locations
  Clone ID: LIB3165-006-P1-K4-H2.pep
MARMKIREYYCKRLGKEHVKRLSRXEIMPMTSAQFTASTDFNQLVQMEPWLSTQILAGKPGMLFGMRGQSGLGGXNIDCAQVIALAKERLGTXVEMSGCKGPVTTLIGXPFIRHNEKHLLN

SEQ ID NO: 84673 - protein, 110 aa, Gossypium hirsutum
  Clone ID: LIB3165-007-P1-K1-A8.pep
MSSSATIATAITAQANMGATFTGLKCASALPVIKKANNDITSVASNGGRVQCMHVWPSTGKKKLETLSCLPELTPEQLAKEVDYLLRSKWSPCLEFGLEAGFMHRKYWSL

SEQ ID NO: 84674 - protein, 131 aa, Gossypium hirsutum
  Clone ID: LIB3165-007-P1-K1-B2.pep
TRPAEANMFFLESPIGVGCSYSNVSTDYRNIGDEFTANDAYTFLHKWFVMFPSYRTRSFYIAGESYAGKYVPELADLIYDNNKDPSLYIELKGILLGDPETNDAEDWRGMVDYAWSHAIVSDETYKIIIGS

SEQ ID NO: 84675 - protein, 44 aa, Gossypium hirsutum
  Clone ID: LIB3165-007-P1-K1-B3.pep
NPSLFSKNLQYLRVVHIERLGLKTEIYYMSSPQTLLTLSYISGS

SEQ ID NO: 84676 - protein, 116 aa, Gossypium hirsutum
  unsure (1)..(116): unsure at all Xaa locations
  Clone ID: LIB3165-007-P1-K1-B9.pep
MADATRALYAPSLNTKAEKLFPFRHKRQGNGRGSMRKTATKAAAYGSTWNGPDRVSYLGALSGAPSFYLTGEYRGDYRWYTAXGLSADPXTSARNRELEVIXHWRWAMLCALGCVF

SEQ ID NO: 84677 - protein, 66 aa, Gossypium hirsutum
  unsure (1)..(66): unsure at all Xaa locations
  Clone ID: LIB3165-007-P1-K1-D10.pep
PPVNPGLVKFIHFDIKSIGXEITLXSIGRDFRNVLFXLNSGIPFVGTSFESTVRRPGKASEGAVPS

SEQ ID NO: 84678 - protein, 33 aa, Gossypium hirsutum
  Clone ID: LIB3165-007-P1-K1-D8.pep
PLLTGMATLGSPKRGCFPRGELVYLTNLCPPWK

SEQ ID NO: 84679 - protein, 48 aa, Gossypium hirsutum
  Clone ID: LIB3165-007-P1-K1-E9.pep
DAWAVKRFLARPRLPIWGHYICCLNVIFYNHIGCVPVLAIPGGELKLL

SEQ ID NO: 84680 - protein, 90 aa, Gossypium hirsutum
  Clone ID: LIB3165-007-P1-K1-F11.pep
MSSKKEEKSQAAADRIKAAALTAAKGLSRAQAERAAAAAARNVNAYGQKEEGPSRWQEKREAKKQMYLMSTEKAVRLGERKDKASMSTMG

SEQ ID NO: 84681 - protein, 69 aa, Gossypium hirsutum
  Clone ID: LIB3165-007-P1-K1-G11.pep
ETLNQQIMATSDSDWRWKNIVFGELRRTAAYYKGPHFIYSQSWLQQKQPLRGKPSGSVHQTKQQHTLLN

SEQ ID NO: 84682 - protein, 77 aa, Gossypium hirsutum
  Clone ID: LIB3165-007-P1-K1-G7.pep
QVDPSEMSFFHLRLSARHPHSSNVPDTLLWPISSVVDYMHRQPNVLLSNYHQFFVKKVFSLYSCRCSLSLQPVRALQ

SEQ ID NO: 84683 - protein, 110 aa, Gossypium hirsutum
  Clone ID: LIB3165-007-P1-K1-H3.pep
MAVNETGKDGIIGVGMMGREHLINLHHLRTQGVVVVCIADPHVPSQQLALELAKSFDWPLKVFSGHQELLDSGLCDVVVASSPNMTHYQILMDILNHPKPHHVLVEKPLC

SEQ ID NO: 84684 - protein, 91 aa, Gossypium hirsutum
  unsure (1)..(91): unsure at all Xaa locations
  Clone ID: LIB3165-007-P1-K1-H8.pep
HASAHASVHASERIFMLGDHDMDGALSDAELNEFQVKCFNAPLQPAEIVGVKRVVHERIXGGVCNLGLTVEGLLYLNALLIEKGRVETTWA

SEQ ID NO: 84685 - protein, 85 aa, Gossypium hirsutum
  Clone ID: LIB3165-008-P1-K1-C11.pep
PTRPPTRPFYAALWKKKKEKKKKKKKKKKKKKKKKKKKKKKKKKKKKKKKKKKKKKKKKRGGRLKEPKLNNRGMQRKNFLKGPPK

SEQ ID NO: 84686 - protein, 115 aa, Gossypium hirsutum
  unsure (1)..(115): unsure at all Xaa locations
  Clone ID: LIB3165-008-P1-K1-C2.pep
MVTVNTPEFDRTSELKAFDDTKAGVKGLADGGITKVPRIFHQPPEKLHXFPVSNDSQFSIPVIDLEGVNNDPITRKEVVDKVGNASRKWGFFQVINHGIPVSVMEEMKDGVRRFH

SEQ ID NO: 84687 - protein, 117 aa, Gossypium hirsutum
  unsure (1)..(117): unsure at all Xaa locations
  Clone ID: LIB3165-008-P1-K1-D5.pep
TNVFRWPQGKTLPDPWNYRGCPADRSKSGGWTSAAMILGVEACERLTTLGIAVNMVTYLTGTMHLGNAXSATTVTNFLGTSFMLCLLGGFIADTFLGRYLTIGIFATVQATGVTILT

SEQ ID NO: 84688 - protein, 131 aa, Gossypium hirsutum
  Clone ID: LIB3165-008-P1-K1-D6.pep
EVLFDYETKINQAAFPGLQGGPNNHTITGLAVALKQATTPEYKAYQEQVLSNCSKFAQTLAAKGYELVSGGTENHLVLVNLKNKGIDGSRVEKVLEAVHIAANKNTVPGDVSAMVPGGIRMGTPALTSRGF

SEQ ID NO: 84689 - protein, 95 aa, Gossypium hirsutum
  unsure (1)..(95): unsure at all Xaa locations
  Clone ID: LIB3165-008-P1-K1-F12.pep
PRVRNLTMWSPRITHRRLVIANDDKGAQEESVQMRGERKTVGNNARREMMYAAAAAAMSSAAADATVLHAQVIAQAXMAYSPVTVATITARMCLT

SEQ ID NO: 84690 - protein, 87 aa, Gossypium hirsutum
  Clone ID: LIB3165-008-P1-K1-F8.pep
QSFLNLGTTSGRSVPLFLCSAILSSIHSFALGKAKVLKATSMHALAGNSDPECEAEADSGQLISQGELDAFMVKKRGIVLYDPGDFT

SEQ ID NO: 84691 - protein, 65 aa, Gossypium hirsutum
  Clone ID: LIB3165-008-P1-K1-G2.pep
LFSFLFFNGMNSSKTGSTFLDIHCTDSSFKATMASLRRSMQRGSSRLKDRSFSFLFQSFYKSIEF

SEQ ID NO: 84692 - protein, 67 aa, Gossypium hirsutum
  Clone ID: LIB3165-008-P1-K1-G6.pep
IFIPFLWIKEKWMKPSHEVVRAATFTPTRLSHYLFSTFLICMVPLPMLTPFFYEFHTLLDLWKPFSV

SEQ ID NO: 84693 - protein, 66 aa, Gossypium hirsutum
  Clone ID: LIB3165-008-P1-K1-H4.pep
VLCPIGQNRPHRLFLTLPYQRWFSYYKACNRSSMDPHSRASLVNACKIDYPLHDDSLTQINQFEKF

SEQ ID NO: 84694 - protein, 63 aa, Gossypium hirsutum
  Clone ID: LIB3165-009-P1-K1-A6.pep
PTLSMTFFFYCAIFSMGRFKYLCSSALYEPFLTTKTCAPPGYNNKSLTVVPKVPILLEDSNPA

SEQ ID NO: 84695 - protein, 49 aa, Gossypium hirsutum
  Clone ID: LIB3165-009-P1-K1-A9.pep
YRTGRPDPTHPCIQTLKLNQIGGSFGKESRYGGGIGKGRRLDRGSPSNP

SEQ ID NO: 84696 - protein, 128 aa, Gossypium hirsutum
  Clone ID: LIB3165-009-P1-K1-B10.pep
LLCFSYPKLLAKSRPWFRQETTLLNSQKKPHIFIVSCSSSPTSQSPEANVQTAESCVNLGLSLFSKGRVKDALVQFETALSLDPNPVEAQAALYNKACCHAYQGEAKKAAECLRTALRDYNLKFGTIL

SEQ ID NO: 84697 - protein, 98 aa, Gossypium hirsutum
  unsure (1)..(98): unsure at all Xaa locations
  Clone ID: LIB3165-009-P1-K1-B3.pep
IRPGLLHYLKTLHVVLNTHVAIHPFNQKILNYIKIAYPPKWILATNTYTIDLNLIRQKMNSQDXLIRTHFFIPAHLIPLLEIIPTQXTSLHIILDLIT

SEQ ID NO: 84698 - protein, 96 aa, Gossypium hirsutum
  unsure (1)..(96): unsure at all Xaa locations
  Clone ID: LIB3165-009-P1-K1-B5.pep
IVLDYSQFKDLYLAINAGAANLPFNQXNIYCDKECFPSXYILATNTFTIDLNLIREKMNSHDHLIRAHFFSPAHLIPVLEIVPTHXTSPHIILDLM

SEQ ID NO: 84699 - protein, 44 aa, Gossypium hirsutum
  Clone ID: LIB3165-009-P1-K1-B7.pep
STHTIHYYFLLLAMAFEVMRSITIVTGCLTQAIIGVHVTDRKCD

SEQ ID NO: 84700 - protein, 126 aa, Gossypium hirsutum
  Clone ID: LIB3165-009-P1-K1-B9.pep
IRQRIGPLLMKMQKRYGRGDERGELTEKEIIRAERNSGVISDRVREIQMQNYMRKKEQKERRETDLREGLQLYKSGNYEQALEKFESVLGSKPEPNEAAVASYNVACCYSKLNQIQAGLSALKDAL

SEQ ID NO: 84701 - protein, 63 aa, Gossypium hirsutum
  unsure (1)..(63): unsure at all Xaa locations
  Clone ID: LIB3165-009-P1-K1-C1.pep
MAFPPKCILATNTFTIDLNLIRQKMNSQDRSIETHFFNPAHLKPVXEIIPTSYTSPPIMRDLM

SEQ ID NO: 84702 - protein, 129 aa, Gossypium hirsutum
  unsure (1)..(129): unsure at all Xaa locations
  Clone ID: LIB3165-009-P1-K1-C10.pep
AKLQKQLKIFTVEIDMLGXGIYSLQTDRNNLQEEIAHGASIKKELEXVARNKIKELQRQIQLDANQTKAQLLFVKQQASGLQAKEQEAIKSDAELEKKLKALKELEIEVVELRRQNKELQHEKREFTVK

SEQ ID NO: 84703 - protein, 51 aa, Gossypium hirsutum
  Clone ID: LIB3165-009-P1-K1-C12.pep
HASNTILFLYSSEHKPGEGPPKLARSYTQYGRLQRIMLHSTHRHFNASCPH

SEQ ID NO: 84704 - protein, 24 aa, Gossypium hirsutum
  Clone ID: LIB3165-009-P1-K1-C3.pep
VLLFLYYRVLFNCVIEGFIKNLSF

SEQ ID NO: 84705 - protein, 78 aa, Gossypium hirsutum
  Clone ID: LIB3165-009-P1-K1-C5.pep
ELTTIDLTRRFPIVTTSSLKTIIHRNNLPTATKRYIATRVVHAMRASTNIIFKVTHNNCELTYAQYLTATLRLDRRYT

SEQ ID NO: 84706 - protein, 39 aa, Gossypium hirsutum
  Clone ID: LIB3165-009-P1-K1-D1.pep
DTLILHLYISTTNSTRKELLYNPFDTTIQHHSWIKCQCR

SEQ ID NO: 84707 - protein, 37 aa, Gossypium hirsutum
  Clone ID: LIB3165-009-P1-K1-D2.pep
APLQTQFLITNSKYTEGKASINAAQPASHNTEAKFLK

SEQ ID NO: 84708 - protein, 44 aa, Gossypium hirsutum
  Clone ID: LIB3165-009-P1-K1-E1.pep
MVDVLCGWDQVDLLRKVIYIDVRYFNLDVILEFYWCYGLLCCFS

SEQ ID NO: 84709 - protein, 69 aa, Gossypium hirsutum
  Clone ID: LIB3165-009-P1-K1-E11.pep
ILSSASTTSDNTSVPVQTNTLDRFTIKIPNSAIPASMKPNNLITSVTNNSVKVQYIQVFSSSHTKKKQT

SEQ ID NO: 84710 - protein, 69 aa, Gossypium hirsutum
  Clone ID: LIB3165-009-P1-K1-E2.pep
PTLPTEFFLSITNYKKDGSNRPYAITTSLDSDKHSLSTPVEPISIYMIKIASPNFKNINQHTPARDSLM

SEQ ID NO: 84711 - protein, 127 aa, Gossypium hirsutum
  Clone ID: LIB3165-009-P1-K1-E9.pep
PPKKKRKVYPRLSRKTLGWITKALFNNILRRFIHQDFHEAVSFMTIIDAFLFLMVHSVDRLGIWHRLPVVLGSIYLAARRHLHQQYNLINVGVTPSGVRLSPGDYPHRTASGSYNDPFNEGAGSQRS

SEQ ID NO: 84712 - protein, 60 aa, Gossypium hirsutum
  Clone ID: LIB3165-009-P1-K1-F2.pep
KGGSISISATTTYFQSHIHFQNNLLHQFTFKTITISINTYISTSTYTIISIILTSNYTTS

SEQ ID NO: 84713 - protein, 40 aa, Gossypium hirsutum
  Clone ID: LIB3165-009-P1-K1-F5.pep
RYVSPPVSDRLEAGIGYNSKGRPPPASHGVGEIKLKRKRV

SEQ ID NO: 84714 - protein, 110 aa, Gossypium hirsutum
  Clone ID: LIB3165-009-P1-K1-F6.pep
HTFLSTFFFLLRNLFGGVKLPFFNPCQLTIFNYKLNQFLHFISIYICLIITIITFLHSYSLSMYTLLIFHKPITSYIPLHHLHKSNLHCLHFPLKTLSVYYANLLHPPLL

SEQ ID NO: 84715 - protein, 104 aa, Gossypium hirsutum
  Clone ID: LIB3165-009-P1-K1-F8.pep
LMVLTNVFLSSTSSAMREGGPDVVGLILPSSFGASLYFMTRRNLKLGKATLITIGGLVAGAVVGSAVENWLQVDIVPFLGIHSPATVVGEIILFSQFLVSLYLR

SEQ ID NO: 84716 - protein, 108 aa, Gossypium hirsutum
  Clone ID: LIB3165-009-P1-K1-F9.pep
LKTFFFYSHKFPSGPGSLFPHTAPKSSPFLVNPNPINPIPRSLTKQFLDRPNAVQLASRAMDIIQSPTATRQSAVLSHLLIFPVSTPLSVARPSLCRICAAFLLGTLT

SEQ ID NO: 84717 - protein, 79 aa, Gossypium hirsutum
  Clone ID: LIB3165-009-P1-K1-G11.pep
QESHVHPLQETVCKHSYVPQRYENTISTLMQNIQKSSCTRAFLISKNKHLHSTERTDMSRQIAKHIIYLCRILVLYNIS

SEQ ID NO: 84718 - protein, 69 aa, Gossypium hirsutum
  Clone ID: LIB3165-009-P1-K1-G12.pep
PLLFTLLIILTITATPRSALFLRSPTSSNPTNPSHFKTPSLQFPLLSLTPPNLTHHSTFLLTIFFPYKI

SEQ ID NO: 84719 - protein, 45 aa, Gossypium hirsutum
  Clone ID: LIB3165-009-P1-K1-G4.pep
KTLYFHLFFTNSLNCMGGSNLLSAPTSYVQTSTPDGRHSSIPIQY

SEQ ID NO: 84720 - protein, 44 aa, Gossypium hirsutum
  Clone ID: LIB3165-009-P1-K1-G6.pep
HTLSSHFFIINSSNYKKGLNLISITNPYLQTSTTNQYILNINSH

SEQ ID NO: 84721 - protein, 83 aa, Gossypium hirsutum
  Clone ID: LIB3165-009-P1-K1-H1.pep
NTRSSKLFFYNSVNGKGGSIVTSKGNATVQSLITNHSKRVHQLTIKTLHIAIDTYVILCHLMRYHYKRHHQLHNIYKYFSIHT

SEQ ID NO: 84722 - protein, 72 aa, Gossypium hirsutum
  Clone ID: LIB3165-009-P1-K1-H12.pep
PVRGATISVLQALPTYKLKLQTVATPFIISLYKSLISPKIHMLSDNHHASCKPNHLSTRYTTSKRTFHAIRT

SEQ ID NO: 84723 - protein, 79 aa, Gossypium hirsutum
  Clone ID: LIB3165-009-P1-K1-H3.pep
TALGGGFVHPKRLQKPIRQRVQRELRKGIALKFLYRDASVDEYVRVSEYVGCGLCMSYLFCLTSCPPCKRISPRLVPPA

SEQ ID NO: 84724 - protein, 53 aa, Gossypium hirsutum
  Clone ID: LIB3165-009-P1-K1-H4.pep
WYDNMSISYVIISEIEYFNFELELKNCLVMLLKFVSRNWLKKEDWSLSYSKRR

SEQ ID NO: 84725 - protein, 126 aa, Gossypium hirsutum
  Clone ID: LIB3165-009-P1-K1-H8.pep
MSAAPSSMRCWVDFNGKNYLSHGKLVCLPPRMGSSMLSYHSRADFLKLNSLTSLSSFQHRNGKLKLQSKPMAPSRKLHQPCALVIRCDHPQNADLPRYYSKKEKKPFPVPIVELRRAARERFKKSR

SEQ ID NO: 84726 - protein, 63 aa, Gossypium hirsutum
  Clone ID: LIB3165-011-P1-K1-A11.pep
PPCCPIKQHCLALCHNLCPGKVILESKRGFASKLFYLGGRMKFCGTIKESILNFCGPQKKIMN

SEQ ID NO: 84727 - protein, 42 aa, Gossypium hirsutum
  Clone ID: LIB3165-011-P1-K1-A5.pep
HESGYTPILGPTCVAPKKVPHREWCLCVNQMYRVKPKQSRSC

SEQ ID NO: 84728 - protein, 61 aa, Gossypium hirsutum
  Clone ID: LIB3165-011-P1-K1-B3.pep
DCKTRNITLKNLRMITVVQCYNGTNLHTFKLKLGFFLSFCALFFFTNFDSSVNDVFFHTNK

SEQ ID NO: 84729 - protein, 95 aa, Gossypium hirsutum
  unsure (1)..(95): unsure at all Xaa locations
  Clone ID: LIB3165-011-P1-K1-B4.pep
ATNAGAPVGNQYXSLTGGAGGAIILRDYHYVDKLPNMSSVRLPKRVVHAKRASAKGFSEATNDLSDLTCAVLLRAPXVQTRLIGRSSTVILIRGC

SEQ ID NO: 84730 - protein, 119 aa, Gossypium hirsutum
  Clone ID: LIB3165-011-P1-K1-B5.pep
AKSTRVLRAGSTLKVKEKPLPATRRAYSACRVGKAATKCKKGSFSLSLVSSPIETAKVLDPAGQLPLGAPFCLLSLAEVLDKALEEKTGILQFELLFFFFLQTNAGGGRVWVGDFFFFF

SEQ ID NO: 84731 - protein, 138 aa, Gossypium hirsutum
  Clone ID: LIB3165-011-P1-K1-B7.pep
LGALALQSVVNTKIEQTFSLGGCTLTIVVPSANGPLVIGLETSQALWLEIICTFVFLFASIWIAFDKRQAKHLGRVVVCSIIGVEVGLIVFISTTVTSTKGYAGVGMNPARCLGPALIRGGHLWNGHWVFWAGPVVAC

SEQ ID NO: 84732 - protein, 39 aa, Gossypium hirsutum
  Clone ID: LIB3165-011-P1-K1-C4.pep
AKAVSEIYHLGGEISQGTGWLGADIYVTFKGGDFGVGKG

SEQ ID NO: 84733 - protein, 43 aa, Gossypium hirsutum
  Clone ID: LIB3165-011-P1-K1-D4.pep
MATNKSVGDLKGAGLKGKKGFGRIDLNVPLDDYFNITDDPRIR

SEQ ID NO: 84734 - protein, 36 aa, Gossypium hirsutum
  Clone ID: LIB3165-011-P1-K1-E2.pep
KEEKHSVMIIVTGNIPPRCTRLSKIKSYGEVLRTLW

SEQ ID NO: 84735 - protein, 132 aa, Gossypium hirsutum
  Clone ID: LIB3165-011-P1-K1-E6.pep
KKEEINSAGGGGVRPKLVLQPRTVPVMEECKKDSTVAKPKGANPFGQARPREEVLKEKGKDWKEIDEKLEAMKIKEAVAVTEKERGAKASFGNGHIPADKSWRKSEPVEATADADHQPQSAEESENGHVAEN

SEQ ID NO: 84736 - protein, 80 aa, Gossypium hirsutum
  unsure (1)..(80): unsure at all Xaa locations
  Clone ID: LIB3165-011-P1-K1-E7.pep
MVFGSHKSTSMRASLKQNYKVFIXVKEHHMKXAIEAKIVVLNRXRKVEKDPGLPSDWAFKEQELKALEARRARALEELEQ

SEQ ID NO: 84737 - protein, 93 aa, Gossypium hirsutum
  Clone ID: LIB3165-011-P1-K1-F10.pep
EFVLDFEEIYVIDSKTKSITRAKVLVTVPGGRNRDRKNDLLVIRDNGNSFKIIHSSERDDPTTVIEREEWDKTRQDMERHLRKLRDFSISNWF

SEQ ID NO: 84738 - protein, 111 aa, Gossypium hirsutum
  unsure (1)..(111): unsure at all Xaa locations
  Clone ID: LIB3165-011-P1-K1-H10.pep
MGKITYKRLKGSQNMRQRLLLATLKSTPVLIEDIHADDTLPGLRPHEISLLRLFEKLTDDCLIEINETGTKLKYKPGIIVGGSHLVHDXGGSRAIGYFLEALILLGLFARK

SEQ ID NO: 84739 - protein, 125 aa, Gossypium hirsutum
  unsure (1)..(125): unsure at all Xaa locations
  Clone ID: LIB3165-011-P1-K1-H9.pep
GCKNIVTRASVGEKNLSLDGVNPAHVSYWWVGKTTHGENCFSKIGKAPIXGSKKKVAIKAWVPQNRYPCGDFFDTSKFXKFGGVKGXRPRFSRLVLVLEIKINQPFPLWFPPKKMIRLSSTRNTG

SEQ ID NO: 84740 - protein, 80 aa, Gossypium hirsutum
  Clone ID: LIB3165-012-P1-K1-A4.pep
WRGEYHFCPKLLSSSTLSYLFRSLSFRRPFAPTTPGIYIYALCIDQLNPNPVKLRSKGKSECYVLLPTYDSAERRQIMEN

SEQ ID NO: 84741 - protein, 94 aa, Gossypium hirsutum
  unsure (1)..(94): unsure at all Xaa locations
  Clone ID: LIB3165-012-P1-K1-A7.pep
PQPGKRKNKAKIGSLAKLVFKGAPKRXSQWVRRXGSHFXXXXKXXVLHXIFXXEQTRKXRXXEIXXRVVIDTVFICDPLLFIADAIGVGARAIP

SEQ ID NO: 84742 - protein, 116 aa, Gossypium hirsutum
  Clone ID: LIB3165-012-P1-K1-B3.pep
MGFTMGLNFVLLLVMVATNILSLYHLSSTVQSPNPPPPVPVPDHLLRQLNTIRASINHLTRHNPSSSSTTAEPSSAVPRDLILHSQIGPIASSCHNHPDLLHRYMNYTPFSTCPYD

SEQ ID NO: 84743 - protein, 136 aa, Gossypium hirsutum
  Clone ID: LIB3165-012-P1-K1-B6.pep
VSRRSSLYSKDTHSLSPLHIPTSKLFLPGFLPTMEDGLGQSPTSAIRRRYSITTPVQIPTKLTLLTPKPLQTATSLSNGSATAPLSLDLELISLKASFASYTSLKDILPSPAVAVNSPTAAGSATSSGYEISIRNR

SEQ ID NO: 84744 - protein, 41 aa, Gossypium hirsutum
  Clone ID: LIB3165-012-P1-K1-C1.pep
FFVPSNWTGCLGLMNNSKSLFPNKKAFFDFPGARPVGAYLT

SEQ ID NO: 84745 - protein, 99 aa, Gossypium hirsutum
  Clone ID: LIB3165-012-P1-K1-D12.pep
ASLPASACGTGIPFSRAGLGLPVRAAPDSISGKVEKSVKEAQEACSDDHSSGECVAAWDEVEELSAGSSHARDKKKDNDPLENYCKDNPETDECRTYDN

SEQ ID NO: 84746 - protein, 106 aa, Gossypium hirsutum
  Clone ID: LIB3165-012-P1-K1-D3.pep
SPKKSASAIVSQCLSSSLYNLICSLTLQSSNPSKRPNQSQMMIDRYSIALFLVFSYLVGLLDASAGDADPRYRGCVAECEKNWLCWGNLLSTLQVSFPMVLPNDGP

SEQ ID NO: 84747 - protein, 45 aa, Gossypium hirsutum
  Clone ID: LIB3165-012-P1-K1-D6.pep
AAPETFAKNRELIVIHCMWHVWGALGCDSAALLTRHGDEFGEAAR

SEQ ID NO: 84748 - protein, 37 aa, Gossypium hirsutum
  Clone ID: LIB3165-012-P1-K1-E1.pep
LCSLQWRPTKSPCQLLTEHRLICMDHETELMLLTQLL

SEQ ID NO: 84749 - protein, 50 aa, Gossypium hirsutum
  Clone ID: LIB3165-012-P1-K1-F1.pep
SSNSYRMDTQSRKNQRRRLWNQTVTPNVTHCGHDSYIQSMMRYIACARLT

SEQ ID NO: 84750 - protein, 100 aa, Gossypium hirsutum
  Clone ID: LIB3165-012-P1-K1-F12.pep
MNSGTSDGELAARGSSGRVCSTSSADKKKEKARVSRTSMILWHAHQNDAGAVRKLLEEDRALVNARDYDSRTPLHVASLHGWIDVAKCLLEYGADVNSQD

SEQ ID NO: 84751 - protein, 91 aa, Gossypium hirsutum
  Clone ID: LIB3165-012-P1-K1-F7.pep
MASLNPSGYEKFSGSPPKQGKEAATTGIPLSSSNQYFNESCETNTRLQTKTRVPWSSGLCDCFSDWRNCCITCWCPCVTFGQIAEIVDKGS

SEQ ID NO: 84752 - protein, 36 aa, Gossypium hirsutum
  Clone ID: LIB3165-012-P1-K1-G10.pep
LDLAYIVYRLFISLDQKTPVLVTYIIFNRLCLGGAP

SEQ ID NO: 84753 - protein, 66 aa, Gossypium hirsutum
  Clone ID: LIB3165-012-P1-K1-G4.pep
YDVSAPPTDCGFGYWRKATILELPLFVFHLYCRADTARHMDVILKALVGTNLPPFQHLRRAHQNYT

SEQ ID NO: 84754 - protein, 51 aa, Gossypium hirsutum
  Clone ID: LIB3165-012-P1-K1-H1.pep
HCCTKRLTSQLSLYCIYCFRIESLPLIAECRSVWLLFQWSPSLLYDHFTIM

SEQ ID NO: 84755 - protein, 49 aa, Gossypium hirsutum
  Clone ID: LIB3165-012-P1-K1-H12.pep
NGAAPNIHSVQRFKSLVLQDAIRVHLIHKIEPSIIILKSSKGCRACKRS

SEQ ID NO: 84756 - protein, 85 aa, Gossypium hirsutum
  Clone ID: LIB3165-013-P1-K1-A3.pep
ITEYIERKRRKFLKFVEIVSYHLALYVDHIVRPVPARPVESGAGPSTEEKENAKDTEVFQGSNGEDPVIHVAECRIRPEEDCTYN

SEQ ID NO: 84757 - protein, 91 aa, Gossypium hirsutum
  Clone ID: LIB3165-013-P1-K1-A9.pep
KGITPFFHFCYYGFLGKFDLFLLLFLLSLLFPLSFFQLSSGQENLTHENHLLLQNPFPFSLWFLFKRKRGNTSKKNLVLKETQRTRGRTRG

SEQ ID NO: 84758 - protein, 76 aa, Gossypium hirsutum
  Clone ID: LIB3165-013-P1-K1-D5.pep
WKCAGTSYLSPDSLLKCLRPMKKLALFLFTACPFVTTTVSATPGFNLLLYTNERGLSTFITLGDAVTHGPLYHDDA

SEQ ID NO: 84759 - protein, 70 aa, Gossypium hirsutum
  Clone ID: LIB3165-013-P1-K1-D8.pep
MVDFVKEEIAPTSLNMSSKKELLSTAMKRTSEWIFSQEIPSDVTVQVGGVSFSLHKFPLISKSGYVRKVV

SEQ ID NO: 84760 - protein, 92 aa, Gossypium hirsutum
  Clone ID: LIB3165-013-P1-K1-E2.pep
LHDRFLCFHSGICIAKILVFLAFIVISLFLLLHQTKIPSFKYPREEKKNMASVNLCSWVQSYSIFNQASRSKYSLLPRSLPFNPLMNLSSST

SEQ ID NO: 84761 - protein, 36 aa, Gossypium hirsutum
  Clone ID: LIB3165-013-P1-K1-F2.pep
LISKEMEICVWGCFHCNASVECCTNTFMKLDAMNIY

SEQ ID NO: 84762 - protein, 37 aa, Gossypium hirsutum
  Clone ID: LIB3165-013-P1-K1-F8.pep
SALRWKYVYPDAFIVMPLTSVEQIPFMKFRRIEYSFR

SEQ ID NO: 84763 - protein, 85 aa, Gossypium hirsutum
  Clone ID: LIB3165-013-P1-K1-G10.pep
EVCFSFSLSIAQSLGLLEEKPKPRKPIPSKSLQSFVRLLHRRFFLLFFPFYLLRCSFPFNSFFLPSTFFPLSNFGKLEFFGSRPF

SEQ ID NO: 84764 - protein, 97 aa, Gossypium hirsutum
  Clone ID: LIB3165-013-P1-K1-G2.pep
MDRKRTESPSYTRRWSSHSGTGSTGGGVESPALSPAHNQPRHARSSSATGISSIKRTQNFAAKAAAQRLAQVMASQTTDDDDEEDDGDDLGFRYSAP

SEQ ID NO: 84765 - protein, 114 aa, Gossypium hirsutum
  unsure (1)..(114): unsure at all Xaa locations
  Clone ID: LIB3165-013-P1-K1-G4.pep
MENETQSLLPKNRSSNPSYSTPEGLELRSFRLGLNWFCLDQSNLWKVSLSWSFFFVLAIGVPIISHYVLLCSNCDEKHRRPYDAXGQLSLSSFGGVSFISLSSWARKYGNQEFL

SEQ ID NO: 84766 - protein, 58 aa, Gossypium hirsutum
  unsure (1)..(58): unsure at all Xaa locations
  Clone ID: LIB3165-013-P1-K1-G8.pep
YYFLSRALVDQDRDQKKGYILITDGLISFSGLRMRIGRVIMLLLLCXXIMMHRSYWGL

SEQ ID NO: 84767 - protein, 67 aa, Gossypium hirsutum
  Clone ID: LIB3165-013-P1-K1-H12.pep
PNGRVDPTDPSGFKVTTLVAIRPSEQSASKKEVSDASWLSTAFEEPYGTAAKMLVKRRTYCLEMNSF

SEQ ID NO: 84768 - protein, 54 aa, Gossypium hirsutum
  Clone ID: LIB3165-014-P1-K1-A9.pep
LVHVENPASQCLLTGDKENVSIGCRFHLKLKRLGDPVESADDAMAVWRGCPPRR

SEQ ID NO: 84769 - protein, 122 aa, Gossypium hirsutum
  Clone ID: LIB3165-014-P1-K1-C3.pep
MRRASFTCCILSRTLSTVHDGGTVNLHPRLLRVALFSSSRTDNSNSRRHWISPLLSSFSKSSGQAVSLGLVGVVASVATAASVYAKEPPPAEIIPKDVVLYQYEACPFCNKVKAFLDYYDIP

SEQ ID NO: 84770 - protein, 55 aa, Gossypium hirsutum
  Clone ID: LIB3165-014-P1-K1-C4.pep
RHNDYGSTSFLGIDDAIENAENLNTAESWHVVQHEVWRVARAVKHASLVLDGKLT

SEQ ID NO: 84771 - protein, 37 aa, Gossypium hirsutum
  Clone ID: LIB3165-014-P1-K1-C5.pep
IKKGARKFEEVLFKTKFAFTLLVLANFYSSLFLLLTL

SEQ ID NO: 84772 - protein, 97 aa, Gossypium hirsutum
  Clone ID: LIB3165-014-P1-K1-C7.pep
FYLSIGHLLLLLLFRASQLMMKRFNSPPPFLFWFMLEEKMEQESTGSGSSKISSLQWVFKDKNMAWEAYKSKPFSHRVLLFLSSMGTLVAFPASSLL

SEQ ID NO: 84773 - protein, 74 aa, Gossypium hirsutum
  Clone ID: LIB3165-014-P1-K1-C8.pep
MMGLGKIFYCSFPLQEKKILSRVYIKFLVLKLSVLQPHQDGPAYYPVVAILSLGSPVVMDFTPHSRLNSCKSTV

SEQ ID NO: 84774 - protein, 58 aa, Gossypium hirsutum
  Clone ID: LIB3165-014-P1-K1-D5.pep
HASAHAFDELMFAFTYQNEEGVFKNASQHPLNDLLNESHHPVVSLEYTRYDISSTFYY

SEQ ID NO: 84775 - protein, 49 aa, Gossypium hirsutum
  Clone ID: LIB3165-014-P1-K1-E2.pep
SCCRDGLESRSDWSRLRHGSASPVRCECGFSGLYSGELYIVNPLLPGAH

SEQ ID NO: 84776 - protein, 113 aa, Gossypium hirsutum
  Clone ID: LIB3165-014-P1-K1-E6.pep
MNSSPNPPQPPPPQSSTSTTATDGSGKKVRKPYTITKSRESWTEEEHDKFLEALQLFDRDWKKIEDFVGSKTVIQIRSHAQKYFLKVQKNGTIAHVPPPRPKRKAAHPYPQKA

SEQ ID NO: 84777 - protein, 135 aa, Gossypium hirsutum
  unsure (1)..(135): unsure at all Xaa locations
  Clone ID: LIB3165-014-P1-K1-E8.pep
FRQLRVYKTPXLETPRYQMLKRTANYEVRKYEPFIVVETIGEKLSGSNGFNAVAGYIFGKNSTTEKIPMTTPVFTHALDPELSDVSIQIVLPSEKDISSLPDPSQETVKLRKVEGGVAAALKFSGKPTEDVVREK

SEQ ID NO: 84778 - protein, 83 aa, Gossypium hirsutum
  Clone ID: LIB3165-014-P1-K1-F11.pep
YMVTAAASSMAATAILVPRVHTAVRITHCSALPSLPPRVSSSSFSSSVKLSPGTALIHGLFNTHFQHHLRNVITSSKIYFLIY

SEQ ID NO: 84779 - protein, 35 aa, Gossypium hirsutum
  Clone ID: LIB3165-014-P1-K1-G3.pep
FKRPKTNDIHPLVTDNGSEIVKATIPGHDAPQPLF

SEQ ID NO: 84780 - protein, 61 aa, Gossypium hirsutum
  unsure (1)..(61): unsure at all Xaa locations
  Clone ID: LIB3165-014-P1-K1-G5.pep
VPCNGTCTWVIYPKDGGSPGHTVSASFXRNRVKFLNRDAAADSNVRESMYLFNLHITFLFF

SEQ ID NO: 84781 - protein, 55 aa, Gossypium hirsutum
  Clone ID: LIB3165-014-P1-K1-G9.pep
KARSVRPFSILRHLEKGICSARILSWVTTVFSQSTRCKTAPSILYLCHYIKALWC

SEQ ID NO: 84782 - protein, 108 aa, Gossypium hirsutum
  unsure (1)..(108): unsure at all Xaa locations
  Clone ID: LIB3165-016-P1-K1-A12.pep
MPAASTNMSDREGESFVEVDPTGRFGRYNDLLGAGAVKKVYRAFDQEEGIEVAWNQVKLTNFSEXPVLINRLQSEVQLLRTLKNKYIIVCYSVWRDREHNTLNFITEV

SEQ ID NO: 84783 - protein, 173 aa, Gossypium hirsutum
  unsure (1)..(173): unsure at all Xaa locations
  Clone ID: LIB3165-016-P1-K1-A2.pep
GNGPGSSPRRHXPQRDVKLQDTPNFTSFVFCHLXLSQRSGXAAXSPNRRPPRCPAAQPPSSGRCXSPKPQXFXGERKVKLEDSHNPPRQVLFGNVLKVIGGPKIEIRPKRHPDRKRTRWEKGVGLPKYFGPTQQRQLXXEGKGDGCDSLVPKPPMNGWNXXLCCHGSSYEIPS

SEQ ID NO: 84784 - protein, 99 aa, Gossypium hirsutum
  Clone ID: LIB3165-016-P1-K1-A6.pep
PCKAFAPPRLFPCGKKVITARCSDRKSVLTCGQRCGKLLECGRHQCERICHIGACDPCKVLINAPCFCKKKVEVVICGDMVVKGKVKAEDGIFSMCLTC

SEQ ID NO: 84785 - protein, 62 aa, Gossypium hirsutum
  Clone ID: LIB3165-016-P1-K1-A7.pep
NSLMEARKEWWLTGQVLKRLVNESKQSRNGEMSSRSPVSYTPSRYVSSLSPFGSKNHSRSDS

SEQ ID NO: 84786 - protein, 107 aa, Gossypium hirsutum
  Clone ID: LIB3165-016-P1-K1-B11.pep
KRGNPKCLPLFGLPFNHHQCTMNDGWWSTKAFPLCLHLKPSLKAHQFRPQNPSQPSTPAKKTRIWWLVRKVSLLSSLYYTKKHAEQKRKQNRPEKNNVQTFEIFFSF

SEQ ID NO: 84787 - protein, 96 aa, Gossypium hirsutum
  Clone ID: LIB3165-016-P1-K1-B12.pep
NRKICVFGRQERKPIERPKVSPQPYQEAGWVLLKTSRILELRAKKLRLGLVKVFWPLKEELTEGVEKEGEKVVAAIVTEVEMIVSYNGTHASAHAS

SEQ ID NO: 84788 - protein, 114 aa, Gossypium hirsutum
  unsure (1)..(114): unsure at all Xaa locations
  Clone ID: LIB3165-016-P1-K1-B5.pep
MVVTTLLSPCNSILVRGFPIRENESSSPPLFLSVRDRFLNRNKRLSRGGLLVQLNATEGSADSSKSEESIPXWAKPDSDEPPPWAQGEGKSSTAQQSFEVPFFVYLLASAVTAI

SEQ ID NO: 84789 - protein, 124 aa, Gossypium hirsutum
  unsure (1)..(124): unsure at all Xaa locations
  Clone ID: LIB3165-016-P1-K1-B8.pep
MAVAVAVTGGGGQYNGRMTWFVVLSCMMAAMGGVIFGYDIGISGGVTSMEPFLKKFFPEVYRKMKVDTKISNYCKFDSQLLTXFTSSLYIAGLVATFFASSVTKVFGRKPSILTGGAAFLAGSA

SEQ ID NO: 84790 - protein, 81 aa, Gossypium hirsutum
  Clone ID: LIB3165-016-P1-K1-C10.pep
VSLYFRLFFFFFFFFFFFFFFFWVFFFFFFFFFFFFFFFFLCKRDNLFSYSMALKELKCTRAHSSNGEAFCFLKSFPRTRG

SEQ ID NO: 84791 - protein, 136 aa, Gossypium hirsutum
  Clone ID: LIB3165-016-P1-K1-D10.pep
FRVLYNVTVFFLNLNTTTGGVILLIQSIQLPGNNYYKLPNARLVTSNLIKDICKKCDFFEALHHWNPYAIDRQSVKLDEGAFHEIHGANAYGTEAKQGPEGQQAIHTAFDSESTFYIRRFHESNMAAIPGLTYEHS

SEQ ID NO: 84792 - protein, 104 aa, Gossypium hirsutum
  Clone ID: LIB3165-016-P1-K1-D12.pep
KSSTVSLRDIFCLRVCQRSGMICKRPCCHVRVSQQGAEFSTCIQNSHDDPSNVEVASPIFKTDGASAQQLILDEDGSELRKQLPAFVNSATLGGMESAHHVAQT

SEQ ID NO: 84793 - protein, 105 aa, Gossypium hirsutum
  unsure (1)..(105): unsure at all Xaa locations
  Clone ID: LIB3165-016-P1-K1-E1.pep
WSSRKMRIISLSLHFCCSDSASYKVWQSSSTSRLLLLPIRVRVLNQLXQDHIQCQAELAVFEVVEGFQKSKSSAPKPATSYRRKEVQKEELPEDIKLYRDPTTTL

SEQ ID NO: 84794 - protein, 96 aa, Gossypium hirsutum
  unsure (1)..(96): unsure at all Xaa locations
  Clone ID: LIB3165-016-P1-K1-E10.pep
IPWMIGQDVXLVMLGTGRRRLXQMLRQFENXHRDKVRGWVGFSVKTAXRITAGLIFYYAIRFEPCGLNQLYAMNYGTIPVVHAVXGLRDTVQQFNR

SEQ ID NO: 84795 - protein, 65 aa, Gossypium hirsutum
  Clone ID: LIB3165-016-P1-K1-G5.pep
ASNFKTNMSVDPIFQGESSKIPKAYLKKHNYWLRRCFKSNCFWQPGPIQSSNRNNIRHDSLLTYS

SEQ ID NO: 84796 - protein, 127 aa, Gossypium hirsutum
  unsure (1)..(127): unsure at all Xaa locations
  Clone ID: LIB3165-016-P1-K1-G6.pep
METAGGSILHTLAFSSNTATATINNNHHLFLPPKTNPSFSSTFPRNFNFHGKPLQFNGFTAFSSPSSAQSQNPPQELAVLLEVDGXIMDAYRLGNRQAFNLAFQKLGLDCANWTEPVYSDLVRRSAG

SEQ ID NO: 84797 - protein, 83 aa, Gossypium hirsutum
  unsure (1)..(83): unsure at all Xaa locations
  Clone ID: LIB3165-016-P1-K1-H8.pep
MGGGGAGGSVKDVQSKGELDGLRQSGATLILHFWASWCEASKQXDQVFSHLFTDFPNFYFLRVEAEEPPEIFEEYSGSAWPFF

SEQ ID NO: 84798 - protein, 87 aa, Gossypium hirsutum
  Clone ID: LIB3165-017-P1-K1-A7.pep
MLYPLLISSVCILVCLITTLFATDLFEIKVVKEIEPALKKQLIISTILMTVGIAIVTWIGVPSSFTIYNFGVQKVVKNWQLFLCVGV

SEQ ID NO: 84799 - protein, 84 aa, Gossypium hirsutum
  Clone ID: LIB3165-017-P1-K1-B2.pep
FLPVLVLEASFFTERSQTSAIGFYRPRHCSGQPIIQVSHSLSLQSFLCFPDLGTFLKRHSSKLWLNSFMSKMYALNTDLSSSLF

SEQ ID NO: 84800 - protein, 61 aa, Gossypium hirsutum
  Clone ID: LIB3165-017-P1-K1-C7.pep
PYFLIKHNIYIYQHPHYYRAAQSPINTAPTLKLPSLSTHPHLYILHPIATFTFTLITLEIP

SEQ ID NO: 84801 - protein, 111 aa, Gossypium hirsutum
  Clone ID: LIB3165-017-P1-K1-D1.pep
PRVRFVMGISILVAVTVLVYIEDNIGWGWGLGVPTIAMFLSIITFIIGYPLYRHMDPAGSPFTRLLQVCVSAFKKRKLAMVSDPNLLYRNDELDASIFVGGKLVHTPDMTF

SEQ ID NO: 84802 - protein, 122 aa, Gossypium hirsutum
  Clone ID: LIB3165-017-P1-K1-D2.pep
MNNKEQGKSEEEEEEVVMESKPLRFLTQQSLFVAVRSGELEAVKQILDKLKKDDEACDGSSTVYDLMAAQSESGATAFYIAAENNFNEVFDYLIKFCDVEIVKIRSKSDMNAFHVAAKLGHL

SEQ ID NO: 84803 - protein, 136 aa, Gossypium hirsutum
  Clone ID: LIB3165-017-P1-K1-D5.pep
HASAHASEYVSFMLAAGAKVAYEKERSIGWLCLVVVMSSAATVYQLYWDFVKDWGLLQMNSKNPWLRNELMLRRKFIYYFSMGLNLILRLAWLQTVVHSTFEHVDYRVTGLFLAALEVIRRGLWNFYRLENEHLNN

SEQ ID NO: 84804 - protein, 135 aa, Gossypium hirsutum
  Clone ID: LIB3165-017-P1-K1-D8.pep
PRVRFSRSLYFNPKLPPLALTSTSKPSFLFPTRKLSLPSLHSLIFNQSKNSSNNNSSNSCIVSSAFDSFFILCTSLALSFSLFVTDVGAASAFVVTPPRKLQSDELATVRLFQENTPSVVYITNLAVRQDAFTLD

SEQ ID NO: 84805 - protein, 137 aa, Gossypium hirsutum
  Clone ID: LIB3165-017-P1-K1-E5.pep
QKSITLKTRRLIYAAENNQSSDYGSSTQKIKDESDTQGLSQWKCMSSNVSDTGREQQGNSVKPGQESLQNEGQAEGISDKLFVSENSERFVEVAHCSGTCESIALKLEENSAFVDEMAHNVVGLQSDKRIAYVMIGV

SEQ ID NO: 84806 - protein, 75 aa, Gossypium hirsutum
  Clone ID: LIB3165-017-P1-K1-G11.pep
PRVRPPVRIFLVLTTFLSAGVSTFLISKAYHIPNPFPYYLLTSVYHQKTLSIYLHSPYSSFTSHSQATFSSCCTP

SEQ ID NO: 84807 - protein, 134 aa, Gossypium hirsutum
  Clone ID: LIB3165-018-P1-K1-A12.pep
MAMTTFHMPRPSFWKGQGIRFSQKPSWFRAQPRTKLNPSVNIKASAGVRKEDIVIVGAGIAGLATAVSLRRLGIGSVVLEQAASLRTGGTSLTLFKNGWRVLDAIGVADTLRGQFLEIQGMAVNSEDGRELRSF

SEQ ID NO: 84808 - protein, 87 aa, Gossypium hirsutum
  Clone ID: LIB3165-018-P1-K1-A8.pep
HASAQKSLLFFLLPQTKRHASIIIASSKPVIFNGCLIILFFQPKLKPIPPLFLPKLPNPKVLKTQQIPLLFFNNFKFIFLFTSTTLF

SEQ ID NO: 84809 - protein, 78 aa, Gossypium hirsutum
  unsure (1)..(78): unsure at all Xaa locations
  Clone ID: LIB3165-018-P1-K1-B5.pep
EEFYHLITLAKDKLDKSMVAPHXSCYSIETQIRTSSGMFLQKAHDEVVADIXPRIAAWTFLPLKNGVSMHILHYQNVL

SEQ ID NO: 84810 - protein, 133 aa, Gossypium hirsutum
  Clone ID: LIB3165-018-P1-K1-C12.pep
ELARPEEKLAGLRIDGKCDARSRMSFYTGIGIHSLMPDGSLGPETEVRGLPDGAKINFVTWSNDGKLLAFSVRFEEEESSSSKLRVWVADVETGMARPLFQSPDIYLNAVFDNYVWVDNSTLLVCTIPLSRGD

SEQ ID NO: 84811 - protein, 81 aa, Gossypium hirsutum
  Clone ID: LIB3165-018-P1-K1-C2.pep
KWCDSNLGSGEEVVLDVPQKWSGRIWARQGCNFNSNGKGSCDTGDCSGRLQCQGTGGTPPATVIEMTLGSSSSPLHFYDVS

SEQ ID NO: 84812 - protein, 142 aa, Gossypium hirsutum
  unsure (1)..(142): unsure at all Xaa locations
  Clone ID: LIB3165-018-P1-K1-C5.pep
QDQVKRVLSKIKXARNKLEREEGVKLENVPSKYPILRRRHRLVVLILDCYDSNGLPEKKMAQIIQDIFKAVRLDTQNAKFTGFAISTAMPVSETMEFLKSAKIQVNEFDALICGSGSEVYYPGTYXQKDGKXFADPDYASHI

SEQ ID NO: 84813 - protein, 104 aa, Gossypium hirsutum
  Clone ID: LIB3165-018-P1-K1-F12.pep
MLYSEIALILSNLILSSVVTSALTFLQVIRCWNAYLGHEIFKSVVGLGGLGRGPELCVWSLLSLRCGTVVSADSTGSVQFWNGDNGTLLQTHSTHKGDVNALAA

SEQ ID NO: 84814 - protein, 139 aa, Gossypium hirsutum
  Clone ID: LIB3165-018-P1-K1-F2.pep
KMTTILGIHLIFLGIGAFLLRFKALYFGGVYDTWAPGGGDVRKITNLTLSPSVIFGYLLKSPFGGEGWIVSVDDLEDIIGGHVWLGSICIFGGIWHILTKPFAWARRALVWSGEAYLSYSLSALSVFGFIAWCFVWFNN

SEQ ID NO: 84815 - protein, 117 aa, Gossypium hirsutum
  unsure (1)..(117): unsure at all Xaa locations
  Clone ID: LIB3165-018-P1-K1-F3.pep
MSPCVTYAARTLGWRDGAXASHLKLISLVVIFISSIAGISSPIFLARYFQGKPVYDKAILVIKCFAAGVILSTSLVHVLPEAFAALSDCHVASRHPWKDFPFAGLVTLLGALLALFV

SEQ ID NO: 84816 - protein, 80 aa, Gossypium hirsutum
  unsure (1)..(80): unsure at all Xaa locations
  Clone ID: LIB3165-018-P1-K1-G2.pep
MAGLFGSQSSTVAPMIVTSTPSTDLALTNFAYCSPSDLQSFAVPGSKLFLXANVGDAFXLTVSSHESIRNGYIALNAIHR

SEQ ID NO: 84817 - protein, 133 aa, Gossypium hirsutum
  unsure (1)..(133): unsure at all Xaa locations
  Clone ID: LIB3165-018-P1-K1-G3.pep
ERDSSSWFFIFLLQIMYESMKVRVEHVVETRKISEEYNTSDEVRQVFSQWSIDGFTRQNHPTVIQVLLDQNKDKDITGNCLPNLVYVSRQKSKTSXHHFKAGALNVLVRVXAAMTNAPVILTLDCDMYSNDPT

SEQ ID NO: 84818 - protein, 49 aa, Gossypium hirsutum
  Clone ID: LIB3165-018-P1-K1-G7.pep
EQLEQCVGSRWVRDWDRCVQSSESILFPRLWIHFGELNCYIGAGPLAVS

SEQ ID NO: 84819 - protein, 138 aa, Gossypium hirsutum
  Clone ID: LIB3165-018-P1-K1-H6.pep
GGPAHAYAFSISLLSPTIIAYLHSLSPGLDPTYRFSSDNGLLLVDFVGLYCKSKPTTRRRLPLSLNTRTMRRFSTSAANNSVRAVLDHLPTTTTTTTTTTTTTTTTTTSVSSASDHQSSASQPKVANLEDIISERGAC

SEQ ID NO: 84820 - protein, 126 aa, Gossypium hirsutum
  Clone ID: LIB3165-019-P1-K1-A1.pep
MGCTSTVSMALPLSPTTQTKVSIPNPVLNPLPLKHSSMAATPTTRPNATKLEVKASSSSSSSSNKEKAVTMLTAAAMTTSMMVPEIAQAADGVTPSLKNFLLSIAAGGVVLVAIIGAVIGVSNFDP

SEQ ID NO: 84821 - protein, 102 aa, Gossypium hirsutum
  Clone ID: LIB3165-019-P1-K1-A4.pep
DMLKPLTTTLSSSCLGSGVRIHHVYFTKHGDLIRSYEGSRFTKTSEGSLHFNSDEQNFSRIGRLKTRCQHQQHVFPNSIAHISADGTHQDQNDVFKATLIWR

SEQ ID NO: 84822 - protein, 125 aa, Gossypium hirsutum
  Clone ID: LIB3165-019-P1-K1-B11.pep
METNDDTSKAKGLSFDDFLSKKPYSPPTWASHLKPIPSHVFSLAHLPTPIHKWNLPNLPQNTEVWLKRDDLSGMQLSGNKVRKLEFLLAEAVAQGADCIITIGGIQSNHCRATAVAAKYLNLDSY

SEQ ID NO: 84823 - protein, 134 aa, Gossypium hirsutum
  Clone ID: LIB3165-019-P1-K1-B12.pep
PTRPPTRPIVSYLHLYPHLSGHSAIPHQHPNFSRLPPTNLSLPVIFKASFPKKCIILVPRASSSSSGQSSVGKKVYEFDPHPTLTNDDLKPTRPSQRNYHWKQMARHWVGLVVGVPAYYMAGSLVELGMAWWQG

SEQ ID NO: 84824 - protein, 54 aa, Gossypium hirsutum
  Clone ID: LIB3165-019-P1-K1-C9.pep
SDIANIAGCLRTIGMGMPGDGEYTGTLNEPGRWINVHIVHTDMRAVRALLLTSI

SEQ ID NO: 84825 - protein, 103 aa, Gossypium hirsutum
  unsure (1)..(103): unsure at all Xaa locations
  Clone ID: LIB3165-019-P1-K1-D1.pep
LTFCLSHCCHWNPKYIYFIFIKELKKETSCESFIFYVLLNLDPNSSERPFSSLNLPFSSLILHGQGWWLCPQQEKASFXRRRPCSPPWVXHNSXQQRTHSRHR

SEQ ID NO: 84826 - protein, 66 aa, Gossypium hirsutum
  unsure (1)..(66): unsure at all Xaa locations
  Clone ID: LIB3165-019-P1-K1-E8.pep
RQHLELRKRKCGKTYELYDVHNDLLTVXTANPEVGKTDQMMNPRAVHGVTKFSDLTTSEDRRQYLR

SEQ ID NO: 84827 - protein, 87 aa, Gossypium hirsutum
  unsure (1)..(87): unsure at all Xaa locations
  Clone ID: LIB3165-019-P1-K1-G6.pep
MSFDSLTFSFLAMATCSADLAPLLGPNATAAADYICNKFSDTSFAVDNTYLLFSAYLVFSMQLGFAMLCAGSVRAKNTMNIMLTNXL

SEQ ID NO: 84828 - protein, 55 aa, Gossypium hirsutum
  unsure (1)..(55): unsure at all Xaa locations
  Clone ID: LIB3165-019-P1-K1-G8.pep
GVRVSEGKFLSLCGVVGVGRSFEKCTSLRFFCFVYKIYKCFFIFLXXESVGRPVF

SEQ ID NO: 84829 - protein, 88 aa, Gossypium hirsutum
  unsure (1)..(88): unsure at all Xaa locations
  Clone ID: LIB3165-019-P1-K1-H2.pep
RVDVCRVTVEEVRLAFNVKTDLKKLEDTMISIKAVLLDAERQQHQNEKLRLCMXKLRDIXYDAEDVIDDFKCEALRKQDGINHPDIKN

SEQ ID NO: 84830 - protein, 109 aa, Gossypium hirsutum
  Clone ID: LIB3165-020-P1-K1-C12.pep
MATKTASSSSSKSQARTCLCSPTTHPGSFRCSLHRNFNKPPTGRSRAVRIAPNSWELALQAKANSIKALLLQIIKPSSHDLQRRRNFQPKPSRFCMLNGNRNGFGVAVS

SEQ ID NO: 84831 - protein, 51 aa, Gossypium hirsutum
  Clone ID: LIB3165-020-P1-K1-C2.pep
PSVRTHKGCGSINTAGRWSWKSKSVKECEPPHLPNQLAPKMVGPKARDLYP

SEQ ID NO: 84832 - protein, 106 aa, Gossypium hirsutum
  Clone ID: LIB3165-020-P1-K1-C6.pep
YPSKFPPTVHIQCQVILHQKLKQKIPKSRTYFPDNQPVLKLVRTDQKRFQRRPQLHVESTYERFTTGTVFGDVFTGIRTVKSRANSPLNGARYVYKFECDLLSDAW

SEQ ID NO: 84833 - protein, 62 aa, Gossypium hirsutum
  Clone ID: LIB3165-020-P1-K1-D12.pep
MATGTGSSRDKATRGAPLTGLKSASAFPVTRKANNDITSLASNGGRVQCMQVWPPLEKKKLE

SEQ ID NO: 84834 - protein, 66 aa, Gossypium hirsutum
  unsure (1)..(66): unsure at all Xaa locations
  Clone ID: LIB3165-020-P1-K1-D3.pep
LRKTIKKHKHKRGCKDQLFLFFVLQVLVTPNIPMCSRNLTSHTRKKLXNQILHMSRFIISKENPIF

SEQ ID NO: 84835 - protein, 139 aa, Gossypium hirsutum
  Clone ID: LIB3165-020-P1-K1-D8.pep
FGMHNRENVLVFCYALSPNDGTEWRLRIQSEAEHFIDVSSMSSDMIAKMINEDKIQILVNLNGYTKGARNEIFAMQPAPIQISYMGFPGTTGASYIHYLVTDEFVSPLHFSHIYSEKLVHLPHCYFVNDYKQKNLDVLD

SEQ ID NO: 84836 - protein, 72 aa, Gossypium hirsutum
  Clone ID: LIB3165-020-P1-K1-E8.pep
FFIVWPTGSLGPMRGPSDHAGGQLSHQLAGVHIHNHPPEHLGRPPCEKDCGFQYCAVPITRHHSSCHTRNEK

SEQ ID NO: 84837 - protein, 144 aa, Gossypium hirsutum
  unsure (1)..(144): unsure at all Xaa locations
  Clone ID: LIB3165-020-P1-K1-F6.pep
LVRSFQVIDIDNDYYLVKFALSQDYTKALTEGPXMVYGNYLTVQPXSRDFSTNKQHPSKIVVWMRMSGLPYRYYNKKLLRIIARTLEKVVKVNYNTTKSRREKFARFAIVVDLMKPLKAFVGITNVPFCFQCEGLPLICYKYGC

SEQ ID NO: 84838 - protein, 91 aa, Gossypium hirsutum
  Clone ID: LIB3165-020-P1-K1-G1.pep
LFCSLPSQHNIGYSGFGWRRRRRRRPCLKLTGLVIDMRPKGSFVSAAGFDSSLSVVIKSTRHMTKLILDPIYYHTEKVADGLTGAEWHGWV

SEQ ID NO: 84839 - protein, 144 aa, Gossypium hirsutum
  Clone ID: LIB3165-020-P1-K1-G10.pep
LFISHTLFPSKSRLFRGLTLSPHRHGFASFTNCSKNNDNLTTPPSQDQDKKLPSSKEQLSFAAATGELFLGIASKLIKNRLNNEDSTSLVFLRPRKRINESEVEYNGNNDKERIGLVMKDEIEPDVIWEQRVKDIEAENERRVV

SEQ ID NO: 84840 - protein, 115 aa, Gossypium hirsutum
  Clone ID: LIB3165-020-P1-K1-G4.pep
MALNLVSPTEIHSISFLGSTHSSSFSKLFPGCFALKKDCPTTFGRKCQCSTQAPQPPPAWPGRASPDPGRKTWDGPEPISIVGSTGSIGTQTSDIPAENPPKFRVVALAAGSNVT

SEQ ID NO: 84841 - protein, 56 aa, Gossypium hirsutum
  Clone ID: LIB3165-020-P1-K1-G8.pep
IKSSVHLYIIYKCSLDKQNKLNSQNKSYSDYSQILIIRLVEAKLRSMITLTSLRVH

SEQ ID NO: 84842 - protein, 62 aa, Gossypium hirsutum
  Clone ID: LIB3165-020-P1-K1-H3.pep
ASHSARTPCMPTTLLLPSVTDWSPLRAPWTVAGAGANEASVAGPLAGVPPEYGLASHLSFFF

SEQ ID NO: 84843 - protein, 117 aa, Gossypium hirsutum
  unsure (1)..(117): unsure at all Xaa locations
  Clone ID: LIB3165-021-P1-K1-A7.pep
RSHTQSSMVLXYPSRLSGNRNGTRFITPASKRKENGGPTSRNQQLAKFQLKVSNTVIARSVVVLFGLGFIDAGYSGDWSRIGVISKDVEDLLKIADFMVCTLCIFIVSSFTKQTTDT

SEQ ID NO: 84844 - protein, 61 aa, Gossypium hirsutum
  Clone ID: LIB3165-021-P1-K1-B6.pep
QQLLSVSHSVRSVISGLTPCTEATPVGQRVLQPITTLEHSVQIYTQGRDPRLPLKPAIYKT

SEQ ID NO: 84845 - protein, 54 aa, Gossypium hirsutum
  Clone ID: LIB3165-021-P1-K1-B7.pep
MASFGLYSILSAGFLYFGFITSRKRRRLPLPPGAKPWPIIGNSPHMSPVPHQSL

SEQ ID NO: 84846 - protein, 118 aa, Gossypium hirsutum
  Clone ID: LIB3165-021-P1-K1-C9.pep
MEKKGTVLMQRFEVGRLLGQGTFAKVYQARNLRTGESCAIKTIDKEKIMKGGLIDQIKREISVMRLVKHPNVVRLYEVMASKSKIYFVMEYVKGGELFNKIAKGKLKEDDARRYFQQL

SEQ ID NO: 84847 - protein, 135 aa, Gossypium hirsutum
  Clone ID: LIB3165-021-P1-K1-E6.pep
LPPKLYFNITDRVYLDFSLCPTYFRNATAADSIPLCSDPSPLGRLVLGLYGNLLPLTVSTFKRMCTSSSYKNTLVHKIFPGQFFQAGRQGRSREYGEVRLPPALDLPRNTETVDSKAFLLKHSRPGVVSLCLSEN

SEQ ID NO: 84848 - protein, 114 aa, Gossypium hirsutum
  Clone ID: LIB3165-021-P1-K1-H9.pep
RWCWFMDIEPLWDLGGWFFIFIDCMAATPKTPSSSSSIVAETFAKSHSLLFLLTLFFIFLLLLNPKPTNYPMDSPNGTPSIPFKRLLLDASSNMNLHSKQTRTLGTSSSSRKEF

SEQ ID NO: 84849 - protein, 58 aa, Gossypium hirsutum
  Clone ID: LIB3165-022-P1-K1-A1.pep
EITIVESETEITTRTGGTTGVIRVHFISRVKQIRIQLVFHPKIPPNLKPSLNFFPFPF

SEQ ID NO: 84850 - protein, 124 aa, Gossypium hirsutum
  Clone ID: LIB3165-022-P1-K1-A9.pep
MSKCRDEEDPTTRKPEYDRLSKLKAFDETRAGVKGLVDSGIKHVPRMFHHQFENNPVSCGIQVSIPIIDLEKVKQNRTTREEIVGKVRNASKTWGFFQVLNHGIPMNVMEEMKDGARRFFEQDV

SEQ ID NO: 84851 - protein, 117 aa, Gossypium hirsutum
  unsure (1)..(117): unsure at all Xaa locations
  Clone ID: LIB3165-022-P1-K1-B10.pep
LTQSVPKVTVFFYVAPNVVWADXETFNDXHTTWNASFLLRYLXKITVMLSSYAHQHFKIYSVMHSLTLLSADTSIYRFAIHASYKVLSLYANEPKCIIAQHSIIIEGFSVDTYYMLK

SEQ ID NO: 84852 - protein, 56 aa, Gossypium hirsutum
  Clone ID: LIB3165-022-P1-K1-B3.pep
KLKRVFVFPESVGGLQAQRLSRVHSFVICDMVYRVTNSISFLTRAVIVIPLNQRLV

SEQ ID NO: 84853 - protein, 61 aa, Gossypium hirsutum
  Clone ID: LIB3165-022-P1-K1-C7.pep
PCLHLNVLKPTLLREGCYYWFAFVLCLHPTATCHAVYSLICPVSIGHYTTKRKNDMDIFIS

SEQ ID NO: 84854 - protein, 55 aa, Gossypium hirsutum
  Clone ID: LIB3165-022-P1-K1-D1.pep
PGSGLWKDEATVKSMSRCGDYRELLKGPLYYATTITLACAFYWRTSPIAIAAICN

SEQ ID NO: 84855 - protein, 85 aa, Gossypium hirsutum
  Clone ID: LIB3165-022-P1-K1-D11.pep
ILIASETPPHILPSTMTFKRVVSHEIFGHRLVSRSKSPVISIVLFSLLIFFMFAYSIISNMSLQSAAFNVLPISFTISTQRNMIV

SEQ ID NO: 84856 - protein, 137 aa, Gossypium hirsutum
  Clone ID: LIB3165-022-P1-K1-D12.pep
PRVRLFEYSSTSTRQVIERRNLQSERIDRLDPISTLELQLQSSTCAMLGKEIAEKTKELRQLRGEELQGLDLEELKHLEKLLEGGLNRVTQTKDELFFKEISILKRKEVELMEENQQLKEKMGNSPHVVQPAVAQQG

SEQ ID NO: 84857 - protein, 125 aa, Gossypium hirsutum
  Clone ID: LIB3165-022-P1-K1-D2.pep
MEVYLVIRDWVALLVVGLLMIWGWRTLNWVWLAPKRLERCLRQQGFAGNPYRFLSGDIKELFTMSRQTRAKPMPLSDDIGPYVVPFQHQTANQYGKNSFTWFGPRPRVNITDPEKIREILNKFND

SEQ ID NO: 84858 - protein, 68 aa, Gossypium hirsutum
  Clone ID: LIB3165-022-P1-K1-D7.pep
AKNFNFLLPLPKNFHQKRKRSEAHWIPEMGAKYIILRKIDHENKCWDGTKSFPNYIYLQYEDTFANSH

SEQ ID NO: 84859 - protein, 103 aa, Gossypium hirsutum
  unsure (1)..(103): unsure at all Xaa locations
  Clone ID: LIB3165-022-P1-K1-E1.pep
PHHIQPLVCHNGTGMVSATISWEICLMFQHQYLPXSKPHTLSIPCNSHNHTSIGDKSXSKIDHWTFKYPIEHDIASNXDYIEKIWHHTFYKPIKDHQQSITCS

SEQ ID NO: 84860 - protein, 76 aa, Gossypium hirsutum
  unsure (1)..(76): unsure at all Xaa locations
  Clone ID: LIB3165-022-P1-K1-E4.pep
MGSSSLLKTSPAGDMSAWVQGHTLHQPYTCAVRSHPAAPSGLTVRASXYTHQHSKTAKAIAYPGRGTYHMNDCHPL

SEQ ID NO: 84861 - protein, 131 aa, Gossypium hirsutum
  Clone ID: LIB3165-022-P1-K1-E7.pep
MVKLLALPFLITYFVTCVPLGNTATITSCTQTPYPGVCNHFMGNGVNVATSNLALDQTRFSFRDLAIQVTLNQAVQAHRLVSTMDLTSFNERAKLAWNDCLELYQNTISHLNRSKSTNSPLDAQTWLSAAI

SEQ ID NO: 84862 - protein, 110 aa, Gossypium hirsutum
  Clone ID: LIB3165-022-P1-K1-E8.pep
GISRSIRCSFIRISLFDQPRKSHNRFFFLEYFERITYSRCFFVIIRLSSNLHWLLQHRISLVPRYESTLIVSGIGVQIWFLTSSTVPAIHRPTHYPTLPTNSTAAAGRVG

SEQ ID NO: 84863 - protein, 58 aa, Gossypium hirsutum
  Clone ID: LIB3165-022-P1-K1-F11.pep
KLHPSIYLLWIQPRGTGPIATLSVHSLGYRRQKDPPLSIKSYLVSKPTKTAHHFSLEN

SEQ ID NO: 84864 - protein, 139 aa, Gossypium hirsutum
  Clone ID: LIB3165-022-P1-K1-F12.pep
RVQAGKDIFVNKLTLQQARDARDALAKFIYASLFDWLVEQINKSLGVHKKYIGRSISILDIYGFESFKKNSFEQFCINYANERLQQHFNRYLFKLGQEEYGLDGIDWTKVDFEDNQECLDLFEKKPLGIFSLLDEESKF

SEQ ID NO: 84865 - protein, 90 aa, Gossypium hirsutum
  Clone ID: LIB3165-022-P1-K1-F3.pep
MARGENHGVNTHYTPPERLTLDCLIIPDDRIMKDDCSPTKLNRIKECTLIYSNRNDPVDDLDKLGDTFPGQYIDSHGALKAIVHNDYNNK

SEQ ID NO: 84866 - protein, 68 aa, Gossypium hirsutum
  Clone ID: LIB3165-022-P1-K1-G2.pep
KKKWGFEILSFLSLRPGSGAADHRHRRRAGNRKRWPEIAPRSATWTTVGRCCRRRWMGQGSEAERLGF

SEQ ID NO: 84867 - protein, 114 aa, Gossypium hirsutum
  unsure (1)..(114): unsure at all Xaa locations
  Clone ID: LIB3165-022-P1-K1-G7.pep
MAFLTFALSSPTRAGXVIKFFPSTPEIPGTCPVFIKKTTKPVPSGSPLDRPYPILDFGSIFREPTFYLTREFPGDYWWDTSXLLTYPQTFAXNPELGVIHFKLAMLGALGCVFP

SEQ ID NO: 84868 - protein, 51 aa, Gossypium hirsutum
  Clone ID: LIB3165-022-P1-K1-H10.pep
ITQSSENAHSCSLLICSRGHAVYTRLKGSKVTPSVNMTLPSRGTTLWHNAD

SEQ ID NO: 84869 - protein, 140 aa, Gossypium hirsutum
  unsure (1)..(140): unsure at all Xaa locations
  Clone ID: LIB3165-023-P1-K1-A1.pep
NWGRGNTSGDGXNIGPVGPMGNRAGGMGRRGIMGNGGNGFGQGMGATPSPMHPQSMMGQGFDPAFGGPMGRMGGYGGFPGAPTPPFSGILPSFPPVGGVGLPGVAPHVNPAFFGRGMPMNGMGMMPSSGVDGPNMGMWSD

SEQ ID NO: 84870 - protein, 52 aa, Gossypium hirsutum
  Clone ID: LIB3165-023-P1-K1-A10.pep
HTRTKQTCNFFMGYTYNLGGFTINTTFIHPTKYQNSVISKSLHPHNVALKLL

SEQ ID NO: 84871 - protein, 105 aa, Gossypium hirsutum
  unsure (1)..(105): unsure at all Xaa locations
  Clone ID: LIB3165-023-P1-K1-A2.pep
MSMTASLLPSSSSSLTRXLSRAARRGAIVAKATSADQGDKASLEIMKQEGSNGRRELIFAAAAAAACSVANVAMGEEEPKRGTAEAKKKYAPVCVTMPTARICRN

SEQ ID NO: 84872 - protein, 51 aa, Gossypium hirsutum
  Clone ID: LIB3165-023-P1-K1-A8.pep
LLIKLSGRSGSSLLSSTTTGFSLFQLIPFLSFLLNTHFYRFQFIIINNFRF

SEQ ID NO: 84873 - protein, 58 aa, Gossypium hirsutum
  Clone ID: LIB3165-023-P1-K1-B2.pep
IRANHTPTKWLAHHVSIHTDTHNTDTTTKILLLTRLLHYLQTLGSTHILSDLIHRYVL

SEQ ID NO: 84874 - protein, 137 aa, Gossypium hirsutum
  Clone ID: LIB3165-023-P1-K1-C10.pep
EQPQSSTSIFGHDEEAEWAEYKIKETNMFTVDKYQQIGFFPNERAFSLRYQTAGMLETVLRQGVLGEDDTGEESPKNVKLPSCQPSIVCENCLYSQAKDRRARAFHIMDPKGFVDMLLIFLEDRGDGPLVHPSLGNI

SEQ ID NO: 84875 - protein, 54 aa, Gossypium hirsutum
  Clone ID: LIB3165-023-P1-K1-C9.pep
LHNCYNTWRLNAFGWIDKDQMLTPYTTEVLPLPALNSHKQDSIHSRRPQQSPFG

SEQ ID NO: 84876 - protein, 137 aa, Gossypium hirsutum
  Clone ID: LIB3165-023-P1-K1-D12.pep
GGNQLEARLTTGYKPSGLFCRRFYPISKDKEDDYCNAPGVETRVPEFGSTNSLLYLNPNLKSLTAYMAPLVKFLEGIGYVSGETMFGAPYDFRYGLAAEGHPSHVGSKFLQDLKDLIEKASASNGGKPVILLFHSLG

SEQ ID NO: 84877 - protein, 37 aa, Gossypium hirsutum
  Clone ID: LIB3165-023-P1-K1-D8.pep
NPKKTQQQKRITQIKRVMLTTANYSIHNELSQFKPLQ

SEQ ID NO: 84878 - protein, 144 aa, Gossypium hirsutum
  unsure (1)..(144): unsure at all Xaa locations
  Clone ID: LIB3165-023-P1-K1-D9.pep
GMGQILAAMAVALLIRLFSGPGPASLPEDETCEENDSVNGDDAPPSAGKVLPVTITWRNITCSLSDKHSKSVRFLLKDVSGEAKPGRLLAVMGPSGSGKTTLLNVLASQILASPRLALSXGLLEFNGKPSSTKAYKFAYVRQED

SEQ ID NO: 84879 - protein, 102 aa, Gossypium hirsutum
  Clone ID: LIB3165-023-P1-K1-E11.pep
GLIQVFWLLQENFSSVALMASSSLPLQEVHFLSPRTTSKHRFYLSRCSSLSRVSLAGNGHLRNGVVLRSRVRALKEEGVSYEEREREFIKEVNGGFGSKGNG

SEQ ID NO: 84880 - protein, 47 aa, Gossypium hirsutum
  Clone ID: LIB3165-023-P1-K1-E9.pep
TNAINISLQLLLFPFTFLPMPSYLQPKLLHPQHSPILQLLSVVPNLS

SEQ ID NO: 84881 - protein, 77 aa, Gossypium hirsutum
  Clone ID: LIB3165-023-P1-K1-G3.pep
GSHGIFSTLVTPIFASILQNKHCKPHNNRNPSVHWPKPLRKGPFFKVTPMSCGKKGCGVKAELNPPMVISLSTRLFL

SEQ ID NO: 84882 - protein, 31 aa, Gossypium hirsutum
  Clone ID: LIB3165-023-P1-K1-G4.pep
KLLGVGAQLIRRVMVGSGRDHWIFGIKKNGW

SEQ ID NO: 84883 - protein, 63 aa, Gossypium hirsutum
  unsure (1)..(63): unsure at all Xaa locations
  Clone ID: LIB3165-023-P1-K1-G9.pep
LERCXRIFFSRAKSKYHYXKRYFTYSSNRMHIYLYTVTYNCFSSIFFKINFFHFNCLFLYYFI

SEQ ID NO: 84884 - protein, 83 aa, Gossypium hirsutum
  Clone ID: LIB3165-023-P1-K1-H2.pep
GGRFCCGGTCGSGSGCKSAGGGGCGCGGCKMSPEMTFAEQPTLETLVLGVAPRKVNFVGPEMELGAENGCKCGDNCTCTPCIC

SEQ ID NO: 84885 - protein, 125 aa, Gossypium hirsutum
  Clone ID: LIB3165-024-P1-K1-A10.pep
HASAHASGSPVWQVRRGGSAVKSSDVMARTAEKGSSRKEVTETRRGKIGNSGNNNSNKAKVLNLNVPMCIGYKHHLNCRIDNNSATVAGISTDPNGGRNGRTNGPNVGSGSNFFNFRNLFTKKVY

SEQ ID NO: 84886 - protein, 50 aa, Gossypium hirsutum
  Clone ID: LIB3165-024-P1-K1-A3.pep
FGPCIINWTVLLLFFEFFLIWARAKVEIRFGFIRPRAKFMPYTLNILIFS

SEQ ID NO: 84887 - protein, 94 aa, Gossypium hirsutum
  unsure (1)..(94): unsure at all Xaa locations
  Clone ID: LIB3165-024-P1-K1-A7.pep
KKNTLNTVSEKTCGTASEMGMLLVDGWLFSPGPLVTSRIINRYKMMDNIKLSMLYGVGCRASMDAIDMVHXVLKTCRNQFDIVVSTGSMGRHWS

SEQ ID NO: 84888 - protein, 73 aa, Gossypium hirsutum
  Clone ID: LIB3165-024-P1-K1-B10.pep
IHKDEPTKPINAIKPIQENLPASEQTGAKETKHVKGTLPERFFDNNETDLRTYHIKPLKIHVKYAVKELDTLI

SEQ ID NO: 84889 - protein, 136 aa, Gossypium hirsutum
  Clone ID: LIB3165-024-P1-K1-B11.pep
MKAISPPSTAAIIIHSHHHYLNHRRWFLSPPPPSNRQFHPAASISRPHSLKLTFITKAADSTSQPNSAKTIVADDGFSLSKLSFGVVGLGVGISLLSYGFGAYFNILPGSEWSAIMLTYGFPLAIIGMALKYAELK

SEQ ID NO: 84890 - protein, 67 aa, Gossypium hirsutum
  Clone ID: LIB3165-024-P1-K1-B5.pep
GANDRLLKYLRQDAHHVAPTVQCYLVSLYIIMSNQSSRVLTISPIIKKKPINQIPEKTVNHQDLFFS

SEQ ID NO: 84891 - protein, 50 aa, Gossypium hirsutum
  unsure (1)..(50): unsure at all Xaa locations
  Clone ID: LIB3165-024-P1-K1-C12.pep
WGXPSCXPXAPSXPXPXRCXXXXAASXWSRSVXRSXWVGSSXXGXXXPPX

SEQ ID NO: 84892 - protein, 62 aa, Gossypium hirsutum
  unsure (1)..(62): unsure at all Xaa locations
  Clone ID: LIB3165-024-P1-K1-C4.pep
QXEQKHNIKLFTSTNSKERTLIFTILRKTIPKQKLLLNSTIYVVLIFPSSTHFLQILHIPFS

SEQ ID NO: 84893 - protein, 66 aa, Gossypium hirsutum
  Clone ID: LIB3165-024-P1-K1-C5.pep
DLFMMPSDKMIILSEPLPFSSFSLEFLVAATMSLIIKAIVMVCITPVFYIHYLHGVDGDDIIPSLT

SEQ ID NO: 84894 - protein, 48 aa, Gossypium hirsutum
  unsure (1)..(48): unsure at all Xaa locations
  Clone ID: LIB3165-024-P1-K1-D5.pep
KKTTDAGEQXTFLSPLHTPNSMALVTTAVSFPSTNCTYKTTQTSIIST

SEQ ID NO: 84895 - protein, 63 aa, Gossypium hirsutum
  unsure (1)..(63): unsure at all Xaa locations
  Clone ID: LIB3165-024-P1-K1-D7.pep
KPGATHAXRPRXRPRXRKQLXHXGXXNQGGGXPSRRRXGREXXPXHPXKPGNRPXXXEENHQA

SEQ ID NO: 84896 - protein, 55 aa, Gossypium hirsutum
  unsure (1)..(55): unsure at all Xaa locations
  Clone ID: LIB3165-024-P1-K1-D9.pep
GFVFPLXSLLLSACCRSXXXXXPAXGFALRPFWGFGXXXLWGXXXVSGLPWPAXV

SEQ ID NO: 84897 - protein, 80 aa, Gossypium hirsutum
  Clone ID: LIB3165-024-P1-K1-E10.pep
CLRKPQTSAKRKGKKEKSFFLNIFNPKRLNFSLRVCVFVFCFSLSIFQNAKKNGVFVPPRDFGTRFLVYTIGKGPTHSVF

SEQ ID NO: 84898 - protein, 76 aa, Gossypium hirsutum
  Clone ID: LIB3165-024-P1-K1-E12.pep
LRIAIFRSAQDAFNHWVDIIKLAKGSRNHYENCAVSQLIFGSISLSPLYSSQSQDMRVSIGAVLHQSFIWFSRAQA

SEQ ID NO: 84899 - protein, 58 aa, Gossypium hirsutum
  Clone ID: LIB3165-024-P1-K1-E5.pep
PAPNMASLAGYNDGAFLGISEMQKNPMNFSGGARSSSATLSNLFKMKTETVFFNPNAD

SEQ ID NO: 84900 - protein, 111 aa, Gossypium hirsutum
  Clone ID: LIB3165-024-P1-K1-G12.pep
MAAMNLVSAGVHSFNLKAGKRFSISKPKGCKLGPRAALVEAGPRGDGSPAALQVSRGDLAADLQAEARAMVRAVNASVYSPELLANKYGSRPCQAAKRTLEILVALGSFAL

SEQ ID NO: 84901 - protein, 121 aa, Gossypium hirsutum
  Clone ID: LIB3165-024-P1-K1-G2.pep
MEHGVNLQDTRWEGYADWRNRPALKGRHGGIFAASFVLVVEVLENLAYLANASNLVMYLSKYMHLSPSKSANNVTNFMGTAFLLALLGGFLSDAFFTTYHIYLISAFTEFLGLIILTIQAR

SEQ ID NO: 84902 - protein, 133 aa, Gossypium hirsutum
  Clone ID: LIB3165-024-P1-K1-G8.pep
MATPLFLRNSLFPPLHHSFLSFPKSSFPSFPSSIKSRPLTSTMMRGSEITEEVSETKEAVNVDTKKKTIFVAGATGSTGKRVVEQLLSKGFSVKAGVRDLGKAKTLLSNDNPSLQIVQADVTEGSAKLAEAIG

SEQ ID NO: 84903 - protein, 123 aa, Gossypium hirsutum
  Clone ID: LIB3165-024-P1-K1-H1.pep
PGRIVRAIGELAKSIGAEGLVAGQVVDINSEGLTDVGLDHLEFIHVHKTAALLEAAVVLGAILGGGCDEDVERLRKFARYIELLFQVADDILDVTKSSNELGKTAGKDLLADKVTYPKLIGIE

SEQ ID NO: 84904 - protein, 118 aa, Gossypium hirsutum
  Clone ID: LIB3165-024-P1-K1-H4.pep
PTRPPTRPPTRSPTRPVGVIEDEENAYTGTRVRPFVATPRVEDEKKQSPTTLNKILCLEELFSLEVWRASLAELLGTAVLVFAMDTIVISSYETQTKTPHLIMSFLIAVTITVLLLAT

SEQ ID NO: 84905 - protein, 89 aa, Gossypium hirsutum
  Clone ID: LIB3165-024-P1-K1-H5.pep
KLNHRLSASISALSPAEKPMVITASSSGTTSNAGAFTTIKETVTFEKEIKKSKFIAIAGPISNEQSAHSFLNQFKDPRATHNCWAYKVI

SEQ ID NO: 84906 - protein, 42 aa, Gossypium hirsutum
  Clone ID: LIB3165-024-P1-K1-H8.pep
GRVGGDPSKFFQRDDGFQRDVYQIALFLAVLYFVVQFLRTTL

SEQ ID NO: 84907 - protein, 83 aa, Gossypium hirsutum
  Clone ID: LIB3165-025-P1-K1-A11.pep
MARSNYKNLESQLNFISILHQPGRSESKREPLGFESINMVFRKSWLEKGRRWKVIITHPKVGMREKKPFSGRELLVAWARPVF

SEQ ID NO: 84908 - protein, 42 aa, Gossypium hirsutum
  Clone ID: LIB3165-025-P1-K1-B7.pep
IYTCFTGIFLFLWPNIQKARLVFYYKLIPPYMFSNCSVSKLL

SEQ ID NO: 84909 - protein, 137 aa, Gossypium hirsutum
  Clone ID: LIB3165-025-P1-K1-C1.pep
AEAAMGAYKAPIPYFLSSPNGNAKTLRTPFLNLGTTSRRFLLFFLSSPILPSSNSLALDNAKLLQSNIMDVLASSFDPVSQAEKDASSLISRRVSEAVELLERGKELQAQGDFPKALHFFTLVVENYKDFAFSDYAR

SEQ ID NO: 84910 - protein, 42 aa, Gossypium hirsutum
  Clone ID: LIB3165-025-P1-K1-D2.pep
PTRPERISKAHCGCCYCCCSGAFNISISTIILFFIIIIYNLI

SEQ ID NO: 84911 - protein, 88 aa, Gossypium hirsutum
  unsure (1)..(88): unsure at all Xaa locations
  Clone ID: LIB3165-025-P1-K1-D3.pep
GHLFISTATDSLSCSETXPRVVKLYKRPIPHSVHHXLLPELFVQQHLLRYKMTYRYYACFGLGFLTVYDQLLEGYPGDEGLDSTFQAY

SEQ ID NO: 84912 - protein, 75 aa, Gossypium hirsutum
  Clone ID: LIB3165-025-P1-K1-D8.pep
THATAPSFQSSSLFSSWKSSPGWVISNPRFQNPTLKPTAPFLRPSKPNLPFLNHPHCLPSDPPFSNQYEETVILS

SEQ ID NO: 84913 - protein, 76 aa, Gossypium hirsutum
  Clone ID: LIB3165-025-P1-K1-E1.pep
QQLCPCLFHRLVYCIRYCIRKENRRINCYSYCHSYSPYDHSVDHSVTQFIHVSSPDSTWIDNCSPDLRSVQMQISV

SEQ ID NO: 84914 - protein, 53 aa, Gossypium hirsutum
  unsure (1)..(53): unsure at all Xaa locations
  Clone ID: LIB3165-025-P1-K1-E5.pep
GLLDPQNIFLVGFICVKVVAQIKNKTPRPYGRQNKRNFGVGSEHLFPRTRGSX

SEQ ID NO: 84915 - protein, 63 aa, Gossypium hirsutum
  Clone ID: LIB3165-025-P1-K1-F11.pep
TIETKQIKYDGGLTKFGHKYNTQIGQIHRQPEESGLVVFIMKTRPCSPTYWGERGKIFCHTGE

SEQ ID NO: 84916 - protein, 74 aa, Gossypium hirsutum
  unsure (1)..(74): unsure at all Xaa locations
  Clone ID: LIB3165-025-P1-K1-F6.pep
PRVRPRVRDSFVYLFYFLIGSSNSGGLLHDLIGNHCHXEPILPRTGQHVGPLHRPQICLCFPSHQEGFLRLYFF

SEQ ID NO: 84917 - protein, 62 aa, Gossypium hirsutum
  Clone ID: LIB3165-025-P1-K1-F7.pep
YIINLTTPGPVKPNPAPIITPTLLFYRDIFLHYWTPQPFMSDLILLEYPRYYTPLYTIPPNT

SEQ ID NO: 84918 - protein, 136 aa, Gossypium hirsutum
  Clone ID: LIB3165-025-P1-K1-G1.pep
PRRPRRPRVRSIYHLPLGVPSLSSKPQVSKWYLLFMWPVTVWSLLLTWVLGHAFISERNAFKKLKLQAWVVPKYNMQYSSKWQRETISKLIGQAIRDADKKGAKWLSLGLLNQHEVFSRNVELYMKRNPQLKIKVV

SEQ ID NO: 84919 - protein, 42 aa, Gossypium hirsutum
  Clone ID: LIB3165-025-P1-K1-G3.pep
ARSLLMISPTTYMTLPYGKGGVDSLFQAPIERRYLTMLVMSS

SEQ ID NO: 84920 - protein, 93 aa, Gossypium hirsutum
  Clone ID: LIB3165-025-P1-K1-G5.pep
VQSFLPALFIYSTSTTTAGANTKPNNNLLYPTNQYNHHLESITTMQHHPCSQTDPDANPNFHYLLLNPHHSVPPTPAAVALIHLFFNQDHGMV

SEQ ID NO: 84921 - protein, 128 aa, Gossypium hirsutum
  unsure (1)..(128): unsure at all Xaa locations
  Clone ID: LIB3165-025-P1-K1-G6.pep
MNHFYLSIPIYSGLEPLYGEGSQLEEAKLXFGKLKSRFFEVFGHPSEVFARSPGRVNLIGEHIDYEGYSVLPMAFRQDTIVAFRKRDKGEAEKLLRIANVNDKYTTCTYPVDPNQVIDLKNHIWSHYF

SEQ ID NO: 84922 - protein, 78 aa, Gossypium hirsutum
  unsure (1)..(78): unsure at all Xaa locations
  Clone ID: LIB3165-025-P1-K1-H11.pep
RHIDLSKHFFFYIAXFDSGGYHWRFSKFLTMVSKKLDKQCAELLEGLLHHGRLTLNKCCNHQIHVQLEELNLYHKPLL

SEQ ID NO: 84923 - protein, 144 aa, Gossypium hirsutum
  unsure (1)..(144): unsure at all Xaa locations
  Clone ID: LIB3165-026-P1-K1-A1.pep
QWPMSTLLLCFMVDIVLQKSTRIMIHFDAAIDGKTFRSTSGLVGWDLRGNLMVLKTVIHRNVPSPFAAEAYACLEGTKLGISLRTHSIRLMGDSKTIIRQCQATSTDKSSDRTPLSEXIQXQEITIFEELIFQVYSSDGVGRXR

SEQ ID NO: 84924 - protein, 90 aa, Gossypium hirsutum
  Clone ID: LIB3165-026-P1-K1-B9.pep
MDKVRDLASKKAAVIFTKSSCYMCYSIKTLFYELGASPAIHELDHDPSGRDMEWALRGLGCDPSVPAVFIGGRFVGSAKDVISLHVDGSL

SEQ ID NO: 84925 - protein, 105 aa, Gossypium hirsutum
  Clone ID: LIB3165-026-P1-K1-E6.pep
MVSLSRVLAVSYTIKPSIPCNTCSLSSRFPQKKPKLNSKWRSMATEPDSSSFAPSIDSDSSADKVTAGFCIIEGPETVQDFANMELQEIRDNIRSRRNKVFLQME

SEQ ID NO: 84926 - protein, 101 aa, Gossypium hirsutum
  Clone ID: LIB3165-026-P1-K1-F7.pep
MAPVRTTGAIVASTAAISISMAIFSYFLFFKKTNSTLHSNKKKKPRNGVVDAIGNTPLIRINSLSEATGCEILGKCEFLNPGGSVKDRVALKVIEEALESS

SEQ ID NO: 84927 - protein, 71 aa, Gossypium hirsutum
  unsure (1)..(71): unsure at all Xaa locations
  Clone ID: LIB3165-026-P1-K1-F9.pep
MTKVHGTGVYDFKRCHVAEYLVELADKPKMKPPHSSSLRSSITLSEIXRDQLTRIAAANWLRSGGSKPEKP

SEQ ID NO: 84928 - protein, 82 aa, Gossypium hirsutum
  Clone ID: LIB3165-026-P1-K1-G3.pep
KKKKFEIYKKGKRKLKLYSNKKMVAFSMVPFLGTVRSTPSLTSLAPYKRQISIRISPVSFPRNGFFPFRRFLQACLQSSSAT

SEQ ID NO: 84929 - protein, 109 aa, Gossypium hirsutum
  Clone ID: LIB3165-026-P1-K1-G8.pep
MAVAELSTSCTKNHSSQLSLSSSSSSRFSHHFRRSFRPLPTTRNPTISCSVASDQVQTPIPVQAQDLKGKSECYGVFCLTYDLQAEEETKSWKKLINIAVSGAAGMISN

SEQ ID NO: 84930 - protein, 88 aa, Gossypium hirsutum
  unsure (1)..(88): unsure at all Xaa locations
  Clone ID: LIB3165-026-P1-K1-H9.pep
LNNQIPLILTNSKSTFHPPINTPKKTIPNPSPSLHTTTLSHLKINSNITPTPNNFITNTPIPTPQIQSFSQXYXSIFPTSLXYIXPLT

SEQ ID NO: 84931 - protein, 45 aa, Gossypium hirsutum
  Clone ID: LIB3165-027-P1-K1-A12.pep
NPAFLYSIATHTRFNDVILTYPLYSFFKTITLIFKQRWQYHLAAS

SEQ ID NO: 84932 - protein, 84 aa, Gossypium hirsutum
  unsure (1)..(84): unsure at all Xaa locations
  Clone ID: LIB3165-027-P1-K1-B1.pep
EKKNSTIFLLVSKLSQIEVGASAVASAAKKKTAVSKRPKSATSHPSLIEMISDALDSLNERTGSSQYAIAXSIAEKHKPLPATF

SEQ ID NO: 84933 - protein, 93 aa, Gossypium hirsutum
  Clone ID: LIB3165-027-P1-K1-B6.pep
FIDNLVATGGTLSAAIRLLERAGAHVVECACVVGLREVKGQHGLNGKPLYILVEPRQQINCSAPSVNGVETCRHDDLILGASFGSLNPTSKSD

SEQ ID NO: 84934 - protein, 86 aa, Gossypium hirsutum
  Clone ID: LIB3165-027-P1-K1-B8.pep
FNFPILIFKLLIPLIRDIYTPKLGFSFLFFLFQVKKEIEIFREKESSYHVNHFDLQNRILDFLYQWTQTPPQISKAFPFSIYENGF

SEQ ID NO: 84935 - protein, 113 aa, Gossypium hirsutum
  Clone ID: LIB3165-027-P1-K1-C2.pep
RSSTVTGGGGTTFVINGTEGDSLSYSEFIAQFHSLAHCLRKNYFLSRNDVALILSPPSLHVPLLYFALMSLGIVISPANPLSSDSEIAHQVQLSKPVIAFATLTTSFKLSSLK

SEQ ID NO: 84936 - protein, 114 aa, Gossypium hirsutum
  unsure (1)..(114): unsure at all Xaa locations
  Clone ID: LIB3165-027-P1-K1-E1.pep
VLGLNLLLRRRXHPVRVKTNLCLHDXVLNPALHVXPYWXXVNPIXXTXXLNSXLHXNDKGKEADXXERDPKKATXXLFERXXAATXSQXXPCLVTLFXXTSXSFPNSXXXSKGS

SEQ ID NO: 84937 - protein, 119 aa, Gossypium hirsutum
  Clone ID: LIB3165-027-P1-K1-F5.pep
SFKPRTAVFFKRVHIRAGLVEPDGGKLVDLHVSEPERELKKREAASLPKVKLTPIDVQWVHVLSEGWASPLTGFMRESEFLQTLHFNSLRLDGGSFVNMSVPIILAIDDLQKRVSVSST

SEQ ID NO: 84938 - protein, 118 aa, Gossypium hirsutum
  Clone ID: LIB3165-027-P1-K1-G4.pep
FLNFTSLLLPPTIRIRVTLTGVMPLTTFLNQFLCMTSRSVSIRIRFTTLKLLLLNFTSILFPPTISFRVILARVMSTSMLCLSIINIQTSSTKLRPIRCACIHSSLIFLASCHWHSHQ

SEQ ID NO: 84939 - protein, 99 aa, Gossypium hirsutum
  Clone ID: LIB3165-028-P1-K1-A12.pep
DVPPSLTFIRLSDFENLEFMFSGGFQDLASLQELMIDNCPKLTSLPEKDMLLCLDVLHIFNCPLLKEECSSDKGREWSKISHIPCVRIDGKVVIPRQSD

SEQ ID NO: 84940 - protein, 60 aa, Gossypium hirsutum
  Clone ID: LIB3165-028-P1-K1-A2.pep
KKDIKLKVINIKLYYIYFFLFFFFFFFIFFIFFFLLTRAYFFRVELPLYTVKTLSSNCFT

SEQ ID NO: 84941 - protein, 101 aa, Gossypium hirsutum
  Clone ID: LIB3165-028-P1-K1-A5.pep
MGKTKKELLSKAPWRGDDHDNSNKFADAKLKVTNQPGSTPKMHVPHRKSAASRLDDDDSLEIDPELRYSFQRNFQFLQRVFSIDTVVKPLPPAMAYNVSRN

SEQ ID NO: 84942 - protein, 124 aa, Gossypium hirsutum
  Clone ID: LIB3165-028-P1-K1-B12.pep
PRVRPRVRFFVIGMGPIAGIYTSKIFPLKLLAQGISLGVAVNRVTSGIISMTFLSLYQAITIGGAFFLFAGIAAVGWLFFNICLPETRGKTLEETERLFGNLVGWREVDKKMKEDNTKGATHGQ

SEQ ID NO: 84943 - protein, 99 aa, Gossypium hirsutum
  Clone ID: LIB3165-028-P1-K1-C1.pep
MNQGCLILVGILVTLSLPYSHAFGRNENKIQTAVFLSPKFVLGPGSVENRFYYNVDFPKGHIAVKSFDAEVIDEAGNPIPLHETYLHHWVGVRYYVRKG

SEQ ID NO: 84944 - protein, 62 aa, Gossypium hirsutum
  Clone ID: LIB3166-001-Q1-K1-A12.pep
CENFLLNYVIMLKLNVTRFWIWSLATCKVDHRMRELFVTSHRIKTLSLRHELSNHCLNGQIR

SEQ ID NO: 84945 - protein, 139 aa, Gossypium hirsutum
  Clone ID: LIB3166-001-Q1-K1-A9.pep
LGKQAIFFNQGPYHAKLRKLVLRAFMPDSIKNIVPNIESIAKHSLHSLQGRLITTFQEMKTYTFNVALLSIFGKDDQVLYREDLKRCYYILEKGYNSMPINLPGTLFNKSMKARKEIAQILAKIISTRRQTKQVDCNDL

SEQ ID NO: 84946 - protein, 35 aa, Gossypium hirsutum
  Clone ID: LIB3166-001-Q1-K1-B9.pep
MAGGRLGNLYCDPLMTSGGHKISARQRWTPTAVQL

SEQ ID NO: 84947 - protein, 137 aa, Gossypium hirsutum
  Clone ID: LIB3166-001-Q1-K1-C9.pep
GLLSGASMPARPSQLDPQPPQQQPQQPQQQQQSQQHSLLQQQHQQFQRSPMMVGSNPLSHLNAIGQNSNMQFNNQIVNKSSVLQLQMMQRQQQRQLHQQQQQPQQQQQMQRKMMGLSAAVGMGNMVRIGGLGNATGI

SEQ ID NO: 84948 - protein, 137 aa, Gossypium hirsutum
  Clone ID: LIB3166-001-Q1-K1-D11.pep
RPSAKRSKFRKFLDTFCTPSDYFSAMRLILPSLDRERGTYGLKESVLAICLIDALGMSRDSADALRLINWRKGGANTGANAGNFALVAAEVLQRRQGTVSGGLTIKELNELLNRLASAESRAEKTAILATLINKTNA

SEQ ID NO: 84949 - protein, 87 aa, Gossypium hirsutum
  unsure (1)..(87): unsure at all Xaa locations
  Clone ID: LIB3166-001-Q1-K1-E10.pep
HASAHASADAWAESGFAYGSLNPDADKFDNYILRWEKLLIPPTTLLIIXLMGDVARIFIAINSGYQIWCPHFGKLFLAFWVIILHYL

SEQ ID NO: 84950 - protein, 71 aa, Gossypium hirsutum
  Clone ID: LIB3166-001-Q1-K1-E2.pep
IIVRTRACSTVTSIASICTYISTYKSPSKATRMASISERRISSGITAVTTITSTTPPIKPTIITSTITSAS

SEQ ID NO: 84951 - protein, 47 aa, Gossypium hirsutum
  Clone ID: LIB3166-001-Q1-K1-F2.pep
SRLFKPTKRWFFKSNLKPISDIILSPLFTKNSFISNFMDYPNWPVDL

SEQ ID NO: 84952 - protein, 97 aa, Gossypium hirsutum
  Clone ID: LIB3166-001-Q1-K1-F9.pep
MDNSTAEKGSPGQEQQAAGVGILLQIMMLVLSFVVGHVLRRHKFYYLPEASASLLIGLIVGGLANISDTERSIRAWFNFHEEFFFLFLLPPIIFQSG

SEQ ID NO: 84953 - protein, 51 aa, Gossypium hirsutum
  Clone ID: LIB3166-001-Q1-K1-H1.pep
GDQSLGLRCISVSCCTREERLTTGYQSVSPDRSLLFNGHRLPCHSTWTNTK

SEQ ID NO: 84954 - protein, 63 aa, Gossypium hirsutum
  Clone ID: LIB3166-001-Q1-K1-H11.pep
MAELSLGILIDIVDEEWMRDTLPDDDLPLPPVMVARTDDTEDSNHETQQVDDNTWHDLELSTQ

SEQ ID NO: 84955 - protein, 47 aa, Gossypium hirsutum
  Clone ID: LIB3166-001-Q1-K3-A4.pep
NNVGISGLFNSNFFNVYIHVYRFLYLFLVFKNVCQSYCVVVSFLVIN

SEQ ID NO: 84956 - protein, 56 aa, Gossypium hirsutum
  Clone ID: LIB3166-001-Q1-K3-E3.pep
IKSITLKAHYRSSLGTMAANRLVGDERKVQKNYWTEHYCDPTVEAMKTHSKAADID

SEQ ID NO: 84957 - protein, 66 aa, Gossypium hirsutum
  Clone ID: LIB3166-001-Q1-K3-F1.pep
VSFRWRHRKSPKSYQPSHEQALHSSKLGAVRKEYVWIISRFLSVNGRARDSQTACPFCKSFDLVSF

SEQ ID NO: 84958 - protein, 75 aa, Gossypium hirsutum
  unsure (1)..(75): unsure at all Xaa locations
  Clone ID: LIB3166-001-Q1-K3-G3.pep
QCGRIFIRKNKGGQLVRVMGAHXHVHKRIESHTHTTDPVSSGIERDFKTLTPKAIDKATLPTNIEQVCLILISCR

SEQ ID NO: 84959 - protein, 37 aa, Gossypium hirsutum
  Clone ID: LIB3166-001-Q1-K3-G7.pep
IAFMNPALGPKAMSVLCIVFGDIIKIPLKEGLYHFRR

SEQ ID NO: 84960 - protein, 89 aa, Gossypium hirsutum
  Clone ID: LIB3166-002-Q1-K1-A1.pep
IPSTTPILWGLLQTLSTYTTLEFQEDHCQPLNSHLWASRGLLLYVSIAHEHIDYTRSTRGPYTPLICPMRLDGYIYIYIYIYIYKSLFL

SEQ ID NO: 84961 - protein, 102 aa, Gossypium hirsutum
  Clone ID: LIB3166-002-Q1-K1-A6.pep
HASADAWVNLSIYDKNKSLIMDEDGCLRSIVEVLRLGLTTEARENAAATLFSLSAVHDYKKRIADQGGAIEALTRVVKRGTPKRKEDARTALFNLSTHSDNY

SEQ ID NO: 84962 - protein, 111 aa, Gossypium hirsutum
  Clone ID: LIB3166-002-Q1-K1-A8.pep
FDIFEANVPRDDPQRMMFEREVIGRDIMNVVACEGIERVERPETYKQWQARTLRAGFKQIPLDQDLVKKVTNMVQSNYHRDFIIDVDGRWMLQGWKGRVIFALSCWKPVKN

SEQ ID NO: 84963 - protein, 62 aa, Gossypium hirsutum
  Clone ID: LIB3166-002-Q1-K1-B11.pep
ILDFIFASFIKMIDNKLVDSTCFHFQVIICSVKLKIQSLPSFGRFFAFPMLISLDFLPHMLG

SEQ ID NO: 84964 - protein, 62 aa, Gossypium hirsutum
  Clone ID: LIB3166-002-Q1-K1-B12.pep
HASAHASAVLYHLEVQSKVRLSSRSNTLLVACEFSSSLLFYFKFWLPLFIYFHFSPLKGMNS

SEQ ID NO: 84965 - protein, 138 aa, Gossypium hirsutum
  Clone ID: LIB3166-002-Q1-K1-B5.pep
PTRPLLTTNQDPSLHSFQTLRVALNNYMKSVKKMACEILEMMADGLKIQPRNVLSKLLMDEESDSVFRVNHYPPCPNVQPLSGNGNGNGDVIGFGEHTDPQIISVLRSNNTSGLQISLREGSWISVPPDQTSFFINVG

SEQ ID NO: 84966 - protein, 133 aa, Gossypium hirsutum
  unsure (1)..(133): unsure at all Xaa locations
  Clone ID: LIB3166-002-Q1-K1-B8.pep
GRVGGRVGEWRSCYLDMILVPLGFLTIIFYHCWLWYKVKTQPLSTIFGTNAGGRRFWVSDMIKDNEKKNIVAVQTLRNTIMGSTLMATTSILLCAGLAAVISSTYSVKKPLNDSIFXAHGELMVSLXYVTILC

SEQ ID NO: 84967 - protein, 125 aa, Gossypium hirsutum
  Clone ID: LIB3166-002-Q1-K1-C10.pep
MCGILAVLGCIDNSQAKRSRVIELSRRLRHRGPDWSGLHCHQNCYLSHQRLAIVDPTSGDQPLYNEDKTVVVTVNGEIYNHKQLREKLKSHQFRTGSDCEVIAHLYEEYGEDFVDMLDGMFSFVL

SEQ ID NO: 84968 - protein, 93 aa, Gossypium hirsutum
  unsure (1)..(93): unsure at all Xaa locations
  Clone ID: LIB3166-002-Q1-K1-C6.pep
HDSWGPQIRGLAGTDRANDDETMAVDRESDGANNEVGGIEVCSLDNRGMGRSSVPNKKSDYSTRIMAKDAIALLDHLGWXKAHVLGISMGAMI

SEQ ID NO: 84969 - protein, 138 aa, Gossypium hirsutum
  Clone ID: LIB3166-002-Q1-K1-D10.pep
MRMEDDSFPGSGLENGNYNNNNNKSKGFKTRKAYFYWVTREQGSFEWFKGIMNEVAEMDEKRVIELHNYCTSVYEEGDARSALITMLQSLHHAKNGVDVVSGTRVKSHFAKPNWRQVYKKIALHHPDERIGVFYCGAP

SEQ ID NO: 84970 - protein, 56 aa, Gossypium hirsutum
  Clone ID: LIB3166-002-Q1-K1-D3.pep
SHSIAISTNFFSALLKQKHRTKQQNNLTSTLPPESKPLKILNSLFQFLREKNYKKY

SEQ ID NO: 84971 - protein, 132 aa, Gossypium hirsutum
  unsure (1)..(132): unsure at all Xaa locations
  Clone ID: LIB3166-002-Q1-K1-D5.pep
HASAHASAASANTGKVNVPGKPPIQIRESSDGVITLAGSTEVSVSTLKEMGACLEQGSLSRATGSTNMNNQSSRSHAIFTITLEXMRKLNPVSGDGNPNDSMSEEYLCAKLHLVDLAGSERAKKTGSDGMRF

SEQ ID NO: 84972 - protein, 88 aa, Gossypium hirsutum
  unsure (1)..(88): unsure at all Xaa locations
  Clone ID: LIB3166-002-Q1-K1-D6.pep
MHTADYQDYTPCTDPLRWSKYGSHLLTFLERHCPPMFXRKHCLVTPTDGYKPPITLPMMPDECWYTNVPYYRILDQKSHQNWLTKQCE

SEQ ID NO: 84973 - protein, 88 aa, Gossypium hirsutum
  Clone ID: LIB3166-002-Q1-K1-D8.pep
KDYPNFVIFKNHHFFIFPIHLVLLFLSIKLELTIFFYSYSSKSNHLSIFNTILSKHIFFVLVFHVKLFSTYLHCLVLHHLLILYTVYT

SEQ ID NO: 84974 - protein, 130 aa, Gossypium hirsutum
  Clone ID: LIB3166-002-Q1-K1-E1.pep
HASAGEETPLQVRLNGVATFIGFVGLSVAFAVLVVLLVRYFTGHTEDSNGRQQFGAGKTSVGNAIDGAIKIVTVAVTIVVVAAPERLPLADTLTLAYSMKKMMADKALVRKLSACETMGSATTICSDKTG

SEQ ID NO: 84975 - protein, 81 aa, Gossypium hirsutum
  unsure (1)..(81): unsure at all Xaa locations
  Clone ID: LIB3166-002-Q1-K1-E7.pep
AQHIKQIPGLQEHGQEKERPLIDLQGPDKAAQEALLYXGEPVKKAQTWISWGPEMDALQSSTNHSLQAELRERTEQYNQLW

SEQ ID NO: 84976 - protein, 137 aa, Gossypium hirsutum
  unsure (1)..(137): unsure at all Xaa locations
  Clone ID: LIB3166-002-Q1-K1-E8.pep
TNGVLLPPRQEDMTSTLTGWIIEXLNAVKLIDAQHFIVPDGHYIPKLVAVRESAIIQILRTIPXQIIHHDXIIRDALNSCNGDMIDEAFTAKHTVKVPFTSRGXSEFKASKIMFKAAADRTRFTSYSSDYHTWSDDL

SEQ ID NO: 84977 - protein, 136 aa, Gossypium hirsutum
  Clone ID: LIB3166-002-Q1-K1-F1.pep
SRKWAKRYPIKVESKTKVIYNASKIIYLYLDTAWEKESWCKGLRLASCEDNEKLNWFTKLNVDFQAYMALLNAGYSSFMKPSLGFSAEPIEKGSKSDGISKVKLFWKRLSRKSSKSGSEKKGNSGNQSIREERKSF

SEQ ID NO: 84978 - protein, 97 aa, Gossypium hirsutum
  Clone ID: LIB3166-002-Q1-K1-F11.pep
QLSSGQLLVEVDTCSSTHLHSNSVSATAWRQIRCSELSFSQFDRKMKSEHWEENGERITSQVFVNYKLLNLLFFEGYTGNKFFLSDSLYLLNNHYKG

SEQ ID NO: 84979 - protein, 115 aa, Gossypium hirsutum
  Clone ID: LIB3166-002-Q1-K1-F5.pep
MDSIKSFKGYGKVDEAEERAFKRKTRRRLIILVISIIVLLAVIIGAVAGTLIHKRNNSSPDTASPTELTPAASLKAVCEVTQYPSSCFSSISSIASSNANDPKILFKLSLKVAID

SEQ ID NO: 84980 - protein, 119 aa, Gossypium hirsutum
  Clone ID: LIB3166-002-Q1-K1-F8.pep
SGAVKALVNLLGSGTLRGRKDAATALFNLSIFHENKARIVQAGTVKYLVKFLDPDSGMVDKAVALLSNLSTIAEGRLAIVQDDGIPVLMEVVVSWSPRGKENAVSALLQLCLNSSKFCT

SEQ ID NO: 84981 - protein, 64 aa, Gossypium hirsutum
  Clone ID: LIB3166-002-Q1-K1-F9.pep
YASILLLALSRNVLPTLLNWSRTFKPMGRLHRLIKCDALLRFEYYRIDDGQTGYYRIYLCALYT

SEQ ID NO: 84982 - protein, 71 aa, Gossypium hirsutum
  Clone ID: LIB3166-002-Q1-K1-G12.pep
ELLLAAFLSIMILQEITILSVVVHVSISEILNKPAGMDLFFEGRNRKMIGGTSWQGGPIIKDHLFLHYWSR

SEQ ID NO: 84983 - protein, 109 aa, Gossypium hirsutum
  unsure (1)..(109): unsure at all Xaa locations
  Clone ID: LIB3166-002-Q1-K1-G2.pep
HAYGRFLLIRLLRILSNMHANNSDQAXDQDLVAHLLRSLANVPCTTNGTNLSGFLQGLHGAANAGWSLGNLEKPTDLTSGSTEHVKTYGSASQIYHCANLAERHGAICY

SEQ ID NO: 84984 - protein, 103 aa, Gossypium hirsutum
  Clone ID: LIB3166-002-Q1-K1-G9.pep
RPPRLVYKIDLGFVTPVIFVQGAVIHFLLVPSLCAPATDVLAPSDGAERPKFIEGLQNIHQDGSHPRLIYEDRDWNKKPCPTCFGGRRGLTKNLHAIYKLMPD

SEQ ID NO: 84985 - protein, 51 aa, Gossypium hirsutum
  Clone ID: LIB3166-002-Q1-K1-H1.pep
ALSPLPSATSSPDSDVMSPNYQLLLTSSVSQTSVSTTTTTTISTIITISSH

SEQ ID NO: 84986 - protein, 88 aa, Gossypium hirsutum
  Clone ID: LIB3166-003-P1-K1-A11.pep
SLAILLRKKLSSWEQRLNQLCLTSYFVPMPRLLFTIITCFYIYFHIYQLFYSYMIITSLMSLTCIYNSYLFIPLHLTLINFSFSKSYF

SEQ ID NO: 84987 - protein, 82 aa, Gossypium hirsutum
  Clone ID: LIB3166-003-P1-K1-A5.pep
TPFAPPESRILLDTEKGPKSSTEGPLLINWNPPIAGGQLATRLRTRGRKMECAPWPSNNLEIWESGKNGLTTRKACLESSKG

SEQ ID NO: 84988 - protein, 75 aa, Gossypium hirsutum
  Clone ID: LIB3166-003-P1-K1-A7.pep
QPRSNYLYYYFFFFQQNTVPFLFLSIMKIQRGCPHNQNCILSTTKKKIKSHLKTHKRSTMPRIPSNNLYRCHLST

SEQ ID NO: 84989 - protein, 43 aa, Gossypium hirsutum
  Clone ID: LIB3166-003-P1-K1-A8.pep
NFCLCQMLKGVSENNLVSFGSLEDPALDMSDSSLESMINDENE

SEQ ID NO: 84990 - protein, 64 aa, Gossypium hirsutum
  Clone ID: LIB3166-003-P1-K1-A9.pep
FKFMRVSDFILVFLAYVIALAIMFFKKISDLYGFFSILNRRYVSLFFYGLVCEFVGLVIFRTLL

SEQ ID NO: 84991 - protein, 129 aa, Gossypium hirsutum
  Clone ID: LIB3166-003-P1-K1-B1.pep
PRVRFWLGQDSIKEDHSNIIDHTVLELFYQGVGLNTTGSVCKPVSGSLPEFSGSPTKKAILSWAVLGLDLDMEKLKQKYSILHVETFNSEKKRSGVSVRRKTDETLHVHWKGAAEIIVAMCSDYYESNG

SEQ ID NO: 84992 - protein, 61 aa, Gossypium hirsutum
  Clone ID: LIB3166-003-P1-K1-B10.pep
FSTRVRELHLGSSLYGRVLVDVYVGLLLLFKYIAFFVCRCFLTFLSFQLMIFLPCLLILLF

SEQ ID NO: 84993 - protein, 69 aa, Gossypium hirsutum
  Clone ID: LIB3166-003-P1-K1-B5.pep
ATDSIICIKDLHRFGSEPPDSTLRTMDPFFKNWANKKSRGPLNLNPIKPAWKAIQSCGTEWWTTFWKGG

SEQ ID NO: 84994 - protein, 106 aa, Gossypium hirsutum
  Clone ID: LIB3166-003-P1-K1-B6.pep
ILFFKGTLSSLHWFFRWGFFYIFLLLLPLLPFFLGKGGGIASKIAFLFFMNPGFIGLSLIFLVKIPFKSIQGLHFPPPRTPKNLVWKAYKPLCKAKRCFGSLSEPS

SEQ ID NO: 84995 - protein, 139 aa, Gossypium hirsutum
  Clone ID: LIB3166-003-P1-K1-C2.pep
PTRPPTRPPVLDWATRLKIAAGAARGIAYLHEDCHPRIIHRDIKSSNILLDNNFEAQVSDFGLAKLALDANTHVTTRVMGTFGYMAPEYASSGKLTEKSDVFSFGVELLELITGRKPVDASQPLGDESLVEWARPLLSH

SEQ ID NO: 84996 - protein, 49 aa, Gossypium hirsutum
  Clone ID: LIB3166-003-P1-K1-C3.pep
CIHHWPSMRTEISLSEPCSTQHIEKGKHGFFQEVLPKLELKPALGLRLK

SEQ ID NO: 84997 - protein, 61 aa, Gossypium hirsutum
  Clone ID: LIB3166-003-P1-K1-C8.pep
SRFSSMYDRVHYDGLSENRSKDESMDIGKRSNKTHITIKTPNFVSQEKRLEIQPLQKRIHD

SEQ ID NO: 84998 - protein, 79 aa, Gossypium hirsutum
  unsure (1)..(79): unsure at all Xaa locations
  Clone ID: LIB3166-003-P1-K1-D10.pep
DNFVGINSFKFFMVYKGTLXMVDDKVLLRGMKRCKSLGALAMVHAENGDAVFQGQKRMIELGITIPEGHALSRPPMVMT

SEQ ID NO: 84999 - protein, 35 aa, Gossypium hirsutum
  Clone ID: LIB3166-003-P1-K1-D12.pep
IGVKVMLDLVDNKVRIHVEYMEAPLTGRHFFYSIT

SEQ ID NO: 85000 - protein, 39 aa, Gossypium hirsutum
  Clone ID: LIB3166-003-P1-K1-D2.pep
DFNYRLESLDTNKVFSINPGDSYSLFNEILRGSLVSKSN

SEQ ID NO: 85001 - protein, 45 aa, Gossypium hirsutum
  Clone ID: LIB3166-003-P1-K1-D4.pep
MDPEFDYLVKALLIGDSGGGKSWFPLRVGDDSYLDRFIKSIGGGL

SEQ ID NO: 85002 - protein, 125 aa, Gossypium hirsutum
  unsure (1)..(125): unsure at all Xaa locations
  Clone ID: LIB3166-003-P1-K1-D8.pep
AHASAHAYTDALTFARYTEGTAFERPITCNISYAAMKLHSERXEQFEKQQGCTIKRIDTLEQNPAHKDFYIPXPLEAIATHEQYAPCIFGQDIRSHVRSFDMLTGQEDGKNVLRARKSRKRALTG

SEQ ID NO: 85003 - protein, 47 aa, Gossypium hirsutum
  Clone ID: LIB3166-003-P1-K1-D9.pep
RTFKILCVGLRTLINLRSQGQLWLCQLERYLPVQRRMMSCCLLTLSR

SEQ ID NO: 85004 - protein, 68 aa, Gossypium hirsutum
  Clone ID: LIB3166-003-P1-K1-E4.pep
MRFFRSQPPFPSWLIVMWFRPIPFLNQEPAQFLPLWVQPGSHPHFQFFKGLQNLQSDLSGGLFLQLVQ

SEQ ID NO: 85005 - protein, 63 aa, Gossypium hirsutum
  unsure (1)..(63): unsure at all Xaa locations
  Clone ID: LIB3166-003-P1-K1-E9.pep
ERRPFLTQLFSPIFLKAFSITFFGXWHDQSQLATIESAADENPFRVVLEGILRQATCTTAADL

SEQ ID NO: 85006 - protein, 63 aa, Gossypium hirsutum
  unsure (1)..(63): unsure at all Xaa locations
  Clone ID: LIB3166-003-P1-K1-F10.pep
FPKRPTRPFFFLFPINFLLSFHXLYKDFYKENKKPPTLSYIIINPITLILSSHLQLFSFNILS

SEQ ID NO: 85007 - protein, 61 aa, Gossypium hirsutum
  unsure (1)..(61): unsure at all Xaa locations
  Clone ID: LIB3166-003-P1-K1-F11.pep
KLYLFFKKGFLGGQPFXSLPYPLLNLEHTHPISLFKDFPFYRYQDLKIIQVRPAFHTDSEF

SEQ ID NO: 85008 - protein, 81 aa, Gossypium hirsutum
  Clone ID: LIB3166-003-P1-K1-F12.pep
LYYILTILSIRFSHSIVSFFTNLTLFFSIKFPSVSNQPSLSSYLYLSISILHSSFAAVYKILNLHASLYIEICLSTFHSLS

SEQ ID NO: 85009 - protein, 77 aa, Gossypium hirsutum
  Clone ID: LIB3166-003-P1-K1-F3.pep
DNECPFVPNENFERVNAYEMVKRNGEPIGKEKINPPIFRAEGERPNLGPPKTPLTYPNLNKPNTNKPNLRTVWAEGS

SEQ ID NO: 85010 - protein, 81 aa, Gossypium hirsutum
  Clone ID: LIB3166-003-P1-K1-F8.pep
EKMQAIEMAETQRRTHNPWMSSEQSSRVEINGHELSIMEPTITDILETELGEPQDQHDNSTTNSNLGIGERAFSAAGAAVL

SEQ ID NO: 85011 - protein, 74 aa, Gossypium hirsutum
  Clone ID: LIB3166-003-P1-K1-F9.pep
YSPHANTLPKLHNARRYQWQDTISGHLCASLLSAGQLHIGHCSLITRVALGTISDLSAIAIKHLYHGAQNAHDA

SEQ ID NO: 85012 - protein, 58 aa, Gossypium hirsutum
  Clone ID: LIB3166-003-P1-K1-G2.pep
PNPSAHPSGDCQIPWEDLNIGERMGLGSYGEVYHADWIGTEVAVKKFLNQDFSGAALA

SEQ ID NO: 85013 - protein, 71 aa, Gossypium hirsutum
  Clone ID: LIB3166-003-P1-K1-G4.pep
KSRGGKRITKCAFVPQKRPLTCYIILTWYYQSLSLACFENQILSKLYTLNLGSTRPSHSKRIVLNARAESR

SEQ ID NO: 85014 - protein, 55 aa, Gossypium hirsutum
  unsure (1)..(55): unsure at all Xaa locations
  Clone ID: LIB3166-003-P1-K1-G6.pep
LHAPKSAGVEGIIIDLWWGLVEKETPASYYLGGFAQLFXMAKKHGLKFQAVMSFH

SEQ ID NO: 85015 - protein, 54 aa, Gossypium hirsutum
  Clone ID: LIB3166-003-P1-K1-G9.pep
QTSDFPFSMSYSMPAERVEPSPSYEGGIGTQLAAHSDEEVLTLATNMPNTQAIW

SEQ ID NO: 85016 - protein, 106 aa, Gossypium hirsutum
  unsure (1)..(106): unsure at all Xaa locations
  Clone ID: LIB3166-003-P1-K1-H1.pep
PRXLRISPSPFYTISPDVDRXRLTVKGCVXMNRFASVKCCVEMNRCPSPFEYLLNIVRIMESRFSFFFCFNFYNIVSDFFLRFQFLTYVSFHTRVGFRLTRLTRNH

SEQ ID NO: 85017 - protein, 68 aa, Gossypium hirsutum
  Clone ID: LIB3166-003-P1-K1-H12.pep
DPDKGSDECGGVGILGIAWAFGGMIFILVYCTAGISGKFRLSSPHVFDEKGHFFSNFFSKLFFMVYSN

SEQ ID NO: 85018 - protein, 59 aa, Gossypium hirsutum
  unsure (1)..(59): unsure at all Xaa locations
  Clone ID: LIB3166-003-P1-K1-H6.pep
TVRVRDPDKVSYKCGGVGILGIARAFGGMIFILVYCTNSISNNSLHFPGKLSXVSPEKF

SEQ ID NO: 85019 - protein, 123 aa, Gossypium hirsutum
  Clone ID: LIB3166-003-P1-K1-H7.pep
LSEESPSLKRSSASDPPLKLHRKCRSVTNGFYDENGEIAADIISAAEVKDDPDKSNDKLIRRRQKSEADFNPRAPEKILKEDNTSNGGFSTITAKGLAHRSKAATRTNPRADAEVFGFNTTAT

SEQ ID NO: 85020 - protein, 118 aa, Gossypium hirsutum
  Clone ID: LIB3166-003-P1-K1-H8.pep
MALHIVKLPFISRCCDSSNSTLFFLSKSYSPIHGRLLKSHLHRSFAVSKSEKLQIPKRKKRLDELCLERFQQYSRTFIQSWILQGKVYVNGKVFNKAGTPVSDKAVVEIIAEIPKYVC

SEQ ID NO: 85021 - protein, 63 aa, Gossypium hirsutum
  Clone ID: LIB3166-004-P1-K1-A11.pep
MMMKTVATLFHRHRFFGTFKPNLDFFLKANKVNFCVYLFDGINQGVWRILAARIGDFPTDTVR

SEQ ID NO: 85022 - protein, 45 aa, Gossypium hirsutum
  Clone ID: LIB3166-004-P1-K1-A2.pep
TIFSYSFRDIYVSPLQRATKWFTGGSYCRFLEKWLISMESDLMVK

SEQ ID NO: 85023 - protein, 132 aa, Gossypium hirsutum
  unsure (1)..(132): unsure at all Xaa locations
  Clone ID: LIB3166-004-P1-K1-A4.pep
MESAVVVKLLGRNIGYGALYNGIVSLXKPSQPFRLMDAANGYYLVKFXSMVDYEVVLTQGPCIVSGHYLTIXPWMVDFDSSRPFPNRILAWIRFPGLSGFLYQKKILXAIASLVGKVIKLDTNTDSGVRGQF

SEQ ID NO: 85024 - protein, 73 aa, Gossypium hirsutum
  Clone ID: LIB3166-004-P1-K1-A5.pep
CESAATNAEEKSDDHAKNVLNALTERAEDIGGIGFRWYNAQLTDLGEEGIESGEVGRVVRVFKRERIGGPKMS

SEQ ID NO: 85025 - protein, 117 aa, Gossypium hirsutum
  unsure (1)..(117): unsure at all Xaa locations
  Clone ID: LIB3166-004-P1-K1-A7.pep
HAFGPTAPFDKDCSISCGICTGWGANXNVAKPKKGQTVAVFGLGADGLAAAESARVCGASRIIAVDVNPRRFEEAXRFGITEIVKSKDYDKPIQEVIVEITCGRVDLQCDCTRSVQA

SEQ ID NO: 85026 - protein, 139 aa, Gossypium hirsutum
  Clone ID: LIB3166-004-P1-K1-A8.pep
EYLAVDKQIEKKRARCSSGKIDRKIIENNRRNHMKNLYASLNSLLPHRNSKELLSLPDQIDEAVNYITSLKTRMNESREKKESLMRRKRSYTCADTITSETTARSKSSEIKMNENGSVMERVLTTGKDSLVMFYEMIYI

SEQ ID NO: 85027 - protein, 51 aa, Gossypium hirsutum
  Clone ID: LIB3166-004-P1-K1-B10.pep
SVTLYSRRRPIETRDYIRIELKIISELSVSYSFFISREEMKLGIFLQEKSQ

SEQ ID NO: 85028 - protein, 51 aa, Gossypium hirsutum
  Clone ID: LIB3166-004-P1-K1-B8.pep
MSSTTSSEMQEPSIDTVKLSYEIFSILDSKFLFGYDDQQKLLISETDLLGI

SEQ ID NO: 85029 - protein, 142 aa, Gossypium hirsutum
  Clone ID: LIB3166-004-P1-K1-C1.pep
PRVRIIKAKISRAYVRTELCDTSLVVKDGYQWRKYGQKVTRDNPCPRAYFKCSFAPSCPVKKKVQRSVDDQSVLVATYEGEHNHLPPSQIEATSGSSRLGSVPVGSTPVKSSGPTITLDLTNSIKSSDEARNSKPKLDSPEA

SEQ ID NO: 85030 - protein, 134 aa, Gossypium hirsutum
  Clone ID: LIB3166-004-P1-K1-C11.pep
ERCNGELVAESDKLAAQDGGDGDDNARRPRREKLKDMLQKMEVQLKPLMEQLNRVKDMPIPEFGSLQAWEARASAAGRAVNGDSGSNDPSKNSQGYGGTPMPFFWETKVEVAFSGLDGQEDVSLKVLQIPEVLP

SEQ ID NO: 85031 - protein, 33 aa, Gossypium hirsutum
  Clone ID: LIB3166-004-P1-K1-C4.pep
RKILKIILDLRLSFYQYWIAYHLRIAYNIPRID

SEQ ID NO: 85032 - protein, 45 aa, Gossypium hirsutum
  Clone ID: LIB3166-004-P1-K1-D10.pep
GFPVMCLVLGSDIFPSLFFYNFTFIFTSLYSITKTIIICLFFHFF

SEQ ID NO: 85033 - protein, 71 aa, Gossypium hirsutum
  unsure (1)..(71): unsure at all Xaa locations
  Clone ID: LIB3166-004-P1-K1-D8.pep
PTLPXGLKSFIYSKKKVIEGLFKGDDVDRPLNLEEESLKTVLNKEYPVDISIPYINNFYIWKPITFMMYTF

SEQ ID NO: 85034 - protein, 64 aa, Gossypium hirsutum
  Clone ID: LIB3166-004-P1-K1-E12.pep
ARAAVYKGTPKPSETRTKYAVSIGTKVFIIGGVGDKHYYNDVWVLDVSASCWAQLDICGQQPQG

SEQ ID NO: 85035 - protein, 89 aa, Gossypium hirsutum
  Clone ID: LIB3166-004-P1-K1-E7.pep
ASTNKSLNKASGFSLITHHPHLQDAQFHLHRSWPLSRGPSLTGITAAGTSSIVFHSGISGCGDEHPTEKGLISSTPDGCPNLIEASKMT

SEQ ID NO: 85036 - protein, 73 aa, Gossypium hirsutum
  Clone ID: LIB3166-004-P1-K1-E9.pep
TTHTPTLPPILSLLETIFLARILNHKRLFFLSCLKNVLIIKSILLIYRFLISTILSIELMISRCITFNVNPFL

SEQ ID NO: 85037 - protein, 89 aa, Gossypium hirsutum
  Clone ID: LIB3166-004-P1-K1-F12.pep
MDVYETGFISETPQSEEDMDVKKGPWTEEEDFTLKAYVNIHGEGRWNLVARLSGLKRTGKSCRLRWLNYLRPEVRRGNISLQEQAFDSL

SEQ ID NO: 85038 - protein, 74 aa, Gossypium hirsutum
  unsure (1)..(74): unsure at all Xaa locations
  Clone ID: LIB3166-004-P1-K1-F3.pep
ALYFSYGIRVLSFIQKKRALGHLKTGLNDFXPSMGSSTGMPIQKSTIIGIGCQLFLRTYTRIFTHIYIYLLLKE

SEQ ID NO: 85039 - protein, 83 aa, Gossypium hirsutum
  Clone ID: LIB3166-004-P1-K1-F4.pep
PTRSPTRPIKSPLPSSSFSRDPLSVCLSLFLSHYSTLLSQPFFIFCYSVRRNIIKKAGSLTLSCNQRLLLVLNIFFSLYFILF

SEQ ID NO: 85040 - protein, 141 aa, Gossypium hirsutum
  Clone ID: LIB3166-004-P1-K1-F5.pep
LGEEDCLGAKVDGSRLRYVDDQLRQQRALQQLGMIQHNAWRPQRGLPERAVSVLRAWLFEHFLHPYPKDSDKHILAKQTGLTRGQVSNWFINARVRLWKPMVEEMYLEEVKEQERNGSEVKANKSVQKESESSSSAHQENV

SEQ ID NO: 85041 - protein, 52 aa, Gossypium hirsutum
  unsure (1)..(52): unsure at all Xaa locations
  Clone ID: LIB3166-004-P1-K1-F8.pep
MVQLQRLLETPKALLLKEQAMTYARGLVAGFAMXNMEHLISFADAFGATRLR

SEQ ID NO: 85042 - protein, 94 aa, Gossypium hirsutum
  Clone ID: LIB3166-004-P1-K1-G12.pep
MPVSPPRSCITSLSSNMLDLSFYKAAYHETTVNQPGLDHSSECNSIVSGGRFKKARVHPSSTSSQPPLKVRKENLGDIITALHQLVSPIWNGRT

SEQ ID NO: 85043 - protein, 65 aa, Gossypium hirsutum
  Clone ID: LIB3166-004-P1-K1-G2.pep
PEPSHEVFSWLKSLPLAPEYRPTLYEFQDPIAYIFKIEKEASQCGICKIIPPVPPNFFLKLRNQI

SEQ ID NO: 85044 - protein, 60 aa, Gossypium hirsutum
  Clone ID: LIB3166-004-P1-K1-G5.pep
AHLMVVIKCTVEPTLLVNTSHSCNAVDVSCLYGFLTVKEQQLGSCWCLPRLFTARYTVPV

SEQ ID NO: 85045 - protein, 136 aa, Gossypium hirsutum
  Clone ID: LIB3166-004-P1-K1-G7.pep
AYAGSGRYREAMVVFKKMEEEGCKPTLITYNVVLNVYGKMGMPWSKVMTLFDGMKSDGIAPDAYTYNTLISSCRRGSLHEEAASVFDEMKLAGFSPDNVTYNALLDVYWKSRRPKEAMEVLKEMELYGFAPSIVTY

SEQ ID NO: 85046 - protein, 119 aa, Gossypium hirsutum
  unsure (1)..(119): unsure at all Xaa locations
  Clone ID: LIB3166-004-P1-K1-G9.pep
GSSLVQWRLFSGRTHXIRGDAKYMGIPLLGDEVYCCTKNMALLLLFSYTPTHYYDELLRMVSKXEKPYLHSLVLCYEHSYLSGRPLVLFIWIPFLHIRRNTFAAFLVFCPPICLCFIHN

SEQ ID NO: 85047 - protein, 115 aa, Gossypium hirsutum
  unsure (1)..(115): unsure at all Xaa locations
  Clone ID: LIB3166-004-P1-K1-H10.pep
DFFSRHENHIDVVNSKAFSKFHYRTISTQQLLNVVAALLLNQRPRHFDTALSLEQFCNDTVMTFLHHHGLCQAGKVCXKDYRFIGVYGLMVIDXSTISFLPGTNSHASVFILWMN

SEQ ID NO: 85048 - protein, 105 aa, Gossypium hirsutum
  Clone ID: LIB3166-004-P1-K1-H3.pep
NLNPSWEKFLVASEDDPTQCRHTSSPLGNGAIVETSDQKIVLLQRSNNVGEFPGQFVFPGGHPEPQEVGIETHEYCKCSKDSELVNKKVSQEMFESIIREVVEEI

SEQ ID NO: 85049 - protein, 104 aa, Gossypium hirsutum
  Clone ID: LIB3166-005-P1-K1-A12.pep
SGERKLDQTPTWAVAGVCAVIIIISIVLETVLHKLGTWFTERHKSALFEALDKVKAELMVMGFISLLLTFGQSYIARICIPIDVANTMLPCKSDSEQGTSESSE

SEQ ID NO: 85050 - protein, 109 aa, Gossypium hirsutum
  Clone ID: LIB3166-005-P1-K1-A4.pep
DVYAFGVVLLELLLGRKPVEKLAPAQCQSIVTWAMPQLTDRSKLPNIVDPVIRNTMDLKHLYQVAAVAVLCVQPEPSYRPLITDVLHSLIPLVPMELGGTLRVTQPTVP

SEQ ID NO: 85051 - protein, 121 aa, Gossypium hirsutum
  unsure (1)..(121): unsure at all Xaa locations
  Clone ID: LIB3166-005-P1-K1-B1.pep
NEVFVGRTVMPGGADVEQLHKIYTKCGSPLDXYCKKYKLPYATLFKHKEPYQRCVRETFRDXLPSSLMLIDTRIAIDTAERLTGTDALRSEFFTTEPYACEPCXFPKYTSSQEIDAKRRDD

SEQ ID NO: 85052 - protein, 98 aa, Gossypium hirsutum
  unsure (1)..(98): unsure at all Xaa locations
  Clone ID: LIB3166-005-P1-K1-B5.pep
AFGGRNFGKKREENVKSNTFSRKTKVGRIKKEVXEIYLRDDIYCGAAACKTCDSSTSRAPXMFATPLLILDTNVLFHQIDLLENSVIDNAVLLSVVLD

SEQ ID NO: 85053 - protein, 80 aa, Gossypium hirsutum
  unsure (1)..(80): unsure at all Xaa locations
  Clone ID: LIB3166-005-P1-K1-B7.pep
QIMKMKVLNQLIAHLGEIQVIGGSIAHNVXLAYKFFWMQVPIDAVFQKVEMNVIIGVTQXKVIESFINLWYITRLSLQIF

SEQ ID NO: 85054 - protein, 53 aa, Gossypium hirsutum
  Clone ID: LIB3166-005-P1-K1-B9.pep
SIDYNIMYQLFINTTIHFLYFYFFMINIVDLDSLLCLLVLLYLVYHVQWYLLA

SEQ ID NO: 85055 - protein, 85 aa, Gossypium hirsutum
  Clone ID: LIB3166-005-P1-K1-C1.pep
LVFLQGRIDDFLFFLLALVRRHCKREKSKSWSFLRVFALVWSAFYFFGCLCKYAWALELDSYNAGVGLLRTFRKNIPLSLKNGST

SEQ ID NO: 85056 - protein, 49 aa, Gossypium hirsutum
  Clone ID: LIB3166-005-P1-K1-C5.pep
TRYYRRGSDKKGYFFKCYYKGLVHVLKGIIFSAFKKVKIEFYLMHFRKV

SEQ ID NO: 85057 - protein, 35 aa, Gossypium hirsutum
  Clone ID: LIB3166-005-P1-K1-C7.pep
ILVDELWYWLYHLLILSFSRPLLFFIKKIAVFSKA

SEQ ID NO: 85058 - protein, 32 aa, Gossypium hirsutum
  Clone ID: LIB3166-005-P1-K1-C9.pep
TFKYGNIHVNGKKVLNINHKKYVKKKCNISKL

SEQ ID NO: 85059 - protein, 47 aa, Gossypium hirsutum
  Clone ID: LIB3166-005-P1-K1-D1.pep
IDKKIESWVANSDSIDDKEREFLVQFSPLTPEKRIDPILLSLINLNF

SEQ ID NO: 85060 - protein, 72 aa, Gossypium hirsutum
  Clone ID: LIB3166-005-P1-K1-D10.pep
SFSQSTLSIILQCPVYLYYNVVYDPLLPLKFTINLYLYYLQTPFMLLSSNFYSCFVYNVLTLFSNGLNFGGF

SEQ ID NO: 85061 - protein, 143 aa, Gossypium hirsutum
  Clone ID: LIB3166-005-P1-K1-D2.pep
FALSICDSVDMYGFTVDPGDKEWARYFSESRKGHTPLHGRAYYQMMECLGLIKIHSPMRSDPNRAVKWVPSQTAIRAARIASEKLLRRVGAGSEDLLSSCSILKKQVKRKHMSISSLRKAAVDHQKFVKGTTMYPLEHNPGHG

SEQ ID NO: 85062 - protein, 45 aa, Gossypium hirsutum
  Clone ID: LIB3166-005-P1-K1-D3.pep
GYTSLHVENAVFALCDCFICHVFTVSASSFQAYNNLKHYLVFSYL

SEQ ID NO: 85063 - protein, 39 aa, Gossypium hirsutum
  Clone ID: LIB3166-005-P1-K1-D8.pep
RVLTPFLKPYHLINHDSSNQLFKKPNKAPFRTVYLKLLN

SEQ ID NO: 85064 - protein, 31 aa, Gossypium hirsutum
  Clone ID: LIB3166-005-P1-K1-D9.pep
PNPNMILSFNYIPLHCTYKAILPSLLIPNIT

SEQ ID NO: 85065 - protein, 113 aa, Gossypium hirsutum
  Clone ID: LIB3166-005-P1-K1-E11.pep
VYESNNDPRIFQCETMYEEDYKTLLTAAIAYLVSCSLIDKALLVRFILAPLVVFVFLLHKCLTTRKKVGNAEHVGDLQMLPKPIPCSPQGHTRNLSSDSPKQVLIAASIERSA

SEQ ID NO: 85066 - protein, 142 aa, Gossypium hirsutum
  Clone ID: LIB3166-005-P1-K1-F1.pep
AKVDEYARGMISGSGSTLFEELGLYYIGPVDGHNIDDLVSILKEVKTTKTTGPVLIHVVTEKGRGYPYAERAADKYHGVVKFDPATGKQFKGNSATQSYTTYFAEALIAEAEADKNIVAIHAAMGGGTGLNLFLRRFPQRCF

SEQ ID NO: 85067 - protein, 50 aa, Gossypium hirsutum
  Clone ID: LIB3166-005-P1-K1-F2.pep
SAYLIKLTTPTPHYCTQGYHSTVYENLLSISFSPLILSFSNINHESFHIF

SEQ ID NO: 85068 - protein, 34 aa, Gossypium hirsutum
  Clone ID: LIB3166-005-P1-K1-F4.pep
SRQPTTHELVAKDLHGNDWRFLRVFMCQPLMHFL

SEQ ID NO: 85069 - protein, 143 aa, Gossypium hirsutum
  Clone ID: LIB3166-005-P1-K1-F5.pep
GDAMKTTVSNFDIPAASMSSFDILSVATFIFIYRRILDPIIARIKTNPKGLTELQRMGIGLVIAILAMVAAGVVEVFRLKYANKDCPNCNNASSLSIFWQIPQYMLIGASEVFMYVGQLEFFNGQAPDGLKSFGSALCMTSIS

SEQ ID NO: 85070 - protein, 82 aa, Gossypium hirsutum
  Clone ID: LIB3166-005-P1-K1-G11.pep
FHGPMAVLKVLSFKLTLMSCGKKVGGVKAVLIAPVVRSLSTGLLLMLGGLGLVNSQRENEANQVPYQNELTHFKAYNSLTKD

SEQ ID NO: 85071 - protein, 65 aa, Gossypium hirsutum
  unsure (1)..(65): unsure at all Xaa locations
  Clone ID: LIB3166-005-P1-K1-G12.pep
MGKSNIITDWTQIYAIYCMYXWQTLFFLIYYAVLFSLLSIIFYFYFDIIIHFYQTIFSSLISFLF

SEQ ID NO: 85072 - protein, 59 aa, Gossypium hirsutum
  Clone ID: LIB3166-005-P1-K1-G2.pep
PSIPTGRLFFFFSLALEKLELLLFYRGNFFKNPKLFLFQQFPWLKAFFFNFFGLWSKPS

SEQ ID NO: 85073 - protein, 64 aa, Gossypium hirsutum
  Clone ID: LIB3166-005-P1-K1-G5.pep
MENKDDEVKKSQVVEARARNISHNVRCTEGWSQSIEDSQADIAILPKKVIRDEIRSWKSDKEIY

SEQ ID NO: 85074 - protein, 53 aa, Gossypium hirsutum
  Clone ID: LIB3166-005-P1-K1-G6.pep
LYFASSLSKNLIIRISVYSYDMPCSGHYQLKWPQIYYLKGLCSYEQSQLLFLL

SEQ ID NO: 85075 - protein, 79 aa, Gossypium hirsutum
  unsure (1)..(79): unsure at all Xaa locations
  Clone ID: LIB3166-005-P1-K1-G7.pep
ALYFQNTIIIVPMXAITFIGYXANCAETSTYLLNSVSSTLWVKAGANIYAYSQTIILLHIFASPTHEYLDTKFSIRRSA

SEQ ID NO: 85076 - protein, 103 aa, Gossypium hirsutum
  Clone ID: LIB3166-005-P1-K1-H4.pep
MSKSNPSFPPQQLSKSLTKSFMAQNQVMDSLTSHISLYHCHSLSQNPNPTPNSNSRSSILRWFSSLTIHQRQAQLTTVDSKFTQLLIQMLGKLRTRGHGFFII

SEQ ID NO: 85077 - protein, 88 aa, Gossypium hirsutum
  unsure (1)..(88): unsure at all Xaa locations
  Clone ID: LIB3166-005-P1-K1-H7.pep
GICTGXGVTANVAKPKEGQAAAFFGLGAVGLADAEGARVGGASRIIGVDVNPKRFVEAKRXGITDFVNPNDYYKPVQEVILDITYVGV

SEQ ID NO: 85078 - protein, 39 aa, Gossypium hirsutum
  Clone ID: LIB3166-006-P1-K1-A1.pep
EGVNSPYLENRVIFFLSLFFFWGGGLSGGLIYTILYYSF

SEQ ID NO: 85079 - protein, 125 aa, Gossypium hirsutum
  unsure (1)..(125): unsure at all Xaa locations
  Clone ID: LIB3166-006-P1-K1-A10.pep
VIASHENAWRTRNSEFEAELELKRRMVEDEIEMKRRAWELKEMDINNKEDQICEREHGLDVRLRILAEKEKDVAEKSNLIDVKEKNMSAFEKELELKKAALEKEKDEMSXMILDLQKSLLSFEDK

SEQ ID NO: 85080 - protein, 85 aa, Gossypium hirsutum
  unsure (1)..(85): unsure at all Xaa locations
  Clone ID: LIB3166-006-P1-K1-A12.pep
MRPNIGLFGDSITQESFRSCGWGASLADTYSRKADVVLXGYGGYNTRWALYLMHHLLPFGSTKPPVATTFFLVANDAFFPGRSSE

SEQ ID NO: 85081 - protein, 75 aa, Gossypium hirsutum
  Clone ID: LIB3166-006-P1-K1-B3.pep
KSEVIKHSLDAFSFFIYIIAIHHQTCFHFVSLKYKQPFDSLDPTAFDYCSKAKLGKKLEETGKKIGRLFLWRNVR

SEQ ID NO: 85082 - protein, 66 aa, Gossypium hirsutum
  unsure (1)..(66): unsure at all Xaa locations
  Clone ID: LIB3166-006-P1-K1-B7.pep
SLFLHTFCSTIRPKGVGGTQLNFGTSLLNIKSVYELTXSDSSVIVLPLFYMHGWLTDLPSGLSLRA

SEQ ID NO: 85083 - protein, 83 aa, Gossypium hirsutum
  unsure (1)..(83): unsure at all Xaa locations
  Clone ID: LIB3166-006-P1-K1-C11.pep
MEGLKKAKPDTLVGAMDAXPDKHYGFHDIRTNYNYTKPTLACNAGLDGVLDALSDDKLTGIDMYSIFSAVPPMFFTLSPPSAP

SEQ ID NO: 85084 - protein, 96 aa, Gossypium hirsutum
  unsure (1)..(96): unsure at all Xaa locations
  Clone ID: LIB3166-006-P1-K1-C5.pep
GRPTRAGEFSFRRGWRILNIFSIGSDMWMEDLFSLELIITTSMRGTLCYVAPEYGGCGYLMEKADIYSLRVLILVNVSGXRPLHVLASPIKLEKAN

SEQ ID NO: 85085 - protein, 77 aa, Gossypium hirsutum
  Clone ID: LIB3166-006-P1-K1-C6.pep
TEENRLKEKLGIRQETVKTTSKELKRMSSNLKSFHFYYKKKRKQCPPKFKKVQKFWVDEKIPHRTCCSFVMSCLSVQ

SEQ ID NO: 85086 - protein, 116 aa, Gossypium hirsutum
  unsure (1)..(116): unsure at all Xaa locations
  Clone ID: LIB3166-006-P1-K1-D1.pep
LKKSSEVNGLSKDVQKLLWKNKMRFTKADAVVKSLGLAXPNWKVKKLVDKEEDEVGLDGSHAADETNCKKVLDDSVDCSECPSTFPAAVNAEEACETDELRPLKKAKLLVDEKCSD

SEQ ID NO: 85087 - protein, 87 aa, Gossypium hirsutum
  unsure (1)..(87): unsure at all Xaa locations
  Clone ID: LIB3166-006-P1-K1-D10.pep
HSSEATLTLDLVLVSRGLDXVLEKDGAKVNVADLVGKTILLYFSTHWCPPCLAFTPSHFVVYNNIKELXYTFEVIFISSYRDHILLC

SEQ ID NO: 85088 - protein, 43 aa, Gossypium hirsutum
  unsure (1)..(43): unsure at all Xaa locations
  Clone ID: LIB3166-006-P1-K1-D5.pep
AYSCSVLIQLFSFSFWDFXWGSTDSLXYLMIPTISSTITEISC

SEQ ID NO: 85089 - protein, 103 aa, Gossypium hirsutum
  Clone ID: LIB3166-006-P1-K1-D8.pep
SHHIIGWPSLWITRLTTRTLIMTGTMIGTCKDLTLSLRSIVVHTQCILSTPLPFTTTPYFHILDPLIQHKYLLNTYLMLFHNIYTLPETLQQPLQESIVAILK

SEQ ID NO: 85090 - protein, 128 aa, Gossypium hirsutum
  unsure (1)..(128): unsure at all Xaa locations
  Clone ID: LIB3166-006-P1-K1-D9.pep
VPAAEATIEATAQGIAXMLCAHGPEVEWRICTIWEAAYGLIPLSSSAVDLPEIIVSTPLQPPILSWNLYIPLLKVLEYLPRGSPSEACLMKIFVATVEAILQRTFPPESPREQTRKTRYSIGSGSKNL

SEQ ID NO: 85091 - protein, 53 aa, Gossypium hirsutum
  unsure (1)..(53): unsure at all Xaa locations
  Clone ID: LIB3166-006-P1-K1-E11.pep
PRNFRLLQELXEVKKRIGDGTVRYXKHHADVVYMQSCTGSIIGPPNTAHEGRI

SEQ ID NO: 85092 - protein, 79 aa, Gossypium hirsutum
  Clone ID: LIB3166-006-P1-K1-E12.pep
VHRERNYWDLIHSILWEFWWGNVIPAREALSLGMEEDAKTYDPSSTHKQTGLAISKSIKLASEAKMFCREIAGHIEFYR

SEQ ID NO: 85093 - protein, 76 aa, Gossypium hirsutum
  Clone ID: LIB3166-006-P1-K1-E6.pep
FAQDGEPTKTIKAPAGLDSVLYNTNAIYTISSSKAFRISFTDSACRGCGVTVYTKKYIYTIDDDCFDAQDPFDYDI

SEQ ID NO: 85094 - protein, 81 aa, Gossypium hirsutum
  unsure (1)..(81): unsure at all Xaa locations
  Clone ID: LIB3166-006-P1-K1-E8.pep
ITNQGCTSTHFQNQRCKSYEKAKKKLTILEAPNILTIALKRFQSGKFGKLNKAVRFPEXFDIMXYMLYGVVVHLDIMNAAF

SEQ ID NO: 85095 - protein, 60 aa, Gossypium hirsutum
  Clone ID: LIB3166-006-P1-K1-F12.pep
PLKNHKPHPNKKVPSKPFAQFQDLVFRLCSCIYPLLLVQDPLLLILSLCVSVCMSQPDAW

SEQ ID NO: 85096 - protein, 48 aa, Gossypium hirsutum
  Clone ID: LIB3166-006-P1-K1-F8.pep
KSLRFDIQNSLGYSKNNSYLFSKLPIFLNKFFFNFSCFILLIYTHINK

SEQ ID NO: 85097 - protein, 65 aa, Gossypium hirsutum
  Clone ID: LIB3166-006-P1-K1-G10.pep
FPYASYKNKCWGPTSEFLFFLNIIPTAYIFIYLTLQHKSPQNYNLFLEKNSIFPTFNTCFILPVF

SEQ ID NO: 85098 - protein, 112 aa, Gossypium hirsutum
  unsure (1)..(112): unsure at all Xaa locations
  Clone ID: LIB3166-006-P1-K1-G11.pep
HASVSFTDVTDSVGFQPDVGTLACGLVADGQLIHIHQYAVRLCLPTKAAHSEGIIMSSAVCITWTPDNMSISQGAVGQSXIVVSTYNPYFRFILRGQITIMHIITKYMNCSM

SEQ ID NO: 85099 - protein, 87 aa, Gossypium hirsutum
  Clone ID: LIB3166-006-P1-K1-G8.pep
ILPVSMPNSGPRPSPFGQQPPFPQSGGSAGFPGALPPMARSGPSPGLMGIPAVPPTGPPQSALPANVPPGRPLGQPFWSLLPLLGLD

SEQ ID NO: 85100 - protein, 42 aa, Gossypium hirsutum
  Clone ID: LIB3166-006-P1-K1-G9.pep
SKINRNICCSTYVKRENKHSTLLKHSFHRKHKGICDLMHLNG

SEQ ID NO: 85101 - protein, 91 aa, Gossypium hirsutum
  Clone ID: LIB3166-006-P1-K1-H10.pep
LNQLFEFRYFPEGIDIYFENVWGKMLDAVILNMRVHGRIAVCGMISQYNRDLPVGVHNLMSIVYKRVRIEGFATVDYYPHFSKFLDFILPY

SEQ ID NO: 85102 - protein, 112 aa, Gossypium hirsutum
  Clone ID: LIB3166-006-P1-K1-H2.pep
MVSMAGVIQRPLMAAAAVAMASVSVDFPAKLPSPTSDTETSISNSLPESNSSLVALISASKLANLSFVTRIRVPLPSFNFPVPNSGRNFVPNMLCSSIASAPLLVNLYQSAE

SEQ ID NO: 85103 - protein, 69 aa, Gossypium hirsutum
  Clone ID: LIB3166-006-P1-K1-H5.pep
ILELIYIYIFYVVCKSMNDFDTWAVVNLSSNFLPFYGLFGYSVFNRSILLPNDHVVLLRRWGFNIFTFF

SEQ ID NO: 85104 - protein, 33 aa, Gossypium hirsutum
  Clone ID: LIB3166-007-P1-K1-A1.pep
TQKIIYLDWSLREFEGVKNRSGIAVKRENGVPR

SEQ ID NO: 85105 - protein, 104 aa, Gossypium hirsutum
  unsure (1)..(104): unsure at all Xaa locations
  Clone ID: LIB3166-007-P1-K1-A2.pep
VGLELIRKVCRTNRREKGKXIKIIISLLKAPSTAVTYECAGTHVSMXSAPTAIRAAANTYCQVFVSYSDYNVQLIVLDLTNEPKAFHRDNNADSIIDVLRALSS

SEQ ID NO: 85106 - protein, 109 aa, Gossypium hirsutum
  Clone ID: LIB3166-007-P1-K1-B1.pep
MTITHQSRHGMLWIIVSKGIPSINLRDPKAKTLIIQACQEFGFFKLLNHGVPIETIARLEAEALNFFNLPRSVKDKAGPANPFGYCTKRIGPNGELRLIEYLLIKHRQN

SEQ ID NO: 85107 - protein, 62 aa, Gossypium hirsutum
  Clone ID: LIB3166-007-P1-K1-B3.pep
TGLQAVQLGIALRLPLEAVMEDSRTVIICKRVMTGSNLNTLRHWRFGGRTTKIERKSGRKRG

SEQ ID NO: 85108 - protein, 89 aa, Gossypium hirsutum
  Clone ID: LIB3166-007-P1-K1-B4.pep
MLRVLTTVTRSDQKQQGSNCTMAFSGFGIGGLLLMVALAASMVFLPLMLPPLPPPPLVLLFFPVGIMAALMFLAFFPAEVVGNAVASSL

SEQ ID NO: 85109 - protein, 95 aa, Gossypium hirsutum
  unsure (1)..(95): unsure at all Xaa locations
  Clone ID: LIB3166-007-P1-K1-B5.pep
SFEEEGEVAEIGSLWLKMNEXARLDAEQEPILSEFYYSLLLSXNSLKTCFGQYHLLNKVKQFKIFQGVTLVDIFMEVVLEDKGMVKAGLGDFKAF

SEQ ID NO: 85110 - protein, 135 aa, Gossypium hirsutum
  Clone ID: LIB3166-007-P1-K1-B7.pep
ATLHPGCYSICSLTQANLDVDLWALAKAMSKLQYPLHYNLNANVSAKRCIIWDSVFSKAKKLAMMLAGANEKHKADHILKRLLNWRDSPPEQLIGLPTTLTLALKNTIEYGTVDYWRDQTLTANMAFVRAVAHIG

SEQ ID NO: 85111 - protein, 124 aa, Gossypium hirsutum
  Clone ID: LIB3166-007-P1-K1-C1.pep
SLTFLRYGNLLLVAGGIGITPFLSILHEIAATQGNGSSRYRLPSRIQLIYVVKKSQYIGLLKSVSSLLQNHPSNKCHLKLKVFVTQEKQCGATLGEMLNEASQVQWVHFGLKGPIYSIHGPQSL

SEQ ID NO: 85112 - protein, 72 aa, Gossypium hirsutum
  Clone ID: LIB3166-007-P1-K1-C3.pep
ARLLQLESIEHNESTQKTIPYLCHDKMKNNHIYDRKSKNYAKCSIDNFTQMFIIYQNWQFRCFLQFLLFKGY

SEQ ID NO: 85113 - protein, 129 aa, Gossypium hirsutum
  Clone ID: LIB3166-007-P1-K1-C7.pep
MAKELIFFLVFVVFSSNPVFSHFIFNGFHDSCDQMSLNGVADITKNGLLRLTNISQRAIGRAFYSSPFQFKNSSNGKAFSFSTAFAFAMAPAYPTLGGHGLAFVLSPSKEIAGYHSQYLGLLNPSNHHG

SEQ ID NO: 85114 - protein, 101 aa, Gossypium hirsutum
  unsure (1)..(101): unsure at all Xaa locations
  Clone ID: LIB3166-007-P1-K1-C9.pep
KNIWQHVVRKRKNEWKEFERSGSVEEGDRQPKQSDDAYYSSLAYERNLKGXKKKRKDEEEETDERDDTSTLKKPRVVWSVELHQQFVAAVNQLGIDKAVPK

SEQ ID NO: 85115 - protein, 135 aa, Gossypium hirsutum
  Clone ID: LIB3166-007-P1-K1-D3.pep
GPVAGPLGGTVGRGGLGKLCMRGSNSSRGVTTVGLRAISRGCPSLRVLSLWNLATVGDDGLCEIAEGCHQLQKLDLCHCPAITNESLLALAKGCPDLTDLTIEGCANIGNEGIQAIARCCPNLKSVSIKDCALLG

SEQ ID NO: 85116 - protein, 131 aa, Gossypium hirsutum
  unsure (1)..(131): unsure at all Xaa locations
  Clone ID: LIB3166-007-P1-K1-D6.pep
MARRPARCYRSGRTKPYPKSRSNRGVPDPKIRIFDLGRKRANVDDFPLCIHLVSNEYEQLSSEALEAARICANKYLVKTSGKDKLHLRXRAHPFHVVRINKMLSCAGADRLQTGMRGAWGKPNGTVARVNI

SEQ ID NO: 85117 - protein, 77 aa, Gossypium hirsutum
  Clone ID: LIB3166-007-P1-K1-D9.pep
PVATQEKGGGPFGSSLSTVANGQTPRGSTTFRSVRRRRSAPKWWIEGAFFITILFFYYYFICKKEKKRNKAKRGKRK

SEQ ID NO: 85118 - protein, 68 aa, Gossypium hirsutum
  Clone ID: LIB3166-007-P1-K1-E2.pep
KKIWALELEYVIKCVNIINGTNFFKSVHFKGLKKGTSNKRLNKVVSLLFLPFPSVITVKLFNVSSLAS

SEQ ID NO: 85119 - protein, 76 aa, Gossypium hirsutum
  Clone ID: LIB3166-007-P1-K1-E8.pep
PTRPFPRKFCCLVLHSYCTIMLLIGTSTITLKYILGQILYAYSRYEKKIPFSFPLSYAIFAELLLYLVFPLLLSLQ

SEQ ID NO: 85120 - protein, 62 aa, Gossypium hirsutum
  Clone ID: LIB3166-007-P1-K1-F10.pep
TDKYSRRRPQPTHTRTGTQKKKKQSKLVLIIKEEVSENVSMKNHQSSSVLASATKYCSQVGL

SEQ ID NO: 85121 - protein, 68 aa, Gossypium hirsutum
  Clone ID: LIB3166-007-P1-K1-F3.pep
EKEKVPHVFFLPPWQTPKLEDLHCNPAYLFKSPYTNFLLKSPCYKFSPLIIYLLIKTMILIKTKNTLY

SEQ ID NO: 85122 - protein, 125 aa, Gossypium hirsutum
  unsure (1)..(125): unsure at all Xaa locations
  Clone ID: LIB3166-007-P1-K1-F6.pep
HTYAKIQDKECFQPDNYRVSLVENQLADGHTLIDYNIHKEFTLHLVLRLHGGMQILTKTXTGMTITLXVESSDTIDNVQAKIRVKAGLPPDQXRVIYVGKQLEDGRSMIDYDIQMEFTLHLVLRI

SEQ ID NO: 85123 - protein, 136 aa, Gossypium hirsutum
  unsure (1)..(136): unsure at all Xaa locations
  Clone ID: LIB3166-007-P1-K1-F7.pep
LSGLCCDENCSPYNESVGDGLRALLTPKLASMLRDHVPKDLLSKLNTNLESPEIIWNSSTRAELLKFVDHQRSSQCPDGSYDLKDSYVFAYEALSKELFVGNVYLMVYNDQPDFEICEPEXFCVALIDFIAFLVHN

SEQ ID NO: 85124 - protein, 87 aa, Gossypium hirsutum
  Clone ID: LIB3166-007-P1-K1-F8.pep
VNEGEGGASWASNFQTDFPYVSMFRKHVVGKYTISFGEINTSNGWCSINLHGICKRKSCILTQNSYITGSLIRSTGERSFQDRKLRR

SEQ ID NO: 85125 - protein, 121 aa, Gossypium hirsutum
  unsure (1)..(121): unsure at all Xaa locations
  Clone ID: LIB3166-007-P1-K1-G11.pep
MFFYTTTCFSSGRQPYYLTTCDLVMLSTNYIQKGLLYAKPEDNCEEDLINNVLDRLKQSLSIALVHFYPLSGRLASKIXENPKSYFFFLDCNNSPGAKFIHAACDLSVSDNCSPTYVPLCC

SEQ ID NO: 85126 - protein, 47 aa, Gossypium hirsutum
  Clone ID: LIB3166-007-P1-K1-G3.pep
KKAMVEEEIKARSHYLVKPPWFWKIGLRRISLGMAVMVLHFQRTFPW

SEQ ID NO: 85127 - protein, 107 aa, Gossypium hirsutum
  unsure (1)..(107): unsure at all Xaa locations
  Clone ID: LIB3166-007-P1-K1-G9.pep
MELERKNGEWIKSGSCDLGLRRIKVRKESVDEEEEPLSPMARMFQQPESNVYIIAMLGFKSPIDPHFLKVADEKNGGXVKWVKTKVDLDNHVKIPMVDQHMASPDQF

SEQ ID NO: 85128 - protein, 50 aa, Gossypium hirsutum
  Clone ID: LIB3166-007-P1-K1-H6.pep
ETILKTYISNKMSRYNINPLLFRKLLQFKTSAINNLCNKLNNYLSADAWV

SEQ ID NO: 85129 - protein, 36 aa, Gossypium hirsutum
  unsure (1)..(36): unsure at all Xaa locations
  Clone ID: LIB3166-007-P1-K1-H9.pep
LALPFYFSLQIXIILHDFAWQVSCLRICCVPLPTLI

SEQ ID NO: 85130 - protein, 57 aa, Gossypium hirsutum
  Clone ID: LIB3166-008-P1-K1-A10.pep
HSYMGQLILSLAEAHTQRVQNKLENAIKLKFMKPTHRADNNVRHYPDLQGCLWKSYF

SEQ ID NO: 85131 - protein, 129 aa, Gossypium hirsutum
  unsure (1)..(129): unsure at all Xaa locations
  Clone ID: LIB3166-008-P1-K1-A3.pep
XKQGMNEFIFXXXXIGRVRHRNLVQLLGYCRRQGELLLVYDYMPNGSLDKYLYNQPKLTLNWSQRFRVIKGVASGLFYLHEEWEQVVIHRDVKASNILLDSGLNGRLGDFGLARLYDHGTEPQTTHVVG

SEQ ID NO: 85132 - protein, 63 aa, Gossypium hirsutum
  unsure (1)..(63): unsure at all Xaa locations
  Clone ID: LIB3166-008-P1-K1-A5.pep
YHHYVLLILCKWPSCNARCRASDFPREYDGECLQMRMSYSPAAHXFLFLVQWTDCHLAGALGL

SEQ ID NO: 85133 - protein, 51 aa, Gossypium hirsutum
  Clone ID: LIB3166-008-P1-K1-A9.pep
AILSSEADSGLTCFQRLQPIKHFICLFNRPRPRSMYFLQCSSATTSPVQDF

SEQ ID NO: 85134 - protein, 97 aa, Gossypium hirsutum
  unsure (1)..(97): unsure at all Xaa locations
  Clone ID: LIB3166-008-P1-K1-B12.pep
RLLINTYAIXRDPNSWDNPLQFNPNRFQDSNIDLKDQDFRFLPFGGGRRGCPGYTFGLATVEIALARLLFHFDWELPYGIHTDDVDVDEIFGLASRK

SEQ ID NO: 85135 - protein, 59 aa, Gossypium hirsutum
  Clone ID: LIB3166-008-P1-K1-B2.pep
HVSAIQETIFLPISTFQILHVWQDFELFGQTKLLSPDSSFPSIFRQRRFFYLDLLSFPP

SEQ ID NO: 85136 - protein, 105 aa, Gossypium hirsutum
  Clone ID: LIB3166-008-P1-K1-B4.pep
MSTTLKSSLLCFIAVVGIVAAAVTIVVVAVPEGLPFAVTMILAYLGKRKMGDPAMVRKLFACETESSATAICTDKTGTLQVTKFWVGQESMEDGGGSISPFVVEL

SEQ ID NO: 85137 - protein, 58 aa, Gossypium hirsutum
  Clone ID: LIB3166-008-P1-K1-B5.pep
TPWSINTERGFLFILEFLWHFDLKKRKIWVSLRKFYIQGPDFPVRDQNTHPPISIFFK

SEQ ID NO: 85138 - protein, 37 aa, Gossypium hirsutum
  Clone ID: LIB3166-008-P1-K1-B6.pep
KVSKTFKFWPEARRKSLFRAFFFNNETWSNGLIGRNG

SEQ ID NO: 85139 - protein, 39 aa, Gossypium hirsutum
  unsure (1)..(39): unsure at all Xaa locations
  Clone ID: LIB3166-008-P1-K1-B7.pep
LIWIIQHNTWRPQRGLPXRAGSDLQAMLFEHLLHLYPKH

SEQ ID NO: 85140 - protein, 69 aa, Gossypium hirsutum
  Clone ID: LIB3166-008-P1-K1-B8.pep
YQPYFLPQYTSAYPPPPWAATPGYFNSQNHRSSTNNMISTPQVNTTASNSITGPRPLQHNCSFPIRGTN

SEQ ID NO: 85141 - protein, 75 aa, Gossypium hirsutum
  Clone ID: LIB3166-008-P1-K1-C1.pep
PTRPNYLNLSKNFFSGHIHIDCGIWTMHRLRSLHLANNSFAGPTPESRGINTLLKNDPFTIEWLVTIKNCRYWTM

SEQ ID NO: 85142 - protein, 132 aa, Gossypium hirsutum
  Clone ID: LIB3166-008-P1-K1-C3.pep
GRVGTGGGGYGGGEEARRRKEISMLLSDPLDEGLGHSFCYVRPDPTRLSSSKVHSEESTTTFRTISGASVSANTYTPLSTALVDPYVSYSNGCFDRAAAFESTTSFSSIPLQPIPKSLINSSRPMSGSLVSS

SEQ ID NO: 85143 - protein, 133 aa, Gossypium hirsutum
  unsure (1)..(133): unsure at all Xaa locations
  Clone ID: LIB3166-008-P1-K1-C4.pep
PTLPPTRPPTRPDLAKIARNDGKTVLHSAARMGHLEVVKSLLSKDPSTGFRVDKKGQTALHMAVKGQNEEIVLELFKPDPSVLGLEDCKGNTALHIAIMKGRTQIVRCLLSVESININSTNKAXESPLDIAEK

SEQ ID NO: 85144 - protein, 53 aa, Gossypium hirsutum
  Clone ID: LIB3166-008-P1-K1-C6.pep
KYLFKYLPTGYSAYRNGRGSGGCCWIFDHILIQMAEDMYNLKNSAVKRIFQDV

SEQ ID NO: 85145 - protein, 105 aa, Gossypium hirsutum
  Clone ID: LIB3166-008-P1-K1-D12.pep
MYVCEISDQEAGENIPGTEVNAKPSVVPRDNPIGKNFSNSVKESITFSKTKPGMLLKPAHVRRPSVNMFEVVKLSATVDSGTPGNVKSGLYIATDLNSQSRLVLE

SEQ ID NO: 85146 - protein, 65 aa, Gossypium hirsutum
  Clone ID: LIB3166-008-P1-K1-D8.pep
KIKKWLGVNKGRKRNMDRWYRLGRRSEVELIREVEEDEMVYVRKRRIVGREEKEVKSNVRVVMLL

SEQ ID NO: 85147 - protein, 68 aa, Gossypium hirsutum
  Clone ID: LIB3166-008-P1-K1-D9.pep
RDEKFSYYYCLFNISDVSTFFITLIKNYYHSHNMHPLPTTIFIFSNTFFTLIFIFFTFSPFNLIYFPP

SEQ ID NO: 85148 - protein, 54 aa, Gossypium hirsutum
  Clone ID: LIB3166-008-P1-K1-E10.pep
DPRERSSLHPYSYNLFFHMLIQMLRTYFLPPINTFTFKFINKNFIKFSTITLLI

SEQ ID NO: 85149 - protein, 77 aa, Gossypium hirsutum
  Clone ID: LIB3166-008-P1-K1-E3.pep
QLLAEIPNSLLPICPLQLRGPLVSLSLRRTLPPSLTPLIGVFSRLISRCHLHWRIDVIHVLQSMFLILRRSKPSQIR

SEQ ID NO: 85150 - protein, 59 aa, Gossypium hirsutum
  Clone ID: LIB3166-008-P1-K1-E7.pep
SYACPLSYAIIFNTNPKLITHTTLNVTLITIKTTSTLMVKISRFHNLEPRASAHMADCI

SEQ ID NO: 85151 - protein, 47 aa, Gossypium hirsutum
  Clone ID: LIB3166-008-P1-K1-E8.pep
IDVVYVKGYVYVVRVINGGEMMVNLCLCEVCVVSKWQGGDGERFKKN

SEQ ID NO: 85152 - protein, 71 aa, Gossypium hirsutum
  Clone ID: LIB3166-008-P1-K1-F10.pep
FPLLIPTISDLWAVDTLIAPYNLIDWPLLSISLLSLTLSSRPLYYNYCDNKGHYLLKADTVSISPNPAITR

SEQ ID NO: 85153 - protein, 69 aa, Gossypium hirsutum
  Clone ID: LIB3166-008-P1-K1-F5.pep
ADSYWCSLLNLLKPPPLCQTLIHPTTNASFAPYCCFFHPHYQSSMSLSLTSLLSILYFYNQFQSLYVCL

SEQ ID NO: 85154 - protein, 53 aa, Gossypium hirsutum
  Clone ID: LIB3166-008-P1-K1-F8.pep
STLTTTITSIPLSGTFLYQDAIYLIFIFQSNLYIPILNACIIVIYKILTTYHI

SEQ ID NO: 85155 - protein, 100 aa, Gossypium hirsutum
  Clone ID: LIB3166-008-P1-K1-G4.pep
MERRVNYENDLNLMATEPRLGLPCCGDDEPQRKTNPSIRNNKRTVPEISEVSSSESNSSITMSGSDDQDSPSPAKEQVVGWPPIRSNRKNCLQSSKRNEV

SEQ ID NO: 85156 - protein, 57 aa, Gossypium hirsutum
  Clone ID: LIB3166-008-P1-K1-G5.pep
ALKGIKIKSHPQGLPCTQTTKRQIPKFKKQFHGKIQRLIPTQPPIKNPFWYQTISIW

SEQ ID NO: 85157 - protein, 35 aa, Gossypium hirsutum
  Clone ID: LIB3166-008-P1-K1-G8.pep
SRSFSFTLFLGLPQHAIDGVLMLHMEILSEFLMGG

SEQ ID NO: 85158 - protein, 37 aa, Gossypium hirsutum
  Clone ID: LIB3166-008-P1-K1-H12.pep
SPGLKAFLTSSLHANPPKLIFHTSHGTIIDCFFLSLS

SEQ ID NO: 85159 - protein, 43 aa, Gossypium hirsutum
  unsure (1)..(43): unsure at all Xaa locations
  Clone ID: LIB3166-008-P1-K1-H6.pep
LSLWPLLRVFNAANKCQAFQQRKESLSLSTHAWAXARVGFXIP

SEQ ID NO: 85160 - protein, 51 aa, Gossypium hirsutum
  Clone ID: LIB3166-009-P1-K1-A10.pep
RSIMGIQIALVTLFFSQTIGPHVHVLGSISSMGFTKPKSCDHLAASPILRR

SEQ ID NO: 85161 - protein, 101 aa, Gossypium hirsutum
  Clone ID: LIB3166-009-P1-K1-A11.pep
IKYYKTVHRILGRKAPSHGTHTLFTTYKTDKFNISHRVSASTYLPDAGLLMELHGRRFLHIITHMLTPGRSLISDRSEFSDTKSWFSHNHRIYQAEHFDAS

SEQ ID NO: 85162 - protein, 31 aa, Gossypium hirsutum
  Clone ID: LIB3166-009-P1-K1-A5.pep
LIPVFQSFLIYLYAKNVVPMGRRSSLKSLDH

SEQ ID NO: 85163 - protein, 37 aa, Gossypium hirsutum
  Clone ID: LIB3166-009-P1-K1-A6.pep
IINYYKTFPTILGRKAPSHRTHTLFSPYKNHKFHISH

SEQ ID NO: 85164 - protein, 79 aa, Gossypium hirsutum
  Clone ID: LIB3166-009-P1-K1-A9.pep
YKLDPVSDKLYTTQALTIHAPWPWVVRKIIGQDICHCVESTLVDAQSKSMQLATRYVSLHKFIEVEEKIRYDPHPDNPT

SEQ ID NO: 85165 - protein, 71 aa, Gossypium hirsutum
  Clone ID: LIB3166-009-P1-K1-B1.pep
KNNYPFSPKFARKQRKHAFDVRNPSSTSTQPRKRTPFCPKNPTQNTTETIKRQLFYVPFLTVFSFLFRLSF

SEQ ID NO: 85166 - protein, 45 aa, Gossypium hirsutum
  Clone ID: LIB3166-009-P1-K1-B11.pep
LKKVPWKLHSYKTSALTHDRSFSHLFCSLEKQGDGISSQQKRRSA

SEQ ID NO: 85167 - protein, 142 aa, Gossypium hirsutum
  Clone ID: LIB3166-009-P1-K1-B3.pep
VLSVNRTFELGFFTINGESDWYLGIWYSSIPTQTRVWVANREKPIKNITGSSLEITGTGRLVVKESPDSVVWQSDNVEKAKRFVFLETGNLVLYSSNGLKVWQSFDFPTDTWLPGMNLTAQQALTSWKSSFDPSPGLFSLRL

SEQ ID NO: 85168 - protein, 43 aa, Gossypium hirsutum
  Clone ID: LIB3166-009-P1-K1-B5.pep
PSPLREGNFNSKIREETPINYPRSRSLYRDEIKKNPKSIYQSK

SEQ ID NO: 85169 - protein, 56 aa, Gossypium hirsutum
  Clone ID: LIB3166-009-P1-K1-B9.pep
QINSCVIINTSFEHDVKKLQSQLQDETDLHLALASAVEHCGSPSSNSPGKLADMAQ

SEQ ID NO: 85170 - protein, 48 aa, Gossypium hirsutum
  Clone ID: LIB3166-009-P1-K1-C10.pep
HAFNILLKSFLSGFLAHRWCFTFAIAYPLEPDQKLRLNIGLDGFFQCS

SEQ ID NO: 85171 - protein, 83 aa, Gossypium hirsutum
  Clone ID: LIB3166-009-P1-K1-C11.pep
MDTWGNDDRIPLAQVVSELVKGWFQEALKEAKAGDTNMQVLVGQMYCNGYGVPKDVQKGRAWISKASRSRSSVWNVSDKHSGY

SEQ ID NO: 85172 - protein, 82 aa, Gossypium hirsutum
  Clone ID: LIB3166-009-P1-K1-C12.pep
LIFNSYKLKGETIHINEQSKKGKITSKEEQKKKKNRPLNKKTKNKKRRNIWLKDLVHGLISESSHGMLGSIETSASISSQFQ

SEQ ID NO: 85173 - protein, 142 aa, Gossypium hirsutum
  Clone ID: LIB3166-009-P1-K1-C2.pep
EISLEKIEGSTDVKYFYDSYTGHVGNHRILTVVTYCEITAGKWLKQAKKANNSKSLPKTLVVGFSVERQNDYYSRYGLLEFPYELLHICIGSHCLLYRLNDPDLYKPPKFLTHFLSDPEVIVVGMGIKEKSSHLEKDFQVKI

SEQ ID NO: 85174 - protein, 75 aa, Gossypium hirsutum
  Clone ID: LIB3166-009-P1-K1-C5.pep
QPLLIKTFLIIRIRHITSLPTVKSFILFNPLPLSLPTSLTPSFLPSTTFSNPVYPLTYDPSSFSSFLSYSLSISI

SEQ ID NO: 85175 - protein, 58 aa, Gossypium hirsutum
  Clone ID: LIB3166-009-P1-K1-C8.pep
GCQSHQNHPILYSLALRRSNQTSPKKPQLITNPVPNPNSNARDEIVPHIANFHQKYIF

SEQ ID NO: 85176 - protein, 125 aa, Gossypium hirsutum
  Clone ID: LIB3166-009-P1-K1-D1.pep
DEKDSNHVSCRFPTTTEVWRFLKFSWILYSNIDSVWNWLTWVFSQGTNKQYHLFCCGLWIIWTSRNKLIYENKQTTSKDILTQISRYISELRGVEKKTLILEASRGPKSDKRRTSVAIYPDAAFD

SEQ ID NO: 85177 - protein, 132 aa, Gossypium hirsutum
  Clone ID: LIB3166-009-P1-K1-D10.pep
PTRPPTRPPTRPIDTCSQGCETLCYDQVLATTTDEEHGEPTSGKDEMLENGVPATINEVSEVDSTFEVPISEIRDKTWNVDVAGLLVEANDSINQTLEEHEDAADGDTMHKPRSKAIANEALHEKLTTKWSF

SEQ ID NO: 85178 - protein, 49 aa, Gossypium hirsutum
  Clone ID: LIB3166-009-P1-K1-D12.pep
VRLMFGISLRKSFREVVNDEVWCPEEFLQHRFCMVHPLEEHGDMASFQS

SEQ ID NO: 85179 - protein, 72 aa, Gossypium hirsutum
  Clone ID: LIB3166-009-P1-K1-D3.pep
FLIIYIQMQMQASGFLHRWISKNNSSRNKSNLFMKQGMRRRRSLRSCSSNSVRSLSSNLLILQIQRNTGVGM

SEQ ID NO: 85180 - protein, 46 aa, Gossypium hirsutum
  unsure (1)..(46): unsure at all Xaa locations
  Clone ID: LIB3166-009-P1-K1-D4.pep
GVVKEGIAFLTLISXQNXLYEKGYFLKIYIQIHIHSIVFSSQIDFQ

SEQ ID NO: 85181 - protein, 96 aa, Gossypium hirsutum
  unsure (1)..(96): unsure at all Xaa locations
  Clone ID: LIB3166-009-P1-K1-D6.pep
MSSAGQVIRRKAAAACEAEKPLSIEEVEVAPPHKHEVRIKILFTALCHTDVYYWECKGYTPLFTRIRGHEAXRIVESVGVGRELFVTXDHVLPIFS

SEQ ID NO: 85182 - protein, 90 aa, Gossypium hirsutum
  Clone ID: LIB3166-009-P1-K1-D9.pep
CTTREAVFLHLFSFKIIFQEGASGALFGTSGSNVIRSFWLTGLSTQILHAHPSYSIYTLLKQPKLHDAPYWKIVIAGKSVALPLTSEFVD

SEQ ID NO: 85183 - protein, 61 aa, Gossypium hirsutum
  Clone ID: LIB3166-009-P1-K1-E10.pep
YIHTITRPGWMAAPTGLSSQILPYRSTACAIFFVGFESPHPLHLDLSFIALLEPGVTFAAV

SEQ ID NO: 85184 - protein, 53 aa, Gossypium hirsutum
  Clone ID: LIB3166-009-P1-K1-E11.pep
SNFKCLSVLLLLVFHETEPTVWYNTYKLPKRFYHFVPYIQFLNICNHFCFILD

SEQ ID NO: 85185 - protein, 84 aa, Gossypium hirsutum
  Clone ID: LIB3166-009-P1-K1-E5.pep
AFNPSSTGFLKFLTIQVGLMHWDPCNPHLLFSPFLCPWKPKLYASSTRSLSATSLIACLYGSPTGCLLWSISQTSSLPLASFRD

SEQ ID NO: 85186 - protein, 50 aa, Gossypium hirsutum
  Clone ID: LIB3166-009-P1-K1-F6.pep
SSLCRKVSCLKLSSPMASLITGHLTHAITPAFVNHSSQLASIVMTEYWVF

SEQ ID NO: 85187 - protein, 33 aa, Gossypium hirsutum
  Clone ID: LIB3166-009-P1-K1-H1.pep
MNEMNNPCSKLTPRMNVRPYIVNSQHRKANETL

SEQ ID NO: 85188 - protein, 49 aa, Gossypium hirsutum
  Clone ID: LIB3166-009-P1-K1-H11.pep
TDKKYYYHGFCRQEGGSYSGMVHILLITYIRCFFITLYVFNIFDGLILL

SEQ ID NO: 85189 - protein, 128 aa, Gossypium hirsutum
  Clone ID: LIB3166-009-P1-K1-H2.pep
KPLLSISTFMQAARNNVLLAVPALLYAINNYLKFIMQLYFNPATVKMLSNLKVLVIAVLLKMIMRRRFSVIQWEALALLLIGISVNQLRSLPEGSTKLGLHVTTGAYIYTLIFVTVPSLASVYNEYAS

SEQ ID NO: 85190 - protein, 66 aa, Gossypium hirsutum
  unsure (1)..(66): unsure at all Xaa locations
  Clone ID: LIB3166-009-P1-K1-H5.pep
KAISFLLYLDMKVKRTQPRTENPKMDNKKTFFVVDKAKQVSNIKTRNPKQTKXSHLYNEIGGFFFF

SEQ ID NO: 85191 - protein, 62 aa, Gossypium hirsutum
  Clone ID: LIB3166-009-P1-K1-H8.pep
MAKSVENRALKKGAWSPEEDKKLIAYIKRYGIWNWAEMAKPAGLQRSGKSCRLRWVNYLRPG

SEQ ID NO: 85192 - protein, 50 aa, Gossypium hirsutum
  Clone ID: LIB3166-009-P1-K1-H9.pep
LTHGLPYTSFSAKTNPINVAVGPTLPAQTATDKVRLLDDNIRPRDCPFNF

SEQ ID NO: 85193 - protein, 133 aa, Gossypium hirsutum
  unsure (1)..(133): unsure at all Xaa locations
  Clone ID: LIB3166-010-P1-K1-A10.pep
HASGFQQIQKMEWEILEVKSKHWLNAVKGAVKTVFYGERLLCDQVFAISSSIRESCFTDVSKEGALALFGFPENVAKCKKTPEKMFRILDLYEAVSDLWPEIESIFSFXSTFTVRSTACNFLIRLSDAFRTIF

SEQ ID NO: 85194 - protein, 82 aa, Gossypium hirsutum
  Clone ID: LIB3166-010-P1-K1-B1.pep
IVMLAPAKFHYNNISIPDHIHEKVSMLMLYELIIYIARIETFGKRFIKFLVVKRLYKTIYVDDYSILNWGYIGHIKFYLILT

SEQ ID NO: 85195 - protein, 92 aa, Gossypium hirsutum
  Clone ID: LIB3166-010-P1-K1-B12.pep
HRRGMILHVHVMIQVPPRFSTKATYHASIILGSPNLGVQRLLCKKYLNIHSVFTVYATCSNRLYSQSHIIYLSFVYIKLSHACVVSIWHQLS

SEQ ID NO: 85196 - protein, 68 aa, Gossypium hirsutum
  Clone ID: LIB3166-010-P1-K1-B2.pep
MARGLKKHLKRLNAPFHWMLDKLGGAFALKPSFGPHKSRECLPLILILRNMMKFANTYKELIVILIQR

SEQ ID NO: 85197 - protein, 96 aa, Gossypium hirsutum
  unsure (1)..(96): unsure at all Xaa locations
  Clone ID: LIB3166-010-P1-K1-B3.pep
WEPILYPSSFLLGQNKEEFIAALPVDELIEKADGFAGVFPEHKFXIVXRLQARKHIFXMTGEGVNYSFSFNKSFIVLFLAFSTYSSRSAFRIVLTE

SEQ ID NO: 85198 - protein, 42 aa, Gossypium hirsutum
  Clone ID: LIB3166-010-P1-K1-B5.pep
KRKVKNVANIMTIIDEYWRSVSIKNSRDTNLNSGKYVIVHCQ

SEQ ID NO: 85199 - protein, 106 aa, Gossypium hirsutum
  unsure (1)..(106): unsure at all Xaa locations
  Clone ID: LIB3166-010-P1-K1-B7.pep
SSYGSQTNLYKQLQAWRENASLVNPPPEIXVIKAKGSLCYLKATIDAWLPPHAVYNIVTVPDNRRVFKNVKVSVLVSPTIINQKFCIMLQLPYVASTLYFSQITHV

SEQ ID NO: 85200 - protein, 145 aa, Gossypium hirsutum
  Clone ID: LIB3166-010-P1-K1-B8.pep
PRVRGRVGLVSGIRVGNLYGDPISASVGHKITARQRWTPTAFQLQILENIYEQGTGTPSKQKIKEMASELAQHGQISETNVYNWFQNRRARSKRKLQSSTDSVNAETDMSTKEKRTKPVDPDFITNISQGVESFYFQASISRGYD

SEQ ID NO: 85201 - protein, 143 aa, Gossypium hirsutum
  Clone ID: LIB3166-010-P1-K1-B9.pep
DAWGNQHNKPSMPKVRSSPGLYSLSTLHPQSNNNHSNHQVYQPHHHSHQNHQQQHPYSGQSPRTSPDYRTEKAPGPYDFVRGAMGHSHVPVNRVYSVGRQNLGNGYPMYTGCCDECLVYASGGANRRGSLSTSGRLGKHDSPC

SEQ ID NO: 85202 - protein, 92 aa, Gossypium hirsutum
  Clone ID: LIB3166-010-P1-K1-C1.pep
NSQNNTRKLEKKFMFFASNIDVSSPLASGFEVIPRLKSPRFLFSYKNWLKRLTKHALSEDFSPKLDNSSLMMFENSLKFLTKTQMNPLFVIE

SEQ ID NO: 85203 - protein, 138 aa, Gossypium hirsutum
  Clone ID: LIB3166-010-P1-K1-C12.pep
QSGPSPAAAPGLSVQFDGKSNSRSLDIDFEERLKAIRRAALEQKKVEEQKEFGPIDYDAPVESEKKTIGLGTNIGVGIAVAVFGLVFSLGDFLPGSVNPPEEAAVIDKKLSREQKAILETRLAQFEATLSTSPEDETA

SEQ ID NO: 85204 - protein, 100 aa, Gossypium hirsutum
  unsure (1)..(100): unsure at all Xaa locations
  Clone ID: LIB3166-010-P1-K1-C3.pep
PRVLPLFLXDPIFNEMLKMRQQLXHVQAELCARGGSDEVQVLKERIAWLEAANEDLCQELQEFRSRCTIVDQRETDAQDGSSCSVKSDGLKRNLHSIESF

SEQ ID NO: 85205 - protein, 76 aa, Gossypium hirsutum
  Clone ID: LIB3166-010-P1-K1-C5.pep
SCCCSKISLTVMRITLHSLISTLTFLIMFYKILTLYAMNHACLVIILHTTLPTILNPLNNIAKGCCFLFFNKIISC

SEQ ID NO: 85206 - protein, 97 aa, Gossypium hirsutum
  unsure (1)..(97): unsure at all Xaa locations
  Clone ID: LIB3166-010-P1-K1-C6.pep
VVMKLLGRNMDYGALTNVISRFRRPSKAFRVMDIETKYVLAKFQCTDFFEKVLSQGPXIIYGQYLIVQPWTKEFNPLQPYPSMVMAWICLPRLSGFL

SEQ ID NO: 85207 - protein, 112 aa, Gossypium hirsutum
  Clone ID: LIB3166-010-P1-K1-D1.pep
CASEGRASSEPETKKIIKKGNTVCSDSVPKARKKPRFVVHAAGDVRISCYGYRWRKYFQKMLKGNSNPRNYYICTSAGCPLRNAYLYSFLSILYAFYYNTYKGCLFIFILPF

SEQ ID NO: 85208 - protein, 42 aa, Gossypium hirsutum
  Clone ID: LIB3166-010-P1-K1-D10.pep
RARNNRNCMIMRNRSTSMNGQDTTMTKGHVNANLNHTGAIPY

SEQ ID NO: 85209 - protein, 62 aa, Gossypium hirsutum
  Clone ID: LIB3166-010-P1-K1-E1.pep
QDKLATLGKPLDVEDLIEKVLEGLDDTFQPIIDAVNSPNTAIIFDEFHEKLITTELALHNSF

SEQ ID NO: 85210 - protein, 103 aa, Gossypium hirsutum
  Clone ID: LIB3166-010-P1-K1-F1.pep
LDLKNHHHSQFQHGFSTALPVASPTVCRTPNNQSLIFSVDGIDQEFPQENGGCPISAVSELAAAINDNKQLEDYKNDNGNSNTKGKANTEKSDLPESLDHILP

SEQ ID NO: 85211 - protein, 96 aa, Gossypium hirsutum
  Clone ID: LIB3166-010-P1-K1-F11.pep
PRADVECPSCKPNYLPIPADEQYSSSQQQQYGLRSRMRCFYSQIRGKEHQSTVTPSLNPDPSAFNSMKIRSSKRAVLCGITYNNLKQYRLKGTIND

SEQ ID NO: 85212 - protein, 113 aa, Gossypium hirsutum
  Clone ID: LIB3166-010-P1-K1-F12.pep
METDDTGRKMEEELGGNKRLSETPPDDDCCPICFGPFTVPCRSNCGHWYCGSCILQFWNYSSASKPCGCPMCTCMIVNLMPEASLEQQPQNQEVAEVLKSVRRYNLLFFGGAR

SEQ ID NO: 85213 - protein, 143 aa, Gossypium hirsutum
  unsure (1)..(143): unsure at all Xaa locations
  Clone ID: LIB3166-010-P1-K1-F5.pep
SLSDIGAYAREIVKNEIEMXALYWLAKADYSLFSGGGKVVRHSEPFLAGKGSNWFSKGSQNVVHPNADKMLKPSFGEPGQCFPLKGSSGFVQIKLRTAIIPEAITFEHVAKNVAYDRSSAPKDCRIFGWMQGRDLDLPIDPNK

SEQ ID NO: 85214 - protein, 106 aa, Gossypium hirsutum
  unsure (1)..(106): unsure at all Xaa locations
  Clone ID: LIB3166-010-P1-K1-F6.pep
PRVLPEFDVTVRSDNGNDKMGIYYEKGSSINVYYQDVNLSNGALPVFYQPTNNVTLFKTALKGSGIXLTAALLKFISNDQNKGTVPFTLKLRAPVKIKAGSVKTCK

SEQ ID NO: 85215 - protein, 143 aa, Gossypium hirsutum
  Clone ID: LIB3166-010-P1-K1-F8.pep
RELQQWYHESVHVGHADLSGESWWPSLKTTDDLVSILTTLIWLASAQHAALNFGQYPYGGYVPNRPPLMRRLIPDENDLEYANFLADPQKYFLSALPSLLQATKFMAVVDTLSTHSPDEEYLGERQHPSIWSGDAEIIEAFYG

SEQ ID NO: 85216 - protein, 63 aa, Gossypium hirsutum
  Clone ID: LIB3166-010-P1-K1-F9.pep
KEQYLDSKFLFLDALFCTRFDKMDNKNKEYMKIRLIPPYRTETLSFCSLQMLKNENRGPHHHD

SEQ ID NO: 85217 - protein, 142 aa, Gossypium hirsutum
  unsure (1)..(142): unsure at all Xaa locations
  Clone ID: LIB3166-010-P1-K1-G12.pep
LTAACCLKLYTCRFCHDKCRDHSGDRKATTDMMCMSCLKILPVGPFCTTPSCGELSMAKYYCNICKFFDDERNVYHCPFCNLCRVGKXLGDYFFHCMVVKWCVAKKIVYHKCSIKVLXINFXLCYDFLFTLIESVRALSCFY

SEQ ID NO: 85218 - protein, 130 aa, Gossypium hirsutum
  unsure (1)..(130): unsure at all Xaa locations
  Clone ID: LIB3166-010-P1-K1-G6.pep
GFVLSRARLRPIXWVNPSFLLTPDQXLHAXXXREXXKXXWGLFYQGPNEYLYPKNLQPFVGLVWKGGLVGCRHMASISPGAHQYIRYPTDKRRTRTCRTLKKHSPCISHVLPYRPPFPPRSYRYRLEKDQ

SEQ ID NO: 85219 - protein, 81 aa, Gossypium hirsutum
  Clone ID: LIB3166-010-P1-K1-H11.pep
KRKGKTYFLLCIVALDLCRISWIYYNHADSYSLHLLSPRVFVPYSFTFLLEVLLSSYHFKFLLFFGVSYFVLFFFFLLVSL

SEQ ID NO: 85220 - protein, 143 aa, Gossypium hirsutum
  unsure (1)..(143): unsure at all Xaa locations
  Clone ID: LIB3166-010-P1-K1-H4.pep
HASDFSVYDKYLNGLERVIKRMKSQSESSLLSAVRQSRGEKILEVDGTVTTQPVLEHVGLSTWPGRLILTDHALYFEALKVVSYDKPKRYDLSNDLKQIVKPELTGPWGTRLFDKAVLYKSIFISEPVVIEXPELKGHTRRDY

SEQ ID NO: 85221 - protein, 116 aa, Gossypium hirsutum
  Clone ID: LIB3166-010-P1-K1-H6.pep
DASAHASEKKGKAGGREPAEFVGFHPFVIGASKKTTFYLSFDRRYRKKTGKMKGSGPLVATVLVASTVALTSSSSAGVQHVSFSPTFFNQESQNSASRNRTASEREKFRATVLMGL

SEQ ID NO: 85222 - protein, 81 aa, Gossypium hirsutum
  Clone ID: LIB3166-011-P1-K1-A2.pep
PHIRPCLWPNGSDGSIAHRRSLDSRLQHVWPHASECLGFLEGAGRLTLQERASVFLGNLVCICSMLTVHKITLLINCFDAL

SEQ ID NO: 85223 - protein, 48 aa, Gossypium hirsutum
  Clone ID: LIB3166-011-P1-K1-A7.pep
VNSGALLGLHCAINRFLHHSQNYKTTETRFQTQCTVFSNTKQVQIHFE

SEQ ID NO: 85224 - protein, 126 aa, Gossypium hirsutum
  unsure (1)..(126): unsure at all Xaa locations
  Clone ID: LIB3166-011-P1-K1-A8.pep
SLNWSYSQVPHLVLTDALFASIGRSDGAEVNRCLQYLQDVSCYVNLKQCLVIAGSLWVASXIGSWRNYLDRLYIGYDAEHTLPDLYERYDEQIDSYVHRMLAQFQNYYKELYPEIVSMMPIRTFKL

SEQ ID NO: 85225 - protein, 84 aa, Gossypium hirsutum
  Clone ID: LIB3166-011-P1-K1-B2.pep
LRGITLITHTQTPATLRTVRETLQNPRMDANRTCSKLQGSYVQLGGRPPSPHDNNCLHRGETKTSCERTIKFSSMISKLSTLCG

SEQ ID NO: 85226 - protein, 39 aa, Gossypium hirsutum
  Clone ID: LIB3166-011-P1-K1-B3.pep
PSYYISRFQIFFKNSLPKNAVVGEEDHPKNLNRQFIQGY

SEQ ID NO: 85227 - protein, 103 aa, Gossypium hirsutum
  Clone ID: LIB3166-011-P1-K1-B8.pep
MDASQKTILVIGGAGFIGTHTVVQLLNECFKVLIINNLNNSVIEVVDQVKELVVPELSKKLQLNLGDSRNRDDLVKLFSKTKYCQLNIYYNIFWFIGCITMVH

SEQ ID NO: 85228 - protein, 51 aa, Gossypium hirsutum
  Clone ID: LIB3166-011-P1-K1-C6.pep
QTSDRKKNCFIFFSCKRWKKLYACIFALFTNFYTLTVFVCLPPKFFSSRRI

SEQ ID NO: 85229 - protein, 93 aa, Gossypium hirsutum
  Clone ID: LIB3166-011-P1-K1-C7.pep
RGPLLALQSASYQRLKLLNICPHLQDFNHLCCKSSTALILPPPNSDSYLCVKSFFRTRNSIMASSGVSSLIVTIYVKWSALKRLCWAFPPTRP

SEQ ID NO: 85230 - protein, 132 aa, Gossypium hirsutum
  unsure (1)..(132): unsure at all Xaa locations
  Clone ID: LIB3166-011-P1-K1-D10.pep
AYILALVFVFFSIVMLWNRXGNKGKPLEAFRIIAPPNRNAVEQLLTLQEVISQYEALIQTANVILLKIRAILFAVLPQATDRVALSLVFLAVVLAXVPLRFLILFVFAEAFTRELPYRRDSNDRWLRRLREW

SEQ ID NO: 85231 - protein, 76 aa, Gossypium hirsutum
  Clone ID: LIB3166-011-P1-K1-D11.pep
MHAKTDSEVTSLAPSSPTRSPRRPVYYVQSPSRDSHDGEKTTTSFHSTPVLSPMGSPPHSHASVDHHSRESSSSRF

SEQ ID NO: 85232 - protein, 45 aa, Gossypium hirsutum
  Clone ID: LIB3166-011-P1-K1-D8.pep
TRSRVLAKPPPLFTRGRPPVDCIPLNRLIPELIPLIIYPSFLSVR

SEQ ID NO: 85233 - protein, 111 aa, Gossypium hirsutum
  Clone ID: LIB3166-011-P1-K1-E4.pep
FSVKFSGFRYYMMIGVGLTLPAQNLNVFNTRRASFKSQKSPLNPTSRRHVSSASSTELTRETLSNLEKLLQKSNQPDPERVVKTSTSNGSIETKGKGLLEGLNLSRIWPEM

SEQ ID NO: 85234 - protein, 117 aa, Gossypium hirsutum
  Clone ID: LIB3166-011-P1-K1-E5.pep
PSGEASGFSTSFWRVVPLRDLLKRCGIYSKKHGALNVCFERAEHLPRGGGSKYGTSIKKEFAMDPTWDIILAYMQNGELLTPDHGFPVRIIIPGFIGRRMVKWVKPIIGTTKESDNF

SEQ ID NO: 85235 - protein, 105 aa, Gossypium hirsutum
  Clone ID: LIB3166-011-P1-K1-E7.pep
MSVLNMKGRELEDPATKAYMKAMAARALWHLAKGNSSICRSITESRALLCFAVLLEKGSDDVQFNSAMALMEITAVAERYTDLRWSAFKPNSHAEACSLSLIEDH

SEQ ID NO: 85236 - protein, 120 aa, Gossypium hirsutum
  Clone ID: LIB3166-011-P1-K1-F10.pep
MEIGLLSFPSPKPPLSQTLTLKPTAPFLRPSKPNLPSFRPSPFPSIRAAISRTKKEETVETVKTQLENCYLLAAVEYKGFTVQQFQDLRRSLPETSKLLVAKNTLVLKAIEGTKWEALKP

SEQ ID NO: 85237 - protein, 81 aa, Gossypium hirsutum
  Clone ID: LIB3166-011-P1-K1-F2.pep
YDLVLIGEQVIYFYSDLLLLEREKVKIGSNNLGLSLIQTMFSVDVEPFTEKKKKKIPPKKKKTQPNVMLYSHYFTFPHFFS

SEQ ID NO: 85238 - protein, 138 aa, Gossypium hirsutum
  Clone ID: LIB3166-011-P1-K1-F3.pep
IVLTALSETDRYYDAIAVQRAVTAAKKDSAFSSPKTQSYVSEVITTSPSVNHGVKLPIVPQLHKVPRALPLRVAAMFKVLVPTLFEKQGAQLLAVAFLVVSRTWISDRIASLNGTTVKHVLEQNKAALIRLIGISVLQ

SEQ ID NO: 85239 - protein, 61 aa, Gossypium hirsutum
  Clone ID: LIB3166-011-P1-K1-G10.pep
PYVLIGYSARLAASVALSDCDGPCCCCCCRSRCKMPWNLRKEKSDLSLLQAITGVKMELRD

SEQ ID NO: 85240 - protein, 136 aa, Gossypium hirsutum
  Clone ID: LIB3166-011-P1-K1-G11.pep
VDFCCGSNDFSFLLKEKLEKVGKSCLFKNYDLFQPKNDFSFEKRDWMSVKPNELTDGSRLIMGLNPPFGVKASRANKFINKALTFRPKLIILIVPRETRRLDEKDAYDLIWEDDRVLSGKSFYLPGSVDVEDKHLE

SEQ ID NO: 85241 - protein, 79 aa, Gossypium hirsutum
  Clone ID: LIB3166-011-P1-K1-H12.pep
HCENTSLNNLSVLLLDSLLKNLKLSHFVFQLLFHGTAAKTWLLWGQIQSFFSSLGLDLEGIESKSLKCWSKLTPTRPRA

SEQ ID NO: 85242 - protein, 67 aa, Gossypium hirsutum
  Clone ID: LIB3166-011-P1-K1-H3.pep
EHRRNHRPVELHTDPLGDARAKVQEEISREFAAIMAAGTLRASEAAALATRKVMHKYGHLNVVMPQS

SEQ ID NO: 85243 - protein, 70 aa, Gossypium hirsutum
  Clone ID: LIB3166-012-P1-K1-A11.pep
CISPNHPFFFFAIIQLCNVGSVKTCIKSIPMTHPLHLIMTYAFTENKHVFVQLINAMDPYHSHHKAYTLS

SEQ ID NO: 85244 - protein, 43 aa, Gossypium hirsutum
  Clone ID: LIB3166-012-P1-K1-A12.pep
FLCRSGCFGNSGRSACLCFQGAGNYNCKPPCQALHSFILTSYI

SEQ ID NO: 85245 - protein, 133 aa, Gossypium hirsutum
  unsure (1)..(133): unsure at all Xaa locations
  Clone ID: LIB3166-012-P1-K1-A4.pep
GRPNPSVNLKRTWKNLLLVARAIVAMGGLVDVSVISSRNTGQRAVLKFAAATGATPIAGRFTPGTFTNQIQAAFREPRLLVVTDPRADHQPLTEASYVNLPTIAXCNTDSPLRYVDIAIPCNNKGAHSVGLMW

SEQ ID NO: 85246 - protein, 126 aa, Gossypium hirsutum
  Clone ID: LIB3166-012-P1-K1-A6.pep
MDPNQGSPEDVFKVYCNLERGETCISANPASVPRKTWWASKSPDNKPVWYGLDMNRGSQFTYGDYKSPNTAITQMTFLRLLSKEASQNLTYICKNTVGYMDDQTKNLKKAVVLKGSNDLEIKGEGN

SEQ ID NO: 85247 - protein, 103 aa, Gossypium hirsutum
  unsure (1)..(103): unsure at all Xaa locations
  Clone ID: LIB3166-012-P1-K1-A8.pep
PTRSFNYFLSLKIFIIIAPKKARESSISKGNFKFFFNFEQTXIQEFKEAFNFIYQNKDCIIYKEDLSDNFSAIGPFNFNNXELHPLIKETIRPINFTFFLTIF

SEQ ID NO: 85248 - protein, 58 aa, Gossypium hirsutum
  Clone ID: LIB3166-012-P1-K1-A9.pep
VVGSPLSLLLWSQVLSFSSTYSFSKHRPAGCFETSLLNGDSWLPCSASGYSVLLSIIV

SEQ ID NO: 85249 - protein, 60 aa, Gossypium hirsutum
  Clone ID: LIB3166-012-P1-K1-B1.pep
PGPAQTHACGVPNRLNQMVFLAGLCLSTSCSVSPEKGGTTVISVSVFLHYVYNISDAECS

SEQ ID NO: 85250 - protein, 130 aa, Gossypium hirsutum
  Clone ID: LIB3166-012-P1-K1-B10.pep
QSRRGFLLQQFLNGTRCSTGPTPAGRFEPEPFATSSLRRSSVASAPRPAAIMTTASPSQVRQNYHQDSEAAINRQINLELYASYVYLSMSCYFDRDDVALKNFAKYFLHQSHEEREHAEKLMKLQNQRGG

SEQ ID NO: 85251 - protein, 95 aa, Gossypium hirsutum
  Clone ID: LIB3166-012-P1-K1-B11.pep
AKVVKGHIFLCPVPLSPHSIPIFLQRGRILRNIYGRQNVFFLCSQGVIRSIRFYRLCSESNPFFPREATSREKTIPPPHSGARNTQGSRDMVKSK

SEQ ID NO: 85252 - protein, 99 aa, Gossypium hirsutum
  unsure (1)..(99): unsure at all Xaa locations
  Clone ID: LIB3166-012-P1-K1-B2.pep
CSLAHTRCDYKWARSYAEQMFQGXILCSAIVGFIYGYVAEQFGWTVYIDMAGFAFSCLLTLPPWPIYRRHPLKWLPVQDSGTEDKKSGDRKIKRHAKNN

SEQ ID NO: 85253 - protein, 77 aa, Gossypium hirsutum
  Clone ID: LIB3166-012-P1-K1-B5.pep
QSYFLFKLLPQWQVHCTNTENQHLVLHCPPPWLMEAHLTKQHLCSPKPIHEVYTYLSLSSNYLPYSLYIESAYISCI

SEQ ID NO: 85254 - protein, 76 aa, Gossypium hirsutum
  Clone ID: LIB3166-012-P1-K1-B7.pep
PSNPGGPTRPVAYMDQQTGNLKKSLLLQGWNEIELRGEGNSRFTYSTLVDGCTSHTGTWGKTVIEYKTTKTSRLPI

SEQ ID NO: 85255 - protein, 114 aa, Gossypium hirsutum
  Clone ID: LIB3166-012-P1-K1-C1.pep
EADSQATRAILNSLFLLAILAALSVAALCYESHECMDCYEVSPFTNRRNANTFISTQQRWHAKAHERVRELNKPAQESNTEACDDYKLCERYALIYGYNAVYNRYFRQRAGSNI

SEQ ID NO: 85256 - protein, 138 aa, Gossypium hirsutum
  Clone ID: LIB3166-012-P1-K1-C10.pep
FAMRPFFGYNFGHYLEHWVSMEGRKGARLPRIFHVNWFRRDEAGRFLWPGFGENARVLDWICRRLGGEDSARETPIGLVPKEGALDLSGLRAIDTSQLFSIPKDFWEQEVRDIRSYLTEQVNQDLPKEVLAELEALEE

SEQ ID NO: 85257 - protein, 47 aa, Gossypium hirsutum
  Clone ID: LIB3166-012-P1-K1-C11.pep
AVPSHRHNYTANSYYSIAFILNHLSEPSLKEFKRQFSLNTKINFYFV

SEQ ID NO: 85258 - protein, 61 aa, Gossypium hirsutum
  Clone ID: LIB3166-012-P1-K1-C2.pep
LLSYFSNVWLFCSHGSALDVHLGYPECCLWAQLWQVSFISVLDTRHESCLLSPYSPSTSCS

SEQ ID NO: 85259 - protein, 120 aa, Gossypium hirsutum
  unsure (1)..(120): unsure at all Xaa locations
  Clone ID: LIB3166-012-P1-K1-C6.pep
NNSSYEEPLSPIXPANXSSQRRQGQRDLXLSDMHMRDLVGMGHPLLPXSEPTXWNVEDVYEFIRSLPGCQEIAEEFRAQEIDGQALLLLKEDHLMSAMNIKLGPALKIYARISMLKDLLE

SEQ ID NO: 85260 - protein, 97 aa, Gossypium hirsutum
  Clone ID: LIB3166-012-P1-K1-C7.pep
MQISAALLCVLLTAAAFTVHVWAQPDGTNSSTCCYVKKQKIPKRNLKSYRKITSSRCPWEAVIFKTKKGHEVCAEAHQKWVEEAIAYLDMKTSTPKP

SEQ ID NO: 85261 - protein, 49 aa, Gossypium hirsutum
  Clone ID: LIB3166-012-P1-K1-C8.pep
IYKTFESIIHLTRIWQKLARGLFIWSYQIYYLNKYILIILRGKTCHFSS

SEQ ID NO: 85262 - protein, 40 aa, Gossypium hirsutum
  Clone ID: LIB3166-012-P1-K1-D1.pep
FNQQNHPKITHYFLITFHQLKHYLNFKTYILTNLTKPTNI

SEQ ID NO: 85263 - protein, 80 aa, Gossypium hirsutum
  Clone ID: LIB3166-012-P1-K1-E1.pep
KIYFSNHFKNFNFQSYKNPNERLISSIKKTHTKPHLYKNKPKINTYKSFNLHFNTNINSSSTFTAIKVAHHLPLYYFYLI

SEQ ID NO: 85264 - protein, 77 aa, Gossypium hirsutum
  unsure (1)..(77): unsure at all Xaa locations
  Clone ID: LIB3166-012-P1-K1-E10.pep
AQQPTEGGRPGGGTLPAXPRAWSGQGRTCCSRPPGGSSSEQPNARVLNLGQLELYWNGLVTTARIIHVDVLARSARS

SEQ ID NO: 85265 - protein, 135 aa, Gossypium hirsutum
  unsure (1)..(135): unsure at all Xaa locations
  Clone ID: LIB3166-012-P1-K1-E11.pep
FELTGIPPAPFGVPQIEVACDIDANGILNVSAVDKSTGKENKITITNDKGRLSKEDIERMVQEAEKYKAEDEKQRDKVSSKNSLESYAFNMKATVEDEKLQGKINXDEDIQKILDKCNEIISWLDKNQTAEKGRF

SEQ ID NO: 85266 - protein, 113 aa, Gossypium hirsutum
  Clone ID: LIB3166-012-P1-K1-E12.pep
KSLGKYGPVSVADTTGSGAGDAKDDDDIDLFGSDDEEESEDAKRLREERLAQYESKKAKKPAVVAKSSILLDVKPWDDETDMTKLEECVRSIQADGLVWGSSKLVPVGYGIKK

SEQ ID NO: 85267 - protein, 61 aa, Gossypium hirsutum
  Clone ID: LIB3166-012-P1-K1-E3.pep
PVAPFLFSFNFLKFLLRDFFFGFFCFSGLLPILVFFFYNNGDTVLRNETNVTSSSENYRVG

SEQ ID NO: 85268 - protein, 64 aa, Gossypium hirsutum
  Clone ID: LIB3166-012-P1-K1-E4.pep
PFRRKQSWSSLQMPNSPSKPVGGGWLPMVLNLPRSPNKDCRLLSQQQNLIFSHLFKPPLFPSQS

SEQ ID NO: 85269 - protein, 25 aa, Gossypium hirsutum
  Clone ID: LIB3166-012-P1-K1-E5.pep
LCVQICLTIRYALSPFQIPKSIGIL

SEQ ID NO: 85270 - protein, 53 aa, Gossypium hirsutum
  unsure (1)..(53): unsure at all Xaa locations
  Clone ID: LIB3166-012-P1-K1-E6.pep
GFWHSPECEFVRHCIDKSQERVEGKVQVSVFKGQVXILGRESPLSLYNEELVS

SEQ ID NO: 85271 - protein, 53 aa, Gossypium hirsutum
  Clone ID: LIB3166-012-P1-K1-E7.pep
SNTILEARLTGTSGKRGTLTAQSQFKSTRWNLLWLATDSNSAPTNALHTAYLV

SEQ ID NO: 85272 - protein, 89 aa, Gossypium hirsutum
  Clone ID: LIB3166-012-P1-K1-E8.pep
EPLGRGLILHSWHRGAIQCVLSLQCAEGKYVLGSKVEKQRSQASGNSGYKALDIRVECINLLDTKGSWSLKLRPSKYPFPVHTRQHSCC

SEQ ID NO: 85273 - protein, 117 aa, Gossypium hirsutum
  Clone ID: LIB3166-012-P1-K1-E9.pep
NAEQAEEAPSLPQCNGREGGSSCEQMCDGPDPQDELSSSLRRDTGAQQPTSEERCTCVMCSPTYVPEDLEARMGSSQGAMDTGRKIPAGKSKKRRRKKKGYNWSKPKRRKPMIVPRK

SEQ ID NO: 85274 - protein, 77 aa, Gossypium hirsutum
  Clone ID: LIB3166-012-P1-K1-F1.pep
ALFINYTSTMLNKQTTLSCEHVKLYVKCYKETNQLTKACLAIKNIRFLKSIMVQNGEGNNSIFVDTLPGSRAHHLID

SEQ ID NO: 85275 - protein, 139 aa, Gossypium hirsutum
  unsure (1)..(139): unsure at all Xaa locations
  Clone ID: LIB3166-012-P1-K1-F10.pep
GTTADAMCPILEFEADRRACIITINSFGTELSKEDRAKLFPHCGRLYPEGLAQLARADDYEQVKNVADYYPEYKLLFEGAGSNPGDKTLEDRFFEHEVKLNKLAFLNQFHFGVFYAFVKLKEQECRNIVWIAECXAQRH

SEQ ID NO: 85276 - protein, 137 aa, Gossypium hirsutum
  unsure (1)..(137): unsure at all Xaa locations
  Clone ID: LIB3166-012-P1-K1-F11.pep
RIPTLREAVTXCLCHNLTVVFDVKGHADMASAALKNIYMEFPQLYNNSMVCSFLPEVIYKMRQTDQKVITALTHRPWSLSHTGDGKPRYSVFWKQSVFVVLDILLDWSMHNVLWYLCGISAFLMQKDFVSPDYLEEV

SEQ ID NO: 85277 - protein, 40 aa, Gossypium hirsutum
  Clone ID: LIB3166-012-P1-K1-F2.pep
RVPLAKGQGVVMDNVGCSTKVGRRAGFKLATVSIMRDKSS

SEQ ID NO: 85278 - protein, 92 aa, Gossypium hirsutum
  unsure (1)..(92): unsure at all Xaa locations
  Clone ID: LIB3166-012-P1-K1-F3.pep
MLLSVPLLVGLLGLAAADPAIYFKEQFLDGDAWTNRWVESKHKSDYGKFVLSXSGKFYGGPGRRIKGLQTSQDARFYALSARFEPFXNKGQT

SEQ ID NO: 85279 - protein, 86 aa, Gossypium hirsutum
  Clone ID: LIB3166-012-P1-K1-F4.pep
TLPVEPPATIQIFVNTLTGKTIRLGVEPWATIKNVKPKIQNKEGFLPDQQSLIFVVKKLENGRTLFNYKIKKKSILNFGLKLRVAP

SEQ ID NO: 85280 - protein, 39 aa, Gossypium hirsutum
  Clone ID: LIB3166-012-P1-K1-F5.pep
CSVTTFILNSFTFSKFQVFRSPPRWFPFVMLRNILHLFW

SEQ ID NO: 85281 - protein, 45 aa, Gossypium hirsutum
  unsure (1)..(45): unsure at all Xaa locations
  Clone ID: LIB3166-012-P1-K1-F6.pep
NPSVLLWVLLXLLSTAWGQDGDYGYHPYHQYQNYSDNGWVNLNRQ

SEQ ID NO: 85282 - protein, 76 aa, Gossypium hirsutum
  unsure (1)..(76): unsure at all Xaa locations
  Clone ID: LIB3166-012-P1-K1-F7.pep
PLLFGRSVVWFTRIPSHILVLKYKSPSTGCNLARTLNVEVSCVGSEFMSFDKIHLVLSTGSTXRLNQPQKGDIQEK

SEQ ID NO: 85283 - protein, 80 aa, Gossypium hirsutum
  Clone ID: LIB3166-012-P1-K1-F8.pep
GDGTHLCTCLQSGSQITSFFFFFFFFGVFFSELGTEPRALRFLGKRSTTELNPQPLSFLKQASCCNRTPGFSKSSTNTSS

SEQ ID NO: 85284 - protein, 113 aa, Gossypium hirsutum
  Clone ID: LIB3166-012-P1-K1-F9.pep
RSVKGLVAVITGGASGLGLSTAKRLVGQGATAVLLDVPNSEGETEAKKLGGNCIFAPANVTSEKEVQAALTLAKEKFGRIDVAVNCAGIAVAIKTYHEKKNQVHTLEDFQRVI

SEQ ID NO: 85285 - protein, 72 aa, Gossypium hirsutum
  Clone ID: LIB3166-012-P1-K1-G10.pep
HCKRFGEGLREGTYLDHIAHCSDQSFSFAHSLRCRCIENTEGFSFQFCFFFLFLKGRNGKEKVFFRGFCFLI

SEQ ID NO: 85286 - protein, 58 aa, Gossypium hirsutum
  Clone ID: LIB3166-012-P1-K1-G11.pep
KKKKLIIKKKKKKRNGLILKTCNHPKLIIPYITLLILNNLSIDNTNTTCHYSTHTPHT

SEQ ID NO: 85287 - protein, 87 aa, Gossypium hirsutum
  Clone ID: LIB3166-012-P1-K1-G12.pep
SLAIGTRVFRGVYSGKQEHRLPARHLLHHRPCFRPAMKALLSPDPGLLPHGSRLGSEVSPLSPFPGTCFTELARANQCTQPLYACRC

SEQ ID NO: 85288 - protein, 31 aa, Gossypium hirsutum
  Clone ID: LIB3166-012-P1-K1-G3.pep
SLKIIYKSFAYVGSSAIYYQILPCHSCRKIP

SEQ ID NO: 85289 - protein, 101 aa, Gossypium hirsutum
  unsure (1)..(101): unsure at all Xaa locations
  Clone ID: LIB3166-012-P1-K1-G4.pep
SCPAANEGWVLSKGVFPTCHLFLTILPERNLLPGLNSLNVSVPPGILFHSISSQKKGFLVQKKGQLFQXPENPYLRXEGLKEAQYPGLPSWSEKQGKCGLT

SEQ ID NO: 85290 - protein, 73 aa, Gossypium hirsutum
  Clone ID: LIB3166-012-P1-K1-G5.pep
VGFLSAALLSEKCLTCPQESKGTKGTWNEWQSFFYGTGFSGPTAGCGHCKKMNYQLATKATGKDKFRTGYSVF

SEQ ID NO: 85291 - protein, 74 aa, Gossypium hirsutum
  Clone ID: LIB3166-012-P1-K1-G7.pep
CSARFWPKLAFRRCPTCPQESKGTKGTWNEWQGFFFGTGFSGPPAGCGHCKKMNYKLATKATGRDTSSTGYRVF

SEQ ID NO: 85292 - protein, 42 aa, Gossypium hirsutum
  Clone ID: LIB3166-012-P1-K1-G9.pep
ENTEFLVRKYFRNNLANSILSNKITHSMCVSFFLNHIDHGFY

SEQ ID NO: 85293 - protein, 52 aa, Gossypium hirsutum
  Clone ID: LIB3166-012-P1-K1-H1.pep
SAKDKLSCVGFFSIVSFFLTFLLYYYRSQILTKVGLVRGMPVCTKHGAVIPS

SEQ ID NO: 85294 - protein, 56 aa, Gossypium hirsutum
  Clone ID: LIB3166-012-P1-K1-H10.pep
ERYYIANDFINNLKLTYKFIRCKPKDFFFKERERKEKKSFYSFGSHYQKYYSAREI

SEQ ID NO: 85295 - protein, 63 aa, Gossypium hirsutum
  unsure (1)..(63): unsure at all Xaa locations
  Clone ID: LIB3166-012-P1-K1-H12.pep
MNGXPICSALPHIPYHKLADLHYLSRGASGTVSSARHADCPLRVAVKHLHIHTPVFDSERNDI

SEQ ID NO: 85296 - protein, 53 aa, Gossypium hirsutum
  Clone ID: LIB3166-012-P1-K1-H4.pep
QWFGRAWPSGTRMWLCRRLTGSPPTPRQGSRTHQWGSECPVSCGRLGRPCHSG

SEQ ID NO: 85297 - protein, 57 aa, Gossypium hirsutum
  unsure (1)..(57): unsure at all Xaa locations
  Clone ID: LIB3166-012-P1-K1-H5.pep
TNPCETGKTCYQGEYVNSPASLFRSTSKQRHKKNLKPQLPXSWFTELELSXPQGTAP

SEQ ID NO: 85298 - protein, 110 aa, Gossypium hirsutum
  unsure (1)..(110): unsure at all Xaa locations
  Clone ID: LIB3166-012-P1-K1-H6.pep
HGGTGTYLVLYVSGPIFWAALAFIVAKQVLXXRKVVVVRCEGINISGNFYRNKLKYLAFLRKRMNTNPSRGPYHFRAPSRIFWRTVRGMLPHKTKXGQAALERLKVLDGI

SEQ ID NO: 85299 - protein, 57 aa, Gossypium hirsutum
  unsure (1)..(57): unsure at all Xaa locations
  Clone ID: LIB3166-012-P1-K1-H7.pep
EMPSERLCRSIRQRAACXSSMTSCRSTAARGARCEGVGLWIPELSPRVRASHEAGPA

SEQ ID NO: 85300 - protein, 93 aa, Gossypium hirsutum
  Clone ID: LIB3166-012-P1-K1-H8.pep
MLMLKKNRIAIDGLLFKEGVMVAKKDVHMPKHPELADKNVPNLHVMKAMQSLKSRGYVKEQFAWRHFYWYLTNEGIQYLRDYLHLPPEIVPVT

SEQ ID NO: 85301 - protein, 87 aa, Gossypium hirsutum
  unsure (1)..(87): unsure at all Xaa locations
  Clone ID: LIB3166-013-P1-K1-A12.pep
NPKVLYDMTIGGHPTSHIVMDLFSDCTNRTAENFRALCTGXKSDSRSRKLLHYKGYCLHRVIHNFMCQGGDLTDRNGTGGEYIYGSK

SEQ ID NO: 85302 - protein, 144 aa, Gossypium hirsutum
  unsure (1)..(144): unsure at all Xaa locations
  Clone ID: LIB3166-013-P1-K1-A4.pep
HTLRRLLQSWCMLNASLGIERVPTPKPPISKAQIVKLLIDAKSPQQQIKCLDTLKSIATENATNKRCMESSGAVEFLASIVCNYDPTATEESLDYEFDSIKPIDEAXSILYSLQLSEASLKNLMGKNGDFILSLTXVMQRGSYE

SEQ ID NO: 85303 - protein, 129 aa, Gossypium hirsutum
  Clone ID: LIB3166-013-P1-K1-A5.pep
PTRPRIFENHVVFGELIQSKWALQSDPNAQKSMSTNLNLDSEASQVTGGYSIGFSLTVLQSECQQLICEILRATPEAASADALQTARLASKVPTNEKRDGSEDTLTFAFRFTDATVSVPNQGVDLIRQG

SEQ ID NO: 85304 - protein, 62 aa, Gossypium hirsutum
  Clone ID: LIB3166-013-P1-K1-A6.pep
LSLLFFFSSSHIFKIGNRGSKLKHPPSSHFSPIIIFIHPLFSLCVYAFVLLIVFSVLPKWRL

SEQ ID NO: 85305 - protein, 56 aa, Gossypium hirsutum
  unsure (1)..(56): unsure at all Xaa locations
  Clone ID: LIB3166-013-P1-K1-A8.pep
AVLFFFFFFFFFFFXTKCRYHREHDHQRLKDTSRTVTCPAKTGVTPKLLYSFDLVF

SEQ ID NO: 85306 - protein, 39 aa, Gossypium hirsutum
  Clone ID: LIB3166-013-P1-K1-B3.pep
ISRSYNFFFFFTYIIHYMSVLNFNPKIKEKKKKQASPKR

SEQ ID NO: 85307 - protein, 74 aa, Gossypium hirsutum
  Clone ID: LIB3166-013-P1-K1-C10.pep
KTSEFVKINFDGANDATHQQSALGIVARNEEGVVLLSCSEIHHGVTFAFAAEAIACQKAVQTGVEQEWPKIIIE

SEQ ID NO: 85308 - protein, 62 aa, Gossypium hirsutum
  Clone ID: LIB3166-013-P1-K1-C12.pep
VNPFSSLASNDLEQCQFSSSECFSELLGTDNLLCISVFVRTFENKMFVVRANMVYEKVLSKS

SEQ ID NO: 85309 - protein, 118 aa, Gossypium hirsutum
  unsure (1)..(118): unsure at all Xaa locations
  Clone ID: LIB3166-013-P1-K1-C3.pep
LNCPDLKGIFGVLLEAKAIARRIVVKAPITHLHFILSPFLIFFTSDSTIYHLFDEVKEKGSRAPKLRNPLFCVLQFNRKQEKMVXILILLEYSRDEGDGISCFGLCYLQPSRFGVRRR

SEQ ID NO: 85310 - protein, 98 aa, Gossypium hirsutum
  Clone ID: LIB3166-013-P1-K1-C9.pep
MDIPSQTCDVPFSKSYSMLAERVEPSSSSEGGIGGQRAVHSDEEVLLLATNKPKKRAGRRVFKETRHPVFRGVRRRNNDKWVCELREPNKKTRNWLGT

SEQ ID NO: 85311 - protein, 102 aa, Gossypium hirsutum
  Clone ID: LIB3166-013-P1-K1-D1.pep
FDNFLPLNFSPEYVMCSTSSGFTAPLQSLLESYKSIFSCMIQWWQKARRAMDCFQSVSRVKGSLCQQLLIFIFWLSSFQDVATLHDPSYIPSTSELANPPTT

SEQ ID NO: 85312 - protein, 75 aa, Gossypium hirsutum
  Clone ID: LIB3166-013-P1-K1-D7.pep
CMNHRVLVLLEGFLPQKVIVLLIPTTSLLPVSIIGFSLPMGFQYPPLPPPSLPLLLQKYLFSFTTHETQNTRTRG

SEQ ID NO: 85313 - protein, 36 aa, Gossypium hirsutum
  Clone ID: LIB3166-013-P1-K1-D9.pep
LVQCRYTMGRFCLLSAHFSTDSVDNDNCFHRIRLVR

SEQ ID NO: 85314 - protein, 72 aa, Gossypium hirsutum
  Clone ID: LIB3166-013-P1-K1-E2.pep
HFYGQIFMHAFFENLSNQTGGQETSSVSNEIPSLSTRQNGYACISARAVLLRGIYTERTRKDVNCMTCELMT

SEQ ID NO: 85315 - protein, 143 aa, Gossypium hirsutum
  unsure (1)..(143): unsure at all Xaa locations
  Clone ID: LIB3166-013-P1-K1-E9.pep
LDSIDRKSNLFNAFLKLSNGIIGGTEKASLMEKAEQNVSGSRFPVLRSKKYIFVIAVDCDSVSDIPKIIKTIMDVAGKENSIGLILSTSLSISEVHSLLISGSISPLDFDALICNSGGDLYYPSTSSEDGTXLPFTVDLDYQS

SEQ ID NO: 85316 - protein, 68 aa, Gossypium hirsutum
  Clone ID: LIB3166-013-P1-K1-F10.pep
VKSKPQDKEGIPPDQQRIIIAGKQLEDGRTLADYNIQKESTLHLVLRLRGGIQLFVRALDFEGDGLAG

SEQ ID NO: 85317 - protein, 143 aa, Gossypium hirsutum
  Clone ID: LIB3166-013-P1-K1-F11.pep
PRVRLSSINCFKSWGTNARGLVNGMQQSLPVTTNVVESLPSLEVKLSSQEASPVKEPLLTSDSHALTVEQPPECAKKIGEIVPVVHPVNDVNRGTLEGHEITSARTSKTDTPINECVQPTGAIDELQVGREKRHDQPSVVREV

SEQ ID NO: 85318 - protein, 112 aa, Gossypium hirsutum
  Clone ID: LIB3166-013-P1-K1-F3.pep
SLDQSDLRCKPGWKDIFRMNQNELEAEIRKVSRDSTLDPRRKAYLIQNLMTSRWIAAQQKSPQTSAIECSNDEDLYGCSPSFRDLEKQEFGCEHYKRNCKLRAACCGKLYTL

SEQ ID NO: 85319 - protein, 108 aa, Gossypium hirsutum
  Clone ID: LIB3166-013-P1-K1-G2.pep
SANPSANPSGRTFLRYWTEGGCRRNVPVGGGSRKNKRALSSSSPPRPSASSKKLGDLTTPPTPKNPKIHEGQDLNLAYPPPTEDYNSLPKFVEVPYSHKSDHPNSTSS

SEQ ID NO: 85320 - protein, 109 aa, Gossypium hirsutum
  Clone ID: LIB3166-013-P1-K1-G6.pep
SNLGSEKRLLRTVLDIPFAFKRVETMLYRANFDTEVQYLRKSIQTLEEASDELKNSMLFLKLLEAVLRTGNRMNVGTNRGDAKAFKLDTLLKLVDIKGTDWKTTLLHFV

SEQ ID NO: 85321 - protein, 56 aa, Gossypium hirsutum
  Clone ID: LIB3166-013-P1-K1-H1.pep
PSQTPGRQVRGLEVERKRKMEVPTNRQDSSVSLNIKEGNFVFPTPTLTQTPSINKI

SEQ ID NO: 85322 - protein, 68 aa, Gossypium hirsutum
  Clone ID: LIB3166-013-P1-K1-H2.pep
PSATPWPAPWLEIVLLVPGLLRGGLCLFPSGWLPPGPIPDPVWPMIQRLQRREGGGIQMAWLMFPGGL

SEQ ID NO: 85323 - protein, 58 aa, Gossypium hirsutum
  Clone ID: LIB3166-013-P1-K1-H3.pep
SGVDSMARPKPFRGNICNNWLRSVTKRLSWLELGSPLLFHLQRRCGCFNIHGKIQNYV

SEQ ID NO: 85324 - protein, 80 aa, Gossypium hirsutum
  Clone ID: LIB3166-013-P1-K1-H4.pep
PLKNQDQHLNKASQIPFLKNWGPPLGGKQENPSVITLRNIKYINSSPKLLIAILHRNSLDRAHSYINHEKIPFRTRRSGI

SEQ ID NO: 85325 - protein, 97 aa, Gossypium hirsutum
  Clone ID: LIB3166-013-P1-K1-H8.pep
PTRPPTRPRTRGELWEENIKAELVPIPDPSLTEQYEYASEHEIKCLVIITDMGVSQTGFVKVRHLDLKKEKEVQREDLVRFLLNAIGTQFRNPSVWF

SEQ ID NO: 85326 - protein, 135 aa, Gossypium hirsutum
  Clone ID: LIB3166-014-P1-K1-A1.pep
EQEEDVPVCPTLPKIEVPGKRLDLIAVKLPCRNEGNWSRDVARLHLQLAAANLATSAKGFYPVHVLFVSKCFPIPNMFPCKELVLRKNNVGLYKPDLNVLREKLQLPTGSCELALPIGIKEPTYSGNASREAYAT

SEQ ID NO: 85327 - protein, 124 aa, Gossypium hirsutum
  unsure (1)..(124): unsure at all Xaa locations
  Clone ID: LIB3166-014-P1-K1-A10.pep
ATRTSNPTCNKSAMEMDGDGGKNGKMAGAATIDGNIVQAPLGALPRPWPPNADAYEGSQFXIKITEHFWLAGCVMAKAIQDXRLLDLPMSMAFYKLVLAQELDQHDILSFDTKLGKILHELHDT

SEQ ID NO: 85328 - protein, 72 aa, Gossypium hirsutum
  Clone ID: LIB3166-014-P1-K1-A2.pep
VNRTKNFRLKEEEGNNQSCKKGKKGTKKSSKNPKRINRTKTLRIYLFLKYQFLYFGTKKKERRKSLYFLTTN

SEQ ID NO: 85329 - protein, 55 aa, Gossypium hirsutum
  Clone ID: LIB3166-014-P1-K1-A9.pep
TIISSSHTNLKKKKQISFLASRSSFFLVLFFEYSYICRFDCFLLFDFEGTGRDGG

SEQ ID NO: 85330 - protein, 55 aa, Gossypium hirsutum
  unsure (1)..(55): unsure at all Xaa locations
  Clone ID: LIB3166-014-P1-K1-B12.pep
HAXAHAXXHAFGFLVASVKSPIKEKTKKPNSKFVKRRKVEDSKEETPPSLPREFI

SEQ ID NO: 85331 - protein, 94 aa, Gossypium hirsutum
  Clone ID: LIB3166-014-P1-K1-B8.pep
RTRGYLSNLRDVIHGSKRQADKAPRMVSPTSIASSEIINQITHQDVLTDYKCVLEIKTQSSADDDGTEGSTIEGTLRPDTPGPGDRFMEHDYNS

SEQ ID NO: 85332 - protein, 132 aa, Gossypium hirsutum
  Clone ID: LIB3166-014-P1-K1-C11.pep
TIILTEHCWAASRVLDLNRPALPKRHHIILKFLISFLLLGLAFRLFVSDSLSFFTSSVVEAPPPLVEETNVVIEPPLPATSAGDLLSVNESKTIPNEEISMSFNASNAAGECDLFVGDWIPDPSAPVYTNSS

SEQ ID NO: 85333 - protein, 132 aa, Gossypium hirsutum
  Clone ID: LIB3166-014-P1-K1-C2.pep
LNGLAIDEFKAVTKEVCKLPSVLSSALFRKIDVDWTGIVTRDAFVKYWVDGNMLTMDIATQIFEILKRPGCKYLTQVDFKPVLRELLATHPGLEFLRNTPEFQDRYAETVIYRIFYHINRSGNGRLTLRELK

SEQ ID NO: 85334 - protein, 53 aa, Gossypium hirsutum
  Clone ID: LIB3166-014-P1-K1-C5.pep
MPSKSRTAEVRATIPRRTATPPHPYSMQVHQRGPSLLYVTLMYTTGSVRDPLH

SEQ ID NO: 85335 - protein, 132 aa, Gossypium hirsutum
  Clone ID: LIB3166-014-P1-K1-D11.pep
PTLERARPILFVVCLLTSALGGMAFTIQFVREFTRLGLNQSVGGVLALAFSRELSPVVTSIVVAGRIGSAFAAELGTMQVSEQTDTLRVLGSNPVDYLVTPRVIASSLALPFLTLMCFTVGMASSALLADSV

SEQ ID NO: 85336 - protein, 80 aa, Gossypium hirsutum
  Clone ID: LIB3166-014-P1-K1-D2.pep
LCPQRAFNFIEMITHSLCHNKKQSPCPVPNDNHLFASFHQPTSLELAFFSSFFPILHALSFTPVIHIASTILVAWSVLTS

SEQ ID NO: 85337 - protein, 130 aa, Gossypium hirsutum
  Clone ID: LIB3166-014-P1-K1-F1.pep
QLFDNFLSGTIPQLLGVYSPLWVVDFSDNHLTGKIPLYLCRRANLILLNLGANNLLGDIPTGIKNCKTLVQLRLVVNRLNGSFPSELCKLVNLSAIELGQNNFTGPVPSEIGNCQKLQRLHIAENQFNSD

SEQ ID NO: 85338 - protein, 65 aa, Gossypium hirsutum
  Clone ID: LIB3166-014-P1-K1-F4.pep
TRLDVKTCYGCHKKRADVAILLAGSRVPAMKTPTSKLPAACTHCEMINTHQAIHFCQPYITNTCQ

SEQ ID NO: 85339 - protein, 55 aa, Gossypium hirsutum
  Clone ID: LIB3166-014-P1-K1-F5.pep
LNIPYNPPAVRLFVRCILQRPRSSTYPFPALLVIFTRTPPYNLLTRVIVCCKFSC

SEQ ID NO: 85340 - protein, 56 aa, Gossypium hirsutum
  Clone ID: LIB3166-014-P1-K1-F7.pep
NLLNQNMDQRKPAPLVENNRSCRNHLCFVSLQTITITQTHTQKQPPQQSCNSSNSI

SEQ ID NO: 85341 - protein, 46 aa, Gossypium hirsutum
  unsure (1)..(46): unsure at all Xaa locations
  Clone ID: LIB3166-014-P1-K1-G1.pep
IVLMYYANFLSSPEGYFHTVICNAKEFRNTTVNXNLHXHIMXDKPT

SEQ ID NO: 85342 - protein, 116 aa, Gossypium hirsutum
  Clone ID: LIB3166-014-P1-K1-G10.pep
MRASPNMEKTRKLVLFSCLLLVSFLASSSAQTCLNHSFSNRQYANCSDLPALNCFLHWTYDEAAGTVEVAFRHTGTTSSRWSAWGINPSGPTMLNTQALVAYVNSSGIPHAFTTSI

SEQ ID NO: 85343 - protein, 64 aa, Gossypium hirsutum
  Clone ID: LIB3166-014-P1-K1-G3.pep
SYYLQRKETSLALLFLHFELQIFVKRKEIKTMSKSKARNKKRGSESLLRKSDPKTRLIDDFDPD

SEQ ID NO: 85344 - protein, 76 aa, Gossypium hirsutum
  Clone ID: LIB3166-014-P1-K1-H4.pep
RKSFSLHMKQNRFISSAQKANNYNLSGNFLSPSVDLKGTLPVISEARPLSCTLLDLNRVFQYLLDQSCPRNYLHMY

SEQ ID NO: 85345 - protein, 65 aa, Gossypium hirsutum
  unsure (1)..(65): unsure at all Xaa locations
  Clone ID: LIB3166-014-P1-K1-H7.pep
DSWVEFLGLXXXWMAIHHDECLDTGAYALFYLCFLLLFQYVSIYLLKPLFTHDPFLYYTLFFFYS

SEQ ID NO: 85346 - protein, 123 aa, Gossypium hirsutum
  unsure (1)..(123): unsure at all Xaa locations
  Clone ID: LIB3166-015-P1-K1-A1.pep
PKSGXXILXLAPKXVXLLXKSXXIPNGVWTFLNLCXXXXLVIQRVQRAVQAQLXXCXLWDEEPKFTSLMLFAVFLPKQPLSIQYCKGARDXVSIRSFLHXYAHXXLHSELVFTWNQRLQTVDQ

SEQ ID NO: 85347 - protein, 92 aa, Gossypium hirsutum
  Clone ID: LIB3166-015-P1-K1-A3.pep
RPGARRPASIEPRPSVCHSRFTVMNGDQAVRASRWCPFRLPLPSDFDFGEAKEISRRIYEVKFHFPLFLFIVLDAKNKERKSKGIDQVKNKQ

SEQ ID NO: 85348 - protein, 154 aa, Gossypium hirsutum
  Clone ID: LIB3166-015-P1-K1-A7.pep
GTPGPAQPHAYAHASDCSHPLIAKHLDPDECAWAYGMNIFDLRTWRKTNIRETYHYWLKENLKSNLTMWKLGTLPPALIAFKGHIHPIDPSWHMLGLGYQSKTNIEKAKRAAVIHYNGQSKPWLQIGFEHLRPFWTKYVNYSNDFVRNCHILEL

SEQ ID NO: 85349 - protein, 113 aa, Gossypium hirsutum
  unsure (1)..(113): unsure at all Xaa locations
  Clone ID: LIB3166-015-P1-K1-A9.pep
MQQQEDPQGKPLAPVQDYPRSDMEFGGIKPKSLRREEKSSXCLVYVLTITVVLGTILLTFASIFLRTRTPAFKFRSAHVRNLKFVTKLTSAFFYFTLMTQIADENTNFGDFRL

SEQ ID NO: 85350 - protein, 108 aa, Gossypium hirsutum
  Clone ID: LIB3166-015-P1-K1-B1.pep
VGSNPQPLLFQYHNGPLLTGNISVNLIWYGNFKPSQRAIVSDFINSLASSKLVSPQPSVATWWKAMDKYYHLTNKSSSLVISLGSQILDESYSLGKSLTNEQILQLAS

SEQ ID NO: 85351 - protein, 77 aa, Gossypium hirsutum
  Clone ID: LIB3166-015-P1-K1-B11.pep
PRFQIILHTILFSENPFLKEGHLSSARVEMNHLSLNDTVTTTTTNSTNHINCYYRPPSAKISICNASTHKPIFSAAL

SEQ ID NO: 85352 - protein, 47 aa, Gossypium hirsutum
  Clone ID: LIB3166-015-P1-K1-B12.pep
TVNANTGVFIKYIHPQNIYKITQSIFLLIIISHKLNKRKPNKYHKLN

SEQ ID NO: 85353 - protein, 96 aa, Gossypium hirsutum
  unsure (1)..(96): unsure at all Xaa locations
  Clone ID: LIB3166-015-P1-K1-B2.pep
MFHRKVQHPMHGSLXFLPMKPASIQHXKLKALPKDDLTKPCKLTAFLWYKAGLTHIVSEVGVSTSMLHMSDTCXSVTIIETPPMENAGRYAYILTP

SEQ ID NO: 85354 - protein, 52 aa, Gossypium hirsutum
  Clone ID: LIB3166-015-P1-K1-B3.pep
KIIHPFFSCFHYFFSQFRSVGRWISYHCINNQSSLSIILIIIKHTAFVEPIL

SEQ ID NO: 85355 - protein, 55 aa, Gossypium hirsutum
  Clone ID: LIB3166-015-P1-K1-B6.pep
CEPFEHRVTCPHGDWLHASSSFFGDAIWQIVEPSQMPAFEGPNKQVFIRFLGRVG

SEQ ID NO: 85356 - protein, 79 aa, Gossypium hirsutum
  Clone ID: LIB3166-015-P1-K1-B7.pep
YIACSLSIGEKPQSHQGSAGYSTASACSSLYSPQYSEHHEKDLQMDSMLVSYLYKYLVPPIHVKFLLNNNFRFMKDMGL

SEQ ID NO: 85357 - protein, 92 aa, Gossypium hirsutum
  Clone ID: LIB3166-015-P1-K1-B8.pep
SFQLRFQREEPLAYLQDKAVGAFSSNKIDFFIFDSPSLLFVYHAIDQSKKHKLNRKKKMRITLWRPYLEKLLCIDLTFVHVFALFYCTDVYS

SEQ ID NO: 85358 - protein, 52 aa, Gossypium hirsutum
  Clone ID: LIB3166-015-P1-K1-C11.pep
KIRYILFPPFHSFNYTSMTRGSLSRLGVTMHPSSKTENHRSYTSTRLQPIHR

SEQ ID NO: 85359 - protein, 134 aa, Gossypium hirsutum
  unsure (1)..(134): unsure at all Xaa locations
  Clone ID: LIB3166-015-P1-K1-C12.pep
REHMNEYADVFLRTLVLAYRQLSXNECEVFNEKMTEAKNSVSADRETLIDGVAXMIERDLILLGATAVEDKLQNGVPDCIDKLAQAGIKLWVLTGDKMETAINIGYACSLLRQGMKQIIINLDTPEIQSLEKTG

SEQ ID NO: 85360 - protein, 49 aa, Gossypium hirsutum
  Clone ID: LIB3166-015-P1-K1-C3.pep
KQTSHFIKKFIIFAIKNWSLYISKKYTWHFTCYCLIILSVILVFNNTNG

SEQ ID NO: 85361 - protein, 125 aa, Gossypium hirsutum
  Clone ID: LIB3166-015-P1-K1-C4.pep
GRTHASAHASAHASGPSTTNLGTESSNGLQKLGFPGFDLPPTNMGQVSLTSILGAANEQQLPGLELGLSQEGHIGGLNPQALSQIYQQMGQARVHQQEQYQHQHQHQHQHQHQPPSKDDSQGSGQ

SEQ ID NO: 85362 - protein, 145 aa, Gossypium hirsutum
  unsure (1)..(145): unsure at all Xaa locations
  Clone ID: LIB3166-015-P1-K1-C9.pep
RILKLVINKGLLKRVYTLIVWVSSLLPLRVLLLGLSVLSRPEHFLFEALAFSAFLVLLCCAGVCIVILVYCPVXDCLALGNLNDLEARRRVILDDQNDTASLIANQTHLDESIGISPERNSDASTKRGSISFRTFIRDEPSSGPF

SEQ ID NO: 85363 - protein, 125 aa, Gossypium hirsutum
  Clone ID: LIB3166-015-P1-K1-D1.pep
EGASLSLSSKPRLPSAFSVSFRDNLRFSRPSSRPQRRFLIITASAASISSKPTVLVAEKLGEAGLTLLKEFANVDCSYSLSPEELCTKISLCDALIVRSGTKVSREVFESAGGRLKVVGRAGVGI

SEQ ID NO: 85364 - protein, 45 aa, Gossypium hirsutum
  Clone ID: LIB3166-015-P1-K1-D11.pep
LTIVALAALSRQVFYFICELDVICHFPCHRIGVCSHSFLFKHPLS

SEQ ID NO: 85365 - protein, 112 aa, Gossypium hirsutum
  Clone ID: LIB3166-015-P1-K1-D12.pep
SGPIPILSATHIYIDDTGRGGEKIFSEPYEGNSDISPYMCPTSDTEKANSSRIPYYIKIFLTIAILFTFSILGCLLCSPIKLKNNHVSVQPTKNGDLCFILDYAWKIAYKDI

SEQ ID NO: 85366 - protein, 126 aa, Gossypium hirsutum
  Clone ID: LIB3166-015-P1-K1-D6.pep
KVVSQMHSKRVYSVRDISQFQYLHETDEYGKEHGAPSSLLQDDHHPSEKGKGRRKRSMLSEEEKRERKRQHDARYRMKKNQENERLKEENIRLKNQLKEKDSETTLDLHEFMQDMDIMQGFPIDLG

SEQ ID NO: 85367 - protein, 49 aa, Gossypium hirsutum
  Clone ID: LIB3166-015-P1-K1-D7.pep
TANIKRKRPTPMKGGKAVRASGGGDEDDDYDEEWTGASVYHQCQTQLSS

SEQ ID NO: 85368 - protein, 128 aa, Gossypium hirsutum
  Clone ID: LIB3166-015-P1-K1-D9.pep
PTRPEGTCKNFICIVDESKWVKHLGGSGLAMPVEVVPFCWKFTANKLQNLFEDSGCVAKLRNDSKGKPFVTDNGNYIVDLYLKKDIGDLQVASDAILRIAGVVEHGMFLDMATTVIVAGELGITIKNK

SEQ ID NO: 85369 - protein, 110 aa, Gossypium hirsutum
  Clone ID: LIB3166-015-P1-K1-E3.pep
HASGKEGIIDFLSTYKYEMDAGRYIGEIPKEGEKKRSPAWCDRILWSGKGIKQLSYKQSDIRLSDHRPVSSMFLLDVEVLDHRKLQRALNVSTAAVHPVVSFDENGEPEF

SEQ ID NO: 85370 - protein, 59 aa, Gossypium hirsutum
  unsure (1)..(59): unsure at all Xaa locations
  Clone ID: LIB3166-015-P1-K1-F2.pep
KNFLKHFPSFITSPFRNTSLNISLNPLSNPLYFYLDFYLNAXTLKKTLKKNPLCSSPVL

SEQ ID NO: 85371 - protein, 143 aa, Gossypium hirsutum
  Clone ID: LIB3166-015-P1-K1-F3.pep
EEYGPWVPFIGTMLLFIFASNWSGALLPWKIIQLPHGELAAPTNDINTTVALALLTSVAYFYAGLSKKGLGYFSKYIQPTPILLPINILEDFTKPLSLSFRLFGNILADELVVVVLVSLLPLVVPIPVMFLGLFTSGIQALIL

SEQ ID NO: 85372 - protein, 131 aa, Gossypium hirsutum
  Clone ID: LIB3166-015-P1-K1-F7.pep
EYSKSSNGAKHKLYGVGVAAGCFLLLLIIILFAAVKFNKKGDGVLQIGNERSTNYVLPADLRIEIARFDQGLRVFTFKEIKKATWNFSSKYRINGSVYSGSFDGKILAVKIMRQNASKVVQLLKNINHFNL

SEQ ID NO: 85373 - protein, 101 aa, Gossypium hirsutum
  unsure (1)..(101): unsure at all Xaa locations
  Clone ID: LIB3166-015-P1-K1-F9.pep
QLPGNFLNQPCXPAXSXGFXGRIKPXFLAGEFPLQHANYXNPGPNLSHLLNNLSLQXSPSTRDHXXRPTVLPTRLXQVSKLLVFCTQXXATICVRPGKTGQ

SEQ ID NO: 85374 - protein, 133 aa, Gossypium hirsutum
  Clone ID: LIB3166-015-P1-K1-H2.pep
ELKARADPRVHDLSFDSFSLHFFLQISKLKREIRVFCTNPSFCSKKVQKKVAFLISDVSCEMKKTNIIDLHCYSSFCYLLFLLVSVFVSLCSCDEHYASSHGGLTDKEVSYIKQRQLLYYRDEFGDRGENVTV

SEQ ID NO: 85375 - protein, 141 aa, Gossypium hirsutum
  Clone ID: LIB3166-015-P1-K1-H4.pep
TGMEGPAPERPVQLGLALPTPNMLKGFDLNNQGLDQLKEMGGLEAWNKAAGCFADKDCVKSKRSFEQAFGNFTEECRTKPLLLWSGQPNEEEDHKDQKKATFSTTDENDAEEDDQVVGWPPIKTWRKKIFQQQQQPRVGRA

SEQ ID NO: 85376 - protein, 44 aa, Gossypium hirsutum
  Clone ID: LIB3166-015-P1-K1-H5.pep
HMISLIHNKPPKPVGGLLQSSYKRKSASNALTATRRLTAALGTP

SEQ ID NO: 85377 - protein, 67 aa, Gossypium hirsutum
  Clone ID: LIB3166-015-P1-K1-H6.pep
PRVRIRLIMGYFLSWLQSRNGARNIMRETIIFTYYIQHYHDHHMANLLLKYILRYTLNTTLYTSRST

SEQ ID NO: 85378 - protein, 91 aa, Gossypium hirsutum
  Clone ID: LIB3166-015-P1-K1-H7.pep
SLAWDQVGCMLIGRRRAVVCRFGCMNSSGSNWFIRPESICRWYMLLYSNWYVHRWRFFRYVLCVEVLCISPRIRVLSPLEIHSYLFLIKIL

SEQ ID NO: 85379 - protein, 132 aa, Gossypium hirsutum
  unsure (1)..(132): unsure at all Xaa locations
  Clone ID: LIB3166-015-P1-K1-H8.pep
DILRHQAVNIVSARLGRAEXALIREVGEYMSDANAHLWSMRRSKANFLRLTSVFSGLFSAGKWFGEVCTWKNPITTVLVHTLFAMLVCFPELILPTVFLYMFLIGGWXNYRYRPRYPPHMNTSLSWPMQVLL

SEQ ID NO: 85380 - protein, 80 aa, Gossypium hirsutum
  Clone ID: LIB3166-016-P1-K1-A11.pep
MVMRIMKSGDSRASGTKTNGVDSSDNEAESSVNESGNSSRGGMNSTEKREGNKRAARADIAPSGRHYRSVSMDSFIGNMN

SEQ ID NO: 85381 - protein, 92 aa, Gossypium hirsutum
  unsure (1)..(92): unsure at all Xaa locations
  Clone ID: LIB3166-016-P1-K1-A3.pep
ERCLNKGRLPPFFMSFLLLTXIFILFILYSTTPLTPIPNQALSRYDDGISKCDLSKGHWIPDLHGSLYTNSSCTTIPDSKNCFHHGRSDRDF

SEQ ID NO: 85382 - protein, 61 aa, Gossypium hirsutum
  Clone ID: LIB3166-016-P1-K1-A4.pep
YIISSCCFTDFSSYSETFPDEPLPHNMSICFHFGVSHDAPISLPVLVVPYSVLGRHRPIPH

SEQ ID NO: 85383 - protein, 130 aa, Gossypium hirsutum
  unsure (1)..(130): unsure at all Xaa locations
  Clone ID: LIB3166-016-P1-K1-A9.pep
PTHTNLTLTLQPLNGELYEPNTPCYSSPRCLXPPTKIDEFKIAHSIISHGSFLRECNVQHSIIGVLSRLKSSVHLQDTIIIVADYYQTQSXIASFLPKQKYPIGVRQNTNIKNRIIDKNAKIGKHVIISN

SEQ ID NO: 85384 - protein, 40 aa, Gossypium hirsutum
  Clone ID: LIB3166-016-P1-K1-B12.pep
KFTSIPSLGSSYCLCNAYFARWLSHNACADLAVAVIIMAY

SEQ ID NO: 85385 - protein, 113 aa, Gossypium hirsutum
  unsure (1)..(113): unsure at all Xaa locations
  Clone ID: LIB3166-016-P1-K1-B3.pep
PVVRASRWGPVLPKARETPSLSFLFTPPCRHXEGPGGVKGDPINLFRPRXNKLMGLVLLHRRETKEGFHLQVSFRRSSLLFGCEAVSNQNTQQALALPEKEVIQPHKTVRLPW

SEQ ID NO: 85386 - protein, 132 aa, Gossypium hirsutum
  Clone ID: LIB3166-016-P1-K1-B8.pep
PTRPPTRSPTCSPTRPPTRAGSMRLFSTSSSPKPNFPLFSPSQNPKRSTYKTIPPFKTRLPSPSFLSLPPCTANNCPSFPVLDQEADREDSLEPKQDTFKKVLVVRRPVMDVSGEENDDGSEDGEAERDDVI

SEQ ID NO: 85387 - protein, 93 aa, Gossypium hirsutum
  Clone ID: LIB3166-016-P1-K1-B9.pep
MTEFMVKGRQNLPVDVIQVIDQLERHCLSPDGSLISKSAYYYLHLAREEMSREILRYLQAIAIYCEAMPMVDEYQQALSCSNLGMIRDIQGIY

SEQ ID NO: 85388 - protein, 122 aa, Gossypium hirsutum
  unsure (1)..(122): unsure at all Xaa locations
  Clone ID: LIB3166-016-P1-K1-C1.pep
HPNGAPNSHGFSYSLISSIGGGNCGSDATDDTNVTSTDTGNNMDQKIDVEELVNRRVSEREKGDDKTDSITXEXSSSMLTDNYNYNSDNMFNSLNEEEDKRKANLLRNRVSAQLSRHHKKHH

SEQ ID NO: 85389 - protein, 90 aa, Gossypium hirsutum
  Clone ID: LIB3166-016-P1-K1-C12.pep
YVPRDEQFEESKQNAFSAGKVRAVLHNLLPQLKASISAHNRDLNSFSDIDGLYKEGLLLKLGFHETVKKLPKMVSKLQESSEGLLKYETP

SEQ ID NO: 85390 - protein, 95 aa, Gossypium hirsutum
  Clone ID: LIB3166-016-P1-K1-C3.pep
LILCSSQKMVSMSKIATGNGHGENSPYFDGWKAYETNPFHPIDRPDGVIQMGLAENQLCFEFIKKWLMEHPEASLCTAEGVNRFKETALFQDYHG

SEQ ID NO: 85391 - protein, 125 aa, Gossypium hirsutum
  Clone ID: LIB3166-016-P1-K1-C8.pep
HFPLLKIFVQSCIFLLDRSSSPLLSLQLVLLLFPIRLSPSLIYLCFSNTISVRPRSKDLFCLLSKAASKFILKKSFFGGLHNSDSNLKARYVFLMSLTSCIYPRMNLTVSAPGLLWFSYIPLFLA

SEQ ID NO: 85392 - protein, 78 aa, Gossypium hirsutum
  Clone ID: LIB3166-016-P1-K1-C9.pep
LLPLSRVGGGKLSENHGGHSHPNPNCRVVTAYTTSLLWLFDSRDSICFLGRIKNREEIKFTLASPTTLRIVFLMQFLR

SEQ ID NO: 85393 - protein, 67 aa, Gossypium hirsutum
  Clone ID: LIB3166-016-P1-K1-D1.pep
LINFCRYGEGSDQALKTQFFSIIPSNDQSLGFGPPRFPTRADLGDPTTEFATEFRNTFFFNVNFGVS

SEQ ID NO: 85394 - protein, 74 aa, Gossypium hirsutum
  Clone ID: LIB3166-016-P1-K1-D10.pep
SCYLHSRFKFSLEINKFHHFHCVLIIRVYSVFFFFENSTYVICIFYIKKLLCYNRRCKYQKDLNATIIEIFRFS

SEQ ID NO: 85395 - protein, 70 aa, Gossypium hirsutum
  Clone ID: LIB3166-016-P1-K1-D12.pep
LAHHYFAKAKRGGLYITICITKRSSFKEPCNLTNQLHYFSSHLPCFNYTHLKQQYLPKRTIYLSTTSRKL

SEQ ID NO: 85396 - protein, 86 aa, Gossypium hirsutum
  Clone ID: LIB3166-016-P1-K1-D2.pep
NHYHSNHYHSNQDVSNSSALVLHHYQVTTFIVILFLKIFIFLKFDTCLFFNILLYLYRTLVNPMTLLMESKKYTSPRVRPRVRGRV

SEQ ID NO: 85397 - protein, 126 aa, Gossypium hirsutum
  Clone ID: LIB3166-016-P1-K1-D3.pep
RTLGGWINILHFLAKMDFNLGQSLHQKEIAHISNWWKQLGLAKELEFARDQPMKWYIWSMACLTDPTLSEQRIDLTKPMSLIYIIDDIFDVYGTLDELTLFVQVVERWDYAACDKLPYYMKICFKA

SEQ ID NO: 85398 - protein, 90 aa, Gossypium hirsutum
  Clone ID: LIB3166-016-P1-K1-D6.pep
MSSLALSLQPANGSDILLQTREWFPPARALIALHAFRQTRLAFSNKSPSSVAATSSSSSSSTAEPSAATESIGDYPLSASSGQLIVGVER

SEQ ID NO: 85399 - protein, 60 aa, Gossypium hirsutum
  Clone ID: LIB3166-016-P1-K1-D9.pep
TTNCNVQYFKSFSVRWFSLTVRGYCFEQPRWVRDLINNVTCCKQDHITLKELIPPHVFKL

SEQ ID NO: 85400 - protein, 44 aa, Gossypium hirsutum
  Clone ID: LIB3166-016-P1-K1-E10.pep
ICHCSSYALCQGQALKSKKHHICCWRMMMTVDEEKAARSFASRF

SEQ ID NO: 85401 - protein, 58 aa, Gossypium hirsutum
  Clone ID: LIB3166-016-P1-K1-E4.pep
FLVLDVVNIGIESNHHHVCRMQEYACLTSLLLISHESQNATPGNHPKETNRLTSQQKV

SEQ ID NO: 85402 - protein, 97 aa, Gossypium hirsutum
  unsure (1)..(97): unsure at all Xaa locations
  Clone ID: LIB3166-016-P1-K1-F12.pep
QTVSYMDEVTIAVYTNTTAGNIPYLKLHPLRIYSTLXRADDRTTRXGLEKIDWTKAXVIAYDKDSHIEXSSSTGPANYPTYSMNWWEGTTYQTLNAM

SEQ ID NO: 85403 - protein, 137 aa, Gossypium hirsutum
  Clone ID: LIB3166-016-P1-K1-F5.pep
LPKGRENFFQERMFQGLEVPEKAGEISSNGRPESTVMSNVPSLNPFGSSDVVKPWSHSASSSDKPSSSLSEKPMTVPTLPFLNSSGPSSKSSVISSQCNGIFGEKWQVSSNSRPNPSFGSELPTRNGFYYGSSSGSR

SEQ ID NO: 85404 - protein, 88 aa, Gossypium hirsutum
  unsure (1)..(88): unsure at all Xaa locations
  Clone ID: LIB3166-016-P1-K1-F6.pep
HGEKVKXGDSQETPTLFSPYKMGKFNLSHRFIYPSTLTTLSFFSHRFPGSREGGELRSLSLGHFCFRHVPPRSPRILYIRGKYGRAIW

SEQ ID NO: 85405 - protein, 90 aa, Gossypium hirsutum
  unsure (1)..(90): unsure at all Xaa locations
  Clone ID: LIB3166-016-P1-K1-F9.pep
VALCHALGHVSINVSFAAVGXFFTHTIKALEPFFNAAASQFILGQSIPITLWLTLAPGVIGVSMASLTELPFNWTGCISAMISNICFTYS

SEQ ID NO: 85406 - protein, 91 aa, Gossypium hirsutum
  Clone ID: LIB3166-016-P1-K1-G5.pep
HGLRFEAWGLPKQTVQARIPPASLASTELVPVPEPVYPRESYQTTTVPSVSSDAASTELKLRLDGVQKKWGRQTHFPSTSTSNSTSQKTVN

SEQ ID NO: 85407 - protein, 94 aa, Gossypium hirsutum
  Clone ID: LIB3166-016-P1-K1-G7.pep
CPGWKKGAAVLAMASVPAPPLPLLSIFGIICVLLMVSSYINLKREVHHTVFNLKMFLLFLPVMLIFASQFLSKCERLVVPYLKTKTDSWRRTLN

SEQ ID NO: 85408 - protein, 41 aa, Gossypium hirsutum
  Clone ID: LIB3166-016-P1-K1-H1.pep
YFLCEVITKILISFILIRFNYNKNILVRSRLNRYKSFDLIF

SEQ ID NO: 85409 - protein, 128 aa, Gossypium hirsutum
  Clone ID: LIB3166-016-P1-K1-H10.pep
LEARNWNADKFKKMLEETMGGRSTYKPEEIRWHEVAVEGETGKVYRASFHDRHGRTVLILRPGKQNTTSLDNQLRHLVYLIENAILNLPETQEQMAWLIDFTGWTLSTSVPIKSARDTINLLQNHYPE

SEQ ID NO: 85410 - protein, 117 aa, Gossypium hirsutum
  Clone ID: LIB3166-016-P1-K1-H3.pep
GARQRVRKFVSRCIYAIFLKACAEQIGGSFSRLEYSSSGRLHMNRQAKCDGDWWVEDLSVIRIDLYQRVMTAMKCRGVRPESIGASLVNYAQKELTKKSSLWNPSGHTKIDLFSTDH

SEQ ID NO: 85411 - protein, 145 aa, Gossypium hirsutum
  Clone ID: LIB3166-016-P1-K1-H5.pep
CREGTGGPTHSVGVFVGMRFRMLFETEESSVRRYMGTITGISDLDPVRWPNSHWRSVKVGWDESTAGDRQPRVSLWEIEPLTTFPMYPSPFPLRLKRPWPAGLPSFHGIKDDGLGMNSPLMWLQGDAGRGMPSLNFPGIGVTPWM

SEQ ID NO: 85412 - protein, 39 aa, Gossypium hirsutum
  Clone ID: LIB3166-017-P1-K1-A3.pep
TGIDGPDRPTRMILLSCATYLTFTLIACWQAGLVTLVNG

SEQ ID NO: 85413 - protein, 66 aa, Gossypium hirsutum
  Clone ID: LIB3166-017-P1-K1-A9.pep
SLSNSSNILSERNRRKKLNQRLFALRALVPNITKMDKASIIKDAIDYIQQLQEQEATLQADIMELE

SEQ ID NO: 85414 - protein, 67 aa, Gossypium hirsutum
  unsure (1)..(67): unsure at all Xaa locations
  Clone ID: LIB3166-017-P1-K1-B6.pep
EKAPWWQTARLNGYTHHNIGLVVLXNLWFYPGFLVSWLMKYADNIVKVYSTSMAMLLTMVLSVFLFS

SEQ ID NO: 85415 - protein, 133 aa, Gossypium hirsutum
  Clone ID: LIB3166-017-P1-K1-B7.pep
HASGYATIQSLDLIKLVSHCPRLQRLLVLDYVEDSGLEELASSCKDLQELRVFPSDPFGAEPNVSLTEQGLVAVSLGCPKLRSVLYFCRRMSNAALVTIAQNRPNLTRFRLCIIEPKTPDYLTLEPLDVVLEP

SEQ ID NO: 85416 - protein, 51 aa, Gossypium hirsutum
  unsure (1)..(51): unsure at all Xaa locations
  Clone ID: LIB3166-017-P1-K1-B8.pep
NLKIFSSKSLYTIMEXITKRLLXEHRVSTSXCYYKYNPKRELHRXRVGRDG

SEQ ID NO: 85417 - protein, 78 aa, Gossypium hirsutum
  Clone ID: LIB3166-017-P1-K1-C11.pep
SPLPQKYCAQIHHLSSIAGMVIPRPRLSGCVTVIVGVYSRHSVTLTCSEGVGPQTSWVVFARLRKEYPQNGWAWSSSC

SEQ ID NO: 85418 - protein, 135 aa, Gossypium hirsutum
  Clone ID: LIB3166-017-P1-K1-C4.pep
AKLKLKAGSRPSWVGLAAALWVQISAGNATNFTLYSSALKSVSGFSQQQLTFLGVANDIGESVGLLPGIACNRFPPWTVLLVGVFACFLGYGVIWLDVSQTIHPLPYWVLWIALVVASNSNAWFSTAVLVTNMRN

SEQ ID NO: 85419 - protein, 138 aa, Gossypium hirsutum
  unsure (1)..(138): unsure at all Xaa locations
  Clone ID: LIB3166-017-P1-K1-C6.pep
LCTRPALNPVLSXEQVNIAEWAMTWQKKGMLDQIMDSNLVGKVNPASLKKYGETAEKCLAEHGVDRPSMGDVLWNLEYALQLEETSSALMEPDDNSTNHIPAIQTPLEPFDNSVSMIDGNSGTDDDAEDAATSAVFSQ

SEQ ID NO: 85420 - protein, 66 aa, Gossypium hirsutum
  Clone ID: LIB3166-017-P1-K1-C8.pep
GRVGKYAKIYSSFLACLLGYGFLLKNSSYRSGLDLGFLMVFCNWSADYDHVRSATRKTRLASGDLL

SEQ ID NO: 85421 - protein, 41 aa, Gossypium hirsutum
  Clone ID: LIB3166-017-P1-K1-C9.pep
KKPLGLSLSRVSKPNSSHLSQLKTTEGDNDTIHGITCSKVP

SEQ ID NO: 85422 - protein, 68 aa, Gossypium hirsutum
  Clone ID: LIB3166-017-P1-K1-D1.pep
LLVLTLNIPTDYCVSISISQRPQLPPTKGIVDFPTIKDQPWGEPPKKVRPKGPPLLNPNSHPRGPGRV

SEQ ID NO: 85423 - protein, 69 aa, Gossypium hirsutum
  Clone ID: LIB3166-017-P1-K1-D10.pep
VCNNDLNSIWEWLTWVFRQGNIEQCRLLCCGLWTIWTYKNQLIYERKNSTGRDISNQVISYILELNGVE

SEQ ID NO: 85424 - protein, 95 aa, Gossypium hirsutum
  unsure (1)..(95): unsure at all Xaa locations
  Clone ID: LIB3166-017-P1-K1-E9.pep
SNTSAIFSSYKFLVSATRALTFTESVAASCMLVGGVLSYSEISVHGSSREDTRAKGALYCFSVTLVLVNYALPSQCFLHIPTSACGFXTRXXXRG

SEQ ID NO: 85425 - protein, 53 aa, Gossypium hirsutum
  Clone ID: LIB3166-017-P1-K1-F11.pep
YLYYFYWGFIIYLLRIIPLKKKKKPLFSQTNSHIGQLQTYTHVTFTNYLTSSH

SEQ ID NO: 85426 - protein, 76 aa, Gossypium hirsutum
  Clone ID: LIB3166-017-P1-K1-G5.pep
KRTHSMLCCYRYSDEDEDEDEDEEDTAEEDGNEEQLGGSRQQNKKQKPKNLSNKNVRPHHHAKNNRSKKRKRAKLN

SEQ ID NO: 85427 - protein, 49 aa, Gossypium hirsutum
  Clone ID: LIB3166-017-P1-K1-H5.pep
ITQITGFFFFSVIFSLSTITMYVFIQIVIGDFLLFHVLDIIVNLGFFLV

SEQ ID NO: 85428 - protein, 55 aa, Gossypium hirsutum
  Clone ID: LIB3166-018-P1-K1-A1.pep
KVKIPTDPPFLKNPFLTINPSFQPFCSQGFLFQLLEPFFENPLFLWKPLCAPFLN

SEQ ID NO: 85429 - protein, 122 aa, Gossypium hirsutum
  Clone ID: LIB3166-018-P1-K1-A2.pep
MILDDLHYTTTSNNSGTGCYFMESNDGSSSVKAKIMAHPHYHRLLAAYVNCQKVGAPPEVVARLEEACASAATTGPTRTGCISEDPALDQFMEAYCEMLTKYEQELTKPFKEAMLFLQRVEC

SEQ ID NO: 85430 - protein, 104 aa, Gossypium hirsutum
  Clone ID: LIB3166-018-P1-K1-A4.pep
SLPIKLKGFLLSSGVVLSKSDASLVIQITDDLCMYVLVYVDDIIITGDSSSEIDTFVHRLHSEFSLKDLGPLNYFFGIEVHRSSAGELHLCQKEYILNLDRCRM

SEQ ID NO: 85431 - protein, 38 aa, Gossypium hirsutum
  Clone ID: LIB3166-018-P1-K1-A7.pep
VIMVASSALSRLSVFQKAPHCSSLHPNKHGTGFHTKEF

SEQ ID NO: 85432 - protein, 135 aa, Gossypium hirsutum
  unsure (1)..(135): unsure at all Xaa locations
  Clone ID: LIB3166-018-P1-K1-B4.pep
HLSQTSFHKDHYENLYAVVSGEKHFLLLPPTDVHRMYIKEYPAARYSYSQVFTXRNWVLEITISMCKSCFISSVVLDLQENGEFRLEFEEPERYVPWSSVDPCPARASLKQESFQFPLYFNGPKPFEVTVKGHAA

SEQ ID NO: 85433 - protein, 118 aa, Gossypium hirsutum
  Clone ID: LIB3166-018-P1-K1-B5.pep
PPTLPPTRPPTRSFNRLAGPIPESLSIEAYNGSLVGNPGLCSSTNRSFKRCQLGSGMSKDVHTIIVCFVIGVTVLLVSIGCFLYLKRTEKDKNGDGHSLKEESWDVKSFHVLTFTEDE

SEQ ID NO: 85434 - protein, 104 aa, Gossypium hirsutum
  unsure (1)..(104): unsure at all Xaa locations
  Clone ID: LIB3166-018-P1-K1-B8.pep
MEFAELREAIEQIEVVDSHAHNIVPLDSSFPFSNSRSEATGHALSFAPHSLSFKRSLRDIAELYGTESSLDAVEXVSRRSSGLQAISSKCFKAAGISAILIDDG

SEQ ID NO: 85435 - protein, 48 aa, Gossypium hirsutum
  Clone ID: LIB3166-018-P1-K1-B9.pep
LKEKECQSSYSIDASDRINVYSPQPYNIRAMNPPLHINSYLHLPSIRS

SEQ ID NO: 85436 - protein, 96 aa, Gossypium hirsutum
  Clone ID: LIB3166-018-P1-K1-C12.pep
GRVGLGITMICSVSSLFFVWLKASFVFNSSKEGSAMEAALFICSFGFAIAHMIVAYRTSCRERRKLLVYKIDIEAISACKNGFPRYQKILQDERVK

SEQ ID NO: 85437 - protein, 91 aa, Gossypium hirsutum
  Clone ID: LIB3166-018-P1-K1-C2.pep
QQDLHKIPRFVESGLKMLLSFLYIFLPRVLFRHFCSLLWSVTKAFFLSYFFFLILSLFYFFFIHNIFVSSFFFYYLFFISFSFFYSKFYFF

SEQ ID NO: 85438 - protein, 121 aa, Gossypium hirsutum
  Clone ID: LIB3166-018-P1-K1-C5.pep
AFRKKRSGKVSDDFLFNEENNGFKDLLSLLLDEGAKEEQEQHQWLTGFETFFEAEAKIEEITGFEMEEELGNSRKKRARKSGSIAGTSSTVSATSDNAGGGSGHQRRLWVKSRSKDWGGEV

SEQ ID NO: 85439 - protein, 119 aa, Gossypium hirsutum
  unsure (1)..(119): unsure at all Xaa locations
  Clone ID: LIB3166-018-P1-K1-C8.pep
PTASGKTRFSIICKPIYHFGGTXTISQYTVHHVGQVAKISPTDPLDKVCPISXGICTGFGATVNVAKPKEGQTVAVSGLGAVGLAAGEGARVCGASRIIDADVNPRRFEEAKTLGITAF

SEQ ID NO: 85440 - protein, 121 aa, Gossypium hirsutum
  Clone ID: LIB3166-018-P1-K1-C9.pep
VNPVNGGAGRSLRGARGLEGSVIETFPTMIYSEVKVHKIGKGALECAVCLNEFEDDETLRLIPKCDHVFHPECIDAWLASHTTCPVCRANLAPQPGDSGVSQPTELNETATETPRGSERQQ

SEQ ID NO: 85441 - protein, 104 aa, Gossypium hirsutum
  Clone ID: LIB3166-018-P1-K1-D11.pep
AIWLLVSTLAVARAFLYLAEARVDKRHRTMAKWVLGQDMTVSEFLAADIDNNGFVSKSEFVIYKLKEMGKVSEKDIMQISEKFDRLDAGNCGKITLADLMEHHH

SEQ ID NO: 85442 - protein, 57 aa, Gossypium hirsutum
  Clone ID: LIB3166-018-P1-K1-D2.pep
PFRKTPANLLDSTGYIDFCLVRFVVERFKYKLKSIYMNRDVENIYIFFFLSVGCLKF

SEQ ID NO: 85443 - protein, 123 aa, Gossypium hirsutum
  Clone ID: LIB3166-018-P1-K1-D5.pep
SSPANFNNGPSSPDDSFSSPIANTSSPAHRRRRGRRQASTPSSAAATPPPNPSRFANSASTPTPARSTRRGRRPGPATSPSPAVAATPSSTDDFSMPSSEGGEDMEEATPTFVWGTNISVQDV

SEQ ID NO: 85444 - protein, 137 aa, Gossypium hirsutum
  Clone ID: LIB3166-018-P1-K1-D6.pep
KRVQLMKSQSRYTTTKLLAAAADAGTKTKEQLMAALETGKRHQQKQDDMEIKKTLKTSSNDEKQIKTVSSAYPRNWSIPNKAHEKHVSSNWEQVPLQNEIREDVCKFVHKLTTEQLELPTDEKSISVVTLAGENRGA

SEQ ID NO: 85445 - protein, 133 aa, Gossypium hirsutum
  Clone ID: LIB3166-018-P1-K1-D9.pep
IIEAALKRDPYEAEFIQSVEEAVHALERVIAKNPHYVNIMERLLEPERMIIFRVPWVDDRGETHVNRGFRVHFNQALGPCRGGIRFHPKMNLSVAKFLGFQQTLKNALSPYKLGGAAGGSDFDPKGKSDNEIM

SEQ ID NO: 85446 - protein, 108 aa, Gossypium hirsutum
  Clone ID: LIB3166-018-P1-K1-E8.pep
MGKEKSHINVVVIGHVDSGKSTTTGHLIYKCGGIDKRTIEKFEKEAAELGKGSFKYAWVLDKLKSERERGITIDIALWKFETPKYNVTVIDAPGHRDFIKNMNNWSLP

SEQ ID NO: 85447 - protein, 48 aa, Gossypium hirsutum
  Clone ID: LIB3166-018-P1-K1-E9.pep
KLLFVMRIAVAVLEGLHQVLSVGISIFSSCFIIPISKQTNKQKKIIIS

SEQ ID NO: 85448 - protein, 103 aa, Gossypium hirsutum
  Clone ID: LIB3166-018-P1-K1-F3.pep
MPGVGKTTLVKEVVRQVKEDKLFDSVVMAVVTHTPDVQKIQDQIADMLGLKFEEQSMTGRASRLCERLKKEKKILVVLDDVWAKLDLMEVGIPLGEEDQGCTI

SEQ ID NO: 85449 - protein, 109 aa, Gossypium hirsutum
  Clone ID: LIB3166-018-P1-K1-F4.pep
KLWLLTNFFGFMLLLVFKTFSEVFLLQPDIACTLYWKLLNENFSHMLILFCHSASLYGIKQYLVLEFGIFFCPHCLGTWQLLPVFVHIIFFTGKIIECHIITGTKVEKR

SEQ ID NO: 85450 - protein, 138 aa, Gossypium hirsutum
  Clone ID: LIB3166-018-P1-K1-F5.pep
AFRQRFRKSSTGWNATAGNCMIPGGGFSAFLREEEGKLMRNGSGNGVSSNGNLMGKRKVRPEQVIEAATLASNGQQFEVVYYPRASTPEFCVKASLVKAALQIRWCSGMRFKMAFETEDSSRISWFMGTISSVQVADP

SEQ ID NO: 85451 - protein, 64 aa, Gossypium hirsutum
  Clone ID: LIB3166-018-P1-K1-F6.pep
ERVGVLKNREIFIVSYRTLHVRDADPHECATLLSNRLTIGKRTKPWISLSTGTGITWSIIDDAL

SEQ ID NO: 85452 - protein, 64 aa, Gossypium hirsutum
  Clone ID: LIB3166-018-P1-K1-F8.pep
MVTSVLPRVESLAGRGIKSIPKEYIRPKEKLPGLGNGLEEKKKEEGPKVPTIDYTKSIRRTKRP

SEQ ID NO: 85453 - protein, 85 aa, Gossypium hirsutum
  Clone ID: LIB3166-018-P1-K1-F9.pep
DHLLHGMQLTILEKQTTQGLETPGTAGDVKEENRSRRRSYMASPSSSSSSPRLRPRCTCSNQPGSAPCSKHGYMVPRQNTKRYCG

SEQ ID NO: 85454 - protein, 137 aa, Gossypium hirsutum
  Clone ID: LIB3166-018-P1-K1-G6.pep
IEEGPFKAMYNYFSTANIQIDGDFSAKLSRYGCVGHIPEMEEISSNSVAVANISVETLERGRLTPKSNVWSFGIILLELLTGRKNLDNRYPKEERNLVKWSRPFLADDCRLSLIMDPQLKGRFPMKAARTVADIAQR

SEQ ID NO: 85455 - protein, 113 aa, Gossypium hirsutum
  Clone ID: LIB3166-018-P1-K1-G8.pep
PRVRFTLSPTNSTCSSSSECKSACRRKLILVFLNGNSNKVSQMVWDQVQLRSSSGNHPLVSGHPNRPIPKLMVCSILFVSLTYLLYTLKLLTTSAQQTFHHTPFTFLFSSLYK

SEQ ID NO: 85456 - protein, 67 aa, Gossypium hirsutum
  Clone ID: LIB3166-018-P1-K1-H1.pep
MENPRTRSGIPLCSSSSLDALTTTLSSSIQALGRGFDVTSDIRLLYCKGAPGSRLVQLDEDHTDHLV

SEQ ID NO: 85457 - protein, 136 aa, Gossypium hirsutum
  unsure (1)..(136): unsure at all Xaa locations
  Clone ID: LIB3166-018-P1-K1-H10.pep
CQCKYLCRPKDEGGLGFRNMAQFNISLLAKQGWRILNNPNPLVGKVLKAKYFPKVDFLXPIWENNVSYTWKSIWATKGVLAEGLCXLVGTGTNISISRDNWIPGLSHVRLPVLNSTLNDSKVAELIDSSNRTWKKE

SEQ ID NO: 85458 - protein, 122 aa, Gossypium hirsutum
  Clone ID: LIB3166-018-P1-K1-H12.pep
MVSKSLCNTWGLSSTTCFPKHRSRKPISTTTPKIFASRRSDNDDLSCSGVGGGGRRRLVDENMIVLRKRIHEIKMIERNYEPPADWMEWEKRYYTSYDSIICDVLGVLQSQLMNTRPSLALG

SEQ ID NO: 85459 - protein, 74 aa, Gossypium hirsutum
  unsure (1)..(74): unsure at all Xaa locations
  Clone ID: LIB3166-019-P1-K1-A1.pep
GHPIPQIGFXALWSMMVRHSVHSTSFGHIHLSRLHKAASRCTLPWQWAHICAIIEEGSKSTCWLXLSHRXSCSW

SEQ ID NO: 85460 - protein, 50 aa, Gossypium hirsutum
  Clone ID: LIB3166-019-P1-K1-A11.pep
GAHSLYHENGFFGQAHEGLINRKMLKDGQNGENEHVHHNRSWKDVYHQLL

SEQ ID NO: 85461 - protein, 55 aa, Gossypium hirsutum
  Clone ID: LIB3166-019-P1-K1-B12.pep
ALALFVQTCEPSQSWQCIMSKYVKGMSKRLVNVVRSRSILETIQVPESRSPDICQ

SEQ ID NO: 85462 - protein, 87 aa, Gossypium hirsutum
  Clone ID: LIB3166-019-P1-K1-B5.pep
FVVLLGFFFFKYCCLSNNFHVLHHLNQISLLFTCAPVTCLRLVETRWEVFPATFKSSEVHSNDILGNFWVCIKFISFMLQLNTFCSS

SEQ ID NO: 85463 - protein, 87 aa, Gossypium hirsutum
  Clone ID: LIB3166-019-P1-K1-C11.pep
VNLFQNFGSSSNADVLPSKTKELSYMVNSNDQNLGYQMGQVENLESSVNMEGLSTPHLETNGPSRFDSLVDVKGVACDHEISFRAGS

SEQ ID NO: 85464 - protein, 45 aa, Gossypium hirsutum
  Clone ID: LIB3166-019-P1-K1-C2.pep
ANLLVSIDTFMGVVFESTEEFPYSFLGSILSYCVALFVKTEEFGN

SEQ ID NO: 85465 - protein, 95 aa, Gossypium hirsutum
  unsure (1)..(95): unsure at all Xaa locations
  Clone ID: LIB3166-019-P1-K1-C5.pep
DGLPRFRAGCVLIAXEKVGKRREFWVMGGYGDSRTVSGVFPVDEYYKDALVMELKGNGGGKWRELGDMWGAWETPRFGKIVIAEDEDGCCPSVIF

SEQ ID NO: 85466 - protein, 43 aa, Gossypium hirsutum
  Clone ID: LIB3166-019-P1-K1-C6.pep
QQRFHHLIKIKGTQFHTHREVRDHFILTMSDIFFFLFYPLKKS

SEQ ID NO: 85467 - protein, 65 aa, Gossypium hirsutum
  unsure (1)..(65): unsure at all Xaa locations
  Clone ID: LIB3166-019-P1-K1-C8.pep
LLKNGVKSNLESKELKIESRWEDRSSIFMCSSSIDFGGIMLVKVPERIYGRRLTTDDSIXDSPMV

SEQ ID NO: 85468 - protein, 119 aa, Gossypium hirsutum
  unsure (1)..(119): unsure at all Xaa locations
  Clone ID: LIB3166-019-P1-K1-D1.pep
LFKDIRSGNLGGASLMPDKQTKELVNMKTIDRDHNIHXNVAREIINHRSLHHTNIIRVKESALTTTHIAIVXEYTANGELFXRISNAGMHNEDXARYLFQQLNSRASYCHCIQICHRNL

SEQ ID NO: 85469 - protein, 114 aa, Gossypium hirsutum
  Clone ID: LIB3166-019-P1-K1-D11.pep
HASAKTCSSLGSVVPSGPKAATQEKRDSNKVVELKRVFATFDKNGDGFITKQELRESLKNIRVLMTEKEVEDMVVKVDANGDGLIDFDEFCILCQTIDGGTDASGTTLKEDDGM

SEQ ID NO: 85470 - protein, 68 aa, Gossypium hirsutum
  Clone ID: LIB3166-019-P1-K1-D6.pep
QFLSSCWFNSSYTCAITLGMRQVYLQVLLFCSCLHEYAWMTWILQYRAIMEISPLIYIFLGLLQLSID

SEQ ID NO: 85471 - protein, 96 aa, Gossypium hirsutum
  unsure (1)..(96): unsure at all Xaa locations
  Clone ID: LIB3166-019-P1-K1-D8.pep
GPTDASAHSSWNLNFLSGPLSWQLSVXYLRMHSLPXEEKRANGRSWSLRSHNMIKAFLLQSSPPNHLITFNIIQTEVVLDKLINCVLFKHIIIIIS

SEQ ID NO: 85472 - protein, 86 aa, Gossypium hirsutum
  Clone ID: LIB3166-019-P1-K1-E10.pep
RTPPPSTFSHLIFMLPEHPDLLSSFATHQTTSFYFCLLHILIPFIFSREPYKQVDIPIPYVFIVYFLISILIFLISACSCTSFVLT

SEQ ID NO: 85473 - protein, 124 aa, Gossypium hirsutum
  Clone ID: LIB3166-019-P1-K1-E11.pep
PTRPILGKAFGLCSYIWLCGDQDLQLYECERVTEARMRGIQTLVFLSTSFGVVELGSSEMIQENWSLVQLAKSIFGSEINCLGSKHPGLESQLQMSTQTVPFLDFGKVASDQKEWILDDRKQQI

SEQ ID NO: 85474 - protein, 67 aa, Gossypium hirsutum
  Clone ID: LIB3166-019-P1-K1-E3.pep
EYMLEDRPCNDCCLHFCCEACALCQEYRELKNRGFDMSLGWHGNMARQQNQGLQMPSAPVMESDMKR

SEQ ID NO: 85475 - protein, 90 aa, Gossypium hirsutum
  Clone ID: LIB3166-019-P1-K1-F1.pep
MIQSIREITRKQHSDEEIFAVLQECFMDPNETAQKLLYLDISHEVKRKRDKKKETAGVQGRGGRGSRANYYTSSSKDAGVARNTSARRDN

SEQ ID NO: 85476 - protein, 137 aa, Gossypium hirsutum
  Clone ID: LIB3166-019-P1-K1-F12.pep
SLYRTMSVVICNDPSGQNLFVVIVRFLETFVGSMSAGVGVGFTSALLFKYAGLDIDNLQNLECCLFVLFPYFSYMLAEGLGLSGIVSILFTGIVMKHYTFSNLSENSQRFVSDFFHLISSLAETFIFIYMGFDIAME

SEQ ID NO: 85477 - protein, 135 aa, Gossypium hirsutum
  Clone ID: LIB3166-019-P1-K1-F6.pep
PTRPLSSSSSSFIVALPLLRRVAPPCSVFFLISHLLRSVGRLCAVVTLFVLVLLFFMATAPKPIKQSHREEEQQQQREEESSKPRENEAEEDEEETVQRPWNLRPRKVVMETSAAVVTSAAEKTSETVGPKSMRL

SEQ ID NO: 85478 - protein, 96 aa, Gossypium hirsutum
  Clone ID: LIB3166-019-P1-K1-G3.pep
MVLVKGLRFVWHAGGPRSTQHPWFLCKSKGILNSSTSIHIHIYTYYISMFFAAYTNGECEGNIIFHLEFSLSLSIYKLSLAFFSLTVSLFFFISKL

SEQ ID NO: 85479 - protein, 126 aa, Gossypium hirsutum
  unsure (1)..(126): unsure at all Xaa locations
  Clone ID: LIB3166-019-P1-K1-H1.pep
MVKEELYXTVPSVFRCPISLDVMKSPVSLCTGVTYDRSSIQKWLESGHDTCPATMQVLPSKDFIPNLTLHRLINLWIQSSTLRPGSNSPRLLPATPSAIFEVQAKLLMEKVEREGCVDSLSRVAEF

SEQ ID NO: 85480 - protein, 107 aa, Gossypium hirsutum
  Clone ID: LIB3166-019-P1-K1-H9.pep
MIQIFSKTLTTMTITLEVASSDTIDNVKAKIQDKEGIPPDQQPLIYAGKQLAYGRTFTDYNIQIESTLHLVLRFIGAIIEPFFKDFALNYNQYKMICPKCYSRVHSL

SEQ ID NO: 85481 - protein, 82 aa, Gossypium hirsutum
  unsure (1)..(82): unsure at all Xaa locations
  Clone ID: LIB3166-020-P1-K1-A5.pep
IPIXCNTLLHTQQLIPIPSHVYDTVPHTNKADKTTARGVHSRRPAPQQKELSDSDDDYACFITGGVMNAAFNAQIAEISCDY

SEQ ID NO: 85482 - protein, 75 aa, Gossypium hirsutum
  Clone ID: LIB3166-020-P1-K1-A6.pep
SNMFSITPTSRNHNPSKPVSVRRVINNMPGLGHEEEDVMLLHDKFYSCSNGGVLQGSALVTRVHGQDRNDKDSLH

SEQ ID NO: 85483 - protein, 50 aa, Gossypium hirsutum
  Clone ID: LIB3166-020-P1-K1-A8.pep
PINRFILSGSIPITTFRITSSTILTFATVPLTDSTQNSKRQHIDFGSSKK

SEQ ID NO: 85484 - protein, 67 aa, Gossypium hirsutum
  unsure (1)..(67): unsure at all Xaa locations
  Clone ID: LIB3166-020-P1-K1-B3.pep
VYFVRHRSLTRSNNXAILQRLXDDIDRNNLPQILYEDEDHDKVVLASDGDLAAAVEHAKLVGWKGLK

SEQ ID NO: 85485 - protein, 136 aa, Gossypium hirsutum
  Clone ID: LIB3166-020-P1-K1-B4.pep
PRVRFNKGVGDFLDWEVEKGGELDFGFEKRQWKPLFGEASMSHRPNKKITQRQEPFRSIASMADQSSSLPSSSPSLTLSLPSSSSSSSNASLPSSRMVLPFAFDGTQNPVYFPHPMFQPVPQSQQQMISFSPQQQQ

SEQ ID NO: 85486 - protein, 54 aa, Gossypium hirsutum
  Clone ID: LIB3166-020-P1-K1-C10.pep
EKKKQKHPSKPRCNFDRIEMHFNCIFCTFDVYNALCFSYLIASMGLQLLWSFGL

SEQ ID NO: 85487 - protein, 79 aa, Gossypium hirsutum
  Clone ID: LIB3166-020-P1-K1-C12.pep
GSIKTQHQVTFFISIRSCNCGSNQCLFSAPLHACTQNYIICCTTNLRSNTAMICYLYIQLAHCDVETLGVADSKLGNAI

SEQ ID NO: 85488 - protein, 105 aa, Gossypium hirsutum
  Clone ID: LIB3166-020-P1-K1-C3.pep
SNYSKHKRTYICIIMWLQCPTLLIHYTHNTLVATWKTIFQISTLITKSITQRNICHRLARSKIKTPLANSILTDRYAKFIASILLFFQLHKSMRTVNYVAKLLIL

SEQ ID NO: 85489 - protein, 131 aa, Gossypium hirsutum
  Clone ID: LIB3166-020-P1-K1-C7.pep
PTRPRTRGNLCSKYSIPKLGWGKSFTSKLAYHLGGLCPSFQTESRPPSLLFTSSNPAVPRSFDPPRLSGLLPPNTSPDLCEEHLLPADGQFYCIDGGYVSVLLPKPGSLRLFRLKHKGLWLICLTPHAGFY

SEQ ID NO: 85490 - protein, 111 aa, Gossypium hirsutum
  Clone ID: LIB3166-020-P1-K1-D1.pep
HPSGPRRVQPTDSHIFAERVRTERGGERIKSLHYLSHPCNKVTGKAVMLDEIINYVQSLQRQVEFLSMKLATVNPRMDVNMETLLSKDMFQSRGLFKWGLDRIKHNAIKVQ

SEQ ID NO: 85491 - protein, 110 aa, Gossypium hirsutum
  Clone ID: LIB3166-020-P1-K1-D4.pep
ASEQIRILCMNKVVFLEKKKELLKGAEQFKDVPGYGRIFMISGLKGSGVEDLTKYLMEQAVQRPWDEDPITMSEEVMKNISLEVVRERLLDHVHQEIPYGIDHRLVDWKE

SEQ ID NO: 85492 - protein, 97 aa, Gossypium hirsutum
  Clone ID: LIB3166-020-P1-K1-D5.pep
LPFLMGASLSMFNGNMITSSTHFINGNKESSVISCFAKSLLSSHEFLKTACSEITSMDLGTASSFPQIKITLYPRQTKQCYCEKNETFFFCLKRTRG

SEQ ID NO: 85493 - protein, 71 aa, Gossypium hirsutum
  Clone ID: LIB3166-020-P1-K1-D8.pep
KICTYIYDGQGLSKRFRTCQFKHGHRSMDRVAYLLAIEGLKKGDQCLMRNGFTEYVREEVERDRKGIVLLV

SEQ ID NO: 85494 - protein, 78 aa, Gossypium hirsutum
  unsure (1)..(78): unsure at all Xaa locations
  Clone ID: LIB3166-020-P1-K1-E2.pep
KQNQIKIWQNLQSTFCRCAEKLEIQCQIHFSAKRCTDIKILWLNVNRKKPVEPTPDEFGFQICINWCSLKGIFVXXXX

SEQ ID NO: 85495 - protein, 117 aa, Gossypium hirsutum
  Clone ID: LIB3166-020-P1-K1-E3.pep
MPVCLYAILGVGAFVFVASELWKKMVLRKLNGEYSGTSNIPPGSLGLPFIGETIQFMAAINGEKGFYDFVRVRSERYGNCFKTNIFGETHVFVKSTESAKTILNNELGRFTKTYIKS

SEQ ID NO: 85496 - protein, 101 aa, Gossypium hirsutum
  Clone ID: LIB3166-020-P1-K1-E5.pep
LFIIIIGCRFRTNVVSLQAFSKFQNTTEALQAPTKLLESTPSKGSLKFLRAHCYTKTLGVNDSKLGNAINEILNIDCVHNNAAIELLTGVRTQSTELISGL

SEQ ID NO: 85497 - protein, 89 aa, Gossypium hirsutum
  Clone ID: LIB3166-020-P1-K1-E6.pep
MDGYFYAVDDQPRKPSLFPLFPAPASTVTSTSSIPQWLSNPSFTTDLSLINDADYSLPRSLDDVQEEDAQEEEENEAKRQEHEKLPHSY

SEQ ID NO: 85498 - protein, 88 aa, Gossypium hirsutum
  unsure (1)..(88): unsure at all Xaa locations
  Clone ID: LIB3166-020-P1-K1-F10.pep
GSGLACTLSYTIXEACXVQDXXLPXVPXNHRAPKLTXLVNRDPREAFCSGILTXAVLXXNDEXVAASXXCXXLHFLLSQRVQCPRSXX

SEQ ID NO: 85499 - protein, 104 aa, Gossypium hirsutum
  Clone ID: LIB3166-020-P1-K1-F7.pep
MLIAKDVIRKSLPVLSSPGIDSNGALLGKDKPPSVTGPLPSSSELNSSWGVFGKVCRIDRPCVVDEVHLRRFDGLLENGGVHRCVVASITVKAPVREVWNVLTA

SEQ ID NO: 85500 - protein, 69 aa, Gossypium hirsutum
  Clone ID: LIB3166-020-P1-K1-G11.pep
RRIISVEPLKTWLRLRIAAGIPPHESSQFNGFSADLSARGTKDFLLSLTATKECGSGQSLCRMVSLSKK

SEQ ID NO: 85501 - protein, 124 aa, Gossypium hirsutum
  Clone ID: LIB3166-020-P1-K1-G8.pep
EEDDVHLAPSFFDDAPRTTNAVLDSATDMNSTPSRPSGRVVGIIKRNWHSYCGSLEPMSMPAGTGSFTSALFVSKDHRIPKIRIQTRQLENLLDNRIIVAVDSGDRQSRYPSGHYVRVIGKISD

SEQ ID NO: 85502 - protein, 76 aa, Gossypium hirsutum
  Clone ID: LIB3166-020-P1-K1-G9.pep
FVHSAINVFRNKFNQPRVNSSSNYHFIKVASYFVIYSVTCINGINKTYTGLVYYTSQPQPMERAGPHHTRKSTVDS

SEQ ID NO: 85503 - protein, 104 aa, Gossypium hirsutum
  unsure (1)..(104): unsure at all Xaa locations
  Clone ID: LIB3166-020-P1-K1-H11.pep
IRGSDLXIHFKNTRETDFANRKLTFTKAKRYFKNLXLPKQTNSFQXFELNSGYLTSLKTPILMNKAFVLTXANFILIWLKIAESNPKVKGLDVNSLIASHIQVN

SEQ ID NO: 85504 - protein, 55 aa, Gossypium hirsutum
  Clone ID: LIB3166-020-P1-K1-H12.pep
GFQFGILSCCHLNLWFLSRLESNIVGSVPVLAVLVGANCSNANSLFHIGENFSLY

SEQ ID NO: 85505 - protein, 89 aa, Gossypium hirsutum
  unsure (1)..(89): unsure at all Xaa locations
  Clone ID: LIB3166-020-P1-K1-H2.pep
VTKKPYKEETRKQIYITYYMPYSVXRVFGFHLSTLHGLISLEAQLQLLFLVVIVKIKRGVSLRLPRLVGEGEDEIPEHAMRASSPRLSG

SEQ ID NO: 85506 - protein, 54 aa, Gossypium hirsutum
  unsure (1)..(54): unsure at all Xaa locations
  Clone ID: LIB3166-020-P1-K1-H5.pep
YVRFQLVFNLIYYLVMFIYILXRGETLDLCFKLVKLALDVLILCGYMIHSYAQV

SEQ ID NO: 85507 - protein, 109 aa, Gossypium hirsutum
  Clone ID: LIB3166-020-P1-K1-H6.pep
PTDDPTHAPPPSLFILFFFFASKLRQDYIYIKKQDINKILQYIPFLIFTLATTQTQLQLKQTLMSFYPQSSILLQSALILILNLAISNLSYLRIITIFHSPLCSYHLTP

SEQ ID NO: 85508 - protein, 135 aa, Gossypium hirsutum
  Clone ID: LIB3166-020-P1-K1-H8.pep
FLPPFMDDMPNLRALIIINYGTTEATLLNFSVFTNLTNLRSLWLEKVLVPELSNTTAPLRNLRKLSTVLCKVNNSFNPSVLDLPIIFPRLTELVIDHCDDLVKLPVSICKVNSLQSLSITNCHRLSELPAGFGLL

SEQ ID NO: 85509 - protein, 124 aa, Gossypium hirsutum
  Clone ID: LIB3166-021-P1-K1-A1.pep
EKISKDFMQQLLELHWRGDEKNSLSINEVKALLLDLMVAGTDTVPTAVEWAMTELLRHRDKMTKLVKELDMVVGNQNTVEDSHIPQLVYLDAVIKETLRLHPVAPLLIPHVPSETTVIGGFTVP

SEQ ID NO: 85510 - protein, 51 aa, Gossypium hirsutum
  Clone ID: LIB3166-021-P1-K1-A11.pep
TKAPRLYYVLSAKPFLNPTGKIQNPPLKNEKKKSVMKIISEENEGKAESGL

SEQ ID NO: 85511 - protein, 80 aa, Gossypium hirsutum
  Clone ID: LIB3166-021-P1-K1-A3.pep
MAKLASLFILTLLLVSTLSLSFAARSGPAFANDSPAKTQSQATTTSTTTDGIEQSEDRCEGVGEDECLMRRTLAAHLDYI

SEQ ID NO: 85512 - protein, 55 aa, Gossypium hirsutum
  Clone ID: LIB3166-021-P1-K1-A4.pep
PVRNLPLLVAFLPENILQFNDSQFFYTLKKPISRDGFYNLQKKNNNIWLNFVRGL

SEQ ID NO: 85513 - protein, 125 aa, Gossypium hirsutum
  Clone ID: LIB3166-021-P1-K1-A5.pep
GSAWFKKGLNVEQKKLEKENEQASPNMGPSAPCGNSNDSAETKQESVQLPSLNAFDLICGFDLSGLFDGVSEKRETRFSSRQPASVIISKLEEAARHLRLKVKKKDAGVLKMERLKEGRKGILSI

SEQ ID NO: 85514 - protein, 124 aa, Gossypium hirsutum
  Clone ID: LIB3166-021-P1-K1-B12.pep
EQDGEELYLQKIDKEQAELARANFSILRKEAQAILDLVIMDATHGSEPGKTISLYVLDAVVCIDHERYFLSQLQSRGFLRSCLMSISSFSSADGGHSLDSMQRACTLEAELALLLRICHKYGKS

SEQ ID NO: 85515 - protein, 95 aa, Gossypium hirsutum
  unsure (1)..(95): unsure at all Xaa locations
  Clone ID: LIB3166-021-P1-K1-B2.pep
SRGRAHARXXPRXXRLHTRAIFLGXXIXPVDPKPSQXXTGXSXXQAXRSXSGPNXXTARVDPXGXXSXQGXHIXLRXLINPITXEQXXNXXEXXS

SEQ ID NO: 85516 - protein, 118 aa, Gossypium hirsutum
  unsure (1)..(118): unsure at all Xaa locations
  Clone ID: LIB3166-021-P1-K1-B5.pep
YQSKRKNIRQERKKIPAQDLTMKRLRGYEIKANHWDSFYKFYRNTTDNKWGSPYLTRDFFHEMGSKMGDDVLLVVAEKRDELVAGALNLIGGDTIYGRLWXCDPQVYYPSLHFEACYY

SEQ ID NO: 85517 - protein, 126 aa, Gossypium hirsutum
  Clone ID: LIB3166-021-P1-K1-B8.pep
AANGSAHYDSSKESNTICSKTEASEIGSLDKCQVTCSNPEPSDFVTENTARSLEQEASIPSGKVFDEDPQDLPVEVSVKQLPTEGEKEESEIGKETTKKLSAAAPPFNPSTIPVFSSVTVPSFKDP

SEQ ID NO: 85518 - protein, 51 aa, Gossypium hirsutum
  Clone ID: LIB3166-021-P1-K1-C12.pep
QDWHKTEIINAPLLHMWDSSLLFSTHTSFKKIKCLLQFMYSDIKLWFRVKL

SEQ ID NO: 85519 - protein, 113 aa, Gossypium hirsutum
  Clone ID: LIB3166-021-P1-K1-C5.pep
MKTSLRRLRGLAHHKHGGEAKQRPDVLALPQLDELAQASQDMQDMRDCYEGLLYAAAATTNCAYEFSDSLREMGTCLLAKTALNDDEEIGKVLLMLGKVQFKLQKLLDSYRSH

SEQ ID NO: 85520 - protein, 123 aa, Gossypium hirsutum
  Clone ID: LIB3166-021-P1-K1-C6.pep
KEVPTVANAAVPTVVPAKGKHYRGVRQRPWGKFAAEIRDPAKNGARVWLGTFETAEDAALAYDKAAYRMRGSRALLNFPLRVNSGEPDPVRITSKRAKPEPSTSSSSGSENRTRGRTRGRTRG

SEQ ID NO: 85521 - protein, 122 aa, Gossypium hirsutum
  Clone ID: LIB3166-021-P1-K1-D10.pep
PTRPVRCCGTDFIIHILIIVLLVLFAGMMSGLTLGLMSLSLVDLEVLAKSGTPTHRKHAAKILPVVKNQHLLLCTLLLCNAAAMEALPIFLDSLVTAWGAILISVTLILVFGEIIPQAVCSR

SEQ ID NO: 85522 - protein, 124 aa, Gossypium hirsutum
  Clone ID: LIB3166-021-P1-K1-D11.pep
AEEMKMEAEKLKLEAEASRIALQEADKQLVVALEEAEAAKEAETRVLDQIKMLSEKTNAARASTSESGANITISREEFESLSRKVEESDNIAEMKVAAAMAQVEAVKASENEALKRLEATQKEI

SEQ ID NO: 85523 - protein, 99 aa, Gossypium hirsutum
  Clone ID: LIB3166-021-P1-K1-D2.pep
MVKPTQTEATTNHGSDPTGNGSKYKGVRKRKWGKWVSEIRLPNSRERIWLGSYDSPEKAARAFDAAQYCLRGTGAKFNFPDNPPDIAGATSLGPHEIQA

SEQ ID NO: 85524 - protein, 99 aa, Gossypium hirsutum
  unsure (1)..(99): unsure at all Xaa locations
  Clone ID: LIB3166-021-P1-K1-D4.pep
GYLGLFSDNNMPKPCPKHGLTRDVSCTANAISQIWSYTGVLISVLMPCPKHGLTGDLSSRCQCHVLDMVLHGTSHNLNDANAMSQIWSYMGSXYPNVMT

SEQ ID NO: 85525 - protein, 52 aa, Gossypium hirsutum
  Clone ID: LIB3166-021-P1-K1-D7.pep
NMMMLESAIAARFPAAANFCSSAFHRNSLPPSAYLFEIIYLFSAIHGLLRPD

SEQ ID NO: 85526 - protein, 115 aa, Gossypium hirsutum
  Clone ID: LIB3166-021-P1-K1-D8.pep
RGSIALGVPSSHSGPSPPSPSPPQSTPFTGSFGHSFGGTSSSNVSQARPMMRGIGMGSSVGSSSQMRPGGISAQHQQRPLQSSLRPTSSPTSQSPSTQNFQGHGLMRVSAVGSSS

SEQ ID NO: 85527 - protein, 123 aa, Gossypium hirsutum
  Clone ID: LIB3166-021-P1-K1-E4.pep
GSYARLNFPDHHSKESVDNSTTEIGSIESTSTSTLDDKRASYETPAVEPVEESKVLLEIKSTDKHDYSQVCTEEEAEDAATDARASESTGCNSSKELRIHNSNGINELKDEECQLRNSCMDSD

SEQ ID NO: 85528 - protein, 62 aa, Gossypium hirsutum
  Clone ID: LIB3166-021-P1-K1-E5.pep
SKKSPTFQLKKQNHIFFPIKLSNPTGRDGYCQNTETKLRITKKKLWRFSLSGRPRRMKTASL

SEQ ID NO: 85529 - protein, 123 aa, Gossypium hirsutum
  Clone ID: LIB3166-021-P1-K1-E7.pep
PTRPFEKSKRALIYEFMPHGSLDGFIYDRGLHHRSCRLEWRTLYDIALGIARGLEYLHQGCNTRILHFDIKPHNILLDENFCPKISDFGLSKLCERKESIISMACARGTIGYIAPEVFCRNFG

SEQ ID NO: 85530 - protein, 126 aa, Gossypium hirsutum
  Clone ID: LIB3166-021-P1-K1-F12.pep
ALIFGLGVFLGFFLRRLRREDDTNVDDHDHVSDMFFHNSDFRHGAAPRKFSLEELAKVTNMFKGEKLGEGGFGAVYRGYLRDLDTHVAVKRISKASKQGIKEYASEVIISRLRHKNLVKLIGWCHE

SEQ ID NO: 85531 - protein, 57 aa, Gossypium hirsutum
  Clone ID: LIB3166-021-P1-K1-F4.pep
AQIRIALLSGLSVKWPKPLKTHDVILCDPDGGEYTTYNYLLLAPTAILRKHEKWLTT

SEQ ID NO: 85532 - protein, 93 aa, Gossypium hirsutum
  Clone ID: LIB3166-021-P1-K1-F8.pep
MNNSGLAVEVSKDRNGTDQILLRNPRGASAKVSLHGGQVLSWRTDRGEELLFTSSKAIFKPPYAVRGGIPICFPQFGQRGSLEQHGFARNRTW

SEQ ID NO: 85533 - protein, 125 aa, Gossypium hirsutum
  Clone ID: LIB3166-021-P1-K1-G11.pep
RLMVRAPQLTHLGTGSFSPSDIVRQGDQEPDYVTSYAACRSLVCLSGFREIIPDYLPAIYPVCANLTSMNCSYANITAEQLKPIISKCHKLQTFWVLDSIRDEGLQAVAATCKDLRELRVCPVDA

SEQ ID NO: 85534 - protein, 81 aa, Gossypium hirsutum
  Clone ID: LIB3166-021-P1-K1-G12.pep
PKRKKTGGWNLNVRGTRTSDPKLPFKVSSVPQTTPFTAVLKFSTTQFKTPPQTNSIITNDCLGINPQQTHEMPPQTWIGTP

SEQ ID NO: 85535 - protein, 133 aa, Gossypium hirsutum
  unsure (1)..(133): unsure at all Xaa locations
  Clone ID: LIB3166-021-P1-K1-H11.pep
YRNGRAGPSDASGSVEQRSERIMRLSWTRADSRQAEDAXRGIAMQGASSANSRSAVQEKEKIHHLADGYYRTGDFSRRRQLVGQSLEMAPDWRPALSLMKATEEPIGXDGVMGSWTNCTAQGLIAGRIAGALT

SEQ ID NO: 85536 - protein, 51 aa, Gossypium hirsutum
  Clone ID: LIB3166-021-P1-K1-H12.pep
RRVLWELLKSCDLVEKDSKQKSFKCVQILVYCWFHRCFETLKKVVLFWCLP

SEQ ID NO: 85537 - protein, 49 aa, Gossypium hirsutum
  Clone ID: LIB3166-021-P1-K1-H2.pep
QTTLVHQLGTCKVRYWTGSVLPFLQTFHREHHSLERSLRAPKYPIPIKY

SEQ ID NO: 85538 - protein, 103 aa, Gossypium hirsutum
  Clone ID: LIB3166-021-P1-K1-H3.pep
MVSVGDSSSSRSPLGRNICTQGSASTSTAKKDRHTTGRSMRTIRSNFYQNDDSSCSFTSSVPQRSGCVSENLTESVIDMRLGQLASKSNAKSVKSDSETEGFL

SEQ ID NO: 85539 - protein, 124 aa, Gossypium hirsutum
  Clone ID: LIB3166-021-P1-K1-H7.pep
KRWGGWCFKYWCFGSYRRKKRIGPAVPVSETSSSRANMPAAEIPTQAVTVTLPFVAPPSSPASFLPSEPPSAAQSPAGLVSLTSISASMYSPGPASIFAIGPYAHETQLVSPPVFSTFTTEPST

SEQ ID NO: 85540 - protein, 95 aa, Gossypium hirsutum
  Clone ID: LIB3166-021-P1-K1-H8.pep
DAWAGLDPVAVLCEVVDDDGSMARLPKLRQFAERENLKIISIADLIRYRRKRDKLIELAGAARIPTMWGPFTAHCYRSILDGIEHIAMVKGEIGD

SEQ ID NO: 85541 - protein, 124 aa, Gossypium hirsutum
  Clone ID: LIB3166-021-P1-K1-H9.pep
LFFPYSPEHLVRTIPKLKDMKPYIYVSINASMKEHSHVSGSASALFVGGFSVMQMGKDIAQLNLTPDFNKTIITILGNTDVEIHWHGQDLLAINPIQKEGFGLSRRIDYEVKALSAKRFADKII

SEQ ID NO: 85542 - protein, 101 aa, Gossypium hirsutum
  Clone ID: LIB3166-022-P1-K1-B11.pep
SAYYKKEYSSFILQVPKNYYYYQIVFLCYSSCFGISLNPRKWGSQPGRRSFKKQARKSWKPTSRTKAPPLIGRPKLSMRTRQSSSTCPRSLKKKLTDSFRN

SEQ ID NO: 85543 - protein, 90 aa, Gossypium hirsutum
  Clone ID: LIB3166-022-P1-K1-B2.pep
SLSIGPGKVFCLPPLTTLLNHLLGFLSSLFHISFLGVLQFLHFYHSFNNPFLSQLSFHGYYPFPRFSQFHVWVQTRSWSSTSIFNSRLRQ

SEQ ID NO: 85544 - protein, 63 aa, Gossypium hirsutum
  Clone ID: LIB3166-022-P1-K1-B4.pep
DGSSDFVLTYEDKEGDWMLVGDVPWKMFLCSVKRLRIMRTSEATGLAPRLHERNCQRQRSKHI

SEQ ID NO: 85545 - protein, 79 aa, Gossypium hirsutum
  Clone ID: LIB3166-022-P1-K1-C12.pep
MSCNGCRVLRKGCRETCVLRSSLRWIESPEAQGNATLFLAKFFGRSDLLSLISSVPESQRPALFQSLLFEACGRTVNPV

SEQ ID NO: 85546 - protein, 75 aa, Gossypium hirsutum
  Clone ID: LIB3166-022-P1-K1-C2.pep
LVTDEERVESFKAALISAIVGTLAGLPICLTQVSSTTQLLLPLSLNFISCALLGITFGYASRRDSDNFQLKTGTS

SEQ ID NO: 85547 - protein, 127 aa, Gossypium hirsutum
  Clone ID: LIB3166-022-P1-K1-C6.pep
DAWADSWVIFLAKGYIRAGEPGEAESLLNSMGKFGVQPNVVIFTTVISGWCTAGKMNHAARVYEKMCEIGVTPNLATYETLIWGYGEAKQPWKAEELLQIMKEKGISAERSTIQLVADAWRAIGLLN

SEQ ID NO: 85548 - protein, 127 aa, Gossypium hirsutum
  Clone ID: LIB3166-022-P1-K1-D4.pep
PRVRVYGLLLDALTVGWAPADNSTTNFALIKPEPQEFLPQTSVEKVDTAAERTVPAVVPAKGKHYRGVRQRPWGKFAAEIRDPAKNGARVWLGTFETAEDAALAYDRAAYRMRGSRALLNFPLRVNS

SEQ ID NO: 85549 - protein, 115 aa, Gossypium hirsutum
  unsure (1)..(115): unsure at all Xaa locations
  Clone ID: LIB3166-022-P1-K1-D5.pep
MQTLGRTTTTMTITLNVAFNNTIDNVQAKIHVTAGLPPYHLRLILAGKHLAHGHSLADYNIHIDSTLHLGLRLIDPIIKPSSMAFTQKYNHYQXIYPKCYARVHPCAENYWKHKC

SEQ ID NO: 85550 - protein, 39 aa, Gossypium hirsutum
  Clone ID: LIB3166-022-P1-K1-D9.pep
IPIYDATNFIAMHSFSAINQVQIMKVHAKGKTNKEMKIK

SEQ ID NO: 85551 - protein, 76 aa, Gossypium hirsutum
  Clone ID: LIB3166-022-P1-K1-E2.pep
NPISVSFYKKKRKGRLRFPWKNWPVKVKPLKLEGLPRIEEEVVKKIALIEMVGRGPKPSLVSFHVSSSSRHKWNRS

SEQ ID NO: 85552 - protein, 64 aa, Gossypium hirsutum
  Clone ID: LIB3166-022-P1-K1-E4.pep
SDRSVPGPDKQSIKLCLRRGTRLLMTGSSDPEACCIKRQTSTTVVPLSHRRQFESESNTSQSIM

SEQ ID NO: 85553 - protein, 87 aa, Gossypium hirsutum
  Clone ID: LIB3166-022-P1-K1-E9.pep
SASLLSFFFFIFYEMIFLHISTPPKLFTYTKLHSTNTLFFIDPTHITTKRAPVLQYHNQKLYFISISNSYTLSQNIIIHLCLIHLQD

SEQ ID NO: 85554 - protein, 127 aa, Gossypium hirsutum
  Clone ID: LIB3166-022-P1-K1-F2.pep
HASAHASVLIDGLCKQGRLKLANGLLGKMIKKGIEPDEVTFTSLMDGFCKSGNTGGASKLLKMMIENGCLKTCHAFNSILHVLSKECELVKQYALFGKILKHGLGPSVVTYTILVGALFQADKVDQS

SEQ ID NO: 85555 - protein, 49 aa, Gossypium hirsutum
  Clone ID: LIB3166-022-P1-K1-F4.pep
NPFNDIFSTLMQNIMKHELKIYFAQCACHGNMACLAGNNIAICQNSIIG

SEQ ID NO: 85556 - protein, 63 aa, Gossypium hirsutum
  Clone ID: LIB3166-022-P1-K1-F5.pep
GPFNYSARDEAGIPREWYDALSTNKQEREGNWKSSQQLSEVYDRLACIISMESENSSLNRPPE

SEQ ID NO: 85557 - protein, 63 aa, Gossypium hirsutum
  Clone ID: LIB3166-022-P1-K1-F7.pep
KPQIFLLCGYNGERSSSILLYKLNPFKTCSSVFNRENGYFLHVDGHQSNGDSAAKKTKKLSSQ

SEQ ID NO: 85558 - protein, 122 aa, Gossypium hirsutum
  Clone ID: LIB3166-022-P1-K1-F8.pep
MVLISSFSSLALSESQIHAVQYSSISAAPAFLPAAPLSSSPGLPPDIEPLLPTPKGMAPSPTESSFPTIPSSPSPPNPDSMLAPGPGFAPSPFGSLPASTAVSLASAGVLNSTLFFGLLVAL

SEQ ID NO: 85559 - protein, 86 aa, Gossypium hirsutum
  Clone ID: LIB3166-022-P1-K1-G1.pep
SIDDQSSHYLSKDQPLVKMVDPILKSFDTKQVEAIGEVVNACVDPEPKRRPNMREVSARLREIIGISPDGAVPKLFPLRWAELEIV

SEQ ID NO: 85560 - protein, 133 aa, Gossypium hirsutum
  unsure (1)..(133): unsure at all Xaa locations
  Clone ID: LIB3166-022-P1-K1-G2.pep
QPSGPPKMLALPVASAGGLVGCVVLGHRKIFVCTPLTRSFKELPPGSVKXWSRNYCXGMTPEWKLNHWEATKVMWXGRDGECEVYDSVKNSWSRPGRMPSNIKVPLSLNFLSQAVSVDNTLCFMRSDPEGIVS

SEQ ID NO: 85561 - protein, 81 aa, Gossypium hirsutum
  Clone ID: LIB3166-022-P1-K1-G5.pep
SNGSFGFRICWILATLLLIFRFPEANHSTDAQTNQNESKSPLYFLFLPQIWLRGNQQNSSTPNSLTSSLCKISYVQSTLSP

SEQ ID NO: 85562 - protein, 65 aa, Gossypium hirsutum
  Clone ID: LIB3166-022-P1-K1-H6.pep
MIFVESDTTDSSSVTPPYLQFKCENERAHIQTGVRMKKQQKLLMVLWQLKLLSIQMHHHHHLEGR

SEQ ID NO: 85563 - protein, 128 aa, Gossypium hirsutum
  Clone ID: LIB3166-022-P1-K1-H7.pep
VLYDKKGLFIWQSFDHPTDTLLVGQTLRSNGPSKLVSRTSIADGSEGPYSFVMEQRFLKMYYKTKNSPLPLLYYRSYEFGNGQGSLANLKFYCSPETEQAYAYELGFTFDMKGSTSSGTYILSRPKYN

SEQ ID NO: 85564 - protein, 69 aa, Gossypium hirsutum
  Clone ID: LIB3166-022-P1-K1-H9.pep
PTRPATLRLGLTKFSIRCETYFPFKLLFVAFLLFCRNDLSLTQIHDRETNDSNQSRNEIVSETIRCPKS

SEQ ID NO: 85565 - protein, 66 aa, Gossypium hirsutum
  Clone ID: LIB3166-023-P1-K1-A2.pep
LALYCRAFHIINCQVLANLISQFGDGFYYCSPEMSVLVVVNSCLTYCLARKYEVASFWHRTSCNEN

SEQ ID NO: 85566 - protein, 81 aa, Gossypium hirsutum
  Clone ID: LIB3166-023-P1-K1-A4.pep
KKEEAKPSICGLLEISIGAVCAEPGTLSNDKKRDIQQLGHGQERATELEMHFHIAYEEGGPPSSDVELVQNMLTCFNHTLS

SEQ ID NO: 85567 - protein, 118 aa, Gossypium hirsutum
  Clone ID: LIB3166-023-P1-K1-A7.pep
MVKPICTTHSSASQTEYASDINTNSCSSNSSSSSSSSKYKGVRKRKWGKWVSEIRLPNSRERIWLGSYDSPEKAARAFDAALYCLRGRDAKFNFPENPPEIAGGTSLSPPEIQVVAAR

SEQ ID NO: 85568 - protein, 46 aa, Gossypium hirsutum
  Clone ID: LIB3166-023-P1-K1-A9.pep
NDPKKCQPKERKQLSVATKRQGPLINYQLPIVPPPRALCNQLLLDS

SEQ ID NO: 85569 - protein, 55 aa, Gossypium hirsutum
  Clone ID: LIB3166-023-P1-K1-B1.pep
NLLAKLHISKLLSCPLNNASNSLLCFWNTHSPGHESSNNWVHNALGGRQLVVCYQ

SEQ ID NO: 85570 - protein, 100 aa, Gossypium hirsutum
  Clone ID: LIB3166-023-P1-K1-B2.pep
GDPRVRPLLRQFLYYNAHINTQREVSFPHKKLPNITNHTNLPTPIIETTQQQIQPFIPPKQPSNSDLSPSLTPIHSKPSPTDNWICSFGSLFRYKTTRLY

SEQ ID NO: 85571 - protein, 126 aa, Gossypium hirsutum
  Clone ID: LIB3166-023-P1-K1-C11.pep
PRVRNTSTGFGKLSSTLSNLEILDLSYNYLNDSILLSLSELSSLRYLDLSYNQFEGSSHPRGFQLLSRLNNLETLDLSWNSLKNSILFHMRNLSSLKTLRLRRNQLKGRLDHIQGLNNLTNLKYLD

SEQ ID NO: 85572 - protein, 128 aa, Gossypium hirsutum
  Clone ID: LIB3166-023-P1-K1-C12.pep
RAGFPLSDSGAVRNTEESFQEDCLPFFLDDDSSGPDGSPSFAKKRSLMKSAYGFSADAKDAREATSSPVNRVDFTSKYSGARQKLKDASFRLESCKVSSETLHEPHKSMDQRSVNTRSRVAESLELID

SEQ ID NO: 85573 - protein, 90 aa, Gossypium hirsutum
  unsure (1)..(90): unsure at all Xaa locations
  Clone ID: LIB3166-023-P1-K1-C8.pep
VSSVYQNSFSRCSLQPGWTLFLLTTLTGPTFTLEVKSSVTFYNVQTNIQHGESIPAYQNXMILVTKQMEACRTLAASNIQNESTVHLDLR

SEQ ID NO: 85574 - protein, 66 aa, Gossypium hirsutum
  Clone ID: LIB3166-023-P1-K1-D4.pep
REEIGEFNLCGHFISKPIPKSFPNPKYIRVLTNTGHGTKANTYYPLTTIIPWHIKRSSTLWKFKEG

SEQ ID NO: 85575 - protein, 126 aa, Gossypium hirsutum
  Clone ID: LIB3166-023-P1-K1-D8.pep
NIQNFRTTLRCMRFWAKRRGVYSNVAGFLGGINWALLVARICQLYPNALPNMLVSRFFRVYTQWRWPNPVMLCAIKEGSLGLQVWDPRKNPKDRYHLMPIITPAYPSMNSSYNVSSSTLRIMTDEF

SEQ ID NO: 85576 - protein, 112 aa, Gossypium hirsutum
  Clone ID: LIB3166-023-P1-K1-E1.pep
MRLNKEARNLSNSSTNTKSDSSKESMAEPYIEQVEYLDVLTKTGKKTGVSKPRGDVHRDGDYHKAVHVWIFAESTQELLLQKRADCKDSWPGLWDISSAGHISAGDSSLITA

SEQ ID NO: 85577 - protein, 67 aa, Gossypium hirsutum
  Clone ID: LIB3166-023-P1-K1-E10.pep
VITLVQSSSIHQCHIKQCIAPSIGVDAGVMVPLALHPLTVDIQPAMHPPLCSMSLYHREIIEEFLFS

SEQ ID NO: 85578 - protein, 105 aa, Gossypium hirsutum
  Clone ID: LIB3166-023-P1-K1-E2.pep
GIGPPKGESIYEEAVEFEPVIHHNQFCPWVNGTVAAAGCNGSSADVVALCGWQLTLDALDALRSQGHIPVQTVQSESAASLYRDDHQTPGKKLHRRRPMNKNHGQ

SEQ ID NO: 85579 - protein, 74 aa, Gossypium hirsutum
  Clone ID: LIB3166-023-P1-K1-E6.pep
MNPNQCFKVPPYKNKLELTSQHTTTRLVRSPRFEGFKHDLRSRGLCLVPVSSTFPMTHESTVDFWTPTFGGTFR

SEQ ID NO: 85580 - protein, 103 aa, Gossypium hirsutum
  unsure (1)..(103): unsure at all Xaa locations
  Clone ID: LIB3166-023-P1-K1-E8.pep
KLSANLAHLLLKQFEHDTVLIPKETSWFGYYPNGAFKPVVQPQETKLYSEDWIGLXTLDDAGKVHYVNVSGGHLGISKEDMKKHVVPFLKDEAPMADSIETHG

SEQ ID NO: 85581 - protein, 57 aa, Gossypium hirsutum
  Clone ID: LIB3166-023-P1-K1-E9.pep
KRRLYRVSCTLLVMDLGPARLQRPGITKTQCVELRAWHARVLHGTDYGYYYNIAFKT

SEQ ID NO: 85582 - protein, 52 aa, Gossypium hirsutum
  Clone ID: LIB3166-023-P1-K1-F10.pep
LIFFLFINKIIDIHSQGSLNIIKKKFSTLHLTILSKKHHTYISQNAQSILPL

SEQ ID NO: 85583 - protein, 56 aa, Gossypium hirsutum
  Clone ID: LIB3166-023-P1-K1-F11.pep
LCPLPLLVKLITLDTLYFQGSCKKIKNKMLFSVKTLVTQCVKFPQGCFARMTVLNC

SEQ ID NO: 85584 - protein, 117 aa, Gossypium hirsutum
  Clone ID: LIB3166-023-P1-K1-F12.pep
SLILMGKHDDERSVFPLTSLQIGDLQSYLSDLSLFLAPESKKFYILVDNRPWLRDLGSRPAHLWQLMVTKSRLSPFANTKGRRARKDGKEASSKSNAKDAKKLERWFSLVDAAMLSK

SEQ ID NO: 85585 - protein, 50 aa, Gossypium hirsutum
  unsure (1)..(50): unsure at all Xaa locations
  Clone ID: LIB3166-023-P1-K1-F3.pep
VPXLFILFTYILYYKVIQRSDSNGRRYAIFLSPSSNSVEASSDRDEIWTV

SEQ ID NO: 85586 - protein, 58 aa, Gossypium hirsutum
  Clone ID: LIB3166-023-P1-K1-F4.pep
AALSFTQLKMFFQFLGRMIEELDKCLEILGLYINFFLLHDLRFYLVEDISFTERCIIT

SEQ ID NO: 85587 - protein, 129 aa, Gossypium hirsutum
  Clone ID: LIB3166-023-P1-K1-G10.pep
HASAHAFVARTLEELKNFKAAGDPFTEEFFQNFQSVYKQQMAMLEKLQLRKNKLDKKLRYIHAWRKVSSMIFVATFATVLICSVVAAAMAAPPVAAALAAAASIPLGSMGKWIDSLWKNYENALKGQKE

SEQ ID NO: 85588 - protein, 117 aa, Gossypium hirsutum
  Clone ID: LIB3166-023-P1-K1-G12.pep
MAYSTALRRVPVSTLFSKLANLSPARTVSVAFPTVARSFNTNAQLTKFNDEDRSVDVQRQSDRSVSRRRDSPRFFSDVFDPFSPTRSLSQFLNLMDQFTDHPLLSNSELSSRKGWDM

SEQ ID NO: 85589 - protein, 90 aa, Gossypium hirsutum
  unsure (1)..(90): unsure at all Xaa locations
  Clone ID: LIB3166-023-P1-K1-G3.pep
LXRYSFPIIRVVGIHWFIFFIQCRWNTQLVITLCFSMWMVSRNKSCDAMGVSLDSSATKTKRVRRLFFPKTLGCLNEKFLARPTPLGGGP

SEQ ID NO: 85590 - protein, 112 aa, Gossypium hirsutum
  unsure (1)..(112): unsure at all Xaa locations
  Clone ID: LIB3166-023-P1-K1-G4.pep
MDYWKLVWVFVVAFLFGGYQSEGCWEIEKAALFQLKPFFPRVNGEEISWGKGNCCRWNWVECSTSTGRVTQLFLEDSYDRETTRISIRDGXLNISLFLPFEELKSLNLGGNY

SEQ ID NO: 85591 - protein, 74 aa, Gossypium hirsutum
  unsure (1)..(74): unsure at all Xaa locations
  Clone ID: LIB3166-023-P1-K1-G5.pep
PASEVDNSWSYLYGAAICRDLFAIATYFVYNHMCVTSDADTQSQCVTSDKGQVTNXGGCWHLLALLWAFGRDES

SEQ ID NO: 85592 - protein, 90 aa, Gossypium hirsutum
  Clone ID: LIB3166-023-P1-K1-G6.pep
VVENDQCPRIFQREEDSSHVFQQCLESSVNVLTNRSDISVVVSGQSFRLMESFTRFVEDQKSQFILMQPLTVNLLDRLWAYLYETRKGRF

SEQ ID NO: 85593 - protein, 46 aa, Gossypium hirsutum
  Clone ID: LIB3166-023-P1-K1-H3.pep
MSRLVNSGELLCCKPIPEGQQPIKILLDLLENKSNKMEIGSCCIIT

SEQ ID NO: 85594 - protein, 139 aa, Gossypium hirsutum
  unsure (1)..(139): unsure at all Xaa locations
  Clone ID: LIB3166-023-P1-K1-H6.pep
PERKRPTRPPTRPIVHHLLYNLLHPLGGGSWVYYLIAWLATLALILLFLPFRPQKKLNLPPGPKPQSXIGNLDHTGSLSDRSIHSLSEKYGALMQLTDRSFPEGVAYSAEMAKAFLKTHEAISAGRPKIAEREYTAHNY

SEQ ID NO: 85595 - protein, 60 aa, Gossypium hirsutum
  Clone ID: LIB3166-023-P1-K1-H7.pep
DAWAGLDQKQINNWFINQRKRHWKPSEDMQFVVMDAAHPHYYMDNVLGNPFPMDLSPTLL

SEQ ID NO: 85596 - protein, 128 aa, Gossypium hirsutum
  Clone ID: LIB3166-024-P1-K1-A11.pep
TPSSNSSIYVSNNPQEARSNPFLDPIEHSNNPPALAMPPPQSRKPVTEPSPTSYSYSSSSPDKAAPPTESHSPQRPGIGPYHNSGVTPSYMGRQSSALNGLTMHGADSQGSYTNTAVEIDGQSNVGRS

SEQ ID NO: 85597 - protein, 62 aa, Gossypium hirsutum
  Clone ID: LIB3166-024-P1-K1-A12.pep
KTFFTAKFIMKNTYVCSDDLNRPILFTMPRLDRFKTLTGLFSCSGRTPKLLSLLNSLFVVWR

SEQ ID NO: 85598 - protein, 92 aa, Gossypium hirsutum
  unsure (1)..(92): unsure at all Xaa locations
  Clone ID: LIB3166-024-P1-K1-A6.pep
MNPSDNSDHPQLPTIKIHHPSFPHHPTFTGTPTXGARRKIGVAVDLSDESAFAVRWAVQNYIRADDAVVLLHVSSTFVLFGADWGPLPHILQ

SEQ ID NO: 85599 - protein, 47 aa, Gossypium hirsutum
  Clone ID: LIB3166-024-P1-K1-A9.pep
PVSSQFLNIRTAHLYHTSADPCANYLSKKLPIDTNYLKPMQHRTDIT

SEQ ID NO: 85600 - protein, 54 aa, Gossypium hirsutum
  Clone ID: LIB3166-024-P1-K1-B9.pep
TIQSIPNQLKSQNLTPNYFFPSLLTSIIHRSVDLIFKHRPKLSTKHTSVALLQS

SEQ ID NO: 85601 - protein, 106 aa, Gossypium hirsutum
  unsure (1)..(106): unsure at all Xaa locations
  Clone ID: LIB3166-024-P1-K1-C12.pep
MESPPPPPAAAPPLSTTTTTTAAATAPPATYPDSIDSSPRSRNTDSWDDPALPTTLHPKLRLMCSYGGTIVPRPHDKSLCYVGGDTRMVVVDRHTXLAXLHHXLSL

SEQ ID NO: 85602 - protein, 124 aa, Gossypium hirsutum
  Clone ID: LIB3166-024-P1-K1-C4.pep
RLTILVLPNSIGTWEHLRELDLARSEDICELPRTFYKLYCLQSLNLGATSLKQLPDSVQRLIELRYLVITIEATHLKEIRAGCWTSLQYLELYNCFELECLPEGMQYLKSLRTLILTYCDSLVS

SEQ ID NO: 85603 - protein, 55 aa, Gossypium hirsutum
  Clone ID: LIB3166-024-P1-K1-C8.pep
MTLESLPGSSGYLDLFPERRMSYFSNPYVLGLTVIAGIGGLLFGYDTGVISGALL

SEQ ID NO: 85604 - protein, 129 aa, Gossypium hirsutum
  Clone ID: LIB3166-024-P1-K1-D10.pep
PRVRILTILLKEKADEGGKCLSESHWNSHCVVTRNKFESMCGGQKEGYAVLSYLSGCRKGQYLSTNKKELIEGIKVSLSSAVVSGVSSLDFDTLHLIWTQEKLQQQLDVIDRRWETSRQSALASLKSGN

SEQ ID NO: 85605 - protein, 130 aa, Gossypium hirsutum
  Clone ID: LIB3166-024-P1-K1-D4.pep
GTFQIFLTVFNRPMDLATVKKRITSGHYSNPLDFAADIRLTFSNAMTYNPPGNDVNFMAKTLSKYFEVRWKAIEKKLPVTKNVDAVPSTAAAPIEGETKSNVLPLKKKKINPKDAMDKPEPIRQIMTDWE

SEQ ID NO: 85606 - protein, 67 aa, Gossypium hirsutum
  Clone ID: LIB3166-024-P1-K1-D7.pep
VFTAIFCIMDMDKPDKPHHFEPQIYNMERGARDKLINHYNTMSIRDFNEKYGDLWDFTIKKDDITER

SEQ ID NO: 85607 - protein, 119 aa, Gossypium hirsutum
  Clone ID: LIB3166-024-P1-K1-E1.pep
MMSLASIQGSISRKQYDVFLSFRGEDTRWNFTDHLYHALRRSGIVTFKDDLKLEAGEEIRPGILKAVQQSWCSVIVFSETYAFSGYCLEELAEIVKQRKNGHKVFPIFYNVDPSDFKNQ

SEQ ID NO: 85608 - protein, 59 aa, Gossypium hirsutum
  Clone ID: LIB3166-024-P1-K1-E11.pep
GDLWILGASMRILLRKFCRSLWQRQFTMTSKCREGNCQGSSQLEVPINYYKKIIRTEGW

SEQ ID NO: 85609 - protein, 63 aa, Gossypium hirsutum
  unsure (1)..(63): unsure at all Xaa locations
  Clone ID: LIB3166-024-P1-K1-E2.pep
ERMPWMPRDFKYMSTASFWLQVMAAVPPKAAILPPTSEQQFPIYNCIHELLSQLRPIIXNIYA

SEQ ID NO: 85610 - protein, 54 aa, Gossypium hirsutum
  Clone ID: LIB3166-024-P1-K1-E3.pep
LLEVHCLRQQETHLDLNHTLVSPESTTLTHLPNEESLVKTSLPHHIPQLPMTFI

SEQ ID NO: 85611 - protein, 129 aa, Gossypium hirsutum
  Clone ID: LIB3166-024-P1-K1-E4.pep
AKTIMDEMLYCINGENIRDGTPTNPCAPDRVPGGSSSGSAVAVGAGLVDFSLGSDTGGSVRVPASYCGILGFRPSHDAISTSGVIPMAQSFDTVGWFARDPAVLNRVGRVLLHLPNVNPVRPSQIFIPE

SEQ ID NO: 85612 - protein, 42 aa, Gossypium hirsutum
  Clone ID: LIB3166-024-P1-K1-E5.pep
LNKKVKSHMIQFTILIQTLLAFPIYPLDLLNLKLEASEMLPQ

SEQ ID NO: 85613 - protein, 70 aa, Gossypium hirsutum
  Clone ID: LIB3166-024-P1-K1-F10.pep
KRKKENERFTLRVLRGSVCSVEIGAKKGFHGRNPHPSRLGYAKSPLTMVDECLKQGIRFRLRKNTMDARV

SEQ ID NO: 85614 - protein, 74 aa, Gossypium hirsutum
  unsure (1)..(74): unsure at all Xaa locations
  Clone ID: LIB3166-024-P1-K1-F11.pep
IIRYINSXKVFFQNIGFYFTPKTENENAHFIVKEAIRRGEGHYLLGLHPQSFHQARERRRQEEQEEGVSRLPDA

SEQ ID NO: 85615 - protein, 61 aa, Gossypium hirsutum
  unsure (1)..(61): unsure at all Xaa locations
  Clone ID: LIB3166-024-P1-K1-F2.pep
SHRTRPAGSLSEDAVSVYHCMCYXCNDLSKGQICLPSIKWYLILGGANPNPGENSIKAFSF

SEQ ID NO: 85616 - protein, 82 aa, Gossypium hirsutum
  Clone ID: LIB3166-024-P1-K1-F3.pep
QHASEEEELQQSPLSVLHFEYGGDDEDGEEAKEIEEKAWELLNGVKETSPLTRYKKNNICIDKLLLDLFREELETKWDQTRN

SEQ ID NO: 85617 - protein, 128 aa, Gossypium hirsutum
  Clone ID: LIB3166-024-P1-K1-F7.pep
HASAHASVHASAKSHQGENEFWAEIEMLSQLRYINLVSLIGYCNEKQEMILVYDYMVNGTLRDHLYKNDNIPLQWKQRLQICIGAARGLEYLHSGAVQRIIHRDVKTTNILLDETWVAKVSDFGLSKM

SEQ ID NO: 85618 - protein, 59 aa, Gossypium hirsutum
  Clone ID: LIB3166-024-P1-K1-G12.pep
HDSHTQNIKCMINWEKLQGNEWNKATWLNPEPRITCEASCSIYVLINNTWPNQTPTRVR

SEQ ID NO: 85619 - protein, 127 aa, Gossypium hirsutum
  Clone ID: LIB3166-024-P1-K1-G7.pep
FGSSWFIFFRAVLVATLCLAAAQKLFLNMLRSVFRAPMSFFDSTPAGRILNRVSIDQSVVDLDIPFRLGGFASTTIQLLGIVGVMTEVTWQVLLLVIPMAAACLWMQKYYMASSRELVRIVSIQKSP

SEQ ID NO: 85620 - protein, 105 aa, Gossypium hirsutum
  unsure (1)..(105): unsure at all Xaa locations
  Clone ID: LIB3166-024-P1-K1-H2.pep
MWKNGSFWYILQSCQKKRLLLPVQTLKTSSLLSNELHMTLYGFIVFEVSWSNVRGLNYLNELQTDTSLAVEAKFMRRWXFDSIDQAAKRLSSWFSGSLVEQRNLK

SEQ ID NO: 85621 - protein, 50 aa, Gossypium hirsutum
  unsure (1)..(50): unsure at all Xaa locations
  Clone ID: LIB3166-024-P1-K1-H6.pep
WSEPMRGYQXCSTTCGFQRNLFLLFATSKRAKEILQKVLNYCHLSSAGNS

SEQ ID NO: 85622 - protein, 124 aa, Gossypium hirsutum
  unsure (1)..(124): unsure at all Xaa locations
  Clone ID: LIB3166-024-P1-K1-H9.pep
MAFSTTKLLLTELATTVKLVPTNYIRPISDPPNLVDVHVSDVSIPLIDLQDLHGPNRSHVLKQIALACQHDGFFQVKNHGVSEATINNMLRLARDFFYLPESERLKNYSDDPSVANRXSTSFNV

SEQ ID NO: 85623 - protein, 45 aa, Gossypium hirsutum
  Clone ID: LIB3166-025-P1-K1-A1.pep
NKIEDLPCKHAVDLFWFRRNQSQNEIMRLKKCPSRHENTVLHLGR

SEQ ID NO: 85624 - protein, 108 aa, Gossypium hirsutum
  unsure (1)..(108): unsure at all Xaa locations
  Clone ID: LIB3166-025-P1-K1-A12.pep
QVTIPLEEIKIISVTVFVNPYLEPDEEEEKEKSNGDKAAEDEDNDKIGSWYSNPGTXTAESGAVGSGGVGKYLKARNTQSESATADTNITAISVTKKRKATPGEFKDF

SEQ ID NO: 85625 - protein, 58 aa, Gossypium hirsutum
  Clone ID: LIB3166-025-P1-K1-B1.pep
QSLIDGHQIHIMAVNYRAIFTAPISTTLASFAATEPENNAQNMLRCLPVCHFNILPCK

SEQ ID NO: 85626 - protein, 100 aa, Gossypium hirsutum
  Clone ID: LIB3166-025-P1-K1-B11.pep
EIYKSADILVFNTGHGWNHEKTSKGEDYYQEGDHVYEELNVVEAFRRALTTWSKWVDDNVNPSKTMVFFRGYSATHFSGGQWNSGGVCDSEMEPIRNDTL

SEQ ID NO: 85627 - protein, 127 aa, Gossypium hirsutum
  Clone ID: LIB3166-025-P1-K1-B4.pep
FQVKLSDSSYPDSTISCKGGVKEDKKLRLSKVELSPVRDMFIDISCLDMGLDLRLALSHKRILTSMTEDEMQSIKNLIDSAVLDPDVKGGLRWPFGKATSGDRYSVVGIWHTMSTAYKNSSIRLKVR

SEQ ID NO: 85628 - protein, 116 aa, Gossypium hirsutum
  Clone ID: LIB3166-025-P1-K1-B5.pep
DLDNGFGGGLRREDDSNGGFGNGCFNEGGLKKSGYGDILASLLLLEEEAKQEEAEWMSESQQEKALFESNHKRKVQAMNEFYDQLQQHYSETVKPSWKSVSVLAATVATTLGNDTT

SEQ ID NO: 85629 - protein, 67 aa, Gossypium hirsutum
  Clone ID: LIB3166-025-P1-K1-B6.pep
GSNSSSGGDESFKTGVSGDPNNQVAKRAKVEEGPSSSRKPSESHGGRRKGGSLGGVLRKKYFCFMPF

SEQ ID NO: 85630 - protein, 119 aa, Gossypium hirsutum
  Clone ID: LIB3166-025-P1-K1-B7.pep
PRVRPRVLPRVRSLPQGRCLSSSSLPRYLYLSPFSLQMQQKPKGVYDKIPIHKIPIDMNLLLRGFWIPKEQGSQRHERTSGSGIPESSQGQTEQTSMRNQSDREHTAFGLPAAVSLGNA

SEQ ID NO: 85631 - protein, 125 aa, Gossypium hirsutum
  Clone ID: LIB3166-025-P1-K1-C12.pep
RFSFARQVDSKYRLADGESPFNIYGQMPQNHPSGQDFTDNRDSYLSKFGVSNGLYSCNFEESDNFSSSPSVFSNKLSASRAQIPVPPGFSVPSRAPPPGFSSIERVNHAFDATSGNHLMDSSSLL

SEQ ID NO: 85632 - protein, 113 aa, Gossypium hirsutum
  Clone ID: LIB3166-025-P1-K1-D1.pep
MAESVGGSGSNDDDGFREQDRLLPIANVGRIMKQMLPPNAKISKEAKETMQECVSEFISFVTSEASDKCRKERRKTINGEDICWALVTLGFDDYAAPLRRYLNKYREVEGDNK

SEQ ID NO: 85633 - protein, 69 aa, Gossypium hirsutum
  Clone ID: LIB3166-025-P1-K1-D10.pep
VWKKPNNNMLVHSNLILFSLISFHFLYCQLISSAVQRCHLSEDLCQLSIVLKSSPPIIRVSSEYFSVFL

SEQ ID NO: 85634 - protein, 113 aa, Gossypium hirsutum
  Clone ID: LIB3166-025-P1-K1-D5.pep
MDLSHWKRGQITRIGSGFCVLLTLHFTFQLLAQHLFHWKNPKEQKAIVIIILMAPIYAVVSFVGLLDVRGSKEFFTLLESIKECYEALVIAKFLSLMYSYLNISISKNTVPDE

SEQ ID NO: 85635 - protein, 84 aa, Gossypium hirsutum
  Clone ID: LIB3166-025-P1-K1-D6.pep
MDEIDVPPFFICPISLEFMKDPVTVSTGITYDRESIEKWLFSGKNTTCPVTKQVIVDCELTPNHTLRRLIQSWCLLNASHGIER

SEQ ID NO: 85636 - protein, 34 aa, Gossypium hirsutum
  Clone ID: LIB3166-025-P1-K1-D8.pep
VICEPNLHKNIGLLLTYFIRIRDECRQYLYMYSA

SEQ ID NO: 85637 - protein, 60 aa, Gossypium hirsutum
  unsure (1)..(60): unsure at all Xaa locations
  Clone ID: LIB3166-025-P1-K1-D9.pep
MVKGLNNVVEGFSQDFVVSRSLKISTLMLXXHCYGSLTRLYKQXMDRFSIEEQKFYGRVG

SEQ ID NO: 85638 - protein, 90 aa, Gossypium hirsutum
  unsure (1)..(90): unsure at all Xaa locations
  Clone ID: LIB3166-025-P1-K1-E11.pep
TXHKPRXXYXNLTXXTGGAPPTXYNKXTTXKTKYFXXRYLXXTXYHLHSXXDSQKXXKIGXESQKLSAKQEKKKRKINNLLSFLALXTDG

SEQ ID NO: 85639 - protein, 61 aa, Gossypium hirsutum
  Clone ID: LIB3166-025-P1-K1-E12.pep
ILECRSLCYEMYSLYAWLKICAIYIQTFSVCLNDSDMILTTLVLSANTHRLLVTYTNAFSS

SEQ ID NO: 85640 - protein, 145 aa, Gossypium hirsutum
  unsure (1)..(145): unsure at all Xaa locations
  Clone ID: LIB3166-025-P1-K1-E6.pep
CLXTRXXPIPKTWAXXVVLGTXIIXGSPDLPTSXXEALPRXXEPPDXXDXXXXRXNLXRKPKGRIPRRGIXXNPSXXTIQESPVRWDPQIPXRFKGTLXXRSIRGSFXXKKNLXXSGTXXGFTPETDIXXFRRRSRPRXXRVSYF

SEQ ID NO: 85641 - protein, 71 aa, Gossypium hirsutum
  Clone ID: LIB3166-025-P1-K1-F12.pep
SHLNTNFLSTPTMKTKSVYSSAGCPNNLDNDNNQNLQAFPHNQHLHKFAVNPLGDELTFYVYNINRNSHKP

SEQ ID NO: 85642 - protein, 95 aa, Gossypium hirsutum
  Clone ID: LIB3166-025-P1-K1-F7.pep
NPSSLGLGRNTPSSLQAPYNVRASTSTALVRQHSLCTTPAHLYLQRNGQKDNSNNGQYKKEQNCILLFLFFEHSAIKPMSLYCIRVLFYSSIQTT

SEQ ID NO: 85643 - protein, 73 aa, Gossypium hirsutum
  unsure (1)..(73): unsure at all Xaa locations
  Clone ID: LIB3166-025-P1-K1-F8.pep
GDDRYYRRKFLRLFFISLFQRTANGILVRQCKRKEGKQSAKTSLLPXSFSLSFNSSSSDFFSSRVTVQWNEKE

SEQ ID NO: 85644 - protein, 128 aa, Gossypium hirsutum
  unsure (1)..(128): unsure at all Xaa locations
  Clone ID: LIB3166-025-P1-K1-G1.pep
PRVRSKSFLFKKSVNGVCTRMGDVSQEIKRVRAQMEENEDLAILMRGLRGQNLRDSQFADDNIQLRLVEVDESSEFLPLAYDPASISAYWGKRPHAVATRIIQLLSVAXGFLSRLAMDVVNKKVKENE

SEQ ID NO: 85645 - protein, 125 aa, Gossypium hirsutum
  Clone ID: LIB3166-025-P1-K1-G10.pep
TESLNDMKKVNTKYTCDVKGGKLKEGEKPKDEKEEKDGKDESRSNTNKELKEKRKPEEPSLKHPGLILQTKWSKDSKLRPLSLSLDSLLDYTDKDIEESTFELSLFAEVLYEMLQYQMGCRILTF

SEQ ID NO: 85646 - protein, 48 aa, Gossypium hirsutum
  Clone ID: LIB3166-025-P1-K1-G2.pep
FPFQSISSFNSMIDQKKFFFFINNKINCMNLAQSNTDIDVLFVCNDLV

SEQ ID NO: 85647 - protein, 121 aa, Gossypium hirsutum
  Clone ID: LIB3166-025-P1-K1-G8.pep
MLENTIDEPVELWGVRIFCSNPADSFTLSLMEPPSADSKSEQSQGFLEGFSLEDRVLQSRETLTIWLSCKPKDMGLHTTVVHFDVDDNRIERVVFLLAEDNVSQSLASTKPYRRAPRRRNH

SEQ ID NO: 85648 - protein, 75 aa, Gossypium hirsutum
  Clone ID: LIB3166-025-P1-K1-H2.pep
LTYADFIIFVALTIQFTLCVILGGTNLNINPSTTRKQMKLDTMTEMLTYTHVPRSPRSVRVRDLEHRPLMRNMNS

SEQ ID NO: 85649 - protein, 121 aa, Gossypium hirsutum
  unsure (1)..(121): unsure at all Xaa locations
  Clone ID: LIB3166-025-P1-K1-H9.pep
IQAALAAVGALKIWLGVYRLAETGEALVSSVDKIIFVDXTGVGKMIMENAAXTLIPVTLELGGKMPLLXCEDVDIQRXPIAVRAALQXSGQNCAGAERFYVHRDIYNSFVNQVTKIVKSVS

SEQ ID NO: 85650 - protein, 71 aa, Gossypium hirsutum
  unsure (1)..(71): unsure at all Xaa locations
  Clone ID: LIB3166-026-P1-K1-A3.pep
QIPSXFLIKGSLHFKKPTFPVIPSGEXSNGYTGXVEVIPESFYHSHARTLWVSDDREKGRRWSGRRWAXXR

SEQ ID NO: 85651 - protein, 110 aa, Gossypium hirsutum
  unsure (1)..(110): unsure at all Xaa locations
  Clone ID: LIB3166-026-P1-K1-A8.pep
ILNVNVNNGGVMYVKVITDEQLETLRKQIAVYADICEHLVEMHNNLTAHQDLAIGRLGSLYCDXLMTCAGHKITARQXWTPTPVQLXILARDFYQTTGTASEPMIQDVTS

SEQ ID NO: 85652 - protein, 108 aa, Gossypium hirsutum
  Clone ID: LIB3166-026-P1-K1-B3.pep
LDHKQEESLFEDISSALCELTQLCEYLNDSNMNRNLNEINSDSSEQNDTMQKYIQKATELQGMCKSIRVTLDQHVFREELELWPLFDRHFSVEEQDKIVGRIIGTTGA

SEQ ID NO: 85653 - protein, 95 aa, Gossypium hirsutum
  unsure (1)..(95): unsure at all Xaa locations
  Clone ID: LIB3166-026-P1-K1-B4.pep
WVLGILPLFGTRCNLXXLPPEIQVLKHXCVSFPXXLKLKATSPVARXLCLQGMVSNIFTHQENSXSLEGILNXHRGARXYSESQHPLIEGNIRYD

SEQ ID NO: 85654 - protein, 34 aa, Gossypium hirsutum
  Clone ID: LIB3166-026-P1-K1-B6.pep
METKEKKFLTVAPFECAWIKDLKFREAGRGCVSF

SEQ ID NO: 85655 - protein, 65 aa, Gossypium hirsutum
  Clone ID: LIB3166-026-P1-K1-B7.pep
RDQVFRGSPGFEADHKTHHHSSLNVNVKGDVLPDGSATVNNVQKAAYRTDAFRSTTPGHSPGAGH

SEQ ID NO: 85656 - protein, 58 aa, Gossypium hirsutum
  Clone ID: LIB3166-026-P1-K1-B9.pep
TITKKTRTGMKINYILLDKMIQCRTTFKKAQSCRGGAYAVQPHWINMRPAKNMNSGRS

SEQ ID NO: 85657 - protein, 79 aa, Gossypium hirsutum
  unsure (1)..(79): unsure at all Xaa locations
  Clone ID: LIB3166-026-P1-K1-C10.pep
FVLYREFLVEFDFFSLFMNSMEVXNRDCVYILLSRCCASLALFSIGLGGGASCKKGRVFFFFFLVLFIFFCPFVPRPFF

SEQ ID NO: 85658 - protein, 119 aa, Gossypium hirsutum
  unsure (1)..(119): unsure at all Xaa locations
  Clone ID: LIB3166-026-P1-K1-C11.pep
IEXXRRNXRKDRKDPASTXRIXPLKSWXXGAXLGVNEISIVXXKIPIXKPIWGSHIXVSXEESAPXVVLNXHVRAKEIVGVSVTIPKLHVPHFPRLRNSFKKEKKNAEVEAIRLPDGVG

SEQ ID NO: 85659 - protein, 146 aa, Gossypium hirsutum
  unsure (1)..(146): unsure at all Xaa locations
  Clone ID: LIB3166-026-P1-K1-C4.pep
RKQNXADFVCVLRXSRCNKIFMSRKKKWGVXXFGXLSAXAAKPSXEQLSEMMCEPFNFQRKKSFCGPAPSMLYTSRRLPLXAPMFLYXWTESRLFCXXADGMIVFESGRRICRRAIQLDYNSVKAHYMLGLALLQKQKLDEGVKEL

SEQ ID NO: 85660 - protein, 55 aa, Gossypium hirsutum
  Clone ID: LIB3166-026-P1-K1-C9.pep
IPPLFTSNLIQRTSPFLSNALVSVLSSLSRFSFFLDLPLPLLILFFPLFLTFRLN

SEQ ID NO: 85661 - protein, 127 aa, Gossypium hirsutum
  unsure (1)..(127): unsure at all Xaa locations
  Clone ID: LIB3166-026-P1-K1-D5.pep
ASDRXTIYLVVLGLQVIERGGEADFILAHDTEALGLPSGLVRPMSLDGLEKILEHWAAKKIPMVGANPDFVTVEARALSIMPGTLADKYEKLGGEVKWMGKPHKIIYESTMAMVGVEASDSIAVRDS

SEQ ID NO: 85662 - protein, 58 aa, Gossypium hirsutum
  unsure (1)..(58): unsure at all Xaa locations
  Clone ID: LIB3166-026-P1-K1-D6.pep
NLKKNNQAYQKRXCTLIGERRFXHXLRTPTCERRMLDRKKRFREYLEKXKIGRRGSDP

SEQ ID NO: 85663 - protein, 57 aa, Gossypium hirsutum
  Clone ID: LIB3166-026-P1-K1-E1.pep
AGNYQDQGSDLSNEFILCAHVDLVYVRAIASMLLVLIEKSYPKGFLLSSAIYSEFYC

SEQ ID NO: 85664 - protein, 69 aa, Gossypium hirsutum
  Clone ID: LIB3166-026-P1-K1-E11.pep
INDKPLLVLLLAVSVYQRGISILLFRFYTSESSPFSSQMEKLINLEFFLEKQFRCHNIFNPNNKSVKEL

SEQ ID NO: 85665 - protein, 58 aa, Gossypium hirsutum
  Clone ID: LIB3166-026-P1-K1-E2.pep
YIANHLVPPLPLPLQLQLQFQHSCFAFCLVFPLKQLHCLSAESGLISFSLICIVIGGE

SEQ ID NO: 85666 - protein, 75 aa, Gossypium hirsutum
  Clone ID: LIB3166-026-P1-K1-E5.pep
AGPFGQYMSSQTDGRHRPGWDQDHLSIAAPHRRYPGDSPPTCLHWARRAAGDASGFGYITQGWKGHCTCETFVMD

SEQ ID NO: 85667 - protein, 102 aa, Gossypium hirsutum
  Clone ID: LIB3166-026-P1-K1-F12.pep
SLEQAKGECKQLLDQWQYHRWTEVVQVMNPCLNPRKESIPFQLTVLNEEDLATRGSENLSTTFLSLVGLSLLSVTGSFFSAESRPDFLELPFLLKHLTFLVP

SEQ ID NO: 85668 - protein, 122 aa, Gossypium hirsutum
  unsure (1)..(122): unsure at all Xaa locations
  Clone ID: LIB3166-026-P1-K1-G10.pep
TIRYSDFNTWAKIPSDGRGTWQAAPGVFGNAPATAIKHGYRHIDCAQVYGNEKEIGLVLKKLSEDGAAKRDELWITNKLWNTNHAPPDVPKASNGTXPDLHLDYIDLYLMHCPNILRMLASH

SEQ ID NO: 85669 - protein, 92 aa, Gossypium hirsutum
  unsure (1)..(92): unsure at all Xaa locations
  Clone ID: LIB3166-026-P1-K1-G9.pep
KKKKKNTALFFYAGPPTQXXXLKETRAAGPLPEETSLTALTYGGYLHXKIKCMKSLAKSELHERKMDLTVLIDGDTQQNHDALAQLTARRIL

SEQ ID NO: 85670 - protein, 89 aa, Gossypium hirsutum
  Clone ID: LIB3166-026-P1-K1-H10.pep
LLMADYDISKRNMATMRKFPCISLLLFSCFYMQVYNGTVAATDTLFQCQIMTASGLLTSSGNAFELGFFSTGSTNLYLVIRMKNVATKD

SEQ ID NO: 85671 - protein, 67 aa, Gossypium hirsutum
  Clone ID: LIB3166-026-P1-K1-H7.pep
GLLLRLHDRGNDILPLNDRAGRSVPWSIGTGTLYRLKRVFALEREQLWTPLLLACPVASACSPYRQA

SEQ ID NO: 85672 - protein, 121 aa, Gossypium hirsutum
  Clone ID: LIB3166-026-P1-K1-H8.pep
LFVSKPHNTSGFHVTVVESFIEHQDACHMGRVIRPESQGVQLACLSRTASSPSPSNDTNFSTAPCPWPSLALPKTKDAMFLSPTKYHNSPKNALSHNLELQLLTTSNPSEVSVSPKKHDND

SEQ ID NO: 85673 - protein, 68 aa, Gossypium hirsutum
  Clone ID: LIB3166-027-P1-K1-A10.pep
QSSIATNLARKLPSSLCGVSSSPITKSTTVISPSSISHSATLTHVVLENLYLINNYQQDQTLHTVSLR

SEQ ID NO: 85674 - protein, 83 aa, Gossypium hirsutum
  unsure (1)..(83): unsure at all Xaa locations
  Clone ID: LIB3166-027-P1-K1-A11.pep
VSPPQKRAVRINILFTAICDTDVYYCACQGYTPLSPHILGHDTKSIXRTWVFGEIASQPDTHELPMMGLECKICNLCLTDPNH

SEQ ID NO: 85675 - protein, 85 aa, Gossypium hirsutum
  Clone ID: LIB3166-027-P1-K1-A12.pep
PTRSEKRFKERGRGLSQWGLSSDRVKYPKKLISKPTLPSYSPHPNDKKENTWVVCLPQNFALPANNCYYNNICLHLSFGKASFSF

SEQ ID NO: 85676 - protein, 95 aa, Gossypium hirsutum
  Clone ID: LIB3166-027-P1-K1-A6.pep
MRTPSLSSFCFCPVFVSKLKKPSKGKAKSSLPQHLYRRFSLHEIRVATKNFDSHLVLGKGSSAVVYKGFFDDGASVFAVKYLQHGSSRQTMLKTF

SEQ ID NO: 85677 - protein, 125 aa, Gossypium hirsutum
  unsure (1)..(125): unsure at all Xaa locations
  Clone ID: LIB3166-027-P1-K1-B1.pep
PAKVKRLLLPTKLSGNGGGKKVSKTDESSPSLMNLLMGVKVLQQAIIDLLLDIMVECCQPSGVARGDSSDANSKPSSDGGEAASPLDCDQENGTVASAQFPTNERLDSCVDDGSTASXVPSSDMN

SEQ ID NO: 85678 - protein, 45 aa, Gossypium hirsutum
  unsure (1)..(45): unsure at all Xaa locations
  Clone ID: LIB3166-027-P1-K1-B10.pep
XGGGDATRAEXQYXEAFFRGEDPCSVEVVIHDLFPCRSLGCYALY

SEQ ID NO: 85679 - protein, 74 aa, Gossypium hirsutum
  Clone ID: LIB3166-027-P1-K1-B8.pep
KEDDSNGGFVNGCFNEQGPKKSGYGDILASTLLLEEEAKQEEAEWMSESQQEKSSLVSNDKRTAHAMNEFYDQL

SEQ ID NO: 85680 - protein, 46 aa, Gossypium hirsutum
  Clone ID: LIB3166-027-P1-K1-C10.pep
GDFIFIVSCSDLVFFSLFLHIDFSQKNKEKMTYLNAVSFMSLLASS

SEQ ID NO: 85681 - protein, 67 aa, Gossypium hirsutum
  Clone ID: LIB3166-027-P1-K1-C9.pep
KAPISGGGGPHRSDLTPNGNSLHRVPSMALLKTFLLQFNVGKHQKTRGLIRLRPNEIPYGTSSHRRH

SEQ ID NO: 85682 - protein, 40 aa, Gossypium hirsutum
  Clone ID: LIB3166-027-P1-K1-D1.pep
PPVRCDYCCYGQRWSSDVREFEMCNRRGALSRNRSISWSS

SEQ ID NO: 85683 - protein, 99 aa, Gossypium hirsutum
  Clone ID: LIB3166-027-P1-K1-D7.pep
TVIRKLQEENEDRSEIAALINGSKSISLGFQTCVFLFTNREANTVAHITLTEGLVRRESTYLENMVAFGAVGVVAEDRQRTHRMRELRGRRVGEEENIF

SEQ ID NO: 85684 - protein, 68 aa, Gossypium hirsutum
  Clone ID: LIB3166-027-P1-K1-D8.pep
SCVFLFIKFMRSWLVLLIRLSDWLALFQAYRLSHASFFGGGSGVCAPIEGFAPETHARDKKIGKAPRV

SEQ ID NO: 85685 - protein, 86 aa, Gossypium hirsutum
  Clone ID: LIB3166-027-P1-K1-E1.pep
SGAIRVHDNMLLAASEAVAKQVSDENYNKGLIYPPFSNIRKISANIAANVAAKAYELGVATHLPRPANLVKYAESCMYSPVYRSYR

SEQ ID NO: 85686 - protein, 113 aa, Gossypium hirsutum
  unsure (1)..(113): unsure at all Xaa locations
  Clone ID: LIB3166-027-P1-K1-E11.pep
GMALKYAELKPVPCLTYSDAQMLRETAATPILKQLSXVRNDVTRYRYGDEQHLDEALKRIFQFGLGGGIPRRNAPILQMIREEVTEDGKYWLVLVFEAKALEVSDFEKRQAKF

SEQ ID NO: 85687 - protein, 107 aa, Gossypium hirsutum
  unsure (1)..(107): unsure at all Xaa locations
  Clone ID: LIB3166-027-P1-K1-E5.pep
SPPPPSPAFCIEPPTPPPGAMHRVSSTHHHPHPHHHYHNPHPQFTTDQLASPVPTRAPIHYHXPTPPSPTPGPVYEGPLPPVIGVXYAPPSPTPFYWCFQEFTSNLG

SEQ ID NO: 85688 - protein, 66 aa, Gossypium hirsutum
  Clone ID: LIB3166-027-P1-K1-E7.pep
TITFFGSTRYSRESRDRKMIKENILRTSTKLQKTTNTNTFNNIAHTNHKKLLQALPNELLHKNKLL

SEQ ID NO: 85689 - protein, 67 aa, Gossypium hirsutum
  Clone ID: LIB3166-027-P1-K1-F2.pep
IFSPFLFPFPFPFPLRFPFPFPFPFPLGFKSVPLSGTLLYILSSLPIFISWMILIFVIYLSFFFSIS

SEQ ID NO: 85690 - protein, 58 aa, Gossypium hirsutum
  Clone ID: LIB3166-027-P1-K1-F4.pep
PRVRNGSALDELVMRLREKLLDAERKKERQTDISDENTSEEPVPIETNDEEAVIAIEA

SEQ ID NO: 85691 - protein, 101 aa, Gossypium hirsutum
  unsure (1)..(101): unsure at all Xaa locations
  Clone ID: LIB3166-027-P1-K1-F7.pep
MATIPSAFIIFLGGVVLAFIRRPKVVNDIKFGPSEMEIVKITGHSWKEGFIKGTIPQLPLSVLNSVIAVCKLSSDLFPGREFSATSVSVTVGLMNLXGCGF

SEQ ID NO: 85692 - protein, 43 aa, Gossypium hirsutum
  Clone ID: LIB3166-027-P1-K1-F9.pep
GMGACSFNHYRSLSFFVYLWHHGMVHLMRESVIVMKKYQRNHC

SEQ ID NO: 85693 - protein, 84 aa, Gossypium hirsutum
  Clone ID: LIB3166-027-P1-K1-G12.pep
AIVHNYTFFPFSFSLSGSCFFFSVSSLLFPLNNQMRNGANKKASSHYQYENHFKASSSSQDNLNNNNLKPSPKSKLAKTFKPYP

SEQ ID NO: 85694 - protein, 83 aa, Gossypium hirsutum
  Clone ID: LIB3166-027-P1-K1-G3.pep
NFPQLDILKSISQNPQIKIPLIFAKVPLICSAKNISSFPITLNLDLFPKFFFCESSLYLAFAGSLQEAIVVRSAKNYSLKFKH

SEQ ID NO: 85695 - protein, 39 aa, Gossypium hirsutum
  Clone ID: LIB3166-027-P1-K1-G4.pep
VMPDQNKSDPTSVVYISVINSKNLLDSCFWGGATSTFYR

SEQ ID NO: 85696 - protein, 89 aa, Gossypium hirsutum
  Clone ID: LIB3166-027-P1-K1-G8.pep
QIIAEATFLSAGARALTERFYMLDDKHMDDLDSESALDIDSRGEIIYAMSSAENRWGHHIERLIRHSCRVCIPLCLASDIKTIVWKCTI

SEQ ID NO: 85697 - protein, 110 aa, Gossypium hirsutum
  Clone ID: LIB3166-027-P1-K1-H10.pep
FFVVSELIKAVNSVRREGCQKSPEYQVFLNDLPGNDFNTIFRSLSIFQNKLREQLGPGIGPCFFTGVPGSFYGRLFRKNSLHFVHSSYNLQWLSQVPRGLENNKGNILHG

SEQ ID NO: 85698 - protein, 104 aa, Gossypium hirsutum
  unsure (1)..(104): unsure at all Xaa locations
  Clone ID: LIB3166-027-P1-K1-H2.pep
MASKRILKELKDLQRDPPTSCSAGPVAEDMFHWQATIIGPNDSPYAGGVFLVTIHFPPDYPFKPPKPVFXVAFRTKVYHPNINSNGNICLDILKEQWSPALTIS

SEQ ID NO: 85699 - protein, 89 aa, Gossypium hirsutum
  unsure (1)..(89): unsure at all Xaa locations
  Clone ID: LIB3166-028-P1-K1-A12.pep
LKKLLYKRVDILHENTSLEQRXLKKMLIXSKNPIFHTQNTYFPLCPKLDLITILRPHTYAGXIIQLFQHDKXSVLQLLKDNHRIYGPSL

SEQ ID NO: 85700 - protein, 98 aa, Gossypium hirsutum
  Clone ID: LIB3166-028-P1-K1-A3.pep
FGIEQHATHVASPPTFVRGSPPSTVSNPLVQDAQLRDERLALFSTFQIPTSSAPSSSSSSRKGRCVRMKFGLKPATVGLEGFDRLNTDRRISSIPATA

SEQ ID NO: 85701 - protein, 57 aa, Gossypium hirsutum
  Clone ID: LIB3166-028-P1-K1-A8.pep
CEKDLSAGVLHLEALTIRLDKKLNYVMEDEHPFQHSRFQLHRLHHHHHHHAKDGVLG

SEQ ID NO: 85702 - protein, 59 aa, Gossypium hirsutum
  Clone ID: LIB3166-028-P1-K1-B11.pep
FPIAHINSALFTHLICAFANINASFYQLSFFYSPDQHLSTFTNTSKQKNPSVTTLLSIL

SEQ ID NO: 85703 - protein, 121 aa, Gossypium hirsutum
  unsure (1)..(121): unsure at all Xaa locations
  Clone ID: LIB3166-028-P1-K1-B12.pep
VLPIFTRKCNECHHCLSGESNNMCELITINWDSXVLCLDDGKTRFSINGXSIYHWDGTLTFNQSTDQHGSHSDKIRTTDTFDKGTTNSCGICTGXRATVNVVTPKEAQTVTALGLGAGGLV

SEQ ID NO: 85704 - protein, 56 aa, Gossypium hirsutum
  Clone ID: LIB3166-028-P1-K1-B8.pep
SSLKKIEASHLGWLNHHHCLNSSNHYSQLDINYPSHILLAGSRKCGQLLNQFFRKD

SEQ ID NO: 85705 - protein, 81 aa, Gossypium hirsutum
  Clone ID: LIB3166-028-P1-K1-C2.pep
LSPGSVSPTSWSSLPAPSFCIQMQSSPKPLVWHWFKPPARVCEPCGPKCALGYPHAWLVLEHAHRTLCVSSSTSCYFNRSQ

SEQ ID NO: 85706 - protein, 118 aa, Gossypium hirsutum
  unsure (1)..(118): unsure at all Xaa locations
  Clone ID: LIB3166-028-P1-K1-C3.pep
AVLFRVTKSSSVGNRVFFGFVLVLVSISSRVFCFPKWFVSSRRRDRYVGTLRRSIRTSESDAHTQSLPKXNSXRIVSIPSGSRYHVVIRISDDHXILXPDXXLWPLFTLRXMIGSRKY

SEQ ID NO: 85707 - protein, 122 aa, Gossypium hirsutum
  Clone ID: LIB3166-028-P1-K1-D3.pep
VEGEEGTATCNKMLSTKESAHKYAELLVKLAVALGFDGWLLNMEVDLDISQIPNLKEFVSYLTQTMHSSAPGSLVIWYDSVTIDGTLSWQNQLNEKNKPFFDISDGIFVNYSWEEDYPKLSA

SEQ ID NO: 85708 - protein, 54 aa, Gossypium hirsutum
  Clone ID: LIB3166-028-P1-K1-D8.pep
TGPRIFFFFIFFIIIQPHYFFFIIFFFFFFFFFFFFFFFFFFFFFFFFFIIENT

SEQ ID NO: 85709 - protein, 94 aa, Gossypium hirsutum
  Clone ID: LIB3166-028-P1-K1-E1.pep
MKAVSGLSGTCLKHLFLFSNVNGLLSGTCLLQFSLIFVGVDSISMDMKDKKLTVIGDVDPINIVNKLRKQWHTEILTVGPAKEEKKDGGAKKDE

SEQ ID NO: 85710 - protein, 55 aa, Gossypium hirsutum
  Clone ID: LIB3166-028-P1-K1-E12.pep
VQDSRRSTKRCHQDLQNLMLRHMHSQTIHVSATNEEDSDHWGKGTTNEIRITTKY

SEQ ID NO: 85711 - protein, 65 aa, Gossypium hirsutum
  Clone ID: LIB3166-028-P1-K1-E4.pep
VFQRKWGRLWVYSSGAATGLTEALGSDDVLTGALLRGWKQACLFWVTLVSGQTSTVVTGVNHPAY

SEQ ID NO: 85712 - protein, 123 aa, Gossypium hirsutum
  Clone ID: LIB3166-028-P1-K1-F2.pep
RKAGRKKFKETRHPVFRGVRQRRGTKWVSEIREPYKKSRIWLGTFLCPEMAARAYDVAVLALRGKSAALNFPDSASVLPRAKSSSPKDIQIAAFAAAEAFKPVTSTDIDPQPVGCSSSTSVST

SEQ ID NO: 85713 - protein, 52 aa, Gossypium hirsutum
  Clone ID: LIB3166-028-P1-K1-F4.pep
NYVQGNKYVMVAGVYTSHIGLGFKLRASWYNRSGTAGPKKSNGRVHRHVNPL

SEQ ID NO: 85714 - protein, 61 aa, Gossypium hirsutum
  Clone ID: LIB3166-028-P1-K1-F8.pep
MQKKTAYSFPDEILEHVFSFIHSGKDRNAASVVCKSWYEIERWCRRKIFVGNCYAVSPTMV

SEQ ID NO: 85715 - protein, 56 aa, Gossypium hirsutum
  Clone ID: LIB3166-028-P1-K1-G12.pep
FPTLSLSLRQDPLIKLTLSFRICIRTNAGHYNFCSVGSCYMLNHAILFATFTRYSI

SEQ ID NO: 85716 - protein, 73 aa, Gossypium hirsutum
  Clone ID: LIB3166-028-P1-K1-G6.pep
RKGRARRMRPTSFYSYVIFRLILKLPGRLPIQKSTLHIDYCWFNPHHYIFDPIRTGYTNNTLMLQGRVPMYLP

SEQ ID NO: 85717 - protein, 123 aa, Gossypium hirsutum
  Clone ID: LIB3166-028-P1-K1-H1.pep
SVLHKEVILSGCQIGRDRGILPTDLMLLRIFESHNVRSLSDISIFFQQASQLRFCSVEDCKGIESILDSSYSNSLCSPLENLEYLWLERLDNLHVLIKLEAPLSISRSLPLLGIFSHLKSFVI

SEQ ID NO: 85718 - protein, 125 aa, Gossypium hirsutum
  Clone ID: LIB3166-028-P1-K1-H3.pep
VRVTGIPNVAFAIYTTHVPIVAPKSNAAAYLNKKQTEKTQKQSYSITLQGIVDPTGVFTDVSIGWPGSMSDEQIFEKSAFHQSAVKGQVKGVWVVGSTGYPLMDWVLVPYAHQNLTWTQHTFNEK

SEQ ID NO: 85719 - protein, 56 aa, Gossypium hirsutum
  Clone ID: LIB3166-029-P1-K1-A11.pep
LNTYLHLNFINPPSSNTRSHKIFTLYNILFHSQYYNYSVTSPFNNTFDLSFKSPNS

SEQ ID NO: 85720 - protein, 43 aa, Gossypium hirsutum
  unsure (1)..(43): unsure at all Xaa locations
  Clone ID: LIB3166-029-P1-K1-A7.pep
WMXKSKGTLXSWSALPPFPSPCSDGLASPHLGMASASEIVFMH

SEQ ID NO: 85721 - protein, 108 aa, Gossypium hirsutum
  Clone ID: LIB3166-029-P1-K1-B1.pep
FLREHRSEWAHFNVDAYTAASLKAGTYAYPGMRPTRFTGSQSIMPLGHTSEHEEILEVIRLEGHSLVQEDAYVSRDIHLLQIYRGSDEKAFGACSELGFAPIDEMFSD

SEQ ID NO: 85722 - protein, 85 aa, Gossypium hirsutum
  unsure (1)..(85): unsure at all Xaa locations
  Clone ID: LIB3166-029-P1-K1-B10.pep
NSGGEAGVRPHVRYXLYARQKPHFGGVQIFIYTSPHFSTLKINILSHVTFRKPLSLIILVQNPTNPTLLRYPDFRADAHIAAPTE

SEQ ID NO: 85723 - protein, 57 aa, Gossypium hirsutum
  Clone ID: LIB3166-029-P1-K1-B11.pep
LNRLNLFSITKEIYARPEDKEHTHEDHIYPREVYQRPERIEMEHQLLSHIANTPHRN

SEQ ID NO: 85724 - protein, 68 aa, Gossypium hirsutum
  unsure (1)..(68): unsure at all Xaa locations
  Clone ID: LIB3166-029-P1-K1-B3.pep
LPILTNVFRPGSAGPKAAPWCPKRRVVWAGLQYHGISPTQRLKGSGIIINRARCSHVIPDASGPTRXF

SEQ ID NO: 85725 - protein, 59 aa, Gossypium hirsutum
  Clone ID: LIB3166-029-P1-K1-B6.pep
ILLTNLTLPLFTLKPLSCDRAGWMVHYRRGFVHFLRLICLSCWKNMWVYSPCYPPKSRC

SEQ ID NO: 85726 - protein, 54 aa, Gossypium hirsutum
  Clone ID: LIB3166-029-P1-K1-C2.pep
RWPNGGETIVSTCLRYLMYRGEIMPNDVNAPMDTIKTKLIMQFDDTCHTGYKFG

SEQ ID NO: 85727 - protein, 74 aa, Gossypium hirsutum
  unsure (1)..(74): unsure at all Xaa locations
  Clone ID: LIB3166-029-P1-K1-C3.pep
SLSCLXLLMLRHSCRKFLKELIIHVVLILIKTLMVQLVTPSTKNTSTTLKRNFCLYGSLXWNSLIFLLFMGAYI

SEQ ID NO: 85728 - protein, 63 aa, Gossypium hirsutum
  Clone ID: LIB3166-029-P1-K1-C5.pep
INILRTEEIVINTYNFFQYSKTCVSMHTLVFVARKLRLKSVSCSIGVVGCQNLCILIFLSICC

SEQ ID NO: 85729 - protein, 86 aa, Gossypium hirsutum
  unsure (1)..(86): unsure at all Xaa locations
  Clone ID: LIB3166-029-P1-K1-C8.pep
PNANIRRVNIMLAAKYHSSVISDTVLILKVNKNNLXALLLRSQAYYFLTNHDLAQRLYQKGFFLDPYHXELNKAYFFLKKKLRKNK

SEQ ID NO: 85730 - protein, 87 aa, Gossypium hirsutum
  unsure (1)..(87): unsure at all Xaa locations
  Clone ID: LIB3166-029-P1-K1-D1.pep
RADHTRPNLLRERTLNFAFNGNYKLRTDIPMDVXKYINKELAHAIDKFITHSAPLADINNAYYYLLQGIGLICMIHYNAKESDAAEY

SEQ ID NO: 85731 - protein, 53 aa, Gossypium hirsutum
  Clone ID: LIB3166-029-P1-K1-D11.pep
SLNILIEESIPHCRDNFFPYNAMKKHIKPIYPKNTNEKHPNKRSTFDLFHCNE

SEQ ID NO: 85732 - protein, 106 aa, Gossypium hirsutum
  Clone ID: LIB3166-029-P1-K1-D12.pep
MKEFREALEDCTLTDLGFTDRWFTWERGRLVSTNIRERLDRGVTTLSWVNLFPGYRLEHLSHSFSDHCPLLIDTIRVTRNNEDNFVKTFTFEAKWCLDSSFEEMVK

SEQ ID NO: 85733 - protein, 60 aa, Gossypium hirsutum
  Clone ID: LIB3166-029-P1-K1-D2.pep
FCFFMQTVISFIGALAMYLDSTAGEARYLLFEITRDKEEAKDNIVEAKKRESRDIYRRPK

SEQ ID NO: 85734 - protein, 69 aa, Gossypium hirsutum
  Clone ID: LIB3166-029-P1-K1-D5.pep
FESEFCDRLISTIGYRHVYHTQLYQSYMEVSITLWKHESLLSYLQNKITNLQICYSLELSYLQVGNFKE

SEQ ID NO: 85735 - protein, 61 aa, Gossypium hirsutum
  Clone ID: LIB3166-029-P1-K1-D6.pep
RLSLSAIYHIHHGPSLDGARVLLYQPTRLVVEAIRWPWIPSPMSTPIWLHGDLSTPFLCCP

SEQ ID NO: 85736 - protein, 59 aa, Gossypium hirsutum
  Clone ID: LIB3166-029-P1-K1-D7.pep
NTPQIYFTILFFIFDILSTLKLSSPTPNHHINLISNHINIYSHLPVSYTLPFISHFSPP

SEQ ID NO: 85737 - protein, 55 aa, Gossypium hirsutum
  unsure (1)..(55): unsure at all Xaa locations
  Clone ID: LIB3166-029-P1-K1-E11.pep
STYQPTSETAFILKEEINKFKTILHRGTAYYYXSEHDASQNHNNKSHPLDPEHSQ

SEQ ID NO: 85738 - protein, 74 aa, Gossypium hirsutum
  unsure (1)..(74): unsure at all Xaa locations
  Clone ID: LIB3166-029-P1-K1-E3.pep
RVRQNLKMXLICLKVHQXKRGGVFFSLMMASLYPHTKNLTSKLSNIFILKILLLTCQYIQKGDLLTSPPYSFDD

SEQ ID NO: 85739 - protein, 54 aa, Gossypium hirsutum
  Clone ID: LIB3166-029-P1-K1-E9.pep
VEIEIPLFLTLFYLFHGRRPCTAPIYAPKAGLSRTIRAEDIVRWGDQLRQLICS

SEQ ID NO: 85740 - protein, 53 aa, Gossypium hirsutum
  Clone ID: LIB3166-029-P1-K1-F1.pep
MAEAYAQLVNSIVSKCRKVAISRHCSYFKFGLIYLLISIAMQIGTKGDYSRHL

SEQ ID NO: 85741 - protein, 58 aa, Gossypium hirsutum
  unsure (1)..(58): unsure at all Xaa locations
  Clone ID: LIB3166-029-P1-K1-F11.pep
VFSACSWIDMKEITATNDLVTVNQDHVSLPTRETNMIMILFLLMANFISLRNQXYDTT

SEQ ID NO: 85742 - protein, 47 aa, Gossypium hirsutum
  unsure (1)..(47): unsure at all Xaa locations
  Clone ID: LIB3166-029-P1-K1-F2.pep
NLTFSPLDICSLRRRFVLFGVNPIISCSNSFXCMCLVKNKARKPLKK

SEQ ID NO: 85743 - protein, 65 aa, Gossypium hirsutum
  Clone ID: LIB3166-029-P1-K1-F5.pep
KRNFISVRATFTLFCGVNFISVLAICKIIVWGVIIMLKIASNIISFILHRRWISTQGSADASAPP

SEQ ID NO: 85744 - protein, 85 aa, Gossypium hirsutum
  Clone ID: LIB3166-029-P1-K1-F7.pep
VNGIQPFVTLFHWDLPQGLEDEYGGFLSPRIVDDFRDYAEVCFKEFGDRVKHWITLNEPWSYTYGGYVAGFLAPGRCSDWQKPKL

SEQ ID NO: 85745 - protein, 67 aa, Gossypium hirsutum
  unsure (1)..(67): unsure at all Xaa locations
  Clone ID: LIB3166-029-P1-K1-G3.pep
ADPRDRSLXTTINVHLLTLYIXSIRSFKQFLILPTTKFFTQFFNSLPIPALILYNTLIIHCLKSPYS

SEQ ID NO: 85746 - protein, 91 aa, Gossypium hirsutum
  Clone ID: LIB3166-029-P1-K1-G4.pep
FIYTWHSISLFPYFFTFSSSPPSILFLICSNPKNPCIYPSLHAPFFYHTSFKPFIFTPKTQIFSFLSITKCTSPHSIPIYSFSPFSFIFIH

SEQ ID NO: 85747 - protein, 107 aa, Gossypium hirsutum
  unsure (1)..(107): unsure at all Xaa locations
  Clone ID: LIB3166-029-P1-K1-H1.pep
MSVACSKNFFQRFCMDEYRMDSYIHGSCFSSTMIASFASIANHATKLRTYIIYPFNPHYRAWEIWLVVLVIYSAWIXPFKLAVLTPKNDALFILDNIAXGFLAADII

SEQ ID NO: 85748 - protein, 76 aa, Gossypium hirsutum
  Clone ID: LIB3166-029-P1-K1-H11.pep
GAVPFTNLHTHHKHPSTTTPNPLTTPSPLTTLTTTPQLNHKNNYISIKNTPYLHKKIYSYNTSQYSHTQTHLIPTH

SEQ ID NO: 85749 - protein, 85 aa, Gossypium hirsutum
  unsure (1)..(85): unsure at all Xaa locations
  Clone ID: LIB3166-029-P1-K1-H2.pep
YSLQLIHFSAGRISPTRRKYTLIYLXSTXKIAISIEFLQIHHKCNAFFPLTLCKIVNFKILTNSFFKRLLNFFHFYFFFQILKIT

SEQ ID NO: 85750 - protein, 49 aa, Gossypium hirsutum
  unsure (1)..(49): unsure at all Xaa locations
  Clone ID: LIB3166-029-P1-K1-H3.pep
RNLVLEVHGGKLAXEGCVMFKNLRPGRKXGWVXISXCYSXCLRTPRPAR

SEQ ID NO: 85751 - protein, 70 aa, Gossypium hirsutum
  Clone ID: LIB3166-029-P1-K1-H8.pep
GQSEQRRHYRKSRWTNAASAERLQDEFKKLSVEMASRIDENEKMTIKAVEEANRLCNAKKRSGRMAPKGH

SEQ ID NO: 85752 - protein, 124 aa, Gossypium hirsutum
  unsure (1)..(124): unsure at all Xaa locations
  Clone ID: LIB3166-029-P1-K1-H9.pep
LQPYLTQCQNLSPVFLPGKSEASVKGKLKGSLSPHKYNTMDPQSERASPSNDSGTSRIILECTSSNLHKQEFTSEQSQPGKQDDRSQCNGDLKLIHAPETPQKATMETKRRXQPENQVKTPENT

SEQ ID NO: 85753 - protein, 39 aa, Gossypium hirsutum
  Clone ID: LIB3166-030-P1-K1-A10.pep
NRGLPLCYHFAAATLPFNWYMKQPFFQGLTIGRLSCLTL

SEQ ID NO: 85754 - protein, 94 aa, Gossypium hirsutum
  Clone ID: LIB3166-030-P1-K1-A2.pep
PKASADWILDGMNKGTDSCGVTTGLGATSHRQTKQGAALQKELIRFLNAGIFGNGTESCHTLPHSATRAAMLVRINTLLQGYFGIRFGIFEAIN

SEQ ID NO: 85755 - protein, 110 aa, Gossypium hirsutum
  Clone ID: LIB3166-030-P1-K1-A5.pep
MKSWRQIQIVSGNLREVIDGADGFQNTHQMQQFESAKFSIDQAVFILEKVHIIWESLLRPSTYKRSMCMVLESVFSRITKDILLLDDLAAEETLQLQRLIHMMLDNLSSL

SEQ ID NO: 85756 - protein, 38 aa, Gossypium hirsutum
  Clone ID: LIB3166-030-P1-K1-A9.pep
VDHQDEIARCCCVSIIANYLDLKITMSSVMDMFNLVYS

SEQ ID NO: 85757 - protein, 59 aa, Gossypium hirsutum
  Clone ID: LIB3166-030-P1-K1-B1.pep
CIPLFQMLPSDGDRACHEVRVQFCASKHILGHGCPPSCSNPPPGSGCCDHHVHIMSARV

SEQ ID NO: 85758 - protein, 115 aa, Gossypium hirsutum
  unsure (1)..(115): unsure at all Xaa locations
  Clone ID: LIB3166-030-P1-K1-B3.pep
KERFRRRPDGGFNSKTTXMNGKGGSSPSWNDKLVMDMPMHTRFVTLQVKCKFSGGRDKTVGLVRIPVTDFIGGYSPETCLQFLSYRLRDPKGLKNGILNVSIRLKEPLQACSSQA

SEQ ID NO: 85759 - protein, 45 aa, Gossypium hirsutum
  unsure (1)..(45): unsure at all Xaa locations
  Clone ID: LIB3166-030-P1-K1-B5.pep
MKLNILVTRHRWRKMYMPPCRWCICWSKESQGGVFGRTPWSAPXF

SEQ ID NO: 85760 - protein, 57 aa, Gossypium hirsutum
  unsure (1)..(57): unsure at all Xaa locations
  Clone ID: LIB3166-030-P1-K1-B6.pep
VENIYXLLESEEISQMYASCNHCKNTNKKGKEQNPALKFLSDMHKNVKPLLHGPAGN

SEQ ID NO: 85761 - protein, 62 aa, Gossypium hirsutum
  Clone ID: LIB3166-030-P1-K1-C6.pep
MSYDKELAAAKKAASLAARLCQKVQKALLQSDVQSKNDKSPVTVADYGSQALVSFVLQHEFP

SEQ ID NO: 85762 - protein, 122 aa, Gossypium hirsutum
  Clone ID: LIB3166-030-P1-K1-C7.pep
VASGNFLAAKRRGVVEGVDYGATGEVKKVDVARLRERLDGGCIVILSNLGYSSSGEVLNCNTYEVATACALALGADKLICIIDGPILDENGRLISFLPLQEADMLIRQRVKQSEIAAKYVKA

SEQ ID NO: 85763 - protein, 32 aa, Gossypium hirsutum
  Clone ID: LIB3166-030-P1-K1-D7.pep
MSYDFNSQGLQAFSHSRTPHLLIVELYQSCEV

SEQ ID NO: 85764 - protein, 109 aa, Gossypium hirsutum
  unsure (1)..(109): unsure at all Xaa locations
  Clone ID: LIB3166-030-P1-K1-E1.pep
TAPENPWNDAPYKDAAXEKTALGGLSLDAFLSEWALMTLLDPARSLENLIYIGYPGDSSSAIRITRRRRLDRKKQQSERNVFQCFVFGPANAGKSALMNSFLAGPIWIH

SEQ ID NO: 85765 - protein, 63 aa, Gossypium hirsutum
  unsure (1)..(63): unsure at all Xaa locations
  Clone ID: LIB3166-030-P1-K1-F11.pep
MFIFSYISRKGVGSFLYRLNFCILNVGLTIHCNKPEELPXQILCFVRLICIDYINYHQLILNQ

SEQ ID NO: 85766 - protein, 52 aa, Gossypium hirsutum
  Clone ID: LIB3166-030-P1-K1-F12.pep
IIIKSIVNFSRNSSSTSPGSDLNLKMKTAITANSHTRKSLIPIRSLVSLPHQ

SEQ ID NO: 85767 - protein, 54 aa, Gossypium hirsutum
  unsure (1)..(54): unsure at all Xaa locations
  Clone ID: LIB3166-030-P1-K1-F6.pep
LLNLEXSSPPPTAQIHQRLRYAAPSNKSNRSTISSSLSISLLPMLKCSFRGRVG

SEQ ID NO: 85768 - protein, 78 aa, Gossypium hirsutum
  unsure (1)..(78): unsure at all Xaa locations
  Clone ID: LIB3166-030-P1-K1-F9.pep
WATCFFSSTRVDSTQSPQPTSASGGSRISSKTSRSSAPSSLTLPSFSDTSSINGCLPTPTTEGEILXSPNLKPLLFNE

SEQ ID NO: 85769 - protein, 93 aa, Gossypium hirsutum
  Clone ID: LIB3166-030-P1-K1-G10.pep
RFIVQGNSKEFPVLIACLTANGSKDGGVADSTFAHPISGLSSLSKLDRQGVDANIVPVNNFNPLKSSYVPKQLVEDEVPCSFLQQFKGSKEEK

SEQ ID NO: 85770 - protein, 38 aa, Gossypium hirsutum
  Clone ID: LIB3166-030-P1-K1-G5.pep
LGLVFVSRIILRFLFLDTRNQDGFSGSFEFVSFLSKMR

SEQ ID NO: 85771 - protein, 124 aa, Gossypium hirsutum
  unsure (1)..(124): unsure at all Xaa locations
  Clone ID: LIB3166-030-P1-K1-G6.pep
NECPVCKGXVTVKTLTPMDDRGKVIYDPXQDSGFKIPPRPTAGRVDCWRQTIQRTPLNLPVEEMIRRIGSRFDLVRDLTPPREASGSRETAXRTNCVLNRILTSRGLRGEQNTVVPLDDVDTPS

SEQ ID NO: 85772 - protein, 111 aa, Gossypium hirsutum
  Clone ID: LIB3166-030-P1-K1-G9.pep
HASADAWGIEENGTAPAGPGSGITVAVKSLKLDGLQGHREWVVEVAFLGQLHHPNLVKLIGYCIEEDHRLLVYEFMTRGSLENHLFRRTIPFSWSNRIKITLGATKGLAFL

SEQ ID NO: 85773 - protein, 112 aa, Gossypium hirsutum
  unsure (1)..(112): unsure at all Xaa locations
  Clone ID: LIB3166-030-P1-K1-H1.pep
MEVVRAGTQVMDFDFNSARSSPRTSAPSTPRRFGDCFFSTPTSPTRMSEFYREFDRFSMMDDRQKSKRSTCLAIPFDWEEKPVTPKSPRAARNDDDDDDXFAFDFSEALEKT

SEQ ID NO: 85774 - protein, 95 aa, Gossypium hirsutum
  unsure (1)..(95): unsure at all Xaa locations
  Clone ID: LIB3166-030-P1-K1-H10.pep
MGSTDGTQYWAYTYXSLEREPXWPSEKLQISITGAGGLIVSNMVRRLKREGHSIIAFDWKKKDHMPDDLSVPNSNLVDLQWREXLLEVTNGVDHC

SEQ ID NO: 85775 - protein, 102 aa, Gossypium hirsutum
  Clone ID: LIB3166-030-P1-K1-H3.pep
SLCFLSRLPLVLHLFLFSLMFPFHLVARCQPWTITLTGLLVIACSWLILRSLVVTAFATLGICTWWYIFLYSYPKAYMEMIAERRERVENGVEDTIWMSKNS

SEQ ID NO: 85776 - protein, 74 aa, Gossypium hirsutum
  Clone ID: LIB3166-030-P1-K1-H5.pep
PRVRPRVRISSMPQFRRRRGNLLAHSQVYFAGMHGVEKPFMVTCRRRVARVKCEATGGCLRYGGPFALWFSENY

SEQ ID NO: 85777 - protein, 140 aa, Gossypium hirsutum
  Clone ID: LIB3166-030-P1-K1-H6.pep
GPGTDRASPDMHLLGALSDSWAVVPTLSERPAAEADAHAKGSMPSFAANPSASNSGNQGFDDPFGDGPFKALPSGDAASAQQQILTPATTFQATMSQNMEAAQPPSVKSEIVTGFDFGESFSAYSTLNASNSQPSSGNFQ

SEQ ID NO: 85778 - protein, 74 aa, Gossypium hirsutum
  unsure (1)..(74): unsure at all Xaa locations
  Clone ID: LIB3166-031-P1-K1-A2.pep
GLCIGHGGGQRCQKAGCNKGAESRTVFCKAHGGGRRCQHLGCTKSAEVKTDFXIAHGGGRRSVFSEGCAKAQLL

SEQ ID NO: 85779 - protein, 41 aa, Gossypium hirsutum
  unsure (1)..(41): unsure at all Xaa locations
  Clone ID: LIB3166-031-P1-K1-A5.pep
NVPTDNFHHPSYHGANHHEDPYAFLTPIIKNNRIVXKRKFP

SEQ ID NO: 85780 - protein, 57 aa, Gossypium hirsutum
  Clone ID: LIB3166-031-P1-K1-A7.pep
IFFQSVFGTKLALNVSRLDLRQCTFYTNFKVPGLCVVGHRSSINTRPGFVVVRKKTP

SEQ ID NO: 85781 - protein, 107 aa, Gossypium hirsutum
  Clone ID: LIB3166-031-P1-K1-B2.pep
LHSPDAKTQENAVTALLNLSINDNNKTAIANANAIEPLIHVLKTGSPEAKENSAATLFSLSVIEDNKVRIGRSGAIRPIVDLLGNGTPRGKKDAATALFNLSIFHEN

SEQ ID NO: 85782 - protein, 69 aa, Gossypium hirsutum
  Clone ID: LIB3166-031-P1-K1-B5.pep
ILSFNPGLLVLSSTRQEHADPDLLPSGKRFTLWQEHFLPTYAHSSSMIYECVENLFSGNMISYFGYRRF

SEQ ID NO: 85783 - protein, 34 aa, Gossypium hirsutum
  Clone ID: LIB3166-031-P1-K1-B6.pep
RKNSNRLKLKNDQKMIVRAFKKSYYTRYYEMLGV

SEQ ID NO: 85784 - protein, 120 aa, Gossypium hirsutum
  Clone ID: LIB3166-031-P1-K1-B9.pep
EAFSFGNCLIVSNSVCRLQENIPLSLPLPLSLSLTPDLLLAISQHRFLTPDTGVHQVWEFCPESGTPKGLSKVEMAHQSFRDNRFHKKHSSNLSMRIRVNLGAEIGIWGFFDNKLSCNLF

SEQ ID NO: 85785 - protein, 103 aa, Gossypium hirsutum
  Clone ID: LIB3166-031-P1-K1-C1.pep
REAVAKFMGKVRGGRVKCDPHRIVMSGGATGAHEMVAFCLADPGEAFLVPTPYYPGFDRDLSWRTGVELVPVVCESSNNFKITRAALEAAYEKAKEANLRVKG

SEQ ID NO: 85786 - protein, 73 aa, Gossypium hirsutum
  Clone ID: LIB3166-031-P1-K1-C12.pep
KMCIKNWYLPVCKPKYGLLSDHVTVQFAYVLVERITWFELALQRSFHTMKQRSNYSKKTDLLRWCLLLRRVGC

SEQ ID NO: 85787 - protein, 87 aa, Gossypium hirsutum
  Clone ID: LIB3166-031-P1-K1-C2.pep
MVKLSYILLLIISLIVTSPPLTESFHINNWAISKLETKQETVTNLQFYFHDTISGKDPTAIRVAQAADTEKSPTLFGALLMADDPLT

SEQ ID NO: 85788 - protein, 92 aa, Gossypium hirsutum
  Clone ID: LIB3166-031-P1-K1-C5.pep
THLSKYLLELEPDSSGNHGAISNAYATAGMWDDVSEIRDLMKEKGLKKSPGCSWIQIGEKLHSFIAGDGSHPNSENIQATLALLGIDMKSSA

SEQ ID NO: 85789 - protein, 109 aa, Gossypium hirsutum
  Clone ID: LIB3166-031-P1-K1-C7.pep
TKVKEWITGNRELKIEDNTTSRLALSQATKLQRLKSLKVSLKSREESLYFLKNSYLTLNLFQANSDSKNLATAPCLTRTRAAFSKIRFRVNLLWSGLSAKTQQQILQLK

SEQ ID NO: 85790 - protein, 52 aa, Gossypium hirsutum
  Clone ID: LIB3166-031-P1-K1-C8.pep
DSLKLRLRQFLRAEQCCKVFFELLEYWILLDLEYPSPWSGLIKLTDGLGECR

SEQ ID NO: 85791 - protein, 55 aa, Gossypium hirsutum
  Clone ID: LIB3166-031-P1-K1-D6.pep
FCSFMIYLSFFVHLNEGLHRKMRPTEFRVYKELQPFDGNKFNFIKVFLRRGASYI

SEQ ID NO: 85792 - protein, 42 aa, Gossypium hirsutum
  Clone ID: LIB3166-031-P1-K1-D8.pep
SRCESRYIGHYIEAPIDESNGSDAMPYSKGDIYVSLFDASIF

SEQ ID NO: 85793 - protein, 60 aa, Gossypium hirsutum
  Clone ID: LIB3166-031-P1-K1-E10.pep
NISQRCFAEEQVRNGGCNTSYVFFIKKKNSISTSHKIFVAGAFSFFLSLYESDIYVLKHI

SEQ ID NO: 85794 - protein, 66 aa, Gossypium hirsutum
  Clone ID: LIB3166-031-P1-K1-E4.pep
VCQWAACQAKSQVKQNLSHQVSKVPSPLVNSQPVEQFKSSPCIDTSENASTYGPADGAPEEVEASQ

SEQ ID NO: 85795 - protein, 37 aa, Gossypium hirsutum
  Clone ID: LIB3166-031-P1-K1-E6.pep
ICKIGESGNRGIELRNPKLMILSVWICEFSLLSPAHI

SEQ ID NO: 85796 - protein, 104 aa, Gossypium hirsutum
  unsure (1)..(104): unsure at all Xaa locations
  Clone ID: LIB3166-031-P1-K1-F4.pep
ALLKSLFIQLSQTQHNFVNTLTKKTITLXVKGTXTMYHLKFEIHDWGSIPPDQQGMIFVSIQLEDGRTLAAYNIHKEYTLHLVLHLHSGMHIFVKTLTVKTITL

SEQ ID NO: 85797 - protein, 37 aa, Gossypium hirsutum
  Clone ID: LIB3166-031-P1-K1-F5.pep
IYKSFSERMGLCSRYSSYKWLLIFHPFHASFNHVFVF

SEQ ID NO: 85798 - protein, 50 aa, Gossypium hirsutum
  Clone ID: LIB3166-031-P1-K1-F6.pep
RPLFLQLSSKFSQRNPINGGVTSNDVAFQRFCSIKCLTHGTVFGSKLAYI

SEQ ID NO: 85799 - protein, 43 aa, Gossypium hirsutum
  Clone ID: LIB3166-031-P1-K1-F8.pep
AGWRWMLLCLHLVIILNLPMLLVFRLEVYNAKILHVDGFSKIT

SEQ ID NO: 85800 - protein, 47 aa, Gossypium hirsutum
  Clone ID: LIB3166-031-P1-K1-G12.pep
VPSPFRFSVIQLSLLLIGGVRHAHQVIKIYFQAMLSLYFILGRQKGE

SEQ ID NO: 85801 - protein, 61 aa, Gossypium hirsutum
  Clone ID: LIB3166-031-P1-K1-H1.pep
GTRLLLFHPFPKLSFLFYKMIVLPQKFRLQPYLSVKFIKLNSSYAAKEKRAREKRPLGYNC

SEQ ID NO: 85802 - protein, 48 aa, Gossypium hirsutum
  Clone ID: LIB3166-031-P1-K1-H10.pep
WTLGRTLVSEVTPSVPDEPLVLRRAFENAVIKRLMTDVPFGVLLSGGL

SEQ ID NO: 85803 - protein, 123 aa, Gossypium hirsutum
  Clone ID: LIB3166-031-P1-K1-H2.pep
VNVNGFEMTEEPSEPEVQDSRNKNLFDGGRVEASRNSSDAESEKQNKKNDHFTNDFMDAIDGNMDMDNPSVVHNEKMSTSKNVAERVQHDSLLKKITSQAEHDLNGTTDVAKFEVANLAGRNL

SEQ ID NO: 85804 - protein, 121 aa, Gossypium hirsutum
  Clone ID: LIB3166-031-P1-K1-H4.pep
LKSLTNLNLLNLSYTYDLRKIPSHLISSFSKLQIFRTWCTTSGYYPKEDNVLNGDNENLIEELKSLRHLNILTIPPIKSLFALERFVSFHLFQCCTQALHLRHLRESNVFNGLCLENMERC

SEQ ID NO: 85805 - protein, 95 aa, Gossypium hirsutum
  unsure (1)..(95): unsure at all Xaa locations
  Clone ID: LIB3166-031-P1-K1-H5.pep
PFFIDSTTGRXVWVSQLWQSVDSVFTCLSELGIRKGNIVIIIAPNSIFIPIVCLSVMSFGAIITTSIPLNTSREFVVQMADSKPVLVFTTFQVFP

SEQ ID NO: 85806 - protein, 123 aa, Gossypium hirsutum
  Clone ID: LIB3166-031-P1-K1-H7.pep
EGLKPFCAIYSSFLQRGLDQLVHDVDLQKLPVRFAIDRAGLVGADGPTHCGAFDTTFMACLPNMVVMAPSNETELMQMVATAAAIDDRPSCFRYPRGNGIGSILPPNNKGTPLEIGKGRVLRE

SEQ ID NO: 85807 - protein, 38 aa, Gossypium hirsutum
  Clone ID: LIB3166-032-P1-K1-A11.pep
THSLSEPFLSPITISTKEFLSMKPTIPTSRLVIYAFSY

SEQ ID NO: 85808 - protein, 66 aa, Gossypium hirsutum
  Clone ID: LIB3166-032-P1-K1-A12.pep
AIEPPRKLPFFSSKLTNIHISFYPSLLVKAQIYCYVGRKKTQHRWTGSFTRTCGRTREKTRGRTRG

SEQ ID NO: 85809 - protein, 60 aa, Gossypium hirsutum
  Clone ID: LIB3166-032-P1-K1-A3.pep
SLWLISQMGSAVWLFLVEVSIHIYIVAAETDPDDNSSLRAVMSEWKNVPSNWGRGDPCDD

SEQ ID NO: 85810 - protein, 37 aa, Gossypium hirsutum
  Clone ID: LIB3166-032-P1-K1-A7.pep
DMGGCHLSITDRTQCNIRCPPTLKKRDCKQSVHGSVG

SEQ ID NO: 85811 - protein, 86 aa, Gossypium hirsutum
  unsure (1)..(86): unsure at all Xaa locations
  Clone ID: LIB3166-032-P1-K1-B1.pep
RSDSTCVIFPPKVFRVLERPVHEFQGHXSQILALSWSKKGFLLSSXSVDMTVRLWQVGFYCCSWVFSYNXNFVTSVVFIPVVDFFF

SEQ ID NO: 85812 - protein, 39 aa, Gossypium hirsutum
  Clone ID: LIB3166-032-P1-K1-B12.pep
ADAWVWSAFVILYILLCGVPPSWAETDQGVAQAIIRSDI

SEQ ID NO: 85813 - protein, 43 aa, Gossypium hirsutum
  Clone ID: LIB3166-032-P1-K1-B3.pep
KSSQKENFSSQIAAMELVNRLGFDCYDRLRPFYLPVFQERHSS

SEQ ID NO: 85814 - protein, 59 aa, Gossypium hirsutum
  Clone ID: LIB3166-032-P1-K1-C3.pep
TTLVFLYFQAGYSFQLDGMTRLAPKCRSYPSSPLLGLCINPRTISLTGQESHSANSNNR

SEQ ID NO: 85815 - protein, 97 aa, Gossypium hirsutum
  Clone ID: LIB3166-032-P1-K1-D2.pep
MRAAMPPINTKNMSTPLEEEESELRRGPWTLEEDTLLTHYIARHGEGRWNMLAKCAGLKRTGKSCMLRWPNYLKPVFKRGNFTPHEQFLILELYFKW

SEQ ID NO: 85816 - protein, 61 aa, Gossypium hirsutum
  Clone ID: LIB3166-032-P1-K1-D4.pep
ICLIPLFIEVFYEFKIDFVYLTTHRLLLLHLIGSSNAQPSNACISQQRRLHTICGTWQMPT

SEQ ID NO: 85817 - protein, 51 aa, Gossypium hirsutum
  unsure (1)..(51): unsure at all Xaa locations
  Clone ID: LIB3166-032-P1-K1-E11.pep
TFHEELIFYGRSRNHMRDLSHYKDDSSPNAWYYSDWVRTXAIFLEERLTMF

SEQ ID NO: 85818 - protein, 50 aa, Gossypium hirsutum
  Clone ID: LIB3166-032-P1-K1-F5.pep
SPENFKNTCRNCAQVVKQMGHIMLTSLCLILIISYIAGEKKRTRGETSGR

SEQ ID NO: 85819 - protein, 73 aa, Gossypium hirsutum
  unsure (1)..(73): unsure at all Xaa locations
  Clone ID: LIB3166-032-P1-K1-F7.pep
MGSLEKDRKTTGWASXDPFGIXTPYSYSLMNTGPEDVFIKVICCGICHTDIHHAYIYPGLSNYPLVSLHEMAV

SEQ ID NO: 85820 - protein, 33 aa, Gossypium hirsutum
  Clone ID: LIB3166-032-P1-K1-G1.pep
RGQDHPVSSLITDSHPGKLYSHDLSNSTHTHVV

SEQ ID NO: 85821 - protein, 64 aa, Gossypium hirsutum
  unsure (1)..(64): unsure at all Xaa locations
  Clone ID: LIB3166-032-P1-K1-G11.pep
QVNTSINRRNGTEPYDVGGGTNFPTFSVERIEIRDYGLKVANRIRXXXDSDIKIPPKIRPFRDI

SEQ ID NO: 85822 - protein, 49 aa, Gossypium hirsutum
  unsure (1)..(49): unsure at all Xaa locations
  Clone ID: LIB3166-032-P1-K1-G5.pep
KHEPFTLGKCGCFTFSFGLCLVGGEITRETLSFNHNFNPLYKXKSGRVG

SEQ ID NO: 85823 - protein, 62 aa, Gossypium hirsutum
  Clone ID: LIB3166-032-P1-K1-G6.pep
DFKRGPMFSHLFIVSLLPDEFTVGMNSSNTQVFSIIVPSSPSILREPLTVFLHGSATSRTRG

SEQ ID NO: 85824 - protein, 61 aa, Gossypium hirsutum
  Clone ID: LIB3166-032-P1-K1-G8.pep
DTGGVSKDMASVNQFVYEDPVPSSLDAGFNASYNAPLYFNSVLGSNLSNCSAYCWGEQGAK

SEQ ID NO: 85825 - protein, 58 aa, Gossypium hirsutum
  Clone ID: LIB3166-032-P1-K1-H11.pep
EGCDMKKCIFPLFDTSHRTSFDADLIRFINRCIIWHRLDRNLNMIRFIINRVYGRNLR

SEQ ID NO: 85826 - protein, 96 aa, Gossypium hirsutum
  Clone ID: LIB3166-032-P1-K1-H12.pep
RRPPHMAFLGNPGTGKTMVARILGKLLHMVGILPTDKVTEVQRTDLVGEFVGHTGPKTRRKVQEAEGGILFVDEAYRLIPMQKAVDKDYGLEALEE

SEQ ID NO: 85827 - protein, 42 aa, Gossypium hirsutum
  Clone ID: LIB3166-032-P1-K1-H5.pep
VRQCWYTCRTYLYIKILKVHDQEYITDPSPALFKSSKKGVFG

SEQ ID NO: 85828 - protein, 80 aa, Gossypium hirsutum
  Clone ID: LIB3166-032-P1-K1-H7.pep
TIRTEHLLLEKALVRLYQSAMLDNLAFKVDTDGDRNREVEVERTSRMSRRAHLGSDETADSKKLMNFPSSVMLRLILHFL

SEQ ID NO: 85829 - protein, 39 aa, Gossypium hirsutum
  Clone ID: LIB3166-032-P1-K1-H9.pep
LLPCKIDGHSKCSLFISMDLVVLNIIITPLQQALHSSYN

SEQ ID NO: 85830 - protein, 38 aa, Gossypium hirsutum
  Clone ID: LIB3166-033-P1-K1-A2.pep
LYPKNYLHLPYPPNKLRKGEASITKPWGLTASLERLPS

SEQ ID NO: 85831 - protein, 38 aa, Gossypium hirsutum
  Clone ID: LIB3166-033-P1-K1-A9.pep
GLHKNLGFHVRQNRFGLTQPHASRLPSIVTKQNLFCTR

SEQ ID NO: 85832 - protein, 94 aa, Gossypium hirsutum
  unsure (1)..(94): unsure at all Xaa locations
  Clone ID: LIB3166-033-P1-K1-B4.pep
KDSKVHVYLFGDSSGGNIAXHVAVRAANADFEVLGNILLHPMFGGQMRTESEKRLDGKYFVTLHDRYWYWRAYLPEGEDRDHPACNPFGPRSRT

SEQ ID NO: 85833 - protein, 57 aa, Gossypium hirsutum
  Clone ID: LIB3166-033-P1-K1-B5.pep
FISFYCSTFLTSYLFNICGERCSKYVSYGLEMVLTVHCISWFGFIITFLLSEKENYS

SEQ ID NO: 85834 - protein, 51 aa, Gossypium hirsutum
  Clone ID: LIB3166-033-P1-K1-B9.pep
YYINMEVNILDEVKFDELLDMVIVKTNKNGVIGSLWPGFKVNPPFCLPLVY

SEQ ID NO: 85835 - protein, 68 aa, Gossypium hirsutum
  unsure (1)..(68): unsure at all Xaa locations
  Clone ID: LIB3166-033-P1-K1-C10.pep
AILGSVDLMFAILLEHYGGKWPFLLSPRQAIDCPEFRKVXNYAMHVLDWIHEAGYYAYVYIVRLNDSS

SEQ ID NO: 85836 - protein, 76 aa, Gossypium hirsutum
  Clone ID: LIB3166-033-P1-K1-C4.pep
PLPPSLYFNFILLSQILYQSFQMIEFLTSQIKILSFFSFLLKICLKKRVILKQCILIHGELVFLQFLRDINRLFQL

SEQ ID NO: 85837 - protein, 57 aa, Gossypium hirsutum
  Clone ID: LIB3166-033-P1-K1-C8.pep
LAHHLIPSFKISSFSNMLPDDDSHKFSTSSLKDFHYAPCFKLVSFSVHPLFDPPSSH

SEQ ID NO: 85838 - protein, 59 aa, Gossypium hirsutum
  Clone ID: LIB3166-033-P1-K1-D1.pep
SLYLFFYNNKGINQSKISVWLSLSLCVCVSLNCHVLSCYTRPAMILLYRGMKKNASLSV

SEQ ID NO: 85839 - protein, 65 aa, Gossypium hirsutum
  Clone ID: LIB3166-033-P1-K1-D5.pep
QKNGSYKLALERIGMRIMTGRLLSCWWMTIPSAAVSQMSIFITSFSVPTHICSLCSNIPAKALFM

SEQ ID NO: 85840 - protein, 31 aa, Gossypium hirsutum
  Clone ID: LIB3166-033-P1-K1-D7.pep
IHPFASFIGMCPNKTWIYIKQDAWVAPARPV

SEQ ID NO: 85841 - protein, 53 aa, Gossypium hirsutum
  Clone ID: LIB3166-033-P1-K1-E10.pep
VTKPNTVYSLLESRIKNAQFPHYLFLTPLYFEPLPVGSEPWIVVASVCVGITM

SEQ ID NO: 85842 - protein, 69 aa, Gossypium hirsutum
  Clone ID: LIB3166-033-P1-K1-E11.pep
HQRALSGVTRQEQVTRMWFAQQSSIKGLVLLQPQQLEAHYNGSSNRSFHHNPPLFFSSLIKKKRFLIQI

SEQ ID NO: 85843 - protein, 100 aa, Gossypium hirsutum
  unsure (1)..(100): unsure at all Xaa locations
  Clone ID: LIB3166-033-P1-K1-E12.pep
MEFPTYDGVGDPLXRLERCENFFGNQQTNEEDKVGLASFHLLGEAQLWFDQIENEEAYLDWERFRECCHIRFEPPMSNNPLGELASLRQTGTVGEYQRHF

SEQ ID NO: 85844 - protein, 93 aa, Gossypium hirsutum
  Clone ID: LIB3166-033-P1-K1-E5.pep
VNRGIHSIDSLCLVTWKAGVAHLFVLKIFLLTTTTTATSFALWIWNLGTTDTPRGGLEKTLRNLLLADREGLVIYFTRFRCCMRKQSKTSYNG

SEQ ID NO: 85845 - protein, 40 aa, Gossypium hirsutum
  unsure (1)..(40): unsure at all Xaa locations
  Clone ID: LIB3166-033-P1-K1-E8.pep
VINAXHLIAKELSLKIVSKIEAXERYTVYVDVLMWPVGIP

SEQ ID NO: 85846 - protein, 114 aa, Gossypium hirsutum
  Clone ID: LIB3166-033-P1-K1-F11.pep
KEWKHRSNIANELLHMQGRIVNISASRETYGIRNIGEGISTARERLRKLRRSSPRREEKDIVGLDEDIDKLVKQLVKTDDQWHAISIVGMGGIGKTTLAKKVYNHGDIEARFPF

SEQ ID NO: 85847 - protein, 115 aa, Gossypium hirsutum
  Clone ID: LIB3166-033-P1-K1-F12.pep
HSGESVAVKKIWNSMGVGHKLEKEFLAKVEILSNIRHSNIVKVLCCISSEDSKLLVYEYMENQSLDRWLHGNKRSSVSGTSSFHHAILDWPRRLHIAVGAAHGLCFMHHECLTPI

SEQ ID NO: 85848 - protein, 49 aa, Gossypium hirsutum
  Clone ID: LIB3166-033-P1-K1-F8.pep
HACAKLSLYAHQNNHGSDSYIPYKDLKTSCLIFQLQPRHSCIWELREGH

SEQ ID NO: 85849 - protein, 115 aa, Gossypium hirsutum
  Clone ID: LIB3166-033-P1-K1-G2.pep
LSPFISDRVLVNGKVVPLTFTRDGKLRWNHNDRRCLNVEKEALGFTFEGSRIRVNVVVEKRDRILCFANMGGIGRQSFVFEPLSEESLTLWSQKLRDYIDSLGRPKRLLIFVNPF

SEQ ID NO: 85850 - protein, 127 aa, Gossypium hirsutum
  Clone ID: LIB3166-033-P1-K1-G3.pep
GRVGLQRERSVEVRIKTVGANQINLLEMSFNKLNEPIDKRQLDLNTKSSSGELNSEAAHQTGITSKTNDLKKESTEYEASNRISKISDGNDKTTDDSKEVLPSTELGFKRLRGAEDTEAMLRDERNV

SEQ ID NO: 85851 - protein, 125 aa, Gossypium hirsutum
  Clone ID: LIB3166-033-P1-K1-G4.pep
KKLSSQLETSSVRDELQGSELIPQSESGNVDSWEVRSSSVASSTSWRRNMIQRSPSASGGLATRANASRYGLRNLRCKSISDVVPSGCLSSDSSIRRREDTVKTRNSDGEGSSSGSSRGKMLSGS

SEQ ID NO: 85852 - protein, 104 aa, Gossypium hirsutum
  Clone ID: LIB3166-033-P1-K1-G6.pep
NEKVGMGLVGFFEKTDSGGNEGNLEESEGKNKERNEHEEEEAVVFYRQQQHQHATFLGLDLNLQPPEEIDFGNEFGGFDFGVPEYQSYNFIVFHSCCFFFSFLI

SEQ ID NO: 85853 - protein, 68 aa, Gossypium hirsutum
  Clone ID: LIB3166-033-P1-K1-G8.pep
PLVRKKPIKDFFFWFPDRVFPFWIRLNLSPNPTIFHSHGVKCKYESLAVYKKYLLYTPFQLKNHSSKP

SEQ ID NO: 85854 - protein, 120 aa, Gossypium hirsutum
  unsure (1)..(120): unsure at all Xaa locations
  Clone ID: LIB3166-033-P1-K1-G9.pep
PRVRPRFLPRVRPRVRVRVRGKDLKAGNYIYGNLHLVDLAGSERVDRSEVTGDRLKEAQHINKSLSSLGDVIFALAQKSPHVPYRNSKLTQVLXSFLGGQAKTLMFVQLNLDVTFYFESL

SEQ ID NO: 85855 - protein, 60 aa, Gossypium hirsutum
  Clone ID: LIB3166-033-P1-K1-H10.pep
LSELGFLSRAGSLFIGICPSITSPQKIPYFFFRSLSPVLTIITYTYSPMHELPIQRNFDP

SEQ ID NO: 85856 - protein, 33 aa, Gossypium hirsutum
  Clone ID: LIB3166-033-P1-K1-H11.pep
RGGPGVRIISQVYNFFCSMDKINLVLAMGSAII

SEQ ID NO: 85857 - protein, 54 aa, Gossypium hirsutum
  Clone ID: LIB3166-034-P1-K1-A1.pep
DGRTHQQSPLATSVITLTVHKFHTWPNTYAHTIRYASSGYVFERCSDERRNFDI

SEQ ID NO: 85858 - protein, 42 aa, Gossypium hirsutum
  Clone ID: LIB3166-034-P1-K1-A11.pep
FKKLYYLFLYLKYFTALFINQTEGLHTLKNSQCQHQDDHMIL

SEQ ID NO: 85859 - protein, 95 aa, Gossypium hirsutum
  Clone ID: LIB3166-034-P1-K1-A4.pep
WWFLTVVCLKPGGPQLAGQAIDLAETRLLKDAWPEYYDGKLGRFIGKQAMKYQTWSIAGYLVAKMMLEDPSHLGMIALEEDKQRKPMIKRSCSWN

SEQ ID NO: 85860 - protein, 64 aa, Gossypium hirsutum
  Clone ID: LIB3166-034-P1-K1-A5.pep
FVSIEMCIFFSQVVKKDIKVFSPLLNMSKLFYQPFLVAWRYSLRASCVSSDNYDYLERRHCPKI

SEQ ID NO: 85861 - protein, 49 aa, Gossypium hirsutum
  Clone ID: LIB3166-034-P1-K1-A6.pep
NSLNIGTFFKAIPFTSNAQLLWGRGEKPKIIHTKTRIDDNPPQSFSLFH

SEQ ID NO: 85862 - protein, 59 aa, Gossypium hirsutum
  Clone ID: LIB3166-034-P1-K1-A7.pep
TVKQLFVERTENYGIPELERLYSFIMKGIFESREKGVGDDPKPSILKFLIQFAEDEANF

SEQ ID NO: 85863 - protein, 111 aa, Gossypium hirsutum
  unsure (1)..(111): unsure at all Xaa locations
  Clone ID: LIB3166-034-P1-K1-B10.pep
DVYRVMPLLAYRADKARVADQKPGPDPXFAAAISSVVHPKNPFAPTLHFNYRYFETDASKDASGAPRXWGLGVETELTPPXFYEEVVMHFPYNTEEIACHIIFIPYLLYFY

SEQ ID NO: 85864 - protein, 55 aa, Gossypium hirsutum
  Clone ID: LIB3166-034-P1-K1-B2.pep
PHLRTLSSLFPSQLKTPSGCTQTDCVIIRHYRTICLSLRCGSYIIPNSQRSLKCL

SEQ ID NO: 85865 - protein, 125 aa, Gossypium hirsutum
  unsure (1)..(125): unsure at all Xaa locations
  Clone ID: LIB3166-034-P1-K1-B3.pep
KNFSRVCTAPVECYNNNSIVTGAQVQVEKHGLKSILFLRLHFSTVLGTVILSRSEWDGSFGIAPQSGILSDLLSNPLTPPPPQRKPDTSCSVYPGGPPMPNYTPKLLKYVDTAEMKRGPQDPXGY

SEQ ID NO: 85866 - protein, 91 aa, Gossypium hirsutum
  Clone ID: LIB3166-034-P1-K1-B5.pep
MPIRNIPVERTEEATHTDALNAAMAELISTLILAFAGTGSRMAINKVTDNGATTRAGVVADGLAHGFGLFVGAYVGGNILGGHVNHVVTFG

SEQ ID NO: 85867 - protein, 122 aa, Gossypium hirsutum
  Clone ID: LIB3166-034-P1-K1-B8.pep
NHARSDSASSTLSNSDFAQGPGGDANESLEASTHLRANSDVNGEVKSDPQPVASSAIPQREAEFSPRFMDPRSRSQRIWRRQSERFVPRIISSPGIENRADLSGTETRVKKLVEDFECTSVD

SEQ ID NO: 85868 - protein, 63 aa, Gossypium hirsutum
  Clone ID: LIB3166-034-P1-K1-C11.pep
CSEYPLFRMIRSAHETSIAQPSKIMDASIDHFMIYSCLTVAIKTHPWSLISCGDESFQSRNLV

SEQ ID NO: 85869 - protein, 80 aa, Gossypium hirsutum
  Clone ID: LIB3166-034-P1-K1-C6.pep
LSIKNLPTRIGELHNLTKLSMRGCSSCNLPSTITKLQHLKDVICDEETAYQWEFLKSYLTNLKVTVHEQDINLNWLQIFV

SEQ ID NO: 85870 - protein, 104 aa, Gossypium hirsutum
  Clone ID: LIB3166-034-P1-K1-C7.pep
ALKEEHIVFQLNGMTVQQALDENKLLMVDYHDIYLPFIDRINAFDGRKSYATRTILFLTSSWTLKPVSIELSLPYTSPNSRSKRVDTPPVDASTNWIWQLAKAH

SEQ ID NO: 85871 - protein, 92 aa, Gossypium hirsutum
  Clone ID: LIB3166-034-P1-K1-D12.pep
LTRPPTRAFRSGGDYGAAKEMLKPAEPGTGLIAGGAVRIDLEMACVENAMGKQLGSKNALNNARATVDAVQKMKQFQVVALLQGIPMEELWT

SEQ ID NO: 85872 - protein, 120 aa, Gossypium hirsutum
  unsure (1)..(120): unsure at all Xaa locations
  Clone ID: LIB3166-034-P1-K1-E1.pep
EIVKDIGSVYFGVVKLVRGRWTKELFAVKFIERGHKIDEHVQREIMNHRSLKHPNIVRFKEVLITPTHLAIVMEYAASGELFERICSAGRISEDEXRFFFQQLIXXVSYWHFMEICHRDL

SEQ ID NO: 85873 - protein, 65 aa, Gossypium hirsutum
  unsure (1)..(65): unsure at all Xaa locations
  Clone ID: LIB3166-034-P1-K1-E10.pep
CRSARLLHTCLANLHPLLSPFVHGGFRARKVSRFHTVXLPTLLSNGIPNVLCPPCLLTRDPCSPS

SEQ ID NO: 85874 - protein, 86 aa, Gossypium hirsutum
  Clone ID: LIB3166-034-P1-K1-E3.pep
LSIPFQKLSFASVLQLLIGMPCFTLPTRKPPAPCLSQHQIEAHTSYLFFSSFFHKLNKRSLIFKSLHLINPSVFWFVNPTERRRIA

SEQ ID NO: 85875 - protein, 51 aa, Gossypium hirsutum
  unsure (1)..(51): unsure at all Xaa locations
  Clone ID: LIB3166-034-P1-K1-F4.pep
DLKMIASEIXSLSGQLKELEEKLKVLLLPSDPLDARNIMLEVRAGTGGDEA

SEQ ID NO: 85876 - protein, 123 aa, Gossypium hirsutum
  Clone ID: LIB3166-034-P1-K1-F5.pep
DLSDPKWAVLADKIHEKEEMLWPLEPKPISGKCKLVMDKILSLKKEDDPSQLLAEWIQLLQPTRVDWITLLDKLERKNPGIHLKVMELVLGEESLQTNVRDYTKLIDAYAKEDRVEHVERILK

SEQ ID NO: 85877 - protein, 72 aa, Gossypium hirsutum
  Clone ID: LIB3166-034-P1-K1-F6.pep
KQIRFITTQNLYIDALLLLLFVCTCLFFPPCSCYLLPPFTNICRECISLDGDTAMKERRPLPHDFAVTFSLI

SEQ ID NO: 85878 - protein, 54 aa, Gossypium hirsutum
  Clone ID: LIB3166-034-P1-K1-F8.pep
LALRLHGGFQTIDKTLTGKTITLDVDSNNTIDNCKFKAKTGKASTIPDGLSSLE

SEQ ID NO: 85879 - protein, 95 aa, Gossypium hirsutum
  Clone ID: LIB3166-034-P1-K1-G11.pep
LSNLVSLSLTHWFINCTLLEDGFREMDDLLFNLKKSIEYVTETKHGRLKFQEAVDQVKLQDGKSWDDLSLKLESDFGILDSALRSREIFRKLGAN

SEQ ID NO: 85880 - protein, 104 aa, Gossypium hirsutum
  unsure (1)..(104): unsure at all Xaa locations
  Clone ID: LIB3166-034-P1-K1-G2.pep
KNLDMIEAMDLEIGPQRLGFQELKKATKGFKDKELLGFGGFGKVYKGTLPTTNTXGAVKRIFYESKLGIREFLFEIYSIGRLRQRNLVQFLGWCQCKGYLLLVY

SEQ ID NO: 85881 - protein, 43 aa, Gossypium hirsutum
  Clone ID: LIB3166-034-P1-K1-G6.pep
FFLFFFFMHSRCLIKFRYCFFSKLGRLGICLKMKGSHFLSSLI

SEQ ID NO: 85882 - protein, 91 aa, Gossypium hirsutum
  Clone ID: LIB3166-034-P1-K1-H12.pep
CWNIKHIRQLAYCKPQVCEYRITPSRSKYSLGIEVERLIYRRRWPPRVALVMRQTLGHANEAPAENEETGRVNERVDAHVVVRMRRSTRSF

SEQ ID NO: 85883 - protein, 120 aa, Gossypium hirsutum
  Clone ID: LIB3166-034-P1-K1-H6.pep
MRIEASVAFTSSRPLVPLFIFLFFIPGFHARNLQQCSSSCGDLTNISYPFRLQGDPAGCGDVDFQLFCQNNTVILNILGGKYYLKGIFYYKRTIRVVDVYLAHGTCGLSYKSFFIELKPP

SEQ ID NO: 85884 - protein, 60 aa, Gossypium hirsutum
  Clone ID: LIB3166-035-P1-K1-A1.pep
SVHFHVQHCVRWECLNLINHVPRCPSLCQSSLFNPPPFLFIFNRRRLSTSPSFRRIVLSD

SEQ ID NO: 85885 - protein, 42 aa, Gossypium hirsutum
  Clone ID: LIB3166-035-P1-K1-A11.pep
CLLLTNSYIKIRCDIWTNSMSRNSKITPNNLMSRNFACSTMT

SEQ ID NO: 85886 - protein, 128 aa, Gossypium hirsutum
  Clone ID: LIB3166-035-P1-K1-A2.pep
CSAPRLHWRSPESLRDLARTSAPVVERFHRRIATTASEHPFKGVMTSLPKPGGGEFGKFYSLPALNDPRIDRLPYSIRILFESAIRNCDNFQVTKDDVEKIIDWENTSPKQVEIPFKPARVLLQDFTG

SEQ ID NO: 85887 - protein, 89 aa, Gossypium hirsutum
  unsure (1)..(89): unsure at all Xaa locations
  Clone ID: LIB3166-035-P1-K1-A3.pep
TAGETRCQKRKNRTSLCSCXTYIDTMVSKFQACQQYIHTLEASLQEEMSXHAPFYGAGPGALSMKELETLSRIHGGGLEHIRSLQHIKG

SEQ ID NO: 85888 - protein, 108 aa, Gossypium hirsutum
  unsure (1)..(108): unsure at all Xaa locations
  Clone ID: LIB3166-035-P1-K1-A7.pep
WSSLARPRLSACPWLLPXRCCFSSCLRRRCPPLVRCXPXALPLLFLXRAGCSLPSALFFSFFFLSVLPGFAGGGWFSAXRSXSSLFAWFLFLSLVXFFCSXRPRGSPP

SEQ ID NO: 85889 - protein, 130 aa, Gossypium hirsutum
  Clone ID: LIB3166-035-P1-K1-B2.pep
ELNCMEPCEEESLIDLNTNVEIPEEKDLLKQLQGPPASNIIAPQPIRPVGSIIYVGCIKENPILTPRMQVLKKGEEVEELVESDALPAVISDSNNKVRLANSAYKEMVGQPQCPWLDSVVTGEGRARTRG

SEQ ID NO: 85890 - protein, 72 aa, Gossypium hirsutum
  Clone ID: LIB3166-035-P1-K1-B4.pep
ETRGGPRVRPRVRPCFDVKDMGKPLEVRDLRLHFKGCPYIALPLENYFAVVGEGMACLTVVTDGGVGGGMAV

SEQ ID NO: 85891 - protein, 109 aa, Gossypium hirsutum
  Clone ID: LIB3166-035-P1-K1-B5.pep
MPKQEIWIGIPGDGRWLFRSVILGAWLRSGKQSPTERSQKVLADELRSKVADEFIKRRADTEWFVEGDFDNYVVQMRKPHIWGGEPELLMCSHVLKTCITVYMKEKISA

SEQ ID NO: 85892 - protein, 121 aa, Gossypium hirsutum
  Clone ID: LIB3166-035-P1-K1-B7.pep
PQPSLDLKIPCNLGAHPKPSVNIKSREAIYVMKTDGNQGFNSARGMESRSCSCSIQKINVILICWGTRRATTSIDVVSPTPWLVHLRTAVHDKHLFICKCIESPLSIKICIRCWSYLREFS

SEQ ID NO: 85893 - protein, 54 aa, Gossypium hirsutum
  Clone ID: LIB3166-035-P1-K1-B9.pep
KGIALEFLNRDAEADGNVRETGYVCGGLGKRYLFCLTVSPPWKRLNRRLGPTVG

SEQ ID NO: 85894 - protein, 95 aa, Gossypium hirsutum
  unsure (1)..(95): unsure at all Xaa locations
  Clone ID: LIB3166-035-P1-K1-C10.pep
VFLQRHVCTAGGQGTVRVTLDGREIFTNIVSSAMIHATGPFDDNEWMQTKIDGYECSGTVEHGVWWSPTIXRGEDQEALYISNHKFTVNVVRNFI

SEQ ID NO: 85895 - protein, 126 aa, Gossypium hirsutum
  Clone ID: LIB3166-035-P1-K1-C12.pep
AAFMPDTAHHPSFVLEQWWQRTPSEAWLYTEFAPYGRPEDSSMSMFFGTKFLTSKLYQLSPVEDLELAKALIRPGSMFLSDLSKADKFSKEKFGSVPRVYVVCKEDKGIPEEFQRWMIQNSEINEV

SEQ ID NO: 85896 - protein, 36 aa, Gossypium hirsutum
  Clone ID: LIB3166-035-P1-K1-C4.pep
YHQNYDKWILESPTDQHMFGLVVRCSPRINKRVDFR

SEQ ID NO: 85897 - protein, 25 aa, Gossypium hirsutum
  Clone ID: LIB3166-035-P1-K1-D4.pep
FNYINVGHRYRLNSHVFKNNDYQLV

SEQ ID NO: 85898 - protein, 123 aa, Gossypium hirsutum
  unsure (1)..(123): unsure at all Xaa locations
  Clone ID: LIB3166-035-P1-K1-D7.pep
RTRGRKGHVVLLLSPNSXCFPIVCLSVMSLGAIITTTNPLNTANEIGKQVADSKPVLAFTIPQLLPKLAGSTIPIVLLEDHLSSQAGEAKIVTTLHQMMKREPSGSRVRDRVNQDDTATLLYS

SEQ ID NO: 85899 - protein, 37 aa, Gossypium hirsutum
  Clone ID: LIB3166-035-P1-K1-D9.pep
PLMNAGTLLLSKRPTTAELWIYDAPPKSALKPSCILR

SEQ ID NO: 85900 - protein, 112 aa, Gossypium hirsutum
  Clone ID: LIB3166-035-P1-K1-E9.pep
FIMDGCLVTVEGEEDIGGSISADAPYLEVSKDAVECFFRSLEFVNATFVAEGNRIPVPKLSRNTRMSIKLDCGERSPSEERFGKILTRNSQALKPMHHKARYCLGVSGQICV

SEQ ID NO: 85901 - protein, 62 aa, Gossypium hirsutum
  Clone ID: LIB3166-035-P1-K1-F11.pep
LKEMRKTNKVDVEDLTVENGLFKSFDEIVRRQLDPIWLTLGKKTKQLVSDLKTLLKFVDYLV

SEQ ID NO: 85902 - protein, 129 aa, Gossypium hirsutum
  Clone ID: LIB3166-035-P1-K1-F12.pep
HASAHASGGTHRPSNFNMSGKEDHIIGDNSGDGELKRVKSDVELHASSQEGPKLFPRSQSLRSLKEQLICDNLQPISKNTSPIAHDLEAQRVKLTYGDEKIRLRMQSKWRFKDLLHEIARRFNIDDISR

SEQ ID NO: 85903 - protein, 58 aa, Gossypium hirsutum
  Clone ID: LIB3166-035-P1-K1-F2.pep
MFDCIVFFIQRFLLIQVKIFTDLCKMSNGDSHWNDEDWRLNIGDLIFLSLLIHYYLLL

SEQ ID NO: 85904 - protein, 99 aa, Gossypium hirsutum
  Clone ID: LIB3166-035-P1-K1-F4.pep
LNKCRAKNKRERRTKRAITMFTKQTISVIILYEHCPKPKALGQLSLAIFPSSHHIPFSFLFSAFLLCFIDVLSRSINQETLARSQQPTKLSGRVGERVG

SEQ ID NO: 85905 - protein, 70 aa, Gossypium hirsutum
  Clone ID: LIB3166-035-P1-K1-F6.pep
VGERVVWATLCTQLGKYYCNMLEEFGIMPNYYLLFPSVAQKFVTNLCGSIYCESACQATGLLDIDPKLRL

SEQ ID NO: 85906 - protein, 91 aa, Gossypium hirsutum
  Clone ID: LIB3166-035-P1-K1-F8.pep
EGIMLSADKKDPILRALIMLKMHSRPARQLQPLVSVDGSVRTCWEKILKETCSDFPANVQIIPPNNLQFYNSFHQISKFLPELRAKILFND

SEQ ID NO: 85907 - protein, 39 aa, Gossypium hirsutum
  Clone ID: LIB3166-035-P1-K1-F9.pep
KLPNLHGRIQKRISWLGRITCTLHIAIHSSRQRVRPSVR

SEQ ID NO: 85908 - protein, 100 aa, Gossypium hirsutum
  Clone ID: LIB3166-035-P1-K1-G2.pep
MAGIRLLNESCSDADEPKEKRMRPKPSFASVIGQAVMVNYLYTALEPVLRKVVNEEVERSIGDRLRSFTRSSLLRIQAVEPEPSTLRLIFPKALSLAIFT

SEQ ID NO: 85909 - protein, 102 aa, Gossypium hirsutum
  Clone ID: LIB3166-035-P1-K1-G3.pep
SPLDSDQSLPFVKKSPIWRTIESLDVFQIVPQKPHFQPLAESREEFREGSAIGIMVTFASLFDKISMLHFDDPRNTFDSISEGLDDLEKHGFDVSLLRRRVN

SEQ ID NO: 85910 - protein, 79 aa, Gossypium hirsutum
  unsure (1)..(79): unsure at all Xaa locations
  Clone ID: LIB3166-035-P1-K1-G7.pep
KEPRFAFITKTEIDHLDCGYRWRKCGQKAVKNSPYPRSYYRCTSSGCGVKKRVXRSFDDTTIIITTYEGKHTHSCSVQP

SEQ ID NO: 85911 - protein, 60 aa, Gossypium hirsutum
  Clone ID: LIB3166-035-P1-K1-H1.pep
MKAELELPPGFRFHPTDDELVNHYLCRKCASQPISAPIIAEIDLYKFDPWQLPDMALYGE

SEQ ID NO: 85912 - protein, 88 aa, Gossypium hirsutum
  unsure (1)..(88): unsure at all Xaa locations
  Clone ID: LIB3166-035-P1-K1-H2.pep
KVGSLDHIFSVEPMKVXGASTDSEVAXALRVLEGCCLLHPESTRLAHQHKAIPDLMNVMSTRGVLEQGACLDASILILLDSLAIQYAF

SEQ ID NO: 85913 - protein, 56 aa, Gossypium hirsutum
  unsure (1)..(56): unsure at all Xaa locations
  Clone ID: LIB3166-035-P1-K1-H4.pep
AFLHWYTGDXMDEIEFTRXEIYMNDLVAQFQQYHDSSVEDEEENEGEECLDVNYQT

SEQ ID NO: 85914 - protein, 41 aa, Gossypium hirsutum
  Clone ID: LIB3166-035-P1-K1-H8.pep
LLTGKTVSLKKVRFDTLETIECKVHGKRDTRFKETKSSKCY

SEQ ID NO: 85915 - protein, 122 aa, Gossypium hirsutum
  Clone ID: LIB3166-036-P1-K1-A1.pep
IPVDPPFRKIPIPFSLFLLIMMPLLGAPTFIFYSPLKHHYHVTQHVIESIMNASIPRRNLRFLSCGTNNPIDDCWLCAPHWETNHQRLADCAIAFAKHATGGKHGKIYLVTDPSDRDPINPK

SEQ ID NO: 85916 - protein, 52 aa, Gossypium hirsutum
  Clone ID: LIB3166-036-P1-K1-A11.pep
QHYFGFVHSFLLHLGSRFSFPLCFFSVGSIAIKGWIFGTRVWIFLVHELSFC

SEQ ID NO: 85917 - protein, 55 aa, Gossypium hirsutum
  Clone ID: LIB3166-036-P1-K1-A3.pep
KTKLKKHYEEQNHDGTEHNFATQRVATTITGRDVHMAPIYSRFHSWLYSLFFLRS

SEQ ID NO: 85918 - protein, 47 aa, Gossypium hirsutum
  Clone ID: LIB3166-036-P1-K1-A7.pep
SQGKGFLATIPVQFATGLHDILSCALLLRVGKAVHGYKKCVWVLSLY

SEQ ID NO: 85919 - protein, 88 aa, Gossypium hirsutum
  Clone ID: LIB3166-036-P1-K1-B10.pep
KPSFIPNTTFRETNFTPQQTTTATCYASSITFNRITFYNLAPKSLLGSFHNNIFTLKELLTKLFKHNSIFVLNPYFFNLFIFLSHLFF

SEQ ID NO: 85920 - protein, 88 aa, Gossypium hirsutum
  Clone ID: LIB3166-036-P1-K1-B6.pep
QTSISSNPFQSPFSSSSSSLSSSLASNGDASLFSNLAAVAPSLFSASPSNILSVTLFLVQRKIRAFGAIKASLAKTEGALLRIGTKDK

SEQ ID NO: 85921 - protein, 76 aa, Gossypium hirsutum
  unsure (1)..(76): unsure at all Xaa locations
  Clone ID: LIB3166-036-P1-K1-B7.pep
IFLIPTQHFNILYQTTFFILFPXLSSSYSLTSYFFFSYFFLYFPLQILPYFFFIFTLLYIKFFFYLFLTLLLFFSS

SEQ ID NO: 85922 - protein, 61 aa, Gossypium hirsutum
  unsure (1)..(61): unsure at all Xaa locations
  Clone ID: LIB3166-036-P1-K1-B9.pep
HSYGSARFFVKTSPGGLEMFSTLMKNIKTPCFFFFLSIKYIHVLLYDSFNNLWCXAGSLIS

SEQ ID NO: 85923 - protein, 44 aa, Gossypium hirsutum
  Clone ID: LIB3166-036-P1-K1-C10.pep
VMASFLWVITYHTHELICLLGHLFVSPIPLFDIYYIGTRNNTPC

SEQ ID NO: 85924 - protein, 98 aa, Gossypium hirsutum
  Clone ID: LIB3166-036-P1-K1-C11.pep
FILVIGHQGEAPAFFVDNLQNGFSTGFGLKSKGFETFTDVGDKTFVIGGANCDSASSVGIQIYDKSTGKWVIPTVLGTKPKTCKGHSAILLNEDRIMI

SEQ ID NO: 85925 - protein, 123 aa, Gossypium hirsutum
  Clone ID: LIB3166-036-P1-K1-C12.pep
HASGGPDGFIIKMRDGRHLRCIQNNPQPGNLPDYAPHPAIVLKMEDGTGLLLPIIVLEMPSVLLMAAMSNVQIPRPTMYQVVKDMIEKMGYSVKLVRVTKRVHEAYFAQLYLTKVGDETESVS

SEQ ID NO: 85926 - protein, 82 aa, Gossypium hirsutum
  Clone ID: LIB3166-036-P1-K1-C3.pep
QQGTAASVIKETAILKPVHHVANNCNDPTVRGSCDTGCNIKRPSSKKPSKFLVQYTHLFEDEAGTTPLRETIDAVDIRPLAP

SEQ ID NO: 85927 - protein, 54 aa, Gossypium hirsutum
  Clone ID: LIB3166-036-P1-K1-C6.pep
NSFLLRVFWNSIDLVFICLTKVYSIILAFSQGFNFFFPIISMESSEFWHVLFYL

SEQ ID NO: 85928 - protein, 21 aa, Gossypium hirsutum
  Clone ID: LIB3166-036-P1-K1-C7.pep
GNKCSSITPVHLKAPSSPFYV

SEQ ID NO: 85929 - protein, 74 aa, Gossypium hirsutum
  Clone ID: LIB3166-036-P1-K1-D10.pep
KQIIEWYFIMEGLYDIIVSKPSFSLIFWVVTNCFYVLYIFFCIIKLFFYFLIFFFINIYFFFFTISFLFSNLYF

SEQ ID NO: 85930 - protein, 84 aa, Gossypium hirsutum
  Clone ID: LIB3166-036-P1-K1-D11.pep
HASGLFGVPIGGAAERAGEEGEGVGTEAATAADETQLQLQQPGGSEIIKLEPLDCQNRGRDDDRGIQDAPWLRQVHRANQRVCN

SEQ ID NO: 85931 - protein, 95 aa, Gossypium hirsutum
  unsure (1)..(95): unsure at all Xaa locations
  Clone ID: LIB3166-036-P1-K1-D8.pep
NYANLYVTPPSSKSTIEALPSVNITKNNLNSEFNQXAFCMDYFEEGTESNYIPCKHLYHKDCLLPRLEFHNSCPVVSSLAAYLFILIIRGVFVLH

SEQ ID NO: 85932 - protein, 89 aa, Gossypium hirsutum
  Clone ID: LIB3166-036-P1-K1-E1.pep
ASPMVASFIFFLIIYEYSSFSSFYFIMVLYIESCVYVGHYYYIVYLYLNVCTILSSRACFLIWFQLFNRFCITICFRIWNTTRFQFQFF

SEQ ID NO: 85933 - protein, 67 aa, Gossypium hirsutum
  Clone ID: LIB3166-036-P1-K1-E12.pep
SSTRPLNVHLPYKPLVGAMEIFKVAQNALAQVVWNPVNDGQRTFLCLQFKPHHIVGGVHFLAAKFLI

SEQ ID NO: 85934 - protein, 47 aa, Gossypium hirsutum
  Clone ID: LIB3166-036-P1-K1-E4.pep
GMETFLITLETCNEGLSYKLCHQISDSITLACFAQDPHSMLSFLSCI

SEQ ID NO: 85935 - protein, 48 aa, Gossypium hirsutum
  Clone ID: LIB3166-036-P1-K1-E5.pep
IMQMQSIHNHIKFCKCTPMITPFSSSTQVPVPCSKCTLGKKADFSRIK

SEQ ID NO: 85936 - protein, 37 aa, Gossypium hirsutum
  Clone ID: LIB3166-036-P1-K1-E7.pep
NNLEDRQGFDLVIKEYITCVSMFVLKDVKNNLIMEEM

SEQ ID NO: 85937 - protein, 119 aa, Gossypium hirsutum
  unsure (1)..(119): unsure at all Xaa locations
  Clone ID: LIB3166-036-P1-K1-F1.pep
PGRPQPSEPAKEAAAFFSGLASKAVGEVLEGEVRPDASKQTPKPVSAGSTEAVELEKCVXIREELYKKAKEFDSKILGFETAIMRPYFHVRPLNVSELEXWLNYLDFIKREGVLNKVVK

SEQ ID NO: 85938 - protein, 53 aa, Gossypium hirsutum
  Clone ID: LIB3166-036-P1-K1-F11.pep
ILFICNFPVGYNVVLQRIELCALIPHVFISAGKYHPLVKTSETRKCSQVKIFI

SEQ ID NO: 85939 - protein, 76 aa, Gossypium hirsutum
  Clone ID: LIB3166-036-P1-K1-F4.pep
VNWVFRMVIDIHRWCLLSFFYPFFIFPLTCFLLKILFYFFFPTFFFQVFFYYIFFFYLFYYLFFFSYSTFFYLHLF

SEQ ID NO: 85940 - protein, 56 aa, Gossypium hirsutum
  unsure (1)..(56): unsure at all Xaa locations
  Clone ID: LIB3166-036-P1-K1-F5.pep
YVQVDTVSYILWVNCAGCDKGPTKCDPGLRLTLYDXKNSSTSSLGYCDQYFCTSTY

SEQ ID NO: 85941 - protein, 93 aa, Gossypium hirsutum
  unsure (1)..(93): unsure at all Xaa locations
  Clone ID: LIB3166-036-P1-K1-F9.pep
FLSYPKHYKHYEXPDIYGLGAKTKGVFINPAFIEPFGLTLIEAVSYGLPIVATKNGGPVVIHRVLDNGLLVDPHDQHSIADALLKLVLYKHFF

SEQ ID NO: 85942 - protein, 84 aa, Gossypium hirsutum
  Clone ID: LIB3166-036-P1-K1-G10.pep
LSEKVSTIRGKYETKILWKFSCSPVLPVKCFIIDGRLLYQLIITSSKSTFHLGALIFLQKLDLIRSSEAVGVIYHMEGRLHKTS

SEQ ID NO: 85943 - protein, 124 aa, Gossypium hirsutum
  Clone ID: LIB3166-036-P1-K1-G11.pep
FTFNFSLPPSLPNLSASLAFPSLPPKVTITTLAPFFSFLSHSHSRPPFFFSFFSFFFPCDPHFFSSSNPFNINNLFDRLILFFFSFHYKFENTPNPENWKIWSHYRLLPGTERSGTEHHPRPSY

SEQ ID NO: 85944 - protein, 86 aa, Gossypium hirsutum
  unsure (1)..(86): unsure at all Xaa locations
  Clone ID: LIB3166-036-P1-K1-G5.pep
NHLIPENMXFGAICTLCFCDSYTYCATNNPFFCYQCNRTFTLTIYPSADSFFPLFIVWFLFLFYNSIFENPILYSNLFFVPFFSCI

SEQ ID NO: 85945 - protein, 82 aa, Gossypium hirsutum
  Clone ID: LIB3166-036-P1-K1-G7.pep
DAVFMVLGHQEGTRKTVHDHVRIEPYSNGAQQPLELESKAMEAVKHHQIQLRWPESGSHTADGCHDPLKIIELRSRQRPTRP

SEQ ID NO: 85946 - protein, 43 aa, Gossypium hirsutum
  Clone ID: LIB3166-036-P1-K1-H2.pep
RVCRFQCPLTLLLSEDAATMNVERHVGLYNSLVECLGLLLILS

SEQ ID NO: 85947 - protein, 53 aa, Gossypium hirsutum
  Clone ID: LIB3166-036-P1-K1-H4.pep
ETTRASNLNTTHQLKNLKISLLKDFRETLCLARAATLTALTLFKALIWETATS

SEQ ID NO: 85948 - protein, 48 aa, Gossypium hirsutum
  Clone ID: LIB3166-036-P1-K1-H7.pep
YWMNEHQLIWYKIPLFTSFNWRFDSTDHTPQASQIYKIQIFNKYLNMV

SEQ ID NO: 85949 - protein, 109 aa, Gossypium hirsutum
  Clone ID: LIB3166-036-P1-K1-H8.pep
MTFTFAARSWSNTYRVLPSFSFTFFCFPSNKLLLSFRSVHKQTINKAGVGIGYEVALSRILSFTGDKIGETYLDLKSCPPETVRADTHRAINTDLQNKRGGTSCTLTPG

SEQ ID NO: 85950 - protein, 75 aa, Gossypium hirsutum
  Clone ID: LIB3166-037-P1-K1-A10.pep
TADFTGNCVGDHTGIAFSFRTFNIDAYDFFASTSISGLESETVFESSGISSSTSAMGDSSSSIEPCTYQEVLYTT

SEQ ID NO: 85951 - protein, 121 aa, Gossypium hirsutum
  Clone ID: LIB3166-037-P1-K1-A2.pep
SPATRPAILMFISTSQYPVTRTSLATVPVLANPAMHQQTVQVSNSLKAPLPSRYWNGTTMSRVGPSISRYQTLLRQEDNLRNNRRNMMISLANMQVDLNLANENSNFIGNVAFPFRIQIGP

SEQ ID NO: 85952 - protein, 69 aa, Gossypium hirsutum
  unsure (1)..(69): unsure at all Xaa locations
  Clone ID: LIB3166-037-P1-K1-A4.pep
MASNRILKELKDLQKDPTTYCSACPVAEDMSHWQATIMGPSDSPYAGGEFIVTIHFLSFYSFXPPKVAF

SEQ ID NO: 85953 - protein, 57 aa, Gossypium hirsutum
  Clone ID: LIB3166-037-P1-K1-A7.pep
QGRLLSCYPVRRHRQVGDEFINRASSSKSSHASTDCASVQLDQSLHTISILERDNHV

SEQ ID NO: 85954 - protein, 52 aa, Gossypium hirsutum
  Clone ID: LIB3166-037-P1-K1-B10.pep
PLVRPRVRWMATNFIELVALCCSHETRVRIFGIYLFLLPNCILFISYTHLCV

SEQ ID NO: 85955 - protein, 120 aa, Gossypium hirsutum
  Clone ID: LIB3166-037-P1-K1-B11.pep
EMILVYEFLARGTLRDHRYKTKNPPLSWKRRLEICIGAARGLQYLHAGVKQAIIHRDIKSTNILLDENWVAKVSDFGLSRLGPTDIFQSHVSTVVKGSVGYVDPEYYRKQQLTEKSDVYS

SEQ ID NO: 85956 - protein, 125 aa, Gossypium hirsutum
  Clone ID: LIB3166-037-P1-K1-B2.pep
KIPFFLFQRWKGLNGVSPLTYKGSIPEAIREAQNQKKLFVVYISGENDESKNLDHSTWTDLKVKESLSKYCILLHIRGGTTDAANFSAIYPQKSIPCITAIGFNGLQAWQNGIKFSSYVKPFFSF

SEQ ID NO: 85957 - protein, 63 aa, Gossypium hirsutum
  Clone ID: LIB3166-037-P1-K1-B5.pep
TRYLLFSYRASSNTHQTRNRIGQIRQNQEKKKIRVHLCFLKKAFFCCLFHARKWGLPLRKWLN

SEQ ID NO: 85958 - protein, 112 aa, Gossypium hirsutum
  Clone ID: LIB3166-037-P1-K1-B7.pep
PTRPEKPCTRIFTDDIMRRYPTLKGGKFWKEEHDLLLLRAVLKHGYGRWQAIVDDKDLRIQEVICQELNLPIINLPIPGQAGSQVQNGAYTTYIVPTGTHTHGNGSGNDVGG

SEQ ID NO: 85959 - protein, 73 aa, Gossypium hirsutum
  Clone ID: LIB3166-037-P1-K1-C11.pep
GSLLFNGNLLNYNRKNIQKNLENTDTPNINLANKAEYYRIIKYMDLKHKLYPFEPFHPQLLANDTKHIFFSKS

SEQ ID NO: 85960 - protein, 127 aa, Gossypium hirsutum
  Clone ID: LIB3166-037-P1-K1-D4.pep
MVAVFYNHSHLKLLWGSRTDNNNNRVKQVAIPEFNKKNAICKYPFESNSGEELSTELHNKTIQEYCKIGDVDNAMKLVAQLEAMGFHPNSISYGFLIDTLGSVGRTLEADVLFQEMMYLGFKPRIRL

SEQ ID NO: 85961 - protein, 118 aa, Gossypium hirsutum
  Clone ID: LIB3166-037-P1-K1-D5.pep
MKILLGFMILTVLMLICMEPNQVEAQVEPPYPPDYEVRALREIATELGKKDWNYNENPCNNKSSWFTPPPPPNVPEAINNSTVTCNCSFPNGKCHIDGIYLLGQDLDGVLPRSLVKLS

SEQ ID NO: 85962 - protein, 127 aa, Gossypium hirsutum
  unsure (1)..(127): unsure at all Xaa locations
  Clone ID: LIB3166-037-P1-K1-D9.pep
MSAPSDIHFKAVKRVLRXVAGTMDHGLFFTAGQLELVGYSDADWASSVEDHXSTSGYVVYLGSYPVAWCSKKQSVVSRSSTEAEYRSLANCVFELLWIQQLLNEVXMPQSKLPIIWCDNSSTVSVVE

SEQ ID NO: 85963 - protein, 130 aa, Gossypium hirsutum
  Clone ID: LIB3166-037-P1-K1-E5.pep
LHPCYCCFSSLLGLEVGNVAPEVNSEAMFRCVRVSGIEDGDDQYAYQTAVNIGGHVFKGILYNQGPENGYNMAAAVGESSSGDGIQQLDLITAGPTAAVSNAGTVSCNASCSSVTAVASSSTVAFLDPSS

SEQ ID NO: 85964 - protein, 125 aa, Gossypium hirsutum
  Clone ID: LIB3166-037-P1-K1-E6.pep
KYILFILAYVLGAGAAIRNFSPAFGKLMSKEQQLEGEYRQLHSRLRTHAESIAFYGGESREESHIQQKFKTLVKHMRVVLHDHWWFGMIQDFLLKYLVATVAVVLIIEPFFAGHLRPDASTLGRA

SEQ ID NO: 85965 - protein, 117 aa, Gossypium hirsutum
  unsure (1)..(117): unsure at all Xaa locations
  Clone ID: LIB3166-037-P1-K1-E8.pep
MHSVPSSTEGMASMNTSASPDNSLSDMYCSTPMPLPWDADTRYFRLXVMVFSRCEKGSSHSQKESEPLRGEDDAGSESLSKGDEWNACEQGSTEQYCKSSQLSSTKGLDGTGYFYSP

SEQ ID NO: 85966 - protein, 127 aa, Gossypium hirsutum
  Clone ID: LIB3166-037-P1-K1-E9.pep
EFTEKVQIRGGVLIKKWGRSSAASTAVSIVDAIRSLITPTPEGDWFSSGVYTNGNPYGIAEDIVFSMPCRSKGDGDYVLVKDVIFDDYLLKRIKKSEAELLAEKRCVAHLTGEGIGFCDLPEDTMLP

SEQ ID NO: 85967 - protein, 83 aa, Gossypium hirsutum
  Clone ID: LIB3166-037-P1-K1-F11.pep
HSCPYFLVQALEDTGQYTGVVCYLLHIHLIILSDGLATTYATSLGAQHDQSRYTLKTRGLERLILNYKQHAPWRNKTYFSLLY

SEQ ID NO: 85968 - protein, 82 aa, Gossypium hirsutum
  Clone ID: LIB3166-037-P1-K1-F2.pep
FNKQRYHSSYSTPNSDELMETRFFIDSWVHKSTHVLAIPKDTQKMYLFSLFNFKKHFFIRKRHQFKKRKRKGNNTYPEFKIL

SEQ ID NO: 85969 - protein, 61 aa, Gossypium hirsutum
  Clone ID: LIB3166-037-P1-K1-F4.pep
CRVTFLSSKVYHTICFTSTVGLIVFNGEHVFYYHQILSTISLCSKQSMAGYCFLPNNQNIQ

SEQ ID NO: 85970 - protein, 31 aa, Gossypium hirsutum
  Clone ID: LIB3166-037-P1-K1-F5.pep
LILPPPITTNNHLNCATLRLPLINKNHLILS

SEQ ID NO: 85971 - protein, 41 aa, Gossypium hirsutum
  unsure (1)..(41): unsure at all Xaa locations
  Clone ID: LIB3166-037-P1-K1-F9.pep
XMDLLAAEKAVXITRPFKRTLFHDVVXVKMYGIKKERSSRT

SEQ ID NO: 85972 - protein, 79 aa, Gossypium hirsutum
  unsure (1)..(79): unsure at all Xaa locations
  Clone ID: LIB3166-037-P1-K1-G1.pep
PVRPKYFEMPXLTVSEAVEQLENVDHDFYGFRNEETGDINILYKRKAGGYGLIIPKGNGKAENLNPLVVESGKEHSYVE

SEQ ID NO: 85973 - protein, 31 aa, Gossypium hirsutum
  Clone ID: LIB3166-037-P1-K1-G12.pep
QTGHMAELAAKDVQFCALIPLFPSALGVVWG

SEQ ID NO: 85974 - protein, 121 aa, Gossypium hirsutum
  Clone ID: LIB3166-037-P1-K1-G4.pep
YWSTKFFGDMLNPVETRLSNYTVSSGGATNGNTFTPDVRIFSGWNSGEPSSRLRTQNQVFQDVLNHHLDDDDGTKIEHGWSSSYGAAGDAPRSEERQIEPPNVFFPGRLNNGRSGNQIRSG

SEQ ID NO: 85975 - protein, 43 aa, Gossypium hirsutum
  Clone ID: LIB3166-037-P1-K1-G6.pep
SCVRRYYSSNSRCRSIWSCLASNEASDSVYASVTLRWCSRRCL

SEQ ID NO: 85976 - protein, 60 aa, Gossypium hirsutum
  Clone ID: LIB3166-037-P1-K1-G8.pep
KKALTETRASSNYNTQAQASECRPEHILIQLCAGIPLLYHIIKLGSQKIWSKIIPALIRH

SEQ ID NO: 85977 - protein, 51 aa, Gossypium hirsutum
  Clone ID: LIB3166-037-P1-K1-G9.pep
PQCSLSRCYRLCIFMVDSRKCYKESNPVAKGVTCVAPVGCVRWTSMAVDVT

SEQ ID NO: 85978 - protein, 39 aa, Gossypium hirsutum
  Clone ID: LIB3166-037-P1-K1-H1.pep
SVAATSGRMKTSQVRGLSTIFSISQLFCYGFFKCNSQFE

SEQ ID NO: 85979 - protein, 52 aa, Gossypium hirsutum
  Clone ID: LIB3166-037-P1-K1-H4.pep
KTISTVIRDLQQIELVCQLTSPVVGSDNHGILHALEQVEIVDEMAAGDVYEL

SEQ ID NO: 85980 - protein, 128 aa, Gossypium hirsutum
  unsure (1)..(128): unsure at all Xaa locations
  Clone ID: LIB3166-037-P1-K1-H9.pep
VKTINETNRNLEQMREELEQLKADKDEERRTRSKLKQTLRLRRQTLRTLQLTLRAVRIESDAFRASAAKALQYTDHPESDNSPVQLTQEDFYALKRRAKEETSLANWRVPASYGTEGYRXNGTKLGFK

SEQ ID NO: 85981 - protein, 106 aa, Gossypium hirsutum
  Clone ID: LIB3166-038-P1-K1-A1.pep
DTFILELMKGRRGVGINLEHPIFRELNAAFKSNPDDEDALRAIDLLYDAALVSSGYTPDNPAQLSGKIYEMMGMAISGKWSTFDSQQSASQSPQTETLEADVDAPV

SEQ ID NO: 85982 - protein, 86 aa, Gossypium hirsutum
  Clone ID: LIB3166-038-P1-K1-A10.pep
MGEKKNGNKKGGNEGEKKEKGSSNFVFKVDCLCEGCSFKILKCIREFQGVETVKTESNSNTVTVTGAVDPAAIKEKLVKKTRKNVD

SEQ ID NO: 85983 - protein, 126 aa, Gossypium hirsutum
  unsure (1)..(126): unsure at all Xaa locations
  Clone ID: LIB3166-038-P1-K1-A11.pep
DIVSPIVIDLVDVIPESEFEDAAADDPXKDETFSDAVIAEMEANSYGLQIIKDADLEELRELGSGTYGTVYHGKWRGTDVAIKRIKKSCFSGRSSEQDRLMKDFWREAQILSNLHHPNVVAFYGVV

SEQ ID NO: 85984 - protein, 101 aa, Gossypium hirsutum
  Clone ID: LIB3166-038-P1-K1-A12.pep
LLHPLPPLLLQAKQFTAPRTQERKRDRKDKLEQNGCPFHVKRCSYTVHPTSAMCKTNILEALSKNLNQILIIRVNNLWSKIPLLHEIRKPLFDPISHFISP

SEQ ID NO: 85985 - protein, 128 aa, Gossypium hirsutum
  unsure (1)..(128): unsure at all Xaa locations
  Clone ID: LIB3166-038-P1-K1-A5.pep
FLFCGEGLSSLMRSAMKNKILHGVKASRSGPQVSHLLFMDDCILFGEATERGAISLKQILHEYEGCSGXKVNYSKSTIFFSANTQKRDISLVTRVLGVHCSTDPERYLGLPNLVGRRKKASFQNSDAW

SEQ ID NO: 85986 - protein, 94 aa, Gossypium hirsutum
  Clone ID: LIB3166-038-P1-K1-B12.pep
MHYLPRFFSRRSAMYSKRSRSKPRLERRNAAKHIDYDAASFSSSLDDTSSSSSLITRSLDLSDKTSFRIQGTEGEFDLICRTLGLSGPERFSIP

SEQ ID NO: 85987 - protein, 57 aa, Gossypium hirsutum
  Clone ID: LIB3166-038-P1-K1-B5.pep
SGAGPSNYPFPYVIYYINALDPSIICGLASSSCPQFNTKLSANMPVPAEGLAPGGHL

SEQ ID NO: 85988 - protein, 51 aa, Gossypium hirsutum
  unsure (1)..(51): unsure at all Xaa locations
  Clone ID: LIB3166-038-P1-K1-C1.pep
GRQNIWILTIQEGPNWKHTXXKVNFSTHTKRPTHVLFLKTTLNLXXNNTQP

SEQ ID NO: 85989 - protein, 51 aa, Gossypium hirsutum
  Clone ID: LIB3166-038-P1-K1-C10.pep
PLREGRVHNNAPNHSTKTHTETPDCEPKFFLKMLPTILHSIIYTQMSTHMV

SEQ ID NO: 85990 - protein, 54 aa, Gossypium hirsutum
  Clone ID: LIB3166-038-P1-K1-C11.pep
VSSMLNGSHGHRHSLFKLQGLSSLCFFHILMARSILIFDSVLYANIISAPARNS

SEQ ID NO: 85991 - protein, 64 aa, Gossypium hirsutum
  Clone ID: LIB3166-038-P1-K1-C12.pep
GWPGVIIQEAIVMNYPPEKLVRFQDWNSGRSTEGRYSDNNWINSGKIRFTINSFSEKLQRGVES

SEQ ID NO: 85992 - protein, 108 aa, Gossypium hirsutum
  unsure (1)..(108): unsure at all Xaa locations
  Clone ID: LIB3166-038-P1-K1-C5.pep
AACDHLSEVALNRLIFLDXSPVFYETLYVGDVANSRLRPAIRILKQNLALLTAILTDHAQALAMKEVMKASFEAFLMVLLAGGPSRTFQRSDHEMIEDDFYSLKRVFC

SEQ ID NO: 85993 - protein, 119 aa, Gossypium hirsutum
  Clone ID: LIB3166-038-P1-K1-D11.pep
NNTVNAGYRSHSKLNPQKFHRKLIFDSVNEILVGKLALFGAFPEPRINSGKLAKKTLTAQQLLKELCLEIEQLQAKKPNCDPEEGEDGLKNILWEDVMSRSESWTDFNSEISGMVLDVE

SEQ ID NO: 85994 - protein, 87 aa, Gossypium hirsutum
  Clone ID: LIB3166-038-P1-K1-D8.pep
ILCSKCKEVSFEVQIHNCFLLNSLAFYFSKSISILSEPYQCISRQLILGPMAIPNSADFASVGGGCAAFSRDRVVNSFPRHKVVKLD

SEQ ID NO: 85995 - protein, 110 aa, Gossypium hirsutum
  unsure (1)..(110): unsure at all Xaa locations
  Clone ID: LIB3166-038-P1-K1-E6.pep
PTRPPTRPVICSQLMAVTGDPAHMFLLSMPSAGPGGRNVRDHVDKFLDMMHSEDRESKRGLVDAVVDCLHKSGLKEEAGSGWEVAAAQKEYPDAAGEQSSXYWLINLHVM

SEQ ID NO: 85996 - protein, 91 aa, Gossypium hirsutum
  unsure (1)..(91): unsure at all Xaa locations
  Clone ID: LIB3166-038-P1-K1-F11.pep
TALIELKSGSDNHGTXSQEKDGGMNTHLRMEKLTLKGKNTDTLDHLRVQRNNXRCYILTDMXNLVTVLAEETPRVKPKKTAAGQPLGCSMR

SEQ ID NO: 85997 - protein, 126 aa, Gossypium hirsutum
  unsure (1)..(126): unsure at all Xaa locations
  Clone ID: LIB3166-038-P1-K1-F8.pep
TIIASAQNSVESDPVRDTXSKAMDQQPELGSRGMPLPIQGDNMLVHPLQRPVSEAQPTECFIGNDTVNQQEDLTIEGGTINISSVYSEELLNSLTQALQSAGLDLSQANISVQIDLGKHANRGLTS

SEQ ID NO: 85998 - protein, 120 aa, Gossypium hirsutum
  Clone ID: LIB3166-038-P1-K1-F9.pep
PRVRLKAICSNEGAIIGVGLPCYSFLQTLLVSIRSGSNGLLMLDNVEINSLNRPKDKLLDWFFNPIMVLKEQIRVIKLGDGEVKLLEKLVLFGTNLERMDAWDNGSIVPQDSLRAAQMEG

SEQ ID NO: 85999 - protein, 74 aa, Gossypium hirsutum
  Clone ID: LIB3166-038-P1-K1-G10.pep
LLVADHCFLLGDSKNERERILKEILKEYEQCSSQCVNFSKSTIFYRSNTTGMDKKEISCLLGVRCYTNLGQYLG

SEQ ID NO: 86000 - protein, 100 aa, Gossypium hirsutum
  unsure (1)..(100): unsure at all Xaa locations
  Clone ID: LIB3166-038-P1-K1-G12.pep
MAQAIRGGELNTGAKIPSVGLGTWQASPGVVXAVAAAIKIGYRHIDCAQADNEKEIGSVLKKLFEDGVVRREDLWITCKLWCTNHAPEDVPVGVNNTLQD

SEQ ID NO: 86001 - protein, 127 aa, Gossypium hirsutum
  unsure (1)..(127): unsure at all Xaa locations
  Clone ID: LIB3166-038-P1-K1-G2.pep
PTRPGQQEIFIWVHHPGSEVSQTWEPRKGKGRSLETQIHKVPNSSFGSTMSAASGSSKSDDSSAEENHNPKNRVNRVKQGLRKIGSVFHRSPKNEGHSXTSEKWFHLPKNLRAVNDKEILVKFVVDD

SEQ ID NO: 86002 - protein, 40 aa, Gossypium hirsutum
  Clone ID: LIB3166-038-P1-K1-G8.pep
IIKYLHLFSIMDMKVNDFHTMQRLKPIPSSLRFGSEPCYC

SEQ ID NO: 86003 - protein, 62 aa, Gossypium hirsutum
  unsure (1)..(62): unsure at all Xaa locations
  Clone ID: LIB3166-038-P1-K1-H8.pep
MGDSAQKTYDIIDDTPAERARGITXINTATVECQTHNRHYKHMNCPAHADYRKNMITGAAQM

SEQ ID NO: 86004 - protein, 109 aa, Gossypium hirsutum
  Clone ID: LIB3166-038-P1-K1-H9.pep
YLKLMERIFFSMLIFLFQFFLPSQSATIMVGGVSHWENPTVHVGDSVIFKHKYQYKLYIFQNKNAFILCNFTQASLLTNPNSSSYEWHPSRTGFFYFAFNNGTLKTCRG

SEQ ID NO: 86005 - protein, 124 aa, Gossypium hirsutum
  Clone ID: LIB3166-039-P1-K1-A1.pep
IILDLSKNNFSGPIPSCLDAQSIEHLHLSKNRLSGTLTNAFFNSSSLVTLDLSENQLTGEIPYGIGTLSALSVLLLKANYFIGEIPTEMCQLYSLSIIDLSQNKLFGSIPSCLSHLTLQPNYEK

SEQ ID NO: 86006 - protein, 90 aa, Gossypium hirsutum
  unsure (1)..(90): unsure at all Xaa locations
  Clone ID: LIB3166-039-P1-K1-A9.pep
ERELLNMLVSGIQADIAGSKDGSGTVKTIAEAIKKAPEHSTRRIIIYVKAGRYEEDNLKVGRKKINLMFIGDGKRXTVITGGKSVAEHMT

SEQ ID NO: 86007 - protein, 130 aa, Gossypium hirsutum
  Clone ID: LIB3166-039-P1-K1-B1.pep
LKSNCLLEVLPKTEYERRVEMQNLVRDMALHITSAKPRFLVKAGMGLREPPKVQEWSEDLEKVSLMWNRELEVLYPLEMSPPKCPMLTSLLLPGCGIKSIPEGFFKHMDGLKILNLSRNPMKSLPNSISN

SEQ ID NO: 86008 - protein, 63 aa, Gossypium hirsutum
  Clone ID: LIB3166-039-P1-K1-B5.pep
GRPTRPITFHEEIASLVPPETKDANASYLSLPLIYRGHHQCLKFSGIEATDLCFRLGTITLFF

SEQ ID NO: 86009 - protein, 40 aa, Gossypium hirsutum
  Clone ID: LIB3166-039-P1-K1-B8.pep
VFFLFIYLFSLKKALNRSDQVTFPPFFLVKVELFIVIRLI

SEQ ID NO: 86010 - protein, 121 aa, Gossypium hirsutum
  Clone ID: LIB3166-039-P1-K1-C1.pep
MSGSGAAVEATVRQVSSSNSELVQRVEASFEAMNNVDCSEERKKSLRARYFYDIIFLITNLTAWFIRDYGHTIFPPLYYEKACGIRGSDCFQTLGVLRVSLGCFIFFLLMFLTTFSTRKLF

SEQ ID NO: 86011 - protein, 117 aa, Gossypium hirsutum
  Clone ID: LIB3166-039-P1-K1-C6.pep
MLDFNSHWRLSMDWDWLFEFLKGMVKPVAALTVVLLAVLLSFMQNLGLEKEMIYSIFRAFLQLSIIGFVLQFIFNQDNSGWIVLAYLFMVSVAGYTAGQRAKHVPRGKYVAGVSILA

SEQ ID NO: 86012 - protein, 65 aa, Gossypium hirsutum
  Clone ID: LIB3166-039-P1-K1-C8.pep
LTYMGKNEMPIVFPFAWGLKKLDLLYALLDTEDHCLLIQRCPNLEVLEVKLQTYNFLIFCCIAFV

SEQ ID NO: 86013 - protein, 105 aa, Gossypium hirsutum
  Clone ID: LIB3166-039-P1-K1-D10.pep
RVGGRVGACQAFKQALVTAPVLVLPNFQLEFTVDTDVSGGGIGAVLQQQGRPIAFFSKALGVRHRALSIYEKEMLVVLLAVRKWHAYLVGRHFKIRIDHQSLRFL

SEQ ID NO: 86014 - protein, 127 aa, Gossypium hirsutum
  Clone ID: LIB3166-039-P1-K1-D11.pep
HASGQQVCRAMDCQNLVQLYCLDDDEAWTLFEKKAGLDDFSDDSIKILANQIAKKCGGLPIAIVPLGSALKGKTHHEWQAAYGRLKDRRLTEIEDVNEENAYVCLEATIDYLKNMETKTCFLFCSLF

SEQ ID NO: 86015 - protein, 55 aa, Gossypium hirsutum
  Clone ID: LIB3166-039-P1-K1-D2.pep
MHLQSSRIWCNRGPFAYMLHLTMFITATWRHHMMMAIVYLAHMKPLIVPILSEGE

SEQ ID NO: 86016 - protein, 127 aa, Gossypium hirsutum
  Clone ID: LIB3166-039-P1-K1-E6.pep
EKLLVYKHMFNGTLYSLLHGRGGDMDWPTRFKIGLVAARGLAWLHHGCHPPFLQQNICSNVILVDEDLDARLMDFGLAGLMTSSDVNETSFMKSDLGEFGYIAPEYSSTMVASLKGDVYGFGVVLLE

SEQ ID NO: 86017 - protein, 117 aa, Gossypium hirsutum
  Clone ID: LIB3166-039-P1-K1-E7.pep
DAWVILLTLQNLGSAMADVVVDAMIAEAVQFEKASFAGDLQSLSWLSMAFGGVCGSLLGGYALTNLEIDIIFLLFSILPAIQLFSCGLVEESSMGGEVLSDFCISSDSHHLNGKEKQ

SEQ ID NO: 86018 - protein, 118 aa, Gossypium hirsutum
  unsure (1)..(118): unsure at all Xaa locations
  Clone ID: LIB3166-039-P1-K1-E9.pep
PRVREYLAPPLQFLSNXCVVLFLIQSLDRLILCLGCFWIRLKKIKPIPKQDAVADLESGENGFFPMVLVQIPMCNEKEVYQQSIGAVCNLDWPKSKILIQILDDSDDPTTQLLIKEEV

SEQ ID NO: 86019 - protein, 43 aa, Gossypium hirsutum
  Clone ID: LIB3166-039-P1-K1-F1.pep
SIHPPPYKQSLTPYNFNFKSLIIISLIKPLKSFIIILTSYITY

SEQ ID NO: 86020 - protein, 128 aa, Gossypium hirsutum
  unsure (1)..(128): unsure at all Xaa locations
  Clone ID: LIB3166-039-P1-K1-F11.pep
VAVALAHFAFGHKQHLKXIAAAYWKPQPNSLLNSLPSLANIKGTGSGNIVSSQIGPLTAMVRDGRVSTSSPLATAGIMHGSPLSDDSSQLSDSGILNDGVSNGEVNHSRPKPLDNAMYSQCVLAMFTL

SEQ ID NO: 86021 - protein, 129 aa, Gossypium hirsutum
  unsure (1)..(129): unsure at all Xaa locations
  Clone ID: LIB3166-039-P1-K1-F6.pep
PRVRKNKGSVVASSDKRIQVLDCYSDPPGWKDQLAGSGNFTALPNEALVSSTANVFTEVKHMDKLYNSIIELGEGLVGGGNIRFSIAIDSXQISRIFWLLHSDLHEARVRAVLEYLSSMVASLEPSHQL

SEQ ID NO: 86022 - protein, 67 aa, Gossypium hirsutum
  Clone ID: LIB3166-039-P1-K1-F9.pep
SPPICFWKPNLAIAGLRGGRRLMPTQALRVERHARVCARSCTEGSLWWGGVMCGRDQTLGLENGRWH

SEQ ID NO: 86023 - protein, 72 aa, Gossypium hirsutum
  Clone ID: LIB3166-039-P1-K1-G7.pep
FFKKKQNTLSPFVSQLCGGVMNPSLCAVSPSIERKKVSPLLLLGLISATERVSGDTITGIPGKPSPSLIIFV

SEQ ID NO: 86024 - protein, 36 aa, Gossypium hirsutum
  unsure (1)..(36): unsure at all Xaa locations
  Clone ID: LIB3166-039-P1-K1-H10.pep
LSFFTLXILIFFPHNPYLGGFFLTPPPPPINLQSYL

SEQ ID NO: 86025 - protein, 109 aa, Gossypium hirsutum
  unsure (1)..(109): unsure at all Xaa locations
  Clone ID: LIB3166-039-P1-K1-H3.pep
PTPTNYANIYLVHSALHRGGIHEEIHSIINPELIAFMLILPTMADNEAIAIVVADSTSYYTXYASSFHYSDDYVDKWSVDFLARLKTIIAAIDALFRPSMQQYTLQYPI

SEQ ID NO: 86026 - protein, 58 aa, Gossypium hirsutum
  Clone ID: LIB3166-039-P1-K1-H4.pep
VLVISSRAISMLNKSVIKVAQHMSANSIVRLDLAKSLVNHKRNLFDRQRSILSITILV

SEQ ID NO: 86027 - protein, 91 aa, Gossypium hirsutum
  unsure (1)..(91): unsure at all Xaa locations
  Clone ID: LIB3166-039-P1-K1-H5.pep
LQENKSRFLILYQKTYERLHLRFHPRESSILSFSGAIKIQETRRSTDGAVXDQASTSLXSIPCSIXLQLRYLSKEIYITGSQLFWVVDARH

SEQ ID NO: 86028 - protein, 85 aa, Gossypium hirsutum
  unsure (1)..(85): unsure at all Xaa locations
  Clone ID: LIB3166-039-P1-K1-H7.pep
FDNRMDNHLNQEXKRKNEREFIGEPHNITXLRTACERAKRTFSXTDQTTIVIHXWNNVIDSYTTITCAWTDELNMELTRNSMETV

SEQ ID NO: 86029 - protein, 53 aa, Gossypium hirsutum
  unsure (1)..(53): unsure at all Xaa locations
  Clone ID: LIB3166-040-P1-K1-A10.pep
TLSTYRTHTTLATDNPVDAKLEPYATFPWHIHCLSNNITVALDTILSSIXRSA

SEQ ID NO: 86030 - protein, 56 aa, Gossypium hirsutum
  Clone ID: LIB3166-040-P1-K1-B1.pep
LHGFFFLENILLFFSLLRSTFCLILLFLGQRVVMMQIIPCLNPIPVACCSVIIIHF

SEQ ID NO: 86031 - protein, 50 aa, Gossypium hirsutum
  Clone ID: LIB3166-040-P1-K1-B4.pep
PRVRPRVRVVIHFEDDTEEVQQWDQQIVGVCQALNDILDSMAKKGMAVPV

SEQ ID NO: 86032 - protein, 119 aa, Gossypium hirsutum
  unsure (1)..(119): unsure at all Xaa locations
  Clone ID: LIB3166-040-P1-K1-B7.pep
LLIGHGYFLYLTKTWXQRTTWMYVAVPVILYACERLTRAFRSSIKAVKILKVAVYPGNVLSLHMSKPQGFKYKSGQYMFVNCSAVSQFEWHPFSITSAPGDDYVSVHIRTLGDWTRQLK

SEQ ID NO: 86033 - protein, 55 aa, Gossypium hirsutum
  Clone ID: LIB3166-040-P1-K1-C10.pep
SSFVESFLGATWTSSHISPKLSLFFSLSPSIYKPIKMEDDPMHQLKKTSSCKANY

SEQ ID NO: 86034 - protein, 111 aa, Gossypium hirsutum
  unsure (1)..(111): unsure at all Xaa locations
  Clone ID: LIB3166-040-P1-K1-C11.pep
MLMRKYSGXLSSLRKEFLKKRKKGKLPKEARVTLLDWWNNHYRWPYPTEEDKLKLSEITGLDQKQINNWFINQRKRHWKPSEDMKFALMEGFAGDPMHFGHGVGPGSDNIC

SEQ ID NO: 86035 - protein, 72 aa, Gossypium hirsutum
  Clone ID: LIB3166-040-P1-K1-C2.pep
MSAPEGDKPTEGGEGGDAPSESQPPPPNPQHQAASRRLQQTQAQVNEVVDIMRTNVEKVLERDQKLSELDER

SEQ ID NO: 86036 - protein, 37 aa, Gossypium hirsutum
  unsure (1)..(37): unsure at all Xaa locations
  Clone ID: LIB3166-040-P1-K1-C4.pep
LNSNIHINLHMQILVQFLSLTIIYXILHTCINNLLST

SEQ ID NO: 86037 - protein, 79 aa, Gossypium hirsutum
  Clone ID: LIB3166-040-P1-K1-D4.pep
KYYRERGRSFSVTKIETQDAEKSSILLIKISLNTKQSKIAFTIFNPFRVSVGDYKGGFFGRCLILFGLSMFILLHPDSF

SEQ ID NO: 86038 - protein, 80 aa, Gossypium hirsutum
  Clone ID: LIB3166-040-P1-K1-E12.pep
TLSFEGDLSSRNIVSVDGTGICKFPRSDVRHLLRVAHSRHRRAFASGHKPSSCTFAGPYRSKAHHWISCHLKRVAGRTRI

SEQ ID NO: 86039 - protein, 97 aa, Gossypium hirsutum
  Clone ID: LIB3166-040-P1-K1-E2.pep
MFLALLLMEADVQKALALGPEGPLMEEFWENVRRYALYALTVSTGAIYTIFQPILELLKNPISAILILVIMGGSLYIVSQILSAMFGVTDFTYTYGY

SEQ ID NO: 86040 - protein, 114 aa, Gossypium hirsutum
  Clone ID: LIB3166-040-P1-K1-E8.pep
PIASELDFYSERTWLCIRRANSHAVKEDSVAITEDSQSLNRNKEHTKSTTQTEVNSNFLPLNNGNYDKPRKLAEEMYKNITSISFASVSSDQHTVLSEIETAEMLGNCVIDFQI

SEQ ID NO: 86041 - protein, 78 aa, Gossypium hirsutum
  Clone ID: LIB3166-040-P1-K1-F1.pep
GSVSSLLVSSSPRDAHSSCVERLGDFSVQGDHFPTLFARWIFWYRHFLLSHLFCSLAVSSLLYLVVLNKILSRLSSRV

SEQ ID NO: 86042 - protein, 80 aa, Gossypium hirsutum
  Clone ID: LIB3166-040-P1-K1-F9.pep
MANSENEKILRKMADAFKELAATVNSQTADMEVAPFSRACSFVSPLFGCLGIAFKFAEMDYVAKVGDLAEASKSIATLKV

SEQ ID NO: 86043 - protein, 44 aa, Gossypium hirsutum
  Clone ID: LIB3166-040-P1-K1-G12.pep
PYEASTSSYRCPTRTCRYVPDTPKKKKIGHCQDTCQKSIIVKIL

SEQ ID NO: 86044 - protein, 68 aa, Gossypium hirsutum
  unsure (1)..(68): unsure at all Xaa locations
  Clone ID: LIB3166-040-P1-K1-G2.pep
SFIXXXYFPGGGFFXYGKKTLSDFCHHMKKPLVLPSSFFCCYILPVFFITWRCFFPPDFQQIFVNCDS

SEQ ID NO: 86045 - protein, 67 aa, Gossypium hirsutum
  unsure (1)..(67): unsure at all Xaa locations
  Clone ID: LIB3166-041-P1-K1-A2.pep
TRPPTRSFFFTPLSSWLDPLPKMDRFSLLFLLLSSGXASAVVSDVYCDDDPLIXLVVSDGGVDDDSD

SEQ ID NO: 86046 - protein, 62 aa, Gossypium hirsutum
  Clone ID: LIB3166-041-P1-K1-E12.pep
RRPYHRNCCCALHCLIGSVLCSSASSRSRNNIAFPKKKTRNVDSSLSKAATDPQSISSRASL

SEQ ID NO: 86047 - protein, 76 aa, Gossypium hirsutum
  unsure (1)..(76): unsure at all Xaa locations
  Clone ID: LIB3166-041-P1-K1-F6.pep
SAGLGKPIYAQHQEIGSSSPQPSHTNLTQKTPGNQRKNKSDNLSTHKXRIKAHPKSRNQMQKKKKTEKQKLRSERK

SEQ ID NO: 86048 - protein, 44 aa, Gossypium hirsutum
  Clone ID: LIB3166-041-P1-K1-G12.pep
VYHHFSALCCLILVGSNYFLLFLCLLIPILGLLKMASSCSYYSP

SEQ ID NO: 86049 - protein, 47 aa, Gossypium hirsutum
  unsure (1)..(47): unsure at all Xaa locations
  Clone ID: LIB3166-041-P1-K1-H9.pep
PLASHSPNFLLLRHPNGLFSLRRYFLYXPFSXXDAFHPRLLARLRSL

SEQ ID NO: 86050 - protein, 119 aa, Gossypium hirsutum
  Clone ID: LIB3166-042-P1-K1-A1.pep
MSESDPSSTNVPPKDQPPPPTVPIPDAPPQEQSPKPSSTPLVSSKEGVSGNPTSRKLSAVYRGVRSRSGKWVSEIREPRKTTRIWLGTYPTPEMAATAYDVAALALKGPDAELNFPDMV

SEQ ID NO: 86051 - protein, 118 aa, Gossypium hirsutum
  Clone ID: LIB3166-042-P1-K1-A12.pep
YLNAVYAFKCRSYQFLSLMGSRTLSIGASLDSPDGHFERNHTENGSMVSLKFHEPNGVLDQGHQVSSPVRRDVNRSLSGVKFLENDDLDLEDGKLEKDRNKTVRSNKAVKIQNQALLS

SEQ ID NO: 86052 - protein, 127 aa, Gossypium hirsutum
  unsure (1)..(127): unsure at all Xaa locations
  Clone ID: LIB3166-042-P1-K1-A2.pep
HASAIFVLFMLQGQSTAASPPRSKLGIERRRRSRSAENVDLEFQEARRSSSASHSSKLKVGRIVDGYLQEIAKDVNLPLLKFIAIAETIPNFSRPDHDDLYRAIDIYLKAHPELNKSERXRLCRILD

SEQ ID NO: 86053 - protein, 113 aa, Gossypium hirsutum
  Clone ID: LIB3166-042-P1-K1-A5.pep
MLMLPIRLKIREVVFWPVFIIATLATMVGSQAIISGTFSVISQCRALKCFPRVKVVHTSNHIHGQIYIPEVNCILMVLCLAVLVGYRDTDTIGNAYGLAVITVMLVTTCLMFL

SEQ ID NO: 86054 - protein, 70 aa, Gossypium hirsutum
  Clone ID: LIB3166-042-P1-K1-A6.pep
FTSESSGWKPAKSRNFQWELNGSTFRLFGSTYRVPYHIRFAHSLTCVEIEALIVSYIGKPNIEAPTIQYV

SEQ ID NO: 86055 - protein, 121 aa, Gossypium hirsutum
  Clone ID: LIB3166-042-P1-K1-B12.pep
MGACLSATKGSGGSSGNTTAHHRKTATNAEKESQKPNNQQVRCSQPLKNKQKPKKQSGIIPWGKRTDFGYDKDFDQRYTIGKLLGHGQFGYTYVAIDKVNGDRVAVKKIDKNKMILPIAVE

SEQ ID NO: 86056 - protein, 126 aa, Gossypium hirsutum
  Clone ID: LIB3166-042-P1-K1-B3.pep
KHYGTPTNPCAPDRVPGGSSSGSAVAVAAKLVDFSLGTDTGASVRVPASYCGILGFRPSLGAVSTVGVLPMSQSYDTVGWFARDPKILNRIGRVLLHLPDVDPIKPSQIIIAEDCFRLSTIPSDRT

SEQ ID NO: 86057 - protein, 127 aa, Gossypium hirsutum
  Clone ID: LIB3166-042-P1-K1-B6.pep
PRVRGIALQDASMEYGMQKNQSRNKYSGGAKDAWSPALDDLMLVKDPRTKSAKKKHVAKLPQSWPLLEQKSKNSRKFPGEKKKHRKEMIAVKRRERMLRRGVDLEKINSKLEQIVLDQVDMFAFQPM

SEQ ID NO: 86058 - protein, 52 aa, Gossypium hirsutum
  Clone ID: LIB3166-042-P1-K1-C10.pep
QADSMHQRADLALRCTTHREHVIDLKQSPFEKCRAYRSIIDIFHKENSSVFL

SEQ ID NO: 86059 - protein, 105 aa, Gossypium hirsutum
  Clone ID: LIB3166-042-P1-K1-C11.pep
MAKTNSTRSAASLAGADNDDSYVEITLDIRDDSVAVHSVQGAGGGNEDPELALLAKKTLENKSASFRSYLLRNTSNRIKQVSQELKQVLSGRPSNAGRRFDRTKS

SEQ ID NO: 86060 - protein, 74 aa, Gossypium hirsutum
  Clone ID: LIB3166-042-P1-K1-C2.pep
MIDASRNVIFGNVALQVATLQCSTIQGDARYGNTYEGLTSIVRNQGWRQLFAGLSINYIKVFYVVLNNNIKHSF

SEQ ID NO: 86061 - protein, 63 aa, Gossypium hirsutum
  Clone ID: LIB3166-042-P1-K1-C3.pep
PTRPITLDGTHHGPITIKPTMFLEIGSTDEYWKRQDAAKVIALLVWEGLGLGGGAAVGKWGKY

SEQ ID NO: 86062 - protein, 42 aa, Gossypium hirsutum
  Clone ID: LIB3166-042-P1-K1-C5.pep
THLVSDSFSRTSLRREWGENCFTVTQRMTASLGNHETSPGTH

SEQ ID NO: 86063 - protein, 127 aa, Gossypium hirsutum
  Clone ID: LIB3166-042-P1-K1-C8.pep
KNLANGSFLNIWNLDHNKGTGPIPPELTLLSRMKTFTVAYNFLTGPIPVFRTMYSVDSFTNNSALCGKPLDQCRETTKGTKTGVIAGAAVGGVTFAAIGTAIVLFFYYRKVSVMRKKDDDPDGNKWT

SEQ ID NO: 86064 - protein, 47 aa, Gossypium hirsutum
  Clone ID: LIB3166-042-P1-K1-C9.pep
VQVFFIIYSSKVTGYCTRDKEESQCRNVFFLVSMSITVLKKYSHHRL

SEQ ID NO: 86065 - protein, 31 aa, Gossypium hirsutum
  Clone ID: LIB3166-042-P1-K1-D2.pep
KSYFFQTPILNFSRRRYLLNIIYPFFLYFYK

SEQ ID NO: 86066 - protein, 54 aa, Gossypium hirsutum
  Clone ID: LIB3166-042-P1-K1-D3.pep
FLQITLSIFTLLLLNLIGSSLKFQICKEIKEAPPFFSSQNPIDFRTLISLFVLI

SEQ ID NO: 86067 - protein, 105 aa, Gossypium hirsutum
  Clone ID: LIB3166-042-P1-K1-D6.pep
CMSTVSYQVVLNGSVGGTFCPTRGLQQGDPLSPFLFLICGEGLSSLMRINTREGLLKGVKASKSGPQVTHLLFADDCILFGEALRKEALAFKEILSEYKKCSGNV

SEQ ID NO: 86068 - protein, 132 aa, Gossypium hirsutum
  Clone ID: LIB3166-042-P1-K1-E10.pep
PSVGVPVVRTTPTLLEALKDKQVKSIAWGTNFTAAICLHKWVSGIDQSMCSGCRLPFNFKRKRHNCYNCGLAFCHACSCKKCLKASMAPNPNKPYRVCDNCFNKLRKAIETEASSQSSVSRRGSINLGTSEF

SEQ ID NO: 86069 - protein, 106 aa, Gossypium hirsutum
  Clone ID: LIB3166-042-P1-K1-E5.pep
SRSAAYELADAILMPSLISLVSTDMYFNDSARSAAKQFGCMLRSWRSILQKRASASLLSSSDIKKFVFDVLYRQSNSTCALRGDMYIDRKNAVNIVCNSLPYLGPR

SEQ ID NO: 86070 - protein, 129 aa, Gossypium hirsutum
  Clone ID: LIB3166-042-P1-K1-E6.pep
EIAKKENEYPHEEATCMHEPAAEVETKLEEVSKEPEMEEHPIADISSSSTGDEIMKESTEENESIPLKLTENASPSLEIQDSKKDTEERTLVEGSIDTADPESAPAAAESEETKLKEAPISDISSSMIS

SEQ ID NO: 86071 - protein, 98 aa, Gossypium hirsutum
  Clone ID: LIB3166-042-P1-K1-E8.pep
SVGKNNRDEFRSDRDWRKVGKFENIPDPILGFNLEGNGLYAELESSRKLIGNNNIEMEHDLENELIVGEEGKKRARGEIEESMEPGGKKRSMAESNPL

SEQ ID NO: 86072 - protein, 88 aa, Gossypium hirsutum
  unsure (1)..(88): unsure at all Xaa locations
  Clone ID: LIB3166-042-P1-K1-F12.pep
MSSLKLGVEVVGAHDLLAKDGQGSFCAFEELEFDGQRCRTTTKEKDLNPVWNESFYFNVSDPNKLSSLPLEXFVYNHNKANNAKTCLG

SEQ ID NO: 86073 - protein, 121 aa, Gossypium hirsutum
  unsure (1)..(121): unsure at all Xaa locations
  Clone ID: LIB3166-042-P1-K1-G12.pep
ILVKLFGQWHGKGKLILVQLMANSSLDSYLFKGKTLLTXEVRFTIVQDLASALFYLHEEGDHCVLHRDIKASNIMLDSSFNAKLGDFGLARLVDHEKASQTTHLAGTMGYLAPECVSSGKA

SEQ ID NO: 86074 - protein, 131 aa, Gossypium hirsutum
  Clone ID: LIB3166-042-P1-K1-G8.pep
RNPFTLPLLKTRSNSFVCLLFGNFIGHKGTIDTLERRRNFQIFCEKFRFRRVMEKEKRKRSEKERKGGVTMESTNKKKKKVTKVEEEEGSVGEEEEEEVEEFFAILRKMKAVVKYFNKSGGSEWWRAAVES

SEQ ID NO: 86075 - protein, 131 aa, Gossypium hirsutum
  Clone ID: LIB3166-042-P1-K1-H10.pep
RAVPGKKVPSFAKGEMANHWKTVVAQQVPPELRDAFIAAVDKGNIRTMPNRSMPADPHPTPGALLMGDAFNMRHPLTGGGMTVALSDIVVLRDLLRPLHNLHDAASLTSYLESFYTLRKPVASTINTLAGA

SEQ ID NO: 86076 - protein, 114 aa, Gossypium hirsutum
  unsure (1)..(114): unsure at all Xaa locations
  Clone ID: LIB3166-042-P1-K1-H2.pep
TIISDQHFGLEIAIFDILXREEHRNCVRHVFANWSWRKLGKSYEXFWQIVKCATEXERIYVXALKKKYKDAYDNLMKKSPKMWTRAFLGTTCKSDIVDNNLCEAFNSSIVEAWF

SEQ ID NO: 86077 - protein, 47 aa, Gossypium hirsutum
  Clone ID: LIB3166-042-P1-K1-H6.pep
TLIGKTNNLLLFFHFPTQSLLKLGKQCDSIYIHLRVVYLYFFIIKSN

SEQ ID NO: 86078 - protein, 95 aa, Gossypium hirsutum
  unsure (1)..(95): unsure at all Xaa locations
  Clone ID: LIB3166-043-P1-K1-A10.pep
NPVPTLTDRRRLLNLFKIAGFAGKDADWQIKAKRIEAGLKILRLQEEIIGGLPMDDTNQHGDQKLLYSEELIELCFERGSQELPLQGFXVFAWTS

SEQ ID NO: 86079 - protein, 104 aa, Gossypium hirsutum
  unsure (1)..(104): unsure at all Xaa locations
  Clone ID: LIB3166-043-P1-K1-A12.pep
PRRFIPTLTHTRRLLNLFNIAAFAGKDADCHIKAKRIXPDLNILRLQEEIMEVLPMDDTNQHVDKKLLHPEELIELYLESGSKXLPLQVFDVFAWTSSSFSQEP

SEQ ID NO: 86080 - protein, 126 aa, Gossypium hirsutum
  unsure (1)..(126): unsure at all Xaa locations
  Clone ID: LIB3166-043-P1-K1-A4.pep
EHVDFQVWKEEPSREFSVRSAYKLLHHSSSNPNIYPLQPKIRNFYRKLWDLQLPGKIKILVXRISWNYIPSLINLRSKKVIENALCPRCRLKEEDSNHIFRFCPAISQIWNLINPDAWADAWADAW

SEQ ID NO: 86081 - protein, 104 aa, Gossypium hirsutum
  Clone ID: LIB3166-043-P1-K1-A9.pep
MASSPALVSWLVLVLTLAMAVSTTQVEAARAFFVFGDSLVDNGNNNYLATTARADSPPYGIDTPSRRPTGRFSNGKNIPDFISEALGSEPLLPYLSPALNGDRL

SEQ ID NO: 86082 - protein, 102 aa, Gossypium hirsutum
  Clone ID: LIB3166-043-P1-K1-B11.pep
IITELLNSPTSFKTKRDDLTEIYKMQNHKAVTSYHLHPGLPLHILLHLFLRSVAVLSIRNTLVPNSKILFHGTVPSSFAISCTPFLSISSSSSRPWSFLSPQ

SEQ ID NO: 86083 - protein, 128 aa, Gossypium hirsutum
  unsure (1)..(128): unsure at all Xaa locations
  Clone ID: LIB3166-043-P1-K1-B2.pep
XKQAKFLYGNGFSTEELQDLKLMIQSNMYRYLSILLDGRERFEEEAMSRIRELGPDDQNSEAGGEVDSSETNQCIYSINPRLKHFSDWLLDIIATGDLDAFFPAATREYAPLVEELWKDPAIQQTYKR

SEQ ID NO: 86084 - protein, 127 aa, Gossypium hirsutum
  Clone ID: LIB3166-043-P1-K1-B9.pep
PRVRPRVRLSLNSNAFCGNIPPSIGNLSTLNWLDMADNQLEGEIPVSNGSTTPGLDWLIHTKHFHFGLNKLSGPIPSKLFSSDMTLIHVLFENNMLSGPLPLTLGLVKTLEVVRFDNNSLEGDLPLN

SEQ ID NO: 86085 - protein, 77 aa, Gossypium hirsutum
  Clone ID: LIB3166-043-P1-K1-C12.pep
HTSVKPTKNINHSEIMSTLTKWHTTKPGLTLRLQLNINKHKLFNTYTEFNNPDVQRQLFSKQLNDLQSPDYEAMALD

SEQ ID NO: 86086 - protein, 74 aa, Gossypium hirsutum
  Clone ID: LIB3166-043-P1-K1-D12.pep
FTVPSTNASSIAIQILDKILSDNYINFTYSQDRYIFHVKLTDGLTFLCMSDESARRQIPLVLLEYIHQIYLYDL

SEQ ID NO: 86087 - protein, 83 aa, Gossypium hirsutum
  Clone ID: LIB3166-043-P1-K1-D3.pep
MACLNNICKEVSDEKMMTKEEEDYTLDGTVDRHGQPAIRSKTGTWVSGILLLVNQGLATLAFFGVGVNLVLFLTRVLGQDNAE

SEQ ID NO: 86088 - protein, 102 aa, Gossypium hirsutum
  Clone ID: LIB3166-043-P1-K1-D4.pep
RKIFREITLFFIPFLVSIFLLPKNLSSPFTILLFLYPKKSGILGFIAEIPWICYYLFPCSLASFLPLFVFSSLFLFFFCLLLFAFVLVLCCCFAGDGTMGWG

SEQ ID NO: 86089 - protein, 90 aa, Gossypium hirsutum
  unsure (1)..(90): unsure at all Xaa locations
  Clone ID: LIB3166-043-P1-K1-D9.pep
MTIVVCIFILNFSFFFFIYYFFFYYFXFFFIFFNIIYFYLLYFFYIYLYFIFIIFNYIFIILYYFYILYILYRFFILFFFIFIFLFLFYH

SEQ ID NO: 86090 - protein, 103 aa, Gossypium hirsutum
  Clone ID: LIB3166-043-P1-K1-E1.pep
LDKAQPDLDSANQRIESINDMYKLLQEYNSSLQIYNSKLQTDVTAAHETIKRGEKERLAAVENLHNLRGEHKSLQDQLTSSIASQDGVMKQKDALLNEVACLR

SEQ ID NO: 86091 - protein, 72 aa, Gossypium hirsutum
  Clone ID: LIB3166-043-P1-K1-E6.pep
AKNHREYRLCSSILLFDLLFVFFPFSSESFSYGSFRFVSQRFWLEFSGTQVYILCISFLYIHRIYFFLLSKE

SEQ ID NO: 86092 - protein, 97 aa, Gossypium hirsutum
  Clone ID: LIB3166-043-P1-K1-F12.pep
MGDSTCLMQPFSYTAGLPNEAEEGNPIHGLGQSISFGRFMSESLAWEKWSTFSHNKYVEEAERYARPGSVAQKKSFFEAHYKTLAARKAAALLEQAN

SEQ ID NO: 86093 - protein, 126 aa, Gossypium hirsutum
  Clone ID: LIB3166-043-P1-K1-F4.pep
YVLSESSLFIYPNKIILRTCGTTKLLLSIPPILQLSNSISLTVSRVNYSRGSFIFPDHQPSPHRNFSEEVAMLNGYFTDFITEAYIIGNPKLQNRSRHIYSAVPKSSPPFVEDQRAEITLEMCMTG

SEQ ID NO: 86094 - protein, 109 aa, Gossypium hirsutum
  unsure (1)..(109): unsure at all Xaa locations
  Clone ID: LIB3166-043-P1-K1-F6.pep
KTLLLADLVIADDRTANRSAGSTALVAMLCARHLMAANAGDCRAFAMREKGKHDDMSEDHRPIYPSXRGRVEDLDQGIDDQYLNGGLSIARDLSARGMNYRTGSKELLI

SEQ ID NO: 86095 - protein, 60 aa, Gossypium hirsutum
  Clone ID: LIB3166-043-P1-K1-F7.pep
GRVGSNTIGSWIRTRVWCNISKRLRLTNINTRQVTQLTPPTPTPIQPLPTPKILKLLQPY

SEQ ID NO: 86096 - protein, 127 aa, Gossypium hirsutum
  unsure (1)..(127): unsure at all Xaa locations
  Clone ID: LIB3166-043-P1-K1-G2.pep
FLGSGLKIVIARDAVRSIGQSSNHGEDLDNKQQGSIVSSTDVPFSISTKRVFEAAVEYSRTMGYNFIAPEHIAVGLFTVXDGSASRVLKRLGANINHLAAEAVTRLQGELAKDGREPSLSSKKMSEK

SEQ ID NO: 86097 - protein, 91 aa, Gossypium hirsutum
  Clone ID: LIB3166-043-P1-K1-G3.pep
MGNSCGKRKMVTVLSIYGGGIRGIIPSVLLASLESKLQELDGPNARIADYFDIVAGTSTGGLIATMLTAPNKDNGRQPLYEAKDIAKFYLE

SEQ ID NO: 86098 - protein, 93 aa, Gossypium hirsutum
  unsure (1)..(93): unsure at all Xaa locations
  Clone ID: LIB3166-043-P1-K1-G7.pep
QVSSPTEAPASRIVGGCTLARTTEAQKEQPNATGYPNMNTSQIYLWNPNNPTKPQLHDYRIYLQECXPMVHDALIKIKNEIDQSIMYRLSWTV

SEQ ID NO: 86099 - protein, 57 aa, Gossypium hirsutum
  Clone ID: LIB3166-043-P1-K1-H10.pep
NKLYKTKIPNESVTINTNDVRTIYTNHNPIIYSNFNPAAYTHKQQSDITQKQLFFTT

SEQ ID NO: 86100 - protein, 61 aa, Gossypium hirsutum
  Clone ID: LIB3166-043-P1-K1-H12.pep
PTLTIKFANSKRNPIHQIHPKLKNFGLQDRHQSKSFYLSILFEQFKVTHQDPNFSKSENPP

SEQ ID NO: 86101 - protein, 82 aa, Gossypium hirsutum
  Clone ID: LIB3166-043-P1-K1-H4.pep
MAKTGVLSSNPTLRARAAELKKELQRLVKIIVDDEDCSVQTIDQAKHALCALRELKFNTRSSATTLTSSLKLHEQLPCPQEF

SEQ ID NO: 86102 - protein, 126 aa, Gossypium hirsutum
  unsure (1)..(126): unsure at all Xaa locations
  Clone ID: LIB3166-044-P1-K1-A12.pep
HASGKGLITREIADTFIXIPKDFCCPISLDLMRDPVIISTGQTYDRSSIVRWLEEGHCTCPKTGQMLIHTRLVPNRALRNLIMQWCTAHSVPYDPPEAADAPAESFAEALPIKAATEANKATTTLL

SEQ ID NO: 86103 - protein, 130 aa, Gossypium hirsutum
  Clone ID: LIB3166-044-P1-K1-A3.pep
KNITFIKTFASGIIVPKSDIWPVDKDLYLLPSTSLVLDAHKEGLEVFASDFYNDVPFSFNYSYDPVAEYLQFIDNGEFSVDGMISDFPITPSAAIDCFAHLGRNASKQVDLLVISSNGASGDYPGCTDMA

SEQ ID NO: 86104 - protein, 114 aa, Gossypium hirsutum
  Clone ID: LIB3166-044-P1-K1-A6.pep
KRPDGQQNFFFWLKPTLSGRGIFKTFMDPRIEGQFSSKAATQTAELTLKCLEHDPKNRPSMKQVVEALERIESLNKERPKESSKSGSIHSSTTPSHRQQSSSQRPQFHSRQHGT

SEQ ID NO: 86105 - protein, 63 aa, Gossypium hirsutum
  Clone ID: LIB3166-044-P1-K1-A8.pep
KNITFIKTFSSLYHETQPLHVSYTYSSPLPTSNLTSLLNPQIKPPTTFLNYLYLNSIQLQPLL

SEQ ID NO: 86106 - protein, 104 aa, Gossypium hirsutum
  Clone ID: LIB3166-044-P1-K1-B10.pep
MPTFPKTLTGMTITLEMESSDTTDNLMTMIQIKECIPSDPHMLIFHVTQLKDGRTLADYNIQTDYTLHLVLRIMGGMQIFMKTLTVMTITHDVESSHTIDNVKA

SEQ ID NO: 86107 - protein, 130 aa, Gossypium hirsutum
  Clone ID: LIB3166-044-P1-K1-B2.pep
EKATEEIEVLYGADLETGVFGSGFPKKSSQVGLASNEKYINSGWNLNNFPRLPGSVLNYESSDISGVLVPWLYVGMCFSSFCWVTQLSPSILKSEGVPVYRCVQNAGEFVLTFPRAYHAGFNCGFNCAEA

SEQ ID NO: 86108 - protein, 56 aa, Gossypium hirsutum
  Clone ID: LIB3166-044-P1-K1-B5.pep
HFIICCPSLLRAWLLAFAEERGILWSSPPQFMENWCSHTNTLMRIANQYQPGHSLT

SEQ ID NO: 86109 - protein, 97 aa, Gossypium hirsutum
  Clone ID: LIB3166-044-P1-K1-C6.pep
RLKSFNFSPFSPRLPAQTKDKNENKKACIIFSTPWSYASHDSTYQEKKEKETQMMGITEHEQINLRDGSWDACSSSSSSSRDFRRRRETSKPVGKAD

SEQ ID NO: 86110 - protein, 54 aa, Gossypium hirsutum
  unsure (1)..(54): unsure at all Xaa locations
  Clone ID: LIB3166-044-P1-K1-C9.pep
WESKELRMEIRIINMIYNVVVYGLPLYKKIPPNEPSSCQLNRXXIRYXIGRVGP

SEQ ID NO: 86111 - protein, 53 aa, Gossypium hirsutum
  Clone ID: LIB3166-044-P1-K1-D2.pep
SSSPVVDAGQNTLVRFRVRPSSIQERRSKKIWFSPQLASPPRFPYFGTVSNLY

SEQ ID NO: 86112 - protein, 126 aa, Gossypium hirsutum
  unsure (1)..(126): unsure at all Xaa locations
  Clone ID: LIB3166-044-P1-K1-D4.pep
FAVLIFWLIFRPNEVKFQVGDFSLNEFNLDGNNTLHYDLAVNITVRNPNRRIGVHYDRIEARAYYEDQRFDTQTLPSFYQGHKNTSFLNPVFKGKHLVFLGADETAEFNEERASTXYSIDVKLYLR

SEQ ID NO: 86113 - protein, 63 aa, Gossypium hirsutum
  unsure (1)..(63): unsure at all Xaa locations
  Clone ID: LIB3166-044-P1-K1-D7.pep
LKFVXLANFSIVEMNVSLMCNSVAFYQIANLTMIPSSCSLEVVFDKVRFSRDTKLSILLVLPC

SEQ ID NO: 86114 - protein, 125 aa, Gossypium hirsutum
  Clone ID: LIB3166-044-P1-K1-D9.pep
HASAFSQLPNYLKDGAGGFLNMGGTLSTGCDGAPLLPLLFIIVNMGFNIALLHLLKISSAVVSSLASTFSVPISVYIFTLPLPYLGVASSLPAGFVAGAIILVMGLLIYAWSPSDSSSAIPSPSS

SEQ ID NO: 86115 - protein, 64 aa, Gossypium hirsutum
  Clone ID: LIB3166-044-P1-K1-E10.pep
NSVRKYEDREDTLLSSSFFHIKSNYKMNGKLMKTFAVLYRWVLILEVKITFKKWYPRSAKETQK

SEQ ID NO: 86116 - protein, 113 aa, Gossypium hirsutum
  Clone ID: LIB3166-044-P1-K1-E2.pep
PTRPKKSRLVVPNLEATLETLVDAFVLLDKNKVGYVSKTEMVQAINESGERSSGPIATKRFGQLALYIYTNSLVHYRHKFYTYGKNIVIYKKRKGFPISHVNMCIIWCLLHLK

SEQ ID NO: 86117 - protein, 114 aa, Gossypium hirsutum
  Clone ID: LIB3166-044-P1-K1-E8.pep
MVAAKKHVPIVKKRTKRFMRHQSDRFMRVDPSWRKPKGIDNRVRRRFRGTLAMPSIGYGSNKKTKYMMPSGHKAFLVNNVNDVELLLMHNRTFAAEIAHGVSSRKRVDIIARAK

SEQ ID NO: 86118 - protein, 124 aa, Gossypium hirsutum
  Clone ID: LIB3166-044-P1-K1-F4.pep
DGYGDCNRGAGNGARQAQGYVWNHIFNFINSMSLKCAIDLGFPDFIQNHGKPMTITELVAALSMLNPTKACNIYRLMRILVHSGFFAQRNLCNDAQEDGYVLTNASRLLLKDNPLSVTPFLKAM

SEQ ID NO: 86119 - protein, 128 aa, Gossypium hirsutum
  Clone ID: LIB3166-044-P1-K1-F8.pep
VEGSIDTADRESAPAAAKAEETKLKEAPISDISSSMISDETLKESKKEDQSTPLKVTEKASSSSELEDSNKDAEEKTLVEESIDAADRESAPAAVEPEETKLKAAEADAEEKKQETENVVATEENSLA

SEQ ID NO: 86120 - protein, 62 aa, Gossypium hirsutum
  unsure (1)..(62): unsure at all Xaa locations
  Clone ID: LIB3166-044-P1-K1-G1.pep
IPFTKMTQQEFFQHTFHQDDATRILYIPFPLEKELDKXIWREEAXRVYIVQSWYKNLIQTEI

SEQ ID NO: 86121 - protein, 52 aa, Gossypium hirsutum
  Clone ID: LIB3166-044-P1-K1-G7.pep
KQLKNSTYKVHLQSQWNVHIFYVLSGLSAVVHIGRQKKISYYQDSKFLLYIS

SEQ ID NO: 86122 - protein, 127 aa, Gossypium hirsutum
  unsure (1)..(127): unsure at all Xaa locations
  Clone ID: LIB3166-044-P1-K1-G8.pep
RMLVYEYVXNGNLEQWLQGDVGPCSPLTWDIRMNIILGTAKGLAYLHEGLEPKVVHRDIKSSNILLDKGWNPKVSDFGLAKLLGSESSYITTRVMGTFGYVAPEYASTGMLNERSDVYSFGILIMEI

SEQ ID NO: 86123 - protein, 129 aa, Gossypium hirsutum
  Clone ID: LIB3166-044-P1-K1-H1.pep
FMEAYCEMLIKYEQELSKPFKEAMVFLQRIECQFKALTVSSSNSAYGTETFERNGSSEEETDVNNKSFIDPLAEDRELKDKLLQRYSGYLFSLKQEFMKKRKKGKLPKEARQQLLDWWSRHYKWPYPSE

SEQ ID NO: 86124 - protein, 111 aa, Gossypium hirsutum
  unsure (1)..(111): unsure at all Xaa locations
  Clone ID: LIB3166-044-P1-K1-H12.pep
CPEGSKTHKGGTMRLGSRRTYXQVLDCKSVKLYGNRRFIDERHRHRYEGNPDMVARLENAGLSFTGKDQTGQRMEIIELPDHXYYIXVQFHSRFKSRPGKPXXLFLGLIGA

SEQ ID NO: 86125 - protein, 128 aa, Gossypium hirsutum
  Clone ID: LIB3166-044-P1-K1-H3.pep
PFHWDYADFENRDYQIHGRALSFTVGPFAIDLIYALNPYYTRGLGRSHRHDLSPTSHLPPQPPTQPRGLDPNTINALPITMVTRGRAALGSECCICLGLFEDGEKVKVLPSCHHSYHSECVDRWLSAE

SEQ ID NO: 86126 - protein, 70 aa, Gossypium hirsutum
  Clone ID: LIB3166-044-P1-K1-H6.pep
IINITKLEHPKHPFKYAPHKMVRITKCIILDLIEFEQIQIQELYIYWKLPQHKLESTQGIREPMSLFRPV

SEQ ID NO: 86127 - protein, 78 aa, Gossypium hirsutum
  Clone ID: LIB3166-045-P1-K1-A11.pep
HASAHASDDTWVNPIALKINGSVNSDFSRLQSYRGGHAYGCLFDGFMSQKILKGVSQNMGRRARQNCPQRVGDHSFPR

SEQ ID NO: 86128 - protein, 64 aa, Gossypium hirsutum
  Clone ID: LIB3166-045-P1-K1-A4.pep
HCSCNKYITKSQAIYIIYMHTWQWNVLHHRLQSFFILMWLVFSFKHIKFITKFLPHQHEKGLST

SEQ ID NO: 86129 - protein, 49 aa, Gossypium hirsutum
  Clone ID: LIB3166-045-P1-K1-A7.pep
IQESNFCTLWQDVYTKPLLILKNKQRNKRKNWEYNLIINFKEKKAKNGN

SEQ ID NO: 86130 - protein, 67 aa, Gossypium hirsutum
  unsure (1)..(67): unsure at all Xaa locations
  Clone ID: LIB3166-045-P1-K1-A8.pep
MSLADMNLSINGQSQVPPGFRFHPTXEEELFHYYLRKKVASXKIDLIVIPEVDLNKLEPRGIQENVY

SEQ ID NO: 86131 - protein, 36 aa, Gossypium hirsutum
  Clone ID: LIB3166-045-P1-K1-B11.pep
KLKARSFPRIHCKFLVLYSLFTSLSIAQSLCHTRKR

SEQ ID NO: 86132 - protein, 97 aa, Gossypium hirsutum
  Clone ID: LIB3166-045-P1-K1-C10.pep
LPRPQDGKLRYVGGETRIVSVPRDISYVELMSKMRELYDGAAVLKYQQPDEDLDALVSVVNDDDMVNMMEEYEKLASSDGFTRLRIFLFSHPDQDVS

SEQ ID NO: 86133 - protein, 68 aa, Gossypium hirsutum
  Clone ID: LIB3166-045-P1-K1-C9.pep
PLHIVILALPKPDAPFSDKSNSVQPLHPPKLYIWRYCYGCCFQRSKSILKPPPLHTMHSSTSSMFSEI

SEQ ID NO: 86134 - protein, 33 aa, Gossypium hirsutum
  Clone ID: LIB3166-045-P1-K1-D3.pep
EPFSFDFEQQPLGEEQMKDMIYQEALALNPTYA

SEQ ID NO: 86135 - protein, 102 aa, Gossypium hirsutum
  Clone ID: LIB3166-045-P1-K1-D5.pep
MARLSSFFIFSFFLQVALFATCCRGESKEQQHQLPKKHVPFFIFGDSILDAGNNNYINTSTLDQANFWPYGLTFFNYPTGRFSDGRLIPDFIAKYAKLPLIP

SEQ ID NO: 86136 - protein, 87 aa, Gossypium hirsutum
  Clone ID: LIB3166-045-P1-K1-D7.pep
MNTQLLEIEPKELDIVFILKKPCSCSVRLTNKTDQHVAFKVKTTSPKKYCVRPNVGIIMPKARCDFTVIMQAQREAPPDLICRDKFL

SEQ ID NO: 86137 - protein, 70 aa, Gossypium hirsutum
  Clone ID: LIB3166-045-P1-K1-E4.pep
SNLLNPKHKLLKLIIMQLQMRLLLKLNLFGISCMSLNLNPYFIQLTILRIQRMLLILINLTKLNQVMQFK

SEQ ID NO: 86138 - protein, 104 aa, Gossypium hirsutum
  unsure (1)..(104): unsure at all Xaa locations
  Clone ID: LIB3166-045-P1-K1-E9.pep
PEDAVYDFFDKINFAVGRFLXGGAYNHQIGALSDVLKQSMTPGFKAYCXQVMANAVALVLYLVGNGFQLVTGXTDNHFVXWDLRPFGLSGIMCYKLCDSFFFTC

SEQ ID NO: 86139 - protein, 73 aa, Gossypium hirsutum
  Clone ID: LIB3166-045-P1-K1-F10.pep
PKKSNAHDEDIDEEGSTPDELVRPLKRARLKNQEGLATCSHTIGSFNDAETCNKEPKVEENEIPSASLQHHAL

SEQ ID NO: 86140 - protein, 123 aa, Gossypium hirsutum
  Clone ID: LIB3166-045-P1-K1-F4.pep
FKLDYKGFPEIFLRNKQDIEYRSGPWNGLRFSGVPEMKPLDYMNFSFVTNQDEVYYSFYITNNNLFSRLIVTPTGTLERLTWIPDTKQWNPFWYAPKDQCDEYSECGPYGICDTNASPVCKCP

SEQ ID NO: 86141 - protein, 60 aa, Gossypium hirsutum
  Clone ID: LIB3166-045-P1-K1-F6.pep
DIDSSSSSLVIEIGICNKNGYFQNSKRYELYSFEQAFVKKGDKKMWLQLIFSLKTLLRVH

SEQ ID NO: 86142 - protein, 43 aa, Gossypium hirsutum
  Clone ID: LIB3166-045-P1-K1-G11.pep
YATKTEKKSLKVNLFTRGKLKRIRMVNSPHNSWNLLEYYLNIM

SEQ ID NO: 86143 - protein, 123 aa, Gossypium hirsutum
  Clone ID: LIB3166-045-P1-K1-G3.pep
FIPSTGVSFFRYMSTTDNDGADKIEFMTDGADRIGLMTDISEALKDSSFEAVASQAPAVNEVAVAAADSALPVAAIQYVIDAVHSSTGLNWWSSIVVTTLLVRGLTLPFLISQLKATAKMTLL

SEQ ID NO: 86144 - protein, 119 aa, Gossypium hirsutum
  Clone ID: LIB3166-045-P1-K1-G7.pep
SFCPQNVSFFGKLVFNFPLLLLLWNQRRRIGVTVAVDSFGFLTEIPSFAPTATADSLKRSVTILTPNSVASAPIDFKLSPGIPASTSAFTSRRNRGDWSSFNSRIVLRGGAFTYLVCGE

SEQ ID NO: 86145 - protein, 71 aa, Gossypium hirsutum
  unsure (1)..(71): unsure at all Xaa locations
  Clone ID: LIB3166-045-P1-K1-H4.pep
MGTGFYSDWKTGCLFGLENLEEDGVLKAPSSLPAIRQPQTPKEPMEFLSRSWSLSASXELSKALSHKQKQF

SEQ ID NO: 86146 - protein, 114 aa, Gossypium hirsutum
  Clone ID: LIB3166-046-P1-K1-A1.pep
VQIPDMYCSSDYLCRQMLLFPIDFIGASSVSAEALKEDNTLGILVRMYDALTDLNIIAERIEITILVVSCFNPLIQISDLYFSSESCTCSSVQVFHESCFLVDISAVLGIWINS

SEQ ID NO: 86147 - protein, 86 aa, Gossypium hirsutum
  Clone ID: LIB3166-046-P1-K1-A12.pep
GEVNLPTTNQTPKTPTLESKILLPPLRKKRRGGVLCVCQSCNGVTVALSSSKFFVICVICTYECVKYNQILPLCKNPMNSYYIKIK

SEQ ID NO: 86148 - protein, 91 aa, Gossypium hirsutum
  Clone ID: LIB3166-046-P1-K1-A2.pep
PGPNSRRVRAQQRPVTTLAIARSEPDVGIGSSVGRNYKRKRNLTHLNPRHDMDGRDTLPQSSHVLQLKLPAKSLSERATDQTVESPSLQTE

SEQ ID NO: 86149 - protein, 111 aa, Gossypium hirsutum
  Clone ID: LIB3166-046-P1-K1-A5.pep
LFNVIGQPLRFPEYPNVSFAAKDLIRGLLVKEPQHRLAYRRGATEVKQHPFFQSVNWALIRCANPPEVPKPSMTDFFAGTNMAKAPTNNMVPGLDVKPSGNYLEIDFFSFL

SEQ ID NO: 86150 - protein, 115 aa, Gossypium hirsutum
  Clone ID: LIB3166-046-P1-K1-A7.pep
VTALAFAMAEKEVSAEPVETNPPTEDMNPETQVPPSPIFDDSVDAGLAYNGGSKSKRQREEDGGESDEVSKKQKAESSVDDEIIEKNSVPSVTSRVRLGPKEFGSSGEMFDYFYN

SEQ ID NO: 86151 - protein, 41 aa, Gossypium hirsutum
  Clone ID: LIB3166-046-P1-K1-B2.pep
AFVLNSQLYNISSYCICLHDLHHFLRALSMLSQLGHVNVCL

SEQ ID NO: 86152 - protein, 98 aa, Gossypium hirsutum
  Clone ID: LIB3166-046-P1-K1-B7.pep
VIFMLPIHSPKPPSSPTKATKTPELNSIKRKNSSSSFQSQNSFVFPNSNRLWLLLVIVSLQIIILLMARGLPLSHRRTHFPSPLSYDHKPVQNRANFS

SEQ ID NO: 86153 - protein, 68 aa, Gossypium hirsutum
  Clone ID: LIB3166-046-P1-K1-C2.pep
ISTQITFILYNKSNLSHSNILDRPTNFKGILSTIRRNKISIQYCCCQSASLIVALNHIAHQHASKVTT

SEQ ID NO: 86154 - protein, 129 aa, Gossypium hirsutum
  Clone ID: LIB3166-046-P1-K1-C6.pep
PTRPCFPLNHMSDTNDDLRCFNNNHEDKENSDLLCYAWGDIGNFEDVDQMFRSCDSTFGLGSLSNEDDLCWVSSSHATEGSQDVLKADAKLNGLPEHCATSRPDNAGPSTIDSYKKNVLLSDKISSLDT

SEQ ID NO: 86155 - protein, 98 aa, Gossypium hirsutum
  Clone ID: LIB3166-046-P1-K1-D5.pep
AQCLSRETLAAFPLSRGSPRNLQVSYDASSNHVNSPRTPAQSPCDANASRTYKKDKHNGKYKQKMVEQQIEGNGNFIWNLFSFFFFLFSYKSQAVNRL

SEQ ID NO: 86156 - protein, 68 aa, Gossypium hirsutum
  unsure (1)..(68): unsure at all Xaa locations
  Clone ID: LIB3166-046-P1-K1-D7.pep
YVGRGAIERTFILXYALTSFISGXYVSGGMYSRNGGKNWIKSMILTACLFPFLCFXLRFLLNTAARDP

SEQ ID NO: 86157 - protein, 103 aa, Gossypium hirsutum
  Clone ID: LIB3166-046-P1-K1-D8.pep
DTQMYHITYIGTHTCRGEYSSMATPRIDRLSLISKLESEEQTTTPSDVTDLDSMTMWTDVMMGGVGFEADVVSNMYSCTEITCLDLEPVELENGLQFDDPDFA

SEQ ID NO: 86158 - protein, 57 aa, Gossypium hirsutum
  Clone ID: LIB3166-046-P1-K1-E1.pep
MRQFFLILGVVSSFMLFSHNSQECLPANLFVFVGVIKQTSFFPAWQMLLSAHILFVA

SEQ ID NO: 86159 - protein, 62 aa, Gossypium hirsutum
  Clone ID: LIB3166-046-P1-K1-E2.pep
DESTFSFVQINSLWTTRVGQSYIFQDHGGSSCQQQWITHITHNFPTQACDNSERYTGFNDDT

SEQ ID NO: 86160 - protein, 104 aa, Gossypium hirsutum
  unsure (1)..(104): unsure at all Xaa locations
  Clone ID: LIB3166-046-P1-K1-E4.pep
GHCDSSREMLEKDYLGVIAPHTAPDXRTYFPPHHTPYNAHMTPEFCIXILHCLVPLLILRLAIAVRHYTNKELLITILDFTCYQGKIIVVHPLPEVTQSYLSLN

SEQ ID NO: 86161 - protein, 110 aa, Gossypium hirsutum
  unsure (1)..(110): unsure at all Xaa locations
  Clone ID: LIB3166-046-P1-K1-E6.pep
PGMTVSLLLVATAFYVEGYILEDSVIHSVMGIMSLVGLVAFAISFCLGVGATPWVIMSEILPVNIKGLAGSAATLLNXMTAWAVTMTATLXLSWSGGGTFTIYAGLAAFT

SEQ ID NO: 86162 - protein, 75 aa, Gossypium hirsutum
  unsure (1)..(75): unsure at all Xaa locations
  Clone ID: LIB3166-046-P1-K1-F10.pep
PDWSMQEGVITSVFFPTDNQWMILVCKPNRPDMLIDPFGIGKIAQDGLVFSXQNFSIRSYEIGSXQTVFIDTVMI

SEQ ID NO: 86163 - protein, 63 aa, Gossypium hirsutum
  unsure (1)..(63): unsure at all Xaa locations
  Clone ID: LIB3166-046-P1-K1-F2.pep
SNKCKHWVKVDNDYQKLMYLLLYKRIECNYKNLGYIKGNEGRSSPLFXXRIHSSLCRSRALYK

SEQ ID NO: 86164 - protein, 47 aa, Gossypium hirsutum
  Clone ID: LIB3166-046-P1-K1-F4.pep
CFCSELGNIMECFSSYKNGMIGVVMALLIVNASAHSRQPAFERTLGR

SEQ ID NO: 86165 - protein, 43 aa, Gossypium hirsutum
  Clone ID: LIB3166-046-P1-K1-F7.pep
NITTNPLVKRSLMQPVEEAMHFLFLYIIYNYCVLIYHAIGHSF

SEQ ID NO: 86166 - protein, 71 aa, Gossypium hirsutum
  Clone ID: LIB3166-046-P1-K1-F8.pep
MATFEPVNDEPRGKRLSRKPSKKFVAKSLLVIGGVICLSRGHCGLGAKVAMAYILTKLRKRGDRSSQSMQT

SEQ ID NO: 86167 - protein, 107 aa, Gossypium hirsutum
  Clone ID: LIB3166-046-P1-K1-F9.pep
APTRKATRPELSHKLKTVNESKDCAAKATDAAKNKAKQIEEANSGILPGPDGTRSQDSETAREQYMIVITELDAAKQELRKVRQDCDASLEAKIAAFNQTEEAEHAA

SEQ ID NO: 86168 - protein, 70 aa, Gossypium hirsutum
  unsure (1)..(70): unsure at all Xaa locations
  Clone ID: LIB3166-046-P1-K1-G12.pep
NNCERRSWQAYGGDHFMCDILGXNHLSAVVFIGQDGIVRAQSFNFPQFKPEXITGLMNDFSEPGSLSSTG

SEQ ID NO: 86169 - protein, 48 aa, Gossypium hirsutum
  Clone ID: LIB3166-046-P1-K1-G4.pep
TQNAVYVSNKVYFYSAILAYKRRMIEPRKGMGLNASVLIRYSNICAHS

SEQ ID NO: 86170 - protein, 73 aa, Gossypium hirsutum
  Clone ID: LIB3166-046-P1-K1-H10.pep
LELKLIYWLGFFIMDLLVDALLFGFLFVCYLICYYFFYFFFVDWLFFFFIIFEIFFFFFLYIFFFTYLFMYFF

SEQ ID NO: 86171 - protein, 52 aa, Gossypium hirsutum
  Clone ID: LIB3166-046-P1-K1-H11.pep
TGLKEPFCDSPTTIYGGGAAVRRGWVYYPSPMGKLAPERGKECSLLIFSDAW

SEQ ID NO: 86172 - protein, 103 aa, Gossypium hirsutum
  Clone ID: LIB3166-046-P1-K1-H2.pep
FFFTWNLNWNEYSCRQIHIISQMRMEGKRISLDTPRNGKSKVLDPAFSAFLVQLPSKLQNCLKSQLKRLAKDGARIKPLNSSLEKKNGSSSGLQINLEKQLQA

SEQ ID NO: 86173 - protein, 99 aa, Gossypium hirsutum
  unsure (1)..(99): unsure at all Xaa locations
  Clone ID: LIB3166-046-P1-K1-H4.pep
MNRKSQDAAGGALVLMLNKAPPLWLDIPSSINFSEASRPEMGNIIIQEKNQYTVAVPVEHDASSIITSSKLVASMTTADALXELPSFKEMIILLLSEGG

SEQ ID NO: 86174 - protein, 111 aa, Gossypium hirsutum
  Clone ID: LIB3166-046-P1-K1-H8.pep
FTHNAHHIKCNFLDYDPYLQHIPFFAVSSRFFNSLTSCFYGRKLNFDPLARFLISYQHLTFYPVMCVARVNLYLQTLLLLFSNRKVPDRAFNIMGILVFWTWFPLLLSYLP

SEQ ID NO: 86175 - protein, 126 aa, Gossypium hirsutum
  Clone ID: LIB3166-047-P1-K1-A11.pep
KSSSKHPIDDHKTSDSIGSLEYEKPVPGAHYYDSSKVKSESVRSKSSFKHPIDDHKSSNSFRSLQSEKTVPGVHYYDSSKVKSESVGKISTMASKSSFKHPVVEKLVPSAIQLNNHIVSQSEPSIC

SEQ ID NO: 86176 - protein, 131 aa, Gossypium hirsutum
  Clone ID: LIB3166-047-P1-K1-A3.pep
ERKGRGHAIRPRVPKFLEQTPSLNGGKIGGYYKDHEILPPMPVGFHRYILQNFNGETLDGLNLQEVQEFDPPSEVRALIEGQFLSMRAHAERFGMPSPPKRIIATGGASANKSILSSIASIFCCDIYTGQR

SEQ ID NO: 86177 - protein, 127 aa, Gossypium hirsutum
  Clone ID: LIB3166-047-P1-K1-A5.pep
PTRPQRYRQYRQQMQIVVASLEKAAGFGAPKSYTGIASRTISKQFRCLKDSISEQIKATSKSLGEDDCLGVKLEGSRLRYVDYQLRQQRALQQLGMIQHNNNVWRPQRGLPERAVSVLRAWLFEHFL

SEQ ID NO: 86178 - protein, 37 aa, Gossypium hirsutum
  Clone ID: LIB3166-047-P1-K1-A6.pep
NPFSQPGGKYIFPCPYTIQISTPKLIPNNFRNLKKPY

SEQ ID NO: 86179 - protein, 59 aa, Gossypium hirsutum
  Clone ID: LIB3166-047-P1-K1-A7.pep
LDLCMLGQQCMSILSSPNPDLADEIESICSRPSWKGILCHLWPKAKYIEAVVTGSMAQY

SEQ ID NO: 86180 - protein, 58 aa, Gossypium hirsutum
  Clone ID: LIB3166-047-P1-K1-A8.pep
AIKIIGSTTSTLEPMNRGDQILSSTPYVACYDRIFNTPFSLRVIQLLLQNYHSSPHFI

SEQ ID NO: 86181 - protein, 53 aa, Gossypium hirsutum
  Clone ID: LIB3166-047-P1-K1-A9.pep
KKKVGSKDDDLEVILFAYLTTTTLSSSLNPQKSLLKEWSIKDGNIDVEKRISS

SEQ ID NO: 86182 - protein, 128 aa, Gossypium hirsutum
  Clone ID: LIB3166-047-P1-K1-B1.pep
KTAMVYSASPALITDLEKRIGLMLEDANANDLLIPNYKDEDQGLMLNSPEQRTMHNIDVVQRILDYFLMHEQQQQQQKIGKTTVSKLLDNYLAEIARDPNLSITKFQALAESLPENARSCDDGLYRAI

SEQ ID NO: 86183 - protein, 80 aa, Gossypium hirsutum
  unsure (1)..(80): unsure at all Xaa locations
  Clone ID: LIB3166-047-P1-K1-B10.pep
HASSGIVLTIEELIYWRGTIARGGSSKFLKALKENKDLCADNGLIGQFDVGFYFAFFGFENVVFSTXSPNSYKQFVLEAV

SEQ ID NO: 86184 - protein, 38 aa, Gossypium hirsutum
  Clone ID: LIB3166-047-P1-K1-B11.pep
VRMDVPVARFMLAFKVLRSLAVDSMLPLTVPSARCSMD

SEQ ID NO: 86185 - protein, 126 aa, Gossypium hirsutum
  Clone ID: LIB3166-047-P1-K1-B12.pep
AQPAKPIFAGDLPAGLRRISNIVAVSSCKGGVGKSTVAVNLAYTLAGMGARVGVFDADVYGPSLPTMVSPENRLLEMNPEKRTIIPTDYLGVKLVSFGFAGQGRAIMRGPMVSGVIDQLLTTSEWG

SEQ ID NO: 86186 - protein, 111 aa, Gossypium hirsutum
  unsure (1)..(111): unsure at all Xaa locations
  Clone ID: LIB3166-047-P1-K1-B3.pep
PLKRPPIHYLFIDREEKGLWPRSLVQLHYCNRKTCEXQSVDSIPDLDRPEYIMVQQVLDDYKEPSTQLLINQQGRKWQQDGSRIVYYHRVNRDGYKAGHFNTWLSFRYVKE

SEQ ID NO: 86187 - protein, 125 aa, Gossypium hirsutum
  Clone ID: LIB3166-047-P1-K1-B4.pep
LPRIATYFLERAVEISRMDGEPSDMDIMDAEGITSLNGLSCTEFSFSSIEREVSIDGYQHDPSSSYQLIRLHPSSLGENCKWVEMFEDVDIVLFCVSLTDYHEFSLDSNGVLTNKMMASKQLFET

SEQ ID NO: 86188 - protein, 77 aa, Gossypium hirsutum
  Clone ID: LIB3166-047-P1-K1-B5.pep
HASAHASALSLDLDFPFCISILYFVLFDGIESLIRFQASILFVVTVLYMSYLSCFLLVSALFDHFYLSFFPHFILCF

SEQ ID NO: 86189 - protein, 39 aa, Gossypium hirsutum
  Clone ID: LIB3166-047-P1-K1-B7.pep
KLASYKGCEHNQIMNILRDGIQDTTLSCPFYLVSLMIIN

SEQ ID NO: 86190 - protein, 95 aa, Gossypium hirsutum
  unsure (1)..(95): unsure at all Xaa locations
  Clone ID: LIB3166-047-P1-K1-B8.pep
KIKTDKSYGINGGMNWGDGIDAFGRKGYVKGVYQYVDKYCADVYGCMPIXYNTNNWSSYDEVNVGSTTGXAMWWVTLDRILYCGGLIGYNTPCFG

SEQ ID NO: 86191 - protein, 76 aa, Gossypium hirsutum
  Clone ID: LIB3166-047-P1-K1-C3.pep
VFAETIATYLLVFVTCGSAAISSVDEHKISRLGASVAGGLIVTVMIYAVGHVSGAHMNPAVTLAFAAVRHFPWKQV

SEQ ID NO: 86192 - protein, 102 aa, Gossypium hirsutum
  Clone ID: LIB3166-047-P1-K1-D1.pep
MAPREKTADVKGNGNGCTKEVHFRGVRKRPWGRYAAEIRDPGKKSRVWLGTFDTAEEAAKAYDAAAREFRGAKAKTNFPLPGEILNNGSNCNNNGYTNCSNN

SEQ ID NO: 86193 - protein, 123 aa, Gossypium hirsutum
  Clone ID: LIB3166-047-P1-K1-D9.pep
HASADAWVTMEWVDGVKVNEQAAIERQGLKLLDLVTTGIQCSLRQLLEYGYFHADPHPGNLLATPEGKLAFLDFGMMSETPEEARFAIIGHVVHMVNRDYEAMARDYYALDFLSTDVDVSPIV

SEQ ID NO: 86194 - protein, 125 aa, Gossypium hirsutum
  Clone ID: LIB3166-047-P1-K1-E12.pep
SYLKGTLHASPPTPSPTWAPQPSISLHPNFAPTHPPRLSPKIHRFPPCPKCNTASPSAHRPLHSPAPTPPISPASSSVVAHPPPPCPYSHPAVPPSPPSKSYSNVIPKHPPLMSPRSQLSPPNLP

SEQ ID NO: 86195 - protein, 63 aa, Gossypium hirsutum
  Clone ID: LIB3166-047-P1-K1-E2.pep
HAYVLYKCTTRKGRTYREACLRTSSLTVALERDTKNGTLQLLSSATLLADAAKSTYQHRKRHG

SEQ ID NO: 86196 - protein, 105 aa, Gossypium hirsutum
  Clone ID: LIB3166-047-P1-K1-E7.pep
PTRPEVSSILEGRISGAWTGGELEETGRVLTIGDGIARVYGLRNVQAEEMVEFASGVQGMALNLEADNVGVTIFCCDRAIKEGDLVKRTGTIVDVPVCIDLLGFV

SEQ ID NO: 86197 - protein, 92 aa, Gossypium hirsutum
  Clone ID: LIB3166-047-P1-K1-E8.pep
GIVTFRDDPKLDAGEEIAPELFKAIQQSWCSVIVFSETYAFSRYCMKELAEIVEQKNKGHKVVPIFYNIDPSDLRKQKGKVNEAFAQHEERF

SEQ ID NO: 86198 - protein, 77 aa, Gossypium hirsutum
  Clone ID: LIB3166-047-P1-K1-F1.pep
IVTQMGSSFKKSIFDEHVQVGLVGWAQKVKKKKGLKAATGSAAQENSEQNPSAAIQMGRVLRNASAPEEIHPSHGTY

SEQ ID NO: 86199 - protein, 125 aa, Gossypium hirsutum
  Clone ID: LIB3166-047-P1-K1-F10.pep
GRVGGGLVVCPKPRRIGVLANNPNRSLRLHLSHQAEVSDLRAGAELLDIILKKEDFGIEQSATHVASSPPFFCGSPPSRVSNPLVQDAQFRDERLAAFSTFQIPTPSSPSSSSSRKGGCVRMKFG

SEQ ID NO: 86200 - protein, 65 aa, Gossypium hirsutum
  Clone ID: LIB3166-047-P1-K1-F11.pep
LGGGFSFPLLTISFSVNPKPKPTLPHIIAKNLGEKNYTRRLHHFYLNVVICMMRPSKSLYFLPGS

SEQ ID NO: 86201 - protein, 96 aa, Gossypium hirsutum
  Clone ID: LIB3166-047-P1-K1-F2.pep
MRRILLSLLLLAHLGELGAEDRLLNPSKLEMFVDELPDMPKIQGFRMLNTSPKPKSLMIGMFKKKWKFHRDLPPTPVFAYGASSRRATVPGPTIEA

SEQ ID NO: 86202 - protein, 66 aa, Gossypium hirsutum
  Clone ID: LIB3166-047-P1-K1-F9.pep
KTLQMSNPRKEGNGGVITDGASGISEDTARFFLQNDALCVTAYVHYELVNQMSASIGLKTANVPAL

SEQ ID NO: 86203 - protein, 127 aa, Gossypium hirsutum
  Clone ID: LIB3166-047-P1-K1-G1.pep
PTRPPTRPLNFDGVLTLSSDPKNSTGSSRNWSVVKTIPDNICTTNFAELGSGTCGFNSICTLKPDKRPECKCPPGYSLSDANEEYGNCQADFMQGCEADAQNSSQDLYKLVELQNTDWPTSDYERIN

SEQ ID NO: 86204 - protein, 62 aa, Gossypium hirsutum
  Clone ID: LIB3166-047-P1-K1-G2.pep
VQRCFCKVSSRLVVHIGNVVLHINLFIDGGLRGIVICLRRKGRKGRKKIVKFLRKRGGRVVG

SEQ ID NO: 86205 - protein, 68 aa, Gossypium hirsutum
  Clone ID: LIB3166-047-P1-K1-G4.pep
SRRVHRFKQPRLDRAIQCAFEHKCICLHHFIGLQCNSSGINCINPFCTRLSFVHIERMFVARKTLCTT

SEQ ID NO: 86206 - protein, 93 aa, Gossypium hirsutum
  Clone ID: LIB3166-047-P1-K1-G6.pep
WKQQCKMAIAVSLVLFGWGIAPSCLGANNMIFVHNPVSPVIHLGIFSTSKRSRGFRSVPIRGGVGLPLSRFCFPHSMLLSSYLKVWLCWIYRD

SEQ ID NO: 86207 - protein, 52 aa, Gossypium hirsutum
  Clone ID: LIB3166-047-P1-K1-H2.pep
QFFFMKKQTRSSGQHALKFVIICKGVFLLPSPVLWGTYKSEIHVGGAGPGST

SEQ ID NO: 86208 - protein, 112 aa, Gossypium hirsutum
  Clone ID: LIB3166-047-P1-K1-H4.pep
PTRPEDGSSTSYAIASSQERGQMFIGPGIEVYKGQIVGIHQRPGDLSLNVCKKKAATNVRSNKEQTVVLDTPLDYSLDDCIEYIQEDELVEVTPSSIRMCKNPKFAAAKKSR

SEQ ID NO: 86209 - protein, 82 aa, Gossypium hirsutum
  unsure (1)..(82): unsure at all Xaa locations
  Clone ID: LIB3166-047-P1-K1-H8.pep
TFDFHYLLCNPKGQGGRGSDKNNLYXKYHYKYFNACMTWKILCFCFFFLLKKKTSSLHSYPSLTPPQCVQQPKCEICTFLLV

SEQ ID NO: 86210 - protein, 35 aa, Gossypium hirsutum
  Clone ID: LIB3166-048-P1-K1-A10.pep
FHFLFLFEAQKRQILKFSFGKKFGFYRTFKNRLNY

SEQ ID NO: 86211 - protein, 99 aa, Gossypium hirsutum
  Clone ID: LIB3166-048-P1-K1-A3.pep
PIPLPSCNTFSYTNSPSIHTQRAPDSFPISPPSHTFTFTTTMSSTNGTNGTSAAPSQSSFAVKAGLAQMLKGGVIMDVVDAEQAKIAEEAGACAVMALE

SEQ ID NO: 86212 - protein, 128 aa, Gossypium hirsutum
  Clone ID: LIB3166-048-P1-K1-A4.pep
ENIGNVEPMGKLDKGDRTDDDELPENQNRNTAGRRSSFLAKLAIALGVAAALTVISFGIKGASFGSLLGVQRLAEVSPSSTMDTTVGFTFKAFGYRFMLPEYAPGWIYFWLLMAAGCGLFISEEALNI

SEQ ID NO: 86213 - protein, 128 aa, Gossypium hirsutum
  Clone ID: LIB3166-048-P1-K1-A5.pep
HIDCVWNGWEEIGNSEQVGLSFWHNQVEEPSSLFSLMGSEYDHEMRRKKCKYSSDVSDGYILENNGFWCKKWDRLQYLSLWIGVGELLTPLPAAGLLNCPNLEEIRIKVEGDCRGRSKPSERAFGLSS

SEQ ID NO: 86214 - protein, 101 aa, Gossypium hirsutum
  unsure (1)..(101): unsure at all Xaa locations
  Clone ID: LIB3166-048-P1-K1-A6.pep
AAFFEANDKPEGRAVSLLTTANTNGQADAVAQTDYQDYCNNTLGKWKPDTCTGGCHEKXTITEDVPNTSLWRITLGNIENMSGSNCMDTHECAVEHWIHVF

SEQ ID NO: 86215 - protein, 65 aa, Gossypium hirsutum
  Clone ID: LIB3166-048-P1-K1-B1.pep
APTEPPTCPPSTADTSTPTLFSTPTPTPTTNPTPTSFFTPSPSPYASSAATVSPTTSSSPIVASS

SEQ ID NO: 86216 - protein, 37 aa, Gossypium hirsutum
  Clone ID: LIB3166-048-P1-K1-B7.pep
LTSFRVTFNSVQLILFEYYSLFFLILYYLFIIYINFF

SEQ ID NO: 86217 - protein, 38 aa, Gossypium hirsutum
  Clone ID: LIB3166-048-P1-K1-C10.pep
NLFFIWVRPLIESGFIWKMLTTDELDPLSGIRTLLEVH

SEQ ID NO: 86218 - protein, 117 aa, Gossypium hirsutum
  unsure (1)..(117): unsure at all Xaa locations
  Clone ID: LIB3166-048-P1-K1-C5.pep
KDKREGEQPRKTPTETQENTPTGEQEEHPEQKRQETEKEKRKPGESRTQAENEPXERKRPKEDQEETKKKNRKKRGNGKGEEREQRKDEASQPRGTEETTGAKDKAEAGEEEKGAET

SEQ ID NO: 86219 - protein, 92 aa, Gossypium hirsutum
  Clone ID: LIB3166-048-P1-K1-C9.pep
PLFESNAIHRLVARSTDNMPVCASTSIDDRHITQKIDLALNKIDSDIANWMIPRLEYCEGLSALEDAGIAPSKRARGPMNTHLACNTLLVVH

SEQ ID NO: 86220 - protein, 113 aa, Gossypium hirsutum
  unsure (1)..(113): unsure at all Xaa locations
  Clone ID: LIB3166-048-P1-K1-D1.pep
GFLSSGPVFLVPVLXXXRLLASPXSVPFSSXSVLGLXVXXVAAFSCWXXPFVXASGFXPCXSPSVVXFGXXCSLFVPLLLGXGPLRALSVWXVPARPFFSVXXXWWLGFCXVX

SEQ ID NO: 86221 - protein, 126 aa, Gossypium hirsutum
  Clone ID: LIB3166-048-P1-K1-D10.pep
PLLKNFGLFFSSNSKPLNANAELLVDFISNKMNNAWVGLEKAPEGSFKNKLHGFGLQLLARVKPSEILLKSISKEVTNVRITYPPSLNSRLVRRRLRHIAMRGTVIHRKYFYGSVTLLSLTTALAV

SEQ ID NO: 86222 - protein, 63 aa, Gossypium hirsutum
  Clone ID: LIB3166-048-P1-K1-D3.pep
SDYFPFLAPLDFQGYRRRVKRTSNGLHAIIDKMIDEHLQGTNAKEQKPYTDFFHVMVSLLNTP

SEQ ID NO: 86223 - protein, 91 aa, Gossypium hirsutum
  Clone ID: LIB3166-048-P1-K1-D6.pep
MEVGDFFVGGFYGGAAGNDFSPLKMMSTERKLPENFTVDDLLDFSNEDAIINDGFLENVAGNSTDSSTVTCNFSVSGCDNHLSPVNLPHFF

SEQ ID NO: 86224 - protein, 72 aa, Gossypium hirsutum
  unsure (1)..(72): unsure at all Xaa locations
  Clone ID: LIB3166-048-P1-K1-D7.pep
ERVIFIGHHLDEEFSNQRGVXRMLFLDSFDYNKRFYXYINGPGGGHTPSWAIYDTMKMQKRPVCTHCVGYSY

SEQ ID NO: 86225 - protein, 58 aa, Gossypium hirsutum
  Clone ID: LIB3166-048-P1-K1-E11.pep
MMVSKHGSCRLSLMLLLVLLGLANADINQDKTECSNELVGLASCLPYFGGDAKTPTID

SEQ ID NO: 86226 - protein, 105 aa, Gossypium hirsutum
  unsure (1)..(105): unsure at all Xaa locations
  Clone ID: LIB3166-048-P1-K1-E4.pep
FCXFLLCSVCFFFAFPCLLPFFFCLVXFPSPPFLCXASCSXRVLFSCFPSASVLXVVVWVFPGFGXPSSPWFCXXXXARCAGVLPSSSAVFSSFXXXFXFCSXFS

SEQ ID NO: 86227 - protein, 94 aa, Gossypium hirsutum
  Clone ID: LIB3166-048-P1-K1-E7.pep
NSEEKENLRERIQILKGQISVQVPTKLMQMPMKRQRLTLVPSPSDHCLFPEYEISIMVVALKNVFVGFTPTFTSAVFCLCRCYYFRFCFLGDFH

SEQ ID NO: 86228 - protein, 61 aa, Gossypium hirsutum
  Clone ID: LIB3166-048-P1-K1-E8.pep
TASLLFNAIFDGTEQRLQGGLIYGLVPSHGEGDKMLLAARKSRRATCTDFVICLAAEDSAR

SEQ ID NO: 86229 - protein, 68 aa, Gossypium hirsutum
  Clone ID: LIB3166-048-P1-K1-F4.pep
TSSTGKITCVAPQGLQCCFINSGTLSDQLRDVSTGEPQGPFQSVPGGRATALHGALTCTQKKVGWTPA

SEQ ID NO: 86230 - protein, 62 aa, Gossypium hirsutum
  Clone ID: LIB3166-048-P1-K1-F7.pep
KKHYGTLFFDNINGFEVEHHSFHSQINPVFNPVILLNNEFISNKSVSRNGPQKRSLVSSKRT

SEQ ID NO: 86231 - protein, 110 aa, Gossypium hirsutum
  unsure (1)..(110): unsure at all Xaa locations
  Clone ID: LIB3166-048-P1-K1-F9.pep
APKSLEELLLLVRFVKMLLTDSSSQKDSIDSGENFSEKLKADDESWSHVIEALLIGSGTSFVTIDWLLLELLKDKLQQCVSSISMXQEIIHCITMFKKEHGLLHMAAGYG

SEQ ID NO: 86232 - protein, 114 aa, Gossypium hirsutum
  Clone ID: LIB3166-048-P1-K1-G1.pep
SILVATYEGEHNHAQHSTPALSSLSPNSGTSNPRSAPVSSSSSAPTKSSPPTVTLELMKPTGLGNDTKNPTQQVDEPAIQQILVQQMAASLTRDPTFTAALAAAISGKVLDHKW

SEQ ID NO: 86233 - protein, 128 aa, Gossypium hirsutum
  Clone ID: LIB3166-048-P1-K1-G2.pep
PTRPQALLTQLQKLNDLIKKPKEEEQCCGQVNGMRCSEGASDKGETTVKSDSEGQLSLSMGRSEHALGALSDDDSAIRTDYFGLEEEPNLMSMVDPADGSLSSPEDWRSLDSDGLFDQSPCGYQWWDF

SEQ ID NO: 86234 - protein, 129 aa, Gossypium hirsutum
  Clone ID: LIB3166-048-P1-K1-G3.pep
PTRPIGGQLKRFAKARKDLLVAVNEMVRHMFDEIDYILEARNAERFASLYSDCPIHGQTCNQNSKDGITNKTKNASGIKVPKIYWDLTRKAVLTMEWLDGIKLTDETALKKACLNQRELIDQGVYCSLR

SEQ ID NO: 86235 - protein, 85 aa, Gossypium hirsutum
  unsure (1)..(85): unsure at all Xaa locations
  Clone ID: LIB3166-048-P1-K1-G4.pep
LTLLYGFLFFFQSSSPIYGGGSKNQQRAAPLPWRGPAQWVASQEIPTDVIDEVGDSNFXLHKFMLVAKSTYISKMLMETNESDLT

SEQ ID NO: 86236 - protein, 47 aa, Gossypium hirsutum
  Clone ID: LIB3166-048-P1-K1-G8.pep
KIFIIHSLKKKKMRSMSIHPNLKVLHTTFVSTPNASRPKVMSQINCV

SEQ ID NO: 86237 - protein, 130 aa, Gossypium hirsutum
  Clone ID: LIB3166-048-P1-K1-H12.pep
PTRPLPPLSYPNMKGMDLFCASQASTAICSSVDHRSMVRHGHRRIDRQNSKPYAPCSSQLPIIPRPYHEKSSKNGVKPSDVRRKSSADIHDLKSSPASSTYLLSDRPFIDWLSESDPTVSALVPSQPSKP

SEQ ID NO: 86238 - protein, 78 aa, Gossypium hirsutum
  unsure (1)..(78): unsure at all Xaa locations
  Clone ID: LIB3166-049-P1-K1-A5.pep
SAPTEKHSXSFVEGFTQTEISTLAVKVNFMVVGGSQGELAFKHLVRXCIXFCTRSTYDYNAITNAYVIYYILSGGIIF

SEQ ID NO: 86239 - protein, 64 aa, Gossypium hirsutum
  Clone ID: LIB3166-049-P1-K1-B2.pep
RSVLLPIVIQPPQTKIRVDRTNKIGECYSQAAHTYLVSTVAKQAGILRHQTQVSFFCFYSIKRR

SEQ ID NO: 86240 - protein, 124 aa, Gossypium hirsutum
  Clone ID: LIB3166-049-P1-K1-B8.pep
PTRPGDNICSEKEEKKELKSVVEEKSIVIQPPQTKINEDLVSHFEDGSKEDEHTGDKTKETFEVPTYEIQNEKPTLETPKDAASDNIEKETVAKDETVKDDMKEATIVEEIPGEKDPTECKKTT

SEQ ID NO: 86241 - protein, 119 aa, Gossypium hirsutum
  Clone ID: LIB3166-049-P1-K1-C12.pep
KVVSVLTVTVPVFFSSTTPCFLSEKKSTSSTATRLSSEAGEEEEEVPGRSSLEPARLTGNCNMSGCCFNRKTGPAVELVLLWKKLDTGSELPRVRPHPFSINNLTTVTRLEPDQRDQIK

SEQ ID NO: 86242 - protein, 60 aa, Gossypium hirsutum
  Clone ID: LIB3166-049-P1-K1-C4.pep
SLKNLDKRSDVGYRIIHDIGGQVYMDGANMNAQLFLPCTGIIGANFFHCEFHKTFLISHG

SEQ ID NO: 86243 - protein, 42 aa, Gossypium hirsutum
  Clone ID: LIB3166-049-P1-K1-C5.pep
DTRYILPLFCIKHPKRGGGTYSPWPETLSNYMKRVIQPLVLW

SEQ ID NO: 86244 - protein, 123 aa, Gossypium hirsutum
  Clone ID: LIB3166-049-P1-K1-C7.pep
ERSYIQRWIDCGNVTCPKTQQMLENLTLTPNYVLRSVINQWCAKHNIEQPSGLANGRLKKSNGSFCDISGDMADIQELVSKLSSRCLEERKAAVAEIRSLSKRSTDNRILIADTGAIPVLVNL

SEQ ID NO: 86245 - protein, 85 aa, Gossypium hirsutum
  Clone ID: LIB3166-049-P1-K1-C9.pep
SPKENIEDPIKNTGNNILETTTIQKKPERAQVKATLVLTPFHHAKKRESHQISKKNRTKTASILRHSDWIGGSETENLMIKTNIF

SEQ ID NO: 86246 - protein, 83 aa, Gossypium hirsutum
  Clone ID: LIB3166-049-P1-K1-D10.pep
KTDRSPSPATCLIDLPFQRPRKMACASATPLRLHLLSTRSCGLRAKSLLTLSFVLFGHTLYWPPLLSVHVHMPFGFVRPLKLL

SEQ ID NO: 86247 - protein, 126 aa, Gossypium hirsutum
  Clone ID: LIB3166-049-P1-K1-D12.pep
HASADAWAHKQSSIAMETLQVFAPLAKLLGMYQIKSELENLSFMYTNPEDYAKVKRRVADLYNEHEKELVEADKILMKRIENDQFLDLMTLKTEIRAVCKEPYSIYKSVLKSNSSISEVNQIAQLR

SEQ ID NO: 86248 - protein, 125 aa, Gossypium hirsutum
  Clone ID: LIB3166-049-P1-K1-D2.pep
GLPSEFEAVISSARLSPVVLPLQRLVDVLVDCESRQDRVLQKVSLNVNLVENEPSVEGAGHGGRASVSGRGRFIRSRVQCQICSRFGHVAQKYYYRYHRDSNKTSGVAGFDSGTKASADAWADAW

SEQ ID NO: 86249 - protein, 94 aa, Gossypium hirsutum
  unsure (1)..(94): unsure at all Xaa locations
  Clone ID: LIB3166-049-P1-K1-D4.pep
NGPGYIMSSDIAHFIVSECEKHNLSLFKMEDVSMGMWVEKFNSSKAVDYIHSLKFCQFGCIXGYYTVHYQSPRQMMCMWVMLQKQTRPXMCNMR

SEQ ID NO: 86250 - protein, 37 aa, Gossypium hirsutum
  Clone ID: LIB3166-049-P1-K1-D6.pep
CQSQASFTCGVYSAYLAEFILTLVVDFCCLCIFIGNY

SEQ ID NO: 86251 - protein, 56 aa, Gossypium hirsutum
  Clone ID: LIB3166-049-P1-K1-D7.pep
ILCSLIKHLDDHLVEIGSNGFTKPKVVRKFIGCGLLLYFIIKKGVLLCILEVLFST

SEQ ID NO: 86252 - protein, 58 aa, Gossypium hirsutum
  Clone ID: LIB3166-049-P1-K1-D9.pep
SRVYKNFQNRCIIVGPNIPWWVLVHSPSFLKISPDLLSLTFVPVEVNEKKKKYCAEAG

SEQ ID NO: 86253 - protein, 61 aa, Gossypium hirsutum
  unsure (1)..(61): unsure at all Xaa locations
  Clone ID: LIB3166-049-P1-K1-E1.pep
HAFEDAWARGSIEERMMHMTNKKMVLEHLVVGRLKAQNINXEELDDIIRYGSKELFADVNV

SEQ ID NO: 86254 - protein, 85 aa, Gossypium hirsutum
  Clone ID: LIB3166-049-P1-K1-E11.pep
RWLFYLYFIALSDERNERKMTKGYPTVSEEYQNSVHKVKRKLLVLIVDKNCAPFMLRIARYLSGTFDVKINTGGPFCTHKYPVVL

SEQ ID NO: 86255 - protein, 38 aa, Gossypium hirsutum
  Clone ID: LIB3166-049-P1-K1-E9.pep
RGRVGGLRVRTRGTLIRLSLNFLGRSVKLSLAKYKIMS

SEQ ID NO: 86256 - protein, 69 aa, Gossypium hirsutum
  unsure (1)..(69): unsure at all Xaa locations
  Clone ID: LIB3166-049-P1-K1-F1.pep
YRRKQLFKDHLGLKRKXVVSANSVNNDGLKCAINHIMHAQQRVEINEDSVLYIEQNMNVASFDTTLSWG

SEQ ID NO: 86257 - protein, 48 aa, Gossypium hirsutum
  Clone ID: LIB3166-049-P1-K1-F10.pep
PVLLQTPFLRAYFVEKEIQFERSMLVENPLMRFFFLLCFYLLRGVNNL

SEQ ID NO: 86258 - protein, 57 aa, Gossypium hirsutum
  Clone ID: LIB3166-049-P1-K1-F11.pep
RDHQVASFQKHAKIVGSVLEVPLQFSKSCGEGTVHFPLSSVSSRQPVHMLLYALQNV

SEQ ID NO: 86259 - protein, 63 aa, Gossypium hirsutum
  Clone ID: LIB3166-049-P1-K1-F6.pep
GPAGIPGATRRSLGLRSNPKGLSQRRASDELIDRTAMARPDNLTDAYNLDPQKPCLLHRGLYY

SEQ ID NO: 86260 - protein, 88 aa, Gossypium hirsutum
  Clone ID: LIB3166-049-P1-K1-G11.pep
EGEQIDAKKVQEKMRVVQMEREDKLAQLLKDRPNQYVQGNKADFVNHAETGVSILSSASYGVDMLNSIGYIYARQAVNELVKNAFNFV

SEQ ID NO: 86261 - protein, 101 aa, Gossypium hirsutum
  Clone ID: LIB3166-049-P1-K1-G3.pep
DATIPCITLIIGGNLIGGLRSSKIKPLVIVGVVCARYIILPVIGIWVVKAAAKLGFLPSDPLFSYVLMLQFTVPPASNIGTMTQLFDVGQEECSCLFLWTY

SEQ ID NO: 86262 - protein, 35 aa, Gossypium hirsutum
  Clone ID: LIB3166-049-P1-K1-G6.pep
LLRKRRHRRYHSNIGSGERDGEFVLMNRFFILLRA

SEQ ID NO: 86263 - protein, 100 aa, Gossypium hirsutum
  Clone ID: LIB3166-049-P1-K1-G8.pep
PRLISHAIRTVLSSISFPINQEGSQAFKSSLFIDIHVLAAILVRGAIIGLTSLINGTIPREDNSTDQSFKSSLSLEESLAIHCSTSGADICRPLLRAASL

SEQ ID NO: 86264 - protein, 125 aa, Gossypium hirsutum
  Clone ID: LIB3166-049-P1-K1-G9.pep
YTLWYRKVHDMEYPERPGCTMLVPNMRYVATGLTPATEYRFKIVSFNGTRWEIPISTSCIGDEVPSCPVMGISQSPTTNCSSLSNPSSVEDETNNVTLYSDQNDDRADNYLTYCKDTDKIVSTNL

SEQ ID NO: 86265 - protein, 47 aa, Gossypium hirsutum
  Clone ID: LIB3166-049-P1-K1-H1.pep
RPPQFSLNKFLPCCGSFSRNPNTLISHKNSVSILQTTFSLSFRVSII

SEQ ID NO: 86266 - protein, 82 aa, Gossypium hirsutum
  unsure (1)..(82): unsure at all Xaa locations
  Clone ID: LIB3166-049-P1-K1-H4.pep
LWGLFLPAFVVRGFLAARFLXCFXRALFVAVFXPCFPGFVFVXXXSVGVGSSGCVPSSXGCPASPFCGALGCXAAXCXVXFX

SEQ ID NO: 86267 - protein, 112 aa, Gossypium hirsutum
  Clone ID: LIB3166-049-P1-K1-H7.pep
MAYGWIHSRSYPLSTWSKNKVQGNEVAFSLGYGFSICRTPNVKCSQKLGEQSLSISRAVEKKPVKKSGKNEHHLWKKRDSAGSGQKALNLVSIVSQLPSEKETVYGALDTWV

SEQ ID NO: 86268 - protein, 62 aa, Gossypium hirsutum
  Clone ID: LIB3166-049-P1-K1-H8.pep
RSRKIFKQTKIPKLNPGGRTIPSYMKTIYRLPKTYLREHEVCNPLGSAKPVCKCTGWGITKG

SEQ ID NO: 86269 - protein, 65 aa, Gossypium hirsutum
  unsure (1)..(65): unsure at all Xaa locations
  Clone ID: LIB3166-050-P1-K1-A11.pep
EQQARFNWLKNGDKNTSFFHKMAVQRXNRGRINELERMNGTRTHTIEEMLKLAFAFFEDLFSAKK

SEQ ID NO: 86270 - protein, 123 aa, Gossypium hirsutum
  Clone ID: LIB3166-050-P1-K1-A3.pep
RKYRDGIDNLLVLLIGGIPIAMPTVLSVTMAIGSHRLSQQGAITKRMTAIEEMAGMDVLCSDKTGTLTLNKLSVDRNLIEVFVKDVDKEHVVLLAARASRTENQDAIDAAIVGMLADPKEARA

SEQ ID NO: 86271 - protein, 108 aa, Gossypium hirsutum
  Clone ID: LIB3166-050-P1-K1-A6.pep
LFPWLSLVISLLLDLRCACVSLLCPVGPLCLLHFGFVCALCVPEVVSAVLVLSGVLALVGAALFLLLPVPARVSALAACSGRLPAWVIANLGGPPFLVAGSFPEIWAS

SEQ ID NO: 86272 - protein, 91 aa, Gossypium hirsutum
  Clone ID: LIB3166-050-P1-K1-A7.pep
AAKKGEAKKKDFLREKFKKNSNPTVGCRTITTTPPSPPSQRLAKQTKKQRNNKKEKKRKERKRAKKKKEKGERGDHRARRRQPPLDSRSSS

SEQ ID NO: 86273 - protein, 89 aa, Gossypium hirsutum
  unsure (1)..(89): unsure at all Xaa locations
  Clone ID: LIB3166-050-P1-K1-A9.pep
KKKIPLSFTNLFNLLFAKKFMHILMVVLVATGKTTILYKLKLVEIVTTIPTISFNVETVXYKNIIFTVLYFHSQDKILPLWIHLFSKHA

SEQ ID NO: 86274 - protein, 48 aa, Gossypium hirsutum
  Clone ID: LIB3166-050-P1-K1-B1.pep
ICSSASANLQGSRGAAISRLRVLIRASSSARLSFELMPQVLSNVLSAA

SEQ ID NO: 86275 - protein, 100 aa, Gossypium hirsutum
  Clone ID: LIB3166-050-P1-K1-B10.pep
FIRSKWVTYFGLNFQEQAVKVSQGKWVDVHGLVHHNRYSRIGINEALLKYILDIPYLFLKFYFLNNFYVICITSNVFSINISQYLQNYFSILLLRCYYPP

SEQ ID NO: 86276 - protein, 56 aa, Gossypium hirsutum
  Clone ID: LIB3166-050-P1-K1-B12.pep
YFLNSDVYKKITLIILGAFYSRLHGSSFLFVSFLSVFVCCCFHSFLVCLQVKKEGQ

SEQ ID NO: 86277 - protein, 69 aa, Gossypium hirsutum
  Clone ID: LIB3166-050-P1-K1-C1.pep
HGGCGWHMMTFATPRSKTNSWCLLQLYFFWSKLSVFLWFFWSKRIPSRNSMVFKFLNTIGMFLGVFKNN

SEQ ID NO: 86278 - protein, 31 aa, Gossypium hirsutum
  Clone ID: LIB3166-050-P1-K1-C3.pep
RSNQKRNLQKNGWVEDTSCGHKIRHYLIISR

SEQ ID NO: 86279 - protein, 56 aa, Gossypium hirsutum
  Clone ID: LIB3166-050-P1-K1-D11.pep
NNTYSFHFLKCRLKGFVFRQKIVLKLDLHHDKSRQKGMKIASGLSGIISINTFYKP

SEQ ID NO: 86280 - protein, 121 aa, Gossypium hirsutum
  Clone ID: LIB3166-050-P1-K1-D12.pep
NCFGKALQRQEEKWWLPVPRVPPGGLDDSSRKKLQHKRDCTNQILKAAMAINNVSLADIEVPESYLEALPKNGRASLGDVIYRHISSDMFTPECLLDCLNLSSEHQAIEIANRVEASMYLW

SEQ ID NO: 86281 - protein, 86 aa, Gossypium hirsutum
  Clone ID: LIB3166-050-P1-K1-D2.pep
KHGKKITVLVEEVKAFGYWGSPYRYRAELAPKLKGVFYEYMNEDICGTMSDFILKYEPVHKKVPFLLDNGKPFVETFAVLAFTEEA

SEQ ID NO: 86282 - protein, 61 aa, Gossypium hirsutum
  Clone ID: LIB3166-050-P1-K1-E10.pep
KIIRYYKRSVTEKGPTTLELNRDEYQDRVELFFRNWIRLGSPETYKATRAIYLVTERNSVR

SEQ ID NO: 86283 - protein, 58 aa, Gossypium hirsutum
  Clone ID: LIB3166-050-P1-K1-E3.pep
LTDIKNKKKKYGAAVLEEPSLLTRACNVIAFYWGNINVMDCTFFNNLIQCKNPVLPQF

SEQ ID NO: 86284 - protein, 94 aa, Gossypium hirsutum
  unsure (1)..(94): unsure at all Xaa locations
  Clone ID: LIB3166-050-P1-K1-E6.pep
SFPPSPWSVSXPLSRARLLPCLLALLGXGSCALFPPLGCCRRPCSPPRXCFCSVLGSFLVLPLALRXXPPRVLPLPPRXRSLFAXXFSVAFPPP

SEQ ID NO: 86285 - protein, 72 aa, Gossypium hirsutum
  unsure (1)..(72): unsure at all Xaa locations
  Clone ID: LIB3166-050-P1-K1-E7.pep
FSSVLPCPLPFLLLLALLVALSAASLALFGLAGLPGPASPRVXCPPLASXLPLWSPRVRPRVRVRVGPPAVS

SEQ ID NO: 86286 - protein, 56 aa, Gossypium hirsutum
  Clone ID: LIB3166-050-P1-K1-E9.pep
NTLSQSCLLYGTNDCNKSLSLISEQNFLELTDNFQENQVNFHDKPWLRSKGREIKV

SEQ ID NO: 86287 - protein, 61 aa, Gossypium hirsutum
  Clone ID: LIB3166-050-P1-K1-F10.pep
QQFCWNPHLHNLPALDPHSSEPASGLFEMALTECERFVDKPAIVIGVFLMRESLVVQICSC

SEQ ID NO: 86288 - protein, 91 aa, Gossypium hirsutum
  unsure (1)..(91): unsure at all Xaa locations
  Clone ID: LIB3166-050-P1-K1-F11.pep
QNKIYQFNGANAKIQEGAKALEVMHFLKEKCHEGTCYVAICGDGKLVTXSDSCXFWVLFGDSVSISIFVTSEFDAIPVTSPGNIFIALSFC

SEQ ID NO: 86289 - protein, 119 aa, Gossypium hirsutum
  unsure (1)..(119): unsure at all Xaa locations
  Clone ID: LIB3166-050-P1-K1-F12.pep
QFEEKRQHCIKFADQFYPPIRAGSTVIVTTRLEKAALMMATTPFYRLGCLSDDDSWSLFKQRAFGMGMNGSNANLETTGRQLVQRCGVVPLAVKAIGSILRFKKXESEWLHVKDSEIWD

SEQ ID NO: 86290 - protein, 122 aa, Gossypium hirsutum
  Clone ID: LIB3166-050-P1-K1-F2.pep
ATRSDAVVHIELLYNAPIYFTLWDIHAQKDIYMSHVKVETLQGRSCLRRGLLRVLFTMWVKRCNHNCKGWRNGLRQWCISRSQHTSRQGWCQVALNPSSETIRLPCSVTDATECHTYRHWGA

SEQ ID NO: 86291 - protein, 113 aa, Gossypium hirsutum
  Clone ID: LIB3166-050-P1-K1-F3.pep
GESLPVTKNPSDEVFSGSTCKQGEIEAVVIATGVHTFFGKAAHLVDSTNQVGHFQQVLTAIGNFCICSIAVGIVIELIVMYPIQRRKYRDGIDNLLVLLIGGIPIAMPTVLSV

SEQ ID NO: 86292 - protein, 63 aa, Gossypium hirsutum
  Clone ID: LIB3166-050-P1-K1-F5.pep
HTIVLFHMHMLSSNCKHVDSPRINVVSIEFVAACFAFPMLVSSSSFGPIISLYMSKAPPYKVL

SEQ ID NO: 86293 - protein, 70 aa, Gossypium hirsutum
  Clone ID: LIB3166-050-P1-K1-F8.pep
ILKYSLLTSFWTIVIFLQSPFMTWFCFTGYWFQTPFFFFIHLCCHHFFLWLVYFCKSFSVNTTIYFCHNS

SEQ ID NO: 86294 - protein, 84 aa, Gossypium hirsutum
  Clone ID: LIB3166-050-P1-K1-F9.pep
TKALLEEMTKNLSRIILSNVLCKQMSPNKMLQILSITRYAPNLNRRGNRFSLQKHNASISLLALQILGTHSPECIALLFNPQFK

SEQ ID NO: 86295 - protein, 88 aa, Gossypium hirsutum
  Clone ID: LIB3166-050-P1-K1-G5.pep
NILIKLIQLSFGFTSLIMIILRKIMQTCKLLHFCRATAAASNSSFVRNLLEGQNSASVQVLIASNWIGLTENWVSVASMVLSIKVDLG

SEQ ID NO: 86296 - protein, 100 aa, Gossypium hirsutum
  Clone ID: LIB3166-050-P1-K1-G6.pep
SASRGPTPIPSNYEEDGTGFCKPRFHYHAQGGAGAAHYPAPNPGMFSPNGSKANTKKPNDQAQQKAEDGGRDLHMFVWSSSASSCFRPSLVCGGWPLKLW

SEQ ID NO: 86297 - protein, 34 aa, Gossypium hirsutum
  Clone ID: LIB3166-050-P1-K1-G8.pep
ALKLLRYFKSGGRGLKGGDGSLGCRCSWCHWCLP

SEQ ID NO: 86298 - protein, 49 aa, Gossypium hirsutum
  Clone ID: LIB3166-050-P1-K1-H10.pep
SSSSTSTTTRSLAYYSHPLPKPPAGFVVDDTGRVLMASNQEKLPPIGWI

SEQ ID NO: 86299 - protein, 52 aa, Gossypium hirsutum
  Clone ID: LIB3166-050-P1-K1-H4.pep
DAWVKMEAAKVHWSSILNGLMVITFLAGIVLVIFLRTAKRYLTPSEELDKEA

SEQ ID NO: 86300 - protein, 47 aa, Gossypium hirsutum
  Clone ID: LIB3166-050-P1-K1-H8.pep
ASNVCLAIAVQRRKAVVERFFRAVMHGLVSPMAIVSRAKNCNPPSGR

SEQ ID NO: 86301 - protein, 94 aa, Gossypium hirsutum
  Clone ID: LIB3166-050-P1-K1-H9.pep
DAWVLILSFLWVLKAFVEVGCTLGSAFFVTILLIRGIWTGVTFMHESLVHRRINVPFDDPLLWNGVQPVILKQGYLHIYRLKLHFQRIFFSLEY

SEQ ID NO: 86302 - protein, 112 aa, Gossypium hirsutum
  Clone ID: LIB3166-051-P1-K1-A1.pep
MKGGKSNSVAMSAKLSMHKKSTTKAGKKSVKAAKDPNKLKRAARDWINLMEDVPEHYTKELPTNKSAGADDKARGDKWSILFEAEKRPYFDMADKRKVLYEKNMNAYNKRQA

SEQ ID NO: 86303 - protein, 72 aa, Gossypium hirsutum
  unsure (1)..(72): unsure at all Xaa locations
  Clone ID: LIB3166-051-P1-K1-A12.pep
ANISTTILFDKISPIICGGCSYFGPSDNFAKPKKVQTAALFGLCALGLASIXGTRICGAYQFIFVVVNPILF

SEQ ID NO: 86304 - protein, 47 aa, Gossypium hirsutum
  Clone ID: LIB3166-051-P1-K1-A3.pep
AGQEVIGCVHHSYTIISKREEACQLIGYSKLGGPDLSTYLYNRTEFF

SEQ ID NO: 86305 - protein, 122 aa, Gossypium hirsutum
  Clone ID: LIB3166-051-P1-K1-A5.pep
FVTSVSSFVFFQHPSSSIKLVFKIACHNNPNSFFHHFNNTQNSSSIADSYYNLFYCSDSYKLKSCYFTKFSKSHSSYLLNYSFLIISFYSQSQFFHPFFLNLILFPQSQITYSFLAYFFKIH

SEQ ID NO: 86306 - protein, 47 aa, Gossypium hirsutum
  Clone ID: LIB3166-051-P1-K1-A7.pep
PGVDRSPHALRHASGHASVLRVRATSVASVKAFPCFCVVIKHCLLSL

SEQ ID NO: 86307 - protein, 65 aa, Gossypium hirsutum
  Clone ID: LIB3166-051-P1-K1-B12.pep
IDSTTCQVNRRSFLLKFPCHTSDSATTSTESNPSQQILPPHTELNAPPCRICSYHRHIHADRTRG

SEQ ID NO: 86308 - protein, 80 aa, Gossypium hirsutum
  unsure (1)..(80): unsure at all Xaa locations
  Clone ID: LIB3166-051-P1-K1-B3.pep
PTLPAEMAGMSHRIRERTVAVDSAGNTTVAIEKGFAIGSAALVFLALFGAXFVSRAAFSTVVVLTPKVFIGSLVGAMLPY

SEQ ID NO: 86309 - protein, 36 aa, Gossypium hirsutum
  Clone ID: LIB3166-051-P1-K1-B6.pep
LRCFDSCLCLLLYCKRELLAYIIYCPYFVVFFNLSC

SEQ ID NO: 86310 - protein, 62 aa, Gossypium hirsutum
  Clone ID: LIB3166-051-P1-K1-B8.pep
HASAHASGYILAFVHDERTCKSELQIVNAMDLKLEATVQLPSRVPYGFHGTFISSKDLEKQA

SEQ ID NO: 86311 - protein, 67 aa, Gossypium hirsutum
  Clone ID: LIB3166-051-P1-K1-C10.pep
PESLNPYQCPSQCTIIFIHTHYLKPYMFFFHKLFITFLFFPPYYYVNNQLFPIYNYFKTNKLLPKFL

SEQ ID NO: 86312 - protein, 85 aa, Gossypium hirsutum
  Clone ID: LIB3166-051-P1-K1-C11.pep
GKPYKLLMPEGLDVQKGSVLSKVALVHLHCRELVLPNIAKFLPLLSNNAETLSPGLSGKPDLLRFVASMPKHMKISWNLMSSYLV

SEQ ID NO: 86313 - protein, 115 aa, Gossypium hirsutum
  unsure (1)..(115): unsure at all Xaa locations
  Clone ID: LIB3166-051-P1-K1-C2.pep
TTRPPTLPKEFRHCLSKKSMNICKLGRINCXRGVMLADGKTRFFINGKPIYHFVGTSTFSQYTVVHVGQVAKISPTAPLDKVCPISCGICTGFGATVNVAKPKKGQTVAVFGLCA

SEQ ID NO: 86314 - protein, 47 aa, Gossypium hirsutum
  unsure (1)..(47): unsure at all Xaa locations
  Clone ID: LIB3166-051-P1-K1-C4.pep
KIKNLRPLTAQIISNSKKLKISTPYQRTYLEQNLSRLINNKXCAHAS

SEQ ID NO: 86315 - protein, 48 aa, Gossypium hirsutum
  Clone ID: LIB3166-051-P1-K1-D10.pep
PRFLPLFFCIDKPLKKGGSYIWRGSLKHSNCLIYYIIKSLIPMEKCNV

SEQ ID NO: 86316 - protein, 43 aa, Gossypium hirsutum
  Clone ID: LIB3166-051-P1-K1-D11.pep
GPKLRANPRYVAPTNYYKFLIELLELMLCCPPYSNFSQPKSGY

SEQ ID NO: 86317 - protein, 97 aa, Gossypium hirsutum
  unsure (1)..(97): unsure at all Xaa locations
  Clone ID: LIB3166-051-P1-K1-D12.pep
HAYDSLFIPISNLHLPLGFSDQRDIAIGRPEEATHPDALKAALAEFISTLIFVYSEIGLXMVFNKXTDNGSSTPAGLVAVALAHGFGLFVSVFVGAN

SEQ ID NO: 86318 - protein, 63 aa, Gossypium hirsutum
  Clone ID: LIB3166-051-P1-K1-D4.pep
DAWVFLLIVVSPPYIYRGGVSIMDGVGIICCIFFVIYCITLMACLSFSKVLISYINFWLLFLV

SEQ ID NO: 86319 - protein, 43 aa, Gossypium hirsutum
  Clone ID: LIB3166-051-P1-K1-D5.pep
VTYTIQACFLMRLTKTLYDGGNNRRGELLPCQTLSRSSIEPNH

SEQ ID NO: 86320 - protein, 53 aa, Gossypium hirsutum
  Clone ID: LIB3166-051-P1-K1-D9.pep
ERILIRSSSFWGGATTTYSKNSGLKTCDASARFAKKPLSSSAHCERKYLLYFK

SEQ ID NO: 86321 - protein, 56 aa, Gossypium hirsutum
  Clone ID: LIB3166-051-P1-K1-E12.pep
MLDSVEANNFEALPLLSLNHVSLLCRSVWDSVRFYEDVLGFVSIKRPSSFKFNGAW

SEQ ID NO: 86322 - protein, 46 aa, Gossypium hirsutum
  Clone ID: LIB3166-051-P1-K1-E6.pep
RPRFRPLVRSLVLFNTIGWGGYASLMSAMITVFVNVGASLVSIYGV

SEQ ID NO: 86323 - protein, 128 aa, Gossypium hirsutum
  Clone ID: LIB3166-051-P1-K1-E8.pep
AAVIIQKQIKGMKAKKTFGNIRDASIVIQSAIRGWSVRRCSVDIGFKSGVPKVDEPDEVLVKSSFLAELQRRVLKAEAALREKEEENDILHQRLLQYENRWSEYELKMKSMEEVWQKQMRSLQSSLSI

SEQ ID NO: 86324 - protein, 88 aa, Gossypium hirsutum
  unsure (1)..(88): unsure at all Xaa locations
  Clone ID: LIB3166-051-P1-K1-F10.pep
VRKTRHLPFIIYLGIISFGRFLHWTYCPLLPFAAEFKLNIVCNHSTLSSHNFHYYLXTATTNVMLLNIYSNTGDPQDVLDTDHFLTYI

SEQ ID NO: 86325 - protein, 43 aa, Gossypium hirsutum
  Clone ID: LIB3166-051-P1-K1-F4.pep
REAKSHLNAPIRIQSAIQTPPKFGDWKVSGRQAIANKGFVFLF

SEQ ID NO: 86326 - protein, 66 aa, Gossypium hirsutum
  Clone ID: LIB3166-051-P1-K1-G2.pep
KIKPALEHYGCLVDLLARAGFIVGAVDLVSTMPMRPDAVIWRSLLDASSKKNSSVELSEELAMASR

SEQ ID NO: 86327 - protein, 83 aa, Gossypium hirsutum
  unsure (1)..(83): unsure at all Xaa locations
  Clone ID: LIB3166-051-P1-K1-G8.pep
GIEDVVCLIKNSATLSRGCYTWDGSQILIDIPTLTDNDKEVINIWGVQNNIYILSLSYTXHSKDILXALSYLSKLGKLNQTQI

SEQ ID NO: 86328 - protein, 62 aa, Gossypium hirsutum
  Clone ID: LIB3166-051-P1-K1-H10.pep
QQPDSLLSISVSLDPTMDAIFRFTTGLSTRSTARQRENKHLRDVVFVDGSDRIKFAGSSPHP

SEQ ID NO: 86329 - protein, 42 aa, Gossypium hirsutum
  Clone ID: LIB3166-051-P1-K1-H11.pep
TLTFSWPIIIFETSLQLLTVVLIFGDDYYRNVKSTTNLSQSP

SEQ ID NO: 86330 - protein, 64 aa, Gossypium hirsutum
  Clone ID: LIB3166-051-P1-K1-H6.pep
KRAVCKILMDIHVIRACISSTMARWLANNQPLLFLQSSPQVTLVEMMANNDYLPYHLSRLTIPP

SEQ ID NO: 86331 - protein, 64 aa, Gossypium hirsutum
  Clone ID: LIB3166-051-P1-K1-H9.pep
QQLYSVKLITLNWEKKGAERDIVKQNTQKDRIIFTEKQRENFRNFFLPIRRDGERKTHASAHAS

SEQ ID NO: 86332 - protein, 119 aa, Gossypium hirsutum
  unsure (1)..(119): unsure at all Xaa locations
  Clone ID: LIB3166-052-P1-K1-A10.pep
PTRPAPPPPPHHSTSLFQVHYRNLQHHGFVPELLTYNILVSGLCKIGRLRSARRVLKEMXFRKKKFEERIELLLEMKSKRYTFVGFAYCTVIGALIKIGKAKQVTAFMVDMTEIGIELD

SEQ ID NO: 86333 - protein, 58 aa, Gossypium hirsutum
  Clone ID: LIB3166-052-P1-K1-A11.pep
YLIYPLCNINPTVLLYLTSILIYTLTTTKHTMISKPFPKYKHLPLHLLYLLTIIKLKH

SEQ ID NO: 86334 - protein, 59 aa, Gossypium hirsutum
  unsure (1)..(59): unsure at all Xaa locations
  Clone ID: LIB3166-052-P1-K1-A2.pep
AXKRFLFVYIYIFYCLTWVQIWGDVYXXXLFFSGSLYILPYINFLYVLSIGLWKESNKC

SEQ ID NO: 86335 - protein, 64 aa, Gossypium hirsutum
  Clone ID: LIB3166-052-P1-K1-A3.pep
KPLTLTLYLCKSRENKRNRNTRKDWPSRGLPILANVRVKSKNKIKNPNPCFVLNVKIIFALEDG

SEQ ID NO: 86336 - protein, 121 aa, Gossypium hirsutum
  unsure (1)..(121): unsure at all Xaa locations
  Clone ID: LIB3166-052-P1-K1-A4.pep
GRVGAYWARSFLQDLERAXRDHLRKRCWGIGFGLGFRVVAMDPNFRKLSVEHIVAAYKRTKNRAILLDYDSTLLLTSSLSTIPNVEACGILNNLCRDPKNVXFLVSAKDXKTLTEWVSCFE

SEQ ID NO: 86337 - protein, 59 aa, Gossypium hirsutum
  unsure (1)..(59): unsure at all Xaa locations
  Clone ID: LIB3166-052-P1-K1-A9.pep
MEKIQHNHVQAXGLKLHVAQIGTGPQVVAFLHWFPEIWDLWGHHMGAVGYAGYRAIFID

SEQ ID NO: 86338 - protein, 124 aa, Gossypium hirsutum
  unsure (1)..(124): unsure at all Xaa locations
  Clone ID: LIB3166-052-P1-K1-B2.pep
SLTESRCDGCFSKSNLKRXSSCHVVWYCVSSCQKLEWKLHRLECQLLAKLDKERRKSVTPTIRMMVKLYLRRKLQNENVIPVTAMDNYNLVEALVSHMSDIDEKQLLLYAQMANLVNLILQLPN

SEQ ID NO: 86339 - protein, 120 aa, Gossypium hirsutum
  Clone ID: LIB3166-052-P1-K1-C1.pep
AGLVCHQLHFFDAHSINDSEAYSLRRGSDGTGDDGFSSQSIPETPPIYSSGGGNSAFSSEQNGKGLNGEFGGSDGPILPPPAEMGPEEGSGLREWRRQNVIPLEEKEKKEKETLEQIIKE

SEQ ID NO: 86340 - protein, 54 aa, Gossypium hirsutum
  Clone ID: LIB3166-052-P1-K1-C2.pep
KILLNIIIRLVKVHELFYTSLRNCIDTWSKFYRYSGTFTHISLFLPIKYIFTYT

SEQ ID NO: 86341 - protein, 71 aa, Gossypium hirsutum
  Clone ID: LIB3166-052-P1-K1-C4.pep
IETFNMPVEEEEYVLLYNVTMIEGHNQRTILKHLNVRLIKDHAFNDRRKGATSASSGLHPSMIKDSCTCRH

SEQ ID NO: 86342 - protein, 42 aa, Gossypium hirsutum
  Clone ID: LIB3166-052-P1-K1-D11.pep
LYIASVAGKGSAAGARDIGEGAFQSRVPIPLERAYARRQEVL

SEQ ID NO: 86343 - protein, 124 aa, Gossypium hirsutum
  unsure (1)..(124): unsure at all Xaa locations
  Clone ID: LIB3166-052-P1-K1-D5.pep
LWFQLLQQVRKSGLRANLXREHDKKVCCLGLTSLLALPGDQIGGEALGRVFRAALDLLVAYKDQVAEAAKEEEAEDDDDMDGFQTDDDEDDGSDKEMGVDAEDEDEADSMMLQKLAAQAKAFRT

SEQ ID NO: 86344 - protein, 86 aa, Gossypium hirsutum
  Clone ID: LIB3166-052-P1-K1-D7.pep
DLHSPSHFLFGLLSNKPLLQWRMNANPTKLTNSARVCLFKNPRHSRKILAMVSVLPYNRGQVGMFKSFLCCIFTFVAQEITRISIL

SEQ ID NO: 86345 - protein, 122 aa, Gossypium hirsutum
  Clone ID: LIB3166-052-P1-K1-D9.pep
DVLLGGNCSYGLGLGKEEEIFCFEHIPGNQTSDTNNLVDGDHRVSSSSQTSMAPPLPHSSGPSAMGRRKRRLSTKAPKNKEEMENQRMTHITVERNRRKQMNQYLSLLRSLMPPSYAQRGDQ

SEQ ID NO: 86346 - protein, 127 aa, Gossypium hirsutum
  unsure (1)..(127): unsure at all Xaa locations
  Clone ID: LIB3166-052-P1-K1-E12.pep
IIEELTGIGPTKASGVDGFSAXFYQKYWHIFGKDVSGVFLDILNNGKPLEDINKTQLVIIPKMANPINLKKFRLISLCTVIYKIIAKTIANRLQKALHECIDDSQSAFISGRLITNNVLLAYKRTRG

SEQ ID NO: 86347 - protein, 66 aa, Gossypium hirsutum
  Clone ID: LIB3166-052-P1-K1-E2.pep
ALPVHHQRVHYLHVSVHGSQPYIQIQDGNFTLIFVMRAQSFMVIRFISCLVWTMQVYGTCFECNGC

SEQ ID NO: 86348 - protein, 85 aa, Gossypium hirsutum
  unsure (1)..(85): unsure at all Xaa locations
  Clone ID: LIB3166-052-P1-K1-E3.pep
SCYSLSKICKANKVVHAHNLWFDILKLHIETFTPXYMLFKVTCYKKSHPQNLATIKSXNFLLKYSKXTPPLQTTFFNLASIALPI

SEQ ID NO: 86349 - protein, 51 aa, Gossypium hirsutum
  Clone ID: LIB3166-052-P1-K1-F1.pep
IIKFLQTAFENCPIFFRLSAVAPVRLRHEHSIFTVLFIFPSSRSFSGMIQC

SEQ ID NO: 86350 - protein, 93 aa, Gossypium hirsutum
  Clone ID: LIB3166-052-P1-K1-F10.pep
PTRPGKISNLRRVTYLVRDEADRMFDMGFEPQITRIVQNIRPDRQTVLFSATFPRQVEILARKVLNKPVEIQVGGRSVVNKDITQLVEMRPES

SEQ ID NO: 86351 - protein, 61 aa, Gossypium hirsutum
  Clone ID: LIB3166-052-P1-K1-F4.pep
SRRGASSKFWGGNALILGYTQIIVNKEEEKNRGCLPSIHPLNNNSVALDFYAILQASCPRF

SEQ ID NO: 86352 - protein, 127 aa, Gossypium hirsutum
  unsure (1)..(127): unsure at all Xaa locations
  Clone ID: LIB3166-052-P1-K1-F6.pep
PTRALTPVLLPPEIGNLTLASLNLSSNQLVGRIPKQLNNLVYESSXLKNADLCADHPILMLPDCYSELHQPKRLSSKYLAMIVALAIIASTVILILTFFLVQDYKMSKRQEFLATWKVSSFHILDST

SEQ ID NO: 86353 - protein, 127 aa, Gossypium hirsutum
  unsure (1)..(127): unsure at all Xaa locations
  Clone ID: LIB3166-052-P1-K1-G4.pep
PARSSSHSPWPSPYPHGGCASPLPPGVSPSPARASRGSTPRRFFRRPFPPPSPAKHIKASLVKRLGGKPKEGPIPXDRGTEPEQALDKNFGYGKNFGAKYELGKEVGRGHLGHTCSAKGEQGELKDQ

SEQ ID NO: 86354 - protein, 76 aa, Gossypium hirsutum
  Clone ID: LIB3166-052-P1-K1-G7.pep
RAVTAGAEEPLVGMVGEQGTGMSEKAMVVLSSLAGIKEGKEAIVEEGGIAALVEAIEDGSVKGKDFAVLSLLHFVP

SEQ ID NO: 86355 - protein, 43 aa, Gossypium hirsutum
  Clone ID: LIB3166-052-P1-K1-H3.pep
NYQDSESGMIYGAFNESAQVWVSGPQYSLEHGMGCDYWKARQS

SEQ ID NO: 86356 - protein, 112 aa, Gossypium hirsutum
  Clone ID: LIB3166-052-P1-K1-H4.pep
HASAHASAKPGCFALSLRVPQEFHPLGIAHYLILRTNKGFKIKGFTKEFTTLTALITHHSVMPELLPCPLSLSRYNPTFVKSDSNQDFADIDADPDYNTLADFRKMMADLNV

SEQ ID NO: 86357 - protein, 95 aa, Gossypium hirsutum
  Clone ID: LIB3166-052-P1-K1-H7.pep
IEDFFNRKKHTSINASFSFKNYLNLSSTNLRIVLPISSDTLYKNQTPSYSYNNNILTLPEKSIFTNATASKNCYQLSVSLLNAQFYKSFHLSHFT

SEQ ID NO: 86358 - protein, 122 aa, Gossypium hirsutum
  Clone ID: LIB3166-052-P1-K1-H9.pep
PRVRYSPYLPKASLKEICLSTLAKVSISQLEWKTCFYSTDCSEIGLVLLRDTENMLSLKRFSKQKIKKLGKEAQVLKEKDLIKSMSSAACVPDVLCTCADQMHAAILLNTCLACPLALILHT

SEQ ID NO: 86359 - protein, 99 aa, Gossypium hirsutum
  Clone ID: LIB3166-053-P1-K1-A12.pep
MSIASVAFSSAIEEFACFPENFAHRYGQTLSNSILIFLSVGGSIIPMRVMEYDSIASVKLRIQTSKGFFLRKQKLVFKGRELAQNDSRVQDYGVADGNV

SEQ ID NO: 86360 - protein, 65 aa, Gossypium hirsutum
  Clone ID: LIB3166-053-P1-K1-A5.pep
VPCLKFIGRVSPIHTKSRIKKPSFFLTYHFASLKSSSLSPFSDLKAICIVLQQPPYGSTTPQLCS

SEQ ID NO: 86361 - protein, 120 aa, Gossypium hirsutum
  Clone ID: LIB3166-053-P1-K1-A6.pep
FFQSTVDLIEMVLGKAEVAIAKHYDEVLVSESRRELGAELRRELMMTEKHVLVVSGHEKLSENNKSLRRLIESRLSYLNPMNMLQVEVLRRLRRDDENNKLRDALLITINGIAAGMKDTG

SEQ ID NO: 86362 - protein, 69 aa, Gossypium hirsutum
  Clone ID: LIB3166-053-P1-K1-A9.pep
YVVHFYMPQKFQRNPPLSAEAQPVELPQHKYAAVRRFGGFMDDSNISVQLSALKKSLKGTGRDKSSAFN

SEQ ID NO: 86363 - protein, 66 aa, Gossypium hirsutum
  Clone ID: LIB3166-053-P1-K1-B1.pep
ANFVRTSEVIHNLDTIIRLLVFNILVLSLKVVDKQKMADEHTKVGGQESGESKDRLNLYLFAKKEN

SEQ ID NO: 86364 - protein, 49 aa, Gossypium hirsutum
  unsure (1)..(49): unsure at all Xaa locations
  Clone ID: LIB3166-053-P1-K1-B11.pep
ILKHLIHLHXQFLLHNQMLIIITNLYILPPITHSNSKINIYKFPPSHQH

SEQ ID NO: 86365 - protein, 52 aa, Gossypium hirsutum
  Clone ID: LIB3166-053-P1-K1-B12.pep
HASGKLEQIRRQSYAVDVWNRQSKDVRVEEGSIVHHIISDCCIFCNISTSSL

SEQ ID NO: 86366 - protein, 45 aa, Gossypium hirsutum
  Clone ID: LIB3166-053-P1-K1-B2.pep
LDWWLYPLPLLVPINFLTFISPLLPLINLLTDKPSPYEHPSYKPS

SEQ ID NO: 86367 - protein, 42 aa, Gossypium hirsutum
  Clone ID: LIB3166-053-P1-K1-B3.pep
LSMGRDMISEPRIFKWCIHPCYISSSICRTVCHTVLFQGTFR

SEQ ID NO: 86368 - protein, 61 aa, Gossypium hirsutum
  unsure (1)..(61): unsure at all Xaa locations
  Clone ID: LIB3166-053-P1-K1-B5.pep
FLTNKNLPKXVVFLLRKVILIHQGKQVVMVVIVIMENQEKLTTLSQVLGISWILHIQIFRN

SEQ ID NO: 86369 - protein, 91 aa, Gossypium hirsutum
  unsure (1)..(91): unsure at all Xaa locations
  Clone ID: LIB3166-053-P1-K1-B8.pep
EANVIVEGGSSNSWLAGGVSIVKIRSKVAEFPGKMKKVAKDDPRRIVHSFKVXLAITLVSLFYYFDHLYVGFGXHSMWAVLTVIVFIEFSV

SEQ ID NO: 86370 - protein, 35 aa, Gossypium hirsutum
  Clone ID: LIB3166-053-P1-K1-B9.pep
SKIINVHAPELVPTISSPHYQQQHQQSMRKMIHFP

SEQ ID NO: 86371 - protein, 78 aa, Gossypium hirsutum
  Clone ID: LIB3166-053-P1-K1-C2.pep
KVAKPCSFGDKGTSDVVLRLRNSEGRPEWFYSHSSVLVSKSRFFADQLFNPGSGSCIEIHCSDSTYDHHVNLLRLLYL

SEQ ID NO: 86372 - protein, 53 aa, Gossypium hirsutum
  Clone ID: LIB3166-053-P1-K1-C5.pep
KRACSVLLFFLRLWLYFSLLLLILLVCNSFFFFESHVFPHEKKLQKTCSTKIT

SEQ ID NO: 86373 - protein, 66 aa, Gossypium hirsutum
  Clone ID: LIB3166-053-P1-K1-D11.pep
PRVRLKVFMRKQASIRGGNKHMRGGGMNSFSFHSSPWMIPHIFKPEVQFVELSIEQFVLFVEENVR

SEQ ID NO: 86374 - protein, 129 aa, Gossypium hirsutum
  Clone ID: LIB3166-053-P1-K1-D2.pep
VAIGVYIWKYRYIQKKRRGSNDSEKFVKLLHDSNLNFKYSTLDRATGSFNDANKLGQGGFGTVYKGVLPDGREIAVKRLFSNNRHRAADFYNEVKLISSVEHKNLVRLLGCSCSGPESLLGYEFLPNKS

SEQ ID NO: 86375 - protein, 46 aa, Gossypium hirsutum
  Clone ID: LIB3166-053-P1-K1-E10.pep
WQLPVLTVQPFQLLVLVQVRDLKLMNSHVIYVSHVYLWYSISNTSI

SEQ ID NO: 86376 - protein, 52 aa, Gossypium hirsutum
  Clone ID: LIB3166-053-P1-K1-E6.pep
QISFYHLFFCFYKYINLLFAFLKYIFIFIFYIFLYFIFILFYFFFFNIFLLF

SEQ ID NO: 86377 - protein, 123 aa, Gossypium hirsutum
  unsure (1)..(123): unsure at all Xaa locations
  Clone ID: LIB3166-053-P1-K1-E8.pep
VWKFEASGIYSVKSGYRVLITDQLKTISYIGYNDSKYKDFXKLLWESQIPTKIKIHAWRLLNNYVPHFVNLFHRRLSADVACPLCKEIPEDSDNLLWKCGALQQLSVSLKVSFDRTHASAHAS

SEQ ID NO: 86378 - protein, 53 aa, Gossypium hirsutum
  Clone ID: LIB3166-053-P1-K1-E9.pep
EKHQHSDMKRSWFLKAIKSILRCQNFSQDIQVQVPANFLLTYQRRIGNIEYAK

SEQ ID NO: 86379 - protein, 107 aa, Gossypium hirsutum
  unsure (1)..(107): unsure at all Xaa locations
  Clone ID: LIB3166-053-P1-K1-F10.pep
PTRTQKGRLRPRATRLSTAARNRAQDLCNIDQFNLSYGARILLHHANMPLKRRHRYGLCGRNGSGKXTLMNAIINNQVDGLPPPTEVRTFYVHHDIDGCXAEISIID

SEQ ID NO: 86380 - protein, 66 aa, Gossypium hirsutum
  Clone ID: LIB3166-053-P1-K1-F12.pep
ADIISFTFNAEVVKKILQIPLETTANEDFQVWREEPSGKFSVRSAYKLSPEGTQNPINLQTESKVF

SEQ ID NO: 86381 - protein, 89 aa, Gossypium hirsutum
  Clone ID: LIB3166-053-P1-K1-F4.pep
ARVGEPLIYVEPQRLRRGRLNQKIDALTAAVLNVSTMDKALVQWDAVSYINELRAKIHRAHLEREVMQSPIKAWQKDLSSEASPPPDQD

SEQ ID NO: 86382 - protein, 48 aa, Gossypium hirsutum
  Clone ID: LIB3166-053-P1-K1-F6.pep
MEIWKEERKKVQKWGPMLCCTTDTESKTMNMNAVPNSPDLKKISWNYV

SEQ ID NO: 86383 - protein, 124 aa, Gossypium hirsutum
  Clone ID: LIB3166-053-P1-K1-G10.pep
ITGASISNAYPIFAQQGYENPREATWRIVCANCHLANKPVDIEVPQAVLPDTVFEAVVRIPYDMQLKQVLANGKKGALNVGAVLILPEGFELAPPDRISPEMKEKIGNLSFQNYRPTKKNILVI

SEQ ID NO: 86384 - protein, 63 aa, Gossypium hirsutum
  Clone ID: LIB3166-053-P1-K1-G11.pep
HASAVFHVGQVAKISPGVPIDEGCPISCGICTGLGATVNVVKPKKGQTVAVLGLIAVGLAAPE

SEQ ID NO: 86385 - protein, 58 aa, Gossypium hirsutum
  Clone ID: LIB3166-053-P1-K1-H5.pep
LDQQNDNIQKWIKKHDLKQATLVFIQSEKDLLQFQAAKQMLENHAMVSYNHKESNHNL

SEQ ID NO: 86386 - protein, 70 aa, Gossypium hirsutum
  Clone ID: LIB3166-053-P1-K1-H7.pep
NARNTDQGRLILSKITCKVRWELSVRRQQISSPNKDHMQAKQFSVDTSLNFNCYISVPSPLNYTLVSYLH

SEQ ID NO: 86387 - protein, 63 aa, Gossypium hirsutum
  Clone ID: LIB3166-053-P1-K1-H9.pep
KQNSSSGSPKVQEKREGRYMRRESSNRILATSVSSMVKRLSKLCVPANPKFLNFALILKKNKK

SEQ ID NO: 86388 - protein, 37 aa, Gossypium hirsutum
  Clone ID: LIB3166-054-P1-K1-A1.pep
HGACSITMHTLLSGQQPPSQNPAPPAMFSFRLVLMDS

SEQ ID NO: 86389 - protein, 46 aa, Gossypium hirsutum
  unsure (1)..(46): unsure at all Xaa locations
  Clone ID: LIB3166-054-P1-K1-A10.pep
GATHSSSHSCYNLFFFKNCLXLTAIIYLHIANIIFCLFSFKLTIST

SEQ ID NO: 86390 - protein, 80 aa, Gossypium hirsutum
  Clone ID: LIB3166-054-P1-K1-A4.pep
RVSLSKMKVWIAVLIVSWAYWISIVEPSCCIAVTENEHKLKIYTVRFTTERATRNSYLMFMKDLYNALTERADRSGDIPI

SEQ ID NO: 86391 - protein, 49 aa, Gossypium hirsutum
  unsure (1)..(49): unsure at all Xaa locations
  Clone ID: LIB3166-054-P1-K1-A6.pep
FLKAILSILLQVPKMFIDNINSPLQLVSSHTPCRITTLNIKISXTIKDV

SEQ ID NO: 86392 - protein, 97 aa, Gossypium hirsutum
  unsure (1)..(97): unsure at all Xaa locations
  Clone ID: LIB3166-054-P1-K1-A7.pep
ENTHNFLNNYLYNETSTKKYLLEPPNILLAIIRIRFRSFPPKFGPFVFILQHRGNHTLFSRRTSFLNQPFFRFPNLIAPPTPVKXLVIVGPNLPKNR

SEQ ID NO: 86393 - protein, 122 aa, Gossypium hirsutum
  Clone ID: LIB3166-054-P1-K1-A9.pep
MGSTGEYESQRRVPVPPSKPFLKSLQARLKETFFPDDPFRQFKNQPISNKFLLGLQYFVPIIEWAPLYTFDFFKADLIAGITVASLAVPQGISYASLASIPPILGLYSSFVPPLLYAMLGEL

SEQ ID NO: 86394 - protein, 89 aa, Gossypium hirsutum
  Clone ID: LIB3166-054-P1-K1-B1.pep
GSVLSLKVYVKPSKLVSYLIHSSKYDLKKKPLFSGRRTPWSTLSQMGPLYDTGLKGLISITASCDVIASRLRAYSNILLTNCYLRTRHR

SEQ ID NO: 86395 - protein, 105 aa, Gossypium hirsutum
  unsure (1)..(105): unsure at all Xaa locations
  Clone ID: LIB3166-054-P1-K1-B11.pep
GDQRDKSTEEEVIIREVGADQPSTCPENELDDRELDGSESKPPLNTSDILKAVEVVERDSRAIADSFSSLFASLRLALSEVTSGSVDHMXCXGDTAWRLKESGNE

SEQ ID NO: 86396 - protein, 92 aa, Gossypium hirsutum
  unsure (1)..(92): unsure at all Xaa locations
  Clone ID: LIB3166-054-P1-K1-B12.pep
VEDVNDEKERFXKKKTTINELSHEWSLVNNQKPILMIKPHEITNEEYSAFYKSLTNYLYYLFSVKHFSVYGQLEFKCYSSSLPKKATPFIFF

SEQ ID NO: 86397 - protein, 122 aa, Gossypium hirsutum
  Clone ID: LIB3166-054-P1-K1-B2.pep
PTRPLTSISREISSQTGWWENNKKLELLYLVNSSLSGHFQLPSTSRRGLSGLDVSSNSLDGNIPNEIGAKLPSLWVLNMSNNFFGGGIPISIGDMISLQILDFSNNKLSGGIPRHLPMLYIF

SEQ ID NO: 86398 - protein, 98 aa, Gossypium hirsutum
  Clone ID: LIB3166-054-P1-K1-B4.pep
INLKSNFNKPKPKAQYTQKNSKQQKASVLSKNGTKGSASHEKSPHSASTSPGSLLRTAVLNFSRHDRAPSTGRMGTVCILLITKTMVARLLAKQPLEI

SEQ ID NO: 86399 - protein, 38 aa, Gossypium hirsutum
  Clone ID: LIB3166-054-P1-K1-B5.pep
LLKVIFLKFLNLYSAVDCNFSDSLNSLFLLIKMYLFLF

SEQ ID NO: 86400 - protein, 97 aa, Gossypium hirsutum
  unsure (1)..(97): unsure at all Xaa locations
  Clone ID: LIB3166-054-P1-K1-B6.pep
RVKTDHLHFETLEFSGRAXYGSRAMESVWRMDFEMIMSVISNTLAIVFVVLQIFHVRRLPAVCPSVSFLMLVILALGHLMPXVLNLEAMFNQDSETT

SEQ ID NO: 86401 - protein, 48 aa, Gossypium hirsutum
  Clone ID: LIB3166-054-P1-K1-B7.pep
SFYLFYHLYLLSYLFPLLINLFNIFLSNIITFYTNFIINILYNISSYF

SEQ ID NO: 86402 - protein, 53 aa, Gossypium hirsutum
  Clone ID: LIB3166-054-P1-K1-C7.pep
ALVASTYYLFLHILFMLGGKHMRLISFPSLALTTSFLQYLINYLPTVQSTQLH

SEQ ID NO: 86403 - protein, 72 aa, Gossypium hirsutum
  Clone ID: LIB3166-054-P1-K1-D11.pep
TDILAIDPGVTWGGLLNWIEGLWSSCGNERIIIFTTNHKEKLDPALLRPGRMDVHIHMGYCTPTGFKKLATT

SEQ ID NO: 86404 - protein, 52 aa, Gossypium hirsutum
  Clone ID: LIB3166-054-P1-K1-D4.pep
LITHGFSLFFYIHIIKLACQYLKVVRHTQNVNKFSHPTLLHCLLYHTHKNCF

SEQ ID NO: 86405 - protein, 100 aa, Gossypium hirsutum
  Clone ID: LIB3166-054-P1-K1-D5.pep
PRVRPRVRLKQGPLDFSRLAHLKVLDLSGNRLYSHLPTIPKGLIMVSLNRNSFNGEIPTQYTLLTHLQHLDISFNSLIRIPPASLFSFSNISSLNLHSNM

SEQ ID NO: 86406 - protein, 115 aa, Gossypium hirsutum
  Clone ID: LIB3166-054-P1-K1-D7.pep
ISSQKENHCSFVSHTRGRSPGSLLTELIGDSNQVTSFSGLRNSDTTTSVPSANSHLIPLSDWFDRCRGFFHLESRRFTSSSPCCHRMCRFICSPSFLTIVSESPSIMAVSNPKSF

SEQ ID NO: 86407 - protein, 84 aa, Gossypium hirsutum
  Clone ID: LIB3166-054-P1-K1-E5.pep
NLLTSGLASHLHGIWRNPFIFSLLSFIIRFLSIFQVSKERIMESKGYRKLNLTHKSHLLFCFSVWVLGSIITTATTCQRGNALF

SEQ ID NO: 86408 - protein, 66 aa, Gossypium hirsutum
  Clone ID: LIB3166-054-P1-K1-E8.pep
TADWAISNNMDYSFLMLPTDKARAIISHLSSLSLRVRKQAIMHQQPQELSYSMPEIGATKPACNLN

SEQ ID NO: 86409 - protein, 67 aa, Gossypium hirsutum
  Clone ID: LIB3166-054-P1-K1-F1.pep
VEEGIKGSKIDSKGNEGIFSSYALRNPPNCVRKKTLFFFLFVLDRSRFSQKNPNRSWNVKRKTMGSA

SEQ ID NO: 86410 - protein, 128 aa, Gossypium hirsutum
  Clone ID: LIB3166-054-P1-K1-F12.pep
NSPSSWLLLEICNNLHPRSTSVPTQAWPNIGYQIPGMMMPVGAQADLQKLMQTMQIGQTQQAGNNVASSSFYALGQATPASSVATNGASKPQSASPVSITNSLQAGKDYDFSSMTQGMFTKRLVATRG

SEQ ID NO: 86411 - protein, 77 aa, Gossypium hirsutum
  unsure (1)..(77): unsure at all Xaa locations
  Clone ID: LIB3166-054-P1-K1-F2.pep
PTRXKAPLFRPRGFCLFFPGKLSGKKIKNLIFVFRPGRSLDCLTLGIYFRLLQYRSRNVPPYLSLPFSLSLFLLQEP

SEQ ID NO: 86412 - protein, 99 aa, Gossypium hirsutum
  unsure (1)..(99): unsure at all Xaa locations
  Clone ID: LIB3166-054-P1-K1-F3.pep
GKTYMCRISNVGLSTSLNFRIHGHKMKLVXVEGSHVIQNLYDSLDVHVGQSITILVTLDQPPKNYYIVASTRFTKTVLTATAVLHYANSNAPVSGPVPA

SEQ ID NO: 86413 - protein, 60 aa, Gossypium hirsutum
  Clone ID: LIB3166-054-P1-K1-F4.pep
AKTQDLWSTANIQATDHRVENTKPTDRSHTHELKPCRNLCLRLRHTGSSTDATCRSYLDL

SEQ ID NO: 86414 - protein, 88 aa, Gossypium hirsutum
  unsure (1)..(88): unsure at all Xaa locations
  Clone ID: LIB3166-054-P1-K1-F5.pep
GVHNYXLQVSFSTPQPINEMGFVQFEENQVLSLLALAHSSHHHQISQPLNTTTTTTNSTAMGFTTHNNNQVVNTEDPQAANDENNCSK

SEQ ID NO: 86415 - protein, 90 aa, Gossypium hirsutum
  Clone ID: LIB3166-054-P1-K1-F6.pep
MVSMVSGSAEPLCASGRSSEKLSLPSLQSKMKTDPEGYETELHLIRNQFYSALELFQQQAALNFSSISGVGADPTVAKDLSDRAMFLAHV

SEQ ID NO: 86416 - protein, 69 aa, Gossypium hirsutum
  Clone ID: LIB3166-054-P1-K1-F7.pep
GGILREGYESFAMYCFGRYLVACLGGEERTIEFMERLGYASSKTPLLGLDCEKGTVKHPFSYELYPKTM

SEQ ID NO: 86417 - protein, 71 aa, Gossypium hirsutum
  Clone ID: LIB3166-054-P1-K1-F8.pep
RKLHDTKAVKVPESAAIKEDLIKAAVKSMPAQKQKTVEYKETATITIKNTNMENTKETVFQRLYPNTDTIV

SEQ ID NO: 86418 - protein, 87 aa, Gossypium hirsutum
  Clone ID: LIB3166-054-P1-K1-G2.pep
HVPNYVKLKVFKVNIFVNIGNKEQGKLVTYRSYNPQMVFFMETKINSRQIEKIRVSYGFFNGIDVSSEGTRGGLCLAWRNDINVQLQ

SEQ ID NO: 86419 - protein, 39 aa, Gossypium hirsutum
  Clone ID: LIB3166-054-P1-K1-G7.pep
LHFHNTPTFFLNSQHHSEVFLNPYPHLKSPFLHFFYPFN

SEQ ID NO: 86420 - protein, 104 aa, Gossypium hirsutum
  unsure (1)..(104): unsure at all Xaa locations
  Clone ID: LIB3166-054-P1-K1-H10.pep
MEMANATENGSAHTQPPTTTAQNPSEAAPLNPAIEKWPGWPGHCVFRLIVPVLKVGSIIGRKGELIXKMCEETRARIPVLDGALGTCCPIVLGFWKEEPEALFF

SEQ ID NO: 86421 - protein, 66 aa, Gossypium hirsutum
  unsure (1)..(66): unsure at all Xaa locations
  Clone ID: LIB3166-054-P1-K1-H6.pep
AFSTFLFLLFCFKRRGFGVLARERNISWLNLVCYPFFLGFSIAXSPWFKTFWXYGITIGHWLVHHY

SEQ ID NO: 86422 - protein, 91 aa, Gossypium hirsutum
  Clone ID: LIB3166-054-P1-K1-H9.pep
STLLFLLQKSLKAAGSSGASPSRKPTAATSLFGRMTMGFRSSPSSNNLAAAAALAVVRQVEAKYPALLFKQQLAAYVEKIYGIIRDNLKKE

SEQ ID NO: 86423 - protein, 102 aa, Gossypium hirsutum
  Clone ID: LIB3166-055-P1-K1-A11.pep
QTLLFVEGINTLLQTLCGARLPTVIGGSYAFMVPIISIIHDTTLLSIEDNHMRFLYTMRAVQGALIVASSIQIILGYSQMWAICTRFFSPLGMIPVIALVGF

SEQ ID NO: 86424 - protein, 65 aa, Gossypium hirsutum
  unsure (1)..(65): unsure at all Xaa locations
  Clone ID: LIB3166-055-P1-K1-A3.pep
MCLPSQTSHLTISSARICRPKPSLFSKRGAVPRSSIHGISKITFKVVVLXFLPKAPTYPTPFKSF

SEQ ID NO: 86425 - protein, 127 aa, Gossypium hirsutum
  unsure (1)..(127): unsure at all Xaa locations
  Clone ID: LIB3166-055-P1-K1-B11.pep
VSISGEPVQRLGAYMVGGWVARKEASXSSIYRALHCREPEGKDLLSYMQVLYEICPYLKFGHMAANGAIAEACRTEDRIHIIDFQIAQGTQWMTLLQALAARPGGAPHVRITGIDDPISKYARGGGL

SEQ ID NO: 86426 - protein, 63 aa, Gossypium hirsutum
  Clone ID: LIB3166-055-P1-K1-B2.pep
CVHDDWRVCVLGCMSKKYPPYKTQTINLLKHQTLIGAYHVNYKPLTANPMVVYTYLNTFHLAL

SEQ ID NO: 86427 - protein, 131 aa, Gossypium hirsutum
  Clone ID: LIB3166-055-P1-K1-B4.pep
ISITVSLLRIILFVARPRTMVLGNIPNSGIYRSMDQYQIANSVPGILILQIDAPVFFANAIYLRERISRWIYEEEDGLKSAGEASLHYVILDLSAVGSIDTSGISMLEELMKNVHRKGLQLVLANPQSEVM

SEQ ID NO: 86428 - protein, 92 aa, Gossypium hirsutum
  unsure (1)..(92): unsure at all Xaa locations
  Clone ID: LIB3166-055-P1-K1-B7.pep
IALSSNGSISLYICFNCNGCFNIKFSISXPIGITHNATVKRRSFTTHHHYDTSYDSNFFTLPNRGSNSPNPIIGPTPINNLITSLTIASSPT

SEQ ID NO: 86429 - protein, 94 aa, Gossypium hirsutum
  Clone ID: LIB3166-055-P1-K1-B9.pep
YEMWWATFWHTSRCFITMWRLRDYNKVKDRLGFTGSRNSNRFKIGDYKMSECRTRLIDDRGNHKRYSEYEKPFSRSSISFYSKDRKLFCPFHSQ

SEQ ID NO: 86430 - protein, 103 aa, Gossypium hirsutum
  Clone ID: LIB3166-055-P1-K1-C3.pep
MNKVDSKNLKSCWWDSHLNPENSEWLAENSKEMDLNVKQIMKLVEDNSEDVTKSEVIVQVQELYRIYRNLAERFDRLTGELSKTQGPDSGLDQISPMVTPDKP

SEQ ID NO: 86431 - protein, 120 aa, Gossypium hirsutum
  unsure (1)..(120): unsure at all Xaa locations
  Clone ID: LIB3166-055-P1-K1-C5.pep
AKACSRATEDEFTRIFGCCDTRNLIVLQLDLCGSCIPDYVLQDTLAHSSKSLXVLVTLXLNGAYRLTDPRLNALALSAPALQSLNLSQCSLLTSSGIKXLANCFESTLRELYLDECHNIE

SEQ ID NO: 86432 - protein, 69 aa, Gossypium hirsutum
  unsure (1)..(69): unsure at all Xaa locations
  Clone ID: LIB3166-055-P1-K1-C9.pep
IARNGFGRIGRXFARVGLESYHIELLALNSPFITTEYMTYIFKYDRVLGQRMHHELKVKDSETLLFGDK

SEQ ID NO: 86433 - protein, 44 aa, Gossypium hirsutum
  Clone ID: LIB3166-055-P1-K1-D1.pep
CSSSCVQHSLLGSSHHLLLNPPISLIISPCLPDCLVQPWKPEQV

SEQ ID NO: 86434 - protein, 129 aa, Gossypium hirsutum
  Clone ID: LIB3166-055-P1-K1-D10.pep
PLHPYRLFVTETFKDLPSAAVSLMDTLLSIDPVHRRTAAFALKSEFFTTQPFACDPSSLPKYPPSKEIDAKLRDKEARRQRAVGSRGSRVDMERRGQKEPISNAEQTASSQRRQPHPNFEEQELDVELS

SEQ ID NO: 86435 - protein, 105 aa, Gossypium hirsutum
  unsure (1)..(105): unsure at all Xaa locations
  Clone ID: LIB3166-055-P1-K1-D2.pep
PRRFFALSYDVIQKPHLKXFKISPDGKKSPDVEIPVDGPTMMHDFAITENFVVIPDQQVVFKLGEMIHGGSPVVYDKNKVSRFGVLNKNAIDAFGIKWIEPPVCF

SEQ ID NO: 86436 - protein, 130 aa, Gossypium hirsutum
  Clone ID: LIB3166-055-P1-K1-D3.pep
TIFAFESVSAVRLQAINSVVRLSESVLSLLTDFESTIHKDSSKSMTPGSGLHRLTMYSMDYLTLLADYCNILTDIISDWPPPAKSSLPESFFNSPVSDDSPRPAISVRIAWLILVLLCKLDCKSKHYKDV

SEQ ID NO: 86437 - protein, 49 aa, Gossypium hirsutum
  Clone ID: LIB3166-055-P1-K1-D5.pep
DRFVHSVAFDNRRYRFSHRIDILAPNKIKTIFKHKAGPTLMKFDRRSLG

SEQ ID NO: 86438 - protein, 117 aa, Gossypium hirsutum
  Clone ID: LIB3166-055-P1-K1-E11.pep
MATNAGGLICLLIIALDITAGILGIEAEKAENKAMHLGAGHVECRNTSSQAYRLGFAALVLLSLAHVIGTLLGGCVCIWRKGNSNKASVIKYLAVAFLIISWIILVVGLIMLIIGTL

SEQ ID NO: 86439 - protein, 72 aa, Gossypium hirsutum
  unsure (1)..(72): unsure at all Xaa locations
  Clone ID: LIB3166-055-P1-K1-E3.pep
MASEVEKKAVFDIHSAKEAVQELRASFVAGKTKDYXWRRTQLKAMLKMMDENEPQIVAALRDDLFKPGLESF

SEQ ID NO: 86440 - protein, 67 aa, Gossypium hirsutum
  unsure (1)..(67): unsure at all Xaa locations
  Clone ID: LIB3166-055-P1-K1-E6.pep
ITKKPFEPSSMMANCYPRHFKNISCCXTYLSDIMPNDVNSSVFTINSHTTIXFLNLFPTRFKFIYNY

SEQ ID NO: 86441 - protein, 118 aa, Gossypium hirsutum
  Clone ID: LIB3166-055-P1-K1-E7.pep
MAFSPGGRHPHPHLLFFTLLSLFLISHARLTLHHSDLKALSTIVKNLGINAQPFPSTNPCTAAGVFCERRLTHNETYVLKITRLVFKSKGLDGFLSPEIGKLTELKELTVSHNNIVYQ

SEQ ID NO: 86442 - protein, 129 aa, Gossypium hirsutum
  Clone ID: LIB3166-055-P1-K1-F11.pep
MRECLMLENEDLKKRMEQLQEDRCADAEELVYLRWINACLRYELRNFTPIPGKTVAKDLNKSLSHKSEEKAKQLILEYARAEGMDSMDFDCDQWSCSQAFYSTDNGEADDFSFGNSSAKKTPNSRRIKF

SEQ ID NO: 86443 - protein, 51 aa, Gossypium hirsutum
  Clone ID: LIB3166-055-P1-K1-F8.pep
GLIDQNQIQLDNNITDLQILFVFKHIVWITVILVVLLTPLLHILHPENENT

SEQ ID NO: 86444 - protein, 58 aa, Gossypium hirsutum
  unsure (1)..(58): unsure at all Xaa locations
  Clone ID: LIB3166-055-P1-K1-G1.pep
LRRTARRTSTVGKTGTHVGGVILSIPXTDIIMHIEIKNTGTSLMEQQERISDTLDANS

SEQ ID NO: 86445 - protein, 70 aa, Gossypium hirsutum
  unsure (1)..(70): unsure at all Xaa locations
  Clone ID: LIB3166-055-P1-K1-G11.pep
MYSTNLYTTCTSLCILRLGLTHMTRTPIDLLKHNMQTDPAKYKSISSXGFGVLFNEQGVMGLMHRHMATL

SEQ ID NO: 86446 - protein, 39 aa, Gossypium hirsutum
  Clone ID: LIB3166-055-P1-K1-G5.pep
VLVIHVPTSHGQPHWMHCTIIYIQLNHFHSFLKDIFFSF

SEQ ID NO: 86447 - protein, 34 aa, Gossypium hirsutum
  Clone ID: LIB3166-055-P1-K1-G7.pep
VKGNIGWEVFANRSEHPSQVGCTFLKGHVNSFVC

SEQ ID NO: 86448 - protein, 69 aa, Gossypium hirsutum
  Clone ID: LIB3166-055-P1-K1-G9.pep
KLSLFQTPSLDASLMWFAQLIMPGLGLCIIRTAHFQVKFLSFFKHFCCRVMSRVVGKPGGVKKSDILNF

SEQ ID NO: 86449 - protein, 39 aa, Gossypium hirsutum
  Clone ID: LIB3166-055-P1-K1-H4.pep
LYDKHCLDLTCVFYFPFNLMRGVHRRSFLLSKWQPALII

SEQ ID NO: 86450 - protein, 53 aa, Gossypium hirsutum
  Clone ID: LIB3166-055-P1-K1-H6.pep
HNPSRLKVQWGLLVYDSFQTLPPTVFPIQTCSASPLQIKRFIQCYHIGSSALP

SEQ ID NO: 86451 - protein, 58 aa, Gossypium hirsutum
  unsure (1)..(58): unsure at all Xaa locations
  Clone ID: LIB3166-056-P1-K1-A4.pep
LLSQANSLSLDSQXIECVVGLPXILLKRPGSDLSLPSILLNSHMDEGPFEPSKMTHPP

SEQ ID NO: 86452 - protein, 76 aa, Gossypium hirsutum
  unsure (1)..(76): unsure at all Xaa locations
  Clone ID: LIB3166-056-P1-K1-A7.pep
PFFXQPSTVAPIHFQXXTDPPXXLHSSTHFPHFLFPFFHKSLTPYPTALLPFFSTSTXDPPQLHSFPELEIQAIDY

SEQ ID NO: 86453 - protein, 108 aa, Gossypium hirsutum
  unsure (1)..(108): unsure at all Xaa locations
  Clone ID: LIB3166-056-P1-K1-B11.pep
TYLETVFTTRACTTQCFHRLMASPKSTTMSFDISCSHSKGFLRIFMEMKSXHFDLPLHGDGVLGSIKGASFLQRNADFGSNLMTXIIXGATSFQKSNTFSSSAICSLR

SEQ ID NO: 86454 - protein, 62 aa, Gossypium hirsutum
  unsure (1)..(62): unsure at all Xaa locations
  Clone ID: LIB3166-056-P1-K1-B4.pep
KSRAEKGKSQKXANSIDKVAAHVXEVQTEKAPPLLEXPIKRLXXKENIRKKKTTSRGKXNQK

SEQ ID NO: 86455 - protein, 86 aa, Gossypium hirsutum
  unsure (1)..(86): unsure at all Xaa locations
  Clone ID: LIB3166-056-P1-K1-B8.pep
MYVCVLXITXPSVXRSPISLDEMISPVSLCTGVTFDRSCILLWLVSGHDTCPATMQVLPSMDFIPNLTLHXLINLWIQSSLRPGSY

SEQ ID NO: 86456 - protein, 92 aa, Gossypium hirsutum
  unsure (1)..(92): unsure at all Xaa locations
  Clone ID: LIB3166-056-P1-K1-C11.pep
GTSKQHEAKDYAKRLLIGYDEAAKEXETSLASITRSSSNTDRGNKETKFQQCLLLNISYCPSSDVDLSCGKNLEVVVYNPXGWKREDIIRIP

SEQ ID NO: 86457 - protein, 91 aa, Gossypium hirsutum
  unsure (1)..(91): unsure at all Xaa locations
  Clone ID: LIB3166-056-P1-K1-C6.pep
SPYFLSASLLSMVLGYPSYLGAGGLXASFKYSSAVLMLLVGWLRLASCPLXLPPPXLWLFLXPPXVVVVVAGVWRPFACAERXXXCLVGIA

SEQ ID NO: 86458 - protein, 109 aa, Gossypium hirsutum
  unsure (1)..(109): unsure at all Xaa locations
  Clone ID: LIB3166-056-P1-K1-D4.pep
RSRGVVFVFLFWWFGANVVVWVRVXGXKXXXSRSFCGVWVCVAALLRPPSLCSIHSFSLPACIRVLMXLFMCVAGFFPHLLSLLLICXFYRXLFSLCFHPGQLCCCCVF

SEQ ID NO: 86459 - protein, 57 aa, Gossypium hirsutum
  unsure (1)..(57): unsure at all Xaa locations
  Clone ID: LIB3166-056-P1-K1-D7.pep
MHVLHRSQMTDNFPGISALRSIYDAIPVTVIDYLLSXYFLHPGLLSRLFLATFGRLF

SEQ ID NO: 86460 - protein, 75 aa, Gossypium hirsutum
  unsure (1)..(75): unsure at all Xaa locations
  Clone ID: LIB3166-056-P1-K1-E1.pep
SAHASAHASVELSVGGLDKASCCVRKRIVDXGXXTHMPSRGKTRLSILGVXDXPXXNPKPPEFWLLPSFLPMHPA

SEQ ID NO: 86461 - protein, 90 aa, Gossypium hirsutum
  unsure (1)..(90): unsure at all Xaa locations
  Clone ID: LIB3166-056-P1-K1-E10.pep
LALVRVFYPYNRXALFDVLVXIYALTSGIAGYTASSFYCQLERTNRERNLLLTGIXXSRPLFVTFCFLNTXAIAYKSTSALPLGTIEEIF

SEQ ID NO: 86462 - protein, 64 aa, Gossypium hirsutum
  unsure (1)..(64): unsure at all Xaa locations
  Clone ID: LIB3166-056-P1-K1-F1.pep
MLLGPAKMLGSXSLLAATPFAFRSFSPSPNNNRFLSSAINHQIAKQLATESGRGSQKLLRRHVF

SEQ ID NO: 86463 - protein, 52 aa, Gossypium hirsutum
  Clone ID: LIB3166-056-P1-K1-F12.pep
QIPKFKKQFLGKFKDRYRLSRLLKTIFRIRLSVYGDQISNRIQVSKSLPFNL

SEQ ID NO: 86464 - protein, 37 aa, Gossypium hirsutum
  unsure (1)..(37): unsure at all Xaa locations
  Clone ID: LIB3166-056-P1-K1-F4.pep
KNIATXSSLAVGESPPTKTQRACLVAWKQXKKSYKFC

SEQ ID NO: 86465 - protein, 63 aa, Gossypium hirsutum
  Clone ID: LIB3166-056-P1-K1-F8.pep
DVRICLFPRDKGAECHWVGDSQGAQLIRSRLCCSKLYKLSPVFLLCSFNFKIFFIYIIRNLIF

SEQ ID NO: 86466 - protein, 59 aa, Gossypium hirsutum
  unsure (1)..(59): unsure at all Xaa locations
  Clone ID: LIB3166-056-P1-K1-G9.pep
KKHPLVYTQSQSIHARWMVPCQDTPAARIXYSALLKVPRELSAVMSARHVDRMSPVSGE

SEQ ID NO: 86467 - protein, 44 aa, Gossypium hirsutum
  unsure (1)..(44): unsure at all Xaa locations
  Clone ID: LIB3166-056-P1-K1-H1.pep
LASGLPGLSRVVKXQENVSWIRPLIRVSKSSPPPVLFLHHRLLL

SEQ ID NO: 86468 - protein, 62 aa, Gossypium hirsutum
  unsure (1)..(62): unsure at all Xaa locations
  Clone ID: LIB3166-056-P1-K1-H5.pep
DSLCTSSRRLFFRFAKISSLSQAPSFSHKRISIFRKVLSFCPLYLTLRISGYICWNSMHXLL

SEQ ID NO: 86469 - protein, 106 aa, Gossypium hirsutum
  unsure (1)..(106): unsure at all Xaa locations
  Clone ID: LIB3166-056-P1-K1-H6.pep
PSFFPPAAPSPKLFGPVTPGPAHSPFHHXPVAMPPSGSSPVPALAPEPLAMPPSGSSPXPALAPRPFAXSPSALTPGPAQXPYHHGPISNPPTASSPAPYSSPELS

SEQ ID NO: 86470 - protein, 99 aa, Gossypium hirsutum
  unsure (1)..(99): unsure at all Xaa locations
  Clone ID: LIB3166-057-P1-K1-A3.pep
MASGDVQYQCFIXGIEWTINHTPFEEAXRAYGEISAXAIINERETGRSRGYGLHTLRDEKSMRDAIEGMNGQSIDGRNITDNGPQSRQIQHLSGGRRFG

SEQ ID NO: 86471 - protein, 62 aa, Gossypium hirsutum
  Clone ID: LIB3166-057-P1-K1-A8.pep
AVHQEAFTYLDGQKEFAQIDPNDLYPYLLVNIGSGVSMIKVDGDGKFERVSGTSLGGGTFWG

SEQ ID NO: 86472 - protein, 70 aa, Gossypium hirsutum
  Clone ID: LIB3166-057-P1-K1-B10.pep
MDMSSSNPQFYAIFPFNLCPPQSFQLQKVLHLTCSLIILISVAVKSTISLNLDKVRHSRLVEELLQVEPS

SEQ ID NO: 86473 - protein, 118 aa, Gossypium hirsutum
  Clone ID: LIB3166-057-P1-K1-B3.pep
GEVLDLSWSKNKHILSSAVDKTVRLWQVGYEECLKVFSHNNYVTCVQFNPVDDDYFISGSLDGKVRIWAIPGRQVVDWTDMTDIVTAVCYRPNGKGAVVGSMNGNCHFYDASDNCLQL

SEQ ID NO: 86474 - protein, 50 aa, Gossypium hirsutum
  Clone ID: LIB3166-057-P1-K1-C1.pep
VIRQVYTGSQTSTANVTELGFRNNVVCYPPSCSSNEKALGITSGSTGIAG

SEQ ID NO: 86475 - protein, 95 aa, Gossypium hirsutum
  Clone ID: LIB3166-057-P1-K1-C12.pep
VINCRPLLVLSCQLYVIQSTYLLLTLLLLVPIWDANAQPLAAIKKETFICFSLAKHFQLPNKPVTKSRNTQLIKLNKQISITKDKSHKEYNLIGK

SEQ ID NO: 86476 - protein, 58 aa, Gossypium hirsutum
  Clone ID: LIB3166-057-P1-K1-D1.pep
TLVFKPCFFFYISLYFILSLIHHFYSEFFYFKCKSIVYLHLNYLVNHQKVVSLSSLEG

SEQ ID NO: 86477 - protein, 78 aa, Gossypium hirsutum
  Clone ID: LIB3166-057-P1-K1-D12.pep
MLWGLMNLFSLCWKPFGPDGENHETNGVLGGGGGTTGGSREGKDGLLWFRDIGKYGSGEFSMAVVQANQVLEDQSQIE

SEQ ID NO: 86478 - protein, 117 aa, Gossypium hirsutum
  Clone ID: LIB3166-057-P1-K1-D3.pep
ASTDPNLFVWPIMEYGGPMQSPGGSVLWNGISTGARVKNTSSDWWYEDASTLSFPRYKRLIAVMESRGIRQEIIAGSLTFYAKKYLPGLNRCLGATDTNSSTCVAPVALEAPPSEED

SEQ ID NO: 86479 - protein, 94 aa, Gossypium hirsutum
  Clone ID: LIB3166-057-P1-K1-D4.pep
MPGFGGVGLQLETPNRDGPTRDLRDHLPSLMSSSYPITLKFIDVCYKVKIQQTNTRGRSIKRMLTHGSTPSDQISTIQEKTILKNITGVVSPGE

SEQ ID NO: 86480 - protein, 119 aa, Gossypium hirsutum
  Clone ID: LIB3166-057-P1-K1-E10.pep
EKDQLIYCWIGEGLLDERTNLSSARNQGHFIIGSLIDACLLEKGPNNDYVKMHDVIRDMALWIAGESEKKFFVKAGTQLKEQPEAEKLEEVIRMSLMDNRIENLTKILACPNLQTLFLG

SEQ ID NO: 86481 - protein, 120 aa, Gossypium hirsutum
  Clone ID: LIB3166-057-P1-K1-E4.pep
EVLVLSQINHRNVVKLLGCCLETEVPLLVYEFITNGTLADHLHDKLSASSLPWEMRLKVAAETAGALAYLHSATSMPIIHRDVKTSNILLDNSYTTKVSDFGASRLVPLDQTQLTTLVQG

SEQ ID NO: 86482 - protein, 131 aa, Gossypium hirsutum
  unsure (1)..(131): unsure at all Xaa locations
  Clone ID: LIB3166-057-P1-K1-F10.pep
LLXVSFSCFGFLFLGRSSLYQXVQGFYTDLWVFFAPXLLXWLSSSXXFSSQPSXXPSDSLXNLLTHTRGWATFQHXXPQTLVYKTVHPHASFXTVPTPIXPPLCPXAFHQQLLHLLLQSAALLLSPQKAHL

SEQ ID NO: 86483 - protein, 111 aa, Gossypium hirsutum
  Clone ID: LIB3166-057-P1-K1-F3.pep
LRENHYSFDVCLSVCLSTKSADGLKNYPRHATAAKLQMQKMLEMEQLANVQGLPTERNTLNKLMALHPGINNQTGNNHNIVGRGALSSSAQTALILTNYQNLLVRQNSMNS

SEQ ID NO: 86484 - protein, 113 aa, Gossypium hirsutum
  unsure (1)..(113): unsure at all Xaa locations
  Clone ID: LIB3166-057-P1-K1-G11.pep
VYASGENQSXXFPXRCPXXSXFLXXFNXXDXXLPXCKXYAXLKPXXNRXXLXXYWXXFXXWQGXXLFHXXEXVCXTTXXIVXEEPQVVTEPXXIHKXWLRAIXXFNCDAHVAL

SEQ ID NO: 86485 - protein, 69 aa, Gossypium hirsutum
  Clone ID: LIB3166-057-P1-K1-G12.pep
DTSYNTNDNIQDKVRIPAGLQPVIQRVIQLGNHLTYGHSIIDNEINMDFTLHLLLGIHIFMQILTETII

SEQ ID NO: 86486 - protein, 105 aa, Gossypium hirsutum
  Clone ID: LIB3166-057-P1-K1-G2.pep
QWRSGKNAEVCETKESSSEQKMNAPDVQISSQQVGIIDSSQREERESRKRPEFDLNCSLQEKQEYFADHVEADDANDGKRLKSCFGGMAVDRNRIKDIINDRCSL

SEQ ID NO: 86487 - protein, 121 aa, Gossypium hirsutum
  Clone ID: LIB3166-057-P1-K1-H5.pep
FASSPLLVNLYQSAELSKASKPFAFKHNIPTSAPDVLYRWHLPEPSAIDVSGNSDCSTAKSRTAVVLLGWLGSKQKHLKKYADWYTSRRYHVITFTFPMIDIINYQDGGKAEKDVDMLVNH

SEQ ID NO: 86488 - protein, 120 aa, Gossypium hirsutum
  Clone ID: LIB3166-057-P1-K1-H9.pep
PRVRPRVRFYFTELLVLKGREDEYGHTLGLVTSIDLSANSLIGEIPKEIGSLVGLLSLNFSRNFLTGRIPDNIGNMELMESLDLSMNRLNGEIPPSFSKLNFLNHFNLSYNNLTGQILTS

SEQ ID NO: 86489 - protein, 53 aa, Gossypium hirsutum
  Clone ID: LIB3166-058-P1-K1-A10.pep
RCQAVLKPKKVCKISRYPQIFLDRPSGLSVKIERGLFLVIKPSTLFSLVLNCV

SEQ ID NO: 86490 - protein, 54 aa, Gossypium hirsutum
  Clone ID: LIB3166-058-P1-K1-A7.pep
TKTTRAGLIYILPTTHKGSSTLNTSRRWSLKSKSSKECATTYLPNQLVPYIDGA

SEQ ID NO: 86491 - protein, 95 aa, Gossypium hirsutum
  unsure (1)..(95): unsure at all Xaa locations
  Clone ID: LIB3166-058-P1-K1-B10.pep
NXTTFVSQWSXPSIGGFNIXTNPQIXXQGQVYCSSGRCGGGWNNIIGCWNTREREVNPFDYNYEADVNDQAFDEQENSVIKFLCLLRHSLWKCSG

SEQ ID NO: 86492 - protein, 95 aa, Gossypium hirsutum
  unsure (1)..(95): unsure at all Xaa locations
  Clone ID: LIB3166-058-P1-K1-B12.pep
MSQIRRDAMVFFLPDSTTSNPLPLLSLNHXXSFVCKSVSKSVRFYEQVLGFVLIKRPSSFNFEGAWLFNYGIGIHLLESESVPTKKEKINPKDNH

SEQ ID NO: 86493 - protein, 94 aa, Gossypium hirsutum
  unsure (1)..(94): unsure at all Xaa locations
  Clone ID: LIB3166-058-P1-K1-B4.pep
FTNPQILRQGQVYCSSGPGGCGWNNKIVCLNMREREVNPFDYYDXSYFNDQTFDEQYNSLNNFNSYXDIPVEISGENVPPPLKTFVDLYLSELF

SEQ ID NO: 86494 - protein, 95 aa, Gossypium hirsutum
  unsure (1)..(95): unsure at all Xaa locations
  Clone ID: LIB3166-058-P1-K1-B9.pep
PGDPHVPPFLLLMLPGHNGLRDVFINITPHLLKPPNIVHPFSLFLMININIKYYTHPNXNSILXTPNKHLSHHKSIHNNQHNPLIITTTLLFYKL

SEQ ID NO: 86495 - protein, 107 aa, Gossypium hirsutum
  Clone ID: LIB3166-058-P1-K1-C11.pep
VLCDHTVGYNSIDYLLLPSNYVGQSPLIDWLSVTSVTFSYEKACKNHVNCNADMIQIKSGLVCTCMIQNSLVSTPHNGHAYIISGLLTNINANSLLRLSDGRLMTYK

SEQ ID NO: 86496 - protein, 81 aa, Gossypium hirsutum
  Clone ID: LIB3166-058-P1-K1-C3.pep
PGRPRVRPTSKKQKLFYPKKTGWELGVYPSYTTRLHTRLPMGHWILQTPQIQISICQDPNQETIHHLKHINILLKLPYLLA

SEQ ID NO: 86497 - protein, 116 aa, Gossypium hirsutum
  unsure (1)..(116): unsure at all Xaa locations
  Clone ID: LIB3166-058-P1-K1-C9.pep
DSWAETNMYGCKASCXSNCSCMVAFYDNSSRNCFLFDQVGSFQNSNQPSNLVAFVKMSSNANGVGNGGGNKSFPYVAIIVVSTVLVILGLLFVSYRYYKKKKKVPGSPVDSSEEDI

SEQ ID NO: 86498 - protein, 57 aa, Gossypium hirsutum
  Clone ID: LIB3166-058-P1-K1-D8.pep
VWFLVGYLKLHIKGSMVVVYVMSCNVIGKKKFYIVITSVYHVLLLFELCRSLFEGCK

SEQ ID NO: 86499 - protein, 53 aa, Gossypium hirsutum
  Clone ID: LIB3166-058-P1-K1-E10.pep
ARQLVGSTLLAEEEDRPHLEKGEFYTRDLVGMRAILKVMYLFAHQPLIFHIQV

SEQ ID NO: 86500 - protein, 124 aa, Gossypium hirsutum
  Clone ID: LIB3166-058-P1-K1-E2.pep
RAGRRVRPRVRYAALLFLKSLSKGESSEPWLNTHGDFNRVFLIGDSSGGNIVHEVATRSGFIDLNPLRLAGVIPIHPGFVRAQRSKSELEQPESPFLTLDMVDTFLALALPNGCTKDHPITCPM

SEQ ID NO: 86501 - protein, 46 aa, Gossypium hirsutum
  unsure (1)..(46): unsure at all Xaa locations
  Clone ID: LIB3166-058-P1-K1-E3.pep
NKVPVCFINFGIVQSLRRNNIFMIPPIKFNISTHVNYFFRXASAGP

SEQ ID NO: 86502 - protein, 39 aa, Gossypium hirsutum
  Clone ID: LIB3166-058-P1-K1-E4.pep
CVIFLACFHISKFKYFVVNSFINKKKIYTRIMYITLLLN

SEQ ID NO: 86503 - protein, 60 aa, Gossypium hirsutum
  Clone ID: LIB3166-058-P1-K1-E5.pep
RDSCWKENLRRQITSCYELLSVDTFHLNVNDILKPYSKFSDTGAFPFKFNGLKMLILDIT

SEQ ID NO: 86504 - protein, 110 aa, Gossypium hirsutum
  Clone ID: LIB3166-058-P1-K1-E6.pep
PRFPQPGDQIYCERKGGLYDHHGIYVGDDMVIHLRGAAKKLGELPACHKCGDKRVENGEIAKVCIDCFLDGATLQIFDYGVPLLEFIARKRGTCCQRDSKPPHEVISTAT

SEQ ID NO: 86505 - protein, 75 aa, Gossypium hirsutum
  unsure (1)..(75): unsure at all Xaa locations
  Clone ID: LIB3166-058-P1-K1-F12.pep
RPIKNGSGIGLEFAVLTLGRVCADNIRNXGLLVREGGIPPLVALSQTGSVRAKHKAETLLGYLREPRQDASSSSP

SEQ ID NO: 86506 - protein, 54 aa, Gossypium hirsutum
  Clone ID: LIB3166-058-P1-K1-F5.pep
KLSISRLHIYAMAKKGGQRGHRCLISKEIERRTGIHYTHEPIPTIMFLGSCTHT

SEQ ID NO: 86507 - protein, 46 aa, Gossypium hirsutum
  Clone ID: LIB3166-058-P1-K1-F7.pep
QRPRFNALSLDITFYVLIRLRKRKILKVCLRMLNAPPYCLPELGST

SEQ ID NO: 86508 - protein, 119 aa, Gossypium hirsutum
  Clone ID: LIB3166-058-P1-K1-G4.pep
NDIIGVCFVGQDITSEKGVLDKFIRLQGDYRAIIQSLSPLIPPIFASDENTCCSEWNAAMEKLTGYSRNEVIGKMLAGEIFGGLCQLKGQDSMTRFMIMLYQGISGRNAEKFPFSFFDR

SEQ ID NO: 86509 - protein, 117 aa, Gossypium hirsutum
  Clone ID: LIB3166-058-P1-K1-G7.pep
RTRGSGAIVALVSTSILCALDTCKTKYQAEVRAHHQQKYRNTADVLWEAIANGQVLSLYQGLGTKNLQSFISQFIYFYGYSFFKRLYLKKTGNNTIGTKANLIVGVAAGACTVIITQ

SEQ ID NO: 86510 - protein, 64 aa, Gossypium hirsutum
  Clone ID: LIB3166-058-P1-K1-H1.pep
SLMFYHFCFFGTKEVVVWDKKDCRCWHSNIKIVFKHRFLKCLLESIKLVSGLQVYNLKPWMGGT

SEQ ID NO: 86511 - protein, 36 aa, Gossypium hirsutum
  Clone ID: LIB3166-058-P1-K1-H4.pep
MTKSPIICCIKVDLHKLIDPLTLLGPLTVLSSHIGH

SEQ ID NO: 86512 - protein, 60 aa, Gossypium hirsutum
  unsure (1)..(60): unsure at all Xaa locations
  Clone ID: LIB3166-058-P1-K1-H5.pep
MADRSXVFSIDHLPPHLILEILTSGKRLSAGDLVSLELTSRTFGGCHDVCPTKCKSLVDL

SEQ ID NO: 86513 - protein, 67 aa, Gossypium hirsutum
  Clone ID: LIB3166-058-P1-K1-H6.pep
QYLSYVRKLIFQFLINFSSQVQFVSVSQHVSFISCFTFFFTSLETFFVMDQLPFYTCICLHTPFYFL

SEQ ID NO: 86514 - protein, 104 aa, Gossypium hirsutum
  Clone ID: LIB3166-058-P1-K1-H8.pep
STPLIAPNINVGVDGMVMNLASLFAGTVTNPFGNCYYQGPAEAPLEASSACPGIYGKGAYPGYAGNLLVDPSTGASYNAHGENGRKYLLPALYDPATSSCSTLV

SEQ ID NO: 86515 - protein, 73 aa, Gossypium hirsutum
  unsure (1)..(73): unsure at all Xaa locations
  Clone ID: LIB3166-059-P1-K1-A3.pep
HAFGFIALYLGVSYNSNEFPSGYHRQDAKELFNQRHFLLRNATDRIFGAXKERFPILMSASSYPLQTHVKLGC

SEQ ID NO: 86516 - protein, 66 aa, Gossypium hirsutum
  unsure (1)..(66): unsure at all Xaa locations
  Clone ID: LIB3166-059-P1-K1-A9.pep
LPLFRIVLAFASGMICGDGIWTLPRSLLALAWVXPPICMIYFSRATNFRVFNFYNSKSLMLSFIIL

SEQ ID NO: 86517 - protein, 104 aa, Gossypium hirsutum
  unsure (1)..(104): unsure at all Xaa locations
  Clone ID: LIB3166-059-P1-K1-B1.pep
ILTEENVTIFEKKVTELCLAEFLCYGPQKETGKEGKCLYRKTKDGKFVKWNVETDDSLCTLQDAFQKVEPSXGFNIELKFDDSAVYQQDHLLHILQVILQVVFE

SEQ ID NO: 86518 - protein, 100 aa, Gossypium hirsutum
  Clone ID: LIB3166-059-P1-K1-B12.pep
KNGRNGKINGKGYYIYEKGSKPKPDPSILPIIEECRRQTKLMPAGKPITISDKEILEMVLFPVVNEACRVLDEEVVVRASDLDTTSVLGMSFPSHRGGIV

SEQ ID NO: 86519 - protein, 47 aa, Gossypium hirsutum
  Clone ID: LIB3166-059-P1-K1-B3.pep
NYTYKSLHNIQPKSIALFFYTSHNISLYLSLLIVYLLEKLRVGGRDI

SEQ ID NO: 86520 - protein, 48 aa, Gossypium hirsutum
  Clone ID: LIB3166-059-P1-K1-C12.pep
NECDTTATISWRRRWTFPSWKLARNSKTPSNYLTFVPSRSLVFFFSAV

SEQ ID NO: 86521 - protein, 114 aa, Gossypium hirsutum
  unsure (1)..(114): unsure at all Xaa locations
  Clone ID: LIB3166-059-P1-K1-F10.pep
MSLTIISAVYEVCSDAAGIAGNIFAFGLFLSPIPTFRRIIRNGSTEQFSGMPYIYALLNCLICLWYGFPIISPGIILVATVNSIGAIFQLIYIIXFIAYATKPNELEMLGSWYR

SEQ ID NO: 86522 - protein, 122 aa, Gossypium hirsutum
  unsure (1)..(122): unsure at all Xaa locations
  Clone ID: LIB3166-059-P1-K1-G10.pep
NNSTSRGNFLYASQVLASNGSSYGRTSSGSIPPVLTSFHLQPSDQHPIVKTEASTSQHAQKFHYNNNNNNPLLRGHQPIHYQQEGNESSSEVEAIKAKIIASSXYSNLLEAYMDWQKVGAPP

SEQ ID NO: 86523 - protein, 74 aa, Gossypium hirsutum
  Clone ID: LIB3166-059-P1-K1-G5.pep
LMSPSPFAVFLFVVVMAVISGCNGNHEVFLNVNGVTSHYHPPTLLASIRKDSDLGIFVPFIQKLMAVVFRHVLS

SEQ ID NO: 86524 - protein, 64 aa, Gossypium hirsutum
  unsure (1)..(64): unsure at all Xaa locations
  Clone ID: LIB3166-059-P1-K1-G7.pep
VLILGISNVIPFPNPNXXIILLNPAAFPSLKQVAKEASACYITYMVLYCFERDNGLWLLFFISF

SEQ ID NO: 86525 - protein, 55 aa, Gossypium hirsutum
  Clone ID: LIB3166-059-P1-K1-H1.pep
LRNFLGWSFVSFLLACFLIKCKNNSMKPCVVFYISRFEDSIKIRPSLTKPILELK

SEQ ID NO: 86526 - protein, 130 aa, Gossypium hirsutum
  Clone ID: LIB3189-001-P1-K1-E11.pep
RCLIYLGDLARYKGLYGDGDSKSREYAAASNYYLQAASIWPSSGNPHHQLAILASYSGDELVAIYRYFRSLAVDNPFSTARDNLIVAFEKNRHNYSQLHGDVKGPFKEPVVRLSGKGRGKLEAKLASKDA

SEQ ID NO: 86527 - protein, 42 aa, Gossypium hirsutum
  Clone ID: LIB3189-001-P1-K1-F4.pep
YTCQKPTLFFFVSMNKNKLGNFKRLRQSIIYRKLAFNACTPI

SEQ ID NO: 86528 - protein, 35 aa, Gossypium hirsutum
  unsure (1)..(35): unsure at all Xaa locations
  Clone ID: LIB3189-002-P1-K1-A7.pep
KKGGELSXVGCIASHYIIKRTLYKKSVKQERWKCM

SEQ ID NO: 86529 - protein, 46 aa, Gossypium hirsutum
  Clone ID: LIB3189-002-P1-K1-B5.pep
HFFKHKHKKKIENLNKKKRDGIFPPLFKTPFYLPLSPTSHFLYIFP

SEQ ID NO: 86530 - protein, 123 aa, Gossypium hirsutum
  unsure (1)..(123): unsure at all Xaa locations
  Clone ID: LIB3189-002-P1-K1-B6.pep
TNVTTQVRGTMGHIAPECLSTGKSXERTDVFGYGIMLLELVTGQRAIDFSRLEDEDDVLLLDHVKKLEREKMLDAIVDRNLNKNYIMQEVEAMIQVALLCTQSSPEDRPAMSEVVRMLEGEGL

SEQ ID NO: 86531 - protein, 67 aa, Gossypium hirsutum
  Clone ID: LIB3189-002-P1-K1-C10.pep
KKENVWERWACLIQSRSILGTLLCIPEFFFPQNLTQSCSSSTTFTYSKCNCSSSSRCGCLIQSIHLM

SEQ ID NO: 86532 - protein, 49 aa, Gossypium hirsutum
  Clone ID: LIB3189-002-P1-K1-D6.pep
SPSKSLSSYFLHFHGHKESAITRAVSPNKPTFCKVADLELSAGVTWVLL

SEQ ID NO: 86533 - protein, 43 aa, Gossypium hirsutum
  Clone ID: LIB3189-002-P1-K1-E12.pep
MARIRSSSSSSKFRYCNPSYYLKRPKRLALLLIGFVSATFFVW

SEQ ID NO: 86534 - protein, 125 aa, Gossypium hirsutum
  unsure (1)..(125): unsure at all Xaa locations
  Clone ID: LIB3189-002-P1-K1-F1.pep
ALDDSTSKAKCARDAVTPLAHMPYSDQLEHKKNSVMQMLKKLTRNARKACPNGVSLPQWVLXSRERGGLPCEVEGIIESPVVNGYRNKCEFSVGYSQQGKPTVGFMLGNFREGVTAVEEPVDCPN

SEQ ID NO: 86535 - protein, 72 aa, Gossypium hirsutum
  Clone ID: LIB3189-002-P1-K1-G8.pep
ALFAKGRSILMVGLMLLVKPPFFTAEWRDVLFPPWLMWTVIKHTYCGVAQQTDHGAFPTPAISGVHDGRGEL

SEQ ID NO: 86536 - protein, 66 aa, Gossypium hirsutum
  Clone ID: LIB3189-003-P1-K1-B2.pep
GFMVVRHGELECCIKRIGGNGETVRLGLNRKFVALNVTNGARSSRGGQYDSGCTLAGFFSKPYLKS

SEQ ID NO: 86537 - protein, 63 aa, Gossypium hirsutum
  unsure (1)..(63): unsure at all Xaa locations
  Clone ID: LIB3189-003-P1-K1-B4.pep
LPEKRLYLGFGYLDLDLEKHMGSWAEFREDPRIIKTFPYXILRGIAYWHSHRVLXHRELKPPK

SEQ ID NO: 86538 - protein, 61 aa, Gossypium hirsutum
  Clone ID: LIB3189-003-P1-K1-B6.pep
MTKRTKKAGIVGKYGTRYGASLRKQIKKMEVSQLSKYLCEFCGKFAWIRKAVGFWCCKDCG

SEQ ID NO: 86539 - protein, 60 aa, Gossypium hirsutum
  unsure (1)..(60): unsure at all Xaa locations
  Clone ID: LIB3189-003-P1-K1-C12.pep
HASAYYSPTFSSYSLTSPGGRLTSPSCSPTSPSYSPTSSXYNPLSAMVCPXSLAYTPSSP

SEQ ID NO: 86540 - protein, 82 aa, Gossypium hirsutum
  Clone ID: LIB3189-003-P1-K1-C6.pep
QIKIPTHLYIAEPDHLLHRRRLDHLLCCRRTSLPQPIGTQDTARLTQNPHSALFAIFFSVFIRLFWWNILLVRGVVVQFQGF

SEQ ID NO: 86541 - protein, 48 aa, Gossypium hirsutum
  unsure (1)..(48): unsure at all Xaa locations
  Clone ID: LIB3189-003-P1-K1-C7.pep
KGKMPIAQVFISYGXRYSSKKIAQCHIQSVSSVDTIIASYFLSRILVN

SEQ ID NO: 86542 - protein, 57 aa, Gossypium hirsutum
  Clone ID: LIB3189-003-P1-K1-C9.pep
VSGFHTSVCLPSAKGVAEGGASEPITQSSYILNTGRCLCIFSPDIKTVTWCMSTHHC

SEQ ID NO: 86543 - protein, 87 aa, Gossypium hirsutum
  Clone ID: LIB3189-003-P1-K1-D3.pep
RYLLFLPYWAIGKKETEWFSRFLSTVVGFFECLRLIYEVGKEKVLKWAIFCTSESCACLSLVTHAWWSERRKWIAQRDILPLPFLFF

SEQ ID NO: 86544 - protein, 62 aa, Gossypium hirsutum
  Clone ID: LIB3189-003-P1-K1-D5.pep
IFNNYSLIAAGNHSHLLFDKDMNPTFALNLIESFIHFSNTNFSVEPHIWASDIKLMPCLIFL

SEQ ID NO: 86545 - protein, 52 aa, Gossypium hirsutum
  Clone ID: LIB3189-003-P1-K1-D8.pep
IPSAKTEKLPASVSDLYTGLTDVDQNALSHFRLRETATEQSRNKKKKKEGVY

SEQ ID NO: 86546 - protein, 41 aa, Gossypium hirsutum
  Clone ID: LIB3189-003-P1-K1-D9.pep
FSLKIAHFIQLNGRPFDRLIFVCRDLKVAREEAICLASSNF

SEQ ID NO: 86547 - protein, 81 aa, Gossypium hirsutum
  unsure (1)..(81): unsure at all Xaa locations
  Clone ID: LIB3189-003-P1-K1-E2.pep
LLLFWFSLLFSFACCSLLLSSWGGLXAFRLLFWVCWASLRLPFSWVVGSLSFPGSAGPAAAXXVPFGLPLGLXXXXXAVXV

SEQ ID NO: 86548 - protein, 110 aa, Gossypium hirsutum
  unsure (1)..(110): unsure at all Xaa locations
  Clone ID: LIB3189-003-P1-K1-E5.pep
ETSASMPASSSRSSSAGRSSKRWVFLKDFLRSKSEGRSNNHKFWSTISFSPAKEKKPGRKEKLSNNVSNGGSXESMKQQEXNNKPMNGISKRRVPPSPHDLHYTANRALA

SEQ ID NO: 86549 - protein, 54 aa, Gossypium hirsutum
  Clone ID: LIB3189-003-P1-K1-F12.pep
NTLKKVRKGLPTNVGLKYAKDQRRFDWLRVPDKGMPGDEKRKAPSFRSKESATI

SEQ ID NO: 86550 - protein, 134 aa, Gossypium hirsutum
  Clone ID: LIB3189-003-P1-K1-F2.pep
HASASWTFGVKWSPSGNTLAYVGHNSMIYFVDDIGPSPLAQNVAFRNLPLRDVQFFSEKMVIGVGFDCNPMIFAADKSGLWSFIRFLGERKEFLSGPKSGSQFSEAFGKLYGQAKHGLSNDSVEPSKIQGAGHD

SEQ ID NO: 86551 - protein, 44 aa, Gossypium hirsutum
  Clone ID: LIB3189-003-P1-K1-F9.pep
TNYAPALHEADIGLAMGICGTEVANESAYVIILDDIFSTIVTVA

SEQ ID NO: 86552 - protein, 81 aa, Gossypium hirsutum
  Clone ID: LIB3189-003-P1-K1-G12.pep
PNFCVQLTPVLVPIQRSANCCRHILAIEALRGKEGVPLGVGVLSMPKIKEDMMGCAPLTRICHKMRKAKKQSFRTKESETK

SEQ ID NO: 86553 - protein, 40 aa, Gossypium hirsutum
  Clone ID: LIB3189-003-P1-K1-G4.pep
RTRGRTRGVCPQYAPLERILTFKRNTSYPRHTLVFQMLYH

SEQ ID NO: 86554 - protein, 82 aa, Gossypium hirsutum
  Clone ID: LIB3189-003-P1-K1-H10.pep
NSFGKVSHKLVGNQCCGASMHMDYIRTIAFRALVIAPLSTNELSFTQAALAIAPLPPPFYLTVTASTIRMGLWIRSLTRSTA

SEQ ID NO: 86555 - protein, 78 aa, Gossypium hirsutum
  Clone ID: LIB3189-004-P1-K1-A1.pep
KRNFKGPFQTLLGIPQNKGCLAKKPLKIWWVRNPNLGGSPPLRKTLLSSEREPKIERIKSPQVYGSQRPPRKACSTGN

SEQ ID NO: 86556 - protein, 61 aa, Gossypium hirsutum
  Clone ID: LIB3189-004-P1-K1-A2.pep
RQFSATAFSARNDPFSMQLHAFPGDQRRCFQSIGKLDALGNYNAGVGAALNCKEPSSGLNF

SEQ ID NO: 86557 - protein, 52 aa, Gossypium hirsutum
  Clone ID: LIB3189-004-P1-K1-A3.pep
TLPLLFSFTFFNIFPEKVTLGSHKKNSLNVVEIRFFYSSLTARAILQLSPIS

SEQ ID NO: 86558 - protein, 63 aa, Gossypium hirsutum
  Clone ID: LIB3189-004-P1-K1-A5.pep
IPKEKFVFLQLKSPKFLISSNTSQYTYTNHTSFSFSFHCTEFSHHSYSFSFDLLGFLLILGFQ

SEQ ID NO: 86559 - protein, 86 aa, Gossypium hirsutum
  Clone ID: LIB3189-004-P1-K1-A7.pep
TEHNRALCQAAVILIFLYYPLQHRTNKIILSPKIYKALYTTLYIYANNFVLTKLASKFIIWLNGPTTIIHGIQLSRLHRWSFICKI

SEQ ID NO: 86560 - protein, 62 aa, Gossypium hirsutum
  Clone ID: LIB3189-004-P1-K1-A8.pep
TFQPRTNKIILSPKISKELYTTLYIYDNNFVLTKHASRLIIWLNGPPTIIHGIQMSGLTAWS

SEQ ID NO: 86561 - protein, 47 aa, Gossypium hirsutum
  Clone ID: LIB3189-004-P1-K1-B12.pep
NMKLVKQLISDHLLCHIRWFEHSLTFANVRNFSMADWEGLPSAVYAP

SEQ ID NO: 86562 - protein, 60 aa, Gossypium hirsutum
  Clone ID: LIB3189-004-P1-K1-B2.pep
QGRLVKSSTITHVLIQTCHHQHPLISDADLTHCHKHLQLVSYHPSKQNHTFDLQGTFYIT

SEQ ID NO: 86563 - protein, 69 aa, Gossypium hirsutum
  Clone ID: LIB3189-004-P1-K1-B8.pep
VLDRERPLADRTRGLRYPSWIWGPQILQATETPMEEDVACVWAHIKAYARRGRRVGARSSSLPVLHNPI

SEQ ID NO: 86564 - protein, 67 aa, Gossypium hirsutum
  Clone ID: LIB3189-004-P1-K1-C10.pep
GGKGKQSIKQSQMLCSTNCSNKNGFLINDVREDVEAKLGWARSRIPPDVLAIQLSRLVNRTRGRTRG

SEQ ID NO: 86565 - protein, 151 aa, Gossypium hirsutum
  Clone ID: LIB3189-004-P1-K1-D6.pep
LSLTLPDNVFKEAKNLKVLDLTGVHFSSLPSSIGLLTSLSTLCLDHCKLGDNLTIIGVLKNLNVLSLLQSDIKIVPKEIGHLLKLKLLDVSGCTKLEKISADVLPRLSKLEELYMGGTSIQWGQPNASLAELNTLSHLSTLEVQIPDAKSA

SEQ ID NO: 86566 - protein, 83 aa, Gossypium hirsutum
  Clone ID: LIB3189-004-P1-K1-E11.pep
LEEGILEFGFLMGFKKRSTKSEEEVLEGQTDLAADNTVSAPSSKKIKMDGKKDADMGDGVASSSSVANSVKPLERIMKRKHVD

SEQ ID NO: 86567 - protein, 130 aa, Gossypium hirsutum
  Clone ID: LIB3189-004-P1-K1-E2.pep
RGLACEKEISAAFEKSLKCTFSTLEEYLDLFLTRVDGLRRRISSASGDGVLNYSMIRESFQQAADYLSPHMKNTDGLLHLHAYWARLELKLGNDLIAARGVWESLLKTCGSMLEAWKSYIAMEIELDHIN

SEQ ID NO: 86568 - protein, 59 aa, Gossypium hirsutum
  Clone ID: LIB3189-004-P1-K1-E6.pep
MILRVQAHWRVGWSQMEVFEARGLYACRKESRMLDHERSLFCRIGGCNSKVCYYCLNEE

SEQ ID NO: 86569 - protein, 83 aa, Gossypium hirsutum
  Clone ID: LIB3189-004-P1-K1-F1.pep
PVDHTRPPFSFQHCVSCFSLVAFKNGHCYVATNSWRNSSASQQFWNSLQCREPSVRLLPKGFKLEVEFPKRAIIVRKEEIKRY

SEQ ID NO: 86570 - protein, 100 aa, Gossypium hirsutum
  Clone ID: LIB3189-004-P1-K1-F2.pep
QKDGGDQPKARISIDRNPAPILVHPPRSSCSFPAPPPMATAAKGGGGCGPMAKGYESFVLTRCKSEPRRSSTKLAPDACFWKNRKLEPAALEVGAAGVGF

SEQ ID NO: 86571 - protein, 65 aa, Gossypium hirsutum
  Clone ID: LIB3189-004-P1-K1-F9.pep
GNGFGAWDKGRFYGGHGVARDGIGGTGNGVGFGGTIPSSKPVSRAVTPTRRPSSAVNVFRSYNHI

SEQ ID NO: 86572 - protein, 56 aa, Gossypium hirsutum
  Clone ID: LIB3189-004-P1-K1-G4.pep
PGFHIATVYDPAKPLLYEQPLWIHQRKKTRASVSLVPLCDTTCKERDKWVLSGENE

SEQ ID NO: 86573 - protein, 59 aa, Gossypium hirsutum
  Clone ID: LIB3189-004-P1-K1-H10.pep
ALNNHSVNRALNWLFFVVRNSLLLLKIKVSFHLPSSFSLDAPVTVSNKVRGIIYFHYRI

SEQ ID NO: 86574 - protein, 63 aa, Gossypium hirsutum
  Clone ID: LIB3189-004-P1-K1-H12.pep
KTNFFFLTSDNKKNKYTSVLANDNGGREECKFLICSYYFFYIFSLAISLNKVRKFQVFSCVKR

SEQ ID NO: 86575 - protein, 62 aa, Gossypium hirsutum
  Clone ID: LIB3189-004-P1-K1-H7.pep
RKTDKTKRELIGGPKVYMPVCRRQYVDGQVVIESCKKCVGIKKASMWDLHIDLLVIHVYVAL

SEQ ID NO: 86576 - protein, 67 aa, Gossypium hirsutum
  Clone ID: LIB3189-004-P1-K1-H8.pep
WIMDTDNSIVISTGPEHRYWKQGVKLLSKPVAVGINGCNSNSEYGSTIVEALLEPSSSELILKHAFL

SEQ ID NO: 86577 - protein, 39 aa, Gossypium hirsutum
  Clone ID: LIB3189-005-P1-K1-E11.pep
NYSPSFLMYLLTLLSVIFIIDAVDSFLPFTKKKNKKKKN

SEQ ID NO: 86578 - protein, 130 aa, Gossypium hirsutum
  Clone ID: LIB3189-005-P1-K1-E6.pep
RNSPSKQKLRFKLVGAQKDRWKLNDIDTNTVQERINSWLTKTQHFLSEITLPLVKTGQTGQSGPGKLDPRNEDEVDNQEMEDIFMAEGIIPSVLPNGNLFIAAIVSIEQFIRMNGLSGKNLYIIFRSLIP

SEQ ID NO: 86579 - protein, 69 aa, Gossypium hirsutum
  Clone ID: LIB3189-005-P1-K1-G12.pep
NRSRMNKNRRVKFVYSRDVHNFPFLGVPPKWKSQNTKPLLANLNIIPPLSSIRHQGPILHMKRKKKRRS

SEQ ID NO: 86580 - protein, 83 aa, Gossypium hirsutum
  unsure (1)..(83): unsure at all Xaa locations
  Clone ID: LIB3189-006-P1-K1-A11.pep
WVGNSAKLCPGVCAYPFAVREYMPMLXPVKSPNGDVGFDGMISVIGHEIVLLATNPLVNVWYACYXPMVFEEISDLCVCIYGS

SEQ ID NO: 86581 - protein, 52 aa, Gossypium hirsutum
  Clone ID: LIB3189-006-P1-K1-A7.pep
SISFIKLDRLLPSIYVSHHWNCLYQEDNRHLCICHLKAMKSPCRRWRQSLNN

SEQ ID NO: 86582 - protein, 54 aa, Gossypium hirsutum
  Clone ID: LIB3189-006-P1-K1-A8.pep
QAFLQYVHHTESQVIGLARGRCIFHTSWMLQGRCTLTLRVWRPVGTILLYCSEL

SEQ ID NO: 86583 - protein, 85 aa, Gossypium hirsutum
  unsure (1)..(85): unsure at all Xaa locations
  Clone ID: LIB3189-006-P1-K1-B1.pep
PLVRECVSKFPLVNINXKETSSREQKHETFSPQTTQMPEEQEPRFIPETHNGFGLYCHVSFSSLSSFTTKETYXPYVTPFISHLV

SEQ ID NO: 86584 - protein, 52 aa, Gossypium hirsutum
  Clone ID: LIB3189-006-P1-K1-B9.pep
LPTSVRAALRAWLKPYAKSLTSSVLDTELAEDWTEAMAAKIEWFAATSSFQD

SEQ ID NO: 86585 - protein, 77 aa, Gossypium hirsutum
  Clone ID: LIB3189-006-P1-K1-C2.pep
IFTWLVLLKKLYNDWVIGVWFQFYGVYEMPLVGKGVSRRRATLAQPQQGGKQTRRSIRGRKRAADGEVGWPRTRLAA

SEQ ID NO: 86586 - protein, 37 aa, Gossypium hirsutum
  Clone ID: LIB3189-006-P1-K1-C7.pep
SIFGGTYGLIRSRSQHKSLVRLKDYNHQSSPNSNHSV

SEQ ID NO: 86587 - protein, 45 aa, Gossypium hirsutum
  Clone ID: LIB3189-006-P1-K1-E8.pep
ENCLHLGNNMTIENLPFAEKSPQADPTHPYIDSYEDSQHLFFRTR

SEQ ID NO: 86588 - protein, 56 aa, Gossypium hirsutum
  Clone ID: LIB3189-006-P1-K1-F7.pep
RVDRTSKMRKSVDTVDTSYTNIILFELVKYAHAVIFRHHLSGKHVNGIDFSHIMCY

SEQ ID NO: 86589 - protein, 40 aa, Gossypium hirsutum
  Clone ID: LIB3189-006-P1-K1-F9.pep
HWQILLVMPISTLSLEDFRWGVYQNSSDSTPIVKHILSFA

SEQ ID NO: 86590 - protein, 45 aa, Gossypium hirsutum
  Clone ID: LIB3189-006-P1-K1-G10.pep
RHSFPKMPTVAVLQQCSVATARAKAISSITKSRTSSKVEAIIQAI

SEQ ID NO: 86591 - protein, 59 aa, Gossypium hirsutum
  Clone ID: LIB3189-006-P1-K1-G2.pep
DAWARCYIALSFFISTGALRVATRLTPYKHNPSLIKLRIPVAIFEGMGMQHCFIIVSAC

SEQ ID NO: 86592 - protein, 45 aa, Gossypium hirsutum
  Clone ID: LIB3189-006-P1-K1-G4.pep
YCKASIVFITPFITLKFDQTISSFFKEWRLNTEVRNCIIQFSSTK

SEQ ID NO: 86593 - protein, 88 aa, Gossypium hirsutum
  unsure (1)..(88): unsure at all Xaa locations
  Clone ID: LIB3189-006-P1-K1-H4.pep
LKAIKGVGKVLCENTLFSIPRVHCFHRFSIKFPKSFRFIEGKPKKPETSTTKRNDEGHPFNFDGLRRXXXPTTSSHLFLQIILLQAWF

SEQ ID NO: 86594 - protein, 77 aa, Gossypium hirsutum
  unsure (1)..(77): unsure at all Xaa locations
  Clone ID: LIB3189-006-P1-K1-H8.pep
MDSATLLDRALFQLTPTRTRFNLVLFYIGKNEXLASGLFEPFICHLKFARDHISKGGYSISLQPPAPSTPLVTKASF

SEQ ID NO: 86595 - protein, 55 aa, Gossypium hirsutum
  Clone ID: LIB3189-007-P1-K1-A10.pep
IDVCVEITKTVPKRPKAKRIHICHTSRAVRYGVKVTYTPICFSSLTNDALIAYTL

SEQ ID NO: 86596 - protein, 50 aa, Gossypium hirsutum
  Clone ID: LIB3189-007-P1-K1-A8.pep
SVSNLSDFFKLSTVFLTFFYSNALILFPNIFVSTSFFFISFTFFYSIIYF

SEQ ID NO: 86597 - protein, 84 aa, Gossypium hirsutum
  Clone ID: LIB3189-007-P1-K1-B3.pep
LREDVSVEVELLSVKKIPLFFVTPLSSGRGTNDHENDTEKSSIASNLSSDENDDHHQSNLEDLPLSVFFPSSEGVPLISPYENE

SEQ ID NO: 86598 - protein, 92 aa, Gossypium hirsutum
  unsure (1)..(92): unsure at all Xaa locations
  Clone ID: LIB3189-007-P1-K1-B7.pep
MSAASAPPPPLSPNSLPSPSPKPLFATSPLXSAVSIEKETLISERPHTFLREADGGDDCSVRSRFQRMILEAQESVCSALEAVDGAGKFKED

SEQ ID NO: 86599 - protein, 61 aa, Gossypium hirsutum
  Clone ID: LIB3189-007-P1-K1-C11.pep
YGRTEHDRSDVRFLTRSPTSTWCTCDAANFRRSVAAMITTAISIFTIAIVNEQRNWGVEGS

SEQ ID NO: 86600 - protein, 70 aa, Gossypium hirsutum
  Clone ID: LIB3189-007-P1-K1-D11.pep
RQKIQSYSTELERHPQQKPNPLRKEHSAKITKYHYDFYNPCYILKLLGIRAPHVLQHVKHIPKPHSVLKF

SEQ ID NO: 86601 - protein, 84 aa, Gossypium hirsutum
  Clone ID: LIB3189-007-P1-K1-D12.pep
TKTQSGKHNKRKGLLRFEKAKQSTKLKRKRKTQRKKKLKGRGRSGILIWFPPPQAFHAPLSQQQPYRNPPLWRRRRRILVRCTH

SEQ ID NO: 86602 - protein, 61 aa, Gossypium hirsutum
  Clone ID: LIB3189-007-P1-K1-D4.pep
FSWYFVVYKLCLNNIHFVLCHWRMKLRNQIRGSDFLVFLYCGLWILKRFLFKKYYVHVIVF

SEQ ID NO: 86603 - protein, 71 aa, Gossypium hirsutum
  unsure (1)..(71): unsure at all Xaa locations
  Clone ID: LIB3189-007-P1-K1-D5.pep
VYPXXLGLNYLQGISQSXXGWSNXXALDLKILNQICLERRKSGEHNXRGTSYALYKEKNLLIAFGVWEMIY

SEQ ID NO: 86604 - protein, 69 aa, Gossypium hirsutum
  Clone ID: LIB3189-007-P1-K1-D7.pep
NSQALDRYYLGCSKRRGKKQMAEQFFVPALDHVLCMRVIMMGIESCSCCGSFSNVKYLCIYDYFIYVIF

SEQ ID NO: 86605 - protein, 78 aa, Gossypium hirsutum
  Clone ID: LIB3189-007-P1-K1-D8.pep
RCNSSNTFEGNDLDRILQATSRDGRAICHLAGSPQSFTLPIIQVYISIILLLQELTKLPKSTTHFAPGTVAMAISNVK

SEQ ID NO: 86606 - protein, 82 aa, Gossypium hirsutum
  Clone ID: LIB3189-007-P1-K1-E3.pep
CILSTTRRPPVSVEPIACRFRNELNSIRLGQIGSPNTSIDLIRCYVSLSLRRSWFLVKGIEFINYGRLGHWSIHQPLWQDWQ

SEQ ID NO: 86607 - protein, 101 aa, Gossypium hirsutum
  Clone ID: LIB3189-007-P1-K1-E6.pep
RTRGRTRGLNDYFEKALDDILNVIPRDRHTYLFSATMTKKVKKLQRACLRNPVKIEAASKYSTVDTLKQQYRFIPAKYKDCYLVYILTEMSGCTYMVFKLT

SEQ ID NO: 86608 - protein, 57 aa, Gossypium hirsutum
  Clone ID: LIB3189-007-P1-K1-E7.pep
IIFSFSCVALICVGSQIRVLSWSRCSGFSMKEMRKAFDFVSSRGGRRSTSSYCVLPR

SEQ ID NO: 86609 - protein, 53 aa, Gossypium hirsutum
  unsure (1)..(53): unsure at all Xaa locations
  Clone ID: LIB3189-007-P1-K1-F11.pep
FKGHLYASQLANIRVQVMSGRLLHMLSPCHHCFVTLFPAGTLCSCAYLXIMHA

SEQ ID NO: 86610 - protein, 128 aa, Gossypium hirsutum
  unsure (1)..(128): unsure at all Xaa locations
  Clone ID: LIB3189-007-P1-K1-F5.pep
RPGIPPSHPNIPTASLPYSQRDDXSRPSAQHGAPSHSKSLSQPTFFSLDRLPPWCPPPYRDPPVSSASDPASNDVSMEERFANSNARSSLPSPVAGGCNEFRIGESSSLPPRKGHRRSINDVPLGFLL

SEQ ID NO: 86611 - protein, 92 aa, Gossypium hirsutum
  unsure (1)..(92): unsure at all Xaa locations
  Clone ID: LIB3189-007-P1-K1-F9.pep
MMQMRCCTVKVKFIFFFYLFIYFFFYLSLIYMYLSFFFSIFIFLFYYFIILNFIFLCFLYYFLLSLLXIIINFYIFFYFIYFNFIFFFIIFY

SEQ ID NO: 86612 - protein, 50 aa, Gossypium hirsutum
  Clone ID: LIB3189-007-P1-K1-G5.pep
SSSTSRYKVYLCCFMSKFMGQTKTRIETLRLLILHFCYRGNESPSSCIHT

SEQ ID NO: 86613 - protein, 109 aa, Gossypium hirsutum
  Clone ID: LIB3189-007-P1-K1-G9.pep
RVFFFVARKMQSLGPLRPRSTVLVKRPWLTKPFNWRALSSIPPPDYSNQSRGGLPRFFSETLPSSKAKSSLYSGIHLLTTTRNLFSNCLQIYKCRAVLFAFKEMNFAYD

SEQ ID NO: 86614 - protein, 49 aa, Gossypium hirsutum
  Clone ID: LIB3189-007-P1-K1-H2.pep
GLIVPFLPINILVYTINHFTNKRFLLIYPKNRKIHNTKYFPHCMVRVIL

SEQ ID NO: 86615 - protein, 36 aa, Gossypium hirsutum
  Clone ID: LIB3189-007-P1-K1-H4.pep
VRLDRERPLAIYAYSSSLDGALRAGRNLSPKGFPKL

SEQ ID NO: 86616 - protein, 41 aa, Gossypium hirsutum
  Clone ID: LIB3189-007-P1-K1-H6.pep
ALHSFNFFCCSKMSFIRKSLPIISRSQKLSSNHSRFNIKYG

SEQ ID NO: 86617 - protein, 76 aa, Gossypium hirsutum
  Clone ID: LIB3189-008-P1-K1-A11.pep
VKQVFYSKDPTDEGWYVVLRNTPRDLFDMGNGSKDDIVERSETFPFPEQNLNENISSTSTQFQWVRQDVDEDIYEL

SEQ ID NO: 86618 - protein, 51 aa, Gossypium hirsutum
  Clone ID: LIB3189-008-P1-K1-A2.pep
VADTSMLYLTVWVMNVRSRLNCSFHCRRKASLLNSSRCIIECFFRGWRIAS

SEQ ID NO: 86619 - protein, 31 aa, Gossypium hirsutum
  Clone ID: LIB3189-008-P1-K1-B10.pep
TDWERVAFRPWGGDEHFIHNCYRQWEFYCLI

SEQ ID NO: 86620 - protein, 48 aa, Gossypium hirsutum
  Clone ID: LIB3189-008-P1-K1-B2.pep
ELVGDCASLFKARLLGLKNQSIVGPLALRRDIWFFKAHGPRRWVNGYS

SEQ ID NO: 86621 - protein, 57 aa, Gossypium hirsutum
  unsure (1)..(57): unsure at all Xaa locations
  Clone ID: LIB3189-008-P1-K1-B8.pep
MGGKEEDVWLGANKWSXRQPIGTTAQTDKDYNEPPPAXPLIEHGELYLWSYCRASIA

SEQ ID NO: 86622 - protein, 66 aa, Gossypium hirsutum
  unsure (1)..(66): unsure at all Xaa locations
  Clone ID: LIB3189-008-P1-K1-C10.pep
DAWADAWGPYAVSEACICLQENNIPYDVVISDCGIRIFLLPQXYAEKQALGDVSAELSNTYADPTQ

SEQ ID NO: 86623 - protein, 139 aa, Gossypium hirsutum
  Clone ID: LIB3189-008-P1-K1-C12.pep
ELSVNFISAVSEEVSSDLHARVMKAARGGMLDEIISTMISEFVAAKKSQRPLMVESYNQDAKSSDGKLIKNTTERSIHCTSKFGTATSDGVSNISILESTNFDASLKSVGSLENFWGSYTVVLKMLFEYCFKFTWNAVF

SEQ ID NO: 86624 - protein, 100 aa, Gossypium hirsutum
  Clone ID: LIB3189-008-P1-K1-D2.pep
MVSITQNGTSNGHLQSFCSATNGGVGVADPLICGVAATVTTAYSYIHGTDSTSDCGLSGGDVIPVPIRLDVYGNGKIFDICHRYTVYMPSWESMVGLGQF

SEQ ID NO: 86625 - protein, 137 aa, Gossypium hirsutum
  Clone ID: LIB3189-008-P1-K1-D5.pep
KLVWSYARPQRVRQFLWLVFKERLLTNAERCRRGMPNSSSCKLCGCVNESILHSLTGCRKVRDIWEQVIPLRLMHRIPLRLMHRFFSYSLKDWLRVNLGNVFGLVFYELDWRSLFGILYLKIWKERFSYVFLGCSIL

SEQ ID NO: 86626 - protein, 155 aa, Gossypium hirsutum
  Clone ID: LIB3189-008-P1-K1-D6.pep
SAVNILQETNLEFEQWLTRVLVDQPTSFYRLFCCTLWAIWGDRNARIHDKTNRSSQEIACFVHSYLEEMDGLESTISIVSKENTKWKRPPGQIVKINFDGAYNERNQQSASGIVVRNRKGFVLLSCTEIHHRVLSAFAAEALTCRKVIQIALNMQ

SEQ ID NO: 86627 - protein, 110 aa, Gossypium hirsutum
  Clone ID: LIB3189-008-P1-K1-E10.pep
ALHPSFCRKIRSKMTLPIFLRIVILGFLEPVLDQNLYFLGMKYTSATYASAFLNIVPAVTFIMAMIFRLEKINVEKIRSVAKTIGTAITVMGATVMTFIKGPIIDFFKHG

SEQ ID NO: 86628 - protein, 93 aa, Gossypium hirsutum
  Clone ID: LIB3189-008-P1-K1-E11.pep
PTRNRSSSLTLNLHLPTRKPSLLAFSSYINHIAIPSPLCFTQINSGLLKRRRRMHVVSYALFLVALFQCRFLAFAILDPIDFLALQSIRKGFP

SEQ ID NO: 86629 - protein, 57 aa, Gossypium hirsutum
  Clone ID: LIB3189-008-P1-K1-E12.pep
FYLHLPSLKAGLFVLGGGKPHCCIFTHMLTQINSGLLKRRRRMHVVPYALLLAALFF

SEQ ID NO: 86630 - protein, 91 aa, Gossypium hirsutum
  unsure (1)..(91): unsure at all Xaa locations
  Clone ID: LIB3189-008-P1-K1-E8.pep
GIKHVKGMLLYGPPGTGKTLMARQIGKMLNGKEPKIINGPEVLSKFVGETEKNVMDLFADAENDQXRTCGDXSDLHVIMLDVFGAFCKYIF

SEQ ID NO: 86631 - protein, 141 aa, Gossypium hirsutum
  Clone ID: LIB3189-008-P1-K1-F7.pep
YLSYQEWLPFLPLFLSKSNFSSFFLTNFFSHPFFYIFFFSIIFNNFFYPIFYVTSFFLFFFIFFIFYNFLFYTFPLFSFTFILHYLFQFISLVFSLITFFYFYIFFLYIFLSLFYLFIYLFIFTIIKILYLYNFFFKIFFI

SEQ ID NO: 86632 - protein, 95 aa, Gossypium hirsutum
  unsure (1)..(95): unsure at all Xaa locations
  Clone ID: LIB3189-008-P1-K1-G2.pep
MGEDPHFPWKLRVPQDLPLSLFFPSFISHRPIXFARPLLKWTLPLPVAPVVPPISSSAXRGPIIPERRKMSEDAFESKRNGKLECSNTKSQLVKV

SEQ ID NO: 86633 - protein, 67 aa, Gossypium hirsutum
  Clone ID: LIB3189-008-P1-K1-G8.pep
FTAFRRGSISTTGSVSVQDYFLELFQPLSNHHTVSKIFFQKHLKFNVFNHNFLQFYNTYFNDKPYIR

SEQ ID NO: 86634 - protein, 62 aa, Gossypium hirsutum
  Clone ID: LIB3189-008-P1-K1-H11.pep
FNIVYGIQISSLASSKVIWIKLHICDYFSYLIFHFPENLCRLPNPIRNSKQGSIFRNRIFSL

SEQ ID NO: 86635 - protein, 41 aa, Gossypium hirsutum
  Clone ID: LIB3189-008-P1-K1-H4.pep
QKGNHVIGDSIGINKQRGWSRINHSCSCNHHLWRLLRRCRQ

SEQ ID NO: 86636 - protein, 131 aa, Gossypium hirsutum
  Clone ID: LIB3189-010-P1-K1-A12.pep
STMMFCRLLTSFFHFRFLPLLCSKFLPCSSFSQPHALYLVRFLSTNNNDNRKDQSFSNPWNFSEEANGKFGNLFPDESQKKSGEGDWFVGEEDKAWSFGEEDKDDGVFDFKEEAVQDVGLTIDGTGIALGA

SEQ ID NO: 86637 - protein, 105 aa, Gossypium hirsutum
  unsure (1)..(105): unsure at all Xaa locations
  Clone ID: LIB3189-010-P1-K1-A5.pep
PQFLVEHAIEKGKKRAASGFLSLVSGTDPEVLTQKPQILLLSFFGFCNRPRDFRLTRLXEAVDATTPSQAFNRRWQRVTSFSSLLSDEGIFPVNAIPPHHALCPI

SEQ ID NO: 86638 - protein, 100 aa, Gossypium hirsutum
  Clone ID: LIB3189-010-P1-K1-B11.pep
VVYHNSAVQSLGAFKRRKLQRGGLFKVLPTPPTIAQFSNGKGPGPNARIGYIDGAFYLFHAGHVEILKKARQLVDFLLVGIYPDYIVSEQRGLPLPVMHL

SEQ ID NO: 86639 - protein, 49 aa, Gossypium hirsutum
  Clone ID: LIB3189-010-P1-K1-B5.pep
LKAGSYGGFFGFSVPNFFLYQGQERIGGLWFSFNISNRHSKMEETSLEE

SEQ ID NO: 86640 - protein, 120 aa, Gossypium hirsutum
  Clone ID: LIB3189-010-P1-K1-B6.pep
MLPERQGGGAPHGIILAVVVGIVVLAPFLFGDQGEAITEAISELLTPLGLLLLPIILLLTIQFLSSDRGSFVFAVFSTGEPDTIHRVSGSPFGVALFLLLILFLLYNRVSIFGGDDDFDD

SEQ ID NO: 86641 - protein, 53 aa, Gossypium hirsutum
  unsure (1)..(53): unsure at all Xaa locations
  Clone ID: LIB3189-010-P1-K1-E10.pep
MATKTMMLQXFSLFFFLFSICNSIFLGANGDDNGGCQTAHAIFYSGAITTCTT

SEQ ID NO: 86642 - protein, 143 aa, Gossypium hirsutum
  Clone ID: LIB3189-010-P1-K1-E12.pep
MVKPSENGSQSIAPFLKKCYEMVDDESTDAIISWSQNNDSFIIWDMTEFSVHLLPKFFKHSNFSSFIRQLNIYGFRKIDTDRWEFANDGFVRGQKDLLKNIARRKHSPGSEQRKPLQQQPLQQLENTVGSCENNETLDCGRKL

SEQ ID NO: 86643 - protein, 99 aa, Gossypium hirsutum
  unsure (1)..(99): unsure at all Xaa locations
  Clone ID: LIB3189-010-P1-K1-E3.pep
GGGNLTCLLVFCHREWPRSVISDVRCLYARGADVTQQCSLFIFQPPWASALLRVISVCLGSPVVGAFSRVRVVLETLPVYGXLSRVSRSVGPRVFGRVG

SEQ ID NO: 86644 - protein, 38 aa, Gossypium hirsutum
  Clone ID: LIB3189-010-P1-K1-E9.pep
HAVCCRGDASPMHAYMNTYILSAASRRIELRIALPWST

SEQ ID NO: 86645 - protein, 46 aa, Gossypium hirsutum
  Clone ID: LIB3189-010-P1-K1-F4.pep
FSHIPNYNTLAILPPRTPVLGSLIIPISHQHSFRSACSEVLDLVRQ

SEQ ID NO: 86646 - protein, 115 aa, Gossypium hirsutum
  unsure (1)..(115): unsure at all Xaa locations
  Clone ID: LIB3189-010-P1-K1-G12.pep
MCIFCSLLLGHREKQGRGWATYFVSVQVDQSTGAIKERFGKFDEVLEPGRHCLPWRIVRQLAGHMTLRLQQIEVRCETKTIDTVFANVAAYIHXSALTEKANDALYILSNPYVLN

SEQ ID NO: 86647 - protein, 57 aa, Gossypium hirsutum
  Clone ID: LIB3189-010-P1-K1-G4.pep
MVRGGKVGPRSNFKRRVRSKDEASDDSNEDYVVSLEGNDESEDDVKHYCSSLDERPS

SEQ ID NO: 86648 - protein, 99 aa, Gossypium hirsutum
  Clone ID: LIB3189-011-P1-K1-A1.pep
NDQTVGTVASYINTSVSDQKAVLETAHKITDEKVTRNDTQETNGTRAFQIQDVLSLENEDSDETTTLLDKKDNVCVMSNRQSMYPVLQVDSRLISDLVL

SEQ ID NO: 86649 - protein, 56 aa, Gossypium hirsutum
  unsure (1)..(56): unsure at all Xaa locations
  Clone ID: LIB3189-011-P1-K1-A10.pep
VLPRSSIYFNFIREGYEAWVIXYNFLSLCWAWVGGPGSAILNLSGIVIKPTCYMLT

SEQ ID NO: 86650 - protein, 69 aa, Gossypium hirsutum
  Clone ID: LIB3189-011-P1-K1-A4.pep
HGNNRCQRMAKNTESRFAYSMVFEFGLNRKPNDVLKETMTPTSASALDNPNMIDNEDPAIKIPQTQNIG

SEQ ID NO: 86651 - protein, 60 aa, Gossypium hirsutum
  Clone ID: LIB3189-011-P1-K1-A8.pep
NSYIQVANMTRKVLNYQSVILSQPSQTLPICRIDSIDRRLGLGFKENEAAAYLLKFPTFS

SEQ ID NO: 86652 - protein, 112 aa, Gossypium hirsutum
  Clone ID: LIB3189-011-P1-K1-B10.pep
MEFSQADFDRLLLSEHTRKISEVNYAKDPLDAERKGVLRLPESGENTLTEFQSDQGAYLLLPSYVIRTHGIKQQRETVKRTPRKQLELVLEALDTLGNTKWRINCRILGVLN

SEQ ID NO: 86653 - protein, 53 aa, Gossypium hirsutum
  Clone ID: LIB3189-011-P1-K1-B8.pep
PPSDPVDPPPLDLSKPAKGVVILPFISAGISYLRGVYLLSIFLLDHSLNLPFL

SEQ ID NO: 86654 - protein, 60 aa, Gossypium hirsutum
  Clone ID: LIB3189-011-P1-K1-C8.pep
AFVACAFSPFQTLFLFGNFGFCSFYPLSRPSSFDCYSNYFHLKKKRKINFFLNCPNSCSW

SEQ ID NO: 86655 - protein, 45 aa, Gossypium hirsutum
  Clone ID: LIB3189-011-P1-K1-D10.pep
IAPFQIVLVTLFFKYYLFLIYIGLYMSIRCLGLKFLFYECNIILS

SEQ ID NO: 86656 - protein, 133 aa, Gossypium hirsutum
  Clone ID: LIB3189-011-P1-K1-D8.pep
MASNVRANMGILSKALTRLRRTGALYSRPNQSLPPPKHWVPSSSFSTAAAVASSQSLHDKEKGSKWSRWFLFLPGAITFGLGTWQIFRRQDKIEMLDYRQKRLQMEPLKLNDMPPSSEILDTLEFRRVGCKGS

SEQ ID NO: 86657 - protein, 79 aa, Gossypium hirsutum
  Clone ID: LIB3189-011-P1-K1-E1.pep
HSNLEPVYSFKPSIMASDHAAAPTSRSDQLTHSYCPDPAHNAFACDPIVPEPNEGDESVSDLLAEVEAMESLNGLTSPT

SEQ ID NO: 86658 - protein, 138 aa, Gossypium hirsutum
  unsure (1)..(138): unsure at all Xaa locations
  Clone ID: LIB3189-011-P1-K1-E2.pep
LISMSPCLNFITGNSSTPSQQCCXQLASVVRSSPQCLCEVLNGGGSSLGINVNRTQALALPGACNVQTPPISACNGASPAPADSPVGSPESGSTIPTGGSKTVPSSEEDGSPSSSSSGSTMTKLTLSLLFFLIVAISH

SEQ ID NO: 86659 - protein, 38 aa, Gossypium hirsutum
  Clone ID: LIB3189-011-P1-K1-F1.pep
HAVRVGVGLMRFPTCPQFALLLQKDVGEAKDFRETEGG

SEQ ID NO: 86660 - protein, 40 aa, Gossypium hirsutum
  Clone ID: LIB3189-011-P1-K1-F11.pep
STVDHQQKLLGYLTFFKALLLPNQTYRMDLHQAEIAKIHK

SEQ ID NO: 86661 - protein, 58 aa, Gossypium hirsutum
  Clone ID: LIB3189-011-P1-K1-F2.pep
KICQNNISQTNNKRSITTYTHYSHSYPMKSISKSSNNSIHPFYVETPPVKTPTPIIYI

SEQ ID NO: 86662 - protein, 32 aa, Gossypium hirsutum
  unsure (1)..(32): unsure at all Xaa locations
  Clone ID: LIB3189-011-P1-K1-F4.pep
MRVFNYSPWKLRLLNVLXLGIGPSLFLYKPPP

SEQ ID NO: 86663 - protein, 65 aa, Gossypium hirsutum
  Clone ID: LIB3189-011-P1-K1-G10.pep
MCGGVVHGGGCTPGSRVLDAVKSLHKVDPSTVTPDVHLQKDLGLDSLHNVEIVMALEEEFKLEIP

SEQ ID NO: 86664 - protein, 63 aa, Gossypium hirsutum
  Clone ID: LIB3189-011-P1-K1-G11.pep
THSLERHCFFQCASDSSYCTARELPKWVPPWRRIPTGTLNVQRSKYWRAHRSVSVDNIIRVQA

SEQ ID NO: 86665 - protein, 89 aa, Gossypium hirsutum
  Clone ID: LIB3189-011-P1-K1-G7.pep
MRKIIVSKALFFYAGLSFSAGAAVAQNEEDQCLAMNFYKASCDHAEDIINDQVKLLYKLHKNTAFSCLKNIFHDCSIQSCDASLLLDFH

SEQ ID NO: 86666 - protein, 44 aa, Gossypium hirsutum
  Clone ID: LIB3189-011-P1-K1-H12.pep
APLCSTAVATFTPPKSPEDPLSNDQPNLSTPSEFNSTPTCDDYC

SEQ ID NO: 86667 - protein, 100 aa, Gossypium hirsutum
  unsure (1)..(100): unsure at all Xaa locations
  Clone ID: LIB3189-011-P1-K1-H3.pep
PLAGFFVLKSNYCYQNGCLKQCVGRLSSGGKVLXEEEKAAENVYIKKTEKEKLEKLARMVPKPDEKPAVGSRGSVTDAYPSICTLTSRALFTEKVLTDKY

SEQ ID NO: 86668 - protein, 58 aa, Gossypium hirsutum
  Clone ID: LIB3189-011-P1-K1-H6.pep
MFKNQLQELAQRSCFNLPSYSCIREGPDHAPRFKATVNFNGETFESPMFCSTLRQAEH

SEQ ID NO: 86669 - protein, 81 aa, Gossypium hirsutum
  Clone ID: LIB3189-011-P1-K1-H7.pep
IPVTLSNKSDKPPQFTKQSKAKSILPPLHNRGKRRMHHLMLVLVTSLIDSALHFDSKTITYILTYVLLKILTIIHTHIYIH

SEQ ID NO: 86670 - protein, 45 aa, Gossypium hirsutum
  unsure (1)..(45): unsure at all Xaa locations
  Clone ID: LIB3189-012-P1-K1-A2.pep
LLSLVLPSAEPYPPRPCGRPPQWVDAXGILSTSPSVKTSSHPIGR

SEQ ID NO: 86671 - protein, 37 aa, Gossypium hirsutum
  Clone ID: LIB3189-012-P1-K1-A5.pep
AVTPFNPTRVMYALVRKISEVGLDPSIQPRESRFQIS

SEQ ID NO: 86672 - protein, 51 aa, Gossypium hirsutum
  Clone ID: LIB3189-012-P1-K1-A6.pep
ECQNLQTLVLVYVVKVSQLGIISISASTSTKFIIFKKRIYFVHTKVNILVF

SEQ ID NO: 86673 - protein, 108 aa, Gossypium hirsutum
  unsure (1)..(108): unsure at all Xaa locations
  Clone ID: LIB3189-012-P1-K1-A7.pep
MASSSSLTLSQALLARAISSHGSAQPSDHRVSLSALSIPTFSGLKSAAPRPSTXRXPPSTRSTWNHQVRSAAVETIGTAAETSLIEKSVNTIRFLAIDAVEKANSRHS

SEQ ID NO: 86674 - protein, 49 aa, Gossypium hirsutum
  Clone ID: LIB3189-012-P1-K1-B5.pep
SDAWVYSVFLGGSFSRDPPNTSALFKKPRVDLFVFILLTTPPILHHPPS

SEQ ID NO: 86675 - protein, 51 aa, Gossypium hirsutum
  unsure (1)..(51): unsure at all Xaa locations
  Clone ID: LIB3189-012-P1-K1-B6.pep
FFFXPNTIILCGLLYKEEEMADHLTDQQISEFKEAFSLFYKDGLRVHYYHS

SEQ ID NO: 86676 - protein, 64 aa, Gossypium hirsutum
  Clone ID: LIB3189-012-P1-K1-C2.pep
KPTIFDCKVFFRGIHAHFCILNTKKRNQNLEKVIIRLWPFFSVCFHLLFLLFGCTYCHFEHKKG

SEQ ID NO: 86677 - protein, 52 aa, Gossypium hirsutum
  Clone ID: LIB3189-012-P1-K1-C4.pep
CFYFQNRGEESMDSKENPERYKVGDDARSSYRSICLDPTFSSCLIFFRSYFI

SEQ ID NO: 86678 - protein, 99 aa, Gossypium hirsutum
  unsure (1)..(99): unsure at all Xaa locations
  Clone ID: LIB3189-012-P1-K1-C5.pep
DHPKKEWGSASEDSSLRAQTRAQWRLLXRCLANRAPSNXRPXFGVDHERHIPDVLFFRITKYVRHNNPELIRVSFKARCVENIDDSRRRYIVPLHEEDF

SEQ ID NO: 86679 - protein, 135 aa, Gossypium hirsutum
  Clone ID: LIB3189-012-P1-K1-D1.pep
YQYFLGFFLLFLINFTLVSAEINGSVLKMRGGTSSVQFDPTSVTQLSWRPRAFIYKGFLSSEESDHLIFRAKDKLEKSMVADDVSGQSIESEVRTSSGMFLEKALDEVVADIEARIAAWTFLPVENGEALQKLHY

SEQ ID NO: 86680 - protein, 41 aa, Gossypium hirsutum
  unsure (1)..(41): unsure at all Xaa locations
  Clone ID: LIB3189-012-P1-K1-E2.pep
NVLLGRIKIVHDEDHLPKIGYNLVKAPPFLQIKQQFXCXXV

SEQ ID NO: 86681 - protein, 66 aa, Gossypium hirsutum
  Clone ID: LIB3189-012-P1-K1-F11.pep
IRDSRIIKDIQNKKFYFQEITFQHIHRSGNSQAHRFAKNTLDRGEISYLVGEELNRHPSDLEGRWS

SEQ ID NO: 86682 - protein, 70 aa, Gossypium hirsutum
  Clone ID: LIB3189-012-P1-K1-F2.pep
SLCPFFCFSLCDFPYTIVGTGSFDVSEKEVYEIDYRGPETHTLIPPPGHGHRSSGHQLTDLPTHELRRGN

SEQ ID NO: 86683 - protein, 97 aa, Gossypium hirsutum
  Clone ID: LIB3189-012-P1-K1-G10.pep
PRVRKNLLLKRYNGRKKIRKLRDADWQEASLDHNELMDGRNEEASDMNHEDGESENGGYDDMQEAPDAQREDGGLHDTRQNCVEGSFNLQSGTHCKN

SEQ ID NO: 86684 - protein, 82 aa, Gossypium hirsutum
  Clone ID: LIB3189-012-P1-K1-H1.pep
STAHGEVLQILHYEFGHKYEPHHDYFCLSVLLLQITLNTFYHLYTLIHDWNDMSSILNTYRSSFKSLFLCVSFISSYLYFIS

SEQ ID NO: 86685 - protein, 63 aa, Gossypium hirsutum
  Clone ID: LIB3189-012-P1-K1-H4.pep
MKIIRIGNILQSCIKKEQNRKVQGRRAKVEKDAPPHRCFYPFSFCSLQQMEVKTEIESDGSKR

SEQ ID NO: 86686 - protein, 149 aa, Gossypium hirsutum
  Clone ID: LIB3189-013-P1-K1-A2.pep
LGKVICSKCGPNFYVCPMRGECRHFVSACACTWLALTGPEEKSIVSASDNTKPGHNHAVIIDQKALPLLQPIEQSDTNCQPEANQQLQAKSWVNNCSHNHAVIIDQALPLLQPMEQSDRYCQSEANRQLQAKFRVNNCDPIIGEPASPE

SEQ ID NO: 86687 - protein, 70 aa, Gossypium hirsutum
  unsure (1)..(70): unsure at all Xaa locations
  Clone ID: LIB3189-013-P1-K1-B4.pep
PVLPQXQENNLKDSLEEAAEDKSLSKSQNIDPSSLNQDGSNGRSRSLARLHSQNDFLNATSLVSYRIFFS

SEQ ID NO: 86688 - protein, 54 aa, Gossypium hirsutum
  unsure (1)..(54): unsure at all Xaa locations
  Clone ID: LIB3189-013-P1-K1-B6.pep
GKKKKSLXLSTGIKIFFSENKKMLCRKNSSCEETGSVPVYLNVYDLTPINGFAH

SEQ ID NO: 86689 - protein, 59 aa, Gossypium hirsutum
  Clone ID: LIB3189-013-P1-K1-C1.pep
TQYIHWIYSCVSRALRSVEYIYVASIRPGVVDLSFVGVSYLLFRCLSPFLSFVVYMKEA

SEQ ID NO: 86690 - protein, 64 aa, Gossypium hirsutum
  unsure (1)..(64): unsure at all Xaa locations
  Clone ID: LIB3189-013-P1-K1-C10.pep
MATKTMMLRIFSLFLLWFKVXNSIFLGANGDDNGGWQTAHATFYCCAYATGTIGGACVYINSFY

SEQ ID NO: 86691 - protein, 85 aa, Gossypium hirsutum
  unsure (1)..(85): unsure at all Xaa locations
  Clone ID: LIB3189-013-P1-K1-C11.pep
LPQEDEEKVVVSIPVTLVKLKLGMGLGLGIELITGCASANSCCSFNPLPMWSFLNRCFIFGIEHQRRLSPPFLFKXSIFFFFNFD

SEQ ID NO: 86692 - protein, 65 aa, Gossypium hirsutum
  unsure (1)..(65): unsure at all Xaa locations
  Clone ID: LIB3189-013-P1-K1-C6.pep
SRNLKMSVGRFLSGLEGGPIKTNVGFRVKAMGSDRNPFRYFHSSNYAXYLLNHCHSLSHLDVPFN

SEQ ID NO: 86693 - protein, 62 aa, Gossypium hirsutum
  unsure (1)..(62): unsure at all Xaa locations
  Clone ID: LIB3189-013-P1-K1-C8.pep
KIFLYNSFILLVSTLYYLFILIGYSFHSFXXFHINYFFTSYFLYLLLIFFFFFFFYFIFFIL

SEQ ID NO: 86694 - protein, 63 aa, Gossypium hirsutum
  Clone ID: LIB3189-013-P1-K1-D2.pep
KRYQTKLLPDCLLLLQFTSPPDKLTDLSSASCNIDLFARVKCSPLLDKPCSYTNVLLKPVLSR

SEQ ID NO: 86695 - protein, 47 aa, Gossypium hirsutum
  unsure (1)..(47): unsure at all Xaa locations
  Clone ID: LIB3189-013-P1-K1-D5.pep
NKTQSLKNCQILFKSSLTXLPIXILPNPINTLSLKPPVGNLSIKLLR

SEQ ID NO: 86696 - protein, 45 aa, Gossypium hirsutum
  Clone ID: LIB3189-013-P1-K1-E2.pep
NIQTSKKEHNLIFFLNQQPDVNSLKKTEFRTKERPSTNLKTYMQN

SEQ ID NO: 86697 - protein, 46 aa, Gossypium hirsutum
  Clone ID: LIB3189-013-P1-K1-F8.pep
CSCSHHQGCSKYSLNLAMNNSHTISMILLSPSSTENTHSWTSLSTT

SEQ ID NO: 86698 - protein, 100 aa, Gossypium hirsutum
  unsure (1)..(100): unsure at all Xaa locations
  Clone ID: LIB3189-013-P1-K1-G1.pep
HASAWSLLKQLIKDCSFPWLVVGDFTEMVYSFEKQGGRVRDEXACRXFHDVLKECELSDLGFFSQWFTWKRGQLPENNVCARLDRGWLVQLGGSYFFHFF

SEQ ID NO: 86699 - protein, 57 aa, Gossypium hirsutum
  Clone ID: LIB3189-013-P1-K1-G3.pep
FSDSSLYFFLNFSPMATAMVGDSIFVEGRAAFMTTNDIFLAFHYFHNKILILNEEMP

SEQ ID NO: 86700 - protein, 100 aa, Gossypium hirsutum
  Clone ID: LIB3189-013-P1-K1-G7.pep
MEEDDDYVEYIPVAKRRAMEAQKILQRKGKASALEDETEKANVAEVKPSLLIKATQLKKDQPEISQMEQIVQQEKEMIEHLFDRKTLMSVRELAKGITYT

SEQ ID NO: 86701 - protein, 89 aa, Gossypium hirsutum
  unsure (1)..(89): unsure at all Xaa locations
  Clone ID: LIB3189-013-P1-K1-H2.pep
WNVMVPPLYLWSRSDFSAKNKSIAEKHGQVPREPASSNQEMNIDETRRSDFELPLEDDXLRDDATELKDHMQNYEIEECKKREIFGGDP

SEQ ID NO: 86702 - protein, 78 aa, Gossypium hirsutum
  unsure (1)..(78): unsure at all Xaa locations
  Clone ID: LIB3189-013-P1-K1-H5.pep
MVSHIVGYARMAPKRELKFALESFWDNKSSAEDLQKVAADLXSSIWQHMAVAGIKYIPSNTFSYYDQVLYATFMLGAV

SEQ ID NO: 86703 - protein, 56 aa, Gossypium hirsutum
  unsure (1)..(56): unsure at all Xaa locations
  Clone ID: LIB3189-013-P1-K1-H6.pep
KHGRLSPYKIAINYEGLKTQEGDRTLFYFEYLGPLXLYPVYYYFPAYKYSGYEEKR

SEQ ID NO: 86704 - protein, 63 aa, Gossypium hirsutum
  Clone ID: LIB3189-013-P1-K1-H7.pep
DDVFIELWINFAFFFFFLHTYAHFFYSYFVYSLIAYFFIYLFILTILFSSFNILFILFHLFYV

SEQ ID NO: 86705 - protein, 127 aa, Gossypium hirsutum
  Clone ID: LIB3189-014-P1-K1-B11.pep
MEEQLIFAWAMIFCIAIAPVYGEYYSKTVTPSSKAEKVTNLHFFLHDTLSGENPSAVLVAHANLTRKDHSPVPFGSLFAIDDPLRVGPEPTSKIIGNAQGLYLSSSQDASKFTIVLYADFAFTTGKF

SEQ ID NO: 86706 - protein, 133 aa, Gossypium hirsutum
  Clone ID: LIB3189-014-P1-K1-B4.pep
LRKGIPLLRLRLQRYNLLAAGIPSSPRRRWCAAAESTGLEEEVSSAEKSSAVPSVRDPKKYHMLDDPDYRKWKDKEEEILRDIHPIISLARENLHSNWYKDGERMYCYNLRNLFFRCLFFITALQAGNLSILT

SEQ ID NO: 86707 - protein, 41 aa, Gossypium hirsutum
  Clone ID: LIB3189-014-P1-K1-B5.pep
QINNIIIYLFNADPLSPLDIRHYPWMHHHHCNSILVYQSLK

SEQ ID NO: 86708 - protein, 72 aa, Gossypium hirsutum
  unsure (1)..(72): unsure at all Xaa locations
  Clone ID: LIB3189-014-P1-K1-B6.pep
NTNNFQLTFNNHXQQQPKEGFQTSEEGHLKXXTIICIIHHQGKPHKVLLKDIFILLIIHNYNLKVYMSHHHL

SEQ ID NO: 86709 - protein, 101 aa, Gossypium hirsutum
  unsure (1)..(101): unsure at all Xaa locations
  Clone ID: LIB3189-014-P1-K1-C5.pep
SSSGSDSRCSSAFGLLLCCDQDGCLSLSCGGAKSYVDSSKIKWVSDDTFITTGNTTTVEYAESTFSSASIALRFFPEPLGPNCYKLPVENMSSXVLVRAQF

SEQ ID NO: 86710 - protein, 52 aa, Gossypium hirsutum
  Clone ID: LIB3189-014-P1-K1-D12.pep
IRTKFFSSFIFDGSFGNVSTTISLSSIPIFSHFYHIRVVFHHPFPFIHILHG

SEQ ID NO: 86711 - protein, 107 aa, Gossypium hirsutum
  Clone ID: LIB3189-014-P1-K1-D8.pep
IFSLFSFVELPEERSYCRGVRMGCLSQTVTAFCLKRCVFEVVLFAFVIPPFFLLIFNIFPQFLFFFIIYYFFISFLNFFYLFLVVIFFFSFLFHFFFFYLLISLFYF

SEQ ID NO: 86712 - protein, 60 aa, Gossypium hirsutum
  unsure (1)..(60): unsure at all Xaa locations
  Clone ID: LIB3189-014-P1-K1-E11.pep
KKKEINYITCYILIIKYTGIFDITILXXLGAFFYPLETVLIGDQLLSMKKTKITDGDASY

SEQ ID NO: 86713 - protein, 39 aa, Gossypium hirsutum
  unsure (1)..(39): unsure at all Xaa locations
  Clone ID: LIB3189-014-P1-K1-E4.pep
CDYHXTFRIYISDVKIXLLXKNVTGKKNTSFAEMEWGNS

SEQ ID NO: 86714 - protein, 108 aa, Gossypium hirsutum
  unsure (1)..(108): unsure at all Xaa locations
  Clone ID: LIB3189-014-P1-K1-F1.pep
CLAWRLGVSVILRSYSKRYMNVYIEDSELRVKWRFTGFYGSPYAQDRNDSWDVLRILKVVGNIPWFICGDFNEIMYGSEKKKREXIPRDERRMDLFRKTLEDCQMSDV

SEQ ID NO: 86715 - protein, 52 aa, Gossypium hirsutum
  Clone ID: LIB3189-014-P1-K1-F2.pep
QSALNCSLFSKMNFETRPSLYTRNQIKCHIHHTKLCHTTNPFHKQRQNFLRP

SEQ ID NO: 86716 - protein, 76 aa, Gossypium hirsutum
  unsure (1)..(76): unsure at all Xaa locations
  Clone ID: LIB3189-014-P1-K1-F3.pep
PRVRSNLSQLFLFSSFFSIKNRMSSILTRSVLKLFLLISLFQISXAGRKLIEVVQDQSYLLTYHNVPLLSSKITIN

SEQ ID NO: 86717 - protein, 41 aa, Gossypium hirsutum
  Clone ID: LIB3189-014-P1-K1-F5.pep
KGGPFFFFFFFFFFFLKIFFFFFFFFFYKKIFFFFFFFFFF

SEQ ID NO: 86718 - protein, 74 aa, Gossypium hirsutum
  Clone ID: LIB3189-014-P1-K1-F6.pep
HVGAVQPGERVFVIDDLVATEETLSGAMRVLERVGAQVVECACVIGLREVKGQRRLNGKPLYILVEPREIDGCY

SEQ ID NO: 86719 - protein, 29 aa, Gossypium hirsutum
  Clone ID: LIB3189-014-P1-K1-F9.pep
FLLVKENSHLREFTGFWKSFKNAGMILSL

SEQ ID NO: 86720 - protein, 72 aa, Gossypium hirsutum
  unsure (1)..(72): unsure at all Xaa locations
  Clone ID: LIB3189-014-P1-K1-G1.pep
VSKRLIFLSLLTAIIFLISKGDIESTHTLPCSSPFLFVFSSFPVDPRLMRTIGWEIIQSLGGSIVDSXIFFI

SEQ ID NO: 86721 - protein, 60 aa, Gossypium hirsutum
  Clone ID: LIB3189-014-P1-K1-G5.pep
TMFASTGPEHETEIFDNRVSVRVFHVPFRISNRKLLIRHEYNETSQKSSIDCNRRESELI

SEQ ID NO: 86722 - protein, 71 aa, Gossypium hirsutum
  Clone ID: LIB3189-014-P1-K1-H1.pep
TVPFIPFFLSFSTSDARLLITHCSSLLFSSVSKNVTQVVVCHFTDSCGSTMFNPIPSSLPFAFWPSLNSIF

SEQ ID NO: 86723 - protein, 82 aa, Gossypium hirsutum
  Clone ID: LIB3189-014-P1-K1-H11.pep
LRPNGFGRLSIMIFFLFTIDFLKGLYDLFFVVLLVFFSKPKRGGGLTGKCKHIQQSTESALLDLQLLFLFFNYTNSYSILDS

SEQ ID NO: 86724 - protein, 50 aa, Gossypium hirsutum
  Clone ID: LIB3189-015-P1-K1-E6.pep
QINNRSDHQRYIEYEKVLSRNSFSAYSYIRNTQKVTDLHRIRLKEERYCT

SEQ ID NO: 86725 - protein, 67 aa, Gossypium hirsutum
  Clone ID: LIB3189-015-P1-K1-F12.pep
DSNGPFLYKIIYHFFFFSLVFLNFFFIYFFFLYIPIFFHFYFFFIYLFILFLFNLIIFFFICFIIFY

SEQ ID NO: 86726 - protein, 57 aa, Gossypium hirsutum
  Clone ID: LIB3189-015-P1-K1-F5.pep
LRPFYHFHSLGSISLNNLKYHLFTLIISLFLITNLPYKPNSFFFLLFFSLYFYFYYL

SEQ ID NO: 86727 - protein, 56 aa, Gossypium hirsutum
  unsure (1)..(56): unsure at all Xaa locations
  Clone ID: LIB3189-015-P1-K1-H4.pep
TNHFTGSIPASIASCEKLXTLNVXNNRLTGDIPESIAMMPTLAVVDLSNNFLTGAI

SEQ ID NO: 86728 - protein, 44 aa, Gossypium hirsutum
  Clone ID: LIB3189-015-P1-K1-H6.pep
RNHSTIRRMRGRSDGSQKKRLITCVFAFVILSWFYYSIFKDLFI

SEQ ID NO: 86729 - protein, 139 aa, Gossypium hirsutum
  Clone ID: LIB3189-016-P1-K1-A10.pep
ALLPEFTPNPVLERFYRHLELKAKQPDAAVPPLDETLKNIVEPDPELVAENKSVFDALHRHFELRQNPKLKKSSRQWYQEKQSGSNAHVSSGQAVNFIENQPPVKIEKIGDLTPVQDFEAMMSQKDNPEWVGKAIKELR

SEQ ID NO: 86730 - protein, 96 aa, Gossypium hirsutum
  Clone ID: LIB3189-016-P1-K1-A6.pep
IIFKYKRDIMFSFVFCDFLWYLFIFLYSLSDWSCSGWLAGRLSCQQLCDFLSHPPTLPSSPCLFQIQSLKGIFENCIIFLVVQCCMGYIVLGITKE

SEQ ID NO: 86731 - protein, 95 aa, Gossypium hirsutum
  Clone ID: LIB3189-016-P1-K1-B6.pep
PSYIVFFHQRKFTLVASEHFDNVGAVQNTNSEGPPAIMVARASFKGLARLFGYSDCGYADDDVYRTDDDLSEHTLSTVMTMVVSTRLSTIRGCGV

SEQ ID NO: 86732 - protein, 80 aa, Gossypium hirsutum
  Clone ID: LIB3189-016-P1-K1-C10.pep
LPLIYLAANSGARIGVAEEVKACFKVGWSNESSPERGFQYVYLTPEDYTKIGSSVIAHEMKLASGESRWVIDTIVGKEDG

SEQ ID NO: 86733 - protein, 120 aa, Gossypium hirsutum
  unsure (1)..(120): unsure at all Xaa locations
  Clone ID: LIB3189-016-P1-K1-C12.pep
KSTVVTSFTSTGRALTVTESSEAPSCIEHQLAEVIVAIVSAYIRMQTIPNSSKASVLADARKTYXTTMVLEQSPRMFYLGVYTXRCMNCETTSKQDEKLIKHSKGXDRVIFAQIDACANE

SEQ ID NO: 86734 - protein, 86 aa, Gossypium hirsutum
  Clone ID: LIB3189-016-P1-K1-C4.pep
NSPSSPVVEGPFPVVGIRPKRGARGALSWFFRPKKVGSLSALEIGVETPLLRNVGHRSRWRYGGTYGRNPRPSRSGGLREGESSKA

SEQ ID NO: 86735 - protein, 151 aa, Gossypium hirsutum
  Clone ID: LIB3189-016-P1-K1-C7.pep
FVFLLVSLLAIVDQTRNPAYVDQVVLAHDVPQQPPAAAVVKEPPQAETDEESVNQKPVEKALVEEYLSKPKCDNQGNVLQSGSFKEESTRVVDLLDNEKKALQQLKQLVQEALNKHEFGGQQPEAPKEDDEKKSAKEEAKDEAVICDEPPK

SEQ ID NO: 86736 - protein, 81 aa, Gossypium hirsutum
  unsure (1)..(81): unsure at all Xaa locations
  Clone ID: LIB3189-016-P1-K1-D3.pep
MAGYRAKDDYHFLFKGVLIGDLGGGKANLFLRVTKNQVNLEFKGTIGGEVASWSLDGEGEGIKAXIWDTGGQKRDRGITRG

SEQ ID NO: 86737 - protein, 137 aa, Gossypium hirsutum
  Clone ID: LIB3189-016-P1-K1-D9.pep
EDSTQGEEGTEGNKGQGQVVVQVVEEEEEEEKEEEEEYFYESLDRIASSNSCSCSNSTTPSSDSDSDPVTRSSNARHPFPVPKFPMAVSKFDIWISEPAFVSERRTRLHREMGLSRDPGLSRSIPGSETELGLGREM

SEQ ID NO: 86738 - protein, 37 aa, Gossypium hirsutum
  unsure (1)..(37): unsure at all Xaa locations
  Clone ID: LIB3189-016-P1-K1-E1.pep
WGLKVKASRPVWLNSAKLVFWRYKKIKVSFGSQYLFX

SEQ ID NO: 86739 - protein, 149 aa, Gossypium hirsutum
  unsure (1)..(149): unsure at all Xaa locations
  Clone ID: LIB3189-016-P1-K1-E12.pep
RSRPYYSLKTTEQPSEKKKGFGDWMNLMKPGTEEKDHWVPDEAVSKCTACGTDFGAFVRKHHCRNCGDIFCDKCTQGRIALTADENAQPVRVCDRCMAEVTQRLSIAKETASKPAALQSHEDLARKXEEMEKNCRASSGSKSDGSGRRM

SEQ ID NO: 86740 - protein, 102 aa, Gossypium hirsutum
  Clone ID: LIB3189-016-P1-K1-E8.pep
AQKLDGNATRCDSQSSLSVSSPPDSPVHLSHDDLDESGGSTVLSAEENKEVNLSRPEIEPLVLPTEAGKQDVRTASSSISAGDDEEWTVDNNEQLQEQVEYD

SEQ ID NO: 86741 - protein, 128 aa, Gossypium hirsutum
  Clone ID: LIB3189-016-P1-K1-F5.pep
MAVDKDKLQEEASIVRFCKIILGWDYFRLLKLSKKNNKDEATSALKEVKDSYKDVDDYLATFEPLLFEEVKAQIVQRKDEEEVADWKLKLVMECNEADGFYLPAITYEAEEEESISQNGLLLLSKEDF

SEQ ID NO: 86742 - protein, 61 aa, Gossypium hirsutum
  unsure (1)..(61): unsure at all Xaa locations
  Clone ID: LIB3189-016-P1-K1-F9.pep
PRVRARFRAXVDKCGALLLCDMAHISGLGAAHEANNPFEFCDIVTTIIHKSLWCPRAAIIF

SEQ ID NO: 86743 - protein, 49 aa, Gossypium hirsutum
  Clone ID: LIB3189-016-P1-K1-G11.pep
SLGGETIKPGRSKHILASDISKCGLKKGVHFYYIPFKRPSLVLGQALNL

SEQ ID NO: 86744 - protein, 109 aa, Gossypium hirsutum
  Clone ID: LIB3189-016-P1-K1-G3.pep
RRDVSKAESKLDSEKSNLDEEFKKLQEKKKKAVKERKLVDLEMAKASELRKSAEETKKKAVDERKCADLEMAKAEKQRKIAKETKKKAVEDRKRADLEMAEAVKQRKIA

SEQ ID NO: 86745 - protein, 127 aa, Gossypium hirsutum
  Clone ID: LIB3189-016-P1-K1-G6.pep
MTQPSVILATASYDHTIRFWEAKSGRCYRTIQYPDSQVNRLEITPDKRYLAAAGNPHIRLFDINSSSPQPVMSYDSHTNNVMAVGFQCDGKWMYSGSEDGTVKIWDLRAPGCQREYESRGAVNTRVL

SEQ ID NO: 86746 - protein, 70 aa, Gossypium hirsutum
  unsure (1)..(70): unsure at all Xaa locations
  Clone ID: LIB3189-016-P1-K1-H7.pep
RCFESYEIELTXLRTXSTXRINLEPXHXXISXXHXXDXSIGSLEEXXMGLHYXPCTSSFPSSSCELRLER

SEQ ID NO: 86747 - protein, 62 aa, Gossypium hirsutum
  Clone ID: LIB3189-017-P1-K1-A12.pep
ANLIWCGQAVVVSIMTQHGKPRTFSKMLLQSGCADSSRILGYQTILTLYYLIAIQFQSDLFN

SEQ ID NO: 86748 - protein, 57 aa, Gossypium hirsutum
  Clone ID: LIB3189-017-P1-K1-B10.pep
PRVRAGDLGTMFVKRDHVREARCGTPSSFNPPALAGVSPIRARGDEMDVDEEEEDVG

SEQ ID NO: 86749 - protein, 112 aa, Gossypium hirsutum
  unsure (1)..(112): unsure at all Xaa locations
  Clone ID: LIB3189-017-P1-K1-C1.pep
GPVFTSARLIHSFPRHETVKLNVGTFVQWKQHVRLIVEGYEPTGFLDGTVPAPPQFVPSPKGSIVQNPDASAFLQQDRLLTSXLLSTIDSSLLSSFTEARTACDVWSIATRL

SEQ ID NO: 86750 - protein, 77 aa, Gossypium hirsutum
  Clone ID: LIB3189-017-P1-K1-D7.pep
MSSGKGGELIPSSSELDLDRPNIEDYLPSGSSIHEALGKLRLCDLLDISPTLTEAAGAIVDDSFTRCFKSNPSEPWN

SEQ ID NO: 86751 - protein, 56 aa, Gossypium hirsutum
  Clone ID: LIB3189-017-P1-K1-E1.pep
FLGLILLIIQCMLPDHTASSFLLETLILIIKKWNLNTHLLRLPVLYDYGIGRTNME

SEQ ID NO: 86752 - protein, 123 aa, Gossypium hirsutum
  Clone ID: LIB3189-017-P1-K1-F3.pep
TTLKELLPAIINGGNKLDHILRVLLSHILGSAQRCPPLSGVEGSAESHLRVLGEQERWNLDVSLRMLAKLLPFIHQKAIETCPFSSVSDSNRTLLSSSILELDAGGHVEWPAFEWVHVDCFLG

SEQ ID NO: 86753 - protein, 145 aa, Gossypium hirsutum
  Clone ID: LIB3189-017-P1-K1-G3.pep
ISEWRNKGVEGMFEDIHEMDTASIEDSHLASIDFKGHLGMRLGNHGASSSTGSMTSLSSTNTPRGSHFDSFWLERNNPSELEDLQQMVDLANIARCVADTDLLKEGSHEFLLACMQDLQDVLRHSKLKALVIDTFGGRIETLLRE

SEQ ID NO: 86754 - protein, 90 aa, Gossypium hirsutum
  unsure (1)..(90): unsure at all Xaa locations
  Clone ID: LIB3189-017-P1-K1-H8.pep
VPPFFSSASSSLVLPSSAFSFSFFGWPLRCCPLLLLVCSPAARSSLRGFWWRPLLLCALRLGXAPALXFLALXRMXAVSFSAXAWAVAWV

SEQ ID NO: 86755 - protein, 63 aa, Gossypium hirsutum
  Clone ID: LIB3189-018-P1-K1-A1.pep
MMQIFAKTLTGKTFTLEVESSDTIDNVKAKIQDREGIPPDQQRLIFAGKQFEDGRTLLDTTFI

SEQ ID NO: 86756 - protein, 119 aa, Gossypium hirsutum
  unsure (1)..(119): unsure at all Xaa locations
  Clone ID: LIB3189-018-P1-K1-A11.pep
PTRPVDDDDEAHEEEDGLGLFDGNDEEDEDDLENARYEDFFSRKKNKSSKEKAKSRDMXKKIQDQMINKMWIRERMALLSISKIEEMEKANLDPNVWTLFGECNSSFRLNISVIIKLFY

SEQ ID NO: 86757 - protein, 64 aa, Gossypium hirsutum
  Clone ID: LIB3189-018-P1-K1-B5.pep
MDRFPDVLCGWSWEENKLFELALAVVDEQHPDRWEVVAAMVGGKKTAEDVHKHYVILLEDLQFI

SEQ ID NO: 86758 - protein, 50 aa, Gossypium hirsutum
  unsure (1)..(50): unsure at all Xaa locations
  Clone ID: LIB3189-018-P1-K1-C3.pep
DCLANLVLARQNKKGNCKLLECMFLFGCLYCSYQTPEINHLLYHSAIVCX

SEQ ID NO: 86759 - protein, 40 aa, Gossypium hirsutum
  Clone ID: LIB3189-018-P1-K1-C6.pep
KFLLKNRTNRLTKQEKKSLLCDNKIRITNCQCFNIMLCVK

SEQ ID NO: 86760 - protein, 63 aa, Gossypium hirsutum
  Clone ID: LIB3189-018-P1-K1-D12.pep
RKMCLKFLNKWWVLSPKTQLLSLAMEMVHNMFLLPPPVTKIQPPQIATLASEIMWAFALVLEW

SEQ ID NO: 86761 - protein, 67 aa, Gossypium hirsutum
  Clone ID: LIB3189-018-P1-K1-D5.pep
RFACFHGNTRGDCTSVYVCCNKNVREIRRYFVLTMLSSVFMFRSIVTYYMNITIFFYYLSYNMLFYY

SEQ ID NO: 86762 - protein, 101 aa, Gossypium hirsutum
  Clone ID: LIB3189-018-P1-K1-D8.pep
PRVRINAGDLACTIQTIAFLAAVYGKDEEYGDSRLLKENQIGQKGPVLIICPTSVICNWKCEFSRWAPFNVSLYHGSSRELILEKLQANGVEVLGTSFDTF

SEQ ID NO: 86763 - protein, 164 aa, Gossypium hirsutum
  Clone ID: LIB3189-018-P1-K1-F10.pep
ATTAAGRLVASHGFLEAVWPYSGHYLPTEDNFKEFIIFLEEHNVDLTNVKRCAVDEGYTSNKVVGYESKHGVIKDTMETEKSRDSKTVEVDDEPANDECIRTESLEVSIDSSAAQAFNMAKPLSCKWTSGIGPRIGCVREYPKELQFQALEQVNLSPRVTPGRF

SEQ ID NO: 86764 - protein, 32 aa, Gossypium hirsutum
  Clone ID: LIB3189-018-P1-K1-F3.pep
MSDAWPRSPTTRLNIKYKAVQNWTIEIIALDE

SEQ ID NO: 86765 - protein, 72 aa, Gossypium hirsutum
  Clone ID: LIB3189-018-P1-K1-F5.pep
NLAAVSAIQGELERAHHFVTQALSLVPNSSKATMTAIYVDLMLGKSQEALPKLKHCSHVRFLPSSLQLNKSS

SEQ ID NO: 86766 - protein, 50 aa, Gossypium hirsutum
  Clone ID: LIB3189-018-P1-K1-F6.pep
LHFHRPCQLLHVRTRTRTVIYLTTIYILISCQSYTFLLSYDYCLCYIFFN

SEQ ID NO: 86767 - protein, 42 aa, Gossypium hirsutum
  Clone ID: LIB3189-018-P1-K1-G10.pep
NLPLPIFNLQSAFFVTHQNFGLTQLNFESRIQIKDNLNIEKF

SEQ ID NO: 86768 - protein, 51 aa, Gossypium hirsutum
  Clone ID: LIB3189-022-P1-K1-A10.pep
LYKPRYQGQKLDLDAFFPTIKEPEHAAARAQLSCLAPDANKEVQDERTRGS

SEQ ID NO: 86769 - protein, 52 aa, Gossypium hirsutum
  Clone ID: LIB3189-022-P1-K1-A7.pep
NLISCTTYPKSLGVIYKTQAPPTILKNTEDLLPNSPFHTNYLINSTTLTSFS

SEQ ID NO: 86770 - protein, 59 aa, Gossypium hirsutum
  Clone ID: LIB3189-022-P1-K1-B6.pep
FIDHYISVKKENEIRLFAGSPANQAIFVIMGEKQHKNNPSTCSFLKDTALAISFKRMFN

SEQ ID NO: 86771 - protein, 75 aa, Gossypium hirsutum
  Clone ID: LIB3189-022-P1-K1-C12.pep
AYQPAPSCFSLNHHNPLKANLAWAAILIRHLMFLLRPIHQTCACHPLSNPMGLLSSNSILGIHLKCMSHHLESLV

SEQ ID NO: 86772 - protein, 47 aa, Gossypium hirsutum
  unsure (1)..(47): unsure at all Xaa locations
  Clone ID: LIB3189-022-P1-K1-D1.pep
TSFPIPKSHSCSMNLEADPKTFSNSLFQFINFCITFKTLIIVIXIIN

SEQ ID NO: 86773 - protein, 66 aa, Gossypium hirsutum
  unsure (1)..(66): unsure at all Xaa locations
  Clone ID: LIB3189-022-P1-K1-D6.pep
IKSHNLLEIMESKLSHELFMPKSSTLKHGDCTNNWCTESHVTTHTFPRQKRLXEXSNLLPPLIERG

SEQ ID NO: 86774 - protein, 63 aa, Gossypium hirsutum
  Clone ID: LIB3189-022-P1-K1-D7.pep
ERERPAFPATTTTTRATTKRRRRHNARANATHDGPSRRTTPGHQERPNGHQRNRTPPPPGQPR

SEQ ID NO: 86775 - protein, 38 aa, Gossypium hirsutum
  Clone ID: LIB3189-022-P1-K1-E12.pep
YNFKDRRLYLKYQRSTGTHEIFYKIPTYELVWEINYRL

SEQ ID NO: 86776 - protein, 125 aa, Gossypium hirsutum
  Clone ID: LIB3189-022-P1-K1-E6.pep
MAAAVLRNPNSRRLLSFSSPIYWSCRGFISASNFSVSDLLSGNEEAAAHANANPWWRSMATFTRTKPHVNVGTIGHVDHGKTTLTAAITKVLAEEGKAKAIAFDEIDKAPEEKKRGITIATAHVE

SEQ ID NO: 86777 - protein, 81 aa, Gossypium hirsutum
  Clone ID: LIB3189-022-P1-K1-F10.pep
SSLNSAPFRRFFFQDPPHFSGAPMTTEWAKVRPPGNSFLSFYSFSLFQELKNIKKPEKKRVTNKMEKNPKNLFVFQLSFVF

SEQ ID NO: 86778 - protein, 59 aa, Gossypium hirsutum
  unsure (1)..(59): unsure at all Xaa locations
  Clone ID: LIB3189-022-P1-K1-G10.pep
LNLLRSLIEGFVXVSNPQTAVVSLTNVNGSRKANGVLRKPMMLMRLTVRAVSKEDIYRG

SEQ ID NO: 86779 - protein, 124 aa, Gossypium hirsutum
  Clone ID: LIB3189-022-P1-K1-G5.pep
FQSSNEDPSAYALPLSYRKFYKKLWSLNLPAKIVITIWRLSWNFLPTKVNMQHRKLSNITTCPRCEARAETLDHLFRECPGYLNNSILVKVVYSAALSAFAAEAIACWRAVQIGVDRGWQSVKN

SEQ ID NO: 86780 - protein, 86 aa, Gossypium hirsutum
  Clone ID: LIB3189-022-P1-K1-G6.pep
IREGAREHPTILVLRTEADRLCVLLMYNRRSLKWRIRRAQQNKRLEHGVSRPNTQGTFKKDGSMCELALHNGDMLGSVKAIWAVYL

SEQ ID NO: 86781 - protein, 56 aa, Gossypium hirsutum
  Clone ID: LIB3189-022-P1-K1-G8.pep
QNKGTILWVFLTETGGHYAIPKKYSHDQTIHRLNLSMQENKRKWKIKLHFKSRNAN

SEQ ID NO: 86782 - protein, 58 aa, Gossypium hirsutum
  Clone ID: LIB3189-022-P1-K1-H9.pep
HASAHASAHAFGSVARLQSFFLSWRIFKVSVESVFFQGTRQVLRFYLIHFPRSVFMCY

SEQ ID NO: 86783 - protein, 121 aa, Gossypium hirsutum
  unsure (1)..(121): unsure at all Xaa locations
  Clone ID: LIB3189-023-P1-K1-A10.pep
MMPSVNPDQSDKDPEPFVEVDPTGRYGRYTELLGSGAVKKVYRAFDQEEGIEVAWNQVKLRNFSDDPAMIDRLYSEVRVIRSXTNNNIISLHRTWRDEEHNTLNVITAVCTFGNLMVYRKK

SEQ ID NO: 86784 - protein, 136 aa, Gossypium hirsutum
  unsure (1)..(136): unsure at all Xaa locations
  Clone ID: LIB3189-023-P1-K1-A9.pep
MAMAFATFNLSPSLRFVSNNKGFFDSQLSNFFLSSHLFLGTSSFSVPTLSFSTIHQTSCRPHINASPCSSTSFRCFAQKSPVDGLGSNGASERLVVLVIGGGGREHALCYALQRSPSCDAVFCAPGNAGIXSSGNA

SEQ ID NO: 86785 - protein, 54 aa, Gossypium hirsutum
  Clone ID: LIB3189-023-P1-K1-B3.pep
NSQTFKSHFFLFLFLSLENPRFCLAQGKIINDGRKRSRSGPKSNLTYSQIFLRS

SEQ ID NO: 86786 - protein, 66 aa, Gossypium hirsutum
  Clone ID: LIB3189-023-P1-K1-B4.pep
SLSKTKNLYTYRQLVIQGQNQQWHFVVSVQCVLGANQIGFTLLYSIEKASPSATSFKFNPKSRPTF

SEQ ID NO: 86787 - protein, 60 aa, Gossypium hirsutum
  Clone ID: LIB3189-023-P1-K1-C7.pep
LGDCFYNNSLICPVLCSILPLFFAILIPWTIDILYFNPALVFKFWVIILFVFLYSWSGFF

SEQ ID NO: 86788 - protein, 35 aa, Gossypium hirsutum
  Clone ID: LIB3189-023-P1-K1-C9.pep
NPYMYTLALSHLKTCPVGIGISLIVSFWLSVPKGG

SEQ ID NO: 86789 - protein, 54 aa, Gossypium hirsutum
  Clone ID: LIB3189-023-P1-K1-D1.pep
QPCPSKLTFISLLIILGGAVGYVATDSAFTLTAYSWAFAYLVTITTEMVYIKHM

SEQ ID NO: 86790 - protein, 35 aa, Gossypium hirsutum
  Clone ID: LIB3189-023-P1-K1-D10.pep
HQAKRLCHSMATNICMVHIRDFFGMAAILVKASYL

SEQ ID NO: 86791 - protein, 66 aa, Gossypium hirsutum
  Clone ID: LIB3189-023-P1-K1-D5.pep
RPPLYEKNPLETKLKKSSCFSSSTFRYFKNFGKRFPRKASPIYFQRFFSTNENQNSQSFTKRTRTP

SEQ ID NO: 86792 - protein, 43 aa, Gossypium hirsutum
  Clone ID: LIB3189-023-P1-K1-E10.pep
TIISVERYKVNTIRKKVQTKLTMLETGPSKTYHPKHYSLGTIR

SEQ ID NO: 86793 - protein, 47 aa, Gossypium hirsutum
  Clone ID: LIB3189-023-P1-K1-E12.pep
HKTYKSLSKEIRKNIYLLQTHKNSDLHIHKIYNVFDRPKLTQYATLQ

SEQ ID NO: 86794 - protein, 93 aa, Gossypium hirsutum
  Clone ID: LIB3189-023-P1-K1-E4.pep
RKKKRVGKKRKKQDNHGRRKKKSRKNIRNKVNCERKNKKAKNEVKKTQWQPKLWQRSCPLNRTHTPFSLRSADSEFFSPFRDFISVDFVFLYL

SEQ ID NO: 86795 - protein, 111 aa, Gossypium hirsutum
  Clone ID: LIB3189-023-P1-K1-E5.pep
MLNYNWISLRFSWSLNIFLLYAGVGSMGLMTSVLLSSDGKTLEAEAAHGTVTRHFRLYQMGQETSSYCFASIFPWTRGLEHTAKLDKNGRLLDFVHKLEAACIETVDAGKM

SEQ ID NO: 86796 - protein, 38 aa, Gossypium hirsutum
  Clone ID: LIB3189-023-P1-K1-F10.pep
PCPKHPSSFTSIHQIYVSFLFVNRRFLCHLHPHLLTKL

SEQ ID NO: 86797 - protein, 58 aa, Gossypium hirsutum
  Clone ID: LIB3189-023-P1-K1-G5.pep
TVRIPCRPRVATRRSFQWFYISFRIYNLYPRYFGHWFREADLLSKRYFRTYLGVRILL

SEQ ID NO: 86798 - protein, 67 aa, Gossypium hirsutum
  Clone ID: LIB3189-023-P1-K1-H10.pep
TKHIKVSHHVITIYRYYFKDIYIFNIFLSFFFSRLKSNFIVSLLDFFITISMCGGWDKFILTHLNAW

SEQ ID NO: 86799 - protein, 78 aa, Gossypium hirsutum
  Clone ID: LIB3189-023-P1-K1-H12.pep
HASAIRIHQNTPREIPSYDPGIDFPKVSSHFEISLPHSIFNSSLLIRPLIQPKIDIGCSPPPFLCLQPFGLISGAPTP

SEQ ID NO: 86800 - protein, 62 aa, Gossypium hirsutum
  Clone ID: LIB3189-023-P1-K1-H4.pep
PCQSLKQAELLGNNGRLLLIEFNSCFQHKINMNSKCPILVHFFCFYERVDGRVGGRVGGRVG

SEQ ID NO: 86801 - protein, 59 aa, Gossypium hirsutum
  Clone ID: LIB3189-023-P1-K1-H7.pep
SDSSVNFKTSFFTLDHSRYILTTTIIIKTHIFKPIFHHLKLKITRVVSFFTFLKEFDRY

SEQ ID NO: 86802 - protein, 68 aa, Gossypium hirsutum
  Clone ID: LIB3189-024-P1-K1-B11.pep
PTLLIFLQLTKPRTFLKPKTAMVSTSSSSPPFFKQKKERNPSITRIVYILVKTQRNPEILFDFSLILL

SEQ ID NO: 86803 - protein, 48 aa, Gossypium hirsutum
  Clone ID: LIB3189-024-P1-K1-C3.pep
FYFSDTIHPLNPLECFIKTSFSYIQHNITQLFVIPIIPDQNHHYNWNF

SEQ ID NO: 86804 - protein, 70 aa, Gossypium hirsutum
  Clone ID: LIB3189-024-P1-K1-E4.pep
MESQRTVNKEPKNLSPCSSGRRSSTSSHSSSPEFEFWMVRNPSFPQPDLIFADELFVNGVLRSFHFLFCK

SEQ ID NO: 86805 - protein, 61 aa, Gossypium hirsutum
  Clone ID: LIB3189-024-P1-K1-F11.pep
GLSWGVMGNRSISLCYILGFNLGIGKCFVFWLVINLAFGFIEGCKWNIWTDLPWTLFGFYF

SEQ ID NO: 86806 - protein, 58 aa, Gossypium hirsutum
  Clone ID: LIB3189-024-P1-K1-F12.pep
IKYAKYDDPNHNYVKAGNYPLFYPLRSKRGPSSSIYRSCNNFRPPPTNETSKPQLAPL

SEQ ID NO: 86807 - protein, 56 aa, Gossypium hirsutum
  Clone ID: LIB3189-024-P1-K1-F4.pep
KKIVKNHHIDRILSKGKIHNLMLKRRQSVYHSTSSSPAVSPFSSKSNFGRVGERVG

SEQ ID NO: 86808 - protein, 34 aa, Gossypium hirsutum
  Clone ID: LIB3189-024-P1-K1-F8.pep
SSFSLISKLFLSLFLTLSHLHHRIFSFNSTHLTS

SEQ ID NO: 86809 - protein, 104 aa, Gossypium hirsutum
  Clone ID: LIB3189-024-P1-K1-G2.pep
ELKRANFLSMEVVSLHSPPCCHLNRRLLVKKRSSGQQVKIPLCRKRRILCSKVHYRTESRALSNKDHSLLNGKVTRPSKPVERFSEDSNGYVIGSENETWKLAM

SEQ ID NO: 86810 - protein, 23 aa, Gossypium hirsutum
  Clone ID: LIB3189-024-P1-K1-G5.pep
LMVNGKPLKWLIMISSYRLVFIR

SEQ ID NO: 86811 - protein, 62 aa, Gossypium hirsutum
  Clone ID: LIB3189-024-P1-K1-G8.pep
RTPSIFYLFLTNLYNKGHYNEGDLYYTHAHIYINLCRYITLIFCFFIHMNLFHFITPISIPI

SEQ ID NO: 86812 - protein, 62 aa, Gossypium hirsutum
  Clone ID: LIB3189-024-P1-K1-H11.pep
CLYRLLSNPTMHGTDLICMNHLNWTCNYACLSAAASVRVSNELGAGHPRCKIFMFVANGHAY

SEQ ID NO: 86813 - protein, 53 aa, Gossypium hirsutum
  Clone ID: LIB3189-024-P1-K1-H2.pep
RSHQTHWKNISPTSEMPLLSKACLNTQKGANFEKQISLHLSLRFLICQTNLLP

SEQ ID NO: 86814 - protein, 29 aa, Gossypium hirsutum
  Clone ID: LIB3189-024-P1-K1-H4.pep
KVTINNVMRRVHKIIFPVTLISIKHHVLN

SEQ ID NO: 86815 - protein, 61 aa, Gossypium hirsutum
  Clone ID: LIB3189-024-P1-K1-H7.pep
PMKDMWTKLGNNFMFFNLQTILWISSEVDFVTQPTQMRIARLDFPFFYKFGRKSSKIPRVR

SEQ ID NO: 86816 - protein, 41 aa, Gossypium hirsutum
  unsure (1)..(41): unsure at all Xaa locations
  Clone ID: LIB3189-025-P1-K1-A11.pep
KIITLKKGLIITCGLTVLKKPHMLFSASFKKXLSPSSQLQT

SEQ ID NO: 86817 - protein, 61 aa, Gossypium hirsutum
  Clone ID: LIB3189-025-P1-K1-B1.pep
MYKCVDQILPQLLYYLSLKNDAESLDWATIAVYTCEASCEGVGYKQEFAWVQLGTAINCPS

SEQ ID NO: 86818 - protein, 123 aa, Gossypium hirsutum
  Clone ID: LIB3189-025-P1-K1-B11.pep
ELQKQYDDDKARVKDAVKLREICLASTWTLEDLKAAILEDISSPPISDVNLKLIFEELLERVKEKEEKEAKKRKRLADDFFDLLHSMKEITSSSAWEDCKHLLESSQEFSSIGDEDICKGDFD

SEQ ID NO: 86819 - protein, 55 aa, Gossypium hirsutum
  Clone ID: LIB3189-025-P1-K1-C8.pep
NFHFLFKSFLTFFISFFFLFSLFYFLSFFFFFYFSFIFFSLFFFFFLFLFFFIFF

SEQ ID NO: 86820 - protein, 100 aa, Gossypium hirsutum
  unsure (1)..(100): unsure at all Xaa locations
  Clone ID: LIB3189-025-P1-K1-F10.pep
GLLIFIFSYYFLFSFNILLLFFFFLLXFLFFIIFFFYYFSVLLFIFFFFFFIVCFYYFFFLFLFLILYLVVNYCFLLHFFLYFYFLFLYFFFLFIRYLFL

SEQ ID NO: 86821 - protein, 100 aa, Gossypium hirsutum
  Clone ID: LIB3189-025-P1-K1-F3.pep
KIFNSSHFIHYLFYLCKLPLFNVFLFAFHLFQWIHSFLLCLMALETWLIKLKKTISNTLDTARSSNHKANVGVLSFEIAGHMSKLLQLWNCLSYSTIFSF

SEQ ID NO: 86822 - protein, 39 aa, Gossypium hirsutum
  Clone ID: LIB3189-027-P1-K1-D12.pep
KGVISSTQVLVVNSLVWNICLAILSIIFHLSAMQVVSKI

SEQ ID NO: 86823 - protein, 149 aa, Gossypium hirsutum
  unsure (1)..(149): unsure at all Xaa locations
  Clone ID: LIB3189-027-P1-K1-D4.pep
LSSLLRGVPPLFLVSLSGPPLPVFCRLLVSCXRLSGARLVSRGLRSGWSPVLLGPPSXXLVLVVVARVXLCLRLPGVVPSSSVGCVSXSFLCCPLSLCLCLFCFCPALPSVXVPFCCVFSSGFFLPLVHALWPCXFKKXXXXGRPLAFX

SEQ ID NO: 86824 - protein, 59 aa, Gossypium hirsutum
  unsure (1)..(59): unsure at all Xaa locations
  Clone ID: LIB3189-027-P1-K1-E2.pep
LVRTPWKVLRNPYSFLHLFRPLAHMRYPSFVVSSMVESNGVFCALLLVFFGVVGRPGXP

SEQ ID NO: 86825 - protein, 122 aa, Gossypium hirsutum
  Clone ID: LIB3189-027-P1-K1-F7.pep
FYGSLPDSMRKLGTCSSISLGGNSLRGQVPDWIGELTSLESLDLSANNFSGKVPSSLGNLQLLRELNLSMNQFTGALPESMANCYNLLAIDVSQNLLTGNVPSWMFKMGVQVVLFSGNKLIG

SEQ ID NO: 86826 - protein, 151 aa, Gossypium hirsutum
  Clone ID: LIB3189-027-P1-K1-F8.pep
RKFPFLFAFSFLLISVTILLFSYSSSSPSLLLSTNFQVSDPLPPPPRPLPSRSPNNVPVSSTKPVPKTTAAASDVDLNVSLDIKWENCQLGPLAVDYIPCLDNWKAIKELKSRKRMEHRERHCPKPNPRCLAPLPIGYKGPVHWPKSRGHD

SEQ ID NO: 86827 - protein, 143 aa, Gossypium hirsutum
  Clone ID: LIB3189-027-P1-K1-G6.pep
MVDSLLYRPTTEDKRAVAECCGNVELCRLSEIYKEWRLKRIEQTWDLFHQKLNKDESGKAYLPAIYNLIQEEYMKELFHDTLGFGIAKMIRRIGGVDHVEDFESIREGSIRADSEAKALELANSHLKEKQQFLAIGEGISPIM

SEQ ID NO: 86828 - protein, 47 aa, Gossypium hirsutum
  Clone ID: LIB3189-027-P1-K1-G8.pep
SLVQLHTHHFFLFVIMLKRLVTVKEVSGALTSQRPDTREGHLDMNRS

SEQ ID NO: 86829 - protein, 47 aa, Gossypium hirsutum
  Clone ID: LIB3189-027-P1-K1-H1.pep
TTTLLKLYKINNTLVLHSCRKPPCLRTFTKALQNSHIGLHFLTSYLE

SEQ ID NO: 86830 - protein, 70 aa, Gossypium hirsutum
  unsure (1)..(70): unsure at all Xaa locations
  Clone ID: LIB3189-027-P1-K1-H11.pep
PEKLQFQFKPFTRQLVRHSICGSPNMHEGNPLQLLISLNPDLSTTSWXLCKPLLPWQKAMGYSHDSRAHV

SEQ ID NO: 86831 - protein, 80 aa, Gossypium hirsutum
  Clone ID: LIB3189-028-P1-K1-A7.pep
IDLSRFLLFAKATIDTGGGAYAGLQDPTKVGLVHVNSDYADLDVAAFKATNHVECPPIERHPRKIIIATSAIRPRADVAY

SEQ ID NO: 86832 - protein, 35 aa, Gossypium hirsutum
  Clone ID: LIB3189-028-P1-K1-A8.pep
ILILGCPSHPLQATKIHNSDNPKKKKVLFIISGHR

SEQ ID NO: 86833 - protein, 120 aa, Gossypium hirsutum
  unsure (1)..(120): unsure at all Xaa locations
  Clone ID: LIB3189-028-P1-K1-B2.pep
AVPPFPPWACGLCLSPPSSLLLLSLRSPSAVWPWASCPAGARSLRSGFLVSVGVRLAAVSCRSLGPPCFVAWXVLRSRGXXXSFFAXLVLFCCSXASXFFSFLLFRLPRRFSLLLWLLAL

SEQ ID NO: 86834 - protein, 70 aa, Gossypium hirsutum
  Clone ID: LIB3189-028-P1-K1-C10.pep
SKQSSSFLVQTLLALASISLLASALLRSKIEPDLQVWRKRRDRKMLMKMNLKLKVGILDLGWIFWRVFQV

SEQ ID NO: 86835 - protein, 56 aa, Gossypium hirsutum
  unsure (1)..(56): unsure at all Xaa locations
  Clone ID: LIB3189-028-P1-K1-C3.pep
KDKEVIISWGVQNKREWLSLXYTRHAEDGRQARECLXKVGDRYKTQIFAKIENIEG

SEQ ID NO: 86836 - protein, 79 aa, Gossypium hirsutum
  Clone ID: LIB3189-028-P1-K1-C6.pep
NVGGNPIFIPPIGSSADGSNLYHGDGLQITCWFIKTRPFAAVSFTNVGLFPDTRNSFYELLPLIGRAVLLHAEPGGIGT

SEQ ID NO: 86837 - protein, 126 aa, Gossypium hirsutum
  Clone ID: LIB3189-028-P1-K1-D10.pep
MEFLGYTNFAFVVFLVSFHSLSACSQSESEDHEFNYDEETRRGPSRWGTLKPEWRTCSDGRKQSPIDIGTVQVNSELGELQRNYTSAQAILRNRTEDVAVVWSGDAGNITIYGTTYRVVNCHWHSP

SEQ ID NO: 86838 - protein, 99 aa, Gossypium hirsutum
  Clone ID: LIB3189-028-P1-K1-D12.pep
DWLVSAGVTSGQATMALLSGARVVMRVRLIRLLVLNSAVHTPSLPQAICLPSASNEHDLSSSSASATDRRRVADVGGRGVGARGSRHPHVLSFFPILCW

SEQ ID NO: 86839 - protein, 49 aa, Gossypium hirsutum
  Clone ID: LIB3189-028-P1-K1-E10.pep
RFSVRLCFKLTAALHSPIMGKEKVHITLVVIGHVDSCTSTTTGHFSFNA

SEQ ID NO: 86840 - protein, 43 aa, Gossypium hirsutum
  Clone ID: LIB3189-028-P1-K1-E11.pep
PTLLLLLSDRRCIMSAGVSVLTMLFLERGILFYCFHECLSSPV

SEQ ID NO: 86841 - protein, 37 aa, Gossypium hirsutum
  Clone ID: LIB3189-028-P1-K1-E7.pep
SYSLLFQHEGSQYKIVSIKIASCLLIMKLTVKITCQS

SEQ ID NO: 86842 - protein, 57 aa, Gossypium hirsutum
  unsure (1)..(57): unsure at all Xaa locations
  Clone ID: LIB3189-028-P1-K1-E8.pep
KYGGLAPKKKPLIXSKDHERAFFDSSDWALCKQGSGVNQKLTWAIETFRPKLQRTRY

SEQ ID NO: 86843 - protein, 57 aa, Gossypium hirsutum
  Clone ID: LIB3189-028-P1-K1-F10.pep
KANLFELLPIRYVLILCETLCPELEGLYQLQALKVDHGQTGGAFEERENTAICKPLI

SEQ ID NO: 86844 - protein, 57 aa, Gossypium hirsutum
  Clone ID: LIB3189-028-P1-K1-F5.pep
ATRRHASETRSFLSRSYPKSPYPLLTARWQLAVPSLDRQASSQPIEMFYSDSFLLDC

SEQ ID NO: 86845 - protein, 50 aa, Gossypium hirsutum
  Clone ID: LIB3189-028-P1-K1-G12.pep
IKLEKQPLICNSGYRSMDLSIKYEKPDKKIGGGPRCYMKTREACFQTNRG

SEQ ID NO: 86846 - protein, 113 aa, Gossypium hirsutum
  Clone ID: LIB3189-028-P1-K1-H7.pep
FYLVRKLKESDIIEAFELEIGPHRFSYQELKKATMGFRDKELLGFGGFGRVYKGTLQSTNTQVAVKRISHESKQGLREFVSEIASIGRLRHRNLVPLLGWCRGRGDLLICYDY

SEQ ID NO: 86847 - protein, 131 aa, Gossypium hirsutum
  unsure (1)..(131): unsure at all Xaa locations
  Clone ID: LIB3189-030-P1-K1-A12.pep
DGLKELPKKIEKLVNLTHLECEHCISLTHMPRGIGKLTSLETXLSMFVVDKDGSHGGADLSELRLLNNLRGRLEIRNLGFVKNAKEKFEAANLKEKQHLRSLVLEWXGGNHDDEKSLEDLQPHPNLKELCI

SEQ ID NO: 86848 - protein, 45 aa, Gossypium hirsutum
  Clone ID: LIB3189-030-P1-K1-C6.pep
CLYTCLISTFNLPYILNPSIFPFINTIFMTHLLSFTLLSFYFFNL

SEQ ID NO: 86849 - protein, 128 aa, Gossypium hirsutum
  Clone ID: LIB3189-030-P1-K1-D2.pep
GLEGHFRDPKPNIAYMRSALDILGTMGLPIWLTEVDVGGGPDQAHNLEDILREGYSHPAVEGIIIFGGPIAAGFKCLTLANYDFEPTPVGEVVDKLINEWKSGRRQVRTDSRGMSAILLFHGDYRVEV

SEQ ID NO: 86850 - protein, 48 aa, Gossypium hirsutum
  Clone ID: LIB3189-030-P1-K1-D7.pep
PCLQHHLQVSEDVCRRNFEEAAVKEDSNGGSSSGGRDFFMFSFWEEGD

SEQ ID NO: 86851 - protein, 100 aa, Gossypium hirsutum
  unsure (1)..(100): unsure at all Xaa locations
  Clone ID: LIB3189-030-P1-K1-E9.pep
WSFRFRFSRALLPPCVSLPLVAGASFWLLSRPGSAVPCCFPASCVAAGLVGCLPFLVLPSVSWCRALPSGCGPPVGFCRVLLFARVFFWFCXPLARPGFP

SEQ ID NO: 86852 - protein, 87 aa, Gossypium hirsutum
  Clone ID: LIB3189-030-P1-K1-F7.pep
MEFSRKSLVIKMLISAIFLLGLSSSSVAEFRLARHATTSTTIEYPALNCRKHSAVLTEFGGVGDGKTSNTEAFKAAIAILSQLAEDG

SEQ ID NO: 86853 - protein, 106 aa, Gossypium hirsutum
  Clone ID: LIB3189-030-P1-K1-F9.pep
LIFFFFNFYFYIIYFFFYIYFNKLWPALFLLRNRLLLLSGLQIPLNLCWRSSCNVRVKLMFYFASPFFRSPTNTSQYNLNRRYQIPKTAHSVLFLCLSDLYPKNFL

SEQ ID NO: 86854 - protein, 70 aa, Gossypium hirsutum
  Clone ID: LIB3189-030-P1-K1-G9.pep
NRRFDLENMTESRDYPGPAKELRGDCQRYYCQSKNRGKKASRKMNKTKRFTEGKRKFQALINEKTKKNYR

SEQ ID NO: 86855 - protein, 113 aa, Gossypium hirsutum
  unsure (1)..(113): unsure at all Xaa locations
  Clone ID: LIB3189-030-P1-K1-H1.pep
MASIAVGDVLPDGTLSYXDADDYLQPVCVHSLADGXKVIITGVARACTPTCSLKHVSGXIEKAGELKSIGGDVIMCISANDPFAMKAWTTTYPENRDGTYPADGLATYTHALG

SEQ ID NO: 86856 - protein, 48 aa, Gossypium hirsutum
  Clone ID: LIB3189-030-P1-K1-H10.pep
CKDHIFDTSCDSFRLLFIVSKHHRSMGRIMMPYLMVFSYLYANCSLTL

SEQ ID NO: 86857 - protein, 141 aa, Gossypium hirsutum
  unsure (1)..(141): unsure at all Xaa locations
  Clone ID: LIB3189-030-P1-K1-H12.pep
MDVLRASSSTLVHSPYISTTTRRNKTQFLKPIFHHLKLKLTVFDSSFTLFERNGSKLRLFMTLPSSPASTTESIEPPMLELEADGCEKERFDWYSHWYPVMPICDLDKRVPHAKKVLXLDLVVWWDRNENEWKVFDDTCPH

SEQ ID NO: 86858 - protein, 90 aa, Gossypium hirsutum
  unsure (1)..(90): unsure at all Xaa locations
  Clone ID: LIB3189-030-P1-K1-H5.pep
DTYCDSFRLLFYVGRHIRSKGRNINAPTMIGFAPIAXIDQHIALNIDKKGFANLVYNRTTNKVDETVVRAYKGGELPVYGFQHPEARVES

SEQ ID NO: 86859 - protein, 98 aa, Gossypium hirsutum
  Clone ID: LIB3189-030-P1-K1-H7.pep
GFSLMAPGTLMITNLHLPFLHCHFTKIILTTSIQSTVPLVMNSFYKATHLIHPHSHFYNNMYDQESKFLDINFTSWMFIAPAKPSLFNYLTLTIHLIS

SEQ ID NO: 86860 - protein, 62 aa, Gossypium hirsutum
  Clone ID: LIB3189-032-P1-K1-F4.pep
VNVGIKLELKFNDRTTSGEHERTFKILDKREGARERYHTMPLQVRPPAGTRRPALAAGAARA

SEQ ID NO: 86861 - protein, 38 aa, Gossypium hirsutum
  Clone ID: LIB3189-032-P1-K1-G4.pep
KAKCLWIHVDGSEWPPATAMALVLLAPYKGAMSALVVS

SEQ ID NO: 86862 - protein, 58 aa, Gossypium hirsutum
  Clone ID: LIB3189-032-P1-K1-G5.pep
KKSKRLKTKEKYIERHLKILKLTLKHFLGFKNLYGEKWKPLWGAKHQIRSLRRVLENT

SEQ ID NO: 86863 - protein, 111 aa, Gossypium hirsutum
  unsure (1)..(111): unsure at all Xaa locations
  Clone ID: LIB3189-032-P1-K1-H12.pep
EEASDQPPMPPHKNIWRALMVAQLAGSNKARSYSXAVNARRTCFVDVLHKEHPIHKHAGGGTDFCPFKVFKDKIVEPHFIHDYNTLSNAHLDESKHKPETSKLSHLFRWIF

SEQ ID NO: 86864 - protein, 91 aa, Gossypium hirsutum
  Clone ID: LIB3189-033-P1-K1-D11.pep
TIKYSTSLDRGLCSPILILRGCHLKRWVPHQGHCFIRSNTLAFMGAATLNIMARVILTNSFDYIPFTLSFYLTFNAIILLVYGLFINVLFV

SEQ ID NO: 86865 - protein, 63 aa, Gossypium hirsutum
  unsure (1)..(63): unsure at all Xaa locations
  Clone ID: LIB3189-033-P1-K1-E2.pep
MCRENVHINIMDIGHVDSGKTTTTVHLNYKLGGIDKLLIEXFEHEASFINKMSFNYSCVLDKL

SEQ ID NO: 86866 - protein, 120 aa, Gossypium hirsutum
  Clone ID: LIB3189-033-P1-K1-E4.pep
AQEAKEENGNATNQVITELGTVKYKRWICILLCIIFLLCGQSVAALLGRLYFDKGGKSKWLSTLIQFAGFPILVPFYCISRPKMLTANHCSIGSNNQPSIMMLGLGYVTFGLMSAWNGFL

SEQ ID NO: 86867 - protein, 137 aa, Gossypium hirsutum
  unsure (1)..(137): unsure at all Xaa locations
  Clone ID: LIB3189-033-P1-K1-E6.pep
GKPYQDVKRSADSMYLPFDVVGDSRGAAKIRVSSDVSYSVEELLGMILKYASNLAEFHSKVTVKDAVISVPPYFGQAERKGLLKAAEMAGINVISLINEHSXAALQYGIDKNFSNESRHVILYDMGSSRTYAALIFY

SEQ ID NO: 86868 - protein, 47 aa, Gossypium hirsutum
  Clone ID: LIB3189-033-P1-K1-E8.pep
YKLKLYNNYQTKQPLLFGATYKRAYIYILVGTSLKKITLMIGRCFPI

SEQ ID NO: 86869 - protein, 52 aa, Gossypium hirsutum
  Clone ID: LIB3189-033-P1-K1-F11.pep
VSLPKHLLSENLLKKKKKKKKGKLKKKERHFKKNKTNKPMLTKYITFLSSLY

SEQ ID NO: 86870 - protein, 44 aa, Gossypium hirsutum
  Clone ID: LIB3189-033-P1-K1-F4.pep
LHIQKKPSIFIFLSTTTPIAGVRKCHCWECHTGYAPEYHFNCCC

SEQ ID NO: 86871 - protein, 73 aa, Gossypium hirsutum
  unsure (1)..(73): unsure at all Xaa locations
  Clone ID: LIB3189-033-P1-K1-G1.pep
LENFKSLRLYHKWNAARIPYSECQRIHIVKEIWAPSVSYYSLTLRNNQRLHSFTXXCQIQELKMLSRTYRXRR

SEQ ID NO: 86872 - protein, 49 aa, Gossypium hirsutum
  unsure (1)..(49): unsure at all Xaa locations
  Clone ID: LIB3189-033-P1-K1-G10.pep
MRLHSQALSSSLPSEYSIEEHDIDAFLSEERVXDILQQSKEKHRTVHRN

SEQ ID NO: 86873 - protein, 85 aa, Gossypium hirsutum
  Clone ID: LIB3189-033-P1-K1-G2.pep
VPKHLALYRSHVNMNVGQIEDDEIFKHGPHSLLQLYFWHRWNYLAHFIIVRRTPLNSQVMTQHCMNCFNSSTIGDHISFSNIFKF

SEQ ID NO: 86874 - protein, 107 aa, Gossypium hirsutum
  Clone ID: LIB3189-033-P1-K1-G8.pep
GLKRAPLKRKVGRNTESKQRSFYFFSTLPCRFCSLQAKPTFGKRTSYPKSCYPITTYCHLFLLPYYHLLPSFLIFIDFPFFPLRGNKAKKRRLKERKVWVLLLFDGS

SEQ ID NO: 86875 - protein, 55 aa, Gossypium hirsutum
  Clone ID: LIB3189-033-P1-K1-H5.pep
HASVLILSCVVTLSLSVLGLRATFLVDCRITWSDSHITQIDGVRAIQLDFDSRLS

SEQ ID NO: 86876 - protein, 66 aa, Gossypium hirsutum
  Clone ID: LIB3189-034-P1-K1-A10.pep
GVHFPSSFSLFSLLIFFSPKHYYSTDTVFLSEDIFLSIVLAIRRFVFFRRRRLIKLETNKALNFLL

SEQ ID NO: 86877 - protein, 102 aa, Gossypium hirsutum
  Clone ID: LIB3189-034-P1-K1-D11.pep
VSGMGTWVLVLQYQNKRFILILMNISFLLVASVFLMMCSSSSQVVLGSNGSKFRNSQQDCKALEDLDDYKAKCSYLKSNNNPCVYQGYVDYLYHFYCNFGRF

SEQ ID NO: 86878 - protein, 145 aa, Gossypium hirsutum
  Clone ID: LIB3189-034-P1-K1-D6.pep
ICSLLNMGLSSGSVHKTEEEWRAILSPEQFRILRQKGTELRGTGEYDKVFQEGVYNCAGCGTPLYKSTTKFNSGCGWPAFYEGFPGAINRTPDPDGRRTEITCAACGGHLGHVFKGEGFSVPTDERHCVNSVSIKFVPAVATPSL

SEQ ID NO: 86879 - protein, 92 aa, Gossypium hirsutum
  Clone ID: LIB3189-034-P1-K1-F11.pep
KDAPNVAEKVCGAIYYLVQGYDDAGPSASLLSPYLTDIFSFLILTADRTDGVVFMFMSFVLFYFILFLTFLFFIFIFFFSFFFIFFVFLLFF

SEQ ID NO: 86880 - protein, 92 aa, Gossypium hirsutum
  Clone ID: LIB3189-034-P1-K1-G11.pep
FLVVILLGTLCVCVYQMILFSLNFVCVIFLFFSVLLLFDIEKDLTFFFPKKNLGFHFNLIFSFQRPIMEQLFISYIPVVLIEFLIALIQFVL

SEQ ID NO: 86881 - protein, 27 aa, Gossypium hirsutum
  Clone ID: LIB3189-034-P1-K1-H1.pep
QLIQGCPLSLNKESPPLKHAISFNYKA

SEQ ID NO: 86882 - protein, 157 aa, Gossypium hirsutum
  Clone ID: LIB3189-034-P1-K1-H2.pep
DPRVRSFEPLRENPLFGPSSSTLKKLGALEWTEVVVKHQGWRLITCIWLHAGVIHLLANMLSLAFIGIRLEQQFGFVRVGIIYLLSGFGASVVSSLFIRNNISVGASGALFGLLGAMLSELITNWTIYTNKAAAFFTLLVIIAINLAIGILPHVDNF

SEQ ID NO: 86883 - protein, 76 aa, Gossypium hirsutum
  unsure (1)..(76): unsure at all Xaa locations
  Clone ID: LIB3189-034-P1-K1-H6.pep
QQKEQKEEAAXXTXPTTXPAGXEXXEQXTKAXXGRGXNEGXXKERRGHRNAEQRNEKRKTHAETEGEEXTKAPDKE

SEQ ID NO: 86884 - protein, 68 aa, Gossypium hirsutum
  Clone ID: LIB3189-035-P1-K1-A8.pep
TGADKKTSINEQFVTESDEEGGCKQHLQSTMCHHQRVLTEVLVTEIEFQDSPIEYEMEKERTKVNQKS

SEQ ID NO: 86885 - protein, 52 aa, Gossypium hirsutum
  Clone ID: LIB3189-035-P1-K1-B1.pep
HLCHHETTCLHSTLDPHIGGKNLDLSYPYHDQSHIVIFYTDSEQALPASYHS

SEQ ID NO: 86886 - protein, 140 aa, Gossypium hirsutum
  Clone ID: LIB3189-035-P1-K1-C1.pep
GDLIMAAQLVTPEAMAFIVKHGTGIVCVSMKEEDLERLNLPLMVNQRENEEKLCTAFTVTVDAKHGTTTGVSAHDRATTILALASKDSKPEDFNRPCHIFPLKYRESGVLKRAGHTEASVDLAMLAGLDPVAILCEIVDD

SEQ ID NO: 86887 - protein, 96 aa, Gossypium hirsutum
  unsure (1)..(96): unsure at all Xaa locations
  Clone ID: LIB3189-035-P1-K1-C11.pep
MAKPHLLFLFYFSLLGRISXSAVDSSIIDDLRVAGSSFPSVHAKNLIREVNLFSKGEVNVFDDHRDFFRGGSKPAEKRYKFPTXLEVPGGVFVEDF

SEQ ID NO: 86888 - protein, 56 aa, Gossypium hirsutum
  Clone ID: LIB3189-035-P1-K1-C2.pep
TARSGPSLVSRTRVSGLTESHVTGANWTLSYDPDRVSVDADSQTVGIVVEILSRVC

SEQ ID NO: 86889 - protein, 78 aa, Gossypium hirsutum
  unsure (1)..(78): unsure at all Xaa locations
  Clone ID: LIB3189-035-P1-K1-C5.pep
LTGEGLLEFCNAVQEKLKDSMVPVEALVPFDKGELLSTIHQVGMVXKTEYTENGTFVKAFVPLRFARLLTPMRQLCKS

SEQ ID NO: 86890 - protein, 146 aa, Gossypium hirsutum
  Clone ID: LIB3189-035-P1-K1-D2.pep
MFKNDTGTDVGCSGGFNDGLTRSTKLAIVFGVGVPFSFILGLVIYLRGKVEDHQNLNLTASSVMVVKGLDGQILESYPITLLGESRRLTRPSDNICSICLSEYHAKEILRTIPDCNHYFHAACIDEWLKLNVVCPLCCSSPKLISN

SEQ ID NO: 86891 - protein, 91 aa, Gossypium hirsutum
  unsure (1)..(91): unsure at all Xaa locations
  Clone ID: LIB3189-035-P1-K1-D5.pep
RFLSKVELLLKMGRGKRAIKRIENQSTRVVTFSXRRAGLWKKTHELSVVCDAHIGLIMFSSTGKICQYCAXPYRMEQIIEWYQKVTETRIL

SEQ ID NO: 86892 - protein, 147 aa, Gossypium hirsutum
  unsure (1)..(147): unsure at all Xaa locations
  Clone ID: LIB3189-035-P1-K1-D6.pep
PRVRSIRRMSDAFHAREEIKAMKLQRQNREDEPVEAVKIPKATWMADGTHWPGTWLNPANEHSRGDHAGIIQVMLKPPSDEPLHGTADDRLIDLTGCDIRLPLLVYVSREKRPCYDHNKKAGAMNALVRASAIIXNGPFILNLDCDH

SEQ ID NO: 86893 - protein, 47 aa, Gossypium hirsutum
  Clone ID: LIB3189-035-P1-K1-D7.pep
SGVLSNQKKGGISTRKLRLRYHEFIETSEYSSPISLCLIINFRNIYI

SEQ ID NO: 86894 - protein, 54 aa, Gossypium hirsutum
  Clone ID: LIB3189-035-P1-K1-E2.pep
GVTIYVHCNGVRRVELCISLLTHLEHRVLTSIKIPLDRDVAMRMSFLRPSVERL

SEQ ID NO: 86895 - protein, 81 aa, Gossypium hirsutum
  Clone ID: LIB3189-035-P1-K1-E7.pep
RWVWRMIWRRIWRLKLNTVSGVPFNLTTDIFTLNLYNFFLSCYIFFIKFYFHYYFYLFFTILIFFNINFSKILFSATIFQM

SEQ ID NO: 86896 - protein, 123 aa, Gossypium hirsutum
  unsure (1)..(123): unsure at all Xaa locations
  Clone ID: LIB3189-035-P1-K1-E9.pep
AIPENGKGFTSMDSTTAQRRVNSIHAHLVSVVDSAFSHSHLRSSPTAAEFLSEQNYSVVLPEKLLTGKWNVYRSARSPVXLGSGFPNHSDIGTLHDNFLLARDFFGEYHYFGTSIRVDWTGGV

SEQ ID NO: 86897 - protein, 127 aa, Gossypium hirsutum
  Clone ID: LIB3189-035-P1-K1-F1.pep
MSFMAVSFSSLLSIPPPPHSLIPLRLASCHRFPTFTPGPRIQIQCATKDNKEATPPAAASMGSFDPKKGVALYKPKSYDVLVTDAAKSLAYAIQDGKTRLEIDFPPLPSNISSYKGSSDEFIDANIQ

SEQ ID NO: 86898 - protein, 39 aa, Gossypium hirsutum
  Clone ID: LIB3189-035-P1-K1-F6.pep
ATMQESATLSRRNQGRYPAPSFVNKIESADFKGGSYPIH

SEQ ID NO: 86899 - protein, 30 aa, Gossypium hirsutum
  Clone ID: LIB3189-035-P1-K1-F7.pep
IQVMILVSWQILVIQSVFGVKIRLYDRWSI

SEQ ID NO: 86900 - protein, 34 aa, Gossypium hirsutum
  Clone ID: LIB3189-035-P1-K1-F9.pep
YFLEWLHFSFPDLLNPIYQHFFHNLILVHHVTKY

SEQ ID NO: 86901 - protein, 41 aa, Gossypium hirsutum
  Clone ID: LIB3189-035-P1-K1-G4.pep
FIAQTAALICPSSYVVPLQSFLGMCLGSSGSISVIVSPKWG

SEQ ID NO: 86902 - protein, 96 aa, Gossypium hirsutum
  Clone ID: LIB3189-035-P1-K1-H5.pep
LEALCIGQPAHRFLKNLKHLEVRECCKLQVVGELLHDVEQNHEHPLSNVQSLKLYQLPALRWISKCSPHSFTLHIIKAVFINGCAKLKSLLAPFLI

SEQ ID NO: 86903 - protein, 30 aa, Gossypium hirsutum
  Clone ID: LIB3189-036-P1-K1-A4.pep
KLTSLKNALSEKRVIDLKFCYFMIPKNKKK

SEQ ID NO: 86904 - protein, 34 aa, Gossypium hirsutum
  Clone ID: LIB3189-036-P1-K1-A9.pep
VNVSLLLIHYISGDSMGNLKPQNTSEAVHLDGSP

SEQ ID NO: 86905 - protein, 67 aa, Gossypium hirsutum
  Clone ID: LIB3189-036-P1-K1-B10.pep
KTQVILQLFVARVFSKQQQVGNSDCRRKHICIKSRHCLNQHMKPMPLIAATDFSVHIFSIKTLYAVH

SEQ ID NO: 86906 - protein, 103 aa, Gossypium hirsutum
  Clone ID: LIB3189-036-P1-K1-B12.pep
MFIIGVCYFVWLGLNGDLKKAMKDGKPVIIEGIHLDPSIYLMNDELKAPTSVDGPSQQSVASDDNSSVQKENNFITTSQSNTENGKNHPVRLSEGVSACNVNK

SEQ ID NO: 86907 - protein, 71 aa, Gossypium hirsutum
  Clone ID: LIB3189-036-P1-K1-B2.pep
LGFDMAANINTANFNTSAAVTAVNHSSSCPNQSHSVTNSGFSQRNQVVCGELEPIAAGSLSSSSDSSSFTT

SEQ ID NO: 86908 - protein, 34 aa, Gossypium hirsutum
  Clone ID: LIB3189-036-P1-K1-C12.pep
IIEEAVQYKDEFNNIREVIFNKPYIPIISNYNNI

SEQ ID NO: 86909 - protein, 124 aa, Gossypium hirsutum
  Clone ID: LIB3189-036-P1-K1-C9.pep
MEGEPVNVNEFQELARQALPKIYYDYYSGGAEDEYTLKQNVEAFQGITIRPRILVDVSRIDLSTTVLGYQISVPILIAPSAKHKWAHPESEVGTARTTAVCDTIMNLSYRSTCTIEEVASSLNA

SEQ ID NO: 86910 - protein, 82 aa, Gossypium hirsutum
  Clone ID: LIB3189-036-P1-K1-D4.pep
FCFTIPYGLILVAGGVIGYLKKGSMASLGGGVGTGLILILAANLSLKAFEKRKNSYFALVLETVALWNLRISLDIVDPVRCY

SEQ ID NO: 86911 - protein, 72 aa, Gossypium hirsutum
  Clone ID: LIB3189-036-P1-K1-E10.pep
LSDAELDELKRSRYGDARGRQLNLAESPSQLLLEADLAKQTTIKKVALDVQESQIPVKPSDELGLTNKSSEP

SEQ ID NO: 86912 - protein, 38 aa, Gossypium hirsutum
  Clone ID: LIB3189-036-P1-K1-E5.pep
KVHQQVKAKITKATKKKWMLKFKSCGLCKNPLKATRKN

SEQ ID NO: 86913 - protein, 85 aa, Gossypium hirsutum
  Clone ID: LIB3189-036-P1-K1-G3.pep
MNYLGVGISPGNVPVYHGTNPMVIERRVSIAELLLRCLICVLSVLTAILVGNDSQVKEIFSIQKKARFTDMKALVFLVVANGVAA

SEQ ID NO: 86914 - protein, 50 aa, Gossypium hirsutum
  Clone ID: LIB3189-036-P1-K1-G7.pep
VPQILVYRRRNFDSGNLKMSFTFSGDETAPYFGFLGAAAASRFLLYGSCL

SEQ ID NO: 86915 - protein, 122 aa, Gossypium hirsutum
  unsure (1)..(122): unsure at all Xaa locations
  Clone ID: LIB3189-036-P1-K1-G8.pep
NIRDVLTAFSPSLDYLAISSGDGRIKIWDTLKGQIQTEFADIISSEATNIYAKAERGHFSIDYKCMKWLSFDKKKKMKLGSSLLIIXTGSGDVLALDVFAGQLKWKVIDCHSGGVSAIAFAT

SEQ ID NO: 86916 - protein, 119 aa, Gossypium hirsutum
  unsure (1)..(119): unsure at all Xaa locations
  Clone ID: LIB3189-036-P1-K1-G9.pep
SSSGAXGARXLSVLXXXLXXRPWLWCXPARRXXAXWPXCSXXGXWXGAXWRXFSGPXGXXGXLVXXXSXWVRXXAGXAWLGXVSSXSXLXXXRPXXAPRXGVGLAXVVXXXXXGSXAWV

SEQ ID NO: 86917 - protein, 139 aa, Gossypium hirsutum
  unsure (1)..(139): unsure at all Xaa locations
  Clone ID: LIB3189-036-P1-K1-H10.pep
MASSPKLLSMCYPLTXCPSSMQIHAGEYFSKVPRVNTNAKETTAREHEHETFVPQTTQKPXEHEPRFIPETQNGYGLYGHELCLSSSSGLSRSSMTTXETYEPYVTPDRFHPDEPYNSIPVCFNIKDTYCYNKNAYKFT

SEQ ID NO: 86918 - protein, 48 aa, Gossypium hirsutum
  Clone ID: LIB3189-036-P1-K1-H5.pep
GSFLNVVLPFIQCTIDFTIKVVSVPFAGDPYSILNSHRDYTCVVARET

SEQ ID NO: 86919 - protein, 55 aa, Gossypium hirsutum
  Clone ID: LIB3189-036-P1-K1-H7.pep
NTAKTKLTAPTTTPNLTLNSFINNAATMEPLPPLRTKGLKLLMLVKGLTMTLFLP

SEQ ID NO: 86920 - protein, 57 aa, Gossypium hirsutum
  Clone ID: LIB3189-037-P1-K1-A6.pep
PRVGPLVREANVYLFPPMKLTYQHLLRESYPQLLLVYYPALVASTRPSWLKQALSYA

SEQ ID NO: 86921 - protein, 42 aa, Gossypium hirsutum
  Clone ID: LIB3189-037-P1-K1-A8.pep
ADLRAAMVARCYLGAFPPVAFSAQPAMARPIHLHLHLSARVT

SEQ ID NO: 86922 - protein, 115 aa, Gossypium hirsutum
  Clone ID: LIB3189-037-P1-K1-B12.pep
GYKVADFCIEAEWRPCYCSSAKEAITSSGKILVSEQGESKIVSLNSSKLQLEDISDTLYSRPSLVAEVSKLTVNELKKFKLDGTAETKKGSTRSTFTINSIIVEMLQGKMVGRQL

SEQ ID NO: 86923 - protein, 72 aa, Gossypium hirsutum
  unsure (1)..(72): unsure at all Xaa locations
  Clone ID: LIB3189-037-P1-K1-C11.pep
INHKXPRRDYKLHYPSLPFLLVKTIQIYTYLLFPCILQKLILYHHIVILATILITLHFHPKCLSLTNFHLNS

SEQ ID NO: 86924 - protein, 66 aa, Gossypium hirsutum
  unsure (1)..(66): unsure at all Xaa locations
  Clone ID: LIB3189-037-P1-K1-C4.pep
EXXGRRHDVRVLVEFMFSNHSFTFIHRTNILDEWDAFLPIQISNPIIITLIVYISMLLLCSHPKIA

SEQ ID NO: 86925 - protein, 44 aa, Gossypium hirsutum
  Clone ID: LIB3189-037-P1-K1-F7.pep
LRWDFVCKKKTKLAETTIIKSRFFYSFSSLCISADCIDDNLAMR

SEQ ID NO: 86926 - protein, 45 aa, Gossypium hirsutum
  Clone ID: LIB3189-037-P1-K1-G3.pep
RPRVRCRCLKRYFYHFHRYNSNRQRAVSVDSENNNLPVAFSHIIF

SEQ ID NO: 86927 - protein, 56 aa, Gossypium hirsutum
  Clone ID: LIB3189-037-P1-K1-G7.pep
VDKISLTLLITAPLNSCLRLLLCKEYCYALSWDIYLQEIITFLMKKKQKKARQLAI

SEQ ID NO: 86928 - protein, 56 aa, Gossypium hirsutum
  Clone ID: LIB3189-037-P1-K1-H3.pep
THKWIAQKLRMDVERIRQQRLLKFEQSSQQVQKNCSPATPHVPISETTMTPIAQRI

SEQ ID NO: 86929 - protein, 44 aa, Gossypium hirsutum
  Clone ID: LIB3189-037-P1-K1-H7.pep
FTLHLSLQKDFIIGKATLRESVSLLLFHTFKLSWLPLLNLCGRI

SEQ ID NO: 86930 - protein, 89 aa, Gossypium hirsutum
  unsure (1)..(89): unsure at all Xaa locations
  Clone ID: LIB3189-039-P1-K1-A2.pep
RNLAEKPAPKGPDQSFAPIPESVDXQLHQSRRIPLSEFPVSTPRSGIVHHLTGPDRHALSRTLLKRSRSVVGAPARDIVTQASNSNKRK

SEQ ID NO: 86931 - protein, 38 aa, Gossypium hirsutum
  Clone ID: LIB3189-040-P1-K1-F12.pep
RAGAWNTLITCNIIFYSPSKETFARQKLADITLNDFLV

SEQ ID NO: 86932 - protein, 102 aa, Gossypium hirsutum
  Clone ID: LIB3189-040-P1-K1-G11.pep
APPDDNGQEKKKPRSLKHWSWKQSRTSYVSSYENGAGRLPNLSLNHLHAFHLLTLVLSEMVSSQGGIVVCWFCHGLLGTLHMSATIMRSKTFREKKKKKRLR

SEQ ID NO: 86933 - protein, 108 aa, Gossypium hirsutum
  Clone ID: LIB3189-041-P1-K1-A10.pep
VEARSLEDIHKAVRQLPESNPGEPPHSSGLRNESSTDTNTETNVVLPVLETRSAEDIDLAFKQLHEGVNVPSMIEKLPDLGDNKSKLPVVEARSLEDLNQIYSTTCET

SEQ ID NO: 86934 - protein, 79 aa, Gossypium hirsutum
  Clone ID: LIB3189-041-P1-K1-A12.pep
GRVGKYSYDDLFDHHFHVFQAAFTKRSLKQRLSLTPKTPLLLLLLLFHLQIINDESKVPSRGWFYRPKQKRASLPPSRR

SEQ ID NO: 86935 - protein, 87 aa, Gossypium hirsutum
  Clone ID: LIB3189-041-P1-K1-A4.pep
ERGAENDVESEKTQISNGSVTLSEAEKKHEFYVSSPEKPNEVMPEAFVLQEKNNIPKFYASANSKDNGISGGCQFSATSIIFAPSFI

SEQ ID NO: 86936 - protein, 77 aa, Gossypium hirsutum
  Clone ID: LIB3189-041-P1-K1-A9.pep
FVNKIPCSRGLHSAIVGLKIAQMVQRKDRQISILLFKTIQFTSPSQKVILWNESKQDLKDSLGIFFGEGIFNQLCFP

SEQ ID NO: 86937 - protein, 73 aa, Gossypium hirsutum
  Clone ID: LIB3189-041-P1-K1-B10.pep
TRPTKCKANISQTFLSQPFKLQTGRQFWEDGGLPQNKSHSLCIILLTSSHGESLPDTYLNLKLMKFVHTQAYN

SEQ ID NO: 86938 - protein, 69 aa, Gossypium hirsutum
  Clone ID: LIB3189-041-P1-K1-B3.pep
WEAPSPTPEAPRSKTTQRGRVLNPPIKATRSPRGYKRPGLGPPPHPAWVKARTEWRTGLSRSNTGPGRG

SEQ ID NO: 86939 - protein, 66 aa, Gossypium hirsutum
  Clone ID: LIB3189-041-P1-K1-B4.pep
LPANHWGFLPFLKPFAKTLFLINLGSALLSSFGFLSQIPVSIQHSSYKLSWGEASLHLFERETYVV

SEQ ID NO: 86940 - protein, 59 aa, Gossypium hirsutum
  unsure (1)..(59): unsure at all Xaa locations
  Clone ID: LIB3189-041-P1-K1-B8.pep
SXXRWGSALLLAVFFXCVNAPQRIIXXPCAILLXIAPSPXLLYWKYTIKHELRIGXAWR

SEQ ID NO: 86941 - protein, 102 aa, Gossypium hirsutum
  Clone ID: LIB3189-041-P1-K1-C3.pep
QPFRGFPQMATQSLSRYLLSKGRSLTSLLFPSCRPFSFFSPAAAAFPVKTLITSSPFPFLSFLRRLRAPLCYSLLLRDLLFPTIKSVFTRAGKAFLNDPNSN

SEQ ID NO: 86942 - protein, 48 aa, Gossypium hirsutum
  unsure (1)..(48): unsure at all Xaa locations
  Clone ID: LIB3189-041-P1-K1-D11.pep
FXSRKKGNKIAFFDCQSVLTNCDLGINGFVLGLXLILLVLMDCEIYLE

SEQ ID NO: 86943 - protein, 41 aa, Gossypium hirsutum
  Clone ID: LIB3189-041-P1-K1-D2.pep
MKNAERLANLALAGLTMAPLVVKVDPNLNVVLTACLTVYVG

SEQ ID NO: 86944 - protein, 101 aa, Gossypium hirsutum
  unsure (1)..(101): unsure at all Xaa locations
  Clone ID: LIB3189-041-P1-K1-D4.pep
MGAETIEGCAIMEKSNGKVSLLSVKQGEPTLVCPAEDTEKGLYFLSNLDQNIAVIVRTIYCFKSDEKGNGNAAQVIKDALXKVLSHYYXXAGRLTISSEGN

SEQ ID NO: 86945 - protein, 54 aa, Gossypium hirsutum
  Clone ID: LIB3189-041-P1-K1-D5.pep
VGKKTQKIGFFFEIYTTGMVLVKEQDYQFSFWFSLFKPLISTKRFTSMASVATS

SEQ ID NO: 86946 - protein, 80 aa, Gossypium hirsutum
  Clone ID: LIB3189-041-P1-K1-E2.pep
PTLKPSTHRLTLTTTSLKIRIIISVSDQLNSIASQNLDYTTSLTRLPSAFIPVHHHLDHLLFKMAPTGVRTHECIQRNSK

SEQ ID NO: 86947 - protein, 110 aa, Gossypium hirsutum
  Clone ID: LIB3189-041-P1-K1-E4.pep
MSIESRSGSADHGIKGVATHGGGYIKYNVYGSLFEVSRKYVPPIRPVGRGANGIVCAAVNSETPNDVAINKISNAFDNRIDAKRTLREIKLLRHMDHENVIAIKDIIRPP

SEQ ID NO: 86948 - protein, 84 aa, Gossypium hirsutum
  unsure (1)..(84): unsure at all Xaa locations
  Clone ID: LIB3189-041-P1-K1-E5.pep
SKSQPSPLFFFLYLRQXXXXTHAIFIQFLKTKNKFYPSFKTKFKILDQFHHKEILLLFFLLNYKLKPHILHIQNYKSIFTNFFL

SEQ ID NO: 86949 - protein, 57 aa, Gossypium hirsutum
  Clone ID: LIB3189-041-P1-K1-F2.pep
RNVLFKQKNIKRNTIHCLSRHLNLLTVAYYSSFFIFSHNLFTHLPTHIVLLKCHFHL

SEQ ID NO: 86950 - protein, 57 aa, Gossypium hirsutum
  unsure (1)..(57): unsure at all Xaa locations
  Clone ID: LIB3189-041-P1-K1-F3.pep
LLMDHLSLHRLLHRRNHYXXNSTTTAKNTFSPFCTIFLLMNASTSSIISTIIIFPEY

SEQ ID NO: 86951 - protein, 147 aa, Gossypium hirsutum
  unsure (1)..(147): unsure at all Xaa locations
  Clone ID: LIB3189-042-P1-K1-H6.pep
NYSYGLQFINLQVNRGHGKMPEAFTNNMLKNLLLNDNQLEGSLPRSLANCTXLEVLNLGNNNLTDTFPHWLASLPSLQVLILRSNRFHGSISNSIASSNFSALQIIDFSQNELSGPLPANFFRNLRAMKDAPKEKLSGSYLFKTDAR

SEQ ID NO: 86952 - protein, 44 aa, Gossypium hirsutum
  Clone ID: LIB3189-043-P1-K1-A1.pep
LGIVHPALILPMAAFRVSSYTASSLDLGANGYPYARVLLWPTHV

SEQ ID NO: 86953 - protein, 31 aa, Gossypium hirsutum
  Clone ID: LIB3189-043-P1-K1-B12.pep
FFMYVLQRKVLIPHSEGIVNIYHTKRIVLVS

SEQ ID NO: 86954 - protein, 49 aa, Gossypium hirsutum
  Clone ID: LIB3189-043-P1-K1-B5.pep
LLCSGIKVDPKKDIRYQSKSNCQIQGLNIILTLLLFHNDFIFDYWLNEF

SEQ ID NO: 86955 - protein, 86 aa, Gossypium hirsutum
  Clone ID: LIB3189-043-P1-K1-B6.pep
MVQSNQKPHLVLLSAPAHLQPVIELGKRLVTCQDVKATIIVASFVQSAPAESRMVQAALATKLFDVIHLPPADICNLVEPGDKGIT

SEQ ID NO: 86956 - protein, 148 aa, Gossypium hirsutum
  Clone ID: LIB3189-043-P1-K1-C12.pep
LEDAVSNGVLSDMIEESMHVLWEFLRADKDNTNATSKTPQQAQVAPHDPIDLELLMDVRTELQKKEKRLKEIQRNTNCIIKRLQRQHQRNLLDHTLFIAQVELKLVSRVLNMLKISTDQLIWCHEKLQRINFGSRNTEIEPSFTLFPC

SEQ ID NO: 86957 - protein, 143 aa, Gossypium hirsutum
  Clone ID: LIB3189-043-P1-K1-C2.pep
RPENDHIYHSELFTLTKKMARAESQKLSFTVPIFEPHPPQYYIRAVSDSWLYAEAFYTISFQNLRLPEACTTLTELIDLKPLPVTSLGNSTYESLYSFSHFNPIQTQIFHVLYHTDNNVLLGAPTGSGKTISAELAMLHLFNT

SEQ ID NO: 86958 - protein, 40 aa, Gossypium hirsutum
  Clone ID: LIB3189-043-P1-K1-D11.pep
LYHQDLTTKMISYKIALVIKLSNDFIGSLGHQLVNRVWCV

SEQ ID NO: 86959 - protein, 134 aa, Gossypium hirsutum
  Clone ID: LIB3189-043-P1-K1-D3.pep
RSLDLWKDVPGVCEQVSTTSQSDSSSIDNGSVGCFTSVSKGMNDVGFRTPQSKKVVPTSRSPPSDASAASTAKKETSLKSNNSNSNTRRLDRSKSSDWKIETVQPKSLFSEASGNYNIKRSVSFGKAHDEKVQK

SEQ ID NO: 86960 - protein, 49 aa, Gossypium hirsutum
  unsure (1)..(49): unsure at all Xaa locations
  Clone ID: LIB3189-043-P1-K1-E2.pep
GMLMLSWLDQFTCPILHYVVRYLDTNKASFTNVWSCPIXFVRNTYVFNW

SEQ ID NO: 86961 - protein, 75 aa, Gossypium hirsutum
  Clone ID: LIB3189-043-P1-K1-F2.pep
PPSFQPPLLSHQPPHARHHRSGHQPPAFHASDTGVEKPIFAHRRPSSTVVVQRAMKESDSSDKQVGERVFCVFFS

SEQ ID NO: 86962 - protein, 78 aa, Gossypium hirsutum
  unsure (1)..(78): unsure at all Xaa locations
  Clone ID: LIB3189-043-P1-K1-F4.pep
KRGDWKNPGVTKFNRFEKNPLFPSWGKNKKAPTDRLSKNLPTLNGKWTPPFTGHLSPGGXLVTPNGTFTFARALTPVF

SEQ ID NO: 86963 - protein, 99 aa, Gossypium hirsutum
  unsure (1)..(99): unsure at all Xaa locations
  Clone ID: LIB3189-043-P1-K1-G11.pep
GGXKSKNIWAITNAPHHLNYTTNPKTMLNSHKFNRTNPLITITPDTKLKNPVCRNIPQFTTQKVEKSLSRLQKYFPFTTALSHQISKKNSPGILPQPSI

SEQ ID NO: 86964 - protein, 81 aa, Gossypium hirsutum
  Clone ID: LIB3189-043-P1-K1-G6.pep
VWDYTGLSYAKYNARDADKEVLGCVVENTVLLSSLLSRVQETDLPKKIYPSRLNSMSILPNSSSFGVDSTLSMTALFTQWR

SEQ ID NO: 86965 - protein, 87 aa, Gossypium hirsutum
  Clone ID: LIB3189-043-P1-K1-H1.pep
EQCFLCKRRLLPGKDIYMYKGDKGFCSVECRCKQIFMDEEESLKKDSCSLDAIVKPSSTSVASTSSSSSAARHHRKPERNRAGGFAY

SEQ ID NO: 86966 - protein, 85 aa, Gossypium hirsutum
  Clone ID: LIB3189-044-P1-K1-A10.pep
DIQDMPSVIRCIREQQLSVTKPGEIGMSYHHYKLGKPRVLPMLHCVKVRVISFELGGHKKKVIPSISVREMLDPKKRRPLNPPPR

SEQ ID NO: 86967 - protein, 99 aa, Gossypium hirsutum
  Clone ID: LIB3189-044-P1-K1-A12.pep
MAPTSYPGPAQVGSYFVGQYYQVLQQQPDLVHQLYSDDSTMIWVDGDSSDSASAMLQIHAMVMSLNFTAIEIKTINSLDSWNGGVLVMVSGSVKIKDFS

SEQ ID NO: 86968 - protein, 43 aa, Gossypium hirsutum
  Clone ID: LIB3189-044-P1-K1-A7.pep
YYKLTKKDLLVAVESVDNQTNKLVDHNMKTVSPTNHNLFLPPF

SEQ ID NO: 86969 - protein, 68 aa, Gossypium hirsutum
  unsure (1)..(68): unsure at all Xaa locations
  Clone ID: LIB3189-044-P1-K1-B4.pep
AYSGGEITSIFILLACVSPSLCIEWLRRHSSLAFGHLLRLLERGPXEYHPVILLMHNELLQNTAMDSA

SEQ ID NO: 86970 - protein, 44 aa, Gossypium hirsutum
  Clone ID: LIB3189-044-P1-K1-B6.pep
MATKVYIVYYSMHGHVEKLAEDIWQGAASAEGEQAKSWPASETT

SEQ ID NO: 86971 - protein, 150 aa, Gossypium hirsutum
  Clone ID: LIB3189-044-P1-K1-B7.pep
FPPERSFLRGPPLPQQRPHPVLLEEELEMQHAEIRRLLTDNSRLVEDRIAIRQELGAAKEEIHRLNLFIGDVRAEQELYSRGLIDKGLKLEADLRATEPIKKEVVQLREEVQKLNNNKQELTGQVQALKQDVGRLQADNQQIPVLRAEID

SEQ ID NO: 86972 - protein, 87 aa, Gossypium hirsutum
  Clone ID: LIB3189-044-P1-K1-C10.pep
WIVLGKRIWFFPNILAEEATLRELFRFLPKKDEEERPKWTARLFYAIVAVLAILLLMHHASDEAGRARYHKRMLNIIDDVLKGSTSL

SEQ ID NO: 86973 - protein, 52 aa, Gossypium hirsutum
  unsure (1)..(52): unsure at all Xaa locations
  Clone ID: LIB3189-044-P1-K1-C2.pep
PSVLALLKAKFAKLQKELLTPYXKGGGGAGEGFDVTKSGDARVGLVGFPSWG

SEQ ID NO: 86974 - protein, 54 aa, Gossypium hirsutum
  Clone ID: LIB3189-044-P1-K1-C6.pep
KGKMLEGLLSRDSFLYLAMGLHHCAVHNIIYVLSSYNTLKLQLEKLKKSRDNSN

SEQ ID NO: 86975 - protein, 86 aa, Gossypium hirsutum
  Clone ID: LIB3189-044-P1-K1-D4.pep
HPRVHSTNTTLPIFNRFFFLSPTHHSLGLFLNRGTSPIIITVYIFTPIAFIGLINYNHSPLLNFLYDNAKSLNPNSQNDSKFSLIY

SEQ ID NO: 86976 - protein, 53 aa, Gossypium hirsutum
  unsure (1)..(53): unsure at all Xaa locations
  Clone ID: LIB3189-044-P1-K1-E1.pep
RSTRFTFPCLFRHRSSHYTVVRRRPDLRSEQXWTDLTGSGEDFFWNRASFKGS

SEQ ID NO: 86977 - protein, 120 aa, Gossypium hirsutum
  Clone ID: LIB3189-044-P1-K1-E12.pep
HASDSDENSNKNEDIPPNEVPSNPSHETPNRRKETLGVVYGKGKKSSSSRKSSRISLANHIEKLCESMASPRKSVNEIIFPHSEYSISNAMDALRDLEDEIPKKDELYCFAIKMFQIPVK

SEQ ID NO: 86978 - protein, 76 aa, Gossypium hirsutum
  Clone ID: LIB3189-044-P1-K1-F1.pep
PPPLPNPSWASNPKPGPFGSPTPGPATTPKRAALKPTSGKTGFSSEVGTKGGHGRLKPPAKTQPPIGLNHPTKKSR

SEQ ID NO: 86979 - protein, 96 aa, Gossypium hirsutum
  Clone ID: LIB3189-044-P1-K1-F10.pep
VAGALIIPFLPNSQQRYSLLLLQEPTTLNTPKSRSIILPFLFSGLSYFLTVIEATLSPLNLELPLKTFLLIFDTGSSLFCFPLNLSIHFVPNSLFP

SEQ ID NO: 86980 - protein, 141 aa, Gossypium hirsutum
  Clone ID: LIB3189-044-P1-K1-F11.pep
LGQKNFDMTIVFKDFKKDVLRIDSIPSTSLDGIKEWLDTTDIKYYESRLNLNWRQILKTITDDPQSFIENGGWEFLNLEASDSDSEQSEESDQGYEPSDVEPESESEDDDSDSESLVESEDEEEEESDDDSEEEKGKTWEE

SEQ ID NO: 86981 - protein, 55 aa, Gossypium hirsutum
  Clone ID: LIB3189-044-P1-K1-F5.pep
SLKTAPPFFFFFFFFCFFLFYFFFFPFFFFYFFLFFFFFFFFFKFKFYFLFFFFF

SEQ ID NO: 86982 - protein, 93 aa, Gossypium hirsutum
  Clone ID: LIB3189-044-P1-K1-G10.pep
MIDQRIQEFLVQSTSQSWMLKATCKTEPVQSPHPDNPAKKLERQPSKNLMAERKRRKRLNDRLLMLRSIVPKISKMDRTSILGDTIDYTNELL

SEQ ID NO: 86983 - protein, 62 aa, Gossypium hirsutum
  Clone ID: LIB3189-044-P1-K1-G3.pep
PLPPVLLLFHYFSSGGFISSFMVNPRWGGGGTQDQLWPTGGRGNRVSRLGFNFFQKPRGLKF

SEQ ID NO: 86984 - protein, 55 aa, Gossypium hirsutum
  Clone ID: LIB3189-044-P1-K1-G8.pep
VLPGLGEIVYMLHKRLLARKSIIEKRKEEQERQLLEMEREEESKRQNLLKKTEEA

SEQ ID NO: 86985 - protein, 136 aa, Gossypium hirsutum
  unsure (1)..(136): unsure at all Xaa locations
  Clone ID: LIB3189-044-P1-K1-H11.pep
MEEERIGYLIEKCPDTRVIRQIHAHVLTRLLPISAVSFLLSKIVGFCALSRHGDINHARKVFAQTPNPNIFTWNSLIRGYYLVGSPSKVPLFLYKKLVRKGYPSANTFTLAFVLKXCSNILAFDEGKQVHARVFRS

SEQ ID NO: 86986 - protein, 76 aa, Gossypium hirsutum
  unsure (1)..(76): unsure at all Xaa locations
  Clone ID: LIB3189-044-P1-K1-H12.pep
NFLPXQKIRIFDTIIGGGWPMISLLFFLSPPYTFFFRKYMGFVLFLRHFNINHSRKSFSKSHHLHIYTYNSLNHCY

SEQ ID NO: 86987 - protein, 80 aa, Gossypium hirsutum
  Clone ID: LIB3189-044-P1-K1-H2.pep
FYPLLTGFNFFIYQRLFGAKFIIPIVAQSLKHHGNSICRFSIPDKCEESNLRDKTSQLKTRYQQETVFSQQVSMLSSCCS

SEQ ID NO: 86988 - protein, 33 aa, Gossypium hirsutum
  Clone ID: LIB3189-044-P1-K1-H3.pep
PTRPEPLTLCLILLSVSFPHQSRRLLQEMKRKT

SEQ ID NO: 86989 - protein, 52 aa, Gossypium hirsutum
  Clone ID: LIB3189-045-P1-K1-A7.pep
MFSFMFEKRPVAHGCPHSNAYSKSSSFSMSNILIISNNFQMPIAPFSPPLLS

SEQ ID NO: 86990 - protein, 129 aa, Gossypium hirsutum
  unsure (1)..(129): unsure at all Xaa locations
  Clone ID: LIB3189-045-P1-K1-B1.pep
MTVSFFICHITPLTGFCFLLLSSSSAADLNITFILSFFQNLTYFFFLLTSSSVASDLTRRQDPITLLAVPNSYLSIPSACDLTRRLPPYXLGDMLRYHVLLHYLFWTDLLQIPPCGVXVSTLLQTTSRA

SEQ ID NO: 86991 - protein, 38 aa, Gossypium hirsutum
  Clone ID: LIB3189-045-P1-K1-C1.pep
SFCNLRILPKRSLSFIYYQHFRLVVWNNEEIWQELNGT

SEQ ID NO: 86992 - protein, 48 aa, Gossypium hirsutum
  Clone ID: LIB3189-045-P1-K1-C2.pep
RRPILSLLIAMSVCHRHVAIPTEYLIFWSHWSVPKALIPKSATSIYFF

SEQ ID NO: 86993 - protein, 67 aa, Gossypium hirsutum
  Clone ID: LIB3189-045-P1-K1-C8.pep
GKAKREKKKKHEQPSKFRLKTILENRTSRSPQIFLVSSTCFWPLPVLSSLVFLTLRITAATEAKSLA

SEQ ID NO: 86994 - protein, 64 aa, Gossypium hirsutum
  Clone ID: LIB3189-045-P1-K1-D1.pep
ISHPFCLPPPNFRHNWVLKGNFGWFSRKQRQNPGLNKKGRSILRLEFLKPKSHQKEPENPRRPR

SEQ ID NO: 86995 - protein, 61 aa, Gossypium hirsutum
  Clone ID: LIB3189-045-P1-K1-E1.pep
PSDRNLKIQILQVHQRTHPVLRLDLIDFMQRCWLFNLIIDQIIVPNLLSLPVSVLSPVFRF

SEQ ID NO: 86996 - protein, 94 aa, Gossypium hirsutum
  Clone ID: LIB3189-045-P1-K1-E7.pep
SPYILALSSNCFPDTTLPPLRVETSPEGAAASLFPSMLPLPEGIRVCLSGPIPYPSELFATPNLDLNSEASGLILPNLIKFPTLPVIFTPLDLA

SEQ ID NO: 86997 - protein, 75 aa, Gossypium hirsutum
  unsure (1)..(75): unsure at all Xaa locations
  Clone ID: LIB3189-045-P1-K1-E8.pep
GRVGPDALATKFLNVYGPAFVAPFRVMAGLIEKXIEFHTVPXDLLKGEHKDPVFLKLHSFGTFSITQYGDYFLYE

SEQ ID NO: 86998 - protein, 49 aa, Gossypium hirsutum
  Clone ID: LIB3189-046-P1-K1-A1.pep
EKKMGCVSSKLVKKEMKREMVLNNGGDFAHHVVSLKSSTYGVLKLDNDE

SEQ ID NO: 86999 - protein, 82 aa, Gossypium hirsutum
  unsure (1)..(82): unsure at all Xaa locations
  Clone ID: LIB3189-046-P1-K1-B3.pep
NRTQKDTENTLLYLQLINVLVLIITQCYLIFSQYPISLLTXHIGXVVKCPLSLSSAECNLARTQFVFTMQRECLDQCPFSSI

SEQ ID NO: 87000 - protein, 88 aa, Gossypium hirsutum
  unsure (1)..(88): unsure at all Xaa locations
  Clone ID: LIB3189-046-P1-K1-B9.pep
KVMCELKKVCKWLELERKCWIFKKVRXGLCFFFGNGIERRVGGYLDVEFVIWKSGYXEVMKMNMMFVYLVLGAVLKSRGLQVCFLCLI

SEQ ID NO: 87001 - protein, 89 aa, Gossypium hirsutum
  unsure (1)..(89): unsure at all Xaa locations
  Clone ID: LIB3189-046-P1-K1-D4.pep
TPIRTHHHPYPLIPPGLTQDEFHELXRSGTXYHTYTLGQGKCSSLLAQRINSPSDLVWSIVRRFYQPQTYKHFIKCCAVKDIFQMVVGC

SEQ ID NO: 87002 - protein, 60 aa, Gossypium hirsutum
  unsure (1)..(60): unsure at all Xaa locations
  Clone ID: LIB3189-046-P1-K1-D9.pep
FGVLFLSKSGQKGFSIYTKRPQGLIYGIPFSAVYFLFPXSVLFDFFTYFLSLSTASKSAF

SEQ ID NO: 87003 - protein, 50 aa, Gossypium hirsutum
  Clone ID: LIB3189-046-P1-K1-E5.pep
SGPCMNNIIVMESTSVHHLIHNNSNSNVADYFIVSYYLKITPMPTDIRTD

SEQ ID NO: 87004 - protein, 125 aa, Gossypium hirsutum
  unsure (1)..(125): unsure at all Xaa locations
  Clone ID: LIB3189-046-P1-K1-E6.pep
TRGRGPKPRMFGAHSHTAPLCTRTHQIAALILVTATFFFTRLFDQSFPPSPCYLDRHLNLHVAKTNDXGHLLWPDRGYGSHLFLKIYVYDENEIDGLKDLLYGRAGSISSNACLKGQWGSQVKIH

SEQ ID NO: 87005 - protein, 92 aa, Gossypium hirsutum
  unsure (1)..(92): unsure at all Xaa locations
  Clone ID: LIB3189-046-P1-K1-E8.pep
NPIXHEPANYTRIGGVRGLYIILXXKILSFLTKILSIFFLNSQTLKLFLSFNPLLHYKQPFIVSIYHYSHKITLPPSLSLPKPKNSSFLSST

SEQ ID NO: 87006 - protein, 67 aa, Gossypium hirsutum
  Clone ID: LIB3189-046-P1-K1-F10.pep
HWPPRACLRNEKYPPASDTYSSKFIPKTLRNNAVDDADEEEEEERVISKESRGQFGLFVASLSLFFP

SEQ ID NO: 87007 - protein, 101 aa, Gossypium hirsutum
  unsure (1)..(101): unsure at all Xaa locations
  Clone ID: LIB3189-046-P1-K1-F3.pep
FTIIILITKLHAAMSTXYKDRRGGALFATQHNLGPTGVGNTRINLLDFIFFQNLYLSHLKKSLLKVLIFHSNINYSSLLLIYCQHILLHFPSLPFYLNLAP

SEQ ID NO: 87008 - protein, 82 aa, Gossypium hirsutum
  Clone ID: LIB3189-046-P1-K1-G9.pep
SAGYVPYRPSVIYASLHKYRFIAPFVTTMLSLLHRSLVTLQGSRLIWQSRPHRVVSCHISARSCGTSAHSISVVHPPALKCC

SEQ ID NO: 87009 - protein, 55 aa, Gossypium hirsutum
  Clone ID: LIB3189-046-P1-K1-H1.pep
PRVSVFISTLTQIPRTTRHPCATIFTPYSPASGDYTDATLVLYRPQLHPITTFND

SEQ ID NO: 87010 - protein, 59 aa, Gossypium hirsutum
  Clone ID: LIB3189-046-P1-K1-H10.pep
FCQGKWLPTSFPSKFLYIFPFYQQLRKAKPKKRRVFSQSTSSAGRSKPKQIVSTVKTRC

SEQ ID NO: 87011 - protein, 73 aa, Gossypium hirsutum
  unsure (1)..(73): unsure at all Xaa locations
  Clone ID: LIB3189-046-P1-K1-H12.pep
MGRGKLEFGVRVWKFMVVSVKTSYRLXWNHPIFVGLVGFIIYLDRSFPFMFSILVTASPVLVCTCVLLGLLLS

SEQ ID NO: 87012 - protein, 59 aa, Gossypium hirsutum
  unsure (1)..(59): unsure at all Xaa locations
  Clone ID: LIB3189-046-P1-K1-H8.pep
TGIGNTDILTDAYFWIRKNIXYFKVNYISILAIVLGLSLLFYLFLTPLFFFGLFCRLAF

SEQ ID NO: 87013 - protein, 38 aa, Gossypium hirsutum
  unsure (1)..(38): unsure at all Xaa locations
  Clone ID: LIB3189-047-P1-K1-A5.pep
LFKNIILIYXTITHNLLTLHTSPISYKKPFNSPSSFVF

SEQ ID NO: 87014 - protein, 33 aa, Gossypium hirsutum
  Clone ID: LIB3189-047-P1-K1-C11.pep
NFTLRKVLESNKKIRRRRKKVFIKTEAWRREGN

SEQ ID NO: 87015 - protein, 153 aa, Gossypium hirsutum
  Clone ID: LIB3189-047-P1-K1-C12.pep
GTVLHRPSGPDPTSEFEHSSIAATLKKILNLKEFLTKRDAWAGSFDIVVNRSTPRTDCPEKLAEPVKMRDSDAKETAKLSDFQEELVQAAAALKGDPFNLVENMTVSSGLKYVEDAFKKFYDDGQKAKEINEVEDTVSADASTRRTTASKTFM

SEQ ID NO: 87016 - protein, 87 aa, Gossypium hirsutum
  Clone ID: LIB3189-047-P1-K1-C5.pep
FPFHHASPHVYYHFTLNSNYFLLPYTINILFASILTARGINLSTLSPYYKTFYFILTSLIIESNLLLTFQLTKLSNEVIILLTPFFI

SEQ ID NO: 87017 - protein, 139 aa, Gossypium hirsutum
  Clone ID: LIB3189-047-P1-K1-D4.pep
MAISFFGFLSLLWRPFSSPSSDGPENFIIHVSKSHKPPLFSSHHHWYSSILASLPPSPHPIKLLYTYERVINGFSARLTAAQADKLRGLPGILSVIPDQVRQIHTTRTPHFLGLSDGVGLWQNSYYGDGVIIGVLDTGI

SEQ ID NO: 87018 - protein, 83 aa, Gossypium hirsutum
  Clone ID: LIB3189-047-P1-K1-D5.pep
SGWSSRTRAVAKYLQNLFEDEAGHGRKALSMDSLLARKTRKEASRMFFETLVLKTKDYIHVEQGKPFDDICIKPRLKLLKSDF

SEQ ID NO: 87019 - protein, 110 aa, Gossypium hirsutum
  Clone ID: LIB3189-047-P1-K1-E12.pep
GSRGLSSKDNAFLRGQFNNSRFMNFYASRAPRKQRGLVVSPSCVLPLTEENVEKVLDEVRPGLMADGGNVGLHEIDGFAVVLKLHGACGSCSNSSMTPKMGIDTWVRGKI

SEQ ID NO: 87020 - protein, 77 aa, Gossypium hirsutum
  Clone ID: LIB3189-047-P1-K1-E6.pep
GRGYKEKMTTKYEEFLKDLEENPELRLNLSLYRNKDYQPSEMASVSDGDDVPSVPLEELLADLELSEEEDGDDSMKD

SEQ ID NO: 87021 - protein, 46 aa, Gossypium hirsutum
  Clone ID: LIB3189-047-P1-K1-E9.pep
HTDLPKFSPSTHLTMPSAVSKENLLPAQRLYNTFFSFDQHLPIIHF

SEQ ID NO: 87022 - protein, 75 aa, Gossypium hirsutum
  unsure (1)..(75): unsure at all Xaa locations
  Clone ID: LIB3189-047-P1-K1-F11.pep
SSHFQTILFALFIESDIATNSSPTTRAGEVLKAFIIPYIFTFVHDNISKNIHXPYYVYKLAYHQTSSESWGTFRS

SEQ ID NO: 87023 - protein, 44 aa, Gossypium hirsutum
  Clone ID: LIB3189-047-P1-K1-F3.pep
ICYIHINHMKHSIKIHAKIQMYFGELVYIRYRCEGMLESKYIVS

SEQ ID NO: 87024 - protein, 75 aa, Gossypium hirsutum
  unsure (1)..(75): unsure at all Xaa locations
  Clone ID: LIB3189-047-P1-K1-F4.pep
ERSPNQTSTGSRKSVRWSAELGSESPAXRMHSVTMSAVNGSNPYIAQSPAPESFSTSFKEKMDTVKDVLGRWGRK

SEQ ID NO: 87025 - protein, 81 aa, Gossypium hirsutum
  Clone ID: LIB3189-047-P1-K1-F5.pep
GFNMKWGLKLGVLKLNPCTPDTELVEALPGEQGIGAFIGPGAAYLIQVFTPPSLEATVVQTSRKVANSNSSRALKAIGESS

SEQ ID NO: 87026 - protein, 106 aa, Gossypium hirsutum
  Clone ID: LIB3189-047-P1-K1-F8.pep
GRVGERLEREAAEAEQKRKEEGEAHERAGGEAAEKEAARARMREQKALSLGDEPEKGPSVTQVLVRFPTGERKERRFHSTATIQSVYDYVDSLGCLEVEDYILLFN

SEQ ID NO: 87027 - protein, 92 aa, Gossypium hirsutum
  Clone ID: LIB3189-047-P1-K1-G12.pep
KILSFSSVSSEAQTETSEMGAPSMFVESSDKEPEGHGETREQGTSSFQEMHAASLDLFENEPRVRDLPEISVHDGIYAGSSRFSSTFFDHNV

SEQ ID NO: 87028 - protein, 89 aa, Gossypium hirsutum
  Clone ID: LIB3189-047-P1-K1-G2.pep
NLALALYPFHIPLLRSLFETLGFLMAFMNEKGLPMVARREEQVISLLFLYICFEFQENKRKGLPLEIFVFLFSIDCVCKKLQKRIPSAL

SEQ ID NO: 87029 - protein, 158 aa, Gossypium hirsutum
  Clone ID: LIB3189-047-P1-K1-G6.pep
TTRPQNLHQPGVYSQIQQQQQQRQILTSNGQSTQTTLPANKASYPLTSLAQDTQIQQQVEQQPNLVQSQQQQTQLQQNLSQRSQQQPQIQQLAQHGLSEQQFQLLQKLQQQQQSSQQLLSPTGSLSQSPVVQQQPMHQQNQPMQQVPLSQSQQTLGSN

SEQ ID NO: 87030 - protein, 47 aa, Gossypium hirsutum
  Clone ID: LIB3189-048-P1-K1-C12.pep
PLNKRQGLPFCSARAHPPIESCSEVFNMLYLTIFFPGARHIFFLFYP

SEQ ID NO: 87031 - protein, 73 aa, Gossypium hirsutum
  unsure (1)..(73): unsure at all Xaa locations
  Clone ID: LIB3189-048-P1-K1-C3.pep
KKMGTGYLSAFPFXLFDRFKTIWPVWAPCYAIHKILARLLHQYTFANDAQTLLITTSMVKYFYNLFQNTLRTL

SEQ ID NO: 87032 - protein, 141 aa, Gossypium hirsutum
  Clone ID: LIB3189-048-P1-K1-C8.pep
KKMGTGYLSAFPSELFDRFEAIKPVWAPYYTIHKILAGLLDQYTFANDAQALVMTTWMVEYFYNRVQNVIRTHTVERHWLSLNEETGGMNDVLYRLFAITGNPKHLFLAHLFDKPCFLGLLAVQADDISGFHANTHIPMVI

SEQ ID NO: 87033 - protein, 100 aa, Gossypium hirsutum
  unsure (1)..(100): unsure at all Xaa locations
  Clone ID: LIB3189-048-P1-K1-D2.pep
LPPSDEEEDEYPSGEEQTQSNRQERQSLKPLDTSISEKELKKREKKEMLATHAAELAKQEALKDDHDAFTVVIGSRASVLDGXDDADANVKDITIDNFSV

SEQ ID NO: 87034 - protein, 57 aa, Gossypium hirsutum
  Clone ID: LIB3189-048-P1-K1-D5.pep
KDKLISLYDLLPWVSLRFGGEIIYRFFPFIYHHQRILILTLLLIFLLMPYFYSFPFK

SEQ ID NO: 87035 - protein, 77 aa, Gossypium hirsutum
  Clone ID: LIB3189-048-P1-K1-D6.pep
AHASAHASAHASGGSISDEQRKNGMVNSCPGAGACGGMYTANTMASAIEAMGMSLAYGCSIPAEDPLKLDECLLAEK

SEQ ID NO: 87036 - protein, 53 aa, Gossypium hirsutum
  unsure (1)..(53): unsure at all Xaa locations
  Clone ID: LIB3189-048-P1-K1-D8.pep
NNFSSVLGFASISADVDNSSAAVKTAKRGGXXXXTTKSXSXEFNVQNHIYIFT

SEQ ID NO: 87037 - protein, 82 aa, Gossypium hirsutum
  unsure (1)..(82): unsure at all Xaa locations
  Clone ID: LIB3189-048-P1-K1-E3.pep
IIVLDLAPYTLNIKTFDWVITKLVPGDTYIPTKNSQVFTTYQDQHTTLFIQVFXGEMILTKDFILLLKSILIRITTTSILIP

SEQ ID NO: 87038 - protein, 69 aa, Gossypium hirsutum
  Clone ID: LIB3189-048-P1-K1-E4.pep
VADRRHPRPHVAAIVFTHERIETAHVVSPTSGSFARCPYHQRRAVGIVCFVLSKSKLKGKGFWREELGR

SEQ ID NO: 87039 - protein, 54 aa, Gossypium hirsutum
  Clone ID: LIB3189-048-P1-K1-E5.pep
RKSMSFREDLPITIIFLATCSPSTPVKARTHRSFNDSGLSNILCRTKYPTLQSY

SEQ ID NO: 87040 - protein, 37 aa, Gossypium hirsutum
  unsure (1)..(37): unsure at all Xaa locations
  Clone ID: LIB3189-048-P1-K1-E9.pep
DAWDHSIIPINVVKTEERIRGRNGQAQREGXKLVGTY

SEQ ID NO: 87041 - protein, 78 aa, Gossypium hirsutum
  Clone ID: LIB3189-048-P1-K1-F8.pep
CTFTINLLVYIYIYYINIAKIIYKSIPSTINNSQPKLISYLIIFKSFKQITILLFTNLFIILISTKLSHYLFIIFQNF

SEQ ID NO: 87042 - protein, 65 aa, Gossypium hirsutum
  Clone ID: LIB3189-048-P1-K1-G2.pep
IYKTCLGIKHTNLFHFLKHLYIYYHSFKIYITTYSIFPFTYPKIFFFYNLIQTLPLLNFYNLNIL

SEQ ID NO: 87043 - protein, 85 aa, Gossypium hirsutum
  Clone ID: LIB3189-048-P1-K1-G4.pep
MSSISKRCLLLALLAAAVLLISSEVTARDLAETTTEKNNGEVATETTEAEAEVEESKYGYGGYGSRRGYGGYGRRGGYGGYGRRG

SEQ ID NO: 87044 - protein, 50 aa, Gossypium hirsutum
  Clone ID: LIB3189-048-P1-K1-H6.pep
RSRTRDLVAKPFKKKGYIPLATYLKTYKIGDYVERKVNRAGHKGMPHKIY

SEQ ID NO: 87045 - protein, 49 aa, Gossypium hirsutum
  Clone ID: LIB3189-049-P1-K1-B7.pep
PRMVHELYDWFYQSLAMFCSFIDHFYDVYPCPFSNMPRHKYVFYPNIIQ

SEQ ID NO: 87046 - protein, 83 aa, Gossypium hirsutum
  unsure (1)..(83): unsure at all Xaa locations
  Clone ID: LIB3189-049-P1-K1-D2.pep
HASGEIPPELGQACGALEELDLSSNKLTGGSPSGPTXCCCLLLLNLGNNLLSGDFLSAGGSRLRNWRGIYGPLHCCTSCDHVA

SEQ ID NO: 87047 - protein, 65 aa, Gossypium hirsutum
  Clone ID: LIB3189-049-P1-K1-D3.pep
LENRQTIHGFFFFNSQIESRKGLCYMHITLSSRVVPYCKSFYILPIHIPTPNRIPEICNYFLTPK

SEQ ID NO: 87048 - protein, 48 aa, Gossypium hirsutum
  Clone ID: LIB3189-049-P1-K1-G7.pep
PSDSGRPTVEFKGNLREDSIFHGTTLLGLFVYKPTQESEQSYPLFSNV

SEQ ID NO: 87049 - protein, 46 aa, Gossypium hirsutum
  Clone ID: LIB3189-049-P1-K1-G8.pep
GSPTRPSKCVFDLIQPPPSFYSTNTPLLYGFLNDPTNHTTTAAMFK

SEQ ID NO: 87050 - protein, 76 aa, Gossypium hirsutum
  Clone ID: LIB3189-050-P1-K1-A1.pep
ENITRDFQSHTIHSDGTSTSSMSSPSNSPNPSASQKKGDCISYHTGCLQFGNCGSGGLNCIYPSDLIPFTRRPLFI

SEQ ID NO: 87051 - protein, 97 aa, Gossypium hirsutum
  Clone ID: LIB3189-050-P1-K1-A5.pep
QPTRKQRNFKSTNKKIPISQIKKEIWEVFIEEPVVFFFYTLSNKLIELIALSTSLFLYSSFCSLLFSLKSQKGPFLYFSPSFLNLFFFGFSLLGFFL

SEQ ID NO: 87052 - protein, 61 aa, Gossypium hirsutum
  Clone ID: LIB3189-050-P1-K1-A8.pep
EGVDDYVKRDGPNPQSIRPLVEIAKSGVLVDTPMHLHSALPIAITPTNDPTLNNVPSFIFS

SEQ ID NO: 87053 - protein, 139 aa, Gossypium hirsutum
  Clone ID: LIB3189-050-P1-K1-A9.pep
SFLLLFAPQILPLGKHRQVPISAQDELDDLHLFREAITAASSRGGSSKVSHLGTINPKPKIAFLFLTNSDLVFAPLWERFFESNDGLFNVYIHADPSTKLNPLQWSIKANFIAFRRTARASPTLIFAARRLLANAIIDD

SEQ ID NO: 87054 - protein, 102 aa, Gossypium hirsutum
  Clone ID: LIB3189-050-P1-K1-B8.pep
VSFTLTAPYSHIVTSSNPLPVLPSIAQLLIGYFESFKRKKREPSMCSWTAAESDMVVKNRLVGFLLWQSILSSLIFLAFTITIVFWRSATAIFVSFFSFHLS

SEQ ID NO: 87055 - protein, 69 aa, Gossypium hirsutum
  Clone ID: LIB3189-050-P1-K1-D3.pep
ILSMGKKRSWFSWVKKIFASNAQPKTQKKSRRWRWIFGKLKLKQCRPALPAIPQQKSLCQAIEDKKSML

SEQ ID NO: 87056 - protein, 71 aa, Gossypium hirsutum
  Clone ID: LIB3189-050-P1-K1-D8.pep
ACGLCSRFGKRYPLIETMFLFPNAKLVRSSNSSIIFGFVRFLFLRPQLLTNSIIKTVIILYSKWHHYFQFQ

SEQ ID NO: 87057 - protein, 61 aa, Gossypium hirsutum
  Clone ID: LIB3189-050-P1-K1-E8.pep
LNTTMRTVQTILRFVPMSLGVASLVFMLKNLHSNDLVFVTYLDLDAFKYFFHAYIFCTCFS

SEQ ID NO: 87058 - protein, 95 aa, Gossypium hirsutum
  Clone ID: LIB3189-050-P1-K1-F9.pep
PTRPISGYQGFFLSGLRPAWFMGFRQRLGGHPQICDGSIVAFTVLHNVNCNHGFIYVTSQGILKICQKPSTSNYDNYWPVQKNSLRCTPHQVTYF

SEQ ID NO: 87059 - protein, 44 aa, Gossypium hirsutum
  Clone ID: LIB3189-051-P1-K1-B11.pep
FNSHWYRLGFMIFTSFPLPFALKSDHATCGSDGKSLRSYGVCSP

SEQ ID NO: 87060 - protein, 109 aa, Gossypium hirsutum
  Clone ID: LIB3189-051-P1-K1-B2.pep
MAEERNYIIKVEEGKAATDERPSIGPVYRSCFAENGFPAPIPGMESCWDIFRMSVEKYPNHHMLGHRQIVDGKAGKYVWQTYKQVYDIVMKVGNSIRSCGVEEGGKCGI

SEQ ID NO: 87061 - protein, 110 aa, Gossypium hirsutum
  Clone ID: LIB3189-051-P1-K1-G10.pep
LNSISHGRNVKSSFYDSSKHPFARAIPSLSFKSCHFCVRCAVSFRPCIDIHKGKVKQIVGSTLRDSKEDGSTLVTNFESDKSAAEFANLYKKDGLKGGHVIMLGADPLSQ

SEQ ID NO: 87062 - protein, 47 aa, Gossypium hirsutum
  Clone ID: LIB3189-051-P1-K1-G12.pep
GGSSRSMFRELWLTDTNVSTRPFRIRVCYPLNGSFLLTKYLSKHIQT

SEQ ID NO: 87063 - protein, 53 aa, Gossypium hirsutum
  Clone ID: LIB3189-051-P1-K1-H5.pep
IWCQTKVILKFLRIGSGRQKIESEPVATQDTPKRNPFLKPIPMLKPEKQKENY

SEQ ID NO: 87064 - protein, 100 aa, Gossypium hirsutum
  Clone ID: LIB3189-052-P1-K1-C3.pep
FCYTKRPSNKYYQKKGKKSRKRHQPKGKSNRIVTIKKLHFSFDKEKKKGGTLRVWLCCCKLPEMRRRTEILVLLICLVIVTTSFASTVTYDHRAIVIDGK

SEQ ID NO: 87065 - protein, 53 aa, Gossypium hirsutum
  unsure (1)..(53): unsure at all Xaa locations
  Clone ID: LIB3189-052-P1-K1-D1.pep
LHLTAEGNAVVFEEVVKVFKEGWLXPPEGAYDFPHHSEIDGKNPEKAFQQKCL

SEQ ID NO: 87066 - protein, 165 aa, Gossypium hirsutum
  unsure (1)..(165): unsure at all Xaa locations
  Clone ID: LIB3189-052-P1-K1-D2.pep
PRVRFAMTLDDFSTNDDIVLRVXEQISENKSRLSNGQLLDVRSAVHVLNSIVQDAMEALRLVIQKIRGTVRYVKSSQSIQGKFKEMVLQTGINSQKNLVLDCPIQWNSTYLMLETAIEYRXCFCQLPELDLDLALSDEEWEWASSITGYLKLXIEIINVFSSNKC

SEQ ID NO: 87067 - protein, 117 aa, Gossypium hirsutum
  unsure (1)..(117): unsure at all Xaa locations
  Clone ID: LIB3189-052-P1-K1-E2.pep
PRVRILKTKLLENCVSNSVKFSXAKVWQVEHEEFESTIQCDDGSELKASLIVDASGFSSSFVEYDKPRNYGYQIAHGIFAEGDSHPFDLDKMVLMDWGDSHLGNEPYLRGNNSKLAT

SEQ ID NO: 87068 - protein, 54 aa, Gossypium hirsutum
  unsure (1)..(54): unsure at all Xaa locations
  Clone ID: LIB3189-052-P1-K1-E7.pep
MSCLASCCAAFTCGLCSTXXSGISRGGGRLAYCGLFGLSLIVSWILREVDAPVL

SEQ ID NO: 87069 - protein, 150 aa, Gossypium hirsutum
  unsure (1)..(150): unsure at all Xaa locations
  Clone ID: LIB3189-052-P1-K1-G1.pep
NRRARWESXQLERECGVLKANYSALKLDYNNLEQEKQALTAELRELKAKLEENSESSHSVKEDSPKSSQQVKDQGFFDNDDDSNEIVKEESNGNAQLLISPSSSSSIQFNGYSSSSDSSNHLWFQPFDSSLILGNMYQPQLVKVEEQCVF

SEQ ID NO: 87070 - protein, 57 aa, Gossypium hirsutum
  Clone ID: LIB3189-052-P1-K1-G7.pep
IYSLFMIPYIAAGILSRLDGEREKKARLALIKKNSKTNGAPNRRRKTTSDQNGGYGE

SEQ ID NO: 87071 - protein, 66 aa, Gossypium hirsutum
  Clone ID: LIB3189-052-P1-K1-G9.pep
MIQPQTHLNVTDNSGARELMCILVIGATNPRYAHIGDVILAAIKAAIPNTPLERSEALRAAIVHTR

SEQ ID NO: 87072 - protein, 52 aa, Gossypium hirsutum
  unsure (1)..(52): unsure at all Xaa locations
  Clone ID: LIB3189-052-P1-K1-H7.pep
ISLYLYEVCVNQSSCENIIRFKTLHCHFYLAKPGLNRFFRKVVVTDFQRTIX

SEQ ID NO: 87073 - protein, 127 aa, Gossypium hirsutum
  unsure (1)..(127): unsure at all Xaa locations
  Clone ID: LIB3189-053-P1-K1-F5.pep
LNNNTQPKILIIEGQGINTKESNKVLIKSVXQAITTYSMACFLLPKTLWSDLKRIVANFWWRNRWNKKSVHWCTWENLCLLKENSGLGFRYFMKFNIPLLAKQGSHLVNYPNSLMARVLKSKYYPNS

SEQ ID NO: 87074 - protein, 47 aa, Gossypium hirsutum
  Clone ID: LIB3189-053-P1-K1-H12.pep
TISVSRDTLKPYKLQKAKDPPLYTTNNAPAPSSSSSSSIPVYHLKKP

SEQ ID NO: 87075 - protein, 73 aa, Gossypium hirsutum
  unsure (1)..(73): unsure at all Xaa locations
  Clone ID: LIB3189-053-P1-K1-H4.pep
PSPSLWLFXXXLLSLXCSFXXSXPFFLXXALXLXXXRXXXXAPPPSXGXPPXXCXLSXXPCXFXSLSXSXFLA

SEQ ID NO: 87076 - protein, 109 aa, Gossypium hirsutum
  Clone ID: LIB3196-001-P1-M1-C11.pep
IFCGGFFFLSGVYPSGENVQFTRSLMSYKELYQNLFDAHVVSFFYVKRLQPPYSNWYDTNVQCDYHAGITGHSIENCTAFKKQVERLINMGIVKLDRSSSAESPLPNHD

SEQ ID NO: 87077 - protein, 54 aa, Gossypium hirsutum
  Clone ID: LIB3196-001-P1-M1-C5.pep
VTKEFKVIKGVFKATNIPLTKVKTTLVTRGPNRPNSLNSTLPFPIVSPGMAGQA

SEQ ID NO: 87078 - protein, 46 aa, Gossypium hirsutum
  Clone ID: LIB3196-001-P1-M1-D3.pep
RVVQVSPIVIILSISNRMVGGHMSHINSSVTVDLISKLIYTVVGIN

SEQ ID NO: 87079 - protein, 108 aa, Gossypium hirsutum
  Clone ID: LIB3196-001-P1-M1-E1.pep
MGGPTKARWAAAALGVAGLLCAVLGAVMIVMVPSLIKQQVLKNVRIDPSSLSFNMWKEIPIPFYLSVYFFNVMNPSEILKGEKPHVQERGPYVYREFRHKTNITFNNN

SEQ ID NO: 87080 - protein, 73 aa, Gossypium hirsutum
  Clone ID: LIB3196-001-P1-M1-E2.pep
NSYNHLHYKGCSTLKGIVSIYYKYLCSAFLHILVLGLCLIKTILLASYDIHDLMLDVVYTKVCTRQPLNTRRF

SEQ ID NO: 87081 - protein, 113 aa, Gossypium hirsutum
  Clone ID: LIB3196-001-P1-M1-E7.pep
MPEFAKEPPQRDRYRLDDGRRVRDLDRVLMGYQTYPQALTLVFDDVQGHDLMGSVTLDHFGEVPGGPARAGQGREVQWQVFVPSAESREKLISLLARQWEALCGRELPVELTG

SEQ ID NO: 87082 - protein, 39 aa, Gossypium hirsutum
  Clone ID: LIB3196-001-P1-M1-G9.pep
IFLRLSPPPVRSISAVNLSENRSVIILPPDYLECLSMGA

SEQ ID NO: 87083 - protein, 58 aa, Gossypium hirsutum
  Clone ID: LIB3196-001-P1-M1-H2.pep
EYYDVHYFLSSLSQTSYPTPSNRLRIPVIAFLSFPTHYPTAPLFFFFFFLRQSLALSH

SEQ ID NO: 87084 - protein, 100 aa, Gossypium hirsutum
  Clone ID: LIB3196-001-P1-M1-H7.pep
CCKRSWLGALALCLALLFHLLVGILGSPLLSGKPEPKCSIPREGVPSRARESEGRRRHQLEKKGRAWRPSLKGKELLANQGRADCTLTCWAGTAQNLQFS

SEQ ID NO: 87085 - protein, 133 aa, Gossypium hirsutum
  unsure (1)..(133): unsure at all Xaa locations
  Clone ID: LIB3196-001-P1-M1-H8.pep
LPTRILTPQGPFSQAVLGIFTXRFTSAQIFNFTRGLCLHKDYVADREFVAWKDRHPDASPNHLTPMRDCLYLVDGGFAINSPFPLALRPQRAVDLILSFDYSLEAPFEVWSDKQLRRRPLGTLSSTGQTPPMA

SEQ ID NO: 87086 - protein, 46 aa, Gossypium hirsutum
  Clone ID: LIB3196-002-P1-M1-B11.pep
DKNYVSSELQFTDKLELCFIWRRGMHSFGFDFYFAFNSLEMMGYLA

SEQ ID NO: 87087 - protein, 36 aa, Gossypium hirsutum
  Clone ID: LIB3196-002-P1-M1-B12.pep
STSSLNNNYYQCYQSGPPNNIIKVKRLNHAKLKLRD

SEQ ID NO: 87088 - protein, 65 aa, Gossypium hirsutum
  Clone ID: LIB3196-002-P1-M1-B6.pep
IFIYLMGFSHFPGNAGTLFLSWLKYSMLNTSQLYSTFHPRACCLVLVYVCFNQLPELPCLTCEVG

SEQ ID NO: 87089 - protein, 125 aa, Gossypium hirsutum
  unsure (1)..(125): unsure at all Xaa locations
  Clone ID: LIB3196-002-P1-M1-C4.pep
MACGRPLISVCSEKGESSGKNVTLPAVFKAPIRPDIVNFVHTNLRKNNRQPYAVSELAGHQTSAESWGTGRAVARIPRVRGGGTHRSGQGAFGNMCRGGRMCLPTKTWRRXHRIVNTTQKRYALC

SEQ ID NO: 87090 - protein, 139 aa, Gossypium hirsutum
  Clone ID: LIB3196-002-P1-M1-C9.pep
CETGRSKGYGFITFSDSECAKKALEQLNGFELAGRPMKVGHVTERTDASSASSFLDSDELERTGIDLGTTGRLQLMARLAEGTGLQIPPAAQQALQMSGSLAFGAVAEFSFVIDLQTRLSQQTEASALAAAASVQPLAT

SEQ ID NO: 87091 - protein, 140 aa, Gossypium hirsutum
  Clone ID: LIB3196-002-P1-M1-D1.pep
CEGPTLSPEPGSSNLLCTQDATVRCRKRMSETEPSGDNLLSSKLERPSGGSKPFHRSRPGRPQSLILFSPPFPIMDHLPPSSTVTDSKVLLSPIRSPTQTVSPGLLCGELAENTWVTPEGVTLRNKMTIPKNGQRLETST

SEQ ID NO: 87092 - protein, 84 aa, Gossypium hirsutum
  Clone ID: LIB3196-002-P1-M1-D2.pep
VGLYMRSVLVPIVCFPGLAPACPMPWTSGPTHRPFRPPAPHPLECSVYADDLELSFLFTGCLFIKILPVPASAERPSSPSFLLP

SEQ ID NO: 87093 - protein, 109 aa, Gossypium hirsutum
  Clone ID: LIB3196-002-P1-M1-D7.pep
MLNPDNSPIPNEVVQVHLKDKVVGNYTTDANGIAQFFLDTSTFTYPNITLKAAYKANENCEAHGWVLPQYPQPEYFAYRFYSKTNSFLKIVQEMEELRCNQQKKVLVHY

SEQ ID NO: 87094 - protein, 52 aa, Gossypium hirsutum
  Clone ID: LIB3196-002-P1-M1-D9.pep
MASMGLQVTGIALAVLGWLADMLCCALPMWRVTAFIGSNIFTSQTIWDGLCM

SEQ ID NO: 87095 - protein, 117 aa, Gossypium hirsutum
  Clone ID: LIB3196-002-P1-M1-G7.pep
SRGDGPICLVLAPTRELAEQVQQVAAEYCRACRLKSTCIYGGAPKGPQIRDLERGVEICIATPGRLIDFLECGKTNLRRTTYLVLDEADRMLDMGFEPQIRKIVDQIRPDRQTLMWS

SEQ ID NO: 87096 - protein, 133 aa, Gossypium hirsutum
  unsure (1)..(133): unsure at all Xaa locations
  Clone ID: LIB3196-002-P1-M1-G8.pep
WDDPNVNPFSSTSKMHESPKLRQQSYXFDPDTCDESADPFKTYCRTPSSPSKFSDSFEIPARAIEANGVDGDGLNKPDKKKKTPLKTVKKSXKRSPVSDPPFQDPTAAATPETPPVISAVVHATDEEKLAVTN

SEQ ID NO: 87097 - protein, 43 aa, Gossypium hirsutum
  Clone ID: LIB3196-002-P1-M1-G9.pep
VKHYSCCGLHFSQNVMLQLGLVEHARNFTGSTPYLPNSTEDAA

SEQ ID NO: 87098 - protein, 81 aa, Gossypium hirsutum
  Clone ID: LIB3196-002-P1-M1-H1.pep
GEHADGQVVGRMDYHPTASSRVEGVQLLETQRVSVAVHCFSLSQVDPVLYEGQRALCILGSWPSVLKKSGHVGLENACRIY

SEQ ID NO: 87099 - protein, 121 aa, Gossypium hirsutum
  Clone ID: LIB3197-001-P1-M1-D8.pep
MKKTQKTNKEKESNTKTRTKESEIFASCSFSSLGLHSTLSEQLQERLGFEAPTLVQAQAIPVILSGRHVLVNAETGSGKTIAYLAPIIHYLQGYNPRIERSHGTFALVLVPTRELCLQVYE

SEQ ID NO: 87100 - protein, 132 aa, Gossypium hirsutum
  Clone ID: LIB3197-001-P1-M1-D9.pep
MLSSVRSFSLSAFIFFVFFSSLAFASESDHKYQPDDPITLWVNKVGPYNNPQETYNYYILPFCHPGVNPAHKWGGLGEVLGGNELIDSQIDIKFQKNVDKGTICQLELDEAKVKQFNDAIENNYWFEFFVDD

SEQ ID NO: 87101 - protein, 84 aa, Gossypium hirsutum
  Clone ID: LIB3197-001-P1-M1-E8.pep
RRALFGFEGAILINRWVVLLLMSCGLFSFLLFGKTKGELSFFFSSSSSSFCCLNLGWTRFYCHFQSLWIGFLGKFSLFWFFFNF

SEQ ID NO: 87102 - protein, 79 aa, Gossypium hirsutum
  Clone ID: LIB3197-001-P1-M1-F2.pep
SYLLFFYPNQSLLILFKPGACLNLRLHADRSSLSLILSKTSSGGKHAIFFLRTLQCFIDTSVPFLPSQALKISLPSFNS

SEQ ID NO: 87103 - protein, 65 aa, Gossypium hirsutum
  unsure (1)..(65): unsure at all Xaa locations
  Clone ID: LIB3197-001-P1-M1-F5.pep
PRLVSQIKFAVVVKILGRPGSGGQVTQVRVKFLDDQNRFIMGNVKGPVVXGDILHAESEREQGAS

SEQ ID NO: 87104 - protein, 135 aa, Gossypium hirsutum
  Clone ID: LIB3197-001-P1-M1-F8.pep
NDPYLYSTNNFLGRQTWEFDPRAGTAEERAEVEEARLNFYNNRYNVQPSSDLLWQMQFLREKKTQQTIPQPKIEDGEEVTYEVTTAAVKRDVHLFSALQSRHGHWPAENSGPMYYIPPLVMSLYITGHLNTIFSR

SEQ ID NO: 87105 - protein, 146 aa, Gossypium hirsutum
  unsure (1)..(146): unsure at all Xaa locations
  Clone ID: LIB3197-001-P1-M1-G10.pep
CGKSCXLRWMNYLRPDIKRGNITPEEDDLIIRLHSLLGNRWSLIAGRLPGRTDNEIKNYWNCHLSKRLLNQGTDPNTRKKLSQQATNTRKNISDTSKTFSERPKIHLPKPIRVTRSSFPRNQSFELDNHQCNANTQAGGNPSSDYA

SEQ ID NO: 87106 - protein, 53 aa, Gossypium hirsutum
  Clone ID: LIB3197-001-P1-M1-G2.pep
FIGNYKRRIVLMILRSFRWLGSSIALSFFPAFKNMLSTAFYKWICTVILSVQN

SEQ ID NO: 87107 - protein, 56 aa, Gossypium hirsutum
  unsure (1)..(56): unsure at all Xaa locations
  Clone ID: LIB3197-001-P1-M1-H10.pep
QLNQIVKFRLSRQXMPQSFSNMLKMTKLILEFGCGKKECRNKIWRCAVKINEKHKG

SEQ ID NO: 87108 - protein, 64 aa, Gossypium hirsutum
  Clone ID: LIB3197-001-P1-M1-H5.pep
MNLGWWWRLFAGALAGFLFFHGFAATETSSNYSFMYDATSASTLSYYDYIIVGGGTRRCPLAAT

SEQ ID NO: 87109 - protein, 62 aa, Gossypium hirsutum
  Clone ID: LIB3197-002-P1-M1-A4.pep
LTPLFIDLSSPSLPSVTEPDPGQTPHIERKDIWRILKRILVIKRIGINQLWPNLKVEWGHGP

SEQ ID NO: 87110 - protein, 58 aa, Gossypium hirsutum
  Clone ID: LIB3197-002-P1-M1-A9.pep
TFKQCRDTFLYCKPLVPIDGTFMFGKYTHWLLLAVAQDRSGRILPIAFAITSGESTND

SEQ ID NO: 87111 - protein, 71 aa, Gossypium hirsutum
  Clone ID: LIB3197-002-P1-M1-B7.pep
KSGAYIRDIKQFATNSQTIRFKYIQRSANQTTHLIAKESLKRGEELYLERLVPHYAVDSTDLTRQREREPD

SEQ ID NO: 87112 - protein, 52 aa, Gossypium hirsutum
  Clone ID: LIB3197-002-P1-M1-C11.pep
SAAKVLFKGSPFLFLFFIFHLCSCRSRGERNCHCSLRAHCCLDLNFFFFNFC

SEQ ID NO: 87113 - protein, 87 aa, Gossypium hirsutum
  unsure (1)..(87): unsure at all Xaa locations
  Clone ID: LIB3197-002-P1-M1-C6.pep
TGKIQQEIPKSSNYYVAVGNLNTKEVEIQLNFSVKALSYDTSQAYYTCSXGDHLCDLELYLLRPNVAVLSSPGRNEVKRTLLQSPQY

SEQ ID NO: 87114 - protein, 136 aa, Gossypium hirsutum
  Clone ID: LIB3197-002-P1-M1-C7.pep
VLLVSFLAKPLPLQCLVNVLLEYKNRQSWMIQEVSIQANLTKSVPSPVVVDSARGGRLHGGRDRGFRSRIQCQICGRFGHIAQHYFYCYNCDFEGPFLWLSGGSLVVLMVIRRHLTKMQLVTSVWRLRWDVNLVGR

SEQ ID NO: 87115 - protein, 127 aa, Gossypium hirsutum
  Clone ID: LIB3197-002-P1-M1-D5.pep
VSKLLFLVAWCLGIGSDHIAVMEILKTIRASNGFSVAIILKPFTFEGQRRLDEVKDLAGKLQELTNFCIEIDTDSLLKNELVTLDEALKTANNAVFLAINAISVVISEVQIKLIDAVHDNMKELGVS

SEQ ID NO: 87116 - protein, 100 aa, Gossypium hirsutum
  unsure (1)..(100): unsure at all Xaa locations
  Clone ID: LIB3197-002-P1-M1-D6.pep
DFCDCPDGTDEPGTSACPTAKFYCRNAGHVSLFLFSSRVNDGICDCCDGSDEYDGRVKCPNTCWEAGKVAXDRLVKKINTYKVGVTLRTNEIEQAKIVFA

SEQ ID NO: 87117 - protein, 69 aa, Gossypium hirsutum
  Clone ID: LIB3197-002-P1-M1-D9.pep
PINPFQDPNSSQFESPNRSVFHSLFLIVAHQKPNFIKIIIENKKGRHFLMIRRRVRRSSFSRPLLFIYL

SEQ ID NO: 87118 - protein, 128 aa, Gossypium hirsutum
  Clone ID: LIB3197-002-P1-M1-E11.pep
PTRPVKFLRLANRLGQTPHNVVVAQVLYRLGLAEQLRGRNGGRVGAFSFDRASAMAEQLEAAGNEPLDFSCTIMVLGKTGVGKSATINSIFDEVKFGTDAFQTGTKKVQDVVGTVHGIKVRVIDTPGL

SEQ ID NO: 87119 - protein, 72 aa, Gossypium hirsutum
  unsure (1)..(72): unsure at all Xaa locations
  Clone ID: LIB3197-002-P1-M1-E4.pep
MHTLMGCFCLKKLGHKPGYEAPINLASETPFTVNEVEALYDLFKKLSSSIIDDGLIHKEEFQLALXKNSNKH

SEQ ID NO: 87120 - protein, 70 aa, Gossypium hirsutum
  Clone ID: LIB3197-002-P1-M1-E8.pep
NKQLIKVPSKIFQPLKILLLLEKKVLFFELFSGQLTTMGHCLDIPGYFGDAGSREVLHKVGAERACTDKI

SEQ ID NO: 87121 - protein, 89 aa, Gossypium hirsutum
  Clone ID: LIB3197-002-P1-M1-F11.pep
MADILASLRSLMASQSPPLDALLVASEDYHQSEYVSARDKRREFVSGFTGSARLALITKNEARLWTDGRYFLQATQQLSDQRKLMRIGE

SEQ ID NO: 87122 - protein, 48 aa, Gossypium hirsutum
  Clone ID: LIB3197-002-P1-M1-F3.pep
SLNYTKAPSPTPQKKRTEKSSPFSSTFKKRKACYIAVKEKRLDNSKKR

SEQ ID NO: 87123 - protein, 49 aa, Gossypium hirsutum
  Clone ID: LIB3197-002-P1-M1-F5.pep
LSQMVTSASTSTVVVWKVLLHLLGIQKRLKLKRWKSNVLNMECDQLFER

SEQ ID NO: 87124 - protein, 52 aa, Gossypium hirsutum
  Clone ID: LIB3197-002-P1-M1-G11.pep
ADAWVQRKKKSFIFFSSSIFLVGFFFVWLRSNPRFLPIIRMWTGLGYAGFRI

SEQ ID NO: 87125 - protein, 46 aa, Gossypium hirsutum
  Clone ID: LIB3197-002-P1-M1-H10.pep
QDLDAREVHVVNTQDKAKCVTLEECKLVEKHMANYIMKLAKKGQER

SEQ ID NO: 87126 - protein, 60 aa, Gossypium hirsutum
  unsure (1)..(60): unsure at all Xaa locations
  Clone ID: LIB3197-002-P1-M1-H4.pep
IERTREWEVICAEHGIYSTERDNGDNVLRLKRMXVYYNEYSXGRVVPRAVLMDREPGTID

SEQ ID NO: 87127 - protein, 36 aa, Gossypium hirsutum
  unsure (1)..(36): unsure at all Xaa locations
  Clone ID: LIB3197-002-P1-M1-H8.pep
THPPLSGFXDRRRREVNPREFRRPSTCQAYPSLSPY

SEQ ID NO: 87128 - protein, 114 aa, Gossypium hirsutum
  Clone ID: LIB3197-003-P1-M1-A8.pep
PTRPARCPGIGERKVKRLRDTFHEPFKRIVSSNPSVPETPVCKDAEPSSASEIIEADKDTEDTSKRRKKENEINIKSALTAAFAKYAGKNSKMNNKSEGNKGGGTLAAAVPEPA

SEQ ID NO: 87129 - protein, 95 aa, Gossypium hirsutum
  unsure (1)..(95): unsure at all Xaa locations
  Clone ID: LIB3197-003-P1-M1-F5.pep
LKTISHSLSSSLLTTQLHASPESKKIFCVFYKANNYFTNNPNFFFCVEGAFXVAPIAXSHGHHYIFTYYKEXPYCELXKHIPDLHVLISTPFHLS

SEQ ID NO: 87130 - protein, 119 aa, Gossypium hirsutum
  Clone ID: LIB3197-003-P1-M1-G3.pep
MITRNSWETEPLLSEGKFSSMDNDEIVSSQNLSSTLRKLCMWEKKLYDEVKAEEKLRMIHSKKRSQMRILDHRGADAHRVDSTRTSIRALSTKMRVAVQVIDNIAITINKVMDEELGHR

SEQ ID NO: 87131 - protein, 89 aa, Gossypium hirsutum
  unsure (1)..(89): unsure at all Xaa locations
  Clone ID: LIB3197-003-P1-M1-H6.pep
FFLVCYLPFFSIFVSFYSFLCFEFFCIFIFFLIFXLFLIFLFFIFSFFCIFFYVFFFYLFYCFFILFYYFFFFYRFFXFSYVFYSSFFF

SEQ ID NO: 87132 - protein, 73 aa, Gossypium hirsutum
  Clone ID: LIB3197-004-P1-M1-A1.pep
EEVRLKEKERVKGGKHKGVCVIKKKWVWVKETKALFVIHRKEFSPINGGQSASHRPILVAGHENQKTEKSAVT

SEQ ID NO: 87133 - protein, 69 aa, Gossypium hirsutum
  Clone ID: LIB3197-004-P1-M1-A4.pep
LIFVCSVQIQFMTTSMMINRELLFMMTRNWLSCLDFRVHYSELTWACYLKPQSKCLRKFSWILIHASFF

SEQ ID NO: 87134 - protein, 34 aa, Gossypium hirsutum
  Clone ID: LIB3197-004-P1-M1-A8.pep
RLNMAERPIKMAVGDSIKLPVYYFLPLVKQLIDK

SEQ ID NO: 87135 - protein, 53 aa, Gossypium hirsutum
  Clone ID: LIB3197-004-P1-M1-B10.pep
KTMQLSSAQIHGLFQTSGGYYRPLLSGCFLYFESLFWILRVYLYCKRLGSDLQ

SEQ ID NO: 87136 - protein, 54 aa, Gossypium hirsutum
  unsure (1)..(54): unsure at all Xaa locations
  Clone ID: LIB3197-004-P1-M1-B11.pep
GDAAXXTGRIPVTTRPTRDPNYQNGSALCVDRARLISAYLIESQSAKRRSVYLI

SEQ ID NO: 87137 - protein, 44 aa, Gossypium hirsutum
  Clone ID: LIB3197-004-P1-M1-C10.pep
ANNNSELMLQNKCIKVFISMPDAEPANRKIKVDMMICLRLLYVR

SEQ ID NO: 87138 - protein, 71 aa, Gossypium hirsutum
  Clone ID: LIB3197-004-P1-M1-C5.pep
RSHSWINDTPTLSHPHLSHSLSNHFVLCRYLTPAICIMGKRMVEIGYLASISLIFPFFSVLGLPSFLNKQL

SEQ ID NO: 87139 - protein, 80 aa, Gossypium hirsutum
  unsure (1)..(80): unsure at all Xaa locations
  Clone ID: LIB3197-004-P1-M1-C7.pep
VTEMGRLVSEGYVLTGLAPNHQAIANLTTDQXLTKPAPPNQIIFHLLIHKSHTGESIPMLRGYFXKVSYDTLRLPHKVLA

SEQ ID NO: 87140 - protein, 108 aa, Gossypium hirsutum
  unsure (1)..(108): unsure at all Xaa locations
  Clone ID: LIB3197-004-P1-M1-D2.pep
FSFWFFAFKFFFSLVQLFFPFVSYDFFKFSMVPFVISILFVFISLLFLTFXLILVKWLSFFEYFCHMFYIFIFLLFFSIIFYFFFSYDTCFLLPFTFVIVLMLLFCPL

SEQ ID NO: 87141 - protein, 82 aa, Gossypium hirsutum
  unsure (1)..(82): unsure at all Xaa locations
  Clone ID: LIB3197-004-P1-M1-D5.pep
DADMEDYGFEYSDEEPEEQDVDIENQYYNSKGVVETDPEGALVGSSEVVXMDAEKAEWEMLTYIKSAVTRNYSEECMNNIMD

SEQ ID NO: 87142 - protein, 67 aa, Gossypium hirsutum
  Clone ID: LIB3197-004-P1-M1-D7.pep
IHLSFKLILNTHYSYFRLFNKLSTFQLTLLKTCISIFIFIYHSHFRHPPFYAMLLKSLLSNIILNLF

SEQ ID NO: 87143 - protein, 64 aa, Gossypium hirsutum
  Clone ID: LIB3197-004-P1-M1-F10.pep
LEGCGPHPPPLNTSPNYIIIDDLQRLYLHYLNKFFYHYLNLHYNLSRHLNYLYNILFNLQPIFH

SEQ ID NO: 87144 - protein, 79 aa, Gossypium hirsutum
  unsure (1)..(79): unsure at all Xaa locations
  Clone ID: LIB3197-004-P1-M1-F12.pep
RFFQSVEKPRAEYYQLRGYGKNFNSLYTXFKTXDNKFDGFVSHVWVKAYLHKDTNVDYQAHSHYDLTNLLTTFLINLLS

SEQ ID NO: 87145 - protein, 64 aa, Gossypium hirsutum
  unsure (1)..(64): unsure at all Xaa locations
  Clone ID: LIB3197-004-P1-M1-F3.pep
AGRNPXRPTVRLFLLRYNLRGFYSCASSXSIITRRQYINLVPLPATLQVTTTVIHLQLVYYKLH

SEQ ID NO: 87146 - protein, 112 aa, Gossypium hirsutum
  Clone ID: LIB3197-004-P1-M1-F4.pep
YPYLLGFWCRGGAPLSCECTLIIGDPYLHKVKARGLFSLKGPHLKLRFQRRRQRPRWCIPESKPLSYLFLFSYEKIWCKSDNKNKSKHEKMKAAITFYFYGCFWILDFRCLS

SEQ ID NO: 87147 - protein, 121 aa, Gossypium hirsutum
  unsure (1)..(121): unsure at all Xaa locations
  Clone ID: LIB3197-004-P1-M1-F8.pep
VYTVTPYNIXGLKXLVECGPHPPHLKTGAKYIIRYDGQRLYLRYLNKSIYHHLXLGYKVERHLNDGDYVLFNRQPSLHKMSIMGHRILIMPYSTFRLNLSFTSPYNSDFDRDEMNMHFPQS

SEQ ID NO: 87148 - protein, 109 aa, Gossypium hirsutum
  unsure (1)..(109): unsure at all Xaa locations
  Clone ID: LIB3197-004-P1-M1-F9.pep
RFTVTPYNIKGVKYLMGYGPHPTPLNTLSKYIILYDXQTLYLRYLNKIFLHHLNLHYNSXPLLNDAYYXLFNLQPNLHKISIIIYIIPIIPYSTFSLNLXFTSPYNSSL

SEQ ID NO: 87149 - protein, 87 aa, Gossypium hirsutum
  Clone ID: LIB3197-004-P1-M1-G11.pep
LPEDADGALLTIGAALAKHHLLMWITMLVVDEIYLQIFIDLSQWPLYRGLTDLCITALLLKHILQRTFLCDIYGYTIVLYIYALVIS

SEQ ID NO: 87150 - protein, 44 aa, Gossypium hirsutum
  Clone ID: LIB3197-004-P1-M1-G12.pep
VFFEPYPTLGWGSICQGGRVPYFILRHSTQIILFRYILLDIPLF

SEQ ID NO: 87151 - protein, 28 aa, Gossypium hirsutum
  Clone ID: LIB3197-004-P1-M1-G2.pep
CKLLYKKFSLSFYPFNVTSHYKMKYYII

SEQ ID NO: 87152 - protein, 90 aa, Gossypium hirsutum
  unsure (1)..(90): unsure at all Xaa locations
  Clone ID: LIB3197-004-P1-M1-G8.pep
MAGKKNVLSALAVYAEESXPESDGETGIEAMGSAAEEKGGLVSDAYGEDDFSRLGGDEDGYEKKEDENSGQSEDDDSETEKPEAYYPNEK

SEQ ID NO: 87153 - protein, 60 aa, Gossypium hirsutum
  Clone ID: LIB3197-004-P1-M1-H11.pep
HNEHKVPDSTGLLFLEKRGHTFRPHTPSPNAKFYSSISMYQSIYIRCNLPAQGSCSLPQG

SEQ ID NO: 87154 - protein, 88 aa, Gossypium hirsutum
  unsure (1)..(88): unsure at all Xaa locations
  Clone ID: LIB3197-005-P1-M1-A10.pep
FAENLMLMLMDDPNDRDRKFKXHLYTIKDRCSKTNEMFIYPLQPYWFWTFYPHITQLRXYPQINQVPLRXDPYYHLLQDIYASSTKLN

SEQ ID NO: 87155 - protein, 75 aa, Gossypium hirsutum
  Clone ID: LIB3197-005-P1-M1-A6.pep
ICSLTHTNYLSLRSTYTGRRGLLKFFLDYVLILFSLSVSLITIYINPTLVSHVFPSPQVFTSCCRSFSSLFFPTL

SEQ ID NO: 87156 - protein, 126 aa, Gossypium hirsutum
  Clone ID: LIB3197-005-P1-M1-A9.pep
MIEENYVCFFVHLQGGFRKKMMKFLSKVVRFFIKCMHCVLSVGPIPSHIGFVMDGNRRYARQNKLKQVAGHEASYFSLMSMLIYCYGLGIKYMTAYAFSIDNFMCRPEEVQSIMDLMTEKFELLCR

SEQ ID NO: 87157 - protein, 60 aa, Gossypium hirsutum
  unsure (1)..(60): unsure at all Xaa locations
  Clone ID: LIB3197-005-P1-M1-B8.pep
RKGRHSGYGGRKGTGEGWLPTXILWMRRIRVLRLLLLKYRESNNIDKLMFLYMYMIVMGY

SEQ ID NO: 87158 - protein, 110 aa, Gossypium hirsutum
  unsure (1)..(110): unsure at all Xaa locations
  Clone ID: LIB3197-005-P1-M1-C10.pep
FHKPHSARGGIQSLWGGKKVGSASIIGGYFYRSNTDPCMYGRYLNAYXYAGAIWAATEDPENSGYLSTNTIPFGCARDSPLECITEPSSTIAALGYIDSFSHDNSKDTIL

SEQ ID NO: 87159 - protein, 128 aa, Gossypium hirsutum
  unsure (1)..(128): unsure at all Xaa locations
  Clone ID: LIB3197-005-P1-M1-C11.pep
EKSDKEDDVEDAKEKEKKKKKKDNKDKEKKKDQKCDKEDEEEXDEECKNDVAEKLEVSEVGETTNKEEKKKNKDPEVVEEGDNVETEEKKNKKKDKKKDEVEKFEKKKKKKDKEKEKEHEVEEDETGK

SEQ ID NO: 87160 - protein, 43 aa, Gossypium hirsutum
  Clone ID: LIB3197-005-P1-M1-C12.pep
QKGFHALAHGRRYALDVVLISTEQHEMLWCRSIGSMSIQLSAY

SEQ ID NO: 87161 - protein, 46 aa, Gossypium hirsutum
  Clone ID: LIB3197-005-P1-M1-C9.pep
QYIVKMSLWLGKCRLSSELPHKLFNIIQWRPPSIFSFSDVIRKGLI

SEQ ID NO: 87162 - protein, 86 aa, Gossypium hirsutum
  unsure (1)..(86): unsure at all Xaa locations
  Clone ID: LIB3197-005-P1-M1-D2.pep
MEKGDQGKEDSKDRISELTDEILFIILSFLTLKEAANICFLSRRLKILWPHIVALNFDASNTLXELRRNGRLRKKKRTWYINWVNH

SEQ ID NO: 87163 - protein, 54 aa, Gossypium hirsutum
  Clone ID: LIB3197-005-P1-M1-D5.pep
TGRAHVIVNTRRQSKPVRQRMQLKLVKEIWLQCLSRLPLSYQSVTDRGLRSRHL

SEQ ID NO: 87164 - protein, 49 aa, Gossypium hirsutum
  Clone ID: LIB3197-005-P1-M1-D9.pep
FHVELPAAIQARPIWAVMHSCIFLFVVAYTASPVQLCLPPLIYAVVNKY

SEQ ID NO: 87165 - protein, 81 aa, Gossypium hirsutum
  Clone ID: LIB3197-005-P1-M1-E1.pep
MAALRPPRSVSSRDSSDGSERLDGAGSWDALEWTKIEPVTRSVSHVNSEFLLEAERVIEEGHGVVLGNRNEAGNLFVTNFR

SEQ ID NO: 87166 - protein, 57 aa, Gossypium hirsutum
  Clone ID: LIB3197-005-P1-M1-E3.pep
GDQSRYCEGRFKHNLNHHCRINASLYYSRQHHAVAGGEKCGVVGGFYYNTGGRLFTH

SEQ ID NO: 87167 - protein, 65 aa, Gossypium hirsutum
  Clone ID: LIB3197-005-P1-M1-E6.pep
DSRVRFKKGKENQSDWVFQLSPSFLSHFLSSHTTITDVTATSPMTICLPWTWAKWLLMTSLPLLI

SEQ ID NO: 87168 - protein, 68 aa, Gossypium hirsutum
  Clone ID: LIB3197-005-P1-M1-F1.pep
AKPRECITAHISQADIQVGNACWEHYWLDHGIQTDGQMPRDMTVTRGDDAVNTVFSETAARKHDPRAD

SEQ ID NO: 87169 - protein, 77 aa, Gossypium hirsutum
  Clone ID: LIB3197-005-P1-M1-F11.pep
LSHPHTRGYGWAFPGVWRLFPLIQFFYSFILIIIILKYSFPYFFTFFSYPYTAFFFYGCFLLHNYYSFLCSTKHVCF

SEQ ID NO: 87170 - protein, 60 aa, Gossypium hirsutum
  Clone ID: LIB3197-005-P1-M1-F6.pep
SSKHAVLKFDSLKRPPPFFFFFIFFFFFFFFFFFFFFFFFFFLFFFFFLFFFFFFFFFIF

SEQ ID NO: 87171 - protein, 69 aa, Gossypium hirsutum
  Clone ID: LIB3197-005-P1-M1-G12.pep
RYWQPFEHAFWDFYYAPDSDLYLPTDDDRRGQLLQKSIDMASMHAQLVKNDRDVMYHKTDFGPSTLPLA

SEQ ID NO: 87172 - protein, 41 aa, Gossypium hirsutum
  Clone ID: LIB3197-005-P1-M1-G9.pep
ETVFPSAKGNINAVPWWDGLSEWGKGRLSVRPKIGDSLLFL

SEQ ID NO: 87173 - protein, 68 aa, Gossypium hirsutum
  Clone ID: LIB3197-005-P1-M1-H3.pep
AKLKKLAKPAGVIALALVVGVHVSESEDGVNSNTNHRLRLSVVMHLIRVNLWIGNIGDAAHVLQNGSS

SEQ ID NO: 87174 - protein, 46 aa, Gossypium hirsutum
  Clone ID: LIB3197-005-P1-M1-H5.pep
MSSLTEIEAHAWLIICNIYPLGKIRFGGAFSFKWPYGNCSYRVGIG

SEQ ID NO: 87175 - protein, 85 aa, Gossypium hirsutum
  unsure (1)..(85): unsure at all Xaa locations
  Clone ID: LIB3197-006-P1-M1-A11.pep
XGMAXAQGEDEPERRGKPGRERNQREHRKGNGTKHPNRDAAADGKRREPGDXGGGQRKRQRTRTTDSPPGKRRNRREGTTGGRAP

SEQ ID NO: 87176 - protein, 149 aa, Gossypium hirsutum
  Clone ID: LIB3197-006-P1-M1-A12.pep
GNLRLVGGDGWESSSFTVLAQQYVRMKKTHGGKVVPGVMDTASAKHLSHAYGTLAERVATIAQNETLGKRLAHGYPYLEAEVAYCARNEYCESAIDFIARRSRLAFLDTDAAGRALPRIIEILAKEHNWDRSRQKQEMQKAREFLETFK

SEQ ID NO: 87177 - protein, 60 aa, Gossypium hirsutum
  Clone ID: LIB3197-006-P1-M1-A9.pep
HASATIHQYTTHDFQVSNSKFATSSHSPCFSKYRPWINLSKKKRLILYKKVEINKKKPTG

SEQ ID NO: 87178 - protein, 42 aa, Gossypium hirsutum
  Clone ID: LIB3197-006-P1-M1-B5.pep
TPIIILGNIAYEAGDFQSPKNGRSYPHYSKKQSYSYRLTISH

SEQ ID NO: 87179 - protein, 150 aa, Gossypium hirsutum
  Clone ID: LIB3197-006-P1-M1-C4.pep
PYSQFEEELKQMFLKCKTLRLHGNMKQEDRRTTFSAFKTEKSALLVSTDVAARGLDFPKVRCIIQYDSPGEASEYVHRVGRTARLGERGESLLFLQPIEVDYLQDLEKHGVSLTEYPLLKIIDSFPLHSQMHRVKKFVSLESHPWVVSLQ

SEQ ID NO: 87180 - protein, 48 aa, Gossypium hirsutum
  Clone ID: LIB3197-006-P1-M1-D6.pep
NICYFVITFHLMLIKYQISASVNRKGNTLSLIVTYLTAQHLKSPSQPD

SEQ ID NO: 87181 - protein, 63 aa, Gossypium hirsutum
  Clone ID: LIB3197-006-P1-M1-D7.pep
YAFFFGYKISSFRERATFILRGNTSQPSYEYWDINLPYISYIISSYYKRYYTLYTKIFQKLFR

SEQ ID NO: 87182 - protein, 94 aa, Gossypium hirsutum
  unsure (1)..(94): unsure at all Xaa locations
  Clone ID: LIB3197-006-P1-M1-E7.pep
FWWEWLNPVGCLKYLVGEYHYVXCTSSLILALVLFKKLYPGHREQEIENCIIKAAKYIEDIRYPDCSCYVNWXICFFYGTWFALLCLKASVKNF

SEQ ID NO: 87183 - protein, 63 aa, Gossypium hirsutum
  Clone ID: LIB3197-007-P1-M1-A10.pep
KLSPFSTITYIKIYQILLLIISFHLSIKFFYYSYHQPTSFIPKSIYQHKYYIFLFILIISYSH

SEQ ID NO: 87184 - protein, 87 aa, Gossypium hirsutum
  Clone ID: LIB3197-007-P1-M1-A5.pep
ARTYPSGITLSTHFYILLSIPLREERDTLFWCLGGHNFFLTHTTKIHYIPFISLNFCLPKYFILINQYIIFLSNLILNHTTTLISLT

SEQ ID NO: 87185 - protein, 130 aa, Gossypium hirsutum
  unsure (1)..(130): unsure at all Xaa locations
  Clone ID: LIB3197-007-P1-M1-B11.pep
LRENEIXECKEKLENCEVELRHLQSKKEELQKEADRLNEVAEKAQMDALKAEEEVANIMLLAEQAVAFELEATQHVNDAEIALQKAEKSLSNLIVETVEQQVSAEETVIDEETSPGGPNDFVERERDALI

SEQ ID NO: 87186 - protein, 39 aa, Gossypium hirsutum
  Clone ID: LIB3197-007-P1-M1-B7.pep
GAKVQWACPFPPAETLIYLEICNINGTISPAPPLHIFTQ

SEQ ID NO: 87187 - protein, 35 aa, Gossypium hirsutum
  Clone ID: LIB3197-007-P1-M1-D8.pep
YFYTTLIGNQLLSERGHHLLNMILKIYDVIFTSNY

SEQ ID NO: 87188 - protein, 102 aa, Gossypium hirsutum
  Clone ID: LIB3197-007-P1-M1-F1.pep
ISLPVNASSMYGQSQPMNIPPQIAGSGADIDDDVSASVSVDNHHIVTYEAPSLDDGGGVDDVATQSFLRHCRRYFRLWLGCCSTRRWCQPTHSIVSWSGLCV

SEQ ID NO: 87189 - protein, 48 aa, Gossypium hirsutum
  Clone ID: LIB3197-007-P1-M1-G2.pep
RIDNLLLFHLGGHSHLSTFLRHNVLTINSSLFKTPCIQNAEETQTRES

SEQ ID NO: 87190 - protein, 61 aa, Gossypium hirsutum
  Clone ID: LIB3197-007-P1-M1-H10.pep
MYIGSMRKSFKDSLKVLEADIQHANTLASDFPREYDGECLQMRMSYSPGAHLFLFLGKGLT

SEQ ID NO: 87191 - protein, 89 aa, Gossypium hirsutum
  Clone ID: LIB3197-008-P1-M1-A11.pep
DNILLSRLHLPKKKDVNLHHIYEMNYSSLQISYFRNTDLTVKALSPKSINYTTSDLYFLTTQQTCLPSTKILDIILKMLHYTLILTIHF

SEQ ID NO: 87192 - protein, 76 aa, Gossypium hirsutum
  Clone ID: LIB3197-008-P1-M1-A2.pep
SHIDQITTLLAKEQNIISEGEHDLANSKSELTEKDKTQNDILQQEANLKSDIEKQKKLVAQFKRRAESLAKEKEQL

SEQ ID NO: 87193 - protein, 109 aa, Gossypium hirsutum
  Clone ID: LIB3197-008-P1-M1-B1.pep
KSAIPNQIAILKEKERKAAIPSKLFFSFWPLEKTLEERSGSAGPSWAGFVHLTTALRREPCEKIRRGKECMQAFPKFLIASPSFHGGRGALPSAGGHPADLTYLAGGGC

SEQ ID NO: 87194 - protein, 99 aa, Gossypium hirsutum
  Clone ID: LIB3197-008-P1-M1-B8.pep
VLLKGGTHLHVTGSNKRKVIHLLKMVVCHVNFKWEFQHEGQKLNSSFCAHQGQWRSLQYPYCGRKRSASKTHINKQTCLLLCLSISVSYRYAHLINKEA

SEQ ID NO: 87195 - protein, 75 aa, Gossypium hirsutum
  unsure (1)..(75): unsure at all Xaa locations
  Clone ID: LIB3197-008-P1-M1-C10.pep
NQRCSSIIRKCXPTHTITPILHNLTYLYPTPHSLLNIKKTPLIIFPNKFPSNTRYFKSNLISLHINYTLHQILLF

SEQ ID NO: 87196 - protein, 73 aa, Gossypium hirsutum
  unsure (1)..(73): unsure at all Xaa locations
  Clone ID: LIB3197-008-P1-M1-C11.pep
HPSFLFLKETYSCYYYLYDWPTNAAXEAFDKAYFTKTHNTNARTXTYITMFDNYYFFYKFVQNLHFFFSGCVN

SEQ ID NO: 87197 - protein, 74 aa, Gossypium hirsutum
  Clone ID: LIB3197-008-P1-M1-C2.pep
MTTAKKNMLPPGLVNNLQEVLLSRKGGNSNTNNDEQQQKPDAITDSTETSTSASDENDNSKPVVLVTNGEGIDS

SEQ ID NO: 87198 - protein, 69 aa, Gossypium hirsutum
  Clone ID: LIB3197-008-P1-M1-C8.pep
TLKYHSIIHFYFTYESTTPKKNILTPVLTYNLQQVPLIIKSRNFYTNNDEQQHKNTHHYTFFSYLYCMI

SEQ ID NO: 87199 - protein, 79 aa, Gossypium hirsutum
  Clone ID: LIB3197-008-P1-M1-D10.pep
TSPYPNLNKSLNCSFSSLLSQNLVFMYAPYYCLFLYFFPNNFFLFLRLQTFLPPTISRKNKFYNPFHHFFSLLSFLGIN

SEQ ID NO: 87200 - protein, 48 aa, Gossypium hirsutum
  Clone ID: LIB3197-008-P1-M1-D3.pep
TNKGHITGNILMNYKRTDRIFVSIQNSHKKTFRSDKIKRKKRVNPPTI

SEQ ID NO: 87201 - protein, 149 aa, Gossypium hirsutum
  unsure (1)..(149): unsure at all Xaa locations
  Clone ID: LIB3197-008-P1-M1-D5.pep
PCVLASVASPASFPGLKSKDPGLXFTKSTDLVRICDLRRTKTGXTRISVIRNHNPSHDTAQLHAGSKXIPLLMPRHKHWESIHKTARCTTTTRMPKNRTLGSEHPIRIQTMTTTDTKDVAGTVEQVMRIADKGADIVRITVQGKIEADA

SEQ ID NO: 87202 - protein, 55 aa, Gossypium hirsutum
  Clone ID: LIB3197-008-P1-M1-D6.pep
VALTTSACLSTRGEQEKRLRNVTQENHRVRLQEIALSSLNLSEQLLLEEGSEHWI

SEQ ID NO: 87203 - protein, 55 aa, Gossypium hirsutum
  Clone ID: LIB3197-008-P1-M1-E1.pep
AFVCYLLYYEYKCITGKRIDFFHLTKPQPHQFTILVRSIPVSAGSNVSESVERFF

SEQ ID NO: 87204 - protein, 63 aa, Gossypium hirsutum
  Clone ID: LIB3197-008-P1-M1-E10.pep
LRRIIKQMSSSTIKRKLISRMSELLMDCCISLYWLLLTIYFNYDALHSQLVTNEPDYHRTHIW

SEQ ID NO: 87205 - protein, 54 aa, Gossypium hirsutum
  Clone ID: LIB3197-008-P1-M1-E2.pep
INELQQLNKKKQLKNFYHFSFRSYFIRPFSFPLLAATLSFLLPEKLKKNWDLLL

SEQ ID NO: 87206 - protein, 144 aa, Gossypium hirsutum
  Clone ID: LIB3197-008-P1-M1-E8.pep
SKVTPATRQMGHDLPRTWRGHPWLDTPHGHAALRRVLVGYSFRDSDVGYCQGLNYVAALLLLVMKTEEDAFWMLAVLLENVLVNDCYTNNLSGCHVEQRVFKDLLSKKCPRIAAHLESLDFDVFLVTTEWFLCLFVKCLPSETT

SEQ ID NO: 87207 - protein, 57 aa, Gossypium hirsutum
  Clone ID: LIB3197-008-P1-M1-E9.pep
NFHPHPRILFFILQITNKARISQRSRRGPSSNNKIHLFITQPYTSSKNTIFYNLILV

SEQ ID NO: 87208 - protein, 45 aa, Gossypium hirsutum
  Clone ID: LIB3197-008-P1-M1-F2.pep
YMNSMARVKCKFRIQMMNCNGVYMDFMTVLLSIYMIVQSLKIKFS

SEQ ID NO: 87209 - protein, 127 aa, Gossypium hirsutum
  Clone ID: LIB3197-008-P1-M1-F4.pep
GNALGNNGTNWGSSAISGQGGRDNISGNSVNFGNGNGDNNFGLGTAGYERNIGTNVVPASSYTASNGGYDISFANLPASASIYGDTTWQSSTSVRDSSGTFGYGLDSATSDVTRKSSPGFVVVIMLI

SEQ ID NO: 87210 - protein, 69 aa, Gossypium hirsutum
  Clone ID: LIB3197-008-P1-M1-F7.pep
SENRSGMEMKHLEIESSPSAMLKKEKAISTSGNIHDFTKSFKMEKKSENQIENRMKQGRKKERKKKKDQ

SEQ ID NO: 87211 - protein, 43 aa, Gossypium hirsutum
  unsure (1)..(43): unsure at all Xaa locations
  Clone ID: LIB3197-008-P1-M1-F9.pep
IXFQKFSINYLGIPTYISFNLFSINLKPSFFNQKKNLSYDRTS

SEQ ID NO: 87212 - protein, 101 aa, Gossypium hirsutum
  unsure (1)..(101): unsure at all Xaa locations
  Clone ID: LIB3197-008-P1-M1-G2.pep
MPGIPLVARETSSYFRSTDQMCREDSRLHLSAEEEIAAEESLSIYCKPVELYNILQRRAVRNPSFLQRCLRYKIQAKHXMRIQMSVSISRIVNEGVLTQSL

SEQ ID NO: 87213 - protein, 137 aa, Gossypium hirsutum
  Clone ID: LIB3197-008-P1-M1-G4.pep
WKEKGDVDVAIRYYMIAIELRPNFADAWSNLASAYMRKRRFNEAAQCCRQALQLNPLLVDAHSNLGNLMKAQGLAQEAYSCYLEALRIQPTFAIAWSNLAGLFMDSGDLNRALQYYKEAVKLKPAFPEAYLNLGNIY

SEQ ID NO: 87214 - protein, 54 aa, Gossypium hirsutum
  unsure (1)..(54): unsure at all Xaa locations
  Clone ID: LIB3197-008-P1-M1-G8.pep
RIKVGGNFMGEYEMYYKIKWRFMKYKGRVCNFIRLRLGLRKKVFNKILVKXKVF

SEQ ID NO: 87215 - protein, 72 aa, Gossypium hirsutum
  unsure (1)..(72): unsure at all Xaa locations
  Clone ID: LIB3197-008-P1-M1-G9.pep
SIKTVGDHINLERGITHGVNDLTSFDRFHFCTLWRLSPQQRGRKTGSIGKKWGGVLEKEELPEQEMKKXGKS

SEQ ID NO: 87216 - protein, 101 aa, Gossypium hirsutum
  Clone ID: LIB3197-008-P1-M1-H11.pep
TMLDRAFSARRTQPHSLFDVPTSSAVSDVSPDAESADLLADESKTKKPHLYVLASNYMSGLGLVKSPCLCLSLCLLLIVFILFSLMLNSRSFVCLSSYDPI

SEQ ID NO: 87217 - protein, 47 aa, Gossypium hirsutum
  unsure (1)..(47): unsure at all Xaa locations
  Clone ID: LIB3197-008-P1-M1-H4.pep
MSVFNLFILCYSDSSMNVEYANIFNFLKVILFXKKXKKKKKKKKNKN

SEQ ID NO: 87218 - protein, 125 aa, Gossypium hirsutum
  Clone ID: LIB3197-008-P1-M1-H5.pep
TMLQVLVSIQALILNAKPFFNEPGFEISYVGAEGEKRSRKYNEDAFALSLKTMIYTLRRPPLHFEDFVAGHFRSHARDIIMACEAYKEGAAIGSVLVKDCVTDPNKTENSSSERFKRTMTKMIDA

SEQ ID NO: 87219 - protein, 56 aa, Gossypium hirsutum
  Clone ID: LIB3197-010-P1-M1-A1.pep
MADGEDIQPLVCDNGTGMVKAGFAGDDAPRAIFPSIGGRSRNTGVNGGMGQKDSLC

SEQ ID NO: 87220 - protein, 66 aa, Gossypium hirsutum
  unsure (1)..(66): unsure at all Xaa locations
  Clone ID: LIB3197-010-P1-M1-A11.pep
FSLNLFSLFLYSICVKKEEKAPVTENESAXYSQSQKKRKIHNKKTKIPSPLYSFFFLFALFFCFLF

SEQ ID NO: 87221 - protein, 53 aa, Gossypium hirsutum
  Clone ID: LIB3197-010-P1-M1-A4.pep
ILPKKPTNSIIHFLAMMTPIFHFHQFLSSKGSNNHYNSHNTLKKQPTLYINKR

SEQ ID NO: 87222 - protein, 62 aa, Gossypium hirsutum
  Clone ID: LIB3197-010-P1-M1-A7.pep
IVTKPALPTSCNLVVPTESNVPSTDDHAILIHLTVEHFEQRQIRPIHLVCENCYSDHKIGIA

SEQ ID NO: 87223 - protein, 106 aa, Gossypium hirsutum
  Clone ID: LIB3197-010-P1-M1-A9.pep
ILFFCPLELEWKTPQDVAADNYMMSMGPSTYNPYWTGMQPGMDGFMGPYAGAMPYMGGYGLSPLDMPFGGVMPPDPFGAQGYMFPPVLPQKDLADFGMGMNVAPPI

SEQ ID NO: 87224 - protein, 65 aa, Gossypium hirsutum
  Clone ID: LIB3197-010-P1-M1-B7.pep
RIFILNSQGDNNLCIIPPWELIQSQNIVPIVSWDSPRGCSCSHRSVHCNSSQPSAPHIEKMPQEK

SEQ ID NO: 87225 - protein, 103 aa, Gossypium hirsutum
  Clone ID: LIB3197-010-P1-M1-B9.pep
QDMAERKRRKLKLLAETGNLDEKIATEEEESFKLQTWSDLPVDLLYIILCLLTLLFIVSSVFFIKYCGLSFLVYFFFWTFFSLYFFFLNFFFLIFFSHYYFFF

SEQ ID NO: 87226 - protein, 95 aa, Gossypium hirsutum
  Clone ID: LIB3197-010-P1-M1-C8.pep
MATPPLSSPTYLTTNIGVGYAIVVALGFLLLLSTLLLASYICSTVFSPLPPRAIYPNPILTPTGANFDSIRLPMIVFIGEEDHENHEENRRVFWL

SEQ ID NO: 87227 - protein, 55 aa, Gossypium hirsutum
  Clone ID: LIB3197-010-P1-M1-D4.pep
RSFSQFSLSFDGFSFISLGIIIISFRSLNLLFYSFLKYPFNRITIYLICSSGLWS

SEQ ID NO: 87228 - protein, 40 aa, Gossypium hirsutum
  Clone ID: LIB3197-010-P1-M1-D5.pep
ISLVPYSKPNIHNQNPCLLLLNVIESKEIVFWGGFFFSFV

SEQ ID NO: 87229 - protein, 83 aa, Gossypium hirsutum
  Clone ID: LIB3197-010-P1-M1-D9.pep
AFFLPFFPWNIFPHSRGWTLEAVMPSPTAKPTILDPSTIPMMTSLTLTPGMELVLAKILYDVYRVRQDLYYFLSILVNMVILR

SEQ ID NO: 87230 - protein, 53 aa, Gossypium hirsutum
  Clone ID: LIB3197-010-P1-M1-E11.pep
TSRRYHPNQMVHTFKKKYKWEITEKKTLIYLSLHFQGSYSCHYNSCSLFIESS

SEQ ID NO: 87231 - protein, 35 aa, Gossypium hirsutum
  Clone ID: LIB3197-010-P1-M1-E2.pep
DTKRKTGKNRNSCLCKMLDKTQIYKKFKAPLLYPF

SEQ ID NO: 87232 - protein, 100 aa, Gossypium hirsutum
  Clone ID: LIB3197-010-P1-M1-E5.pep
KGCLLTTSSFVSIALNILIEMQVSHMLSSFITILVLHCLLLSTFVSCSSHGEITASTNHKNIKGNAHKLSSQMISYMAVHGLLLWSSMGFLMPVGILTVR

SEQ ID NO: 87233 - protein, 104 aa, Gossypium hirsutum
  unsure (1)..(104): unsure at all Xaa locations
  Clone ID: LIB3197-010-P1-M1-E6.pep
MRSEGFQSFPPNYVASDDYNIGGNTFMETRRSVPDEQPNEEAAEFYTLLGEMNEELYEGSKXXKMSFCIRLFHIKCLGGWTGNSLTMLLELLREMFPFAKIPHH

SEQ ID NO: 87234 - protein, 111 aa, Gossypium hirsutum
  unsure (1)..(111): unsure at all Xaa locations
  Clone ID: LIB3197-010-P1-M1-E9.pep
TVHISYSGSSPFFIPTFYPRIFGFRAYFNLFXVIFFAVITFNILFFSFFLCAFFFFSFIFVNFFLNFFIFYFFLVKFFIFFYIFWFFLFIFLFFIFFYFFILFFFSFFFIF

SEQ ID NO: 87235 - protein, 58 aa, Gossypium hirsutum
  Clone ID: LIB3197-010-P1-M1-F4.pep
RGWNSLWDGALFPIYLLLSNKLVLYDLENHTIGLTEYICDYSVTFHFTNGVYKFDYMV

SEQ ID NO: 87236 - protein, 46 aa, Gossypium hirsutum
  Clone ID: LIB3197-010-P1-M1-F5.pep
RISRFSYKEFCERPISYPWYSGSMLSECSASELIQTLSLAGYVPVI

SEQ ID NO: 87237 - protein, 53 aa, Gossypium hirsutum
  Clone ID: LIB3197-010-P1-M1-F7.pep
AFTLQRHGTKIPTQKIKFYHYTHSSYPSLIKRYSKTNTYYNHFINNLLLSYYY

SEQ ID NO: 87238 - protein, 104 aa, Gossypium hirsutum
  Clone ID: LIB3197-010-P1-M1-G10.pep
GVVFQALGFPEFLSIQRYRYYLLSSQRGDLKPPLKKEGVEGMTIKPAVRISERKLVVKERTILTGVPENVIATSGTAARSVEEGFPLVRVLMKKTARHLVPIRD

SEQ ID NO: 87239 - protein, 120 aa, Gossypium hirsutum
  unsure (1)..(120): unsure at all Xaa locations
  Clone ID: LIB3197-010-P1-M1-G11.pep
KIRETAIDNFEPMKSKGGETSEHILSMLKAEKEELESSFNNEKLLSLQLKQELADAEARNTDLYKELQSVRGQLAFEQSRCFKLXGDVSELRQKLQTMETLQRELELLLRQKATSRTSWH

SEQ ID NO: 87240 - protein, 77 aa, Gossypium hirsutum
  unsure (1)..(77): unsure at all Xaa locations
  Clone ID: LIB3197-010-P1-M1-G3.pep
MGECMLISGKILXVYRIAHDQDLKKSHPKLAMKWHPNKNPHSNKEAEANFNQIFQPYYVSSDPQKRAVFDHLRDIRI

SEQ ID NO: 87241 - protein, 57 aa, Gossypium hirsutum
  Clone ID: LIB3197-010-P1-M1-G6.pep
YISLYGICQCSFTRFSNGNIIDIKGRCVEWIEYRHYYSGHGNSPQMRYCMICYLIKY

SEQ ID NO: 87242 - protein, 76 aa, Gossypium hirsutum
  Clone ID: LIB3197-010-P1-M1-G7.pep
YLFTCSLQEAQKRMKIKKPPHILVIHLKRFKYIEQLGRYKKLSYRVVFPLELKLNNTVEDADLEYSLLAVVVHVGS

SEQ ID NO: 87243 - protein, 73 aa, Gossypium hirsutum
  Clone ID: LIB3197-010-P1-M1-G8.pep
QSMWLIEIKLMQNLGGMKTLSNFSSSLTSSTRSFCFPSHRDFLISAGPARPCSSFPLQFFLQAPVLPIPTSNA

SEQ ID NO: 87244 - protein, 91 aa, Gossypium hirsutum
  Clone ID: LIB3197-010-P1-M1-H10.pep
EPPFTDWTTEPISEVKLPSALPPDHRYFLHSPFSFTFLYLRFLFPFFSGDLISLKSLVKCFFFFKFWVVLLGLTLYEDLGCLSNLGNDNIT

SEQ ID NO: 87245 - protein, 47 aa, Gossypium hirsutum
  Clone ID: LIB3197-010-P1-M1-H4.pep
FLEHLKMGIITGLLFSLLGAPYKYIVLKKGCNVTIDFNFLDSKTLSD

SEQ ID NO: 87246 - protein, 125 aa, Gossypium hirsutum
  unsure (1)..(125): unsure at all Xaa locations
  Clone ID: LIB3197-011-P1-M1-C10.pep
MAXSRVSFIIIMVSTXLXPSLSSQLSDLFPSNNPPPFLCKHSHPIKQPNHHQQYHYYNPYFSQPLDHFIFFDLPRFPQLYLINXNTWSALSLPXPIFLYFGNQSYIQMFPLNTRFLFDISPPFGA

SEQ ID NO: 87247 - protein, 105 aa, Gossypium hirsutum
  unsure (1)..(105): unsure at all Xaa locations
  Clone ID: LIB3197-011-P1-M1-D2.pep
RDHLLPQTSTKLSKLKGLPANYHYSHSRNSCLIRXRXMCWWXTYNSSPPHIDPSPLQPFSVTPKINVESYQTPNTAVYFVEQTIGKGNAQAREEERTAALTFFQL

SEQ ID NO: 87248 - protein, 46 aa, Gossypium hirsutum
  Clone ID: LIB3197-011-P1-M1-D9.pep
LHHHHQYTIPFIFFLNFSHLHYYTHNIILKKSNFFLILFISHLLLH

SEQ ID NO: 87249 - protein, 52 aa, Gossypium hirsutum
  Clone ID: LIB3197-011-P1-M1-E1.pep
MVDVDIAHKVIIDMCWPRHLLLIVSLQVYSLRDELIISDVRSAGKHMKTKKV

SEQ ID NO: 87250 - protein, 95 aa, Gossypium hirsutum
  unsure (1)..(95): unsure at all Xaa locations
  Clone ID: LIB3197-011-P1-M1-E3.pep
KKPNLGFQXLLTCXAWSCDWDXLFHLLLIPIETFDLNSYGNYETREALGSNALSWPLLKLGPADNDINNIHHHNSSSSSSSSSSGGGAGCKKTQL

SEQ ID NO: 87251 - protein, 62 aa, Gossypium hirsutum
  Clone ID: LIB3197-011-P1-M1-E7.pep
HPHSHPPPPPYFFLLQELLRKSHHRRGAYQNNNPTFSFHSYNFLPLNQNLLPPHIPLLIYSL

SEQ ID NO: 87252 - protein, 127 aa, Gossypium hirsutum
  Clone ID: LIB3197-011-P1-M1-F8.pep
MNIGERVTWIAEWRNLLYVDSSMPTKLYSSIFPSIFFLSLIFLFLYSTFLPLYTNNDSSSLPTNKFLPSSSPPCNLFKGHWVLNSTKGKPFYDDTCPFHRNAWNCLKNKRDNMGIINSWKWVPKDCK

SEQ ID NO: 87253 - protein, 63 aa, Gossypium hirsutum
  unsure (1)..(63): unsure at all Xaa locations
  Clone ID: LIB3197-011-P1-M1-G2.pep
AGVLGSLKKRWRRVSVIXIGVLILLVIFYVIGCAAFRNNKKIGNDEPYGEARMTKAQPSRIHL

SEQ ID NO: 87254 - protein, 62 aa, Gossypium hirsutum
  Clone ID: LIB3197-011-P1-M1-G3.pep
SIENQSMVFRKCLPVVHHTINKTHQPYLSLLVTYISQFNKKYGSASLSLHVIGPWLGFSYCL

SEQ ID NO: 87255 - protein, 49 aa, Gossypium hirsutum
  Clone ID: LIB3197-011-P1-M1-H1.pep
CGFGSSNNMNGSLNVQYSHMIFYIISFQSRSNYQTPNADVKRPAPISLE

SEQ ID NO: 87256 - protein, 29 aa, Gossypium hirsutum
  unsure (1)..(29): unsure at all Xaa locations
  Clone ID: LIB3197-011-P1-M1-H7.pep
WDWSVAEDDYKDYNSDADGXRLSRWVFKG

SEQ ID NO: 87257 - protein, 135 aa, Gossypium hirsutum
  Clone ID: LIB3197-012-P1-M1-A4.pep
FRLWYWWKGCEREVADAAKGSSEEQKSESIMRLSWALVHSRQAEDVQRGIAMLEASLANSSSPLQQREKIYLLAVGYYRTGEFSRSRQLVGQCLEIAPDWRQALVLKKAVEERIAKDGVIGIGITATALGLIAGG

SEQ ID NO: 87258 - protein, 98 aa, Gossypium hirsutum
  Clone ID: LIB3197-012-P1-M1-A6.pep
RLGGLQVGEMERDCLIAYGASMLIFERLMVSSDPFEVQVCRKCGLLGYYSHKLKTGICSSCKNGDDVSTMQLPYACKLLIQELQSMNIVPRLKLSEAN

SEQ ID NO: 87259 - protein, 139 aa, Gossypium hirsutum
  Clone ID: LIB3197-012-P1-M1-D5.pep
QVLVTLVNSYWVIISSLYAARRLHDAMLTSILRAPMTFFHTNPLGRIINRFAKDLGDIDRNVAPFVNMFLGQVSQLLSTFVLIGVVSTMSLWSIMPLLVLFYAAYLYYQSTAREVKRLDSVTRSPVYAQFGEALNGLST

SEQ ID NO: 87260 - protein, 53 aa, Gossypium hirsutum
  Clone ID: LIB3197-012-P1-M1-D6.pep
LQSMVCFHHICCTDMQESLALLFSEHLQAMYRACVRSVNSSFEYPLRCCNSLL

SEQ ID NO: 87261 - protein, 144 aa, Gossypium hirsutum
  Clone ID: LIB3197-012-P1-M1-F11.pep
QIQKGLLALGDYMNVQCHACIGGTNVGEDIRKLDYGQHVVAGTPGRVFDMIRRRSLRTRAIKMLVLDEADEMLNKGFKEQIYDVYRYLPPATQVVLISATLPHEILEMTNKFMTDPIRILVKRDELTLEGIKQFFVAVEREEWK

SEQ ID NO: 87262 - protein, 44 aa, Gossypium hirsutum
  Clone ID: LIB3197-012-P1-M1-G11.pep
VGWGYLNITYNKRFICKYTILIIPMIFKTSSLTIIFISISPAHI

SEQ ID NO: 87263 - protein, 63 aa, Gossypium hirsutum
  Clone ID: LIB3197-012-P1-M1-G12.pep
KLGGKKFVIYVHFNLCLIISFFKHETKHHGKANLTKNSPPKQFLLPHYASLLTLQHTNPTHLI

SEQ ID NO: 87264 - protein, 136 aa, Gossypium hirsutum
  Clone ID: LIB3197-012-P1-M1-G7.pep
YNTAVFQPMTAFPQSSRSVNPFDLGGEGPPVQTQTFPSMASLQGALPIMPRPGLVHTSNLSPPSSAWMPPQSLPYASRPPYPGAQLPSNLPPSSHQNGGIGNEASFGFVNTDQQMGGRFSAAPTPQPFPSVGWGNP

SEQ ID NO: 87265 - protein, 139 aa, Gossypium hirsutum
  Clone ID: LIB3197-012-P1-M1-H5.pep
NILGTGGFGNVYKGKLGDDTLVAVKRLKDLTGSFGESQFRTELEMISLAVHRNLLRLIGYCATSNERLLVYPYMSNGSVASRLRGKPALDWNTRKRIAIGAARGLLYLHEQCDPKIIHRDVKAANVLLDDYCEAIVGDF

SEQ ID NO: 87266 - protein, 120 aa, Gossypium hirsutum
  unsure (1)..(120): unsure at all Xaa locations
  Clone ID: LIB3197-013-P1-M1-A2.pep
PLHDCXKLVXHGVNTAAYLIRYCXIIMLFDILXDNEKLWSSTKNASHIQLYSLPXVPLLVDVPXLFAQLNNSTLIIMNDPILXPRTTTYLPPVLLXYPMLPPGRIIVRWCKVDDDFTAQH

SEQ ID NO: 87267 - protein, 66 aa, Gossypium hirsutum
  Clone ID: LIB3197-013-P1-M1-A3.pep
HMSTSFFSLPKNKNNHHHLTTLTSLNVVSFILLHQKRKQTNSYLRVARLCSTTKLWPQKARLPVYL

SEQ ID NO: 87268 - protein, 65 aa, Gossypium hirsutum
  unsure (1)..(65): unsure at all Xaa locations
  Clone ID: LIB3197-013-P1-M1-B12.pep
SIKXTNKNTRIQSAIPQKLCCYFNQKNSKFFEMNSNGSSKYESICFITTLATNKQLKKFVRNHTR

SEQ ID NO: 87269 - protein, 112 aa, Gossypium hirsutum
  unsure (1)..(112): unsure at all Xaa locations
  Clone ID: LIB3197-013-P1-M1-C11.pep
SFTRGRTHGKKGLICLDCRMVXPRELERANRTLLMRHESEIKXNAYWLGLLAHLQSSSVPRKDISCVKELTSLYEAGSIEDIYLAYDQLYVDEDFFYSCFGIAGVNAVYSAM

SEQ ID NO: 87270 - protein, 117 aa, Gossypium hirsutum
  Clone ID: LIB3197-013-P1-M1-C8.pep
LFLKGHIYLLFSSMFMINLPSLFYYISISSNSFLLFSPRLFLQTFSFFLSFSSILPLDLLQIFSYLRLIKVHYLLVYSIFYFFHFLSFTPVYYTYFFSSSISFLIIFFLIFFLPKFF

SEQ ID NO: 87271 - protein, 75 aa, Gossypium hirsutum
  Clone ID: LIB3197-013-P1-M1-D1.pep
TLWCSLSLWFLNFYQMKSAFDPHRQPFQVDTLLDFCSAESPVVNPVTTVESVSLTPFQDCAGKHVLASSGSDPLY

SEQ ID NO: 87272 - protein, 48 aa, Gossypium hirsutum
  Clone ID: LIB3197-013-P1-M1-D5.pep
YSNEDLYSLDTFAEILSKRLIWLGTNVIYYYDELSPNSILRKALHLFY

SEQ ID NO: 87273 - protein, 122 aa, Gossypium hirsutum
  unsure (1)..(122): unsure at all Xaa locations
  Clone ID: LIB3197-013-P1-M1-E1.pep
KKVCSFPCEGNKPKAXHKKGLWSPEEDFKLXIYVLKHDHFYCSSVPINAWLQRNGKSCRLRWINYLRPLLKRCTFTPQEEETILTLPSXLGNKWSQIAQNLPGRTDNEIKNYWHSYLKKRIA

SEQ ID NO: 87274 - protein, 112 aa, Gossypium hirsutum
  unsure (1)..(112): unsure at all Xaa locations
  Clone ID: LIB3197-013-P1-M1-F1.pep
MGFQKTIWGFLFWIWAXLTSLFFSLPSEYSIGEHEIDPFLSKERVLEIFPQWXKEKHRKSVPAPPRRLKKRFEKFQGXIXKYIXLERKAKRKANKWEHHVGLNKFADMSHEE

SEQ ID NO: 87275 - protein, 82 aa, Gossypium hirsutum
  Clone ID: LIB3197-013-P1-M1-G2.pep
PKSKAETPMKTRKPTTSAARGSSSSSPPSQTLSFIFQYAPKIFSFQTHPYCYRLLPPRHLCLLLHFLPHSSSPLRFQLRFFF

SEQ ID NO: 87276 - protein, 90 aa, Gossypium hirsutum
  Clone ID: LIB3197-013-P1-M1-H10.pep
YSRWGCLDPWGAHSPYDRRVYMLELFLPDEYPMAAPMVPILTIIYHPNICLLCRTCLVILKDKCSPALQIRTVLLSILSLLSAPYFFYPL

SEQ ID NO: 87277 - protein, 63 aa, Gossypium hirsutum
  unsure (1)..(63): unsure at all Xaa locations
  Clone ID: LIB3197-014-P1-M1-A2.pep
PACFYLTKRGEGGGSNXIWSTDKTTETCAGXEGSGGGAIXLNIFHGSTLPDAPKFGKDLGGQL

SEQ ID NO: 87278 - protein, 49 aa, Gossypium hirsutum
  Clone ID: LIB3197-014-P1-M1-B11.pep
RREHYVTAPDFSLFACRTVWPLLNGYEHCEPMPNRAWRMYSCSSLPTRA

SEQ ID NO: 87279 - protein, 37 aa, Gossypium hirsutum
  unsure (1)..(37): unsure at all Xaa locations
  Clone ID: LIB3197-014-P1-M1-B12.pep
KKHXXDTIQALIFSTDYNMLILYEHRLQKSPIXDFNC

SEQ ID NO: 87280 - protein, 109 aa, Gossypium hirsutum
  unsure (1)..(109): unsure at all Xaa locations
  Clone ID: LIB3197-014-P1-M1-B5.pep
SSSSFSRELKITAKKTYIVQVKHQDKPSFXSDDDWHXWSLQSLTDSPPESLXSVHILKRVNGFAASLNEEQAESLSKSESILGVYXXAXYTLHTTRSPQFLGLDADFGL

SEQ ID NO: 87281 - protein, 69 aa, Gossypium hirsutum
  unsure (1)..(69): unsure at all Xaa locations
  Clone ID: LIB3197-014-P1-M1-B9.pep
FFVGLRESCCCADPSYFLFCXXXXXXLIFSTIASLLFXLFFRCCXXXNDXSNRETPTFVCFVESRDLLF

SEQ ID NO: 87282 - protein, 48 aa, Gossypium hirsutum
  unsure (1)..(48): unsure at all Xaa locations
  Clone ID: LIB3197-014-P1-M1-C1.pep
SSRAKIKSNXXHLNTGISXGXAQQQLSRRNQRMKRGSRDFFSKTPRVR

SEQ ID NO: 87283 - protein, 105 aa, Gossypium hirsutum
  unsure (1)..(105): unsure at all Xaa locations
  Clone ID: LIB3197-014-P1-M1-C12.pep
MKLLELTEHLHPAYVLLGVWLPYNHRSPRLETNQSTAAGRWPIHKHLAAMAEDGVVTLYNNTDITXSKKKPVSIKVGLAQMLRGGAILEVSNTNQAKIAEEACAW

SEQ ID NO: 87284 - protein, 107 aa, Gossypium hirsutum
  unsure (1)..(107): unsure at all Xaa locations
  Clone ID: LIB3197-014-P1-M1-C6.pep
VXPIGAVEGVRLWLGNSAYIYWSVSFIQMLGQWVGVXXXSIGVLFKKEGYRSPRXGVLGISFGVAIAAYGEAKFDTWGVILQLGAXAFQASRLVMIQILLTSKGITL

SEQ ID NO: 87285 - protein, 82 aa, Gossypium hirsutum
  unsure (1)..(82): unsure at all Xaa locations
  Clone ID: LIB3197-014-P1-M1-C7.pep
LSTLAXGPFCDFLTLSIHFPIYLSLSGVGGRAGPXFLHIKASREREFRGDFTMEQGFNRSNQLARYIVTRSQLGGTGILDAT

SEQ ID NO: 87286 - protein, 82 aa, Gossypium hirsutum
  unsure (1)..(82): unsure at all Xaa locations
  Clone ID: LIB3197-014-P1-M1-D7.pep
IIYTCNIMVLYNKNQKLGWFDRKFXFFCHPSSLPLKREIKCTRFPLNCXLILSHSHIYGKRISFLYLNFSSFWFKXSSXPLS

SEQ ID NO: 87287 - protein, 86 aa, Gossypium hirsutum
  unsure (1)..(86): unsure at all Xaa locations
  Clone ID: LIB3197-014-P1-M1-E4.pep
GXEXXPWLEXGWLLAHSRPHLVGFALLVPLDVVVWXVXXACRGCFSLQAFAWVRCLCWLVXSCAPRSHIIFDYSRNTIPIIHFHLQ

SEQ ID NO: 87288 - protein, 68 aa, Gossypium hirsutum
  unsure (1)..(68): unsure at all Xaa locations
  Clone ID: LIB3197-014-P1-M1-F6.pep
RLGSFVESSFTLTSXTPSAWLHVGIFWILXAXXSTLVSRICLALTCSTPSAWLHVGIFIXLLFSXTRP

SEQ ID NO: 87289 - protein, 99 aa, Gossypium hirsutum
  unsure (1)..(99): unsure at all Xaa locations
  Clone ID: LIB3197-014-P1-M1-F7.pep
ANRRSIRSSSAGGSGFLEGRALAISQALIYSXTPPVESVSVMLSSEXXFNTLTCASALARRRASFPPSASWYCSHXLSCLAAGVGRTGGSGRVLAGVPA

SEQ ID NO: 87290 - protein, 111 aa, Gossypium hirsutum
  unsure (1)..(111): unsure at all Xaa locations
  Clone ID: LIB3197-014-P1-M1-G9.pep
EIAKAVMHLDKFKQKHTKVEDPKLKMVRGDLEXXIDILRNQADTYDDKXPIIDAVVWHDGEVWRVALDTQSLEDDTKSGKLAXXVPLTNYRIERKYGVFSKLNACTFVVNV

SEQ ID NO: 87291 - protein, 52 aa, Gossypium hirsutum
  unsure (1)..(52): unsure at all Xaa locations
  Clone ID: LIB3197-014-P1-M1-H6.pep
MGKMXPILMKGHERPLTXVGXEGVGEGXXSCAKDHTPTVWFADNGERLGTYR

SEQ ID NO: 87292 - protein, 44 aa, Gossypium hirsutum
  Clone ID: LIB3197-015-P1-M1-A1.pep
QETKLSFILIEETSFFPCFAVLRNPSRSLFGLYRVFKSLIITQL

SEQ ID NO: 87293 - protein, 87 aa, Gossypium hirsutum
  Clone ID: LIB3197-015-P1-M1-A10.pep
LCKRGNVGHAMQLVEKMEAHGYPTNTVTYNSLVRGLCMHGNLKQSLQLLDRLIQKGLVPNEFTYSFLLEAAYKEKGVNEATKLLDEI

SEQ ID NO: 87294 - protein, 103 aa, Gossypium hirsutum
  unsure (1)..(103): unsure at all Xaa locations
  Clone ID: LIB3197-015-P1-M1-A9.pep
SWSQLPCCRTTVDPREKLEVLERTYGEIEGTVSRVLGREYKLPMDDLLPLLIYVVSRARWGSXGPEKGGSQPGCWGARGRVRTTPQVSSHPGQGSFPSCLXMT

SEQ ID NO: 87295 - protein, 103 aa, Gossypium hirsutum
  Clone ID: LIB3197-015-P1-M1-B11.pep
LRIFLHVRNQKGVPLKGVDSTASSFGGMFEKFRSDAPNYKANFILFLADKDPSTSLSWCPDCVRAEPVIYKKLEASPEDVTLLRAYVGDMPTWKNPQHPWRLD

SEQ ID NO: 87296 - protein, 117 aa, Gossypium hirsutum
  unsure (1)..(117): unsure at all Xaa locations
  Clone ID: LIB3197-015-P1-M1-B6.pep
NQFIIWKRTTXYWKSGVSGKFIGPDGMPSAMPSAISFFLSNFTTVVLHNESMPHLTSSLYSDTRMTISFSGQIQYFKWDSWKIWSLIXAEPRDKCSIYNACGKFGSCNSNNDLMCKC

SEQ ID NO: 87297 - protein, 54 aa, Gossypium hirsutum
  Clone ID: LIB3197-015-P1-M1-B7.pep
MDSGSRIYTADEFKLDAKWLIDPKHLFVGPRIGEGAHAKVYKGKYKNQTVAIKI

SEQ ID NO: 87298 - protein, 120 aa, Gossypium hirsutum
  unsure (1)..(120): unsure at all Xaa locations
  Clone ID: LIB3197-015-P1-M1-C2.pep
NIEKNSPGSQILKGYLMATLFYEPSTRTRLSFESAMKRLGGEVLTTENAREFSSAAKGETLEDTIRTVEGYSDIIVMRHFESGAAKRAAATAGIPIINAGDGPGQHPTXALLDVYTIERE

SEQ ID NO: 87299 - protein, 100 aa, Gossypium hirsutum
  unsure (1)..(100): unsure at all Xaa locations
  Clone ID: LIB3197-015-P1-M1-C5.pep
GRVGSLVAAFLWIARFELRKYCIYRVFAVSRDLHVMGKSPGKWIKTVLFGKKPSKSSYPKGREKVDNDSQVLVAAXASESDLAVASSFSSQLNXHTTERD

SEQ ID NO: 87300 - protein, 83 aa, Gossypium hirsutum
  unsure (1)..(83): unsure at all Xaa locations
  Clone ID: LIB3197-015-P1-M1-C6.pep
EADHTHRCTHLKTHANIKMCLESKKQLTEQXALTLQVSCCVLALTHWQRRHRHAGWPPIXRVXRYIVKSLKCVHSWSIFPDGD

SEQ ID NO: 87301 - protein, 57 aa, Gossypium hirsutum
  Clone ID: LIB3197-015-P1-M1-E10.pep
MAGPDQRVCFNRRGPLYPGIQTLICLSILKGRGTTSLYRRKKKECQVRVSNWVKRGK

SEQ ID NO: 87302 - protein, 40 aa, Gossypium hirsutum
  Clone ID: LIB3197-015-P1-M1-E6.pep
NMASVIDQKDKRNDLSKTKRVACQCYLRNVNFFFFSLIRR

SEQ ID NO: 87303 - protein, 81 aa, Gossypium hirsutum
  Clone ID: LIB3197-015-P1-M1-F10.pep
IHIMTPFFNSNFKANQIILKPTTPAKPRTFEEPHLLYETHPPSLNKFELASSSDHCTWKFVLFSLKHKFENKNRHPECLPK

SEQ ID NO: 87304 - protein, 130 aa, Gossypium hirsutum
  unsure (1)..(130): unsure at all Xaa locations
  Clone ID: LIB3197-015-P1-M1-F11.pep
YKGQTGRPNVNLXKLIQLGLTFSDAKGNLPTXGTDKYCVSQFNFRKFHPNEDVYSNYSIELLSQNGIHFHKNKQKVITSHDFTELAMISGIGSNDNAHWSTIHTDFYFXYFLKLLTCNNSSEXQTGFFNL

SEQ ID NO: 87305 - protein, 92 aa, Gossypium hirsutum
  unsure (1)..(92): unsure at all Xaa locations
  Clone ID: LIB3197-015-P1-M1-F7.pep
RPRXRLRPRDTIHMMQPGHSPENQRQMVVPELQLHIQENSQGIAAFNGLTSAYPNQSTPSPVQSYPGQPQKSHGLNNSLQGSNGSQQQAYAM

SEQ ID NO: 87306 - protein, 114 aa, Gossypium hirsutum
  Clone ID: LIB3197-015-P1-M1-G11.pep
MKLVRFLMKLNNETVSIELKNGTVVHGTITGVDVSMNTHLKTVKLTLKGKNPVTLDHLSVRGNTIRYYILPDSLNLETLLVEETPRVKPKKPAAGRPLGRGRGRGRGRGRGRGH

SEQ ID NO: 87307 - protein, 89 aa, Gossypium hirsutum
  unsure (1)..(89): unsure at all Xaa locations
  Clone ID: LIB3197-015-P1-M1-H5.pep
IWDGVAHELTKEASYEFKKGTDLELSTTQERSVMCVEERMPRPPRQAIGKEKRRFGXXGVLTKRXNESSLRPAKGRHNERSAKCVMRKY

SEQ ID NO: 87308 - protein, 98 aa, Gossypium hirsutum
  unsure (1)..(98): unsure at all Xaa locations
  Clone ID: LIB3197-016-P1-M1-A10.pep
MLSTPYESEATEQHDDTSASTMKFGTPEAVDYVRSLTDVGAMTRLLHECIAYQRALDVDLDTXLFQRTDLDKSLNNLQRSADVLDIVKAESDHMLSNV

SEQ ID NO: 87309 - protein, 122 aa, Gossypium hirsutum
  unsure (1)..(122): unsure at all Xaa locations
  Clone ID: LIB3197-016-P1-M1-A6.pep
PTRTGKYYLVDSGYPQMVGFLRPYRGNDIIYLIFVEVIIKYLEKKIFNHAHYSLRSVIERTFGVWKKNXPILKDIPSYLFNKQVLIVIATMVLHNYIRRHDWSDDDDFQKVENIPDMPVSLS

SEQ ID NO: 87310 - protein, 120 aa, Gossypium hirsutum
  unsure (1)..(120): unsure at all Xaa locations
  Clone ID: LIB3197-016-P1-M1-B12.pep
ITCPIFTFNGVDGMVDRLAGDVKHVIHHHPIVQKISFVDHSSXGLISRYAIARLFEQYLTQENSQTNGHSIADXCKIHGLKGSSNVKCAGLEPVNFITLASPHLVSPSHXQVPLFLGSHF

SEQ ID NO: 87311 - protein, 54 aa, Gossypium hirsutum
  unsure (1)..(54): unsure at all Xaa locations
  Clone ID: LIB3197-016-P1-M1-B2.pep
LTRGAKYGQKWVRTMTIIXSFSPKWNEQYTWEVFDPCTVITIGVFDNCHLHGGD

SEQ ID NO: 87312 - protein, 55 aa, Gossypium hirsutum
  Clone ID: LIB3197-016-P1-M1-B7.pep
IYSTHPQKSVSVFSTLYSAKPFLPYPDYIYLAPNFPKLATLYISSKGCSRRKSRT

SEQ ID NO: 87313 - protein, 76 aa, Gossypium hirsutum
  Clone ID: LIB3197-016-P1-M1-C10.pep
MESRMDHYEIMEQIGRGAFGAAILVHHKSENKKYVLKKIRLARQTERCRRSAHQEMALISRVQHPYNCEFKEAWVE

SEQ ID NO: 87314 - protein, 101 aa, Gossypium hirsutum
  unsure (1)..(101): unsure at all Xaa locations
  Clone ID: LIB3197-016-P1-M1-C12.pep
INKIKHREKKIIIRKSGEKIQEEKNDLSNIRFQHTPRKTGGLAHILATETLKRGEXTYLEMGVPEYAEDQTRYDAVSEPDYPSLRRRRPKERKFQNKKKIN

SEQ ID NO: 87315 - protein, 72 aa, Gossypium hirsutum
  unsure (1)..(72): unsure at all Xaa locations
  Clone ID: LIB3197-016-P1-M1-D4.pep
SHPPVFVVLRNRRTREESNVAEEPEAXVLYTECIXRNGXVGLYVMAIVFITLLIGFHALRAYLDKLTSLSDR

SEQ ID NO: 87316 - protein, 52 aa, Gossypium hirsutum
  unsure (1)..(52): unsure at all Xaa locations
  Clone ID: LIB3197-016-P1-M1-D6.pep
MKVLSPIGACLTLAWVGNHAALSPEQYWSYXLANTSMPKAXKEILHPELMEE

SEQ ID NO: 87317 - protein, 91 aa, Gossypium hirsutum
  unsure (1)..(91): unsure at all Xaa locations
  Clone ID: LIB3197-016-P1-M1-E6.pep
VPYRKSYPAIPDSHYDISNPKAVIEELDRIEEFLNWVSYIFPDGSLYEGTVWDDLAHGKGVYVAEQGLVRYECXWLQNNMEGHGVVDVVTS

SEQ ID NO: 87318 - protein, 87 aa, Gossypium hirsutum
  unsure (1)..(87): unsure at all Xaa locations
  Clone ID: LIB3197-016-P1-M1-G4.pep
QLFGLSEFPDAEDLLKPAAAAMMDXSADVRKAAHRCVTEILRVSAQEAIDKNLRDLQGPALALIPERVKPYRSFQELDEPSKGGSIG

SEQ ID NO: 87319 - protein, 56 aa, Gossypium hirsutum
  Clone ID: LIB3197-016-P1-M1-G5.pep
PPCSTQPSRPISLGPIANREKAILRIGRDLHPNRILDKLSQRLTRPMFPAKGRTTA

SEQ ID NO: 87320 - protein, 85 aa, Gossypium hirsutum
  Clone ID: LIB3197-017-P1-M1-E12.pep
SVSEEKESSKASDECKKWPWFPFYSPSPAHYLFSKKSPARSLANSTPKRFFREPFPPPSPAKHIMAVLARRHGSVMPNESAIPEG

SEQ ID NO: 87321 - protein, 63 aa, Gossypium hirsutum
  Clone ID: LIB3197-017-P1-M1-F5.pep
SLVFFYLFNDPFSPMLNIILISSLLPTPTVILITNIGNSLSTSSKMKQQLHSFYMTNNSYSQF

SEQ ID NO: 87322 - protein, 49 aa, Gossypium hirsutum
  Clone ID: LIB3197-017-P1-M1-F6.pep
KTQNSESSKNAPKNSSLTDRSQDRPPQPAISWQTQKSVTAGDLIQSLEA

SEQ ID NO: 87323 - protein, 67 aa, Gossypium hirsutum
  Clone ID: LIB3197-017-P1-M1-H5.pep
SSLSLSTPSWNLLNASPPDQPNTRVGLGMRGVISDAFPSTLRRANPGNQQGPLPHSLSSTGVAGHSS

SEQ ID NO: 87324 - protein, 99 aa, Gossypium hirsutum
  Clone ID: LIB3197-019-Q1-M1-A8.pep
MANEKKTQTGVWPKIKPFVNGGTSGMLATCVIQPIDMIKVRIQLGQGSAATVTKTMLRNEGIGAFYKGLSAGLLRQATYTTARLGSFKMLTTKAIEAND

SEQ ID NO: 87325 - protein, 95 aa, Gossypium hirsutum
  Clone ID: LIB3197-019-Q1-M1-B1.pep
AKNTHAIVGREFSGERNPKFSLAFLVFVIFEIRCFNGDSFQVSISFLVSAPCFFTCISVGFFLVFLVFSFRNHCFIPSFKSTDVGLALHFCLFIV

SEQ ID NO: 87326 - protein, 73 aa, Gossypium hirsutum
  Clone ID: LIB3197-019-Q1-M1-B4.pep
ELRCLDHPYSGSTMNFHSGRKDAQKHAVDKSCIYCNKVFDDYLALSGHLRIHEEETLRALNFPGRSSNSIDIT

SEQ ID NO: 87327 - protein, 66 aa, Gossypium hirsutum
  Clone ID: LIB3197-019-Q1-M1-B7.pep
MSFPCDNDESRDLKKPFLHTGRWSWMTSMQPRVMRASVQVLRDGSIFVDLWVLIDALGPIQFGFTW

SEQ ID NO: 87328 - protein, 82 aa, Gossypium hirsutum
  Clone ID: LIB3197-019-Q1-M1-C10.pep
FPPLKPPTLQTYRPLKFLTPCPLLSFLPQPQFLNAQKSLFLHGSCFEEFIELHFHATDMFSLSQISFFFLFSLAICLCSDLN

SEQ ID NO: 87329 - protein, 50 aa, Gossypium hirsutum
  Clone ID: LIB3197-019-Q1-M1-C4.pep
CYIMARPSNSLAISKQFFFWCKILLTVWFSFKTFVPIRTFALFIAFMTGG

SEQ ID NO: 87330 - protein, 86 aa, Gossypium hirsutum
  Clone ID: LIB3197-019-Q1-M1-D1.pep
MAEEDVVPKTFRALVESADRKFARVRDLPSYGRAQGQHYFQKVFKAYMRLWKYQQEHRPELVKAGLNRWEIGEIAGRIGQLYFGQY

SEQ ID NO: 87331 - protein, 64 aa, Gossypium hirsutum
  Clone ID: LIB3197-019-Q1-M1-D5.pep
TSFPWQLQRGHLIFVRSTSHNLSLILRNVRRSIRRLLYCSRWLMQHKKDGAISPIPLLKTPRWV

SEQ ID NO: 87332 - protein, 75 aa, Gossypium hirsutum
  Clone ID: LIB3197-019-Q1-M1-E10.pep
FLVVLACCVFVDQSLIIIVNCLSACPLFCFIECMLSMLLFYVSLVCTIVKQTTVLIIDRVIMACFYIILDLILLF

SEQ ID NO: 87333 - protein, 64 aa, Gossypium hirsutum
  Clone ID: LIB3197-019-Q1-M1-E12.pep
FTEKVFWTVKEYLFLTCYGSNLYIQEYAASTSLYDLLPGDHGAFTKSPDNFMVLYIHIFMRFFI

SEQ ID NO: 87334 - protein, 59 aa, Gossypium hirsutum
  Clone ID: LIB3197-019-Q1-M1-E7.pep
NTALLVYMTDMVRILKCLSLAGYVATRISQRIYIPTLSYQTLTMPMAALQILHSELLDE

SEQ ID NO: 87335 - protein, 50 aa, Gossypium hirsutum
  Clone ID: LIB3197-019-Q1-M1-F3.pep
LSVNFQPLFLSSPSFSSIGLFPVDKINHFCPRSLVMHPVPSYYSTLSKQS

SEQ ID NO: 87336 - protein, 53 aa, Gossypium hirsutum
  Clone ID: LIB3197-019-Q1-M1-F4.pep
LVITCDGLYDLSKELSNVDFVLTLFYKLIDVSGNAVPCSLTNPLMLRLIYQKC

SEQ ID NO: 87337 - protein, 91 aa, Gossypium hirsutum
  Clone ID: LIB3197-019-Q1-M1-G11.pep
MSNFYNQTRAASSLMRRLKRSLINPTAVSRARCFTTAEGHRPSLVHKRSLDILHDPWFNKGTAFSMTERDRLDLRGLLPPNVMSSEQQIER

SEQ ID NO: 87338 - protein, 109 aa, Gossypium hirsutum
  Clone ID: LIB3197-019-Q1-M1-G2.pep
MDCSPKLWGMSILWLFALFSMQNRAREDFSKFPRVNIAEKETASREQKRETLVSQTTQKPQEQEPRVIPETQNGYGLYGHESRSSRARFTTKETYEPYVTPRRFHPDEP

SEQ ID NO: 87339 - protein, 77 aa, Gossypium hirsutum
  unsure (1)..(77): unsure at all Xaa locations
  Clone ID: LIB3197-019-Q1-M1-H1.pep
LFDGGSXLQLCPLASTPLDYCLRPLRFLSILVYKSLGFSTLSRHKRGSGVSMSSTGRVNYVASPKCAAADPDQLKSA

SEQ ID NO: 87340 - protein, 58 aa, Gossypium hirsutum
  Clone ID: LIB3197-019-Q1-M1-H10.pep
SIFPPYLINKMKIYICNHTWQKFQLFIIGSARDIGRERTPMKHEEPERDLVTSSRTRG

SEQ ID NO: 87341 - protein, 61 aa, Gossypium hirsutum
  Clone ID: LIB3197-020-Q1-M1-A12.pep
ERDIARMLPGDSSHHSTSDSGPSRNSQDKQEEVRRWYFSRKEIEENSPSRMDGIDLKKETY

SEQ ID NO: 87342 - protein, 50 aa, Gossypium hirsutum
  Clone ID: LIB3197-020-Q1-M1-A6.pep
GKENLVLIPNIPGGRSQGFTEPVPIGLILMVLFRVNFFQVCCQYQECLYH

SEQ ID NO: 87343 - protein, 65 aa, Gossypium hirsutum
  Clone ID: LIB3197-020-Q1-M1-C5.pep
IIWGILPIMKKLTIFPFEAWSINKELSKNPFSFRHGRNSELRITNGNGFLRKIKRTDGLVQPGNS

SEQ ID NO: 87344 - protein, 34 aa, Gossypium hirsutum
  Clone ID: LIB3197-020-Q1-M1-D10.pep
IFIIIFSGRTIDLSSSPIIHCSLSKQCKGLVHLG

SEQ ID NO: 87345 - protein, 148 aa, Gossypium hirsutum
  unsure (1)..(148): unsure at all Xaa locations
  Clone ID: LIB3197-020-Q1-M1-D5.pep
NEVENEDLVFTLGTIVDKFGEEMAPYALGLCQNLAAAFWRCMNTTEADDEADDPGALAAVGCLRAISTILESVSRLPHLFVQVEPTLLPIMQRMLTTDGQEVFEEVXLEIVSYMTFFSPAISLEMWSLWPLMIEALADWAIDFFPNIL

SEQ ID NO: 87346 - protein, 36 aa, Gossypium hirsutum
  Clone ID: LIB3197-020-Q1-M1-D6.pep
ASNIRGQFFKANKGGRFSPTLTIPLKNSGMTSGNPH

SEQ ID NO: 87347 - protein, 106 aa, Gossypium hirsutum
  unsure (1)..(106): unsure at all Xaa locations
  Clone ID: LIB3197-020-Q1-M1-H11.pep
IVKSWVKQLTRQXGYTDQMVEEANAVIFTFGSYRLRVHGPGADINTLCVGPSYVNREEDFFIILRDILAEMEEVTELQPVPDAHVPVMKFKFQGISXDLLYASISL

SEQ ID NO: 87348 - protein, 68 aa, Gossypium hirsutum
  unsure (1)..(68): unsure at all Xaa locations
  Clone ID: LIB3197-020-Q1-M1-H7.pep
GRVGLEERRIKDLVKKHSEFISYPIYLWTEKTTEKEINDDEEDEPKKDEEGNVXDVEEDESKSEKKKK

SEQ ID NO: 87349 - protein, 53 aa, Gossypium hirsutum
  Clone ID: LIB3197-021-Q1-M1-A3.pep
THVLVHQLTLGEFRYAHAGIDVEWKAEDHHMLQTPWRPRLILYYLINIQFGKL

SEQ ID NO: 87350 - protein, 53 aa, Gossypium hirsutum
  Clone ID: LIB3197-021-Q1-M1-A7.pep
MAGAEDFVKGNVYPNGVAIITLDRPKALNAMNLDMDVKYKQILEEWESDPKVK

SEQ ID NO: 87351 - protein, 112 aa, Gossypium hirsutum
  Clone ID: LIB3197-021-Q1-M1-A9.pep
MAISSVCPTEDAVQAFLEHLVDPLLPSKYSVRETPSLATQELVAKQVHAVVLLYNYFLRKRHPDLRYLDFENFCKWALVLKPNLKSHMKLMVRTDDTELSEVESQFSLLEKA

SEQ ID NO: 87352 - protein, 44 aa, Gossypium hirsutum
  Clone ID: LIB3197-021-Q1-M1-C3.pep
THSKNGYYGATADIWACGVILLELLAGYLPFDDRKIVCLYKKVC

SEQ ID NO: 87353 - protein, 32 aa, Gossypium hirsutum
  Clone ID: LIB3197-021-Q1-M1-C5.pep
SGSHVQNKCCLILPTSYVFHLWFTYAYMVNVK

SEQ ID NO: 87354 - protein, 47 aa, Gossypium hirsutum
  Clone ID: LIB3197-021-Q1-M1-C9.pep
LLANKGYDGATADIWSCGVILFELLAGYLPFDDRNLVVLYKKVCMCI

SEQ ID NO: 87355 - protein, 64 aa, Gossypium hirsutum
  Clone ID: LIB3197-021-Q1-M1-D12.pep
WVSPLTKCVNFLVGTSLWELQGINRKPIHRSMMPRQNTFHSLVHSYQRQAPSTIAFPHSEADSN

SEQ ID NO: 87356 - protein, 135 aa, Gossypium hirsutum
  Clone ID: LIB3197-021-Q1-M1-D5.pep
HASGDSSKGDRVGFASQLHLLVNALGMSFEAPFIEDFVSVENPGSDNLESTMVIPPPTVLDRVLKDLFLEDPQLPDFAKDEHKSSRAIKGAPVESLFAQFCLHSLWFGNCNIRAIAVLWIEFVQEIRWHWEESQP

SEQ ID NO: 87357 - protein, 134 aa, Gossypium hirsutum
  unsure (1)..(134): unsure at all Xaa locations
  Clone ID: LIB3197-021-Q1-M1-D6.pep
GRVGVMDNQQTGGAGAATTGSSTSSDPAITSXSTDAFSEIWTLWFSHLWTLLSLLTFIPFVKLTTNNFSVETPSWTKGFLADIRILFAINXASQARLRVQENVTRYARNYATLFILFFSXYLYQLKLALVGKIS

SEQ ID NO: 87358 - protein, 58 aa, Gossypium hirsutum
  Clone ID: LIB3197-021-Q1-M1-F11.pep
MVGLFRGVSGCPGPSGFGSASTAQEVTEGIDGTNLTALVTGHRLSLLHFFAIFTSSPL

SEQ ID NO: 87359 - protein, 55 aa, Gossypium hirsutum
  Clone ID: LIB3197-021-Q1-M1-F2.pep
PHPIYCRFMVRKIYICVCVYDMLLAADYKGFLDKLRHYKTSISFIQLQALTYSGR

SEQ ID NO: 87360 - protein, 118 aa, Gossypium hirsutum
  unsure (1)..(118): unsure at all Xaa locations
  Clone ID: LIB3197-021-Q1-M1-F4.pep
FGYVAPEYAMTGHLLVKSDVYSFGVVLLELLTGRKPVDMSQPQGQENLVTWARPLLSSREGVXQLVDPSLAGTYNFDDMAKVAAISYMCVHPEVTHRPXMGEVVQALKLIYNDTDETG

SEQ ID NO: 87361 - protein, 70 aa, Gossypium hirsutum
  Clone ID: LIB3197-021-Q1-M1-F5.pep
PRVRDLVNEVVNKYRLIFVSSAGNSGPALSTVGAPGGTSSSIIGVGAYVSPAMAAGAHSVVEPPPERLEY

SEQ ID NO: 87362 - protein, 90 aa, Gossypium hirsutum
  Clone ID: LIB3197-021-Q1-M1-F8.pep
AFSSQLRAVSTNRRPRSTTLLCNSDDYGVSKGSATRYSRTEVRDVARTKASCTGACVVWENGAGGCCCSALGFSVNCLEVLGHWAIGCLG

SEQ ID NO: 87363 - protein, 136 aa, Gossypium hirsutum
  Clone ID: LIB3197-021-Q1-M1-G5.pep
NGSFHSFPLIHPPPPSSNPHFVSSLHFIFSIIFDPFESFLCFPHLFKALVMALDLNLTVISDGDDNSMAGGFSGYNNNQMDSSGGSFGSSVVNADTATTAGDDDSFFNAAATDTFGYSFDILKASREEEQDKYNNR

SEQ ID NO: 87364 - protein, 131 aa, Gossypium hirsutum
  Clone ID: LIB3197-021-Q1-M1-G9.pep
MKSILKYAMLMENHKPYIAMLFVQFIYAGMALFSKAAISKGMNPYVFVVYRQAFATITLAPFAFFLESKQTSLSYNLIIKIFLISLCGLTLSLNFYSVAIKYTTATFAAATTNTIPVLTLIIAVCLRMESI

SEQ ID NO: 87365 - protein, 135 aa, Gossypium hirsutum
  unsure (1)..(135): unsure at all Xaa locations
  Clone ID: LIB3197-021-Q1-M1-H1.pep
MSSKINGHVSPQPCPHLLVFRSRNGPKPFRALQDCIRVKPPGGRAAIRREPTEVPRCGTCEESSRSRLYACXACAAVFCHAPLLHSHASDHSLSIPGHEIAVDVDRAELFCLACGDQVYDRDFDAAVVLAQTVNA

SEQ ID NO: 87366 - protein, 132 aa, Gossypium hirsutum
  Clone ID: LIB3197-021-Q1-M1-H5.pep
ELPVDKQKLTAPIKSTADKFQLLPEFLKVRGLMKQQLDSFDCLVNTGIKKIVRVNDRIVSDIDPSIYLRYSAPIFVNGEYIQVRYGQKTRLEKVYSRCFFDVCTMQNDRCFGCNATSVPSRIILLLQKCPSC

SEQ ID NO: 87367 - protein, 64 aa, Gossypium hirsutum
  Clone ID: LIB3197-021-Q1-M1-H6.pep
LQSKWYIFLAFCHQTNNLESNKETSLLKRCVLPSQYKISRTHNLPKVTYIRFYIYINYERTLNK

SEQ ID NO: 87368 - protein, 53 aa, Gossypium hirsutum
  Clone ID: LIB3197-022-Q1-M1-A11.pep
RSVIGLVLGYVTSLVVDLAILIEAKEEAELPEYILGTVRLNRVKPESAVPLNA

SEQ ID NO: 87369 - protein, 69 aa, Gossypium hirsutum
  Clone ID: LIB3197-022-Q1-M1-A12.pep
TVNDQGVFLLGLFFFKKKMLTKTPPLSLPTPFLQALFGIFLVIKPQLPKWIKPFFNMNGGLAPTYKKTL

SEQ ID NO: 87370 - protein, 101 aa, Gossypium hirsutum
  unsure (1)..(101): unsure at all Xaa locations
  Clone ID: LIB3197-022-Q1-M1-A9.pep
RPFTKKFRSAGHGRDSDKRPSLGLAPGGLAVVGRSAGGEPGPEAGRAADSGERPLAASPPGTVKAEEHQRQNINKFERRQARPPDAXAARGGEDTNDLQQK

SEQ ID NO: 87371 - protein, 128 aa, Gossypium hirsutum
  unsure (1)..(128): unsure at all Xaa locations
  Clone ID: LIB3197-022-Q1-M1-B6.pep
KGGLYVHVRIGPYICGEWNFGGFPVWLKYVPGISFRTDNEPFKKAMAKFTQKIVHMMKDENLFESQGGPIILSQIENEYEPXSQLYGPSCKAYVKWAAKIAFGLNTGVPWVMCKEYDAPDPVINTCNG

SEQ ID NO: 87372 - protein, 75 aa, Gossypium hirsutum
  Clone ID: LIB3197-022-Q1-M1-B7.pep
AQRSNDLRYVRCAHLLHIYVPCPYSKQRHFELQIPYTYDRHEFYVCKSDGKTADHVTRPKIVSFYQSESNKTRLE

SEQ ID NO: 87373 - protein, 60 aa, Gossypium hirsutum
  Clone ID: LIB3197-022-Q1-M1-C4.pep
FPSTRLRYHIKPDRFKLQLSFTRILLLHLLQLHKRVETSANLVDLTGKSTCLLRIFGSKS

SEQ ID NO: 87374 - protein, 124 aa, Gossypium hirsutum
  unsure (1)..(124): unsure at all Xaa locations
  Clone ID: LIB3197-022-Q1-M1-D11.pep
MPELPEVEAARRAIEENCLGKKIKRAIIANDSKVIEGVSSLDFESALLGKTIVSAHRKGKNLWLHLDSPPFPSFQFGMAGAIYIKGVAVTKYKRSAVKDNDEWPSKYSKFXFVELDDGXELSFT

SEQ ID NO: 87375 - protein, 51 aa, Gossypium hirsutum
  Clone ID: LIB3197-022-Q1-M1-D2.pep
DAWVAFSTGSYVVLKPSHGLAIVSYLICPAFFFVLHLTICDYYITKILFHR

SEQ ID NO: 87376 - protein, 80 aa, Gossypium hirsutum
  Clone ID: LIB3197-022-Q1-M1-D3.pep
RPVFIHFIIGELKSLASSINFGVFAPRNIGSGRLFKFIDVGVGGLVGCFGKKRKSCSGKIHQPLAFFYKATTYYSYSLLH

SEQ ID NO: 87377 - protein, 51 aa, Gossypium hirsutum
  Clone ID: LIB3197-022-Q1-M1-E1.pep
RSSLTSLYLQANQLSGTLDVLQDLSLKDLNIKNNLFNGPIPEKMLSIPSSK

SEQ ID NO: 87378 - protein, 47 aa, Gossypium hirsutum
  Clone ID: LIB3197-022-Q1-M1-E4.pep
RAACWRFFIRWVLPPQELPNNIMIKCFPTDSVIYPSQLQRPRVILMA

SEQ ID NO: 87379 - protein, 43 aa, Gossypium hirsutum
  Clone ID: LIB3197-022-Q1-M1-E6.pep
RLNYSCLKNKIQGNRLFTENNNHPPNLVRTVAKNTERKSSVSS

SEQ ID NO: 87380 - protein, 68 aa, Gossypium hirsutum
  Clone ID: LIB3197-022-Q1-M1-E7.pep
PLILFLHSNKQKHENTLKFFFFFHSFTFHFHSNPIFKRFPFLPLFYFILIPTQKPKGLLWFLASQFFV

SEQ ID NO: 87381 - protein, 122 aa, Gossypium hirsutum
  Clone ID: LIB3197-022-Q1-M1-E9.pep
GFCGLVFSFNKENIFYCFVFLFLGTDDDLPPSQPTRVPIRGNIAGNGRSIVGSASYFRMHSDMESQIHLLEQEAYCAVLRAFKAQSDAITWEKEGLITELRKELRVSDDEHRELLTKVNADD

SEQ ID NO: 87382 - protein, 79 aa, Gossypium hirsutum
  Clone ID: LIB3197-022-Q1-M1-F2.pep
IRSKWNRTVTEKILLKKWRIRNLMQFSRVFELVFSFYYLGTDLKSKVFHFCSKTKHERRSKKLGLLAEGEASNERDKGE

SEQ ID NO: 87383 - protein, 57 aa, Gossypium hirsutum
  Clone ID: LIB3197-022-Q1-M1-F8.pep
TLFLGIVTCLFSATMTRKRITGKQIFYVFYKKHVHILFSVSHWKWIKTTKKRLLRSL

SEQ ID NO: 87384 - protein, 30 aa, Gossypium hirsutum
  Clone ID: LIB3197-022-Q1-M1-G6.pep
FPWDEAVLSFEQIFWVSSMKAIVVRVKLVV

SEQ ID NO: 87385 - protein, 126 aa, Gossypium hirsutum
  Clone ID: LIB3197-022-Q1-M1-G8.pep
VPDAYASNISQYVSVKDRRLYSLKSHDYHILMQYLLPVTLRCCISKKVTSCIIELSNIMKAIYGKVLDVQELQKVQDRADLTLCNMEKIFPPSFFTIMVHLIIHLPNEAILGRPVFYRWMYPIEMC

SEQ ID NO: 87386 - protein, 45 aa, Gossypium hirsutum
  Clone ID: LIB3197-022-Q1-M1-G9.pep
KKKKEKSPHAEPTVSFLLCSFTLLVVPPQLRRRLTLPFVSDQLPT

SEQ ID NO: 87387 - protein, 56 aa, Gossypium hirsutum
  Clone ID: LIB3197-022-Q1-M1-H4.pep
PMLLRFFHFLEYTCPIHILKYKYLYPMLRFEFCRYQVRCTIFCILIGEIFLAFNTL

SEQ ID NO: 87388 - protein, 86 aa, Gossypium hirsutum
  Clone ID: LIB3197-022-Q1-M1-H6.pep
TSTFTFFIHASRVETTNQQKIQPEKIERPEISVGKSPLRIGCFFIASGFACVFLCLCGVRVCNMRVYIAFRKKKNFQSKIKGFIAR

SEQ ID NO: 87389 - protein, 75 aa, Gossypium hirsutum
  Clone ID: LIB3197-023-Q1-M1-A11.pep
SFLTSISCYTIISVYIHSVTDSDSCTTTHSCRSAQWKQIIPATWKITGFSTQHNFSHLGSYSKKCRFQKESSLRA

SEQ ID NO: 87390 - protein, 56 aa, Gossypium hirsutum
  Clone ID: LIB3197-023-Q1-M1-A2.pep
KRSHTPQASHTQLHRINYEAIGPRLLLFFFAPFSAGPSETHVRLTKHATPHKKWTL

SEQ ID NO: 87391 - protein, 86 aa, Gossypium hirsutum
  Clone ID: LIB3197-023-Q1-M1-B1.pep
MERLVAAVLAAGFLQVLLATADDHYLLSRIAFGSCANQSAPQPIWDAINKFDPQVFIWLGDNIYGDIRRPFIFLGKERDDGPWQKC

SEQ ID NO: 87392 - protein, 91 aa, Gossypium hirsutum
  Clone ID: LIB3197-023-Q1-M1-B4.pep
MDKFKNMLKPKPNPQQLLRDWQRKLRQECRNIERQIRDVQREEKGVQKAIREAAKRNDMGSAKALAKEIVMSRKAVNRLYENKAQLNSISM

SEQ ID NO: 87393 - protein, 76 aa, Gossypium hirsutum
  Clone ID: LIB3197-023-Q1-M1-C3.pep
QIGLDMSLIQFRLTLSFSTSSMANLPSFSTEEFYWLASFFWGHHHLQTTWASLYLLLFSDLFDKDSSNDLIVNRSS

SEQ ID NO: 87394 - protein, 56 aa, Gossypium hirsutum
  Clone ID: LIB3197-023-Q1-M1-C8.pep
TNPSPIKSVPKVGVESSSTRSSFAVDYTKPVQLGLDALYTRQGQWTSQPGCPRTPV

SEQ ID NO: 87395 - protein, 70 aa, Gossypium hirsutum
  unsure (1)..(70): unsure at all Xaa locations
  Clone ID: LIB3197-023-Q1-M1-D1.pep
PPVHHYEILKFPVATHYALEKNEDNNTLVFIDDIRAVIKKIKDAVXKMYYFHAKKVNTFIRPDGTKKAYV

SEQ ID NO: 87396 - protein, 61 aa, Gossypium hirsutum
  Clone ID: LIB3197-023-Q1-M1-E3.pep
HLSVSPLPIFLLIFFLLHALLKFSSFIFDTIFFFPYFKDSLALFNMSLATSQILQFSPYFL

SEQ ID NO: 87397 - protein, 99 aa, Gossypium hirsutum
  Clone ID: LIB3197-023-Q1-M1-F3.pep
MKRLRSYYMQFRHNNNQAMERKWIFPLAVGSIVSLFLLFLTTLTSFDGSPFLFFYRSSAVTGGSSPFVENQLKPIPISTLPPSPRFAYLISGSAGDGRM

SEQ ID NO: 87398 - protein, 48 aa, Gossypium hirsutum
  Clone ID: LIB3197-023-Q1-M1-G3.pep
FSFLLKLSGGDLSEGGWRSQTDLLRINIGCDGFDHSNLKYPAMEGLEG

SEQ ID NO: 87399 - protein, 67 aa, Gossypium hirsutum
  Clone ID: LIB3197-023-Q1-M1-H3.pep
TLDMTCLNCGVYPSDILPYQLQTSATGTENLALSAEIKAAVGNLRSGYSRIIRICRCVSQVIQSSGR

SEQ ID NO: 87400 - protein, 73 aa, Gossypium hirsutum
  Clone ID: LIB3197-023-Q1-M1-H9.pep
PSGGGHNFNPFFPSLGLPSLVSPLFVPLGIKVPASFKKGAGGPFIEVDLRGVYLVWQDLPGGLPTFGNKPTKR

SEQ ID NO: 87401 - protein, 107 aa, Gossypium hirsutum
  Clone ID: LIB3197-024-Q1-M1-A3.pep
APKLALIPLRRKPKLAPKPPPIPIPVPAPAPLPPVPIPPPPIPVPIPPVPALVPVPPPPPPVPAPVPPPPAPVSPPVPVPVPVPIPLPVPVPSPPTPLAPPVPPPAP

SEQ ID NO: 87402 - protein, 69 aa, Gossypium hirsutum
  Clone ID: LIB3197-024-Q1-M1-B3.pep
TYQPELGKSFPLGPLTISGANHSLRDIIRRKTLMGSLGQIGGITKASITLLRRILTGSGALYTLLPKMR

SEQ ID NO: 87403 - protein, 66 aa, Gossypium hirsutum
  Clone ID: LIB3197-024-Q1-M1-B7.pep
GRVGSKTDFKPPPFFFYSSTPLPSQTTVGFHRRIIRLHHHRGSNRIRKDPIVFGPEKQTISNTKAR

SEQ ID NO: 87404 - protein, 35 aa, Gossypium hirsutum
  Clone ID: LIB3197-024-Q1-M1-C2.pep
LTSYVPAMIGSYYFQTQVSNWKTGLTADKVEDFKH

SEQ ID NO: 87405 - protein, 82 aa, Gossypium hirsutum
  Clone ID: LIB3197-024-Q1-M1-D3.pep
EEERAKREELERILEENNRKIAEAQAKLAEEQLRIVEEQRKIHEERMKLEQERQRQQKEEQKIILGKGKSRPKLSFSLKTQD

SEQ ID NO: 87406 - protein, 70 aa, Gossypium hirsutum
  Clone ID: LIB3197-024-Q1-M1-F3.pep
MGKIMIGINGFGRIGRLVARVALQSDDIDLEAGNDPFITTEYMTYLFNHDSVHGQWKQCVLEANDSKTPL

SEQ ID NO: 87407 - protein, 56 aa, Gossypium hirsutum
  Clone ID: LIB3197-024-Q1-M1-F7.pep
LLIFYFKYWIFLLTLDVMHSVLGQQTLERCFKNVCELDIVFNYSKVVYPLITYIYR

SEQ ID NO: 87408 - protein, 139 aa, Gossypium hirsutum
  Clone ID: LIB3197-024-Q1-M1-G12.pep
PPSPIPTATGSRSAANEILTDFLEKSLQIPDLTLPECQTLRHHGLPDKVDFQSLGLREVGSVERFMRSARKYGVVAIGLHGIDAGEEVRATVKEAARVFGVLEERDTGYRRNSAGKREGDVWIDCKDQRMEWARQYIGV

SEQ ID NO: 87409 - protein, 85 aa, Gossypium hirsutum
  Clone ID: LIB3197-024-Q1-M1-G2.pep
QAGLYFLVSIGLLTSVDSIYYYLKIIKLLMTGRNQEITSHVRNYRISPLRSNNFIELSMIVCVIASTIPGISMNPIIVIAQDTLF

SEQ ID NO: 87410 - protein, 55 aa, Gossypium hirsutum
  Clone ID: LIB3197-024-Q1-M1-G3.pep
PSHPLVDAFPPPRRRFSFDGIIPFPNLNHVLAPEPNLPYRSIETDRWMFSRTSLQ

SEQ ID NO: 87411 - protein, 94 aa, Gossypium hirsutum
  Clone ID: LIB3197-024-Q1-M1-G6.pep
MVINFVCVFLVSVLVLSLGVSSEPVEDKQALLAFLSQTKHENRVQWNSSTSACDWVGVECDANRSFVYTLRLPGVGLIGSIPANTVGRLNQLRV

SEQ ID NO: 87412 - protein, 58 aa, Gossypium hirsutum
  Clone ID: LIB3197-024-Q1-M1-H10.pep
CLAIYLFVILIKILFPLLFMRMGKWVFEGEGSDHLFHSMSVPCELIHCSLLSSLVNEF

SEQ ID NO: 87413 - protein, 60 aa, Gossypium hirsutum
  Clone ID: LIB3197-025-Q1-M1-B4.pep
PPYFFRTIYVPNGFFVPSQNSLPLKKIMPGSQHENGPTKNSSSGYQMDPQFTAFLPPNSK

SEQ ID NO: 87414 - protein, 119 aa, Gossypium hirsutum
  Clone ID: LIB3197-025-Q1-M1-C8.pep
VIFQNLTLLFPVFVIDFTWGKYFQPTNPGKRLKPFSGKCFIPINPTFNFYDFASWVFPSIGFCCFFYLSFFDTVKFMYVTIDELCNVLPSTNCFLMYSFISVSPYGPECTAEEAALTRG

SEQ ID NO: 87415 - protein, 138 aa, Gossypium hirsutum
  Clone ID: LIB3197-025-Q1-M1-E5.pep
LGEDPLQIPLVLTPFWVQIYNIPTGLFSDILAVPLGNFLGNFMEHDVSSLGKGNRNFMSRIRVQIDIRRPLKRRKKISFGGKCSYVNFKDKRSYLKLTYEHFKYERLSLFCFYCGRLGHNDPFQQFPLPRFILSSQNE

SEQ ID NO: 87416 - protein, 90 aa, Gossypium hirsutum
  Clone ID: LIB3197-026-Q1-M1-B5.pep
NELLTIQILLFPCRSLCTMMMLKQRKATFLANLTIRLVFTQSKTKLLSPSKTPFPERSPVRLPGLNSPEIINRFFFLFNFFEVKVSGRVG

SEQ ID NO: 87417 - protein, 61 aa, Gossypium hirsutum
  Clone ID: LIB3197-026-Q1-M1-C4.pep
LMSTRVMQTFLHVKFLYIGLLIKLMPISHQIHLSPGEKWFHVKNNRVLVQSSYQRWQALGN

SEQ ID NO: 87418 - protein, 72 aa, Gossypium hirsutum
  Clone ID: LIB3197-026-Q1-M1-C7.pep
VSGILIGFNKGHSASDISQLVVPHKATLHQSKCVLIGANLLVLQSRRHPIRSSSQNNDRIEVMMGVFQSTAK

SEQ ID NO: 87419 - protein, 94 aa, Gossypium hirsutum
  Clone ID: LIB3197-026-Q1-M1-C8.pep
SSVTALGSLTPSLDSVSTVASVSGAWGFWNDASGTDPFGSSPTGFGAGATAKTCVVEIYSPLTSYSGFSSWNAVIPETTRPVAMESSESLVGIK

SEQ ID NO: 87420 - protein, 114 aa, Gossypium hirsutum
  Clone ID: LIB3197-026-Q1-M1-D5.pep
MDQNMNSTKEGLISGSGAIQHKAYARVGLLGNPSDVYFGKTISFSLANFWASVTLEPSPHLIINPHPIHDLVQFDSLDHLVNRLQSESYYGGVRLLMSICKLFHKHCKDNNINL

SEQ ID NO: 87421 - protein, 40 aa, Gossypium hirsutum
  Clone ID: LIB3197-026-Q1-M1-D7.pep
PRERQTQWQRERLAFYFPIQIHEWPPMPWVQKNDLKKLIF

SEQ ID NO: 87422 - protein, 51 aa, Gossypium hirsutum
  Clone ID: LIB3197-026-Q1-M1-E12.pep
NTNLNHERYNFNIKEANQHMCNKSACNIWMRTAEFDMQSCETEISSTFHNL

SEQ ID NO: 87423 - protein, 139 aa, Gossypium hirsutum
  unsure (1)..(139): unsure at all Xaa locations
  Clone ID: LIB3197-026-Q1-M1-E3.pep
GMLGLLCLIGLVLPXSRGSLLLRLIDIPFEHATRYHVWLGHLTMMLFTLHGLFYVIGWAMNGTLVKELLEWKRVGIANLPGVISLLTCLFMWVTSGYPMRKDYFELIFYTHQLYGSFGNFLALDGRDFGISIIAGAIFI

SEQ ID NO: 87424 - protein, 134 aa, Gossypium hirsutum
  Clone ID: LIB3197-026-Q1-M1-E5.pep
NRQIKSIICTVLGLWSARNLLIHKNKAQTEARVAQFILDYIQEIEWVYRMIPVNIIANENWRPPNEMNVKINFDVAFEKQNNRSCIGIVIRNSLGQALKTKIYRNEHIPTTFAAEALACVQAIQFGRRIWIPTS

SEQ ID NO: 87425 - protein, 54 aa, Gossypium hirsutum
  Clone ID: LIB3197-026-Q1-M1-F12.pep
VCLQKLKRCNVLTLRFVLYSLSDSKSCVVLIGWFSCHCCQTANLLQLYKAFLFP

SEQ ID NO: 87426 - protein, 58 aa, Gossypium hirsutum
  Clone ID: LIB3197-026-Q1-M1-F6.pep
MASRHRNPRRSKIYHGMCSYMISSPSTIHSDCLCDHTLFSHSISISVTKSLKIIKESR

SEQ ID NO: 87427 - protein, 96 aa, Gossypium hirsutum
  Clone ID: LIB3197-026-Q1-M1-G10.pep
GVGYPSPENLCGSYFLDTHYPSSIFHLDISSHHMNHRPGNCGQEQQENPQERCYYPIHVLVEQGSDQGPFSFSFFLSFAEEIFRINSCLRLRLRFS

SEQ ID NO: 87428 - protein, 79 aa, Gossypium hirsutum
  Clone ID: LIB3197-026-Q1-M1-G11.pep
MMLHYLQPAKLQSKKIVFEDVFSARDPATLEHLKELSSRRSVIEESINQSSFITEAIAREMSGGLTSHCLRDLQKLEQY

SEQ ID NO: 87429 - protein, 56 aa, Gossypium hirsutum
  Clone ID: LIB3197-026-Q1-M1-G9.pep
PRRTPTHILYSCAHEAHSTWPLLQDLKGNVYKANLPETRRALRTDGYAHTNRRALR

SEQ ID NO: 87430 - protein, 122 aa, Gossypium hirsutum
  Clone ID: LIB3197-026-Q1-M1-H12.pep
MAGGKMKKDKQKGPRAPSNHYQGGVTFHKSKGQHILKNPLLVDAIVQKAGIKPTDTILEIGPGTGNLTKKLLEAGKMVIAVELDPRMVLELQRRFQGTRFSSRLKVIQGDVLKTDLPYFDIC

SEQ ID NO: 87431 - protein, 104 aa, Gossypium hirsutum
  Clone ID: LIB3197-026-Q1-M1-H4.pep
VSPFYDPLFFHYLNGLPLKFVVSPIISNPNSVIQHNPIINSRGSAPNFSNKEAHLVALALFPSSTYPQHSSIFLCGIESTVELQKKGLLIGYLRIWVSSEFPKF

SEQ ID NO: 87432 - protein, 145 aa, Gossypium hirsutum
  unsure (1)..(145): unsure at all Xaa locations
  Clone ID: LIB3197-026-Q1-M1-H5.pep
PRVREDEVDDGKKKVRVFFGTQTGTARRLGQGVACXAKTRYDXATLKLELKXNAIHDDEYEEKMKKESLAFFFLATYGDGEPTDNADXPFQWDTYANERGERLQNMKYGRFGLGNRQYEHFNKVAKVVDEILTEQGAKRLVPVGL

SEQ ID NO: 87433 - protein, 30 aa, Gossypium hirsutum
  Clone ID: LIB3197-026-Q1-M1-H6.pep
TTVDIISVMVTGREQLVYLARLPELTKNYD

SEQ ID NO: 87434 - protein, 56 aa, Gossypium hirsutum
  unsure (1)..(56): unsure at all Xaa locations
  Clone ID: LIB3197-026-Q1-M1-H8.pep
CISIHIVQAGIQVGNAWXQLYCLEHGIQSDGQMPRDKTVGGGDESFNSFISETGAG

SEQ ID NO: 87435 - protein, 72 aa, Gossypium hirsutum
  Clone ID: LIB3197-027-Q1-M1-A2.pep
ESILFKKSKSLRPWIFGSFKNFFSWWGVFGLAFVWALVLKPKAKEPSLVDHLNLALNFYSQAFELNLKRADF

SEQ ID NO: 87436 - protein, 62 aa, Gossypium hirsutum
  unsure (1)..(62): unsure at all Xaa locations
  Clone ID: LIB3197-027-Q1-M1-B2.pep
MGVIAHGGSQYEARIYNSXMNDSNADDGYDYFTTYDEVYQSYDKMGXQENMLRRIYAYRSEK

SEQ ID NO: 87437 - protein, 61 aa, Gossypium hirsutum
  Clone ID: LIB3197-027-Q1-M1-B3.pep
HVCIIVNKHCMILFEHEPFFTCRLQLFLLIIHPIIVLPFVLEHSLFASSIILSYDMLLVKI

SEQ ID NO: 87438 - protein, 133 aa, Gossypium hirsutum
  Clone ID: LIB3197-027-Q1-M1-C1.pep
SMSLRAAPPVPPPNKTSLRTAVSLPSESPKNRQPEKRFTSDIGFNLKDTGDYREASALRDELDMLQEENENVIDKLRLEEERCQEVEAKVKELEKQVAALGEGVSLEAKLLSRKEAALRQREGWPYGCKTNLG

SEQ ID NO: 87439 - protein, 52 aa, Gossypium hirsutum
  Clone ID: LIB3197-027-Q1-M1-C4.pep
IFQASSASSLSLNFLCSSLTVSAYSISFPYFFYSTWHQCWANPNKENKVGIK

SEQ ID NO: 87440 - protein, 149 aa, Gossypium hirsutum
  unsure (1)..(149): unsure at all Xaa locations
  Clone ID: LIB3197-027-Q1-M1-D12.pep
SISISMSLHQTSFCFVCSHLTSGQKEGDELRRNSDVMEILRKTRFPRVHGMGDETSPETILEHDRIIWLGDLNYRIALSYRSAKALVEMRXWKALLENDQLRIEQRQGRVFEGWRERKIYFPPTYKYSNNSDRYAGEDRHPKKKRRTPA

SEQ ID NO: 87441 - protein, 60 aa, Gossypium hirsutum
  Clone ID: LIB3197-027-Q1-M1-E9.pep
TLLLPKSYYPSHQLGCFLVNLDAEVVIMKRLLIGPVSLPLVPLTFFLIPGNSTSIVFCLF

SEQ ID NO: 87442 - protein, 146 aa, Gossypium hirsutum
  Clone ID: LIB3197-027-Q1-M1-F2.pep
NFHRIPTANLVGESLPATPPRRRSRPRAAVVKDYASENEAQRPRGRRSKDLRKRRVIKGRWIDKEMGCKHEGKNKSGLYYNYSHSNYSGSFSGESEGGVVVITRPKGGKRSLCMDMEEGKACTDLGLELEMPGRVSLSGSAIDNTS

SEQ ID NO: 87443 - protein, 150 aa, Gossypium hirsutum
  Clone ID: LIB3197-027-Q1-M1-F4.pep
STCMKDVPSMLLQMLEEEFNFLINKKDQMNIETKIRNIRFIGELCKFKISSPGLVFSCLKTCLDDFTHHNIDVACNLLETCGRFLYRSPETTIRMANMLEILMRLKNVKNLDPRHSTLVENAYYLCKPPERSARISKVRPPLHQYITKLL

SEQ ID NO: 87444 - protein, 67 aa, Gossypium hirsutum
  Clone ID: LIB3197-027-Q1-M1-G11.pep
KTGHKIGNYLTDLHVLLIKEAFTLLDTDGYGKIVPYEFMILMRCIYGNRIQSNVIIYYLLIESHGAL

SEQ ID NO: 87445 - protein, 129 aa, Gossypium hirsutum
  unsure (1)..(129): unsure at all Xaa locations
  Clone ID: LIB3197-027-Q1-M1-G7.pep
MVTKHAAENPGKYNILGTNTIMDKMMVAGFKKQMADTGKLNTLLQRAPQCLGKFIEIAARKKRNFILDQTNVSAAAQRRKMCLFASFQRKSCXVCPKDEDYKQRTQKKAEVEGKDLPEHAVLKMKGNFT

SEQ ID NO: 87446 - protein, 70 aa, Gossypium hirsutum
  Clone ID: LIB3197-028-Q1-M1-A11.pep
VYFKVKDTERPFPPNISPGCIKRLYFQSSPTGSSIANGLVVPCSHNRVHLVPKPFLSSPRRAPHVYLEPS

SEQ ID NO: 87447 - protein, 58 aa, Gossypium hirsutum
  unsure (1)..(58): unsure at all Xaa locations
  Clone ID: LIB3197-028-Q1-M1-B1.pep
METGKKISEFLSXIECLNREFSFFIRLDLYDIMNAAIMSLYNKDXIMFIYLESSFIQL

SEQ ID NO: 87448 - protein, 84 aa, Gossypium hirsutum
  Clone ID: LIB3197-028-Q1-M1-B11.pep
MATVARVIRCELLSTKPGANTRREQGDQVQVQRVKAGEPENGKIVLQPRLCTLRSYGSDRVGVMKTRREENDDVSPFFETLSEY

SEQ ID NO: 87449 - protein, 76 aa, Gossypium hirsutum
  Clone ID: LIB3197-028-Q1-M1-B2.pep
MTDLMSVIKDTETIILTEIGKGKQVRKVAFENLERTANNKVRIGTYQQLFYLKQVIFGKEDAGNNFAKGRNTIGKE

SEQ ID NO: 87450 - protein, 64 aa, Gossypium hirsutum
  Clone ID: LIB3197-028-Q1-M1-B6.pep
YCDTALNYNFDTPDNKPDLAWEFSEANKHTVTEIVNHDPYNYKHDAAITEIDVAQPPDVRWLTM

SEQ ID NO: 87451 - protein, 79 aa, Gossypium hirsutum
  Clone ID: LIB3197-028-Q1-M1-B7.pep
VSVISIKKEREEYIRKHSYDMMNAAIMSVDNKDGTMFIDIERTWIQLKAHKSMRGEWVLWIHPIGKQEKAQWMKREKEN

SEQ ID NO: 87452 - protein, 48 aa, Gossypium hirsutum
  Clone ID: LIB3197-028-Q1-M1-B9.pep
NTCPYTVRIKYSFIIKTNYNWINIYKESKLSDYPESWYINRAPKLLNS

SEQ ID NO: 87453 - protein, 78 aa, Gossypium hirsutum
  Clone ID: LIB3197-028-Q1-M1-C2.pep
MSQNGAPGMQEESLQGSWVELHFSNNGNGSSVPASVSIYNGDMEKILLDAQHESGRSSSQSSHCDSPPRSQTPQDTNR

SEQ ID NO: 87454 - protein, 108 aa, Gossypium hirsutum
  Clone ID: LIB3197-028-Q1-M1-D7.pep
MCLSLFLQKHGFQELSNDDYFSKNNEFATWLKEEKRVFFSDLSSESARDLFADFVKDWNNQKLGSQYYERLASGPRTAHNWENQLVGRRKNLFPLGPLLFFSWLALLY

SEQ ID NO: 87455 - protein, 122 aa, Gossypium hirsutum
  Clone ID: LIB3197-028-Q1-M1-E1.pep
EVSEWEISWEDLQIGERIGIGSYGEVYRADWNGTEVAVKKFLDQDFSGDALVQFKCEVEIMLRLRHPNVVLFMGAVTHSPHFSILTEFLPRGSMYKLLHRPNQQLDEKRRMRMALDVAKGMN

SEQ ID NO: 87456 - protein, 53 aa, Gossypium hirsutum
  Clone ID: LIB3197-028-Q1-M1-E12.pep
QFSFLSLNNIVSISFGRQGISGVLTRLIDNIIGKDSASHSGGPFLHSKLLLRR

SEQ ID NO: 87457 - protein, 76 aa, Gossypium hirsutum
  Clone ID: LIB3197-028-Q1-M1-E2.pep
IALYSSSHNQPISPFLFETKRNLHWVAHVLRESKEESIGKFHLGLLVFHVIKKKRKKTPLPTPVLLVSYFVFLIYY

SEQ ID NO: 87458 - protein, 54 aa, Gossypium hirsutum
  Clone ID: LIB3197-028-Q1-M1-F11.pep
MLACPALSDMVLCKVDRRIYLTSNMVRISYTLEVEKARTKTDSKVLRAFTDLKT

SEQ ID NO: 87459 - protein, 72 aa, Gossypium hirsutum
  unsure (1)..(72): unsure at all Xaa locations
  Clone ID: LIB3197-028-Q1-M1-F2.pep
MADGEGSQPLMWDGGTGMVKAGFAVDNAPRAVFPSIVGPPRHTGVMVGMAHDRCLCXDKAQSKIGILTLKYL

SEQ ID NO: 87460 - protein, 55 aa, Gossypium hirsutum
  Clone ID: LIB3197-028-Q1-M1-G9.pep
ALSGIATAISDETSCGYDTVNIVQGTGVNCCTSYSSETMRLILRQTYRDHNQTVD

SEQ ID NO: 87461 - protein, 80 aa, Gossypium hirsutum
  unsure (1)..(80): unsure at all Xaa locations
  Clone ID: LIB3197-028-Q1-M1-H10.pep
NKYNQXRRIRCQKGLAHIMSFVFFLSSFYFTRTCHIRCSLYRILPSHEIINSMVLDSSITLLSINFYIGLRLICSHPKLM

SEQ ID NO: 87462 - protein, 84 aa, Gossypium hirsutum
  Clone ID: LIB3197-028-Q1-M1-H3.pep
KWTAGGPGRNSGLDQGFGQRVRKLLLTFLTCLLAYRLIYIYITSEVVCWRIWETFVLRLRIIKDRWALLLRRDLYNPCQGLLGY

SEQ ID NO: 87463 - protein, 37 aa, Gossypium hirsutum
  Clone ID: LIB3197-028-Q1-M1-H9.pep
RDVTLFKITLFKWHSCSCKNSVLWNDINKYSYMRIKA

SEQ ID NO: 87464 - protein, 42 aa, Gossypium hirsutum
  Clone ID: LIB3197-029-Q1-M1-A9.pep
LSKSTSVWLWPINRCRWHLQLHDHQLCCVQLDEEIQVICDSS

SEQ ID NO: 87465 - protein, 137 aa, Gossypium hirsutum
  unsure (1)..(137): unsure at all Xaa locations
  Clone ID: LIB3197-029-Q1-M1-B1.pep
ITEDRLQLLVNVTGAFRPGVLTALVGVSGAGKTTLMDVLAGRKTGGLIEGSIHISGYPKRQETFARISGYCEQNDIHSPCLTVLESLLFSAWLRLPSDVGLETXRAFVEEVMELVELTPLSGALIGLPXVDGLXTEQ

SEQ ID NO: 87466 - protein, 85 aa, Gossypium hirsutum
  unsure (1)..(85): unsure at all Xaa locations
  Clone ID: LIB3197-029-Q1-M1-B2.pep
AYKLKSQGLHVTGYESDXIAGGKLRSVSRDGLIWDEGANTMTESEIEVRSLFDDLGIQDKQQVPIAQNKRDIMKNGVPVLIPLNP

SEQ ID NO: 87467 - protein, 110 aa, Gossypium hirsutum
  Clone ID: LIB3197-029-Q1-M1-B7.pep
GKALKPIGDALQQVYIGIEGLERSLGFDPNDPVVPFFLLTGTSATLWVFYRVWAYGGYYGDLSPQLTLELLSGKENVLLIDVRPEVLREKDGIPDLRRAARSRYASVSFT

SEQ ID NO: 87468 - protein, 49 aa, Gossypium hirsutum
  Clone ID: LIB3197-029-Q1-M1-C2.pep
SSSSAYSSSLDQTLSCLIPSPPTPTFYTIVPDTQTGCFTCFKQHLAGYR

SEQ ID NO: 87469 - protein, 105 aa, Gossypium hirsutum
  Clone ID: LIB3197-029-Q1-M1-C3.pep
MVWFWVLVLFTANLKLGLTHIHGGEQPLAKINILQTTVALHESASISAEPVLLGLKGEDTEWITVNFVNPKPSLDDWVGVFSPAKFDPSACPPVNERKKQLPYIC

SEQ ID NO: 87470 - protein, 90 aa, Gossypium hirsutum
  unsure (1)..(90): unsure at all Xaa locations
  Clone ID: LIB3197-029-Q1-M1-D1.pep
PTRPDEISKFGEVYDKFCKEKIAHLQALKGYEQNGFGKEAIELFYLMQDLGVKPDSSTFVSLLSACAXVGAIGLSCWVHEYIARNWFDLN

SEQ ID NO: 87471 - protein, 138 aa, Gossypium hirsutum
  Clone ID: LIB3197-029-Q1-M1-D12.pep
MAIITEEVEPESPKTRVDKKTPPKPTFNPNPVSSKSDPNSQTQNPFAFWFYFTLTIALITFLFVSFSSLSPQDPKSWFLSLPNSLRQHYSNGRIIKVQTSPNQSPIEVFVSENGQFSSSENVLVVHGLGLSSYSYREM

SEQ ID NO: 87472 - protein, 134 aa, Gossypium hirsutum
  Clone ID: LIB3197-029-Q1-M1-E5.pep
MVHSAYDSFQLITDCPTKIDAIESYGWKLLLGCSDGSLRIYVSDSSGADRSPPSDPHALRKEPYALERTVAGFSKKPLISMEVLESRELLLSLSESIAFHRLPNLETIAVITKAKGANVYSWDDRRGFLCFARQ

SEQ ID NO: 87473 - protein, 63 aa, Gossypium hirsutum
  unsure (1)..(63): unsure at all Xaa locations
  Clone ID: LIB3197-029-Q1-M1-E7.pep
MANNVGIIAMEIYIXRATGVKQETTQAHDGAXLGKYTIRLGQDCIVFRTKLENVISMSLTLVT

SEQ ID NO: 87474 - protein, 134 aa, Gossypium hirsutum
  Clone ID: LIB3197-029-Q1-M1-E8.pep
MGAYCDENLSFSPACNLSPSHDLRLSKHVHDNVHGNIYLDPLSLKFIDTEQFQRLRELKQLGLAHLVYPGAVHSRFEHSLGVYWLAGEAMQKLKTYQGLELGIDRFDVQAVKVAGLLHDVGHGPFNHLVEREFF

SEQ ID NO: 87475 - protein, 53 aa, Gossypium hirsutum
  unsure (1)..(53): unsure at all Xaa locations
  Clone ID: LIB3197-029-Q1-M1-E9.pep
LVLLFKKINAYFRKWHARKPCYIVAGAMFLHIFLYFPFQKRDVADGYLTXHIF

SEQ ID NO: 87476 - protein, 60 aa, Gossypium hirsutum
  Clone ID: LIB3197-029-Q1-M1-F11.pep
YDVLANSDPVYKLFLSLKTDGLYYMLPFICQIGFGPFFFHFINRANKLGWTLFGWVCFFF

SEQ ID NO: 87477 - protein, 138 aa, Gossypium hirsutum
  Clone ID: LIB3197-029-Q1-M1-F4.pep
LLPSCLFILTMTINNSVGIQTSGDAKHFAISAKIPEFTNKNRTLVIQYSIRFEQDIECGGGYMKLLSGFVNQKKFGGDTPYSLMFGPDICGTQTKKLHVILSYQGQNYPIKKELECETDKLTHFYTFILRPDASYSIL

SEQ ID NO: 87478 - protein, 107 aa, Gossypium hirsutum
  unsure (1)..(107): unsure at all Xaa locations
  Clone ID: LIB3197-029-Q1-M1-F7.pep
PRVRVIALDHLKNYIYIEADKEAHVREAIKGIRNIFGAKIMLVPIREMTDVLSVESKAIDLSRDTWVRMKIGTYKGDLAQVVDVDNVRQKVTVKLIPXDDLQVLANK

SEQ ID NO: 87479 - protein, 53 aa, Gossypium hirsutum
  Clone ID: LIB3197-029-Q1-M1-G2.pep
FLKWIVCFFSFFFFSVGVLGNRNWESLFKTFKQNQSNSKHERKTKRSLRHQTT

SEQ ID NO: 87480 - protein, 152 aa, Gossypium hirsutum
  Clone ID: LIB3197-029-Q1-M1-G3.pep
SASRPPPTKTDGSVTLDNGIIRVKLDPTGRLTSLVLVASGREAIAEGAVGNQFVLFDDVPLYWDAWDVMDYHLETRKPVLGQAGTLAVGTEGGLRGSAWFLLQISPNSRLNQEVVLDVGCPYVRFHTEVHWHEAHKFLKVEFPARVRSSQAT

SEQ ID NO: 87481 - protein, 90 aa, Gossypium hirsutum
  unsure (1)..(90): unsure at all Xaa locations
  Clone ID: LIB3197-030-Q1-M1-A11.pep
MLTWMNLKSANLKQCMLGYIGQGVLQDRNAXWSYSALNNGIQTDGHMPXRHDWXGRDYAYNTFFSETGAGKHVRRADCVDLEPTDIDEVR

SEQ ID NO: 87482 - protein, 43 aa, Gossypium hirsutum
  Clone ID: LIB3197-030-Q1-M1-A2.pep
QNVRRPKLQRLNKNDNERSSAWNFYFVKIYCLFHRNFVCYRWI

SEQ ID NO: 87483 - protein, 137 aa, Gossypium hirsutum
  Clone ID: LIB3197-030-Q1-M1-A4.pep
LDSFRNGLTRRLTPSGIADFSPAVSPSGVWTAVASYGKEGWGGEVEELSTDIYVFLTRDGTHRVKVVEHGGWPCWVDDSTLYFHRRSEDQWISVYKATFPKDKPVSTELVTIQRVTPPGLHAFTPATSPGNHKFVAV

SEQ ID NO: 87484 - protein, 65 aa, Gossypium hirsutum
  Clone ID: LIB3197-030-Q1-M1-A5.pep
LQCQLLPTCHPLLLNERLRKIDKFLNLKRAGKSFNAEVRNRKDYRNPDFLLHAVRYQDIDQIGSC

SEQ ID NO: 87485 - protein, 50 aa, Gossypium hirsutum
  Clone ID: LIB3197-030-Q1-M1-B4.pep
MRSKHNIGGVSYGGKCEKMPISKLKVKNSSLGLYRLETRVYDGIYLFRGH

SEQ ID NO: 87486 - protein, 118 aa, Gossypium hirsutum
  Clone ID: LIB3197-030-Q1-M1-C12.pep
MNLYLQDSKLTNLGKIMEIHGPKLLGTSYKDPIASFNLFREYTVRHPEVYWSIILKELSVTFHEPPKCILDTTDKSRPGGTWLPGSVLNIAECCLLPSIHPRKRDDSCAIVWRDEGDD

SEQ ID NO: 87487 - protein, 69 aa, Gossypium hirsutum
  Clone ID: LIB3197-030-Q1-M1-C2.pep
VYAWFPKWTNALSCPSTFSTTVQCCMGIVLSVSLISKISFLDILRMSVQSPSKVGYWDYEWFDPYLSMN

SEQ ID NO: 87488 - protein, 78 aa, Gossypium hirsutum
  unsure (1)..(78): unsure at all Xaa locations
  Clone ID: LIB3197-030-Q1-M1-C7.pep
ATHQAEGQPKEIDNAAIIATYLADLIEEVLLTSSEAALXAVPSPXLLKLTCFXDRPKSHYHTRRLFGGSHMLTKPRNS

SEQ ID NO: 87489 - protein, 85 aa, Gossypium hirsutum
  unsure (1)..(85): unsure at all Xaa locations
  Clone ID: LIB3197-030-Q1-M1-E12.pep
MPSLNLVPIGNFDSEYTLAIFSETTYSVAXLIGKPDAYAMIVLKGFNPMLYGGTDHSPAYGELLSIGGLSPYVKMNLITAICQIS

SEQ ID NO: 87490 - protein, 132 aa, Gossypium hirsutum
  Clone ID: LIB3197-030-Q1-M1-E5.pep
SEKDLTELGECPYDQGGYFIINGSEKVLIAQEKMSTNHVYVFKKRQPNKYAYVAEVRSMAETQNRPPSTMFVRMLSRTSAKGGSSGQYIRATLPYIRTEIPIIIVFRALGFVADKDILKHICYDFSDTQMME

SEQ ID NO: 87491 - protein, 85 aa, Gossypium hirsutum
  unsure (1)..(85): unsure at all Xaa locations
  Clone ID: LIB3197-030-Q1-M1-F4.pep
LICTSHXFXXPNKQRLNRPKLILLSTTNREQTNIPTLFCCHYRIFNKLNYIKKKRKEKNPTIQSVPHLKYSHTLTTLLVCTTHTA

SEQ ID NO: 87492 - protein, 81 aa, Gossypium hirsutum
  Clone ID: LIB3197-030-Q1-M1-H12.pep
MTINALSAFLTCAIKKLTFSKKKLVPLFMSPKKENLDYLVNLLKDGKLKTVIDSKYPLSKAEEAWAKSIDGHATGKIIVEP

SEQ ID NO: 87493 - protein, 45 aa, Gossypium hirsutum
  Clone ID: LIB3197-031-Q1-M1-A11.pep
CQRTHSIGFCNQVSMLVLVSFPNPLLLKVYKSCLSSQAVISVKTI

SEQ ID NO: 87494 - protein, 67 aa, Gossypium hirsutum
  unsure (1)..(67): unsure at all Xaa locations
  Clone ID: LIB3197-031-Q1-M1-A12.pep
MAASANPTGNHQEGSSNQNVTPSPPPTANGLAVNSNNSGGNTSTAXAAVSADTQSALKHNPGISLDW

SEQ ID NO: 87495 - protein, 78 aa, Gossypium hirsutum
  Clone ID: LIB3197-031-Q1-M1-B10.pep
MPSLTSPGKILRLELENFKSYKGLQTIGPFSDFTAIIGPNGAGKSNLMDAISFVLGVRTGQLRGGQLRDLIYAFDDRE

SEQ ID NO: 87496 - protein, 68 aa, Gossypium hirsutum
  Clone ID: LIB3197-031-Q1-M1-B4.pep
ILITAILFLWTVHYRRGLALISDNKDLIFNVHPVLMVIGLVLLNGEAILAYKTVSWTKIFKKLVHLTD

SEQ ID NO: 87497 - protein, 91 aa, Gossypium hirsutum
  Clone ID: LIB3197-031-Q1-M1-B5.pep
PGSSSFFAREVQIAPQVATDITLFIGPTQSLSPSESLNTTTSLFMGQTPLRVFAAVSTLAAICVMATSSQTIVLFGFTIRAHYSYSSATRF

SEQ ID NO: 87498 - protein, 152 aa, Gossypium hirsutum
  Clone ID: LIB3197-031-Q1-M1-C4.pep
VSSKYLSDSLCADRFIIICPSLPLFAYLSEGLTPSKHREGQSQKIMEDLITKFQNEIFFFPLLFPKIDSPHFFFPNPFSPTPIPFIFPPNFPKSAALLLFFPNHFSPTPIPFVTSFLRPPNLRLISPLPTLLSPFLFPRLSVWRIMVCVQRV

SEQ ID NO: 87499 - protein, 54 aa, Gossypium hirsutum
  Clone ID: LIB3197-031-Q1-M1-C8.pep
ANVSDLIFIFAYLFHTRMLHVSLFPFQINIFIQPITLGIVLKSPCNILINISSH

SEQ ID NO: 87500 - protein, 115 aa, Gossypium hirsutum
  Clone ID: LIB3197-031-Q1-M1-E10.pep
MSTGVQHQERVPMNLKKQLALAVRNIQWSYAIFWSISTRQPAVLEWGDGYYNGDIKTRKTVQAVELNTDQLSLQRSEQLRQLYESLSAGESSPQAKRPSAALSPEDLTDTEWYYL

SEQ ID NO: 87501 - protein, 86 aa, Gossypium hirsutum
  unsure (1)..(86): unsure at all Xaa locations
  Clone ID: LIB3197-031-Q1-M1-F1.pep
LDAKEHYYSSTLRYAKVDLYPGLCAFSPSLEGCFLALPATTAKRAVLVYNVMELQLHCXDAHRSPLAAIALSSNGKYIATASEQGT

SEQ ID NO: 87502 - protein, 139 aa, Gossypium hirsutum
  unsure (1)..(139): unsure at all Xaa locations
  Clone ID: LIB3197-031-Q1-M1-G3.pep
LTLGLFFRKKWRGIIQLSWAILLLGVGIATVTDMQLNILGSILSLLXAVFTTXIAQIMTNTIQKKFKVSSTQLLYQSCPYQALTLFIIGPFLDGLLTNKNVFAFKYTPQVLFFIVLSCLISVSVNFSTFLVIGKTSPVT

SEQ ID NO: 87503 - protein, 90 aa, Gossypium hirsutum
  unsure (1)..(90): unsure at all Xaa locations
  Clone ID: LIB3197-031-Q1-M1-G4.pep
PVLVQNSLLQLFVKLWKSVFSIFSQPSPAFDLCFATSLILAHSIFILWFPISSLILSTISTPFTKWFDPHPQLFIQSPHPPXSIXXALLT

SEQ ID NO: 87504 - protein, 131 aa, Gossypium hirsutum
  Clone ID: LIB3197-031-Q1-M1-G5.pep
FISGNHITYSAGCDALRQVNLTGLSHGLSFQETKDLWVQADADGNGVVDYEEFKRIWDATWLQHMDEDCSLEDLNEGIAEDEAIGFAVKKAVLFPHEVEKGIWPENYSLSDHARLTAVFSPVRLRCSKQSL

SEQ ID NO: 87505 - protein, 50 aa, Gossypium hirsutum
  Clone ID: LIB3197-031-Q1-M1-H5.pep
CLGSLLLERLCVDYCKKSKVGFTVFPLPQVFTFVGEPYNSVLLTYFLFEH

SEQ ID NO: 87506 - protein, 139 aa, Gossypium hirsutum
  unsure (1)..(139): unsure at all Xaa locations
  Clone ID: LIB3197-031-Q1-M1-H8.pep
MAAAFRKAAKSRQREHRERSQPGFRKHLGLLEKKKDYKLRADDYRKKQEYLRALRKKALEKNPDEFYYKMTRVKLQDGVHIIKETKEEVTPEQLKLMRTQDIKYIEMKRVAEAXKFXRLKSELHLLDFQGKQQNKHVFF

SEQ ID NO: 87507 - protein, 76 aa, Gossypium hirsutum
  Clone ID: LIB3197-031-Q1-M1-H9.pep
SLAFCVCFKDLSNHLDIGLYPLRYMKSVSIPVIIVPYFKKVFRILKICLDLFYYIFLYKHRISLDHFKLIHYLYIH

SEQ ID NO: 87508 - protein, 55 aa, Gossypium hirsutum
  Clone ID: LIB3197-033-Q1-M1-A2.pep
LLRAAGTEFPVSGSTHAIVKFFLLFLHGTLLLLHSAGSTHISLKCPFHFLNVSQS

SEQ ID NO: 87509 - protein, 73 aa, Gossypium hirsutum
  Clone ID: LIB3197-033-Q1-M1-A3.pep
MSKGPGLFINIGLRAKHLLTKDYTSDQKLTVYTYTVAGVDITSTIVIKRGLCTDDGSFLYLYHNTQYDVIDNT

SEQ ID NO: 87510 - protein, 55 aa, Gossypium hirsutum
  Clone ID: LIB3197-033-Q1-M1-B1.pep
SPTGHKLRLASTGRGAIHSFAIGVCVREHLDKKKRVRVGVGGNCDSVPARAGASA

SEQ ID NO: 87511 - protein, 64 aa, Gossypium hirsutum
  Clone ID: LIB3197-033-Q1-M1-B12.pep
RLEFMKTTLCQIHSLLICSASLRSRVLFGIVFNVCHLHFFPQKISRCTFHIFTAKLHLNGGLRV

SEQ ID NO: 87512 - protein, 47 aa, Gossypium hirsutum
  Clone ID: LIB3197-033-Q1-M1-B3.pep
VSSSSFFFFVRWFVLSPNFHGLNVQSLKKTKFHFGNVNSKFGQNFVL

SEQ ID NO: 87513 - protein, 118 aa, Gossypium hirsutum
  Clone ID: LIB3197-033-Q1-M1-C11.pep
FQVHLIISFDQSLLIRIFASRCVCFPVIFHFSSINQPILRFNFVSFFHVTCSDIIFNLAIHFHCMMIFLLTFCLYYSFGFTGSSCVTEYAGRVFKFTLFMSFTTRETSFSSDLSIRTA

SEQ ID NO: 87514 - protein, 134 aa, Gossypium hirsutum
  Clone ID: LIB3197-033-Q1-M1-C3.pep
GRVGFLLCRVKPQNSATPASLSPSLPPSLSLSATMTATMGPPPPSNPNPSTEPESIAQEESEPRTAKTTMGPPPPLPINPNPATEPESIALEESELIKAKTTMGPPPPLPINPNLANPLDEEEPSNSKSEPKST

SEQ ID NO: 87515 - protein, 152 aa, Gossypium hirsutum
  unsure (1)..(152): unsure at all Xaa locations
  Clone ID: LIB3197-033-Q1-M1-C5.pep
RTRGVKEAVSKFGGIVDWKAHRMQTLERRKLVEQEFVKVQEEMPEYKKRSEDAEEAKMKVLKELDSTKRLIEELKLNLERAXTEENXAKQDSELAKLXVEEMEQGIADEASVAAKTQLEVAKARHAAAVSELKNRKEELETLKKEYASLMND

SEQ ID NO: 87516 - protein, 61 aa, Gossypium hirsutum
  Clone ID: LIB3197-033-Q1-M1-C7.pep
EDGYQEAIGAADVMRLDPLERAEIAADLLEVKWSTNIISNRSNTNGSGLPSTNDALDNKSY

SEQ ID NO: 87517 - protein, 47 aa, Gossypium hirsutum
  Clone ID: LIB3197-033-Q1-M1-D10.pep
LTVILFWSGLNCIYTLGIVPQLKKNFFFPQSFMYIRALKQKRDQLNK

SEQ ID NO: 87518 - protein, 84 aa, Gossypium hirsutum
  Clone ID: LIB3197-033-Q1-M1-D12.pep
EVRDEVAAMKPPAFNRFQHTFSHIFAGGYAAGYYSYKWAELLSADAWSAFEEEGVLNPETGRRYRREILEAGGARDAIDNFKAF

SEQ ID NO: 87519 - protein, 83 aa, Gossypium hirsutum
  unsure (1)..(83): unsure at all Xaa locations
  Clone ID: LIB3197-033-Q1-M1-D7.pep
FGFSKALCDEFSNTSGVSNWTCTCSSGNQSYILKSNCSRSCDCNPVESSGDRWTCVCATNGFPEVAVDNHDTTCXTACNCTAG

SEQ ID NO: 87520 - protein, 66 aa, Gossypium hirsutum
  Clone ID: LIB3197-033-Q1-M1-D9.pep
MELFYFVVFGALGAGVAALELSQNSQDRINTFSAFNFFKNKYLVAYSLMIAGDSLQGPHVYYLYRT

SEQ ID NO: 87521 - protein, 35 aa, Gossypium hirsutum
  Clone ID: LIB3197-033-Q1-M1-E11.pep
NHRQCVSNNDVVETGGLGRKLNSGTGTRRRSSFPY

SEQ ID NO: 87522 - protein, 91 aa, Gossypium hirsutum
  Clone ID: LIB3197-033-Q1-M1-F1.pep
NPTRRKKEKTMAPPIIRSLIAFSLNKSCRSQKPISGYSISSIFFSSSPTQESRASLPLADHLVEKHSFSPELAVKTASSLTYVKDPRSVIL

SEQ ID NO: 87523 - protein, 56 aa, Gossypium hirsutum
  Clone ID: LIB3197-033-Q1-M1-F11.pep
MGKVSAIIYIAVALLILFLISHSPKKHPNHSRHRRLKLRSSFSFSNPTHHEPVAFD

SEQ ID NO: 87524 - protein, 102 aa, Gossypium hirsutum
  unsure (1)..(102): unsure at all Xaa locations
  Clone ID: LIB3197-033-Q1-M1-F12.pep
FFPKYIYSLDLRLALLXTNMFIMNEQHLNPCTTYXNFEAQKEVSNCHYSMLLVLTSTXHPPPPGFSYFPYHTFIDQTVQLPPLVMLKLFYRIQKWHTACILS

SEQ ID NO: 87525 - protein, 52 aa, Gossypium hirsutum
  Clone ID: LIB3197-033-Q1-M1-F2.pep
MFKPKAVILCLLSSKKINQGCLFFFQVVHLSQSGRYLQIKLKDWLWEIVTWT

SEQ ID NO: 87526 - protein, 143 aa, Gossypium hirsutum
  Clone ID: LIB3197-033-Q1-M1-F8.pep
LLKTCGSMLEAWQGYIAMEIALGHINEARAIYKRCYSKRFSGTGSEDICHAWLRFEREFGTLDDLDHAVQKVMPRLEELQLFRLEQESKSLTEVTDKRERPLKKTASEKRKSGSITIDEQSPAKRQKSTQNQKKLHEKENTRG

SEQ ID NO: 87527 - protein, 119 aa, Gossypium hirsutum
  Clone ID: LIB3197-033-Q1-M1-F9.pep
TQIQKHTLKIWVYLESLNQHYLQSVFCSFPMANPHKSRFFLFFFFICHFIFVSTPFPTVLANSKHEFNDPHEVLLHKLEELVKNLSEVVSRLETKVLKESTKIDDGVGSKDETSLIKYD

SEQ ID NO: 87528 - protein, 37 aa, Gossypium hirsutum
  Clone ID: LIB3197-033-Q1-M1-G2.pep
WWGCNQGCNGNGQELGIPPAAVGKQGMACLALVKTNH

SEQ ID NO: 87529 - protein, 100 aa, Gossypium hirsutum
  Clone ID: LIB3197-033-Q1-M1-H11.pep
MQKREQGKSGGSGGGNAAPPPKRGRPFGSTAASVASASAADSVAPSTLLGPSLQIHNSFSEQNNKRIVLALQSGLKSELTWALNTLTLLSFKEKDDMRKD

SEQ ID NO: 87530 - protein, 48 aa, Gossypium hirsutum
  unsure (1)..(48): unsure at all Xaa locations
  Clone ID: LIB3197-033-Q1-M1-H4.pep
KYGKSEXIPFSQFSHQSYVFNCKLCLLSNYQQFNQQLSQAIIIILELG

SEQ ID NO: 87531 - protein, 142 aa, Gossypium hirsutum
  unsure (1)..(142): unsure at all Xaa locations
  Clone ID: LIB3197-033-Q1-M1-H9.pep
TVAPLASTEISSVGVNLKQASHEALQVDAIESEKITQSKAELDDWEDAADISAPNMETSDTDEQAHGGLASHEEDGSGNIKKKYSRDFLLKFAGQYTDLPQGFEIASDIAAALMASNVNASHAXDHDSYPSPGRKLDRQSNG

SEQ ID NO: 87532 - protein, 47 aa, Gossypium hirsutum
  Clone ID: LIB3197-034-Q1-M1-A1.pep
SLFFDCASVNLKALNRKIWRLFLSRQEFFSLQYLSSLLGKSSMNLML

SEQ ID NO: 87533 - protein, 47 aa, Gossypium hirsutum
  Clone ID: LIB3197-034-Q1-M1-A4.pep
FVQKSRLVPSRISRVLKPGRQIKTVSNPKRKKLTILLYRRAPQTIVF

SEQ ID NO: 87534 - protein, 90 aa, Gossypium hirsutum
  Clone ID: LIB3197-034-Q1-M1-B10.pep
ARESKNPKNRNGRENHNIVSLNSFGPWVDMNGRRPQKRNLRFPSSSFSGAATIGPSPCVCASGCHSPRTFAHVAPARRKTEPYLPRSDRS

SEQ ID NO: 87535 - protein, 50 aa, Gossypium hirsutum
  Clone ID: LIB3197-034-Q1-M1-B9.pep
MSRYRGPRFKKIRRLGALPGLTSKRPRAGSDLRNQSRPGKKSQYRIRLEE

SEQ ID NO: 87536 - protein, 150 aa, Gossypium hirsutum
  unsure (1)..(150): unsure at all Xaa locations
  Clone ID: LIB3197-034-Q1-M1-C10.pep
LVRSLEAQGVPSKQAEAITSAITEVLNDSLENVSQSFVSKAEMQKSEMLQEANLSXKFKSEVKSSQEHHFSMLQRETEKLRGDIEKMRSELRYEIDKVTAGQRLDLNLERGRIRDELANQNAETTNLTNKLDREIHALRAQLEAAKYDVI

SEQ ID NO: 87537 - protein, 35 aa, Gossypium hirsutum
  Clone ID: LIB3197-034-Q1-M1-D3.pep
MGFSITPASVDPGSLKTWLKIPATWPNETVIFGPV

SEQ ID NO: 87538 - protein, 147 aa, Gossypium hirsutum
  Clone ID: LIB3197-034-Q1-M1-D5.pep
FPEAFEPVRVPFQKGLGQRFQQPPGTGIDLGFFELDDLSKPSPGEDVFPLVISAETCMLPHSSDEHVGDPTQSTSAHMQITQAILEKNGNSFQAKVIRQILWVDGVRYELREIYGIGSSAAAEGFDDSDPGKECVICMTEPKDTAVL

SEQ ID NO: 87539 - protein, 47 aa, Gossypium hirsutum
  Clone ID: LIB3197-034-Q1-M1-E1.pep
TFYPSALSSSIPQNESNLRWIRSENKPRNKSSESDELERNNEELVRV

SEQ ID NO: 87540 - protein, 74 aa, Gossypium hirsutum
  Clone ID: LIB3197-034-Q1-M1-E11.pep
LSFLYPIISSFLKTNHQYLNSQGFFVSFYNFKFQLQNLLFIFIFNPRTFILISLVSLILLTNFFFLFPLTFYTI

SEQ ID NO: 87541 - protein, 43 aa, Gossypium hirsutum
  Clone ID: LIB3197-034-Q1-M1-E12.pep
DSSQKLIIQFLMKIGSVQFKQIYVNKEVDFFLLMEDKKERLNY

SEQ ID NO: 87542 - protein, 44 aa, Gossypium hirsutum
  Clone ID: LIB3197-034-Q1-M1-E3.pep
PKKRESKGPKCQLPLNGSWLNKEGAGGILDSISQWQPKNQRKTS

SEQ ID NO: 87543 - protein, 46 aa, Gossypium hirsutum
  Clone ID: LIB3197-034-Q1-M1-E5.pep
FLSDYLSLKISTCLCRSFLLFFFWYFSFSKTKIGIYCFLFGYLVTN

SEQ ID NO: 87544 - protein, 72 aa, Gossypium hirsutum
  Clone ID: LIB3197-034-Q1-M1-F5.pep
FFSPKLDAENQEGFIKNIGGATNFFLSKFNDLTFFVGESMHDDGCLVFAYYKDCAVDPTFLYFAYTLNDVKF

SEQ ID NO: 87545 - protein, 75 aa, Gossypium hirsutum
  Clone ID: LIB3197-034-Q1-M1-F7.pep
FSLSSLPRSSGPPMNTSMGLVLVPLMPSSCHLRPPIFQPAPLPPLSNTFSISERFLTAVGYCEATEGRQESQSLV

SEQ ID NO: 87546 - protein, 66 aa, Gossypium hirsutum
  Clone ID: LIB3197-034-Q1-M1-G4.pep
QVPETRGNPDLLYFILEISNWGVTLTHPYYTYEDELCFKLMQQSQTFGCRGGLLGFPELVSRIVGQ

SEQ ID NO: 87547 - protein, 134 aa, Gossypium hirsutum
  Clone ID: LIB3197-034-Q1-M1-G8.pep
TPCAPGSYEVSPENAPCKSPNLHICMPCSIGCPAEMYQKSGCTLKSDRVCDYNCSSCNSVECVSNCSSNSEATNGSKNERFWSLQLPIIVAEIAFAVLLLIIVSLTAVLYVRYRLQNCRCKAKESKSKKANEIA

SEQ ID NO: 87548 - protein, 54 aa, Gossypium hirsutum
  Clone ID: LIB3197-034-Q1-M1-H3.pep
LEEKICFPNKDGEATIHAGWFDEQAFVCSFLFQHQGRIMNLPRPCGEKNLLSTS

SEQ ID NO: 87549 - protein, 78 aa, Gossypium hirsutum
  unsure (1)..(78): unsure at all Xaa locations
  Clone ID: LIB3197-034-Q1-M1-H8.pep
YFVTLRDRDWYWRAFLGEGXHRDHPARNPFVPIGISFEGIKFPKSTGVVSGFANKRCCLSVFILCIYVVSLITTFKMN

SEQ ID NO: 87550 - protein, 113 aa, Gossypium hirsutum
  Clone ID: LIB3197-035-Q1-M1-A12.pep
RFLLLQTLTADFLYHLAAKMDLKMEIFSLGDLSKTIGKILTDMSSLYDVGRRKRTVGLLLVDRTLDLLTPCCHGDSLVDRIFSTLPRKERTSACACIKCSQAQLKPGPSSLAR

SEQ ID NO: 87551 - protein, 57 aa, Gossypium hirsutum
  Clone ID: LIB3197-035-Q1-M1-A8.pep
VILVINITSLLTRLLIRVLSSILFHIRIYIHGYSVKNVASVNFYVLEHKSSVSLRLS

SEQ ID NO: 87552 - protein, 125 aa, Gossypium hirsutum
  unsure (1)..(125): unsure at all Xaa locations
  Clone ID: LIB3197-035-Q1-M1-B4.pep
MVLKTEPCRFSGGKIYPGKGIRFIRSDSQVFLFANSKCKRYFHNRLKPSKLTWTAMYRKQHKKDIAAEAVKKRRRTTKKPYSRSIVGATLEVIQKRRSEKPEVRDACAEAALREXKERIKKTKDE

SEQ ID NO: 87553 - protein, 44 aa, Gossypium hirsutum
  Clone ID: LIB3197-035-Q1-M1-B5.pep
LTRLWARKTSANRLTNLEIANLLTPKLVHEEDHLLAALTDVMRT

SEQ ID NO: 87554 - protein, 80 aa, Gossypium hirsutum
  Clone ID: LIB3197-035-Q1-M1-B7.pep
RSQLNQQMVRIIMFMYPPVGENIEDQKFMWLQSMGTVIISMVSGCVLKLRCICKHSVHIKQTFSFVFVKLFLLYEMQSFH

SEQ ID NO: 87555 - protein, 49 aa, Gossypium hirsutum
  Clone ID: LIB3197-035-Q1-M1-C10.pep
TGLHTVADVYCCDCREVLGWKYERAYEETQKYKEGKFILEKSKIVKENW

SEQ ID NO: 87556 - protein, 78 aa, Gossypium hirsutum
  Clone ID: LIB3197-035-Q1-M1-D12.pep
MSHTIRRNIGLALGSLYGIQRGRFWGLGLLKCVCSFDFCCRGYCMCSKASNGDGFGGNGYRGRGGCSISNKKNKKNYK

SEQ ID NO: 87557 - protein, 141 aa, Gossypium hirsutum
  Clone ID: LIB3197-035-Q1-M1-D5.pep
ETASAVYRNRISPDPIFLTSEATSAGGFYAINRRGQVLLATVNEATIVPFVSGQLNNLELAVNLAKRGNLPGAENLVVQRFQELFAQTKYKEAAELAAESPQRILRTPDTVAKFQSVPVQAGQTPPLLQYFGTLLTRGKLN

SEQ ID NO: 87558 - protein, 75 aa, Gossypium hirsutum
  Clone ID: LIB3197-035-Q1-M1-D7.pep
RLSRRSSIKVFFPVAFDSMSLETGVDSRRAESEPDSEEDLEELESDVKKMAEKILEYRSAIPDQLKTTLASPTRP

SEQ ID NO: 87559 - protein, 78 aa, Gossypium hirsutum
  Clone ID: LIB3197-035-Q1-M1-E10.pep
SAHKYIRLYLLNYNGRLNRKIGFSIIMMINKDRNFKGKIKFKKKKKRELKCENFLRLRLLGERREKEREEMLRIGRVG

SEQ ID NO: 87560 - protein, 85 aa, Gossypium hirsutum
  unsure (1)..(85): unsure at all Xaa locations
  Clone ID: LIB3197-035-Q1-M1-E7.pep
QILSXFNKSFSNIPHSLNAPHNPXTFSTFKNYFLPNHFTSFYPISFSINLLSSYFMTLFSLKTEPTSSHTFFLCILHILLFFNPH

SEQ ID NO: 87561 - protein, 85 aa, Gossypium hirsutum
  unsure (1)..(85): unsure at all Xaa locations
  Clone ID: LIB3197-035-Q1-M1-F7.pep
AQEGVDSLIKCTTQNLGFSQEKPVAAFTIYKCLVHWRTLEAERTSVFDNLIQMIGSSLEKQDDNDHMAXWLSNTSALLFLLQSSL

SEQ ID NO: 87562 - protein, 104 aa, Gossypium hirsutum
  Clone ID: LIB3197-035-Q1-M1-G3.pep
FFFNNLFPSSWGYISCGGGYKYTKINISINGFLTIGHYIDTFALQNNDIDLVAVNYPFITTEYITYMFNYYYINSQFNHYYLKVKDSNTLLFFKKPCHIFLYHK

SEQ ID NO: 87563 - protein, 73 aa, Gossypium hirsutum
  Clone ID: LIB3197-035-Q1-M1-H9.pep
VGPKDLTEKNQGVNYRALGDLFVLAEKRKDNFRYDVAVQMIEIYNEQVRDLLVIYGSNKRYPSVHLILFLTRL

SEQ ID NO: 87564 - protein, 98 aa, Gossypium hirsutum
  unsure (1)..(98): unsure at all Xaa locations
  Clone ID: LIB3197-037-Q1-M1-A6.pep
QRQHQCGSCTLPWLTRSIGQNLLWENTRLPQTYRDPNRTDRGKATKFGHKNIEILVCAAIKEMKDWLTNKDSXCNQLKKWAATLNMGKEQDFEVKFAD

SEQ ID NO: 87565 - protein, 135 aa, Gossypium hirsutum
  Clone ID: LIB3197-037-Q1-M1-B12.pep
IKESNWKFSILSSLINCIKQVSTLAPNVPAMYELHFAVPMAGAVLCTLNSRLDSAMVSVLLAHSEAKILFVDHGLLEIARGAFDHLAKTNTKPPILVLISEGDDDPSPTSIVPYEYDRFFQTGHIAFEIKRPKSE

SEQ ID NO: 87566 - protein, 62 aa, Gossypium hirsutum
  unsure (1)..(62): unsure at all Xaa locations
  Clone ID: LIB3197-037-Q1-M1-B2.pep
VGITCRSVTWYVMIFAMDXKGDIYIFNEKLLKNNITNDSLFFHSTLVLYFFIISSCSLYHIY

SEQ ID NO: 87567 - protein, 107 aa, Gossypium hirsutum
  Clone ID: LIB3197-037-Q1-M1-B7.pep
LENLDSALHTTTQFEAVTSKMENSSKQWRFEGNKRPNSASAISVRGVLDLVIGNLSTDDLRPTIPLGNGDPSQFACFRTSTTAEEAIFDAVHSPKYNGYAPTVGVLS

SEQ ID NO: 87568 - protein, 140 aa, Gossypium hirsutum
  unsure (1)..(140): unsure at all Xaa locations
  Clone ID: LIB3197-037-Q1-M1-B8.pep
QDLLTHLLRSLASRTGEQGGKNMSGLLPEACDLEAVSALFSNGQGPPRPFKHHITGTASEIPHTGRKSCDTKGAEVPSNTAGASKINNFDLNDIYIDSDDETDGIKRSPAPVNAXTGSLDCPSWVQQDSHQSSPPQTSRN

SEQ ID NO: 87569 - protein, 68 aa, Gossypium hirsutum
  unsure (1)..(68): unsure at all Xaa locations
  Clone ID: LIB3197-037-Q1-M1-C2.pep
MGTGKEDTVIFLDRASRSTRGRRMTKLLDEEFEEDELFWNQEAFKEEENDVNYEEEPEVADXFDSDFD

SEQ ID NO: 87570 - protein, 58 aa, Gossypium hirsutum
  Clone ID: LIB3197-037-Q1-M1-D2.pep
DVIVETEFNRTFPPITKFCNRFFTFKVLTVNRSHRKVVKMSPNPYIHICYKLSKFPLI

SEQ ID NO: 87571 - protein, 84 aa, Gossypium hirsutum
  Clone ID: LIB3197-037-Q1-M1-D9.pep
TLHFLPQIPPNSASSRLFNPYVAPHSVSPLSKIFCFSKEKKSKETTSHRQQQHHPSLFLFKQSPSLIKDCTFKNKTSNQVTTQN

SEQ ID NO: 87572 - protein, 78 aa, Gossypium hirsutum
  Clone ID: LIB3197-037-Q1-M1-E1.pep
PFRPFKNFIIQSARGGPYYQGGHFYLQEHSDLINDIPNLPAPRVDHTPVGDIIKKACHLRLVKPFIGGGQNNHLLTSN

SEQ ID NO: 87573 - protein, 55 aa, Gossypium hirsutum
  Clone ID: LIB3197-037-Q1-M1-E2.pep
LLLLFPNSQCRGTRRSLEVLRSSLQFELLPGNMSKNLHLIHFYNIMLPLKLIHNG

SEQ ID NO: 87574 - protein, 149 aa, Gossypium hirsutum
  Clone ID: LIB3197-037-Q1-M1-E3.pep
ERRENELEKETEEKDEERLVRNVSTNQDMNFSCVATFKVPERSKDNFQLQYLSNERRFHTINLGKDEITLHDPEGKRGKEILETESSADLKIIDKTFGDLVLKRSPHFDPINCYSSIVVDKVITKQSVICYSLNLPCVKSSNLSKSVLE

SEQ ID NO: 87575 - protein, 74 aa, Gossypium hirsutum
  unsure (1)..(74): unsure at all Xaa locations
  Clone ID: LIB3197-037-Q1-M1-E9.pep
LCSTSAHLSAALGPTPGFAXTATMMFSGFNADYEASSSRCSSASPAGDSLSYYHSPADSFSSMGSPVNAQDFCT

SEQ ID NO: 87576 - protein, 85 aa, Gossypium hirsutum
  Clone ID: LIB3197-037-Q1-M1-F2.pep
KQINEEPADKPEVEQNAYEVTKAVILSEEVEDYSSVSKECLKEGESKEQVEAKNLEFEDHSIKDQEASVIVESEDRRQDQESGDP

SEQ ID NO: 87577 - protein, 64 aa, Gossypium hirsutum
  Clone ID: LIB3197-037-Q1-M1-F8.pep
APDCPVYLNNFGNPCDDFDTSSSFGTFSRSIWASGAPETKEDGPSALGNQLKVNKKTGCELHLS

SEQ ID NO: 87578 - protein, 51 aa, Gossypium hirsutum
  Clone ID: LIB3197-037-Q1-M1-G1.pep
PLHFLLFFNFPWWDFFELGGVGRPRKKPWGQPWTCSKNCRLVLKKQAFPFF

SEQ ID NO: 87579 - protein, 85 aa, Gossypium hirsutum
  Clone ID: LIB3197-038-Q1-M1-H10.pep
AFFSQFRCCYLPPVLSPLVTRRTALFSLIRFVSIYAFHSVVLIYRLIAHRICLIKCLREKFLPFSQTVFFLTDPAVFWLVTWGFP

SEQ ID NO: 87580 - protein, 45 aa, Gossypium hirsutum
  Clone ID: LIB3197-039-Q1-M1-A2.pep
LFSELLLLRWACQKSLEAESVYYVIHTYLFLYVDEICIKLLVLWL

SEQ ID NO: 87581 - protein, 56 aa, Gossypium hirsutum
  Clone ID: LIB3197-039-Q1-M1-A4.pep
PGFLKFDQRYFRHINSVSYLQKYKSYTIRVEKILKPTSSVIFSIIFHLLNNIPHLA

SEQ ID NO: 87582 - protein, 52 aa, Gossypium hirsutum
  Clone ID: LIB3197-039-Q1-M1-A5.pep
KELKIGLISRSYKRQLCCSYRFFSRRSMASNHEQPGLSSLGKEGRSSGETGP

SEQ ID NO: 87583 - protein, 136 aa, Gossypium hirsutum
  Clone ID: LIB3197-039-Q1-M1-A6.pep
KNVIMTNEYQSTRLCEALYTKCEDRMDQLQVLRLPTMAKFDAGLQQCNQSFEQECVGPSKANYEQRIMKMLGKSRSLFIKEYNQRLFNWLVAFSLVMGVGGRFIIKFILVEMAAWILFIFLETYTKMFWSAESLYY

SEQ ID NO: 87584 - protein, 120 aa, Gossypium hirsutum
  Clone ID: LIB3197-039-Q1-M1-B1.pep
HASADAWAKKPAIEVEIDSQSFVLDFLHMFRLELKTGMRHPIAWIDEAGGCFFPEIFTGEDEAYPCCKDECANDQEFMFSESYAPREIKLHLEIGINGVEQPKLECSGESSSFVRHFQIA

SEQ ID NO: 87585 - protein, 135 aa, Gossypium hirsutum
  Clone ID: LIB3197-039-Q1-M1-B3.pep
NKKNKRKFCWFHTWCCACHCFQNRLLAMNYINEGDDDKLFEAHRDWGRRFMRLYPQYDSWDNPKDPERPLVIGYISPDYFTHSVSYFIEAPLIYHDYGKYQVVVYSAVVKADAKTNRFRERVVKKGGLWRDIYGI

SEQ ID NO: 87586 - protein, 151 aa, Gossypium hirsutum
  Clone ID: LIB3197-039-Q1-M1-B4.pep
SEGGVAAPAGTDECLDKATNQELASNNGVEALNAVSQGNPEISKGESFSMSPEVSEICEMPDHNTIDDTPLKADKIPENDGKMSKSEATADHDSSSEEKCGSIVEETSQNADVESNKQEANLELKKQALSDNHDLIIESSNEAYEIVSKDD

SEQ ID NO: 87587 - protein, 120 aa, Gossypium hirsutum
  Clone ID: LIB3197-039-Q1-M1-B9.pep
MDFTTISNGHSPSSFTKFNSALTAGLLNPHSPPPPPDKSRSSPTLFEMMASEPDVHPRTQTQIQVPISGPRQNQPPPVIDKQALTMQRISNLLSTRSPGNQFNDPDSSDIKLTLSSKDGI

SEQ ID NO: 87588 - protein, 45 aa, Gossypium hirsutum
  Clone ID: LIB3197-039-Q1-M1-C10.pep
EFKLFALDYVYALTIILSAICICGYKLQQTNKAGILIHKLSLSVD

SEQ ID NO: 87589 - protein, 57 aa, Gossypium hirsutum
  Clone ID: LIB3197-039-Q1-M1-D2.pep
KLPSRYSMVGKAHGGVWHGKNRRLSFVHQVNHSCCLVMNMSLELDAAPHSQCQRQTA

SEQ ID NO: 87590 - protein, 139 aa, Gossypium hirsutum
  Clone ID: LIB3197-039-Q1-M1-D4.pep
HASGRWISLFHEPIRQEERIVLDHLHPGSGRVLNSIKGEQVAAGWPSWLVAVASDALKGWIPRRANTFEKLDKIGQGTYSSVYKARDVVHNKLVALKKVRFDNHDPESVKFMAREINLLRRLNHPNVIKLGSLITSHTS

SEQ ID NO: 87591 - protein, 148 aa, Gossypium hirsutum
  unsure (1)..(148): unsure at all Xaa locations
  Clone ID: LIB3197-039-Q1-M1-D5.pep
QVAMASSLLVNGLKALFLVLWCLMVTTLIYTISIDGLPFRWEILTPWMAATLVDFYINVVPFAVWVSYKESSLIAATLWVILLVCLGSITTSGYLFIQFFNLSPQESLEDPIYHVLLEPSXKDGTKPKGKHSSVAIARILFIVLGCLM

SEQ ID NO: 87592 - protein, 60 aa, Gossypium hirsutum
  Clone ID: LIB3197-039-Q1-M1-D8.pep
MAGLFAYGSLAPKTKNMVVAGGLTAFVFGVYFYTMRAVGGTDELQVAIDKFEELKKQEGK

SEQ ID NO: 87593 - protein, 101 aa, Gossypium hirsutum
  Clone ID: LIB3197-039-Q1-M1-E12.pep
MAASDSDDVNLAYDDTADDDYFYLDDTDEDLHPPQASDSLDDDQLQGSDSRNDDDDDLLQSSDRHDDGDHDCDDNDDGDENALEKDDHDSPISGQNFSVLT

SEQ ID NO: 87594 - protein, 126 aa, Gossypium hirsutum
  Clone ID: LIB3197-039-Q1-M1-G4.pep
MNGMGRQGKRSGAAGLQVHHQRQYSDNFLETTSNGRWLQSAGLQHLHSSNNSIPPLQDYAFYGGGDGGGQGSRMYRNIQREFSMGNDFFTEPTTPPVGSRPSSQRMNGDQSPNEFSPGLLDLHSFD

SEQ ID NO: 87595 - protein, 33 aa, Gossypium hirsutum
  Clone ID: LIB3197-039-Q1-M1-H6.pep
TIDQGSDPIVNIKQFSLWHELTAYLARHWSFDL

SEQ ID NO: 87596 - protein, 153 aa, Gossypium hirsutum
  Clone ID: LIB3197-040-Q1-M1-A11.pep
RTRGWRSPRPPSPSLAAQRLIREQQDDEYYASLQADREKELKAIEEAKARRLEEEAARKAALEEEQRKEEELRRKVEEEQECERQLAAKEASLPQEPAANEQNAVTLLVRMPDGSRRGRRFLKSDRLQSLYDFIDIGRGVKPGTYRLVRPYPR

SEQ ID NO: 87597 - protein, 50 aa, Gossypium hirsutum
  unsure (1)..(50): unsure at all Xaa locations
  Clone ID: LIB3197-040-Q1-M1-A12.pep
SRTRGETYEPYVTPVKYHPDXPYNRIPASNSNYKDSYFYSKTNAFGNTDT

SEQ ID NO: 87598 - protein, 71 aa, Gossypium hirsutum
  unsure (1)..(71): unsure at all Xaa locations
  Clone ID: LIB3197-040-Q1-M1-A4.pep
SDNLRPSAPRILARLHSGTVCIWSYYAQTMDKTLERTGLTELLCTFRXPKRWDGAGADYMSISVYDSISVD

SEQ ID NO: 87599 - protein, 51 aa, Gossypium hirsutum
  Clone ID: LIB3197-040-Q1-M1-A7.pep
RPHSKIPQPDHKKSLESKNISALYSTRDLHYFHFPFIIFNNFQHLKNCFKP

SEQ ID NO: 87600 - protein, 150 aa, Gossypium hirsutum
  Clone ID: LIB3197-040-Q1-M1-B6.pep
PRVRPRVRDLLGNGTPRGKKDAATALFNLSIFHENKARIVQAGAVRHLVELMDPAAGMVDKAVAVLANLATIPEGRTSIGQEQGIPVLVEVVELGSARGKENAAAALLQLCTNSNRFCSLVLQEGAVPPLVALSQSGTPRAREKAQTLLS

SEQ ID NO: 87601 - protein, 68 aa, Gossypium hirsutum
  Clone ID: LIB3197-040-Q1-M1-C1.pep
NAGACVIHMTRELLQLSPSSELTKETSSDLSFMITCEKPNPSQGTPASLKRIMALNFHRILRCHSYYN

SEQ ID NO: 87602 - protein, 69 aa, Gossypium hirsutum
  Clone ID: LIB3197-040-Q1-M1-C6.pep
MADTDHCCSTQLIDGDGEFNVVGLDNFMRTTKFSNCGLSYAVVAIMGPQSSGKSTLLNHLFQTNFREMD

SEQ ID NO: 87603 - protein, 57 aa, Gossypium hirsutum
  Clone ID: LIB3197-040-Q1-M1-D6.pep
KPFSNLSKSSSEKPPIPRPFPFSLIFSHLTREPFLLPIEVSIFSLTILTRSNTLPPK

SEQ ID NO: 87604 - protein, 56 aa, Gossypium hirsutum
  Clone ID: LIB3197-040-Q1-M1-D8.pep
MILRSVIMVVVVVGILSSASQALRFELQSGHTKCISEDIKSNSMTVGKYHVVNPNE

SEQ ID NO: 87605 - protein, 136 aa, Gossypium hirsutum
  unsure (1)..(136): unsure at all Xaa locations
  Clone ID: LIB3197-040-Q1-M1-E12.pep
MFSKMKCTCIDLNQFSRFIKDMKALLVDKVYVVNVLGYCAYNFVLGAYSYWGPKAGYKIYNMSDADLIFGGITIVCGILGTLAGGYVLDLMKSTIPNAFKVASXVTNIFGAIFCFTAFCFQNMYAFLAFFXSGELL

SEQ ID NO: 87606 - protein, 92 aa, Gossypium hirsutum
  unsure (1)..(92): unsure at all Xaa locations
  Clone ID: LIB3197-040-Q1-M1-E8.pep
MDCTTCWKKLVRFTLGKHSLLAPDREGSISVAIYAGIDTRVRLMYMANEGDLEGIYELLDSGTNVNFNDFHGRTGRYVFVXQGLTDVNRLLL

SEQ ID NO: 87607 - protein, 69 aa, Gossypium hirsutum
  Clone ID: LIB3197-040-Q1-M1-F4.pep
INTYRISNTSIFRSLGSQNFRGDKSGTCCLFLDKILFFSFSSFVLAHPLLHSVTFTCLSIHICMKASHF

SEQ ID NO: 87608 - protein, 115 aa, Gossypium hirsutum
  Clone ID: LIB3197-041-Q1-M1-A1.pep
MSTAGQGMGCKTAVTWEAGKPLLIEEVVVVPPQKHEVRIKIVFTALCHTDGYYWECKGYTPIASRILGHEASGIDDSGGEGVNDIEPADHVLPIFTGEGKECSHLLSEEINNVSQ

SEQ ID NO: 87609 - protein, 80 aa, Gossypium hirsutum
  unsure (1)..(80): unsure at all Xaa locations
  Clone ID: LIB3197-041-Q1-M1-A5.pep
VNWKGETLHGVKNLTYSDMDKLPISNVPDGSKRMWEHIAITYVSALWTSYALYDQYTKLSGMKVRYLTSDNXQPDQCTGI

SEQ ID NO: 87610 - protein, 63 aa, Gossypium hirsutum
  Clone ID: LIB3197-041-Q1-M1-B1.pep
TVYLNQDSICFPISHMNNMIRSFIIDYTTIQMLHSNHCIIKAHLTTRTVHSCKHGWRYLHISK

SEQ ID NO: 87611 - protein, 124 aa, Gossypium hirsutum
  unsure (1)..(124): unsure at all Xaa locations
  Clone ID: LIB3197-041-Q1-M1-B12.pep
MNPLCCIAPVSIDRDRANPVVTKSGPQCQLSIEPSVRTVNYSKPSFSSQVSSVNADTDRSSPSVMNHTSMAIFDEPIIREVNAAHGVARILYKWVNYGKGWRSRWFVLEDGVLSXYKIHGPDRI

SEQ ID NO: 87612 - protein, 45 aa, Gossypium hirsutum
  Clone ID: LIB3197-041-Q1-M1-B2.pep
VPYIVIRILGVKTNGYRRSRSILCLRWRCHQICDLFIVNERTTAP

SEQ ID NO: 87613 - protein, 124 aa, Gossypium hirsutum
  Clone ID: LIB3197-041-Q1-M1-B4.pep
PFTYNHKCYLFANQKLSRHFTSFNFRLQSRKNSTSDAKEFDESAFEAERLRLDAKARESMAQISKTMTETTAEAEADPKAWKWVIRKRIWDLMEAQNIAQNPRPVHHRIPNFVGASSAAKKMSE

SEQ ID NO: 87614 - protein, 117 aa, Gossypium hirsutum
  Clone ID: LIB3197-041-Q1-M1-D11.pep
MVELMHVTAAVVIIVIVLILLVVFILKWCLHKESTEGKDMVADHHYVFRRGVSAKPLFSWSDHPSLITDAVENGWSRFGFTPYNISSSTRSSSLLGLCAAVDFLRGNDVELSWEVCQ

SEQ ID NO: 87615 - protein, 72 aa, Gossypium hirsutum
  Clone ID: LIB3197-041-Q1-M1-D7.pep
RGQNHPPKTPVREKQQNHKVSPVHGADAAAAAVGHLETDTKMIDLNMKPHRIHGQASNNQVRTTFKLFSIPI

SEQ ID NO: 87616 - protein, 85 aa, Gossypium hirsutum
  Clone ID: LIB3197-041-Q1-M1-E4.pep
PISSSGVDIVPQVLIMRNLLTPLFPPLYPFPFATTSPDCFNGKTSSTTSISDISQKPDNQKKLKNKFFSPFLLSGFTFFRKQNPG

SEQ ID NO: 87617 - protein, 139 aa, Gossypium hirsutum
  unsure (1)..(139): unsure at all Xaa locations
  Clone ID: LIB3197-041-Q1-M1-F11.pep
EHVALEIANRVXAAIYVWRXRSHSKPPINPNRSTAKSSWEMVKDLMVDGDKREFLAERAETLLLCLKQRFPGLTQTTLDTSKIQCNKDVGKSILESYSRVLESIAYNIVARIDDLLYVDDLTKHSDKLSSVPTVSVIAH

SEQ ID NO: 87618 - protein, 103 aa, Gossypium hirsutum
  Clone ID: LIB3197-041-Q1-M1-F5.pep
MAMVNVISVLIFISSMWMMGEARIPGVYSGGAWQNAHATFYGGADASGTMGGACGYGNLYGQGYGVSTAALSTALFNNGLSCGACFEIKCASDPKWCHSGSPS

SEQ ID NO: 87619 - protein, 96 aa, Gossypium hirsutum
  unsure (1)..(96): unsure at all Xaa locations
  Clone ID: LIB3197-041-Q1-M1-G10.pep
KLFDAPFPIVNKRRYGHXVPKDVNFISYVKGKVTCMVDDISDTDGTIPKGASLLYQEGSRKVYACNTHADHRTTAIKRLXSGLVQNVIISDTIPVL

SEQ ID NO: 87620 - protein, 138 aa, Gossypium hirsutum
  unsure (1)..(138): unsure at all Xaa locations
  Clone ID: LIB3197-041-Q1-M1-G11.pep
MSDSNISSSSSSSSSDSASIATVDQNVRRNGRMIDDGDTFSPKVRRWRDVFWLAIFMLHLIALGFVLVLLGLNRFKKSDRLNIDRYTNRVWEHNNGLTENYWPNYAVAGGVGAALGWXWVFLLGSHSNLMMXGSVHIL

SEQ ID NO: 87621 - protein, 81 aa, Gossypium hirsutum
  unsure (1)..(81): unsure at all Xaa locations
  Clone ID: LIB3197-041-Q1-M1-G4.pep
PRVREEVFKKFDANGDGKISASELGSIMKSLGXHPSDEELHNMIKEFDADGDGFINFNEFIELNTKGVDSEEVLENLKDAF

SEQ ID NO: 87622 - protein, 136 aa, Gossypium hirsutum
  unsure (1)..(136): unsure at all Xaa locations
  Clone ID: LIB3197-041-Q1-M1-G5.pep
ETQLVSPPVFSGFPTEPSTAPFTPPPESVHLTTPSSPEVPFAQFLGPNLQYGEQRFPLSHYEFQSYHLQPGSPVGQLISPSSGISGSGTSSPFLDGDYTTGLRFPEFQLVYPSKLLNLDKLSNREWXSYHGSGPLT

SEQ ID NO: 87623 - protein, 48 aa, Gossypium hirsutum
  Clone ID: LIB3197-041-Q1-M1-G8.pep
AITNFLIKLNKNNPISVKIYEYSPNQIGQGLLKKTSVTITNLVMTSYN

SEQ ID NO: 87624 - protein, 35 aa, Gossypium hirsutum
  Clone ID: LIB3197-041-Q1-M1-H4.pep
RISSWTRLRILRNRCCCIRILYQRSLRNMHNQGHD

SEQ ID NO: 87625 - protein, 106 aa, Gossypium hirsutum
  Clone ID: LIB3197-041-Q1-M1-H7.pep
MLSMNNGVTISRDSTYGGSVVDRTDVISDAPALASGKASIYGAKHEPASSLGIVPHRGPDSLEVDEDMQLALAHQLYKSGNYKQALDHSNAVYDQNSLRTDNLLLL

SEQ ID NO: 87626 - protein, 78 aa, Gossypium hirsutum
  Clone ID: LIB3197-042-Q1-M1-A1.pep
MDPEGKKFGGGPRELSGAVDLISHYKLLPHHDFFCKRPLPVSISDTHYLHNVVGDTEIRKGEGMQLDQLIQNTCHNRD

SEQ ID NO: 87627 - protein, 106 aa, Gossypium hirsutum
  Clone ID: LIB3197-042-Q1-M1-B2.pep
LVVCLCSSIRFRSFVVAASSFSNDNREFVIVGGGNAAGYAARTFVEHGMADGKLCIVSKEAYAPYERPALTKGYLFPLDKKPARLPGFHTCVGSGGERQTPEWYKE

SEQ ID NO: 87628 - protein, 67 aa, Gossypium hirsutum
  Clone ID: LIB3197-042-Q1-M1-C3.pep
VFQCENDFKCEGCKYAENVSFSNNFIHSFSTSIFNCDQGLHLTRQRDQFKSLFVTASLVASAMLLSV

SEQ ID NO: 87629 - protein, 69 aa, Gossypium hirsutum
  Clone ID: LIB3197-042-Q1-M1-C8.pep
LSPLREGNFNSKIREENPINYPRSRNLYQDEILKNPKSIYQSKHSCSYQSSYTQNLTTCFAQYKYKTER

SEQ ID NO: 87630 - protein, 103 aa, Gossypium hirsutum
  Clone ID: LIB3197-042-Q1-M1-D7.pep
PRVRLPVSLLNFSERKKMAQFKAISLSSSINLASYGPKRNTLLHSDNLICSRKLSTFHELSGKSSSLHGNAIVSNNVCMTLTPKNQGIQAVLSSNSGTDVSTV

SEQ ID NO: 87631 - protein, 69 aa, Gossypium hirsutum
  Clone ID: LIB3197-042-Q1-M1-F10.pep
GFGALMLTTGSSYLSHAQIWALQDGTTVIVGGKTNRAKAEFPDEMNRLLDQVPEIVESSISKKPDNIGG

SEQ ID NO: 87632 - protein, 68 aa, Gossypium hirsutum
  unsure (1)..(68): unsure at all Xaa locations
  Clone ID: LIB3197-042-Q1-M1-F5.pep
ISLGALVHLIEGGGHQFSESYCXMLFNSIIYASYTTQPLELLNALGLENPMNPSILRDLKVHYICLSI

SEQ ID NO: 87633 - protein, 73 aa, Gossypium hirsutum
  Clone ID: LIB3197-042-Q1-M1-F6.pep
KVLKASSPPPTVLSLELGIRLDSMLKPVKLPAGISELDNSVIKCERKGHLIIIRISNYKLRLKEIRHRPSGVY

SEQ ID NO: 87634 - protein, 149 aa, Gossypium hirsutum
  Clone ID: LIB3197-042-Q1-M1-H4.pep
IISSDGVWDALTAEEALDCCRGMPPDAAAAQIVKEAVKPKGLRDDTTCIVVDILPQEKPAALPPPKKPVKGMLKAMFRKKNSGSSSQDKDYMEPDVVEELFEEGSAWLSERLDTKYPLCNMFKLFMCAVCQLEMKPGEGISIHVGTSNP

SEQ ID NO: 87635 - protein, 153 aa, Gossypium hirsutum
  Clone ID: LIB3197-043-Q1-M1-A10.pep
SEVEPNPVTIINILSSCTHLAHLPQGRCLHAYMIRRESSLGHNLSLQNAFITMYARCGSMRNAEKIFETLTRRNIISWNAIIMGYGMHGHGYDAILAFSQMLEDGFQPNEVTFISILSACSHSGMIEERLQLFDSMVHDFNITPQLAHYGCVV

SEQ ID NO: 87636 - protein, 99 aa, Gossypium hirsutum
  Clone ID: LIB3197-043-Q1-M1-B4.pep
KGLCFLYPFFPISCRKLSILTVVRSFIWQPSPVGSSIPLATIYLHFYVDLWSTLSLLVSLPLPYVIFDACSCVFAALYSLHWTLLGIYDLYLSLIRFQY

SEQ ID NO: 87637 - protein, 132 aa, Gossypium hirsutum
  unsure (1)..(132): unsure at all Xaa locations
  Clone ID: LIB3197-043-Q1-M1-G8.pep
DFIRNNRLINGGKDLPREYLSELFLSICENEIQMIPDQDAGVPVMTSSRWINVVNKSKGSTPFIACDSRALLDHDMFTILSGPTIAALSVVFDQVEQEDVXYQMCIDGFLAIAKLSAHYHXGDVLDDFGVSL

SEQ ID NO: 87638 - protein, 131 aa, Gossypium hirsutum
  Clone ID: LIB3197-044-Q1-M1-A10.pep
GRVGDDGSNPSLNSTGSPVTYCKETNIIRFANSSVDANSLRNMVVLAIHTGRIYCIIEAVSDKTAESSFAETVDTVSSEFATFYEYFYKKYNIVLKHPRQPLMLLKQSHNPHNLLVNFNDEGVSAKASQAG

SEQ ID NO: 87639 - protein, 109 aa, Gossypium hirsutum
  Clone ID: LIB3197-044-Q1-M1-A3.pep
LIDLAVSLLPGLDEPALNLLFIAIKPALQDVDGLIQKKAYKVLSIVLRNQKGFLSAKLEELLKLMIEVLPSLHFSAKRHRLDCLYELITHASKVDPNLKRHEILSSFLT

SEQ ID NO: 87640 - protein, 82 aa, Gossypium hirsutum
  unsure (1)..(82): unsure at all Xaa locations
  Clone ID: LIB3197-044-Q1-M1-A6.pep
MVFESDNAMLELYGLDHGIQPDGQTPXDKTVGRGDDAYNTFFTETGAGKHDLLTIVADLGPTAINEMRTGSYRLLLHYGQLI

SEQ ID NO: 87641 - protein, 122 aa, Gossypium hirsutum
  unsure (1)..(122): unsure at all Xaa locations
  Clone ID: LIB3197-044-Q1-M1-B5.pep
RDRKMMRVLCNRGRMEIMFSKCAPNSIICRCTNILCTNGGSTIPNDTTLLSELHSRLNSCAGQETLRXLALTLKIMPMGHQTLFFDDEKDLTFIEQVGMLDPPPQEVRNAMRSCMTXGIRVI

SEQ ID NO: 87642 - protein, 104 aa, Gossypium hirsutum
  Clone ID: LIB3197-044-Q1-M1-B8.pep
GHPINPELFLGLEQTKASSLLSKPDHEKLHRKLIFDSANEILVGKLAQVRASPEPWLNPGKLTTKTLNAQKLLKELCMEIEQLQPKKSDNNMEEEDGLKNILWE

SEQ ID NO: 87643 - protein, 139 aa, Gossypium hirsutum
  unsure (1)..(139): unsure at all Xaa locations
  Clone ID: LIB3197-044-Q1-M1-D8.pep
STYSASPSEAAAKVILSIDPRVSSDDNDSSSAQFTMELVGTETGDVPKRYSMDMTKDSAPMSVLSETLQRKLDGDGKILNKFDMRPHDENIENYGKLXREKTNQSMNKSRQIQVIDNDHGTHMRAMPRVINGAVFNNIF

SEQ ID NO: 87644 - protein, 127 aa, Gossypium hirsutum
  Clone ID: LIB3197-044-Q1-M1-D9.pep
VILEYQTPVNSSKPDECDVAWRFRNKKERSWRKYRDFRRFEFGIGVNCTYRVIHTGRWHSGINARRPWIRPNPKFTQPIRDEEINDTIPTLPETNFRKRKYLYYARGRDYCKGMNHYLMSFLCGLRE

SEQ ID NO: 87645 - protein, 137 aa, Gossypium hirsutum
  Clone ID: LIB3197-044-Q1-M1-E2.pep
EEPYHKPLNNHGDHSMTDSAQSLETQGEIADDPDEYCKEVQCIDTEGSGRDNNNSESLAVPNGESEGRLALTLNGVGDVAGQETMSTPMNGDREANRIQNSLKLSRSWSCRDDVTGGTSSPYMDGEHNESTPPNGLE

SEQ ID NO: 87646 - protein, 136 aa, Gossypium hirsutum
  Clone ID: LIB3197-044-Q1-M1-E6.pep
INRSSIGPLPSCYSPSLKTLIKGMLRKNPEHRPSASELLKHPYLQPYVDQYRSSFSYPSTNCSLDKHISTGRESRDNRKNMAESHSSNSSCSDKDSLLSSDRNTATMVSNSNSKATDRDSISNDEEGSTEQHLPSK

SEQ ID NO: 87647 - protein, 126 aa, Gossypium hirsutum
  Clone ID: LIB3197-044-Q1-M1-F1.pep
SKLVRVFADLSRNYSDLINKPSYRALFETDSLSIDESVLRQFEKEVKERIKATRQMISEAKESFDNQLKIQKLKDTIFAVNEQLTKAKKQGAFSSLIAAKSIPKSLHCLAMRLMEERIAHPEKYTD

SEQ ID NO: 87648 - protein, 95 aa, Gossypium hirsutum
  Clone ID: LIB3197-044-Q1-M1-F12.pep
KKREPAQLRIFNLGNTSPVPVSRLVSILEKILKVKAKKKVVPLPRNGDVEFTHANITLAMTELGYKPTTDLEAGLKKFVRWYLSFYSGSKKKSSW

SEQ ID NO: 87649 - protein, 69 aa, Gossypium hirsutum
  Clone ID: LIB3197-044-Q1-M1-F3.pep
MMVYKKREAVEEVAIYGGLIGVQFVYAGNSILLGYLMSLGLSLFTIVIFFTFATFIIVSPFALYFERSN

SEQ ID NO: 87650 - protein, 44 aa, Gossypium hirsutum
  Clone ID: LIB3197-044-Q1-M1-F6.pep
IKKRGRLKTKYRLKKGNIVLGKLQNLILFNLGAFKYAPAAGFLR

SEQ ID NO: 87651 - protein, 60 aa, Gossypium hirsutum
  Clone ID: LIB3197-044-Q1-M1-G1.pep
FIISSIFINIFQFTYLDHITFHICTYFFKPLPPVEPNEITSDAWEMLTQAVTITCNSICS

SEQ ID NO: 87652 - protein, 40 aa, Gossypium hirsutum
  Clone ID: LIB3197-044-Q1-M1-G8.pep
NIPAPAGHCRCLTFALSSSMHYNTMWTRYYIAGTSYVLIV

SEQ ID NO: 87653 - protein, 102 aa, Gossypium hirsutum
  Clone ID: LIB3197-044-Q1-M1-H3.pep
NPVFDSVVKFSVSFFFPPISLKFWLYQKPKTNSNMKIEIPPPIITHCNLCQTCLFCNLYNFIVHFSSTKTQRLNHSHTMTNCRKGKEKCHINIENSIPQIES

SEQ ID NO: 87654 - protein, 121 aa, Gossypium hirsutum
  unsure (1)..(121): unsure at all Xaa locations
  Clone ID: LIB3197-044-Q1-M1-H4.pep
ALSQQMRRARRSPSMGGQDEWLDRWMPAKPWNIRGRASLDQRDNVKTVRNGHXQPYSYVAPNYRRATXNHYHQWPSSPLHRAQHNAQAFHPSALTPCPSKTRAVQVRSASPRCVMVYRTSF

SEQ ID NO: 87655 - protein, 140 aa, Gossypium hirsutum
  Clone ID: LIB3197-044-Q1-M1-H7.pep
GPFGIEQGTSFSMNKGKIVGFRGRSGWYLDAIGVYSKPVLKLNPSKPIVNAQSLAATGPEKSGYSVIQGSVGESYDIVLAVRQRDGFVNPQPRELIRQNSSSSSSDDSSDVEAKSRVPFRTPMKVPPKLPEGVLTYGPWG

SEQ ID NO: 87656 - protein, 105 aa, Gossypium hirsutum
  Clone ID: LIB3197-044-Q1-M1-H8.pep
NIKFFAFVSFPLVLCSSSAGDSQARLFTLSLLNLLLGSEPQRMDFVKTALFKRHSNYSISVDEIGMKLDFVWAPYVLNLTHLLTDFKTKKKYPNVMVMGAGLWHM

SEQ ID NO: 87657 - protein, 143 aa, Gossypium hirsutum
  Clone ID: LIB3197-045-Q1-M1-A12.pep
IVLRVKQGDNPTFGFLMPDHRLHPYFRFLVDHQELLSSNSIDEESKADSSLDQASSGRGGGALSLLGTVYGSGEDEDGETENATKAKRMESGESGVAINKKSTDGSDQKESSLSVSRKDDTVTKHLAPLKEKASLIKRNQSIT

SEQ ID NO: 87658 - protein, 110 aa, Gossypium hirsutum
  unsure (1)..(110): unsure at all Xaa locations
  Clone ID: LIB3197-045-Q1-M1-A4.pep
MSGSTGERSFADIITSIRYWVIHSITIPSLFIAGWLFVSTGLAYDVFGSPRPNEYFTESRQGIPLITGRFDSLEQLDEFSRSFXEDPMTIDRTYPXFTVRWLAVHGLAVP

SEQ ID NO: 87659 - protein, 97 aa, Gossypium hirsutum
  Clone ID: LIB3197-045-Q1-M1-B1.pep
TLLEVEISVIQYTPAIDIWSIGCIFAEVLIGKPLFPGKSVVHQLDLITDLLGTPSPETISGVRNDKARKHLTEMRIKQPVPFSQKFPNADPLAVRLL

SEQ ID NO: 87660 - protein, 59 aa, Gossypium hirsutum
  Clone ID: LIB3197-045-Q1-M1-B7.pep
FISWQLPRCLFHKTGEKKAKKQNTTVTVSIKERKKLLKSRDRNQVQGEQRTTDKFQLYY

SEQ ID NO: 87661 - protein, 74 aa, Gossypium hirsutum
  Clone ID: LIB3197-045-Q1-M1-B8.pep
GKLYSSLDKCSALSRVLPGVSSMTTPVDNRVSFTRSPSVTSFTFDNTSYISVEPPGDSSHTTGNLASSMLIKCY

SEQ ID NO: 87662 - protein, 72 aa, Gossypium hirsutum
  Clone ID: LIB3197-045-Q1-M1-C4.pep
NVIAISLIFIVTGTIKSQKFLFNLDSVYFCLEEVLIEFHCHRLNFLYFILIPKFFRRLIHRLHSPTPNPSFN

SEQ ID NO: 87663 - protein, 86 aa, Gossypium hirsutum
  unsure (1)..(86): unsure at all Xaa locations
  Clone ID: LIB3197-045-Q1-M1-C7.pep
TITDEDIDRIIAKGEAATAELDAKMKKFTEDAIKFKMDDTAELYDFDDEKDENKFDFKKIATENWIEPPKRERKRNYSXSEYFKQT

SEQ ID NO: 87664 - protein, 143 aa, Gossypium hirsutum
  Clone ID: LIB3197-045-Q1-M1-D10.pep
WGALHLRSPPSFATVLKHLQIIGKNGGEDTLAHWPTASGMMTIDDATYEVLKYLDKIWGSLSSSDIAKLQGVAFLPAANGTRLVPANSLFARLTINLAPFSFELPSLYLPFMKILKDLGLQDMLSVASAKELLLNLQKACGYQ

SEQ ID NO: 87665 - protein, 90 aa, Gossypium hirsutum
  Clone ID: LIB3197-045-Q1-M1-D2.pep
KSLKQNSAFVCLLFLSILLAFVLAERQNFGTAKEYSLFLKNSQGQRKQSSCVRERKDGCTSVSLVLGELRSFQVSAIRSFSCKSIVFMDL

SEQ ID NO: 87666 - protein, 142 aa, Gossypium hirsutum
  Clone ID: LIB3197-045-Q1-M1-D9.pep
AATFFYRAPECRDIRKSSTQPADVYSLGVLLLELLTGKTPFQDLVQEHGSDIPRWVKSVREEETESGDDPNSGNEASEGKLQALLNIAMACVAIAPDNRPAMREVLKMIRDVRAEAQVSSNSSDHSPGRWSDTVQSLPREEH

SEQ ID NO: 87667 - protein, 87 aa, Gossypium hirsutum
  Clone ID: LIB3197-045-Q1-M1-E4.pep
IIAGENNGDQKKRSGYVLVFFFSLKALDLQIHQINNHGLLGFFSFFFSFYGFSPFLEMKKIEREKKKNRDMNEYRDDNDNENEGTKT

SEQ ID NO: 87668 - protein, 121 aa, Gossypium hirsutum
  unsure (1)..(121): unsure at all Xaa locations
  Clone ID: LIB3197-045-Q1-M1-F2.pep
MVGLCHFSELADDHIENIQTNYAAGEKVKAKILKLDEERHRISLGMKNSYFTDDIDFQITEQEESDEDIEETGVADDEARSILLTDRTGMDIEYRSGVSDVLAQAESRASIPXLDVTLDDI

SEQ ID NO: 87669 - protein, 48 aa, Gossypium hirsutum
  Clone ID: LIB3197-045-Q1-M1-G12.pep
IESKPKITFLWARRVSSKRSRRLCTDVITGLAMNLQQAQYHGLCILAA

SEQ ID NO: 87670 - protein, 110 aa, Gossypium hirsutum
  Clone ID: LIB3197-045-Q1-M1-G7.pep
CPLSKTSNITTHNTPAPIMLTTSRMTENFISVHAQPSASSSTNVVPCSPQHPIPSQQDTLTPLPFSVSCQSLRPVTLKFEEVAYTIHSSVTSASCFSSHKPQQRTNVLNG

SEQ ID NO: 87671 - protein, 82 aa, Gossypium hirsutum
  Clone ID: LIB3197-045-Q1-M1-G8.pep
MEAKTNGPSVNAGRVMDGPTNPMVTPLLTDLYQFTMAYAYWKAGKHNDRAVFDLYFRKNPFGGEFTVFAGLEECIKLIANFE

SEQ ID NO: 87672 - protein, 32 aa, Gossypium hirsutum
  Clone ID: LIB3197-045-Q1-M1-H12.pep
KQVSSKTLIPPFQNRMGEPKKFKIKERLKRSV

SEQ ID NO: 87673 - protein, 112 aa, Gossypium hirsutum
  Clone ID: LIB3197-045-Q1-M1-H3.pep
VAHLSMTKFSSMNLVQYSAKEALSHDFANTGSPLYTRINKRLWSAVRSMESLLPHANPRSSYAVTDENTNGFIYAKIFGGFEKIRSSICDLVTISRLLNATLVIPEIQQSTR

SEQ ID NO: 87674 - protein, 96 aa, Gossypium hirsutum
  Clone ID: LIB3197-046-Q1-M1-A10.pep
QRKWWQWRQLNQRGKVPKVWGLPPSLYKPCLETTIAYSYHCQRLRFPFLSNSPISNNPNFNNPFASLQFQSQTLIAWLGFLLFFFPIFSFNFYAEN

SEQ ID NO: 87675 - protein, 93 aa, Gossypium hirsutum
  Clone ID: LIB3197-046-Q1-M1-A8.pep
MEDSAELESILPYLPLVIGSSRRLLWPSKVVEALEAMSRGPDHSLVNCGEVLSIAISDMRASLSLADPLALSAPLGYALFFDELMSRGRLQKN

SEQ ID NO: 87676 - protein, 72 aa, Gossypium hirsutum
  Clone ID: LIB3197-046-Q1-M1-A9.pep
SGAPPAGLENAEDRVPFAPGRTHNRIKGSRGTTFGQWNNVSQGRSQNGSRTFGKGLGFKAWHRGSNPQPRGW

SEQ ID NO: 87677 - protein, 118 aa, Gossypium hirsutum
  unsure (1)..(118): unsure at all Xaa locations
  Clone ID: LIB3197-046-Q1-M1-B1.pep
MHHEYSPGAGKSILHSNRHHTEWKGSMQALFLMCHYFAAKEIYNAIQVFIADYVWMTGSGNFSYYHVGEDSMLARFRTDDMTTKFLFFAVPELNNTYMLCYICPMHTLXVMVFGALGI

SEQ ID NO: 87678 - protein, 52 aa, Gossypium hirsutum
  Clone ID: LIB3197-046-Q1-M1-C3.pep
CEQGGKKHLHYLNADLNRKSKDHGTLSLCKREGTISKKEIPCNSTHITHPPS

SEQ ID NO: 87679 - protein, 70 aa, Gossypium hirsutum
  Clone ID: LIB3197-046-Q1-M1-C5.pep
HASGKSEQDKINKFPHFSHSQFLLSNFLNNTNKNIPNYFPLNFSSFPAPICLYLVSTFPSLFYFFLGFSW

SEQ ID NO: 87680 - protein, 134 aa, Gossypium hirsutum
  unsure (1)..(134): unsure at all Xaa locations
  Clone ID: LIB3197-046-Q1-M1-D1.pep
MELPEECWEXIFSFLERHRYLEPLSLVLPRFFSITNHLRSRLTITDPTLESLPHLLLRFTNLTTMAFRDFHGNLDSGLSLICQPGLALTSLDVXLTQVFPFTGFEMLGFQXRIVTELNCSNIGSLKDSDLIEIG

SEQ ID NO: 87681 - protein, 119 aa, Gossypium hirsutum
  Clone ID: LIB3197-046-Q1-M1-D9.pep
PRVRPYHLNLKPSRISIHFHFFTTTQDPTQDLNNAPPQQQEQHVPNNRRTPRGKTRNPEKVEDIICRMMENRAWTTRLQNSIRALVPEFDHALVYNVLHGAKNSDHALQFFRGVERAGL

SEQ ID NO: 87682 - protein, 133 aa, Gossypium hirsutum
  Clone ID: LIB3197-046-Q1-M1-F11.pep
MEASQSQASANAALNPHPNPNSNYTNNSNSILSSTPVWPTIDGPLGLSEEESLAYARRFYKFGYALLPFLWAINCFYFWPVLRHSRSFPRLRPYVVLSAIGFSVFSVILSSWALTFAIGGRTSLGSTLDQLVI

SEQ ID NO: 87683 - protein, 38 aa, Gossypium hirsutum
  Clone ID: LIB3197-046-Q1-M1-F3.pep
LSQGMTYVGATAILLLASIDQNCHNPLNMYTGDILPVP

SEQ ID NO: 87684 - protein, 120 aa, Gossypium hirsutum
  unsure (1)..(120): unsure at all Xaa locations
  Clone ID: LIB3197-046-Q1-M1-G1.pep
DSTYIKRLIGEAAINQAVVNANRTICDVKRLIGRKSDDTVVHVDIKLVPYIIVNSYMXPYIQVKIKDEETXVFSPEEIISMALMKTNXNRCSXLVTKLNDAVLTMSAYFNVSHRQASFDA

SEQ ID NO: 87685 - protein, 129 aa, Gossypium hirsutum
  Clone ID: LIB3197-046-Q1-M1-G10.pep
GNSVDVRNHEMRLHEINTLEWDELLVTYDSNDSSISIRDNNSWFHQLNQTTGNGFLNYGGPILADNLSTEICMLGNLVEPAAQSNNTYFNSPTTVCNTISSTQMNPNVQQKDSIATRAGDALDLSINDG

SEQ ID NO: 87686 - protein, 54 aa, Gossypium hirsutum
  Clone ID: LIB3197-046-Q1-M1-G11.pep
MEKSMSMAPLLLMVLCLPFALGWHDYNQALSKSILFFEAQRSGYLPHNQRVTWR

SEQ ID NO: 87687 - protein, 43 aa, Gossypium hirsutum
  Clone ID: LIB3197-046-Q1-M1-G3.pep
FSILSCKNSIFEFSLVWSVVVGIVIEELSLKPLTLRKFEGSPI

SEQ ID NO: 87688 - protein, 122 aa, Gossypium hirsutum
  Clone ID: LIB3197-046-Q1-M1-G6.pep
RTRGRFSVRLDKVNVPDSVPPVVTVAQEVVAKDVTAGSDCGSEDQHLITDPMVSPAEIQRQIHELQRMHIAATQEQGILQRKIDESNARAYNTQDYSKMLDKIATSPAPVSTPLQMPIQNGY

SEQ ID NO: 87689 - protein, 101 aa, Gossypium hirsutum
  unsure (1)..(101): unsure at all Xaa locations
  Clone ID: LIB3197-047-Q1-M1-A10.pep
VLKCMGINLKDARVXVEKIIGRGSGFVAVEIPFTPRAKRVLELSLEEARQLGHNYIGSEHLLLGLLREGECVASRVFENLSADPSYIRSHVIRMDGEGNKL

SEQ ID NO: 87690 - protein, 59 aa, Gossypium hirsutum
  Clone ID: LIB3197-047-Q1-M1-A5.pep
LAVLSLVQNQSCYFYTSSSNLRVPRHTINLLPLSSQILKDKGSDLICCKWGRMGVDKTG

SEQ ID NO: 87691 - protein, 61 aa, Gossypium hirsutum
  Clone ID: LIB3197-047-Q1-M1-A8.pep
APIRHSSPSYGFLQACSHSNPSLKIKVGRRCTPEGCRQSASMSLSRLLERSLPHLSDSLVR

SEQ ID NO: 87692 - protein, 107 aa, Gossypium hirsutum
  Clone ID: LIB3197-047-Q1-M1-A9.pep
PHVLLGTVGPTVPNADVRLESDAEMGYDALARTPRGEIGLKGSTLFSGDSKREYLTMEVMIEGWVHTGDIGERRPYGEMKVNDRKKNIFKLSQREYVAGDNLYNVYG

SEQ ID NO: 87693 - protein, 56 aa, Gossypium hirsutum
  Clone ID: LIB3197-047-Q1-M1-C11.pep
KINSQLPLILILWGSFSFFGLNFFSQSLKILHHKKKETHIYTYKRQNLEIFPIALS

SEQ ID NO: 87694 - protein, 152 aa, Gossypium hirsutum
  Clone ID: LIB3197-047-Q1-M1-D10.pep
ALVTTFNVEIGITGAILTKLDGDSRGGAALSVKEVSGKPIKLVGRGERMEDLEPFYPDRMAGRILGMGDVLSFVEKAQEVMRQEDAEELQKKIMSAKFDFNDFLKQTRAVARMGSMTRVIGMIPGMGKVTPAQVREAEKNLKLMEAMIEAMT

SEQ ID NO: 87695 - protein, 61 aa, Gossypium hirsutum
  Clone ID: LIB3197-047-Q1-M1-D6.pep
TQHQSLFLSEGREISGKVMAFKKRQFTIVERLTSLYTIVRPFVTGEKHPSHFLVIHGLPSD

SEQ ID NO: 87696 - protein, 43 aa, Gossypium hirsutum
  unsure (1)..(43): unsure at all Xaa locations
  Clone ID: LIB3197-047-Q1-M1-D9.pep
XVMHSMSMVQFICFTGAFEYKEVDLEKAMATISIMKGIPHKIK

SEQ ID NO: 87697 - protein, 76 aa, Gossypium hirsutum
  Clone ID: LIB3197-047-Q1-M1-E10.pep
SNHLLAMPSYEEHSLKEVVAFCIFLSPPHISPCSLTPICIRSKSHFPLLAVLLLTFILVPFFSINSTFHKIHKSPN

SEQ ID NO: 87698 - protein, 101 aa, Gossypium hirsutum
  Clone ID: LIB3197-047-Q1-M1-E8.pep
MQRQKSILSLWQKPSPASQNGAVGEVKGQGASLFPSKQNLNGDVCGSSLEVTGTDTPPEKVPRKVLPVNFASNAEARGSSSLVSSIMHKFVKADDRENGSQ

SEQ ID NO: 87699 - protein, 49 aa, Gossypium hirsutum
  Clone ID: LIB3197-047-Q1-M1-E9.pep
FYFSVTLLTCIRCRNKVIRYYLTEKTYIRSKILTRHKLSTMQTCIIDFP

SEQ ID NO: 87700 - protein, 127 aa, Gossypium hirsutum
  Clone ID: LIB3197-047-Q1-M1-G10.pep
MRELKYWGLLHWVRMRGRPRPWILEDLTMGRPRPRAANTWMFLLLLGEAWAGHSIAQEDKVLGGQECRPHSQPWQAALFHGKQLLCGGVLIGGNWILTAAHCKKPKYTVRLGDQHLHKKDWPEQDIP

SEQ ID NO: 87701 - protein, 84 aa, Gossypium hirsutum
  Clone ID: LIB3197-047-Q1-M1-G4.pep
GVRVGVEPRLRLTRGMWWVLSLRSVDLPDGVPPSLVQVGGIEIPHVRPLLEYQRAIKIEKNSSQYIYMYIYMGKTYILKVNRIS

SEQ ID NO: 87702 - protein, 123 aa, Gossypium hirsutum
  Clone ID: LIB3197-047-Q1-M1-G5.pep
GQRTRRVSGRLPRVLVLAPTRELAKQVEKEIKESASYLNTVSVYGGVSYNLQRNALSRGVDVVVGTPGRIIDLIESKDLRLGEVEYLVLDEADQMLAVGFEEAVEEILENLPSKRQSMLFSAT

SEQ ID NO: 87703 - protein, 117 aa, Gossypium hirsutum
  unsure (1)..(117): unsure at all Xaa locations
  Clone ID: LIB3197-047-Q1-M1-H5.pep
EIKGGLSALRNVGKPTNNGALGTASAPIHMVSSESGNFKDQLWRIFRSLALGFLLISGIGALIEDRGISKGLGLHEEVQVVESNTXFNDVKSVDDANAELKENVHYLRDPKAFTRLG

SEQ ID NO: 87704 - protein, 114 aa, Gossypium hirsutum
  Clone ID: LIB3197-048-Q1-M1-A12.pep
FAFVLEGRDTKSEKREEEKISRRRRHCHCLRRRRRPFSISIGSCDLLSIYNITIIYASPSLRVFFYFLMNALDKPCCSSSSSSSNLSRFIAGLLISLLFHSFQLISNFLTPIHP

SEQ ID NO: 87705 - protein, 69 aa, Gossypium hirsutum
  Clone ID: LIB3197-048-Q1-M1-B12.pep
FRLIFFFYGIICLQFFLTAFRFVFISSSRVGMYSIYHSPSCCFHSFLALFIILLIDFFLTCFVPFVIFF

SEQ ID NO: 87706 - protein, 114 aa, Gossypium hirsutum
  unsure (1)..(114): unsure at all Xaa locations
  Clone ID: LIB3197-048-Q1-M1-B5.pep
HKFIGEETTAAWGASKLTGEPTWIGDPLDGTTNFGHGVPLGGGSHGPTIGKGSTNGGGYQSIMGEPFTXVDLEKGPFLTGPPLEVYFQTDLGRLFLPPKVGPNQIRLPGVVPPT

SEQ ID NO: 87707 - protein, 67 aa, Gossypium hirsutum
  Clone ID: LIB3197-048-Q1-M1-H2.pep
IRHGNCGPTESLEIQRQLGARSPVFYRLEQVSNSPSSVGYMRLKEFNALARKDLVMGNFIFILVDLT

SEQ ID NO: 87708 - protein, 148 aa, Gossypium hirsutum
  unsure (1)..(148): unsure at all Xaa locations
  Clone ID: LIB3197-048-Q1-M1-H3.pep
KIPFNQMKSLRESCYKMLNLNVEXARRFPGSHPVSLNRDNLQLLRQHYYYATWKADGTRYMMLITVDGCYLIDRHFNFRRVQIRFPCSYGNSTHHYTLLDGEMVIGTLPCSQNKERRFLVFDIIACNGNNLMEKPFSERWNMVEKEMI

SEQ ID NO: 87709 - protein, 143 aa, Gossypium hirsutum
  Clone ID: LIB3197-049-Q1-M1-A1.pep
KDKKVKHGIRIAGSVITAGLALAARGKNPMSRSEDPFSALSAWTPSLCVNPADHLCSEYIGYFEHRKKMEEIGAGAIERLATHHSLGGLFMSVGRKGVEAAEPLHLLPSANLTGNLSPSNDFKHAHGIHPWWRPDLSLKCSLY

SEQ ID NO: 87710 - protein, 78 aa, Gossypium hirsutum
  Clone ID: LIB3197-049-Q1-M1-A10.pep
GAGAWGSVFAALLQDSYGQFRDKVQIRIWRRPGRAVDRATAEHLFEVINSREDVLRRLIRRCAYLKYVEARLSDRTLF

SEQ ID NO: 87711 - protein, 77 aa, Gossypium hirsutum
  Clone ID: LIB3197-049-Q1-M1-A5.pep
MENFKGQPRLPKFAVPKRYDLQLKPDLSACKFAGSISIDVDIVAETRFIVLNAAELSINPGSVSFSPRNSSKVFDPK

SEQ ID NO: 87712 - protein, 71 aa, Gossypium hirsutum
  Clone ID: LIB3197-049-Q1-M1-A6.pep
MGRTKGVAEFEETAPVDLDPDDPYKDPVAMLEMREHIGREIWIDIVKAKILRDMVRWCYRIYWVNHVQKCR

SEQ ID NO: 87713 - protein, 126 aa, Gossypium hirsutum
  Clone ID: LIB3197-049-Q1-M1-A7.pep
MPKFSSPSSYFLLFSLALCFYSSSNAGSSHEFPVNVPPAEFAGSLRTTIDAIRKVIPIVSQFGSFFGDFRLSNAISDCLDLLDFSADQLSWSLSASQNPNGKHNSTGDVASDLRTWLSAAMANQET

SEQ ID NO: 87714 - protein, 56 aa, Gossypium hirsutum
  Clone ID: LIB3197-049-Q1-M1-B11.pep
LILMNFYISISILSSPLMFYVAGTQVDILTLICFLFELVGREIFLINWSFKIFPFF

SEQ ID NO: 87715 - protein, 121 aa, Gossypium hirsutum
  unsure (1)..(121): unsure at all Xaa locations
  Clone ID: LIB3197-049-Q1-M1-B12.pep
LDDAILAFVYTNGYRFQPSKWRKTDEIPFDFMRRRVSVILETESNPEGRNIQPFYRFIITKGALEDVLKVCSYVENVDMGEITAVSAEHXHRILNVVEETXNEGLRIIGVAIKNLQQTKLS

SEQ ID NO: 87716 - protein, 142 aa, Gossypium hirsutum
  unsure (1)..(142): unsure at all Xaa locations
  Clone ID: LIB3197-049-Q1-M1-B3.pep
VPVGEDIATFELDLADKQCEVDGDTGSLWHIAKAIHKLESTFGVIPNXRAKCKASDLGSYIMDRMHTEEPMNSCDMAISEINTLILIDREVDIGTPMSSQLTYEGLLDEFLRINNGSVELDSSIMGVQHDGKKMNVPLNSSD

SEQ ID NO: 87717 - protein, 94 aa, Gossypium hirsutum
  Clone ID: LIB3197-049-Q1-M1-B6.pep
IPEGFSHSSDAITKEEIQSISEKIYRADTNKAQKEDIILNSQNCISPSETRDQRDRCPKPLFTYVNEKLFSKPTYAAFINLLNNYQRATGHGEH

SEQ ID NO: 87718 - protein, 43 aa, Gossypium hirsutum
  Clone ID: LIB3197-049-Q1-M1-B7.pep
KLDYLFSLGRVVKESIQRTCRRKKILVSVRNKKSVSYFYTSKV

SEQ ID NO: 87719 - protein, 79 aa, Gossypium hirsutum
  unsure (1)..(79): unsure at all Xaa locations
  Clone ID: LIB3197-049-Q1-M1-C2.pep
IWIFKRGPPFFYLFFXIFFFFFFFFFFFFFFFXSVNPDLATFISTKETSNINGNMGNCRLTFQPLPSISFPSLFDHRFP

SEQ ID NO: 87720 - protein, 99 aa, Gossypium hirsutum
  Clone ID: LIB3197-049-Q1-M1-C3.pep
MFQAKNNSAICLNQSTLNDVSSVLSPSIIRCLSDISEMDTVHLSVDLVSAARRTVGFLRSVNECQWLHQRPTIIEAIRRYDKVWMPLISNLTVVGSTPP

SEQ ID NO: 87721 - protein, 88 aa, Gossypium hirsutum
  Clone ID: LIB3197-049-Q1-M1-C4.pep
DEPLILFLKAGCITLSPESSSSILEIHSFIRFTRTGIAEMLLEIFSLSSCIFSFVLFSVSNSLSSESIKIKILVNYQERLFNPDFTNP

SEQ ID NO: 87722 - protein, 140 aa, Gossypium hirsutum
  Clone ID: LIB3197-049-Q1-M1-C8.pep
VDADNGSKNTEEETIQFKTMTVETCDQAIKIHLSVHSESNEIEDDKVLDTPTSLDGIHQLHKKLLLLEKREPGTEDSLDGSVFSDIECGDGLLTVEKLKSALKAERKALNDLYTELEEERSASAVAAHQTMAMINRLQEE

SEQ ID NO: 87723 - protein, 127 aa, Gossypium hirsutum
  unsure (1)..(127): unsure at all Xaa locations
  Clone ID: LIB3197-049-Q1-M1-D11.pep
GRVGTIENVEELQKKNPSVCINGGETVNAGVEVANSEVEYIESENLGDLEDVNTCLEKLLPGLESKDWVLVVETLNNVRRLSIFHREAMHSMLGDLIPLVVKSLKNPRSAVWXTCNMTFADIFSAYN

SEQ ID NO: 87724 - protein, 68 aa, Gossypium hirsutum
  Clone ID: LIB3197-049-Q1-M1-D7.pep
EGFRCWSTAGIEHRNRDLTLLWPTFISHVPITKTSSSALGLVAVDSLKKKKRIFLCFAVGHVLVRYKC

SEQ ID NO: 87725 - protein, 57 aa, Gossypium hirsutum
  unsure (1)..(57): unsure at all Xaa locations
  Clone ID: LIB3197-049-Q1-M1-E3.pep
YGHHGEECELRVAYIAPTRPTSPAKEXSIVGSSPWACASDNGLYNTADLASKMALIS

SEQ ID NO: 87726 - protein, 122 aa, Gossypium hirsutum
  Clone ID: LIB3197-049-Q1-M1-E4.pep
FGSVHEKLPETGSTRSMLFPNFGSMFSTAEPHARNEQWDEESLQREGEDYASDAAGGDSDDNLHSPLISRQTTSLEKDMVPPASHISSLSMRRHSTLVQDVTESVGGTGIGGGWQVALKWSE

SEQ ID NO: 87727 - protein, 89 aa, Gossypium hirsutum
  Clone ID: LIB3197-049-Q1-M1-E9.pep
LGFPVSLPNPDQLYEKCRDAVFKCGNISIGYPFSGGDRDPECGHPGLALHCDVFTNTTKIEIFRVKYEVLDIHHENQILRIAREDFIKN

SEQ ID NO: 87728 - protein, 55 aa, Gossypium hirsutum
  unsure (1)..(55): unsure at all Xaa locations
  Clone ID: LIB3197-049-Q1-M1-F1.pep
MSHPQEPQRSFFHFGNPFRSPKGSHLPSGTLSLLGXVEKTLSERLQKLVPKDKSD

SEQ ID NO: 87729 - protein, 94 aa, Gossypium hirsutum
  Clone ID: LIB3197-049-Q1-M1-G4.pep
MGLFGLLSSINWDSEFYPQLTDFVYLPFFALFFLFVRLFLDKFIFENLARRLVLGKGHTLHDVQKHDNRKKLNKFKESAWKCIYFFSSELLSIY

SEQ ID NO: 87730 - protein, 138 aa, Gossypium hirsutum
  unsure (1)..(138): unsure at all Xaa locations
  Clone ID: LIB3197-049-Q1-M1-G5.pep
IVEFCIHVKTPAEKIGLMKQRIMSYIEHKSDHWYQDTMIIFKELEELNRVRIAIWVTHRMNHQDMGERYIRRALLIEELVKIFNDLDIKYRLYPININVCSMPPATSDRLPXNWSGPASLTKFWYWDMVRLQGEDVSR

SEQ ID NO: 87731 - protein, 55 aa, Gossypium hirsutum
  Clone ID: LIB3197-049-Q1-M1-G7.pep
CFNYFLPHLPSFPQWPINFISFSFFLFSNSSSPSLKGFISWFLIERVLLCFGENV

SEQ ID NO: 87732 - protein, 44 aa, Gossypium hirsutum
  Clone ID: LIB3197-049-Q1-M1-H1.pep
IQSQLNVSRKRNRHLHNVDDLGILGHYHHLRRHDSVNKNSTHAS

SEQ ID NO: 87733 - protein, 73 aa, Gossypium hirsutum
  Clone ID: LIB3197-049-Q1-M1-H11.pep
RTVETPVQIYIIPCIQRKINRRGEEHSIEILSFLFFSFNDERSPCFPMSTDAGGDSSKESRRKNQQSFLRIGS

SEQ ID NO: 87734 - protein, 83 aa, Gossypium hirsutum
  Clone ID: LIB3197-049-Q1-M1-H5.pep
SCHFHFFYIYTSNHLFFCKPRIEISSSLFFFWGGVLQRLFSKLNGRVLANVHGNVNYSSSSSTEIYGKFHFFVEPCHYGGARS

SEQ ID NO: 87735 - protein, 85 aa, Gossypium hirsutum
  Clone ID: LIB3197-050-Q1-M1-A1.pep
LVHAKTCHPCQGKFIPNISLKPLNPKFPSSSPASPTNHEKQVSSFEDVPISLYSFHQESVPWKFSDKSWRNASDHIKLIEGSSSD

SEQ ID NO: 87736 - protein, 109 aa, Gossypium hirsutum
  Clone ID: LIB3197-050-Q1-M1-A3.pep
IPSQKGWLNAPGSRAQPHTSCLLHSAFHGPNCALGGLRLLGIDKQMDLSFSKEYSYYLLLLTCPICKSTFVVTTIESCQTSTDSKVVLMQAQGSFGSYLKSSGRWKHGV

SEQ ID NO: 87737 - protein, 78 aa, Gossypium hirsutum
  Clone ID: LIB3197-050-Q1-M1-A4.pep
RSSLIHFSQFPPFHFLNLQILSILFENSLRFLEFQGIAIWNLIYFLIWLLIFSFDFEIFVIKLGFSLIADSNLREFDR

SEQ ID NO: 87738 - protein, 124 aa, Gossypium hirsutum
  Clone ID: LIB3197-050-Q1-M1-A6.pep
PGSKKQVALEKRRAAQNQWQLQQEKHLQHLAKVSAEVRERKTGTQQELEGVFQKLGNLKQQAEQEQDKLQRYQTFLQLLYTLQGKLLFPEAEAEAENLPDDKPQQLTRPQEQSTGDTMGRDAGV

SEQ ID NO: 87739 - protein, 87 aa, Gossypium hirsutum
  Clone ID: LIB3197-050-Q1-M1-A7.pep
RKETFHLSSVMLILRILYASPNFQKPNDNVRERNTSTQQELGDGNKNCHPRIIKETRPLHSEHAPEITALPSEDNMQHFNAIILGPT

SEQ ID NO: 87740 - protein, 60 aa, Gossypium hirsutum
  Clone ID: LIB3197-050-Q1-M1-A9.pep
NIHISNFLSSFLLVCGLWRVDKSVGFLLCFSIQLHQASFSCKFIRFRSPLSLNPSSKFCC

SEQ ID NO: 87741 - protein, 141 aa, Gossypium hirsutum
  Clone ID: LIB3197-050-Q1-M1-B2.pep
DFCKDKKNEMNIFVHTYMQKTTYVTYHIKDVKLQFPVFKEAMVRQEDLFMDLKLVRGIGPAYRACLAEIVRRKASMKLYMGMAGHLAERLATKREVEVRRREEFLKAHGLYIPKDVLASMGLYDTPNQCDVNIAPFDTSLL

SEQ ID NO: 87742 - protein, 66 aa, Gossypium hirsutum
  Clone ID: LIB3197-050-Q1-M1-B4.pep
KLKQDMPINIHKVKNAHDTPLSSNNKCSASVSMFVFEGNEIKTLTNAIQYELYICFYIRKHVNYTT

SEQ ID NO: 87743 - protein, 72 aa, Gossypium hirsutum
  Clone ID: LIB3197-050-Q1-M1-B5.pep
IEMLVWCIKRQIALANAKNLILSLTCFSSQLTRSAGMSSMAEKKDVDKDKPITRVLFCGPHFPASQIYTREY

SEQ ID NO: 87744 - protein, 96 aa, Gossypium hirsutum
  unsure (1)..(96): unsure at all Xaa locations
  Clone ID: LIB3197-050-Q1-M1-C2.pep
AEEDGIFNDYGRIRQSSVELLGDRTVNVAGTCAKXLYVEGGNDEERACTEGQLQTIMEVRRRGKDILRLSAVTKDPTVVRNTGHDADIDGKKNVAK

SEQ ID NO: 87745 - protein, 40 aa, Gossypium hirsutum
  Clone ID: LIB3197-050-Q1-M1-C3.pep
HPMYDSTTSDTEHKVGLLSQLTTTVYPYLKVALTQQIAKE

SEQ ID NO: 87746 - protein, 143 aa, Gossypium hirsutum
  Clone ID: LIB3197-050-Q1-M1-C4.pep
SKEINFPYPLGLTLLHMVFSSVLCFLLTKVFKILKVEEGMTLEIYTTSVIPIGAMFAMTLWLGNTAYLYISVAFAQMLKAIMPVAVFILGVAAGLEVMSCRMLLIMSVISFGVLVASYGEINISWIGVVYQMGGVVGESLRLI

SEQ ID NO: 87747 - protein, 55 aa, Gossypium hirsutum
  Clone ID: LIB3197-050-Q1-M1-D11.pep
NSCMCVIESYFLRDQDNGSFRKVKEFIHQLETLVGASVDRDKSMREIHTHEGVLH

SEQ ID NO: 87748 - protein, 86 aa, Gossypium hirsutum
  Clone ID: LIB3197-050-Q1-M1-D6.pep
MGKKRVMVPAKDLDLSTVKYEHEVIKAPHLTGLMLKLFVRMVEAPVLGSLIMSFLKKQNKMVEMSQNTVIPEAPMFKPEFTPQDAQ

SEQ ID NO: 87749 - protein, 132 aa, Gossypium hirsutum
  Clone ID: LIB3197-050-Q1-M1-F6.pep
MGICWPKPAKCGHASSTNFSGGSKTHTPVSSNLNVDTSVSSNLKAFSYSDLKTAAKSFRSETLLGEGGFGCVFKGWLDENTLAPTKPGTGIVVAIKRLAAESFQGHKEWLAEVNYLGQLHHENLVKLIGYCA

SEQ ID NO: 87750 - protein, 65 aa, Gossypium hirsutum
  Clone ID: LIB3197-050-Q1-M1-F8.pep
KKAKLIYIYILIFFRNFEYLSILCLSSRYRENLQQEYIHILFFQKVRTYTYVCVISLFFSFSNAC

SEQ ID NO: 87751 - protein, 108 aa, Gossypium hirsutum
  unsure (1)..(108): unsure at all Xaa locations
  Clone ID: LIB3197-050-Q1-M1-H10.pep
KDIRTDNLGAGWITAMAHIGLRVNLLIDFPLMTNHVCDIEQRQFVGWRHXMWMRXLLVLIASLTAXILTNFAESLSLIGRQVRCTXEFVLATILHLLVFKGEVDGKGW

SEQ ID NO: 87752 - protein, 82 aa, Gossypium hirsutum
  Clone ID: LIB3197-050-Q1-M1-H4.pep
MQRQTRYTTRTASMVRGKRSLEGDEHQHAEPKRAALASENDEALKVDSLHKLCSSLEPILRRVVSEEVERALAKLAPPRLNG

SEQ ID NO: 87753 - protein, 57 aa, Gossypium hirsutum
  Clone ID: LIB3197-050-Q1-M1-H6.pep
SWIGSFSLFLNSTFIKTFQACKFRLSLFKSYSKEKEKKNPDILFLCNWLKLCVYLSN

SEQ ID NO: 87754 - protein, 137 aa, Gossypium hirsutum
  Clone ID: LIB3197-051-Q1-M1-A12.pep
ACLTELFQKVCALKGIEQDKVRIWDYFNKRKYAQLSVSNKTLEESNLQMDQDILLELVDGHLSSKIGMDSTGNDLALVSLEPSRSPLTIAGGPTLSNGHSGYRSNLYPGSSLGSGLTDMDDGFDACNSARKREKGGL

SEQ ID NO: 87755 - protein, 61 aa, Gossypium hirsutum
  Clone ID: LIB3197-051-Q1-M1-A9.pep
FPPFFQTLTFQLVPQFQISPGLSNRSSISILSPTLTAQILIFLSDSFTNSSIQLSLSFNYG

SEQ ID NO: 87756 - protein, 64 aa, Gossypium hirsutum
  unsure (1)..(64): unsure at all Xaa locations
  Clone ID: LIB3197-051-Q1-M1-C11.pep
LIQSHDLQSHADAKTCVYCPQANPDWASNSYRIFMCLECYCEHLGVGVHISIXRAAPMDSWTGI

SEQ ID NO: 87757 - protein, 54 aa, Gossypium hirsutum
  Clone ID: LIB3197-051-Q1-M1-D11.pep
GCQNYINLGILNLQLYDPSYPTNCFQCLMDRLRPRQRPVFSGFTKAEVSQHGNM

SEQ ID NO: 87758 - protein, 36 aa, Gossypium hirsutum
  Clone ID: LIB3197-051-Q1-M1-D12.pep
KLIFERRIFSATLVSKKEEKVKNNHIELNQKLQKGA

SEQ ID NO: 87759 - protein, 57 aa, Gossypium hirsutum
  Clone ID: LIB3197-051-Q1-M1-D3.pep
RRSMMMTGFTINIRIYFMVSITPRDLRHGNTIKKNRGRGRGQKTEKACFFRQALVLR

SEQ ID NO: 87760 - protein, 77 aa, Gossypium hirsutum
  Clone ID: LIB3197-051-Q1-M1-E1.pep
KNASHGPNFLPEQPVDGNPKFIYGPMPHLCDTPIERIFSTPIETTLMFACNAKHIVLAKIVQGYILPSSDGHYISTK

SEQ ID NO: 87761 - protein, 99 aa, Gossypium hirsutum
  Clone ID: LIB3197-051-Q1-M1-E6.pep
MSGRHEKEKGVNVQVLLRCRPFSEEELRNNAPQVVKCNEYQREVAVSQNIAGKHFDRVFTFDKVFGPLAHQKDLYEQAVVSIVNEVLEGFNCTNFAMVK

SEQ ID NO: 87762 - protein, 48 aa, Gossypium hirsutum
  Clone ID: LIB3197-051-Q1-M1-F2.pep
VFFFYLYSVCKIRVFVSKRQNPASLVTFLSSQIQPFYLSPHLFGETWR

SEQ ID NO: 87763 - protein, 145 aa, Gossypium hirsutum
  Clone ID: LIB3197-051-Q1-M1-F4.pep
MEMGDQYGLPDFQRLLTRRTHFPASLLPQPSDSPYLAHHRNMALSPPPYHEPPYVLSNGNIAMPSGLLRFNTTGATDFTAAASASAAVGGGGWSLGNIDGGNSRWPRQETLTLLEIRSRLDSKFKEASQKGPLWDEVSRYINILL

SEQ ID NO: 87764 - protein, 49 aa, Gossypium hirsutum
  Clone ID: LIB3197-051-Q1-M1-G1.pep
RTRGLDQIFPQLPIFFLQSFHYFRVLISPYFLNLRIKKNTLEGTTSSNP

SEQ ID NO: 87765 - protein, 107 aa, Gossypium hirsutum
  Clone ID: LIB3197-051-Q1-M1-G2.pep
ALRVEVVNLPGHVQDVGDPVPEAQDQADVGRGTRPIGHQTWQPLGLSLALSFKSHGGSSYSGRRSDPAVRWLQPWTNHFTLLGLFPHLVQTAGSTATPALPLFSEMS

SEQ ID NO: 87766 - protein, 61 aa, Gossypium hirsutum
  Clone ID: LIB3197-051-Q1-M1-G6.pep
LYCVEHGLNTDVQMSSDRIVKCADYASYTFFSETGAGKHVPRAVFGDLEPTGIVEVRTCAY

SEQ ID NO: 87767 - protein, 67 aa, Gossypium hirsutum
  unsure (1)..(67): unsure at all Xaa locations
  Clone ID: LIB3197-051-Q1-M1-G7.pep
ECILDHIWHAGIQDRNACXELYRLEHGIQSDGHMPSDMTVRGGDDAFNNLFSVTGAGSTILLLSLRI

SEQ ID NO: 87768 - protein, 123 aa, Gossypium hirsutum
  Clone ID: LIB3197-051-Q1-M1-G9.pep
VCSGSDLGVQLGLREVEVEGDSQSVIRKLQKKMNDSSEISVYINEALKLSLSFSLCVFLFTNREANKVAHFLASEGIKKGDSTYLLNLVPSGVAEMVAEDKRWTEEARESRRRGNEELGGSVF

SEQ ID NO: 87769 - protein, 80 aa, Gossypium hirsutum
  Clone ID: LIB3197-051-Q1-M1-H1.pep
FASKKGSADGSTDRPIRPSNGGSCGNFTSFRDFSSENRMDILSGMDLHSRIIINLRLSLKSSLQSAKYREDEFKDYGDKN

SEQ ID NO: 87770 - protein, 88 aa, Gossypium hirsutum
  unsure (1)..(88): unsure at all Xaa locations
  Clone ID: LIB3197-051-Q1-M1-H11.pep
RFWYKLDRTFKLSRANTYFRINLKGAYRTLKSCLLTELYIHLLKDELNEIIFYASIAKLETSVAMSDDKLXLMLYGFIDKLPVYLEKN

SEQ ID NO: 87771 - protein, 52 aa, Gossypium hirsutum
  Clone ID: LIB3197-051-Q1-M1-H7.pep
KNIYRCCSICNPQVRPFWSPFTIRSRQYQFEDLINAPHCSQKAVSCSLIGNA

SEQ ID NO: 87772 - protein, 59 aa, Gossypium hirsutum
  unsure (1)..(59): unsure at all Xaa locations
  Clone ID: LIB3197-052-Q1-M1-A9.pep
SYLIKQEMILLCRGIGGLSHSFCGIRCNCIRDFYDWFSFFERFPKRKAXLKCENLYVIN

SEQ ID NO: 87773 - protein, 151 aa, Gossypium hirsutum
  Clone ID: LIB3197-052-Q1-M1-B11.pep
SWSKDRSQKFKSDYVDEMQGRTPLCKVKPKNGRNNFQERLGVKSNGSENRSVDDNKESMGKLSSESSKRENQRNVGQSDAKPDETGGQDVMCTVKKSIMQDGNVKKYMKRFHSDKSDHAEIASGRGNSPSLPPFGGTQNEILTHCPHPNGS

SEQ ID NO: 87774 - protein, 58 aa, Gossypium hirsutum
  Clone ID: LIB3197-052-Q1-M1-B2.pep
TSGEDLSEQYFVEFSRGNFLESEVDCLISFRNLNAMLMWLRSQLEARNFPVGNHFLKV

SEQ ID NO: 87775 - protein, 105 aa, Gossypium hirsutum
  unsure (1)..(105): unsure at all Xaa locations
  Clone ID: LIB3197-052-Q1-M1-B3.pep
LGYEHGVLRSDPAHRIHSEPIDHFNRLTDSLIPLVLNKIGDVTALGRCCDGXRRYRTLAPQVMNVLHRINCVISDDDCSPSSCSYDEIRARGPISNIVTILLGGI

SEQ ID NO: 87776 - protein, 64 aa, Gossypium hirsutum
  Clone ID: LIB3197-052-Q1-M1-B7.pep
LDEMAFGNFKTVIVTQNDKSGLVISILLHKHGHWTYITLREHPQGPSQWFVLIKQKPPPCLFQL

SEQ ID NO: 87777 - protein, 61 aa, Gossypium hirsutum
  Clone ID: LIB3197-052-Q1-M1-C3.pep
PGRRHARDLCYFYYLPLVFPCFDWIKYTAMRDNEVVRVRTYALVYVLIGINTGVLVVNDPA

SEQ ID NO: 87778 - protein, 46 aa, Gossypium hirsutum
  Clone ID: LIB3197-052-Q1-M1-C7.pep
VIQLVLVQSDSAGHIFILFRCGVFANKATANCQLDNPHLCYTCIKC

SEQ ID NO: 87779 - protein, 80 aa, Gossypium hirsutum
  Clone ID: LIB3197-052-Q1-M1-D3.pep
MSFSSSSCMDGSYAEIVVVRHGETEWNADGRIQGHLDVELNEAGKQQAALVADRLSKEPKISAVYSSDLKRALVTAETIA

SEQ ID NO: 87780 - protein, 79 aa, Gossypium hirsutum
  Clone ID: LIB3197-052-Q1-M1-D7.pep
LVWKYLYSIYKGKHHLWPINNGQRQRKNILGGKKAHEKLRKKRMYFANRKLSRCAECLGCDKGRNDDRRKLKNLLAEWK

SEQ ID NO: 87781 - protein, 75 aa, Gossypium hirsutum
  Clone ID: LIB3197-052-Q1-M1-D8.pep
SLVCSSPFHLWASNSLKSNFPQFNSFPVSNREILNICQRLTLYGSKRGGGIEISVDRRTEFICLRGKGTIGNISI

SEQ ID NO: 87782 - protein, 141 aa, Gossypium hirsutum
  Clone ID: LIB3197-052-Q1-M1-F12.pep
ENSGAMLEWRFRVSLHHLVTGYAGLVSARKIVLPLTCIQPKGLESLKRSVHTSNDDGDFAELGLPVERVGGVIAKLMTERPQHFVKINGTKKKLNGSPFKEDSCLNIKDVSLKVGNSFVPSLDLENNDSGRSTFRTSSSVT

SEQ ID NO: 87783 - protein, 85 aa, Gossypium hirsutum
  Clone ID: LIB3197-052-Q1-M1-F4.pep
FTPCRTGQAEMGFGDTGYRTIISRNFATLHSISTTPFTDMWRAYLLNSINDLKDFDMTNLYNYYGSDANDNKTGYAYVNESRIDD

SEQ ID NO: 87784 - protein, 60 aa, Gossypium hirsutum
  Clone ID: LIB3197-052-Q1-M1-G1.pep
LLIRKGYIHEKMHSTASSSSSSSSSYSIIQRLRSLASSKLRFFTFISLYLHVQIFDICQY

SEQ ID NO: 87785 - protein, 61 aa, Gossypium hirsutum
  Clone ID: LIB3197-052-Q1-M1-G11.pep
HAYDLLLLFKTNLNTNSKTILQYSTTLKTLSHSDIDGGNTFCFDVYNGLSLSLSPCLNAAF

SEQ ID NO: 87786 - protein, 123 aa, Gossypium hirsutum
  Clone ID: LIB3197-052-Q1-M1-G12.pep
SVKVYDVVNYDMMVMIRLPYVPGAVEWVYKQGDVKAKLAISDRNSSLVHIYDARAGSNEPIISREIHLGPVKVMRYNSAFDIVISGDEQGIIEYWSPATLQFPESEVHFRLKSDTNLFEIAKC

SEQ ID NO: 87787 - protein, 100 aa, Gossypium hirsutum
  Clone ID: LIB3197-052-Q1-M1-G3.pep
VSNNPLTMLKELFIGITEVPFRCTEQVSLWALAAMKDVGIGLLIEVCCDAISFDFAMRAVKGQTTETRLFNGAGLVAAAGAITAVQMPELLADGELLSQV

SEQ ID NO: 87788 - protein, 68 aa, Gossypium hirsutum
  Clone ID: LIB3197-052-Q1-M1-G6.pep
IQSVSKDSDRRFKCRVKHPSQTHHHRRALCRAACMIVHMGTVKILRGSLPSWTHSIKISKDMQYRIER

SEQ ID NO: 87789 - protein, 107 aa, Gossypium hirsutum
  Clone ID: LIB3197-052-Q1-M1-G9.pep
PHVHLPQQSQSFELILNFILKYGNPTFSLFFSSLHSIFPLILPNSLDSFFNFKIRKKNLLFPLKPIKFRTLILLFLKLRQYKFRGFLLDKNTHNHIYISTTKIKSKS

SEQ ID NO: 87790 - protein, 55 aa, Gossypium hirsutum
  Clone ID: LIB3197-052-Q1-M1-H10.pep
NQSVIKQFHPFVAVLKPLLLSLELFSEFYIHILELSHPRSINCDNTSSLVGAGIS

SEQ ID NO: 87791 - protein, 139 aa, Gossypium hirsutum
  unsure (1)..(139): unsure at all Xaa locations
  Clone ID: LIB3197-052-Q1-M1-H12.pep
LRSSESWSYRRLPTHTATFPVIINSEDEDSESEVLRTRNNNKNKNPLENGDRLDSFLQPKDDPNLGISKQVRALWKKLQQIEVLEEKQLSGCILDDQQIAKLQTRPALENSLAEXGVPVERSHLKGSCSILSDGKGNKK

SEQ ID NO: 87792 - protein, 64 aa, Gossypium hirsutum
  Clone ID: LIB3197-052-Q1-M1-H3.pep
GSPDPTKLLSCSRYDFRLVWLFWPSWVFFSPFFFHTLSILIFPRNKQTSRFRSVLKGFTIGKYI

SEQ ID NO: 87793 - protein, 40 aa, Gossypium hirsutum
  Clone ID: LIB3197-052-Q1-M1-H5.pep
GFSAGFGFCDFLKFSASSVTDFRYIYLSLQKKAQRKVGRF

SEQ ID NO: 87794 - protein, 49 aa, Gossypium hirsutum
  Clone ID: LIB3197-052-Q1-M1-H7.pep
LTFTQSSCFIPDSSILGHQDAGPYQGSLPRYFRNMSRFQSLSMTIYLDL

SEQ ID NO: 87795 - protein, 59 aa, Gossypium hirsutum
  Clone ID: LIB3197-053-Q1-M1-A12.pep
VDTGQGEEKIFTSAAENACYHCFLHHDTTCTLVKLVRKLHCLEPWTKDFTYVKHRVPSP

SEQ ID NO: 87796 - protein, 36 aa, Gossypium hirsutum
  Clone ID: LIB3197-053-Q1-M1-A7.pep
LTRHKERLVFDIMILGLSELSFTCYAYGNIPLVRVG

SEQ ID NO: 87797 - protein, 72 aa, Gossypium hirsutum
  Clone ID: LIB3197-053-Q1-M1-B7.pep
VFYFLIHRSKLLTMASTIFIQTPFQSKSLNKSLNTHFVPSFKLPVSLSFKPRTAAFSKRVHIRAGLIEPDGG

SEQ ID NO: 87798 - protein, 36 aa, Gossypium hirsutum
  Clone ID: LIB3197-053-Q1-M1-C1.pep
KGPIWQKVIKAHFGKFPKLTKGCLQRLVRFTNFGRV

SEQ ID NO: 87799 - protein, 82 aa, Gossypium hirsutum
  unsure (1)..(82): unsure at all Xaa locations
  Clone ID: LIB3197-053-Q1-M1-C10.pep
QMSRMSPAEGCRIQQQMMSNTDLMRMASKSMKNMTPRNLLQAAXQLKHTRSDDMAEIGEKMANASTERIAALRARTDAHISY

SEQ ID NO: 87800 - protein, 101 aa, Gossypium hirsutum
  Clone ID: LIB3197-053-Q1-M1-C6.pep
LEKVMRVTESDRVPNLYIKCLVMLEDFLAEALANKEAKKKMSSSNHKALNAMKQKLKKNNKQYEELINKYRENPESEEEKLEDEDEDEDEDESGSELEDPH

SEQ ID NO: 87801 - protein, 124 aa, Gossypium hirsutum
  unsure (1)..(124): unsure at all Xaa locations
  Clone ID: LIB3197-053-Q1-M1-C7.pep
TEETIQKEAAVMISQFFVLSQRGDNIVFRDYCGELAKXSAXIFFRKAKFWKEDGQEEAPSDFNVDGVNYFHVKVXVGLLFVASTRVNVSPSIGLXLLQRIARVIKDYLWVLXEDSXRKNFVLGY

SEQ ID NO: 87802 - protein, 70 aa, Gossypium hirsutum
  Clone ID: LIB3197-053-Q1-M1-C9.pep
SICIIPLWSMMLNAQILSLRWINFLLLEIYKMKNQKIMPIALQEGMARRIRHAPDQMDLAWKCLEAFFVG

SEQ ID NO: 87803 - protein, 38 aa, Gossypium hirsutum
  Clone ID: LIB3197-053-Q1-M1-D1.pep
HCLSLVRPKSVVCSPVAVLKFDLQMPIRFIPPIYPIPI

SEQ ID NO: 87804 - protein, 26 aa, Gossypium hirsutum
  Clone ID: LIB3197-053-Q1-M1-E10.pep
NYTKLKKRSNKLKKGPPPEHLNVNNE

SEQ ID NO: 87805 - protein, 87 aa, Gossypium hirsutum
  Clone ID: LIB3197-053-Q1-M1-E11.pep
MGEETQSKTTSGPFKNKAFQLAQDTFSPPKVTKGVMDDFNATVSWLASQEETPEPQEIQQVAGQGILTCLQDAIHCLAQKHDVQHIT

SEQ ID NO: 87806 - protein, 81 aa, Gossypium hirsutum
  Clone ID: LIB3197-053-Q1-M1-E12.pep
AGAIDALLDLVRSHQCEEASGRLLEALFNNVRVREMKVSKYAIAPLAQYLLDPQTRSESGRLLATLALGDLSQHEGHARAS

SEQ ID NO: 87807 - protein, 76 aa, Gossypium hirsutum
  Clone ID: LIB3197-053-Q1-M1-E2.pep
PNSGSPRVATGAAWNSQGVGHLDPRPTSFYSKCAKEYHAPHLPNQLDPCLMGLKPANSTRAARHGPGLHNYHVTGV

SEQ ID NO: 87808 - protein, 61 aa, Gossypium hirsutum
  Clone ID: LIB3197-053-Q1-M1-E5.pep
ETHSLRFSEARHAMNNHTKRICTPMFLFIQIRLGHLVSPPLVHFISYNVRRRSAGSKMPGA

SEQ ID NO: 87809 - protein, 62 aa, Gossypium hirsutum
  Clone ID: LIB3197-053-Q1-M1-E8.pep
CKSESGFRLFCFLKFLAQAVRQAPKLQTSFVYARGLQKPKLKLPKQFQSELRRILDEHVRVV

SEQ ID NO: 87810 - protein, 74 aa, Gossypium hirsutum
  Clone ID: LIB3197-053-Q1-M1-E9.pep
QLSELACMSLVHLCILPSRSVNTKLATDFFVWSSSKVKLGGNAPKAQTTLVYARGTQESMIKLPKPFQSEPRRI

SEQ ID NO: 87811 - protein, 103 aa, Gossypium hirsutum
  Clone ID: LIB3197-053-Q1-M1-F1.pep
REVGAPLLEKLPWINSSTQTKTWYQEQAVLRVSLGNFPFFAILALIMIGVKDQNDRRDSWHHGGWIAKMVIWIMLVILMFFLPNVVITVYEILSKFGAGVFLL

SEQ ID NO: 87812 - protein, 84 aa, Gossypium hirsutum
  Clone ID: LIB3197-053-Q1-M1-F3.pep
GDRAMQTVKFFHVLSFDREAQLIDSAPSREWESVHRNHDSKFSSGKNVFSDKELDISGKESEERPFFWGEDRLKMEIISKSTFG

SEQ ID NO: 87813 - protein, 53 aa, Gossypium hirsutum
  Clone ID: LIB3197-053-Q1-M1-G10.pep
SIFVFSPLWWCIQEKKTSEKLITQSGYLLLDGNFQNNYCNHNMYNAVEVMQAL

SEQ ID NO: 87814 - protein, 61 aa, Gossypium hirsutum
  Clone ID: LIB3197-053-Q1-M1-G11.pep
MRPHQSLARTGIAAYVRTLSTAGNAISQEKGLLVHPTLTEAANATLPNNSFIARWDIIAGN

SEQ ID NO: 87815 - protein, 95 aa, Gossypium hirsutum
  Clone ID: LIB3197-053-Q1-M1-G5.pep
FNKLPVPPPPKKKKTKEKLNFTRKKNRTKDTQMGNWINQVKRRTGLQRSWDLKQRKKHKNNIFSRKFWDVNKKTGNGMKRKENEKKDKRFELREG

SEQ ID NO: 87816 - protein, 41 aa, Gossypium hirsutum
  Clone ID: LIB3197-053-Q1-M1-G7.pep
FHGGFKVLAIIEIFRYSLSRQGLVNVGKRLFPDVPSSENGV

SEQ ID NO: 87817 - protein, 63 aa, Gossypium hirsutum
  Clone ID: LIB3197-053-Q1-M1-G9.pep
PTYMERGYTYTLLVLAILYYIGRGGCMHQTIRIHRGSGAHCDICAWLPPIRDFLAIEAEHTDF

SEQ ID NO: 87818 - protein, 114 aa, Gossypium hirsutum
  unsure (1)..(114): unsure at all Xaa locations
  Clone ID: LIB3197-053-Q1-M1-H4.pep
PASTGQGLRISARVARQDGQIFYSLMFESISQITLDGFMIQINTXSSGLAADGPLQVPPLAPGAAARTLLPMVLFQNMSPGPPSSLLHVGVKNNQQPVCYFNDTILMHVLLSEG

SEQ ID NO: 87819 - protein, 88 aa, Gossypium hirsutum
  unsure (1)..(88): unsure at all Xaa locations
  Clone ID: LIB3197-053-Q1-M1-H7.pep
MINKLASSCKEKAFRMNKKYDLGRQSDNTKLLHNXNKYEEYGXGGNEKLSTLRLNTGNXSWXSKAVTRKTKILECVYKAFNNKLVLTQ

SEQ ID NO: 87820 - protein, 76 aa, Gossypium hirsutum
  Clone ID: LIB3197-053-Q1-M1-H9.pep
LNSLYAIIIGGCSCQNMKSVQMITLSKISIYICYLNRLISPSTCSDRILWSSLFRRMCIAFQRLSLQKQYIPMINL

SEQ ID NO: 87821 - protein, 50 aa, Gossypium hirsutum
  Clone ID: LIB3197-054-Q1-M1-A1.pep
STIFFRVLYLIVLFQNQFLSESIIPPIKWLILMTSTLTCTMYRDYFMNKQ

SEQ ID NO: 87822 - protein, 90 aa, Gossypium hirsutum
  unsure (1)..(90): unsure at all Xaa locations
  Clone ID: LIB3197-054-Q1-M1-A2.pep
DRADNPRRRYDQEADMTSAAEASMVNPAFCVSXFLALLKYYDDADDLKHLSEEMHGDTDGIYFDIGDDHKGRFSKGSDAYENTNHMAVVV

SEQ ID NO: 87823 - protein, 143 aa, Gossypium hirsutum
  Clone ID: LIB3197-054-Q1-M1-A3.pep
LVPLEGVRRQFQKYSRKQIDPIEPSATDSKTASSIEDVVVGPQSLEIQEGTDGISLKPIANTDNCESDTGSGKLTDKNNGSGDNKRWHSVPSLPSYVPFGQIYLLENSSVESLSGAEYSKVTSVRSVIVELRERLQSHSMKSY

SEQ ID NO: 87824 - protein, 70 aa, Gossypium hirsutum
  Clone ID: LIB3197-054-Q1-M1-A4.pep
MADVHMGSESETFAFQAEINQLLSLIINTFYSNKEIFLRELISNAPDALDKIRLEGLTYKSKLDAQSELF

SEQ ID NO: 87825 - protein, 149 aa, Gossypium hirsutum
  Clone ID: LIB3197-054-Q1-M1-A5.pep
HASDQIFFIFRVLPRSDSLLPSVRFGFMADFEGNNRETLEDDFCLLEDSDLEGDVDERFYELPILSPKAKAKIPVDYNKALKYVDRKEAGLEDVLRDHALHLLPAKTLFRFKTVSRRWDHWISSPLFAHRQTTYFKNVSGLFCQVADHS

SEQ ID NO: 87826 - protein, 59 aa, Gossypium hirsutum
  Clone ID: LIB3197-054-Q1-M1-B11.pep
SFFLKTLLTLLSSIMIMRMIMIRNFLYFMDKICGSCYNGYVMDMDFNINVNTVLYKLIF

SEQ ID NO: 87827 - protein, 95 aa, Gossypium hirsutum
  Clone ID: LIB3197-054-Q1-M1-B8.pep
IRKIKRERKGIYRITSLELLPPSSISNSKGRKGKKIWYQTRKRNQKRKSVSKENERENNTYLQPLIVSLLRVVGHQVRWWCGGAPRLRPKPKLKG

SEQ ID NO: 87828 - protein, 52 aa, Gossypium hirsutum
  Clone ID: LIB3197-054-Q1-M1-C12.pep
LFCLFPHFFLSSWGLGFRDKQLRDWLLNSRLRNMNWEVKTSSLNFRTSIKNL

SEQ ID NO: 87829 - protein, 147 aa, Gossypium hirsutum
  Clone ID: LIB3197-054-Q1-M1-C2.pep
QRLKQCLSVFFEHYASLSENHKKCLSKAFIPVMRSMWPGIDDNPGGSSYTVSNMRKHAIQASRFMLQMMQTPLYAKGTEAEDDNGCNGSPEIIDGPSQPSVECGEEGLAIRIATEVLRFPAKKTPAERSYVAALCRILASLHFCLSE

SEQ ID NO: 87830 - protein, 76 aa, Gossypium hirsutum
  Clone ID: LIB3197-054-Q1-M1-C7.pep
KGIGLKLLNRDAVADGNDREFGDVGGGLEKSYLFCETAWPPWKRVNRRQGPTSEKAPYVPWGPVRPRRASKIRRTD

SEQ ID NO: 87831 - protein, 151 aa, Gossypium hirsutum
  Clone ID: LIB3197-054-Q1-M1-D1.pep
VEINGYEEYSGMEYRSAGCTEEYNVMQRDLEHAGEEESVLLEGDIGGGLVLQRQITVPKDNPKVLRIESSILARKVGAGSGGFSRLVCLRVHPTFSLLHPTETFVAFTSVDGTKQEVWPETGEKVYQGNLLPNGEWKLVDKCLGLVLINRF

SEQ ID NO: 87832 - protein, 100 aa, Gossypium hirsutum
  unsure (1)..(100): unsure at all Xaa locations
  Clone ID: LIB3197-054-Q1-M1-D5.pep
MARTENLNNFIVGDLPTLFYIPDFITDSEQARLLNNIYQAPISKWKSLKNRRLQNWGGVVHEKGLLSQDLPPWLAKITKRICEESGLXPSAINHVLINEY

SEQ ID NO: 87833 - protein, 94 aa, Gossypium hirsutum
  Clone ID: LIB3197-054-Q1-M1-E3.pep
NFPTIIVERIKIKAFGFKVDTRINFTTDSDIKIPPFIRHYRDISDAPYTIGNKYFRQIGILDPKLITIMPKRLLVILHSQLQFPSKTLKIEIWV

SEQ ID NO: 87834 - protein, 53 aa, Gossypium hirsutum
  unsure (1)..(53): unsure at all Xaa locations
  Clone ID: LIB3197-054-Q1-M1-F2.pep
MTVEGEGPATGIDLGXTTYSCVGRRHHDRVEIIANDQCNEIMPIYVDCTDTER

SEQ ID NO: 87835 - protein, 66 aa, Gossypium hirsutum
  Clone ID: LIB3197-054-Q1-M1-F4.pep
NQKRDPTKAGQVIQETFTEFLDSLFVSFNSVTHSSPYTLFFFHIQRFLSLSTIEVLSYSDPGDILF

SEQ ID NO: 87836 - protein, 55 aa, Gossypium hirsutum
  Clone ID: LIB3197-054-Q1-M1-F7.pep
LLSHCRYLGAAALEQITSTTIKAASLEQQWWFLQIPTSSLASNNFKKIDFRFVVY

SEQ ID NO: 87837 - protein, 103 aa, Gossypium hirsutum
  unsure (1)..(103): unsure at all Xaa locations
  Clone ID: LIB3197-054-Q1-M1-F9.pep
FSIRCWNPILPRKRFSAVXFDFTAFDPVNEQNSRVKLIIGGSFGVCQNSQSCTHVIVDKIVYDDHXWLAARNDCLTLVTGLWVXDHSFDIGMPVDATSIMYRP

SEQ ID NO: 87838 - protein, 48 aa, Gossypium hirsutum
  Clone ID: LIB3197-054-Q1-M1-G7.pep
CCKFLVNSTLSNLLACSNAISNLSIVNLISSAIHTTLLTDTCYFYPLI

SEQ ID NO: 87839 - protein, 138 aa, Gossypium hirsutum
  Clone ID: LIB3197-054-Q1-M1-H5.pep
SLLLKVEDENDKRPFSIESGCWQGVDRGKKEELLTQALTLVYLLTRFHEHAFLGLQVMKVGLFPKKELLPPPVGVGTRLKCKAPEKKRGLWSSASCRNVSCPRALKHLDALNTFQLLIIQLLDQSILLKCAIFNISPP

SEQ ID NO: 87840 - protein, 56 aa, Gossypium hirsutum
  Clone ID: LIB3197-054-Q1-M1-H8.pep
PTRTNTYKVELAIPCATNTGLKTFRIDQSSLSYYKSSYVVNSAPYTVGISLVPFLF

SEQ ID NO: 87841 - protein, 110 aa, Gossypium hirsutum
  Clone ID: LIB3197-055-Q1-M1-A5.pep
PVKGWRAGGGPGFGFLPPGLCTVPWAPQPQRQGLPAEATGQALIYDVLKEATVCGNCKRIRNLGCDLRHVSWVLRGKEAGTVIVDNEGVSLDVMKCNFMVWCKNSYFPVN

SEQ ID NO: 87842 - protein, 138 aa, Gossypium hirsutum
  Clone ID: LIB3197-055-Q1-M1-A6.pep
ENLLVAEIYNHRIIRYLEELSDSLSLIRDDDTLVAYRLNKDIEKAPLVVFMHQQMEEQYMLGKLTSSWKTFGIPLVARLSNVVTGSDIHGLYLKLLNSFQTQAEDVLEDNDTSESTAVEAISLKEHDASFSTSNGIEK

SEQ ID NO: 87843 - protein, 67 aa, Gossypium hirsutum
  Clone ID: LIB3197-055-Q1-M1-B5.pep
MVVKGEESDRILELFLKIGLDERTARNTIANNKVTANLTAVVHEAALANGCDRAIGNLLYTVATKYP

SEQ ID NO: 87844 - protein, 70 aa, Gossypium hirsutum
  Clone ID: LIB3197-055-Q1-M1-C4.pep
SSFIYDIIIKFRIWVSCIFSFFLGCFYLSLILVKHWSLSRIWFFKNSIFFCLSYRRVDFDPWGGLLKEKR

SEQ ID NO: 87845 - protein, 134 aa, Gossypium hirsutum
  Clone ID: LIB3197-055-Q1-M1-D5.pep
KRPVRPAIVPKKARATSLHSQIPCCLVYGCNKDLSSLNDFHKRHKVCEAHSKTAKVMVIGIEQGFCKHRSMFHLLPECVEGKRSCRKRLAGHNERRRKLHFNTFSGKSHMEASFISRYQIYWNLHTETNAFVYT

SEQ ID NO: 87846 - protein, 35 aa, Gossypium hirsutum
  Clone ID: LIB3197-055-Q1-M1-E11.pep
MQPDQRRKSAADVDFFTEYGEGSRYRIEEVIGKGS

SEQ ID NO: 87847 - protein, 49 aa, Gossypium hirsutum
  Clone ID: LIB3197-055-Q1-M1-F4.pep
MADMQLVRASKRVEPQYVEMMVPLYSYGCERKVKKTLSHLKGIPNYFLS

SEQ ID NO: 87848 - protein, 123 aa, Gossypium hirsutum
  Clone ID: LIB3197-055-Q1-M1-G12.pep
PTRPKRPKRFLRLVMVNAFIRVTDREKKKKQKGRQNSNRDFSLDLTVVFPYIAIFMLFFSTGDGIEGLRKWILFAEASGGGGGGGGGGFWSYYSVVSPSGIAIAVTAMAGIRSRCYHRLFSKG

SEQ ID NO: 87849 - protein, 66 aa, Gossypium hirsutum
  Clone ID: LIB3197-055-Q1-M1-G3.pep
PSKVQLAHVFPSCSYSLILVKPPPWVALELMKSDQVQVVWVKHNRNQGQIRKHCNINRFQSLCSEL

SEQ ID NO: 87850 - protein, 54 aa, Gossypium hirsutum
  Clone ID: LIB3197-055-Q1-M1-G6.pep
GASRVKCLITRYSTVSCHHKNECDLRHYNFAMYSITYLLNSAHAFFTKHAKSYP

SEQ ID NO: 87851 - protein, 92 aa, Gossypium hirsutum
  unsure (1)..(92): unsure at all Xaa locations
  Clone ID: LIB3197-055-Q1-M1-H9.pep
PLFLVQALTTLTDSEIYAGINDYPPYLFEGYPXYGRDFAYKKPTGRCCYGKLTTDITAETLGVTTNTPPYLIPEALWKNLLLGANIASSGSG

SEQ ID NO: 87852 - protein, 92 aa, Gossypium hirsutum
  Clone ID: LIB3197-056-Q1-M1-A1.pep
VKDSNPKLVVTVPELFDKVKDFNLPVILLGPKRNRQPFDVKNVPKILSFHDLLDLAGDVKEFPRVSVKQTDTAALLYSSSTTGISKGVVLTH

SEQ ID NO: 87853 - protein, 97 aa, Gossypium hirsutum
  Clone ID: LIB3197-056-Q1-M1-A2.pep
QVKAEHQVSSGLLQPITIPEWKWERITMDFVSGLPLSPRKKDAIWVIVDRLTKSAHFIPVCMDYSLDKLAGLYISEIVRLHGVPVCIISDRDPRFTS

SEQ ID NO: 87854 - protein, 89 aa, Gossypium hirsutum
  Clone ID: LIB3197-056-Q1-M1-A8.pep
ASPPFYPSGSCNKDTALTQKKDVHAESVSRNLCPSVTDENFSASQSSSLRGKNVLDSLSMAKLYIDDPSMSASAKPLTNVQMVPFWIFI

SEQ ID NO: 87855 - protein, 124 aa, Gossypium hirsutum
  unsure (1)..(124): unsure at all Xaa locations
  Clone ID: LIB3197-056-Q1-M1-B2.pep
FIRTSKVISDLXGELSSIINLLSTQATLIHGLAEGVHIDSLSPIVSEGPNANSLLNIEDIEPSDLEKWSAEFPDHLDVLLAEKRVDEALAALDEREQAPAEAKETNSLSPAALTYLQTAIVERK

SEQ ID NO: 87856 - protein, 49 aa, Gossypium hirsutum
  Clone ID: LIB3197-056-Q1-M1-B4.pep
TLHIIWPLICICRPPSVRFKFMWTGLAIHSIHINHGRPPRTFMRQRTRG

SEQ ID NO: 87857 - protein, 51 aa, Gossypium hirsutum
  Clone ID: LIB3197-056-Q1-M1-B5.pep
WLMCLSIFNSVKSYVTSHTHLHTKQALEIDEFVKTFAVDSVEHFPFFFFLV

SEQ ID NO: 87858 - protein, 46 aa, Gossypium hirsutum
  Clone ID: LIB3197-056-Q1-M1-B7.pep
NCFTSPRSSFLFRFLKGKRFGKVLEGSRIRAPSIAVHGGAMTGLRL

SEQ ID NO: 87859 - protein, 40 aa, Gossypium hirsutum
  Clone ID: LIB3197-056-Q1-M1-B8.pep
TMYSFEEILTCTWIKFASFSGSKAFSILGKSVKLYFLYDC

SEQ ID NO: 87860 - protein, 138 aa, Gossypium hirsutum
  Clone ID: LIB3197-056-Q1-M1-C1.pep
MFGAQASTSAFGTPSSTPAFGTPSSTPAFGTPSSTPAFGTPPSTPAFGATSSTPAFGTPSSTPAFGTPSSTPAFGTPSSTPSFGAPSSTPAFGTPSSTPAFGTPSTPSFATGFGGSSLFSTPFSSQTQQQQTSLFQQP

SEQ ID NO: 87861 - protein, 101 aa, Gossypium hirsutum
  Clone ID: LIB3197-056-Q1-M1-C12.pep
MKSTQMNGSYPNESKAGQTVVIGSSGFIGRFITEACLDSSRPTYILIRSSSNSSFKAFTIKFLQDKGAIGIYGSITDQEFMEKVLREYKIEVVISAVRGES

SEQ ID NO: 87862 - protein, 55 aa, Gossypium hirsutum
  unsure (1)..(55): unsure at all Xaa locations
  Clone ID: LIB3197-056-Q1-M1-C5.pep
EFEDQKPEDWDDKGYIPAPEDRKPDGYDDISKDIPDPDANKPEXWDDEEDGEWTP

SEQ ID NO: 87863 - protein, 58 aa, Gossypium hirsutum
  Clone ID: LIB3197-056-Q1-M1-C7.pep
PAVSMALSTESIGLIHSAITALLRLQSSLRATSMSGVREGATWSIRAHTISTHSRKLE

SEQ ID NO: 87864 - protein, 63 aa, Gossypium hirsutum
  unsure (1)..(63): unsure at all Xaa locations
  Clone ID: LIB3197-056-Q1-M1-D10.pep
VGRRNPLNDSHDLFKRGLXTAAVIAGYADIMKNTENADGWRSLGITHAENDDDHHVGEQSSTC

SEQ ID NO: 87865 - protein, 102 aa, Gossypium hirsutum
  unsure (1)..(102): unsure at all Xaa locations
  Clone ID: LIB3197-056-Q1-M1-D12.pep
GLRAGTLKSCCSTNNPSDGLIRRLSVFHLILLGVGGHIGAGLFVETGTVARDAGPGVTXISGILAGASCELNALCYAQLATRVPCVVRGAYLYTYTVFNEIT

SEQ ID NO: 87866 - protein, 32 aa, Gossypium hirsutum
  Clone ID: LIB3197-056-Q1-M1-D3.pep
NYTKRRLLTCMRTRGGPVGRCRLFLGEDSHRR

SEQ ID NO: 87867 - protein, 122 aa, Gossypium hirsutum
  Clone ID: LIB3197-056-Q1-M1-D8.pep
TKPFLFFNLKTRCCKLDLRNLDLQTFCLVSNPDPSVQDSVIQCRTRLSRHSVDACAFQLHSWRPFHLQQALDSSDPQLTPPKLSSSNGFHPKRPCLSDRTTSFSIDLSKLTLLDDDNNNNPI

SEQ ID NO: 87868 - protein, 107 aa, Gossypium hirsutum
  Clone ID: LIB3197-056-Q1-M1-E10.pep
DPWHPSPTLSPFPSLATALPTPHLTSTPSPPAFPVWIPVSSDRDELLCLNRVESGGGFAANATPVMDQPVGEKSSRATTIVEVDWRNRSYPIYIGSGLFDQPELLQK

SEQ ID NO: 87869 - protein, 76 aa, Gossypium hirsutum
  Clone ID: LIB3197-056-Q1-M1-E11.pep
KFLHSYSCKLHPIITLPIIHLHPIFSNHLQCMFVVQHSPYKKQHSSSELVIWSSQPSVYASVIYSLNQCFLINKDF

SEQ ID NO: 87870 - protein, 142 aa, Gossypium hirsutum
  Clone ID: LIB3197-056-Q1-M1-E12.pep
ENMGQWVDYWLNYGAEPKEPQTWEAQNQNQNVFASNFVPLWIDLFNSDTPLVEKVTRSLQSSGLLCAAGIATSLTNSGHQWDFPNGWAPIQHMIVEGLWRSASIEARKVARDITERWIRGNYVAYKKTGTMHEKYNVEKCGE

SEQ ID NO: 87871 - protein, 53 aa, Gossypium hirsutum
  Clone ID: LIB3197-056-Q1-M1-E4.pep
SSLAPIERSADYTMREHMHVPSRRFVPINQSSSMWLLQVYVSCQSREERHLVS

SEQ ID NO: 87872 - protein, 64 aa, Gossypium hirsutum
  Clone ID: LIB3197-056-Q1-M1-E6.pep
VSTALTSFSAWRDYYTHAGLRCTLGSETSRAPDDRMQASHSVMPSAGLHETSYNSIIRREVHNR

SEQ ID NO: 87873 - protein, 46 aa, Gossypium hirsutum
  Clone ID: LIB3197-056-Q1-M1-E8.pep
ETDFKLSVWGNKIGHMHFEILVRYIPTVKCFADFNIYKLLSSLVLK

SEQ ID NO: 87874 - protein, 102 aa, Gossypium hirsutum
  Clone ID: LIB3197-056-Q1-M1-E9.pep
MVHGFINPWRRVLSETTYSLRRGQFGRRRCFSLVAHKAELDKNNIDSVPKLPYFDYSTPPYTRSSAVDILYKRKEYLSPFMLYCYHRPFERMDGRMQYLFDE

SEQ ID NO: 87875 - protein, 125 aa, Gossypium hirsutum
  Clone ID: LIB3197-056-Q1-M1-F10.pep
MRKRTLYVWGVAILCFVVLMIVTPAIPQSQEYHNFSDQRQFLGIPNTLNVISNFTFLVIGVIGLVLCLYNNNFMFNWQGELWGWTCFFIGVADVWDGSSYYNLDPNDSRLVWDILPMTIAFTSIM

SEQ ID NO: 87876 - protein, 95 aa, Gossypium hirsutum
  Clone ID: LIB3197-056-Q1-M1-F11.pep
MFESQTAIASSHSPHLRKPGSKSVSSDLGAGEPGNSVQEGYVFPLTVGEMKASNSPMHTTSIMPSPIFLWRFKVIWFLIWAFTCCKIGWDSVMRM

SEQ ID NO: 87877 - protein, 32 aa, Gossypium hirsutum
  Clone ID: LIB3197-056-Q1-M1-F8.pep
MSSFGALIYQVKFLAMSALTVVRYYAYHLSSA

SEQ ID NO: 87878 - protein, 128 aa, Gossypium hirsutum
  Clone ID: LIB3197-056-Q1-M1-G11.pep
IPLTEEMACTSMAAISLNFQHFRNHRVSFSSCCCFNRKIKLHENQQILSRKYRRKPISALASGLEASISDADDKLIALKEAKIVVESKDENKIQLRVDVTGIETQKVFNKVLTDLARQAPTIPGFRRE

SEQ ID NO: 87879 - protein, 93 aa, Gossypium hirsutum
  Clone ID: LIB3197-056-Q1-M1-G2.pep
SRPSFSNSFSTYPLSLISLLRVRRLLLPRFSYLPFSLSLQHCTFPVTTSISTLLIYTVNRTPLRSFQIPSMQVDLHRQQQLLFLFYVANKKLT

SEQ ID NO: 87880 - protein, 140 aa, Gossypium hirsutum
  Clone ID: LIB3197-056-Q1-M1-G4.pep
DFIGRLPGAYSVNQKLNSAVKNNLSAGSSLTGTGDRQSSNRAGNQGSDLLSPLVDPRFIQYLQRTSYGTTAASPDSLLAGNHGGTLHGDLDGLQKAYIEAILAQQKQQYELSLLGKAGGLNQGYYGNSSYGLGMPYAGNP

SEQ ID NO: 87881 - protein, 121 aa, Gossypium hirsutum
  Clone ID: LIB3197-056-Q1-M1-H3.pep
KKLIETNELPAPAPIEQRWTARSQSPMSPASSSAEDDIFSWVGIIMYLPTMDARQRKEITEEFFHYRHLTQSQLWDKYSAYEHWAKIEVPKDKEELEALQARLKSPFPVDAYNKARRELDS

SEQ ID NO: 87882 - protein, 49 aa, Gossypium hirsutum
  Clone ID: LIB3197-057-Q1-M1-A12.pep
LKFKYVLLKMFILIPNVIYRLNSYKIIGEREHHIQSWESFFNIKFQFFD

SEQ ID NO: 87883 - protein, 86 aa, Gossypium hirsutum
  unsure (1)..(86): unsure at all Xaa locations
  Clone ID: LIB3197-057-Q1-M1-A3.pep
TKRAIKIAFGDMKITLMWVSWTXMFGLFTSWIATDIGVQAISWAHIVIITFISLRFIDIINIMGGFIGGASFKPNGTASFYAAGVG

SEQ ID NO: 87884 - protein, 135 aa, Gossypium hirsutum
  Clone ID: LIB3197-057-Q1-M1-A4.pep
WNPLSWVMEAAAIMAIALANGGGKPPDWQDFVGIITLLVINSTISFIEENNAGNAAAALMARLAPKAKVLRDGRWNEQDAAILVPGDIISIKLGDIIPADARLLEGDPLKIDQSALTGESLPVTKRPGDGIYSVS

SEQ ID NO: 87885 - protein, 84 aa, Gossypium hirsutum
  Clone ID: LIB3197-057-Q1-M1-A5.pep
KDSPGTRDSYGEPLVTSYNRRFSGTVDYIWRSEGLQTVRVLAPIPKHAMQSTPGFPTKKWGSDHIALAAELAFTKSLTNQDPKS

SEQ ID NO: 87886 - protein, 75 aa, Gossypium hirsutum
  Clone ID: LIB3197-057-Q1-M1-A7.pep
LEATYQRFKYLITSSSSTLNKTLSTESAFYIGSRCFHLILTSVVNPRCRNVPHVPGLSVQVQCRPPGSVPRPPVL

SEQ ID NO: 87887 - protein, 141 aa, Gossypium hirsutum
  Clone ID: LIB3197-057-Q1-M1-B1.pep
DFFSVEVTALSSYEDKEELFKEQVAQLRQRFFNSISPGGLAGDRRGVVPASGFSFSAQQIWRVIKENKDLDLPAHKVMDATVRCEKIANEKYCRLSSDEDWLALEEAVQSGSASGFGRRLSSILETYSSEYDSEATYFDED

SEQ ID NO: 87888 - protein, 87 aa, Gossypium hirsutum
  Clone ID: LIB3197-057-Q1-M1-B2.pep
AITFNFFQLEHFGFGFYGYSSINMIDYWDIEQRMFGLPLKSWISCVSVCDLPTLFREFVYLSWLHSRLLDLTYVCALSSILNSIQYK

SEQ ID NO: 87889 - protein, 40 aa, Gossypium hirsutum
  Clone ID: LIB3197-057-Q1-M1-B5.pep
TLTTCILITYDSPSIGKPGITILMHMNVMPPLYEPFGTHR

SEQ ID NO: 87890 - protein, 58 aa, Gossypium hirsutum
  Clone ID: LIB3197-057-Q1-M1-B6.pep
LMYTTHFLLFVLGAETLTTSIFGTYEPPNYFKPPTAFTKPDKVKPPLYEPKPTQFVTL

SEQ ID NO: 87891 - protein, 85 aa, Gossypium hirsutum
  unsure (1)..(85): unsure at all Xaa locations
  Clone ID: LIB3197-057-Q1-M1-C1.pep
EWSKPDFNNYKMDRTWMEXSRASNEYQNGVQSFLDFAFHNXSQENMILCLCKRCGNIYWHYRESVYEHLIVDGFISGYKKWIFHR

SEQ ID NO: 87892 - protein, 82 aa, Gossypium hirsutum
  Clone ID: LIB3197-057-Q1-M1-C4.pep
HSYSNILSPVASYITAVKCPHLSLFSTAQERDLIHNTSKKASKGVILLRRVHLNGLSFKNKLRPDQPFTTIGWWSTGEQSSK

SEQ ID NO: 87893 - protein, 58 aa, Gossypium hirsutum
  Clone ID: LIB3197-057-Q1-M1-C7.pep
MVQDGFLSFSCIYKLLSYCSLKTFSVYFCSLLEPYIPWFFCFYVLNDDSFVCIVLNFA

SEQ ID NO: 87894 - protein, 70 aa, Gossypium hirsutum
  Clone ID: LIB3197-057-Q1-M1-C9.pep
PHIIPGGVTPINVYITEEVIHYIKIAEFSKNQKENKKALYGIISLFKLKYPRIQNPSPYVLLTAYSNRID

SEQ ID NO: 87895 - protein, 42 aa, Gossypium hirsutum
  Clone ID: LIB3197-057-Q1-M1-D10.pep
HNNWIYLPYHYIQIHSILRWQNVFPTFIMLNQLFLHCLTTLH

SEQ ID NO: 87896 - protein, 63 aa, Gossypium hirsutum
  Clone ID: LIB3197-057-Q1-M1-D3.pep
STRACKLNMACFFCFPRRAPAVAQYGQHRRITAALDSQIHAIDNIMVLESYLLMLTTVESVDR

SEQ ID NO: 87897 - protein, 70 aa, Gossypium hirsutum
  Clone ID: LIB3197-057-Q1-M1-D4.pep
MQEKGGSTLSDDSRTKTPHVLTVAGSDSGAGAGIQADLKACAARGVYCSTVITALTAQNTVGVQGASNVP

SEQ ID NO: 87898 - protein, 72 aa, Gossypium hirsutum
  Clone ID: LIB3197-057-Q1-M1-D5.pep
RASGKIRCSLLLMEARSGTFHDPELFHAPLLHHPRRRSGRPLRGFAVIYEGGDSPTLTGHNNHSPRPECISM

SEQ ID NO: 87899 - protein, 57 aa, Gossypium hirsutum
  Clone ID: LIB3197-057-Q1-M1-D7.pep
ESNHRTAEMSGSLIDDDSSFCFNDSLLSATSDFDSFSGFISSPSSHAVSLTAITNLL

SEQ ID NO: 87900 - protein, 120 aa, Gossypium hirsutum
  Clone ID: LIB3197-057-Q1-M1-E12.pep
MWKLEIAEGNGPWLLSTNNFVGRQIWKFDNEASPVSNGQGAQTQYFHPNFNSHRHHVRPSSDGLKNFQLIKENNVDLSIGPVRFEEDEEVKNEKVEIALRKAFRFLSATQASDGHWPSEN

SEQ ID NO: 87901 - protein, 44 aa, Gossypium hirsutum
  Clone ID: LIB3197-057-Q1-M1-E8.pep
TCILTSSSPSSSPLAATFTSRVTIRTKAVALSKSVIEQLVDRVA

SEQ ID NO: 87902 - protein, 37 aa, Gossypium hirsutum
  Clone ID: LIB3197-057-Q1-M1-E9.pep
GSVISSVTVLLMTAAVPAIVTVNVNFARQVDDDSNNL

SEQ ID NO: 87903 - protein, 58 aa, Gossypium hirsutum
  Clone ID: LIB3197-057-Q1-M1-F3.pep
FRCSKKGAQKPLKKLNITHDAENTRTVAADPGCAQTHDESYSSNHVNGLTPEMKQGTR

SEQ ID NO: 87904 - protein, 81 aa, Gossypium hirsutum
  Clone ID: LIB3197-057-Q1-M1-F5.pep
FKRSVTIQRLERQLPYQQRSLPRLRSRQPGIHLQLVGTTRAPSLCWSDLIAMSLHSPCWNDKEVPTRLILLCGHATHCQWS

SEQ ID NO: 87905 - protein, 45 aa, Gossypium hirsutum
  Clone ID: LIB3197-057-Q1-M1-F6.pep
FYFLVNYFILCSPSPSVFPITLTSLYKYKIKFKHKFFQAPKNPNL

SEQ ID NO: 87906 - protein, 46 aa, Gossypium hirsutum
  Clone ID: LIB3197-057-Q1-M1-F7.pep
MGGSRGYSANPSDYKLLEEIGYGASATVYRAIYLPFNDVVAIKCLD

SEQ ID NO: 87907 - protein, 57 aa, Gossypium hirsutum
  Clone ID: LIB3197-057-Q1-M1-F9.pep
LNWHKSQTLYSQISPYICINWIHRDRCQSNIEKGERIFWFKYVLLNKDFIVTHRYQA

SEQ ID NO: 87908 - protein, 77 aa, Gossypium hirsutum
  unsure (1)..(77): unsure at all Xaa locations
  Clone ID: LIB3197-057-Q1-M1-G1.pep
PPDIFFFPLLSLFKLSFLLXPHFFNSFSFILIHPPYLKKLEYVDTIGIKKWNCTRQSKHEISKNWNKKKTRNSQIKP

SEQ ID NO: 87909 - protein, 64 aa, Gossypium hirsutum
  Clone ID: LIB3197-057-Q1-M1-G12.pep
TMKRGKKKLFGHRGDINYDYLTSKTPGLTSTKFTMCTTFSGDETALFLGLLGADDDLDLLLNGS

SEQ ID NO: 87910 - protein, 118 aa, Gossypium hirsutum
  unsure (1)..(118): unsure at all Xaa locations
  Clone ID: LIB3197-057-Q1-M1-G7.pep
NSLSESGFRLSANLGEYFIGPELEQLIQXLAENDPNRYGTPPASKSAIDSLPSVKITKDHLSSKSKQCAVCMDDFEEGIQAKRMPCRHLYHKNCILPWLELHNSCPVCRHELPTDDPD

SEQ ID NO: 87911 - protein, 111 aa, Gossypium hirsutum
  unsure (1)..(111): unsure at all Xaa locations
  Clone ID: LIB3197-057-Q1-M1-G9.pep
SFVRNEQPXFGACYQIALSITDELADLEQAGVDGIPIHHGALPEWLPLMKSVHAFYQTMDEHCLRITHCGVHYIKQMQTALGYYKYKGAVHSIKHMVAALVTHCDCPIYEK

SEQ ID NO: 87912 - protein, 82 aa, Gossypium hirsutum
  unsure (1)..(82): unsure at all Xaa locations
  Clone ID: LIB3197-057-Q1-M1-H2.pep
FIICFVKISRPGYLIRHPPLKEMAWARLSTESLELQHLPPSYFGARLVLACAFLLRVLLKYGPRLDCLHDSVELFVKXPTRP

SEQ ID NO: 87913 - protein, 62 aa, Gossypium hirsutum
  Clone ID: LIB3197-057-Q1-M1-H9.pep
KKRKIFLSSTFCWNWAQLFGFFINYGIFFVGLGSLLFYFSYESLWISHGDPVLPQLGEYLFS

SEQ ID NO: 87914 - protein, 59 aa, Gossypium hirsutum
  Clone ID: LIB3197-058-Q1-M1-B3.pep
SYKDQYFHPNQPKFSNNKPSFFTDHLKREARKKDTHVLVKVVFIFLPPKLTYAIYKLIV

SEQ ID NO: 87915 - protein, 105 aa, Gossypium hirsutum
  Clone ID: LIB3197-058-Q1-M1-B7.pep
CISTYFLIKIFFNITQLSLFVTVISLSLFIKDKFSIFHYFHNVMIFEVLHHLVLNVCVDSNIVLGQRWHPVLNKFFYPVLRPWHAMVKYIMCKSFINKSSKLNYV

SEQ ID NO: 87916 - protein, 113 aa, Gossypium hirsutum
  unsure (1)..(113): unsure at all Xaa locations
  Clone ID: LIB3197-058-Q1-M1-B8.pep
DXCGKFLEYDTSISTLRIQNYLHIRVCLNVAAPLKRKKKVMVGKSMVVYARFKYEKLSLFCFIYGKLGHGESYCPLRLTIDSSKIVVGWDLSLRAVARCRSMVVTDSGWVVVQ

SEQ ID NO: 87917 - protein, 77 aa, Gossypium hirsutum
  Clone ID: LIB3197-058-Q1-M1-C8.pep
IEIRIIECWYCRTIIGSLYKTRNKFHSRRQTSTIDKRLKMMLRTNADNKNGKRERKGNLFQSRRHKETQKNKKGNII

SEQ ID NO: 87918 - protein, 96 aa, Gossypium hirsutum
  Clone ID: LIB3197-058-Q1-M1-D7.pep
HYHFDHTKISEQMCVNNAGKCKLFSSILLFSPLSLSLKSQQPASRNRLLLVFPYLWHYGCTPHLTSPHLISSFSRRESTKKYCMYKNIFCRKKFTF

SEQ ID NO: 87919 - protein, 45 aa, Gossypium hirsutum
  Clone ID: LIB3197-058-Q1-M1-E1.pep
MDRLHDILKAHRRLRLHVHPHHNKTPGSSEAFKAVSKALPCLNYD

SEQ ID NO: 87920 - protein, 75 aa, Gossypium hirsutum
  Clone ID: LIB3197-058-Q1-M1-E2.pep
RHSEHSGVSEDVSVSVSENEFVKWLPDRFGLQNGSEDSSNFDCEHSSDLGEVERERVRQIFHEWMNSGGKGCTSN

SEQ ID NO: 87921 - protein, 109 aa, Gossypium hirsutum
  Clone ID: LIB3197-058-Q1-M1-F2.pep
LEPLKSTLHFNISSPFVAEAYACLEATKLGISMGIDSVTIMGDPKTVIHKCQSTTRDKSVIGMIIHDIQSNRSHFQKIAFRFIQRTENGQAHTLAKDALTKGEEVYLIV

SEQ ID NO: 87922 - protein, 110 aa, Gossypium hirsutum
  Clone ID: LIB3197-058-Q1-M1-F3.pep
GKDSLSTQEFNGTDEWQEATRSSEFFRTDKSRMGFKQTNNEEVLVQCTKSHELRHKAKKASIRELEHQLKSGMKVEAVREDHELEKAEKDMKTAKESHGRGEFPCNNETS

SEQ ID NO: 87923 - protein, 67 aa, Gossypium hirsutum
  unsure (1)..(67): unsure at all Xaa locations
  Clone ID: LIB3197-058-Q1-M1-F8.pep
MASTSNSNKMQKLASIDAQLRLLVPSKVSEDDKLVEYDALLLXDRFLDILQDLHGEDLKETVQDCYE

SEQ ID NO: 87924 - protein, 88 aa, Gossypium hirsutum
  Clone ID: LIB3197-058-Q1-M1-G3.pep
RTRGAYGNFVLANVWLHAQVIAMNMQDDSDENVMPDTEIRTTGSPLSWLYHYNLSCNPAFRMIERTGIHHEPGLGGSTIHTTAAATEL

SEQ ID NO: 87925 - protein, 71 aa, Gossypium hirsutum
  Clone ID: LIB3197-058-Q1-M1-G8.pep
LPFPTNGFETVGKQRNTFFVKCLKKLVFLSSNTRSWGVLDNKPWNLTEPQLEWFNVANFKSLKENQSYGWV

SEQ ID NO: 87926 - protein, 120 aa, Gossypium hirsutum
  Clone ID: LIB3197-058-Q1-M1-H2.pep
VAITLFPFLLVIVAICFSFCDANSNVLCIESERNALLKFKNDLVDPSNRLSSWVEGGDCCKWLGVVCHNSTGHINQLHLAAPLPVPHFDAPVAEWEAYHRSKNNSPLKRENNFFIAGVET

SEQ ID NO: 87927 - protein, 84 aa, Gossypium hirsutum
  Clone ID: LIB3197-058-Q1-M1-H3.pep
GEKYETLVLISVEGVGILKYKTALLVYDRLVNSLATPKDTFELRDEWHTTRLHIGQLVIETSAKLTVASETDQNAQHLKKIADA

SEQ ID NO: 87928 - protein, 145 aa, Gossypium hirsutum
  unsure (1)..(145): unsure at all Xaa locations
  Clone ID: LIB3197-059-Q1-M1-A4.pep
SXFPLFLDYQXFFAQSHPVXPDXXSFTSXSSXXWVFLPFCFAPYSIXSSFXWLXSSMFXLSLXKPMXXKYSLEFSSFWXSSLGRTLISXLCLPTLXLSLFFFWQAYLFYSLCVRRIFSALMFYFSILVDLFFNILNQVCNSDIFT

SEQ ID NO: 87929 - protein, 83 aa, Gossypium hirsutum
  Clone ID: LIB3197-059-Q1-M1-B2.pep
LQYATQITQSLVDGIFESVFPFWFSSVVKIFTPVFCWSLSPLKMQSLTTTIESVYKEREGYFHFSKFSFPLLFTRYSALVVLA

SEQ ID NO: 87930 - protein, 61 aa, Gossypium hirsutum
  Clone ID: LIB3197-059-Q1-M1-C2.pep
PNSLLLTRYLILSKPHSFRLFLSLNPPYIAYIHINSETNYSTFPLKINQFYSLSSAIHSKS

SEQ ID NO: 87931 - protein, 145 aa, Gossypium hirsutum
  Clone ID: LIB3197-059-Q1-M1-C7.pep
LSSVAKNFTPSSIQELSQVAQKCNAINLAEGFPDFPAPPCIKEAAVSAINNDFNQYRRVQGICDQLALKMKKTHGLNVNPLTDIAICCGQSEAFAAAIFSIINQGDEVLLFDPCYETYEGCITLAGGIPVYVALEPPQWTLDPEK

SEQ ID NO: 87932 - protein, 81 aa, Gossypium hirsutum
  Clone ID: LIB3197-059-Q1-M1-D1.pep
LNYFKPTKSINSNKSLSETTKTKQSKPHLCIYNPNSLNCLQHKTKTQFGSRFSQPSYDRPVIPNQKLCKTDNAKDSIEKNL

SEQ ID NO: 87933 - protein, 91 aa, Gossypium hirsutum
  Clone ID: LIB3197-059-Q1-M1-G12.pep
MMELYSRIQPRNGSQSGYQSEWSPAGPETGLEESMWPLSLGGTESYPEPARVPDCVYYMRTGFCGYGNRCRYNHSRNPALVEAAVRATGVY

SEQ ID NO: 87934 - protein, 95 aa, Gossypium hirsutum
  unsure (1)..(95): unsure at all Xaa locations
  Clone ID: LIB3197-059-Q1-M1-G2.pep
MSSSSRGDGENSIDVEELLEIETRCRELRKEKDMLKESQPQGFELIRGLELHVKSLSEACTQDKKHIQKLERELKNCSQXIGNGSFFPLKYCWGV

SEQ ID NO: 87935 - protein, 124 aa, Gossypium hirsutum
  Clone ID: LIB3197-059-Q1-M1-H7.pep
DIFLKTDKIVDDLFYFKDMLSVGESRLSRVVTQNLLSLLILPLLLPLLKLGENKGSYNISAVTSLYIVSRLLQVVGGKHLINGVAGLLLYHYMALCQRDAIATNGDIAGSIGDASPLLHSLNDI

SEQ ID NO: 87936 - protein, 148 aa, Gossypium hirsutum
  unsure (1)..(148): unsure at all Xaa locations
  Clone ID: LIB3197-060-Q1-M1-A11.pep
LIGRRFSDASVXQSDTKLWPFKVIPGPGDKPMICVTYKGEEKQFAAEEISSMVLIKMREIAEAYLGSTIKNAVVTVPAYFNDSQRQATKDAGVIAGLNVMRIINEPTAAAIAYGLDKKATSVGEKNVLIFDLGGGTFDVSLLTIEEGI

SEQ ID NO: 87937 - protein, 49 aa, Gossypium hirsutum
  Clone ID: LIB3197-060-Q1-M1-A6.pep
ITIDLTPVKRNRLHHEGDRISCSEMWSNIHLIGILNFLTFLLLADILGV

SEQ ID NO: 87938 - protein, 144 aa, Gossypium hirsutum
  Clone ID: LIB3197-060-Q1-M1-B10.pep
LVPLGVDSFFQQQRYHLLCFSNQKRNTMKCYLFCKDLILFVFQLFAFFYLASGNLASEKRILLEFKSSVFDPSGVLSSWNSSNNPNHCSWFGVSCNSRSQVISITIPGGCREVSEGNFAQPCSCSSKLSKFPFYGFGLRRSACS

SEQ ID NO: 87939 - protein, 133 aa, Gossypium hirsutum
  Clone ID: LIB3197-060-Q1-M1-B11.pep
VCSKEEGFLGSYYQAKILSPLNDNTLYRVQYKNLVEEEDQTRPLVEIVSADEVRPVPPPVTFTKATQVFHYLDSVDAFDNDGWWVGKITGRQGSKYWVYFETTRDEIAYPVSRLRHHLEWRDGHWILATNTFF

SEQ ID NO: 87940 - protein, 50 aa, Gossypium hirsutum
  Clone ID: LIB3197-060-Q1-M1-B4.pep
VWYHCQSVVLSITPTCEEVDYPGLFHMATITDLILRPVNPPTMYLIASIS

SEQ ID NO: 87941 - protein, 147 aa, Gossypium hirsutum
  Clone ID: LIB3197-060-Q1-M1-C4.pep
GNYDEALDLEAVVCKLSTMHPNIPVIQALAQEVRQTTQSLLSQLLQKLRSNIQLPECLRIIGYLRRIGVFSEYEMRLQFLRCRETWLTGILEDLDQRNAYEYLKGMISCHRMHLFDVVNQYRAIFADDTSGSEENYDGGLLFSWAMH

SEQ ID NO: 87942 - protein, 47 aa, Gossypium hirsutum
  Clone ID: LIB3197-060-Q1-M1-D1.pep
DNVMAIFQDKGGIHSDQEGLIFACKHLADGRTLSDYHTQNEFTLHLV

SEQ ID NO: 87943 - protein, 51 aa, Gossypium hirsutum
  Clone ID: LIB3197-060-Q1-M1-D10.pep
NKEKVQPLFSWNLLLIKENKGCTFSLLAANSMNQQREPLKHFMGQIKADAW

SEQ ID NO: 87944 - protein, 113 aa, Gossypium hirsutum
  Clone ID: LIB3197-060-Q1-M1-D2.pep
VFLNLMADRTSAAPKPIWMKQAEEAKLKSEAEKAAAAKAAFEATFKDVDKGRNKDVVAASSDSESEDTNDLVDKPVGSVDPAKCMAAGPGIAGGTACAASTFMVVTKDANGRK

SEQ ID NO: 87945 - protein, 92 aa, Gossypium hirsutum
  Clone ID: LIB3197-060-Q1-M1-E10.pep
MAEEVISGSGSSGREGEIDIRVGLTSRDSLDSRWVFPGEDDSEIEENGDGDDDLPHRAAVDSEDEDNQEHHLIRTEPRVDSFDVEALEVHGA

SEQ ID NO: 87946 - protein, 67 aa, Gossypium hirsutum
  Clone ID: LIB3197-060-Q1-M1-E5.pep
LFLSYSAFFSLRTTSRSMNLILVHITMPPKLNLISYQKKLICLCIMSRYVHICAEMHSRLTREGLQP

SEQ ID NO: 87947 - protein, 64 aa, Gossypium hirsutum
  Clone ID: LIB3197-060-Q1-M1-E7.pep
MRRWLCCSCLVEDTYQSHENEHLRSPNYNTEGNQKNSKAAAPPKAEVQKSAPPIEVPALSLEEL

SEQ ID NO: 87948 - protein, 63 aa, Gossypium hirsutum
  Clone ID: LIB3197-060-Q1-M1-E9.pep
HTFGLYVHFFDSQDGVICEKYSQRGVQQAAHGLQHMLLERDKHLSTMDYADGTTLMREMYIMP

SEQ ID NO: 87949 - protein, 121 aa, Gossypium hirsutum
  unsure (1)..(121): unsure at all Xaa locations
  Clone ID: LIB3197-060-Q1-M1-F10.pep
TSLFIREFKDIIVHNFGKDLWLKMDTNNHPXIHYHQQPTTNNNNPLPILSHFLTNLHLGLKFTKLNIIVNSSNWITSSKRLSGANQSRIPIKSKQCLNLYAGLTLVNISAGFFSVATLLIT

SEQ ID NO: 87950 - protein, 66 aa, Gossypium hirsutum
  Clone ID: LIB3197-060-Q1-M1-F3.pep
FPFASSLSYFYFFPLFDSSFFTFRIPSFDSLISSFLSLGSFKFVCFENFEVNERKKKTWVVLTRWK

SEQ ID NO: 87951 - protein, 142 aa, Gossypium hirsutum
  Clone ID: LIB3197-060-Q1-M1-G12.pep
KNDLQHRIAKEARGNAILQASLERRKQALHERRLALEQDVCRLQEQLQAERDLRAALEVGLSMSAGQFPNSRGIDSKTRAELEEIALAEADVARLKQKVAELHQQLNQQRQHHYGSISDACDHYQHVQNHNSQQRFLQQDFD

SEQ ID NO: 87952 - protein, 64 aa, Gossypium hirsutum
  Clone ID: LIB3197-060-Q1-M1-G5.pep
IPILVVSTEGSPKRSKAEMEALREARGVSKFVKVAGALLPHEEYPSMVAEELYKFLQENFEVNA

SEQ ID NO: 87953 - protein, 84 aa, Gossypium hirsutum
  Clone ID: LIB3197-060-Q1-M1-G6.pep
MTTFSMVSMGGFTLGERKMERYLVFGKRENERKQSKMQENKLGPNRQKSKAMNQGIKSDEGVKQNRNNRDWGTVIKVVFAGRVG

SEQ ID NO: 87954 - protein, 61 aa, Gossypium hirsutum
  Clone ID: LIB3197-060-Q1-M1-H3.pep
PKGYAEPAIIMGIMTHSARVAPNIVLYHLWRGGTHVVMTGNILLNGKKKRLEYGADAYVTQ

SEQ ID NO: 87955 - protein, 71 aa, Gossypium hirsutum
  Clone ID: LIB3197-060-Q1-M1-H4.pep
VYTNPDTFFKPNFPTSDGPNLEPKKNPKFSRPRALEASGIHWNSTRGSTSHVGSPRSAFTSPESSFSRTRG

SEQ ID NO: 87956 - protein, 46 aa, Gossypium hirsutum
  Clone ID: LIB3083-001-Q1-L1-A10.pep
GMLISRCERCHESALRLVARSWVYEVSETCSRLQFSPSRSVNVLAI

SEQ ID NO: 87957 - protein, 63 aa, Gossypium hirsutum
  Clone ID: LIB3083-001-Q1-L1-A11.pep
PLPQLQIYLGDNTLAQITPSPKIKVYNITSILEERGQFTGVIMLWKATQAADQLINHLNSPHP

SEQ ID NO: 87958 - protein, 66 aa, Gossypium hirsutum
  unsure (1)..(66): unsure at all Xaa locations
  Clone ID: LIB3083-001-Q1-L1-B10.pep
GADGHDLMXLLALISTVSGRSLMVRVLQELTIELXHGVKSRIADVTGEILRKRRAGKIPRVTTSVL

SEQ ID NO: 87959 - protein, 30 aa, Gossypium hirsutum
  Clone ID: LIB3083-001-Q1-L1-B9.pep
GLANYIIKVSYNIPFTCQRSFRCLCCNIHF

SEQ ID NO: 87960 - protein, 94 aa, Gossypium hirsutum
  unsure (1)..(94): unsure at all Xaa locations
  Clone ID: LIB3083-001-Q1-L1-C12.pep
TILVFFIVRAYGDYIISSGGRFLPRAVLMDLEPXTMDSLLTGPYGQLFRPDYYIFGQNGSRNNXAKGHYTEXAPSIDSVLDVVLKETKNCDCLQ

SEQ ID NO: 87961 - protein, 112 aa, Gossypium hirsutum
  Clone ID: LIB3083-001-Q1-L1-D10.pep
IRDELRLSSGPHSSGSATTLQLCTFHEIRIPIDPNDLTFVEYEAEDVGAYAMQMNVGHHTTYNRTLQATMLMQEMSMEIPGNSSMFSAETHYRARFYQGVVNIIANLEELKK

SEQ ID NO: 87962 - protein, 114 aa, Gossypium hirsutum
  unsure (1)..(114): unsure at all Xaa locations
  Clone ID: LIB3083-001-Q1-L1-D12.pep
PVPNQDENTVYGEPSAPQPPRFHVHSFCMTLTVSDSCTHGGFSALMRHADXCVPPLDMSLQPTTQELVAXDMHGIEWRFQHIFRGEPLLHLLQSGWSVHVSSSRLCSRDALIYF

SEQ ID NO: 87963 - protein, 54 aa, Gossypium hirsutum
  Clone ID: LIB3083-001-Q1-L1-D9.pep
GVHVIPVSPKSFLQVFIHSFQIHWTSPVTFLLTKCISVLDSNRSRDPLVLDLQP

SEQ ID NO: 87964 - protein, 60 aa, Gossypium hirsutum
  Clone ID: LIB3083-001-Q1-L1-E12.pep
TLVTIPIFVLKGLLFLSSSSATPNSDAHHYLFLSSCVHSSYPSLCFRTLSSYSGPSNTLR

SEQ ID NO: 87965 - protein, 31 aa, Gossypium hirsutum
  Clone ID: LIB3083-001-Q1-L1-E9.pep
SFALYIYSYSVVSTYARIFVIHHDVLNAYNG

SEQ ID NO: 87966 - protein, 60 aa, Gossypium hirsutum
  Clone ID: LIB3083-001-Q1-L1-F9.pep
YIMHVIMYDVLGNLMRVTYCMTLLIAKRITHVTVTRCRAILPTVTYRCVPYTRPDSKLSS

SEQ ID NO: 87967 - protein, 53 aa, Gossypium hirsutum
  Clone ID: LIB3083-001-Q1-L1-G11.pep
MVIYSKSARVAVYVVLIYVRFVGNESVDVAYDASRWSHDCPSIITRSLAADTR

SEQ ID NO: 87968 - protein, 63 aa, Gossypium hirsutum
  Clone ID: LIB3083-001-Q1-L1-G12.pep
YLTSRGFRGETIPRLYFDRDYALTHHFQYPCRSFFYFRGRKIRTAVTNSLVERHLNCHKMISS

SEQ ID NO: 87969 - protein, 121 aa, Gossypium hirsutum
  Clone ID: LIB3083-001-Q1-L1-H10.pep
EYILAAFDDAIADGVDLITASLGSFFVFEFYSDSVAIGAFHAAEKGVLDVQSAGNSGLAGFQSVASVAPWILSVATCAMDRHFVNKVVLGNGKTLTGLSINTISINRAMVPLVNGMHASSD

SEQ ID NO: 87970 - protein, 62 aa, Gossypium hirsutum
  unsure (1)..(62): unsure at all Xaa locations
  Clone ID: LIB3083-001-Q1-L1-H11.pep
DPITKGRTFELDGCTACTFTPVLAAVHGMCXHCFYQRRHGVHENECPECAPEFRIIWEMIRD

SEQ ID NO: 87971 - protein, 91 aa, Gossypium hirsutum
  unsure (1)..(91): unsure at all Xaa locations
  Clone ID: LIB3083-001-Q1-L1-H9.pep
RGKEIYDTTSNGRVFHLQECTPCTETLVFAGEHXMCFALLHRRVTAXSEIDCPLCATQCRYAVELKRSLXQVSSHHELYFQQVFIQKDKIF

SEQ ID NO: 87972 - protein, 90 aa, Gossypium hirsutum
  Clone ID: LIB3083-001-Q1-L2-B6.pep
GYRVINLLHLIREFPRMTVKFYPISRVWNASSYYGDQIIKSQSPSKFKTKKEARCRRKKLPRTWPPKKMVQISNQWLDLLKCQIPTKNQM

SEQ ID NO: 87973 - protein, 44 aa, Gossypium hirsutum
  Clone ID: LIB3083-001-Q1-L2-C2.pep
LSPWTLLMGMASPRWRFNFYTRWDKELSVLLIWSFLTWKKQLMG

SEQ ID NO: 87974 - protein, 83 aa, Gossypium hirsutum
  unsure (1)..(83): unsure at all Xaa locations
  Clone ID: LIB3083-001-Q1-L2-C8.pep
XSSSQNQINRSSQQTPRLDEVSPDLRTNTTTYILLHHDHHLPHLYKTVGKADITKPQIWMVPSPSSALCLPLCMLGHSSQLLQ

SEQ ID NO: 87975 - protein, 136 aa, Gossypium hirsutum
  Clone ID: LIB3083-001-Q1-L2-D5.pep
LTAAQVLSHPWIKEDGEAPDTPLDNAVLSRLKQFKAMNQFKKVALKVIAGCLSEEEIRGLKEMFKAMDTDNSGTITLEELRQGLAKQGTKLSEYEVKQLMEAADADGNGTIDYDEVITGTLPMNRMDREEPSFHAF

SEQ ID NO: 87976 - protein, 45 aa, Gossypium hirsutum
  Clone ID: LIB3083-001-Q1-L2-D7.pep
HSFFLYIIKSWGKDNNPMTIENYPYHFTIPLQILEHTHDSYRCHA

SEQ ID NO: 87977 - protein, 48 aa, Gossypium hirsutum
  Clone ID: LIB3083-001-Q1-L2-E3.pep
YHVLRARVNGLGYRLDEHLMPYLEAFGFGSVALICMFDLRCDLIFPLV

SEQ ID NO: 87978 - protein, 50 aa, Gossypium hirsutum
  Clone ID: LIB3083-001-Q1-L2-E8.pep
TCRDLPDSRSTICWLCNYQTVVQTLIMQFQAVMLTSAIMCFFRRTDNMKL

SEQ ID NO: 87979 - protein, 104 aa, Gossypium hirsutum
  unsure (1)..(104): unsure at all Xaa locations
  Clone ID: LIB3083-001-Q1-L2-F7.pep
VDWKPDLKAEKXAVYATVIAYRKQQLREKKRRLEMQRLEKERQADLISYKGLMVSEMMTLDNQIASDKLVFPGSRKGCYVKLATRQIMVVSFYFFVIASLSYLP

SEQ ID NO: 87980 - protein, 53 aa, Gossypium hirsutum
  unsure (1)..(53): unsure at all Xaa locations
  Clone ID: LIB3083-001-Q1-L2-F8.pep
QMHAIGTSLILAINVNDSGTKSKLDNXYGCRXNFPMDXMRATDEMIAGKVADD

SEQ ID NO: 87981 - protein, 101 aa, Gossypium hirsutum
  Clone ID: LIB3083-001-Q1-L2-G1.pep
MALETASRPATPSAQVVGNAFTEQYYHILYNSPEWAHRFYHDSSVISRPDSSGVMTSVTTMQGINEKILSFDYTYHKAEINTDDAQKSYHEGSTILGTGCL

SEQ ID NO: 87982 - protein, 56 aa, Gossypium hirsutum
  Clone ID: LIB3083-001-Q1-L2-G6.pep
AATWPIGSFLVIVGAFGNHFAGQDHRKREEQGRRSFLKEDKTIPKQKKLKTENRMP

SEQ ID NO: 87983 - protein, 86 aa, Gossypium hirsutum
  Clone ID: LIB3083-001-Q1-L2-G7.pep
DCSKCLCLSNCDDLKYLSNELRLLDRKGCPLRSLPSSFQPDNLVALFIPYSNIKHLWKGNRPLYKLTMMNLEWSQYLIKTPNFTTV

SEQ ID NO: 87984 - protein, 72 aa, Gossypium hirsutum
  Clone ID: LIB3083-001-Q1-L2-H1.pep
MSLRPSTRTEVRRNRYKVAVDAEEGRRRREDNMVEIRKSKREESLQKKRREGLQAQQLSASLQSSNVEKKLE

SEQ ID NO: 87985 - protein, 38 aa, Gossypium hirsutum
  Clone ID: LIB3083-001-Q1-L2-H5.pep
CLKAFHIVVMSCRLSYMYSITVPYETTAHVRLNNQVRH

SEQ ID NO: 87986 - protein, 28 aa, Gossypium hirsutum
  Clone ID: LIB3083-001-Q1-L2-H6.pep
WNHTSLGLAFYVICFICMIHSLMSDSID

SEQ ID NO: 87987 - protein, 45 aa, Gossypium hirsutum
  Clone ID: LIB3083-001-Q1-L2-H7.pep
MEIFTISYQNHQKTSIQYILVFISIPLILLSSPLNSLAWFKIQIR

SEQ ID NO: 87988 - protein, 73 aa, Gossypium hirsutum
  Clone ID: LIB3083-001-Q1-L2-H8.pep
GFPNLLRFARNSPNKTNTATAQGRTVPIQNTGIFIHIYTCSVAYNLKPVPNLEKTYLRWPSIHYEMTVCMKTN

SEQ ID NO: 87989 - protein, 86 aa, Gossypium hirsutum
  unsure (1)..(86): unsure at all Xaa locations
  Clone ID: LIB3083-002-Q1-L1-A4.pep
VMNSSGGSSVKCAACDKTAYPIARDTVNGAMYHTSXFKCTHXGCQISPSNYIXHEGKLYCEHLHLQLFKVQGNYSQLGTELHEQAM

SEQ ID NO: 87990 - protein, 83 aa, Gossypium hirsutum
  Clone ID: LIB3083-002-Q1-L1-A8.pep
LYTEAQILRLAIENAQLFGSRDVSGIVSYDASWLHVDVCKANELGDESDIPVRTLSNDSQFNVIRHTIRVYRYRDPALCRRNR

SEQ ID NO: 87991 - protein, 42 aa, Gossypium hirsutum
  Clone ID: LIB3083-002-Q1-L1-C10.pep
FIISGQDCIGSTGTCRVELGSEILVYFLNPNISAFGYHLRYL

SEQ ID NO: 87992 - protein, 131 aa, Gossypium hirsutum
  Clone ID: LIB3083-002-Q1-L1-C11.pep
LNSAVFSDGSFCYIPKDTKCPMPISTYFRINALETGQFERTLIVADEGSFVEYLEGCTAPSYDRNQLHAAVVELYCAKGAEIKYSTVQNWYAGDEEGKGRIYNFVTKRGLCAGDRSKISWTQVETGSAITW

SEQ ID NO: 87993 - protein, 70 aa, Gossypium hirsutum
  Clone ID: LIB3083-002-Q1-L1-D1.pep
SSFFSFLYLFVRDSPYRSWILLLMAFFLRIPSRGRVYIYTAWAMTMVPTILSLCKIVVKFFDVRKEGSHT

SEQ ID NO: 87994 - protein, 131 aa, Gossypium hirsutum
  Clone ID: LIB3083-002-Q1-L1-D12.pep
PEPNQDENTVNKEPPAPQPPRFHVHSFCKTLTASDTSTHGGFSVLRRHADECLPPLDMSRQPPTQELVAKDLHGNEWRFRHIFRGQPRRHLLQSGWSVHVSSKRLVAGDAFIFLRGENGELRVGVRRAMRH

SEQ ID NO: 87995 - protein, 83 aa, Gossypium hirsutum
  Clone ID: LIB3083-002-Q1-L1-D6.pep
LCIGQSSADTWPCPAEADHYHFTLVYLILGLINGDAAYSNSSWDTICSLVSSYGQLSGRACSIQLSNLCTNGIVSEVIVSAST

SEQ ID NO: 87996 - protein, 131 aa, Gossypium hirsutum
  Clone ID: LIB3083-002-Q1-L1-F11.pep
KDKAEKSDLLEKETVGEKGEKDVLLENKDQVVVEKANENNPVEKVKGNVDESSSGNIVTEKVNLEKNEEVCKDDSMAKSVEKVASEAKDGENKEPSNGKGKDSDISVASSHPSMVEEEEEEDLGWDEIEDL

SEQ ID NO: 87997 - protein, 76 aa, Gossypium hirsutum
  Clone ID: LIB3083-002-Q1-L1-F2.pep
HFVLVIPDHRLLIPNRIHLHATLDNPISFFQPTYIPYIVTFANLFKPTPTLEDLVIGGCAWTKIELSSHGKLLRKL

SEQ ID NO: 87998 - protein, 43 aa, Gossypium hirsutum
  Clone ID: LIB3083-002-Q1-L1-F6.pep
RQIAKSLPDTTLCHSYLKLRLNQHPYIHLHLMTHLTCQNLIHI

SEQ ID NO: 87999 - protein, 75 aa, Gossypium hirsutum
  unsure (1)..(75): unsure at all Xaa locations
  Clone ID: LIB3083-002-Q1-L1-F8.pep
FSTGTNPHVPADKPDSKPSSFEGVPLESAYVAVSEYAVVDKDLLCPISMHIINDALITFCXHSYCYIYLITHLRN

SEQ ID NO: 88000 - protein, 40 aa, Gossypium hirsutum
  Clone ID: LIB3083-002-Q1-L1-G12.pep
RTAPLQIYFRSMANHFVIKIILMNATTSIHSPAFFNHERK

SEQ ID NO: 88001 - protein, 69 aa, Gossypium hirsutum
  Clone ID: LIB3083-002-Q1-L1-G3.pep
GRPPDIHVLIQVEPSLIMTDRMQVHSMSMAASKVYKRMKYRMIQTFAIQHSITMVATLMIVRNGTCIVA

SEQ ID NO: 88002 - protein, 87 aa, Gossypium hirsutum
  Clone ID: LIB3083-002-Q1-L1-G4.pep
EFLFLSAMYGIAVPGVSGQATATPSNPLDMDSGSHRLHPFPHLHLLLNHLLHPPLLIRHQLCLLLLLHDHHQLPLILQRLRTPLALD

SEQ ID NO: 88003 - protein, 69 aa, Gossypium hirsutum
  Clone ID: LIB3083-002-Q1-L1-G5.pep
PFISVRSKIFFSLFNFCPHLYLENEEALEYHLLPRFMVRVIKMESRDIRIGKSGTSSTKWRWQRTCWLF

SEQ ID NO: 88004 - protein, 114 aa, Gossypium hirsutum
  unsure (1)..(114): unsure at all Xaa locations
  Clone ID: LIB3083-002-Q1-L1-G6.pep
LSSAYGLSSLHEDCHPTIIHRDIHAGNMLLDPKFESPVGDPGLAKIAFDVNTLFFTSVMCTNPVFXAPEYASSGKLTDXSDVAFSRAMLLELITGHRPDLSSFMDDIPVDRATP

SEQ ID NO: 88005 - protein, 48 aa, Gossypium hirsutum
  Clone ID: LIB3083-002-Q1-L1-G7.pep
YSPSRSSPKSSSWFSSIQVIPAVVHHSVYIKGWRSFQAPTWNEKSLHC

SEQ ID NO: 88006 - protein, 58 aa, Gossypium hirsutum
  Clone ID: LIB3083-002-Q1-L1-H12.pep
PTSSLIIILGAVRSSCWDHCLRSTSKSAAVKRSKDRACLLCSTSKAADTDHAVLTGLS

SEQ ID NO: 88007 - protein, 104 aa, Gossypium hirsutum
  unsure (1)..(104): unsure at all Xaa locations
  Clone ID: LIB3083-002-Q1-L1-H3.pep
RIPDQVKPCCEPIQGHRVHGHRNVCDAGQDGSLMLCNPVLLAPDDTHWYGCSLQRSWQLTDECSYKPTSLRFLXQLIHPKIYAKGIICLDRLQSNWCPSFECTS

SEQ ID NO: 88008 - protein, 103 aa, Gossypium hirsutum
  unsure (1)..(103): unsure at all Xaa locations
  Clone ID: LIB3083-002-Q1-L1-H7.pep
TLMRDYSRSQGDPPASVSEAGQDDSLMLWNAVLLAPDYTPWDGCSLQWSLQLTDXYSYKPSSCRFLSRLFDPNIYCLRIICLDRLQSHWCSMYEVAAILACTQ

SEQ ID NO: 88009 - protein, 37 aa, Gossypium hirsutum
  Clone ID: LIB3083-002-Q1-L1-H8.pep
KCPMCVFLSLKGESSAAINAANLDYGLMLWDPVFLIS

SEQ ID NO: 88010 - protein, 50 aa, Gossypium hirsutum
  Clone ID: LIB3083-002-Q1-L1-H9.pep
TSRMTIEPIQGIPTIIWLTIARREALSSYSVHTIPFHSYRSIRHFSTSLF

SEQ ID NO: 88011 - protein, 112 aa, Gossypium hirsutum
  unsure (1)..(112): unsure at all Xaa locations
  Clone ID: LIB3083-006-Q1-L1-A2.pep
FSESGCYDLTTTSDVMELLDNLKSLSNEVQTKAALKLRLLANNNMXNRIIIGRCGAIAPLLSLLYSEVKLTHEHAVTALLNLSISEDNNAIIXKIMSIIPLIHVIKSEMMDP

SEQ ID NO: 88012 - protein, 68 aa, Gossypium hirsutum
  Clone ID: LIB3083-006-Q1-L1-A8.pep
YTCEQSGEQQGHQALDWSALTRLRSEPWKWLFQASVVISVILAHMLPLLLMLVVKTLVILATLDVCHV

SEQ ID NO: 88013 - protein, 62 aa, Gossypium hirsutum
  unsure (1)..(62): unsure at all Xaa locations
  Clone ID: LIB3083-006-Q1-L1-C10.pep
CRLKSRSSLIKYPGTCFLHKVXALQLSEMMNMLTYINLVMKNTILDSFKQDSSEVDQQPFSP

SEQ ID NO: 88014 - protein, 52 aa, Gossypium hirsutum
  Clone ID: LIB3083-006-Q1-L1-C2.pep
IITKTPFSKRFLNIFVTIQLNLTKMQFAAFKNQLLILKAAFKNMSTPNKLKL

SEQ ID NO: 88015 - protein, 105 aa, Gossypium hirsutum
  unsure (1)..(105): unsure at all Xaa locations
  Clone ID: LIB3083-006-Q1-L1-C4.pep
QIFTEVNIDLGPVPGSXIKESMKSSTRSAFRPGVVGDQNVYRGFCGILQLSDEVLSLKILSRLTPRDIASVGSVCRRLYDLTKNEDLWLMVCQNAWGYETTRVLE

SEQ ID NO: 88016 - protein, 132 aa, Gossypium hirsutum
  Clone ID: LIB3083-006-Q1-L1-D11.pep
NHVDLLSLGAETTLAIDEGMGEVVDSSPEEQQHQRHPNESSEANIWEEHKKESEMDQTQAPFSDSKTNTGCDEGVPSNSSHQDMSSRESPSSESEKQLLFGKDELPVDEHDKLEEPSIIATESTRVADIVNT

SEQ ID NO: 88017 - protein, 67 aa, Gossypium hirsutum
  Clone ID: LIB3083-006-Q1-L1-D7.pep
QAVQCLKETFIHCGSTYCKYTFGSNNNHTICHVISRTHFFTPLNPCISIHDNKKLNSCCILPDSCIH

SEQ ID NO: 88018 - protein, 68 aa, Gossypium hirsutum
  Clone ID: LIB3083-006-Q1-L1-D8.pep
GHGIYIYSSANLKAYSKIYNAVIHGSKQSLMEIEFVGTMDSSITTLGSSYNNKGTDRPAIHNECTHHL

SEQ ID NO: 88019 - protein, 66 aa, Gossypium hirsutum
  unsure (1)..(66): unsure at all Xaa locations
  Clone ID: LIB3083-006-Q1-L1-D9.pep
YRLIFFIILKMKEKASPFLQEMYAXKTLEHLDKRPSFRKVPSLASSKRHQPLHSLSSQEGLNSPLH

SEQ ID NO: 88020 - protein, 40 aa, Gossypium hirsutum
  Clone ID: LIB3083-006-Q1-L1-E3.pep
LKPFLRKAPTGLEKGDMGTTDEIPRSVLGQASKERLQGAT

SEQ ID NO: 88021 - protein, 120 aa, Gossypium hirsutum
  Clone ID: LIB3083-006-Q1-L1-E5.pep
GAVCTWGGICLAWGKEVQVNLRTFSMNHIDVLIKEEDVDEEWRFTGFYGSPYSQNKKASWDLLRFLGYEQDLSLLVSGDFNEIIYSFEKRGGQPREEKIMEEFRDVLNECQLIDVGYSGT

SEQ ID NO: 88022 - protein, 80 aa, Gossypium hirsutum
  unsure (1)..(80): unsure at all Xaa locations
  Clone ID: LIB3083-006-Q1-L1-E6.pep
SRIDKSIIFVYCRRILSKIQLNDEKNLLVVISPPAKTKGTHCSQSHANYVNKVKAISQRSSWTCIAATYNLCYSNSXFFF

SEQ ID NO: 88023 - protein, 28 aa, Gossypium hirsutum
  unsure (1)..(28): unsure at all Xaa locations
  Clone ID: LIB3083-006-Q1-L1-E9.pep
KSYDGSSFFGKTFRNSKXKILVKFHYLN

SEQ ID NO: 88024 - protein, 54 aa, Gossypium hirsutum
  Clone ID: LIB3083-006-Q1-L1-F7.pep
VTSMCYTFEISFLRVLSLHESIIPFCIRKIKLITTYLPLNNQTNSQYKKDTATC

SEQ ID NO: 88025 - protein, 48 aa, Gossypium hirsutum
  Clone ID: LIB3083-006-Q1-L1-G12.pep
HLFPSFFTLLFFLCVEQLHFVFSNLLLNNSYLDLIQTYNSDDVLIPSL

SEQ ID NO: 88026 - protein, 67 aa, Gossypium hirsutum
  Clone ID: LIB3083-006-Q1-L1-G4.pep
MSLSSYLGSNTRRGGGWAQSLLPSSSPTVKSTLKVHPTRKSRKRTVLINFLLTNFFTIALSLSFIFF

SEQ ID NO: 88027 - protein, 54 aa, Gossypium hirsutum
  Clone ID: LIB3083-006-Q1-L1-G6.pep
THARDQWSIGHIIERAWYLYRTPDPVYNCLTTNIVGHFSTSSLDLRWLSLPIAL

SEQ ID NO: 88028 - protein, 67 aa, Gossypium hirsutum
  Clone ID: LIB3083-007-Q1-L1-A1.pep
QPEGVLLLSIWEPPKNLAYDHTYLHNIPLIPPMDRYLDIQGQRLDHALNGKVKLYTGVKPFILLLTV

SEQ ID NO: 88029 - protein, 41 aa, Gossypium hirsutum
  Clone ID: LIB3083-007-Q1-L1-A12.pep
FEQGAFYLNIFKSVKKYAGYICGTIAHLCYVVPPKNDCFII

SEQ ID NO: 88030 - protein, 94 aa, Gossypium hirsutum
  Clone ID: LIB3083-007-Q1-L1-A7.pep
MQKLGDFKLPHFFNYPPYFTLQPVRETREKQIQLWKELILDYCRTQKIFIVRLEEEFPLFSNSVIERTLSHEAREAFLSALVAKRRAKWLDKRR

SEQ ID NO: 88031 - protein, 108 aa, Gossypium hirsutum
  unsure (1)..(108): unsure at all Xaa locations
  Clone ID: LIB3083-007-Q1-L1-A8.pep
MTVCGSEELESNKDRLLDEAVDALYEKRGSTPEKALAAIIDAFNINLQHGQQFAXRKFATLLHHSLNSIKKGSNKEISLAFHSIGFLALTGFPRDHSXKFLEESMIPF

SEQ ID NO: 88032 - protein, 101 aa, Gossypium hirsutum
  Clone ID: LIB3083-007-Q1-L1-B11.pep
QFNSSVCNKGRIGARSVNKGLIANNPSITISMNSPRDTAGHGTHTSSTAAGTYVGDASYFGYAQGNARGMAPGARVAMYKALWDEGSYTTDVIAAIDQAIN

SEQ ID NO: 88033 - protein, 60 aa, Gossypium hirsutum
  Clone ID: LIB3083-007-Q1-L1-B12.pep
CLESESFRPCRYESRSRPMKVLGARAYSRTLVGTSTLIGIPMTFMVHIFSTSTTPWRWKA

SEQ ID NO: 88034 - protein, 40 aa, Gossypium hirsutum
  Clone ID: LIB3083-007-Q1-L1-C2.pep
RMTYSSMRIQRAMSNFNGTIIECNLVWLLINIINNRTFKI

SEQ ID NO: 88035 - protein, 55 aa, Gossypium hirsutum
  Clone ID: LIB3083-007-Q1-L1-C6.pep
SCYLSTTIAIHDLIHIAARASAILYVLYRHYHSTFTDYYLKISALNVTSASKLNT

SEQ ID NO: 88036 - protein, 45 aa, Gossypium hirsutum
  Clone ID: LIB3083-007-Q1-L1-D3.pep
ENLALKDHVMMLSLFFDVENFKESRVLVIPTFEIFSVNVSAHLAW

SEQ ID NO: 88037 - protein, 80 aa, Gossypium hirsutum
  Clone ID: LIB3083-007-Q1-L1-D6.pep
TIKISKTNVSIKCTIYLLNTTYNATTPKNVVSGCAPTLKPHGAYASLIPSYRFAQRTSLLKACSITTKLPYNYHSFAHYD

SEQ ID NO: 88038 - protein, 53 aa, Gossypium hirsutum
  Clone ID: LIB3083-007-Q1-L1-D9.pep
FAISKIIFKHMTVITNALSLDPIKLSQLSKHLAIQTIHISTFFINQAGTTNVL

SEQ ID NO: 88039 - protein, 88 aa, Gossypium hirsutum
  Clone ID: LIB3083-007-Q1-L1-E11.pep
RGCGAAAENRVGAKKSAGVTASSSTSLSLLLRSSSFDLSFIQDRKRWPTVRIFNPSALIMEPERSTLLLMVMMLQRQIFPVLMVVAGT

SEQ ID NO: 88040 - protein, 88 aa, Gossypium hirsutum
  Clone ID: LIB3083-007-Q1-L1-E4.pep
AFIHSLVHFTGGLFHGRVIFSLRYIQALLLPLIKTQGGYRPLFSYAARSATYRLALHHNASVTGSLTVRSSHQDDTIVLYTWCELTRL

SEQ ID NO: 88041 - protein, 79 aa, Gossypium hirsutum
  unsure (1)..(79): unsure at all Xaa locations
  Clone ID: LIB3083-007-Q1-L1-E6.pep
MDSCNCIEPQWPPDDLLMKYQYISDFFIALAYFSIPLELIYFVKKSAVFPYRWVLVQFGAFIVLCGATHLINXWDFTMH

SEQ ID NO: 88042 - protein, 105 aa, Gossypium hirsutum
  Clone ID: LIB3083-007-Q1-L1-E8.pep
SASQARPLKLLSGTPATIRYSIRSSDMDPLFDRINVRDLLSGHDLSDPSTPLFTPDLRLIISRLEYHSLHIKSKVRSYLLSHREDFDSLFFQCNYADLKTSEISD

SEQ ID NO: 88043 - protein, 67 aa, Gossypium hirsutum
  Clone ID: LIB3083-007-Q1-L1-E9.pep
IFFLISCNFGGLKVVFANLLMMSYLLTFLTLLIWLLPTFEWWMTFLSTMLARKKKFRFPIDFRRIKT

SEQ ID NO: 88044 - protein, 115 aa, Gossypium hirsutum
  Clone ID: LIB3083-007-Q1-L1-G1.pep
EFEDVFPDEVPSGLPLIQGIEHQIDFISGASIPNRPAYRSNPKEIKELEKQVNELLEKGFIRESLSLCTIPVLLVPKKDGTWRMCVICRAVNKITIKYRHPIPCLDHILDELSGD

SEQ ID NO: 88045 - protein, 56 aa, Gossypium hirsutum
  Clone ID: LIB3083-007-Q1-L1-G12.pep
FFFPKIIFPIQSLTFLVSSSQSTITQHEKRTQIVYACTRTKHKHITVPHSHTRSKL

SEQ ID NO: 88046 - protein, 76 aa, Gossypium hirsutum
  unsure (1)..(76): unsure at all Xaa locations
  Clone ID: LIB3083-007-Q1-L1-G9.pep
LFLFSIILIRTHSMMVSSTPIQILVWICVAMSVCASAAPINIMVRVFRTYSDXFMPRTLSFVLTLSAQLSFAYALF

SEQ ID NO: 88047 - protein, 67 aa, Gossypium hirsutum
  Clone ID: LIB3083-007-Q1-L1-H2.pep
FITNFFFFYQSSKLAVFIKSLTQTFTHPIIIHHIQSTHTNLLTTNTQTFTFINQFTHILTNTTHTHS

SEQ ID NO: 88048 - protein, 114 aa, Gossypium hirsutum
  Clone ID: LIB3083-008-Q1-L1-A12.pep
KAETASTKVGNLCKKDPPTKALKSVKNSQKVQKSPQPATMKETVKETTKASSAKRISSRTSPLPATRKSWPSTPSPRTRGTSPAKISAGISSSGTVPTSRKPQSAQLVPRLSPK

SEQ ID NO: 88049 - protein, 61 aa, Gossypium hirsutum
  unsure (1)..(61): unsure at all Xaa locations
  Clone ID: LIB3083-008-Q1-L1-B12.pep
ITLDHLHKEPELYRVDAQRMKMLMQEGAEGNHQTLINGGYAXHAIIEELSCIYKHLKSLIY

SEQ ID NO: 88050 - protein, 66 aa, Gossypium hirsutum
  Clone ID: LIB3083-008-Q1-L1-D9.pep
MLKFLKGVVGGSGAGLKDLPYNIGDPYPSAWGSWSHFRGTSKDDGSPVSIFSLSGSNPQDGHLAAG

SEQ ID NO: 88051 - protein, 120 aa, Gossypium hirsutum
  Clone ID: LIB3083-008-Q1-L1-E12.pep
VISHTLLLLLVHLSSSSAATHHHHHHHHHHRSLSPNPKLQQAYTALQAFKKVIYSDPNNITTNWVGPDVCKYTGVYCAPHPHDKTIKVVAGIDLNGDDIAGYLPDELGLLTDLALIHLNS

SEQ ID NO: 88052 - protein, 42 aa, Gossypium hirsutum
  Clone ID: LIB3083-008-Q1-L1-F11.pep
NGLRYVKLFHVKWVCGFKYKIFGVCHQTCYMHSSQNNNHTRN

SEQ ID NO: 88053 - protein, 115 aa, Gossypium hirsutum
  Clone ID: LIB3083-008-Q1-L1-F9.pep
EVLNLYKAPLCVGGWDEALHEICRLSHETILSPQNATSLLNAVEEMPVLVIAGAEDSHISLKSSQAMASKLVNSRLVAISGCGHLPHEECPKALLAAISPFISRLLIQTRIAKSQ

SEQ ID NO: 88054 - protein, 69 aa, Gossypium hirsutum
  unsure (1)..(69): unsure at all Xaa locations
  Clone ID: LIB3083-009-Q1-L1-D10.pep
FCTSKIFPILDKTQILTYIIQMLKAXKIILLNHFILIIPTIYHNLTFLFLLQFNDHHTKFIYLITISFN

SEQ ID NO: 88055 - protein, 37 aa, Gossypium hirsutum
  Clone ID: LIB3083-009-Q1-L1-D11.pep
HQTLLYIAPPIQTPTNFFFFYHSLHPSFNEMFLSSIN

SEQ ID NO: 88056 - protein, 63 aa, Gossypium hirsutum
  Clone ID: LIB3083-009-Q1-L1-E5.pep
DQHKLKPCLKTIDESSYSLLCTARAKQFKISASTFGCLPLRLPLRRKERDQAGFVSFRLKKLQ

SEQ ID NO: 88057 - protein, 74 aa, Gossypium hirsutum
  Clone ID: LIB3083-009-Q1-L1-F12.pep
RPKHWCWLYYGGMATKFPQILTFLSNLPSPLSPSSVLKWSLIFFNLYYIIYFSTIYNNTNYTIFSSTTKFIIPD

SEQ ID NO: 88058 - protein, 59 aa, Gossypium hirsutum
  Clone ID: LIB3083-009-Q1-L1-G10.pep
WCESIWYCIIIEVVVKLKMKWWKFELFKERIVMNEIKRIKKVIVFMFRLDYSVFDELKR

SEQ ID NO: 88059 - protein, 55 aa, Gossypium hirsutum
  Clone ID: LIB3083-009-Q1-L1-G11.pep
KKMASKNHRKLITLYFPPFQHKIITFQKKITIHPPNNAKTNSIQIPYFIIILIYH

SEQ ID NO: 88060 - protein, 56 aa, Gossypium hirsutum
  Clone ID: LIB3083-009-Q1-L1-H5.pep
QLLFFFVSQPNSPGIDFIYKIASFLKQLLLSKNSYITQHNFLSPHYYLLNLLYHLY

SEQ ID NO: 88061 - protein, 72 aa, Gossypium hirsutum
  unsure (1)..(72): unsure at all Xaa locations
  Clone ID: LIB3083-009-Q1-L1-H6.pep
MVELENSSAMTVSTASGEATASSLGNQIXTINSQADDHXKKKRNLPGMPDPDAEVIAIFPKTLLATNRFVCE

SEQ ID NO: 88062 - protein, 52 aa, Gossypium hirsutum
  Clone ID: LIB3083-010-Q1-L1-A9.pep
SGTYTITLQTSHSTTMIAPATTFIVNTDVRRQYNYYVFSVLANHHQTAAHAT

SEQ ID NO: 88063 - protein, 82 aa, Gossypium hirsutum
  unsure (1)..(82): unsure at all Xaa locations
  Clone ID: LIB3083-010-Q1-L1-B3.pep
MGGCIRIHIVQASIQFXNACWELXCLEHGIXPYGHMPNDKTVXGGADASYTYFIDTGAWKHVPRACFVDLEPPVIDEVRTGA

SEQ ID NO: 88064 - protein, 63 aa, Gossypium hirsutum
  Clone ID: LIB3083-010-Q1-L1-B4.pep
VQAAFLHALMGVTMVCASFFVVFTHFPSAFISNLLPWVFALLVALFPLTYLLQCQVSINSFLA

SEQ ID NO: 88065 - protein, 98 aa, Gossypium hirsutum
  unsure (1)..(98): unsure at all Xaa locations
  Clone ID: LIB3083-010-Q1-L1-B6.pep
VDPSPAPLIDMAESELWSLYRALIVEFIDTLVFLYVTIATVIGHMIQHDACDGVGLLGIAWAFGGMILILVYCTIGISRGHINPAVTXGLVPAMKASL

SEQ ID NO: 88066 - protein, 42 aa, Gossypium hirsutum
  Clone ID: LIB3083-010-Q1-L1-B8.pep
TVDPPAARFSPGFYPFNLISNRLLSVIDLAKIGVNWQLHLLH

SEQ ID NO: 88067 - protein, 70 aa, Gossypium hirsutum
  Clone ID: LIB3083-010-Q1-L1-B9.pep
SLKPGTTDPFLQLRHNHTTAQTRDLHRRRRTPIISKPTKPSRILPSSQTTLLITFQINICFILRKPITKP

SEQ ID NO: 88068 - protein, 86 aa, Gossypium hirsutum
  unsure (1)..(86): unsure at all Xaa locations
  Clone ID: LIB3083-010-Q1-L1-C7.pep
GFTIRNGFKTLVTRTYGGKIAAXGLLHRLLDVILGDLQXCGEDHTVIXIQLLAEHVLGKNVLTKFWIMNFTTDMLMSLFFKLLIFI

SEQ ID NO: 88069 - protein, 63 aa, Gossypium hirsutum
  Clone ID: LIB3083-010-Q1-L1-C9.pep
QSFSNQIITIMIIDIDNAFLVWSIVSIIRYHISNYVQQQLHQKDVPTRAVRISFENLHLCFLW

SEQ ID NO: 88070 - protein, 65 aa, Gossypium hirsutum
  unsure (1)..(65): unsure at all Xaa locations
  Clone ID: LIB3083-010-Q1-L1-D1.pep
MALNLCQKQTECIIRMFNLNQPVNSSGTVNXDVYKILIYDKFCQNILSLLIHVNDLRKHGVSLLL

SEQ ID NO: 88071 - protein, 34 aa, Gossypium hirsutum
  Clone ID: LIB3083-010-Q1-L1-D11.pep
HNHFIPFQHFLSVGLLSIQAGNRHSNLQRLCPLN

SEQ ID NO: 88072 - protein, 49 aa, Gossypium hirsutum
  Clone ID: LIB3083-010-Q1-L1-D12.pep
EKASSLCLTFLLLVLLNIISISFISLYNSGQHHFHPLNMCPFHSLHQSI

SEQ ID NO: 88073 - protein, 70 aa, Gossypium hirsutum
  unsure (1)..(70): unsure at all Xaa locations
  Clone ID: LIB3083-010-Q1-L1-E11.pep
MNQAIKNLYAFPLSNEHLLHNTHSLSLVSIYGLIIITTLFFHXLTYYLSTYTFHHISLYFKPLLTLFISH

SEQ ID NO: 88074 - protein, 46 aa, Gossypium hirsutum
  Clone ID: LIB3083-010-Q1-L1-E3.pep
WKNYSISHPNCLINRSEHEIFTSNGSTFNSPEVIRTFSKFENLLPS

SEQ ID NO: 88075 - protein, 84 aa, Gossypium hirsutum
  Clone ID: LIB3083-010-Q1-L1-E5.pep
DLLQDTDSSDTQAQKPDNLMHNDRITGDTSSFNIHMTSNADYHATDETMMDKYPLPVSNSYLFDPNYGEIDSKVFSPLMNSQPF

SEQ ID NO: 88076 - protein, 40 aa, Gossypium hirsutum
  Clone ID: LIB3083-010-Q1-L1-F11.pep
LFGSFPELIYLMVLENLIWLELAFSTNGLPTNNYIHFRII

SEQ ID NO: 88077 - protein, 78 aa, Gossypium hirsutum
  unsure (1)..(78): unsure at all Xaa locations
  Clone ID: LIB3083-010-Q1-L1-G10.pep
ETAFSVFYRHKQLSLRSLCIGGXSSQFADIFRRAFASRVFPPHVTNKLLINSCLRDSTFIPSVSGKTLIASQIVKILN

SEQ ID NO: 88078 - protein, 49 aa, Gossypium hirsutum
  unsure (1)..(49): unsure at all Xaa locations
  Clone ID: LIB3083-010-Q1-L1-G11.pep
TRGSMVQTHKIPFILRQILLCXGRQYYIHAQILSKMISPLLFFFLFLLF

SEQ ID NO: 88079 - protein, 56 aa, Gossypium hirsutum
  Clone ID: LIB3083-010-Q1-L1-G2.pep
LRNVSISVCNNLYRTRSMDSHKVNIMSHKRQYSHQWISKGPPMKPQLVKGEDQYAT

SEQ ID NO: 88080 - protein, 50 aa, Gossypium hirsutum
  Clone ID: LIB3083-010-Q1-L1-G3.pep
KIVFMNMHKWVKHHIVLCDNMVCMEIRCCKVLMKGRIVKDLKKNRLKEIQ

SEQ ID NO: 88081 - protein, 93 aa, Gossypium hirsutum
  unsure (1)..(93): unsure at all Xaa locations
  Clone ID: LIB3083-010-Q1-L1-G4.pep
MGEHEEKHEESLMVKLAEKIHGHDSSSDSDIDEPSESSINAKVFRLFGRQRSVHHVFGGGKSADTFLWRNKKIFAGVLGXATVIWVLFELLEY

SEQ ID NO: 88082 - protein, 32 aa, Gossypium hirsutum
  Clone ID: LIB3083-010-Q1-L1-G5.pep
VEIRSYRCHLSLTPSLFIHDVVVVIENYDEAG

SEQ ID NO: 88083 - protein, 59 aa, Gossypium hirsutum
  Clone ID: LIB3083-010-Q1-L1-G9.pep
NQMILQRYCDVQSWYCSHYIQTFKMNVVYRFLRIDRSEIRIDFDEGHGYFVLQIMKHHN

SEQ ID NO: 88084 - protein, 51 aa, Gossypium hirsutum
  Clone ID: LIB3083-010-Q1-L1-H11.pep
MIGVGKIKQYSNILYKPLIKGKQYVILSAYTFLLSELVHYNQTLFDNIALL

SEQ ID NO: 88085 - protein, 59 aa, Gossypium hirsutum
  Clone ID: LIB3083-010-Q1-L1-H2.pep
SIRYYKNRYQCKQYYVKTHLEAEENEIEHKFTEQVDVSGTRSLTLVELPQQYTLVDEVK

SEQ ID NO: 88086 - protein, 34 aa, Gossypium hirsutum
  Clone ID: LIB3083-010-Q1-L1-H3.pep
KCMDCSIRKWIKWRCAEALNNVLHFGFQHVCSLN

SEQ ID NO: 88087 - protein, 77 aa, Gossypium hirsutum
  Clone ID: LIB3083-011-Q1-L1-A11.pep
TYCPSCSYALLVLLILLVPIWFQILFLPFFFFCCFFNFIFFFLVFFLFYFFSFFYFFFFILFLFFFFFFLCYYISFF

SEQ ID NO: 88088 - protein, 36 aa, Gossypium hirsutum
  Clone ID: LIB3083-011-Q1-L1-A6.pep
YCNPTLLLLTCLFTLLLLSLKTNISYSFIDSLILKL

SEQ ID NO: 88089 - protein, 55 aa, Gossypium hirsutum
  Clone ID: LIB3083-011-Q1-L1-C10.pep
VIILLYALTVLRIFYVVYFFFNFMFFDFFILYFFFYFFFFFYFLFFIYIFYFFYY

SEQ ID NO: 88090 - protein, 60 aa, Gossypium hirsutum
  Clone ID: LIB3083-011-Q1-L1-C2.pep
ALTGTSHDNAQAEAKAQARTVLAPQKLMNSTAPVLDSRLMSIITAYSSAASMATLTTAAR

SEQ ID NO: 88091 - protein, 89 aa, Gossypium hirsutum
  unsure (1)..(89): unsure at all Xaa locations
  Clone ID: LIB3083-011-Q1-L1-C3.pep
TPHLITKLEDLKSGKNAPQTPTTPQVQSTGSKTLFVGNLPFQVEQADIKNFFKDAGEVVDIRLSTDFEGNFKGYGHCXFATAYAAHIAL

SEQ ID NO: 88092 - protein, 62 aa, Gossypium hirsutum
  Clone ID: LIB3083-011-Q1-L1-C4.pep
MLLYYLFLFLFFPFFFFFFLLFFFLIFISYYFLFFILYLYFFFLLFSLFLLLFSFIFFFYYS

SEQ ID NO: 88093 - protein, 53 aa, Gossypium hirsutum
  Clone ID: LIB3083-011-Q1-L1-C6.pep
RVLRGTFNYKLNNPKYINYIELHDNFILHISLICTYIHTFHKFFISFSFLFLF

SEQ ID NO: 88094 - protein, 54 aa, Gossypium hirsutum
  Clone ID: LIB3083-011-Q1-L1-C9.pep
MSAADELHEFHYRLPQRAAGQRPGSHPGSSLGAGQEFVSHMTLYDRPDPRRLDL

SEQ ID NO: 88095 - protein, 41 aa, Gossypium hirsutum
  Clone ID: LIB3083-011-Q1-L1-D11.pep
TVLSRGYGNVTFRFFDNAKNHLTSQHCTVYRVPNVKNMTLA

SEQ ID NO: 88096 - protein, 41 aa, Gossypium hirsutum
  Clone ID: LIB3083-011-Q1-L1-E2.pep
FKDMDYVNVPSIYWEYSTLQVLTMEYVPVIKINKIQALDQL

SEQ ID NO: 88097 - protein, 141 aa, Gossypium hirsutum
  Clone ID: LIB3083-011-Q1-L1-G10.pep
EEVDEDKEKKSKRKNVKEVSHEWQLINKQKPIWLRKPEEITKEEYSSFYKSITNDWEDHLAVKHFSVEGHLEFKAFLFVPMRAPFDLFVSWIKLININLNFMMVFFFFFCFILIFCIYFLFLNLFFIFFFFFFLFFFFFFF

SEQ ID NO: 88098 - protein, 60 aa, Gossypium hirsutum
  Clone ID: LIB3083-011-Q1-L1-G5.pep
FNLSFSTISPLVCPEKQVNLTPLDCPDRTTKETILVTGTHGQDPRHFLKTLLLSSFTFRH

SEQ ID NO: 88099 - protein, 104 aa, Gossypium hirsutum
  Clone ID: LIB3083-012-Q1-L1-A11.pep
MTTSIHVTALDSVVNVNSLFTLAVFIGLAWNPYDPSNTLVDPNSRCAPTSKIAEDLIKFHVYSFSSFLFSSLVALAIKQAIKLSKSHTFNIHVTFRGSEFLDML

SEQ ID NO: 88100 - protein, 40 aa, Gossypium hirsutum
  Clone ID: LIB3083-012-Q1-L1-A12.pep
PYFFLLVSKPPGLFITFTSAIHITVLYSFNYFNSLFTLTI

SEQ ID NO: 88101 - protein, 67 aa, Gossypium hirsutum
  Clone ID: LIB3083-012-Q1-L1-A5.pep
LAITQLAAITMMEHTSPLKSFTNNGCEYIFLDAYGDDDGGWQTAHATFYGGADATVSMRGACGYGNM

SEQ ID NO: 88102 - protein, 55 aa, Gossypium hirsutum
  Clone ID: LIB3083-012-Q1-L1-A9.pep
CVGFEHELSNVYRSSYDHPNVENADRTIERAGGHNVADNADLYVPYLGIRSSLDP

SEQ ID NO: 88103 - protein, 91 aa, Gossypium hirsutum
  Clone ID: LIB3083-012-Q1-L1-B1.pep
RTNLHNSPSKRRRQKNPPLQPHVTPNLPFTTPSRNRPRRNYCCWTTLKILILILLAAITGTVLYVRLPPHRPCFTLASFRIHRLNLTTSAD

SEQ ID NO: 88104 - protein, 91 aa, Gossypium hirsutum
  unsure (1)..(91): unsure at all Xaa locations
  Clone ID: LIB3083-012-Q1-L1-B9.pep
GFHFRGAFSKKGPVKFYSSGAYILRQASKIIISNLLALMFIVQVSYSIDLPEPLSFFVYSYVTLNISDKXILQIVKYNFYFMPCIITINLY

SEQ ID NO: 88105 - protein, 45 aa, Gossypium hirsutum
  Clone ID: LIB3083-012-Q1-L1-C12.pep
CFMSCLNIDQLIRPELNGMIFELLFILNQQYPIALAYDNKMWGYI

SEQ ID NO: 88106 - protein, 121 aa, Gossypium hirsutum
  unsure (1)..(121): unsure at all Xaa locations
  Clone ID: LIB3083-012-Q1-L1-C3.pep
QHQXTFNKGISRVPLAGPLRSKXCLIXXPTLISASSNTPYYTTRAKTLPXTQXRVIWPEKFFXLQACPNSQESXICVVQTIVDPTLPSPLLALPFLGHPSTRTHPFSFXLDSTMGSLIHQI

SEQ ID NO: 88107 - protein, 51 aa, Gossypium hirsutum
  Clone ID: LIB3083-012-Q1-L1-C7.pep
CIIAGHVYYVFLCRAHTQLSPFQPETTTPLKQKLSCQKQRPHFETITKLPP

SEQ ID NO: 88108 - protein, 101 aa, Gossypium hirsutum
  unsure (1)..(101): unsure at all Xaa locations
  Clone ID: LIB3083-012-Q1-L1-C9.pep
YGEDFICIFRQLEPFSKRAISRPAKKREKLVFAIGKTEEKCDAFKGRWLRHEXTRPLYQESECPYIQPQLTCHEHGTPDTEYHRWRWPPSCCDLPIYNATF

SEQ ID NO: 88109 - protein, 84 aa, Gossypium hirsutum
  Clone ID: LIB3083-012-Q1-L1-D11.pep
MNRQIHLFLPLYIRNHEHKLKFNYKFTNQIFPSRLNQPNPTEPDQTQHLNEALLYIQALFSVRFSVPLHASEPASIINSTLVLS

SEQ ID NO: 88110 - protein, 64 aa, Gossypium hirsutum
  Clone ID: LIB3083-012-Q1-L1-D2.pep
RIPRQGNHHRFQILLPSSGERTGCRKGRTTMGLAFTKLFIPLFCQKEKPILMGGLDATGKTTIL

SEQ ID NO: 88111 - protein, 128 aa, Gossypium hirsutum
  Clone ID: LIB3083-012-Q1-L1-D8.pep
HIQSTRKAMGEGGADSPGTCKGETPRLMILDQALRQQRSYHQMNMMESHPWRPQRGLPERSVSVLRAWLFEHFLHPYPSDVDKHILAQQTGLSRSQVYNWFINARVRLWKPMVEDMYFEETKEHENNH

SEQ ID NO: 88112 - protein, 71 aa, Gossypium hirsutum
  unsure (1)..(71): unsure at all Xaa locations
  Clone ID: LIB3083-012-Q1-L1-D9.pep
DYIYPPPTPLNDMAELNXWSLNRTLIHXYTATLFITYVTNATVIIYMKQQDACNMLHLLGMPCALGGIIYI

SEQ ID NO: 88113 - protein, 47 aa, Gossypium hirsutum
  Clone ID: LIB3083-012-Q1-L1-E10.pep
RKRAMLMTLMYVQCKSRSILPMAFNSISLFLELFISTSLYLSWYISV

SEQ ID NO: 88114 - protein, 97 aa, Gossypium hirsutum
  Clone ID: LIB3083-012-Q1-L1-E12.pep
LDLEFLLEDLETVKVIGNGRGGPVQLARHIWDGKLYALKVIKMNLQKEEVLKQFVQYLKINKASKCSNVVSCNHSFYHRGDVFLVLDYMDRGSLIEV

SEQ ID NO: 88115 - protein, 57 aa, Gossypium hirsutum
  Clone ID: LIB3083-012-Q1-L1-E8.pep
QIMVMEVFRLFSFIYMFILHMIIYESFIIIFMLSLVVFLVVVVVRVVEIECVWLNWL

SEQ ID NO: 88116 - protein, 55 aa, Gossypium hirsutum
  Clone ID: LIB3083-012-Q1-L1-F12.pep
KSNSSNNHPFLSFLSAAHITLLVTHYIRIQHHHELRESVDRNLDWKLIQEFPVKI

SEQ ID NO: 88117 - protein, 56 aa, Gossypium hirsutum
  Clone ID: LIB3083-012-Q1-L1-G11.pep
SRYGLSVGANCVWLVRILMIICYPIAYPIGKVLDAVLGHSDALFRRAQLKALVFIH

SEQ ID NO: 88118 - protein, 100 aa, Gossypium hirsutum
  unsure (1)..(100): unsure at all Xaa locations
  Clone ID: LIB3083-012-Q1-L1-G12.pep
QMLKNDCAPDVITYHCFFXSLEKLREILKLFDLMIRNGVQPRMDTYVMLMRKFGRWGFLRLVFMVWKKMEELGSSPNEFAYNALIDALIEKGLLDMARKY

SEQ ID NO: 88119 - protein, 51 aa, Gossypium hirsutum
  Clone ID: LIB3083-012-Q1-L1-G2.pep
IHITRNQQSQSMIPHVPQNFILLHQPYFYCCKLVSVFHSLKSFCTFTGYIP

SEQ ID NO: 88120 - protein, 51 aa, Gossypium hirsutum
  Clone ID: LIB3083-012-Q1-L1-G7.pep
EIYKPLYPKISTKPRDLNLTITLIDEKTYNRTLTPIPAPCYWASKPATLVP

SEQ ID NO: 88121 - protein, 58 aa, Gossypium hirsutum
  unsure (1)..(58): unsure at all Xaa locations
  Clone ID: LIB3083-012-Q1-L1-G9.pep
NEDINMDQFEDDNKFXEYEIDGEWDDKEQSKEVTQQXEDEWDDYDVSDDFSLQLMKEL

SEQ ID NO: 88122 - protein, 51 aa, Gossypium hirsutum
  Clone ID: LIB3083-012-Q1-L1-H10.pep
ARVFVWMPLWLSSDVWTPLWLSYEVRTPLRLSIFLWTPLWLSSAPECFYSY

SEQ ID NO: 88123 - protein, 94 aa, Gossypium hirsutum
  Clone ID: LIB3083-013-Q1-L1-C3.pep
TSFSTNFLAQLFFSYFFFLIVLLIFFIFFSSYILLFIFSFFSFIFFFLLFFFFLLFFFFNIFFFFLFYFYIFNFFNFFYFYFYNLFLLFIFFFF

SEQ ID NO: 88124 - protein, 91 aa, Gossypium hirsutum
  unsure (1)..(91): unsure at all Xaa locations
  Clone ID: LIB3083-013-Q1-L1-C7.pep
VGCCTLKVGNVEXIPPNKLKFDFLGKDSIQYVNTVEVELPVYNAIGQFHTWKSKSDDLFDKLDTSKLNAHFKELMPGLTSKVFRTYNASIT

SEQ ID NO: 88125 - protein, 72 aa, Gossypium hirsutum
  unsure (1)..(72): unsure at all Xaa locations
  Clone ID: LIB3083-013-Q1-L1-E7.pep
EPCELYHCVLESSSFLEKMTVLEHTIPFFLPIREVXNDLLSSNAMRFIDHIGELLQAYVDRLEQVLLVKEFY

SEQ ID NO: 88126 - protein, 37 aa, Gossypium hirsutum
  Clone ID: LIB3083-013-Q1-L1-F5.pep
KSTFTHYVYCILYMFIAYSCHMCEFVLVNDLYLTGHP

SEQ ID NO: 88127 - protein, 75 aa, Gossypium hirsutum
  unsure (1)..(75): unsure at all Xaa locations
  Clone ID: LIB3083-013-Q1-L1-G3.pep
PYASWVKNETLRLXINRDPGXEEVDELKDKGRGMGRIQPVKSSGGEVDLIQGFDFAEWFINTVTDSDFLVINFDF

SEQ ID NO: 88128 - protein, 63 aa, Gossypium hirsutum
  unsure (1)..(63): unsure at all Xaa locations
  Clone ID: LIB3083-014-Q1-L1-A10.pep
LHXVDGSITSCGFEVHPSDKWSLILMVVGCYGFYIIRRLHHQKGQVLGSLSEFAVVCNLRTLN

SEQ ID NO: 88129 - protein, 69 aa, Gossypium hirsutum
  Clone ID: LIB3083-014-Q1-L1-A5.pep
TIHSFKYKKRVSSKGKKIIMSQRIQYNGKATLPLPPKFLHQIKLQLFYIIFPTQHGPYEPIRIFLTLCL

SEQ ID NO: 88130 - protein, 101 aa, Gossypium hirsutum
  unsure (1)..(101): unsure at all Xaa locations
  Clone ID: LIB3083-014-Q1-L1-B10.pep
MTXLPSWFLFLTVVSXFVCGFGKRIPILSFYEGYSQLFGDYYLVLHRXXKAVHLSLNEKTRSGFLSQDLYLHCFFSASIKLPSDYTAXVVVAFYMLNCYFF

SEQ ID NO: 88131 - protein, 101 aa, Gossypium hirsutum
  unsure (1)..(101): unsure at all Xaa locations
  Clone ID: LIB3083-014-Q1-L1-C10.pep
XIWEYVAPVKGAFIVXLVDMLERWSNCIFKSTLHRVLGNGQERYSIAYFVEPSHDCLVECLPTCKSENNPPKFPPIYCATYLSQRYKDTHAELSVYEKHQT

SEQ ID NO: 88132 - protein, 49 aa, Gossypium hirsutum
  Clone ID: LIB3083-014-Q1-L1-C12.pep
SNCVHIERVAAGQASLMKGCCLTCFDSFVKDVVKRIMDTRSRQWLSLGL

SEQ ID NO: 88133 - protein, 78 aa, Gossypium hirsutum
  Clone ID: LIB3083-014-Q1-L1-D8.pep
FRDFYTKTMCIYQRSGYIFINEQSKLEYTRHCVVQNTPFKKKTKEISSVHSLCHYFSFHSAAPSSMTVYIHDRKMGEI

SEQ ID NO: 88134 - protein, 105 aa, Gossypium hirsutum
  Clone ID: LIB3083-014-Q1-L1-E11.pep
KWNKGASKNVSTNQSKETVVPMKSNKSVAESSKGRAIENTQSRTRDIKCFKCQGRGHIASQRPNRNTMVILPNGEIESEEEIDKNEEEINNLSDNEDEIEFTVEG

SEQ ID NO: 88135 - protein, 35 aa, Gossypium hirsutum
  Clone ID: LIB3083-014-Q1-L1-E4.pep
MRGFPSIEGEMCVFKQFSRIEGSNTKFFFCQSVVG

SEQ ID NO: 88136 - protein, 62 aa, Gossypium hirsutum
  Clone ID: LIB3083-014-Q1-L1-E6.pep
RTHYHHCIKRVTKPLQSIIILLLSLHLVLLILERCHLLLQFLTLTDLINIPCYLGTMFQYIS

SEQ ID NO: 88137 - protein, 39 aa, Gossypium hirsutum
  unsure (1)..(39): unsure at all Xaa locations
  Clone ID: LIB3083-014-Q1-L1-F10.pep
TTLXHPNHQPTKIYNPANTSEHSSIKYLSNENNSKLQDN

SEQ ID NO: 88138 - protein, 94 aa, Gossypium hirsutum
  Clone ID: LIB3083-014-Q1-L1-F11.pep
VVFSILIFLFLGSVERFSSKSQPCTYGKSKICKPALATAAFSTISFLLGAITSVVSGFLGMKIATYANARTTLEARKGVGKAFITAFRSGAVMG

SEQ ID NO: 88139 - protein, 70 aa, Gossypium hirsutum
  Clone ID: LIB3083-014-Q1-L1-F12.pep
FYFNLHSTFPLHVLIFQIHLPTFHHILNLKNCTTSIPPTPFSTISTLLLNLPSIASTFLCMKISSYTNTI

SEQ ID NO: 88140 - protein, 56 aa, Gossypium hirsutum
  unsure (1)..(56): unsure at all Xaa locations
  Clone ID: LIB3083-014-Q1-L1-G8.pep
KLYIFFIFXVGDVVTKADAGCGKFISISTTYILLLCTLDSCICSLSIFIFTITRLH

SEQ ID NO: 88141 - protein, 44 aa, Gossypium hirsutum
  Clone ID: LIB3083-014-Q1-L1-H11.pep
ANGKYTIEEQIAITMAYSKTTNTTYNSSDLSLKIAFVMNLNGSV

SEQ ID NO: 88142 - protein, 70 aa, Gossypium hirsutum
  unsure (1)..(70): unsure at all Xaa locations
  Clone ID: LIB3083-014-Q1-L1-H2.pep
PSXPFPGVDKIAVREVXXEIHGHFLPNLLITTATSTPMASPYSIYRHLSISASFKSQVKELPEENIMFHT

SEQ ID NO: 88143 - protein, 54 aa, Gossypium hirsutum
  Clone ID: LIB3083-014-Q1-L1-H5.pep
HTKIDTGASVIYRSLDCCKKSMYRIRVKLSANIFFTVNFKRINIGMVIQFFYLA

SEQ ID NO: 88144 - protein, 38 aa, Gossypium hirsutum
  Clone ID: LIB3083-014-Q1-L1-H7.pep
VLARVRIWYFENKKNLSLLHVIVFLNVYIWNSIIYKLW

SEQ ID NO: 88145 - protein, 53 aa, Gossypium hirsutum
  Clone ID: LIB3083-015-Q1-L1-C11.pep
EVKATAGDTHLEGEVLITGWGTNLVKNLKGRTRRAFMVNPKPLRRLRPVGKRP

SEQ ID NO: 88146 - protein, 130 aa, Gossypium hirsutum
  unsure (1)..(130): unsure at all Xaa locations
  Clone ID: LIB3083-015-Q1-L1-D10.pep
LKLSDWQDFVGIMXLFIRNAAISFIQENNAGNAAAALMARLAPKAKVFRDGKWSEEEASILVPGDIISIKLGDIIPADARLLDGDPLXIDQSSLTGESFSVTKGPGDSIYSGSTCKQGEIEAVVIATGVH

SEQ ID NO: 88147 - protein, 146 aa, Gossypium hirsutum
  unsure (1)..(146): unsure at all Xaa locations
  Clone ID: LIB3083-015-Q1-L1-D3.pep
LQGQVPTTFFGLAHLQAVELESNQLNGTLVIGTSFTNQLQLVDLQNNKISEFNDAGYNFEIVLVDNPVCMETGKTDKYCQLPSRKSLYSTPQKNCVSGSCRSSQITSPTCTCAYPYTGTLLVRGYTFTEIGNTAXYLSLEQSLMKF

SEQ ID NO: 88148 - protein, 81 aa, Gossypium hirsutum
  Clone ID: LIB3083-015-Q1-L1-D5.pep
PNFHNPHSFNHFSIIIILNQTIPNTIITSEPSSQPLFKVLLSQIQPLFCSRTILLHFNDRATNNSNHHRGEFVSLVYLKHK

SEQ ID NO: 88149 - protein, 81 aa, Gossypium hirsutum
  unsure (1)..(81): unsure at all Xaa locations
  Clone ID: LIB3083-015-Q1-L1-F2.pep
QNHFSFTLPTLGRVLHTIDPFNPKFNILNPASNTHIYLPYTXHNPIFNHFHTYIQHLLYIKFDNEQHLCPLNDRNMPIFSQ

SEQ ID NO: 88150 - protein, 79 aa, Gossypium hirsutum
  Clone ID: LIB3083-015-Q1-L1-F8.pep
VRAWNSFCQTPLLLGGISLESGFPKMNGQIHGLDVHPSRSTLGTIKALLKPSTRRVSLAETKNDAHTDQWLQNFNNIVS

SEQ ID NO: 88151 - protein, 156 aa, Gossypium hirsutum
  Clone ID: LIB3083-015-Q1-L1-G1.pep
AVWLGFFVLVLLSVNSEGSRHGGELSHSDVLRQQEADRVVELPGQPAVEFKQYAGYVTVNESHGRALFYWFFEATSKPEKKPLLLWLNGGPGCSSIGYGEAEELGPFFTQKDEQTLKLNPHRWDKAANLLVLESPVGVGFSYTNTSSDIHQLGDKI

SEQ ID NO: 88152 - protein, 73 aa, Gossypium hirsutum
  Clone ID: LIB3083-015-Q1-L1-G7.pep
PFLKVRLTFVRHKCFFRNVSYDFIRNISLFIAPICCIIIRVPIHPLFSNPSRQHYCVSVRRVYICSNRVPCHI

SEQ ID NO: 88153 - protein, 80 aa, Gossypium hirsutum
  Clone ID: LIB3083-015-Q1-L2-B5.pep
EFIGLALYCTQHKRLRHVHLWMALTTKGGPIQQKFATHASNVRAYNCKHCQCVPSGTYWNKHKCPLYIYKVNHIVKPKCP

SEQ ID NO: 88154 - protein, 69 aa, Gossypium hirsutum
  Clone ID: LIB3083-015-Q1-L2-D3.pep
QIQLPIMKLDTNRREGSTPDWEAPMKLEDTFNPDKRDQACTHNKKASNAKKSNPDLQTKQWDHHTRDHM

SEQ ID NO: 88155 - protein, 74 aa, Gossypium hirsutum
  Clone ID: LIB3083-015-Q1-L2-D6.pep
VLQSYSSAAEQMTAREALKSALDDEMSADPKDFLMSEELVEYHGAYKISTGLLEKNRPERVLDTPSTKAGFAGI

SEQ ID NO: 88156 - protein, 83 aa, Gossypium hirsutum
  Clone ID: LIB3083-015-Q1-L2-E10.pep
DLFNRKPILLTGLISNHRRARLVLIHNIGQDTNLFNEVSESDGNKSLCILPLTILLLLSDLPYLSLIIDSSLKSLNYCFIGKF

SEQ ID NO: 88157 - protein, 139 aa, Gossypium hirsutum
  Clone ID: LIB3083-015-Q1-L2-E7.pep
MRTSWADSVSNSAAEIAISDKNSLPCPTRSTYVPPHLRSGSISDLSGPVTGTNGGSRWTGSDGGGTKPELRRQGQANSYATAGRDAAAGGGGGGGRNNRSGGWDRREREVNPFGNDDKIYDIKQNFSEQEDSGINFDAY

SEQ ID NO: 88158 - protein, 56 aa, Gossypium hirsutum
  Clone ID: LIB3083-015-Q1-L2-E9.pep
PDYLSHFLTPYSYDTIHSYVSNVLSPYITQLLSNSVHQSEVECCNLTAYKIVGEYT

SEQ ID NO: 88159 - protein, 64 aa, Gossypium hirsutum
  Clone ID: LIB3083-015-Q1-L2-F10.pep
IFSDDNSDDQYQHKEDLELGQSCILDDVSEVVSQRRPYVASTVSLNTTPTIGHPVSVLDACEKR

SEQ ID NO: 88160 - protein, 58 aa, Gossypium hirsutum
  Clone ID: LIB3083-015-Q1-L2-F12.pep
VPLLIMLSARSNLTPVMFNCTDGVLKKEMYNLIYLLNKIQRSCPSLGDHGEPSAYTTI

SEQ ID NO: 88161 - protein, 103 aa, Gossypium hirsutum
  Clone ID: LIB3083-015-Q1-L2-F4.pep
NLPRKRATHNPNPPSTTHTKKEKPQLTQPVNEPKTIHTMYEPMNKPPTTNKPEKKDNLEPKTPTNEPSIKPTKKSPKKKNLFPNTQTLKDTTKIKPPILKYPN

SEQ ID NO: 88162 - protein, 98 aa, Gossypium hirsutum
  Clone ID: LIB3083-015-Q1-L2-F6.pep
NGECPKLQEMKEHQQYQEKKPQVPKQGKPQEHEKHQDEYSEIPQYQGKEDKSKKHIDEKCHEVHESKEHQEYQKEKPDFPKRGKPKGRQKNKAAYSKI

SEQ ID NO: 88163 - protein, 101 aa, Gossypium hirsutum
  Clone ID: LIB3083-015-Q1-L2-F9.pep
MAGWGVAAAVATPVTPTEGTVIAIHSLEEWSIQIEEAISANKLVVIDFTASWCPPCRAMAPIFADMANNSPNVVFLKVDVDQMKTIAEQFSVEAMPTFLFM

SEQ ID NO: 88164 - protein, 68 aa, Gossypium hirsutum
  Clone ID: LIB3083-015-Q1-L2-G6.pep
TFSPPEREEGPISYDAANFNSEACQPYVSSATDNSEQPQTDSAVNSKRKETSKKRTDTVTTLAIIAHT

SEQ ID NO: 88165 - protein, 110 aa, Gossypium hirsutum
  unsure (1)..(110): unsure at all Xaa locations
  Clone ID: LIB3083-015-Q1-L2-G7.pep
MNGYSYDNSADGCNKKGDNTDESNMRHCERSIFDERIRRLTFRMGYSYATVETRSRTVTLGTMYLLDNPSALQHLTEEHEEIVMNREYANSGLVWXEYIYMTFTRYVINE

SEQ ID NO: 88166 - protein, 40 aa, Gossypium hirsutum
  Clone ID: LIB3083-015-Q1-L2-G9.pep
FHGLDAHASVCTYFLHRLHTHIIHLSLGRDYQGQRCGSRV

SEQ ID NO: 88167 - protein, 121 aa, Gossypium hirsutum
  Clone ID: LIB3083-016-Q1-L1-B2.pep
ASTYKYLIISLCGRKGGKVDEAVKIFQEMIRSGYTPDKELLEMYLGCLCEVGKLLEARNCTESLSKIGFSAPLSYSLYIRALCRAERLKEALEVLDDVRTEQSSLDQHVYGSLVHALLRKG

SEQ ID NO: 88168 - protein, 78 aa, Gossypium hirsutum
  unsure (1)..(78): unsure at all Xaa locations
  Clone ID: LIB3083-017-Q1-L1-A1.pep
QPGSAQNGDQLTRLAPEGFRPFKVVNHLHWLIIPIXKGLPFQLVWLGXSKNALVSNFLFLEPNVWVCQTRLYYNQKTA

SEQ ID NO: 88169 - protein, 73 aa, Gossypium hirsutum
  Clone ID: LIB3083-017-Q1-L1-A6.pep
VVIGQGRAILELLSELDHALLVWSDPSLVLDYRVKVVERVVTSDFECDGPDGQSLNEDLHLNCPFEKKKKLEL

SEQ ID NO: 88170 - protein, 62 aa, Gossypium hirsutum
  Clone ID: LIB3083-017-Q1-L1-A8.pep
TSTMTNRLMLIKILILHHELSLYFHHKSLLYIHSTSTNVYQRNDIKHNIDILQHTLPTIRIT

SEQ ID NO: 88171 - protein, 60 aa, Gossypium hirsutum
  Clone ID: LIB3083-017-Q1-L1-B1.pep
TMLSNTHITLTQQPVCIIYLHYNITSTLVSKLHDHRLIHILKLSPELTSSIHTIVFSQNK

SEQ ID NO: 88172 - protein, 44 aa, Gossypium hirsutum
  Clone ID: LIB3083-017-Q1-L1-B3.pep
PVIRSHECFTVIELSHASQPVSANTHALNSADNASIRTRAPALY

SEQ ID NO: 88173 - protein, 33 aa, Gossypium hirsutum
  Clone ID: LIB3083-017-Q1-L1-B6.pep
LNSPAVEIMDPDVKTWQSCLKFEKVILGRGFQL

SEQ ID NO: 88174 - protein, 41 aa, Gossypium hirsutum
  Clone ID: LIB3083-017-Q1-L1-B7.pep
FIIDKYQPLMGTRYHPISHESSLLTILPYAEMDKANKFISG

SEQ ID NO: 88175 - protein, 43 aa, Gossypium hirsutum
  Clone ID: LIB3083-017-Q1-L1-B8.pep
VNVDRIRMVASVEKIAGCILTVMVGSNDFGFDMLCYSKCRYEV

SEQ ID NO: 88176 - protein, 40 aa, Gossypium hirsutum
  Clone ID: LIB3083-017-Q1-L1-C6.pep
YFLHHHSLEGPFQSESCRGRYYFMRKLTKRIMRRLITILT

SEQ ID NO: 88177 - protein, 104 aa, Gossypium hirsutum
  unsure (1)..(104): unsure at all Xaa locations
  Clone ID: LIB3083-017-Q1-L1-D5.pep
TDLEDNVPLAAPSYEPGQLIXWSYYKAAIAELGATSLYLYITEYTVMTTYHSKTTCTTVSIQCITCSSGFMIYALVYSTDRIARGLTNHAVTLSFLIANKLSLT

SEQ ID NO: 88178 - protein, 37 aa, Gossypium hirsutum
  Clone ID: LIB3083-017-Q1-L1-D6.pep
TTNSTPLNPVIATGKSHTQILLVNKLTLFHTHHFKLS

SEQ ID NO: 88179 - protein, 90 aa, Gossypium hirsutum
  Clone ID: LIB3083-017-Q1-L1-D7.pep
GCRNFHKVDWVGVSLLSFCDPFLVKLIRIPSRRQPKEWALPFISHHYGLTHFNPSLISIIKRYNLQMKRMNSRNLFLSQFAEFNLKHSLK

SEQ ID NO: 88180 - protein, 72 aa, Gossypium hirsutum
  Clone ID: LIB3083-017-Q1-L1-E3.pep
STTCNYFNFTGPIDVLKLIHHYEMIHMIIRSACILTDTNRYIRTLTQATRAAFSDTLGQIYNWIVLLHVSVI

SEQ ID NO: 88181 - protein, 97 aa, Gossypium hirsutum
  unsure (1)..(97): unsure at all Xaa locations
  Clone ID: LIB3083-017-Q1-L1-E5.pep
LYFSTGNSSYVQVATHPKLAKHAGAFCDHPHHGVLSFANQLAGAHVLLTRLRLILSPDYPYNEILSSFHNXSSILIFSFRPVLTSSNMSIRSADSSK

SEQ ID NO: 88182 - protein, 90 aa, Gossypium hirsutum
  unsure (1)..(90): unsure at all Xaa locations
  Clone ID: LIB3083-017-Q1-L1-E6.pep
IPHFSNSVKLSYVKLVYQYLANHILTLTLIPVMAGALIEILRLRPAFIEPLWNSLHSDLRNISCSXSTLYLXSSHYFMYTPIITYLVDYS

SEQ ID NO: 88183 - protein, 43 aa, Gossypium hirsutum
  Clone ID: LIB3083-017-Q1-L1-F1.pep
YGMKLINLAFEFEPGNIHRYVIESCQVPLTCIQDNGQHINRLI

SEQ ID NO: 88184 - protein, 140 aa, Gossypium hirsutum
  Clone ID: LIB3083-017-Q1-L1-F3.pep
MDSLSDRASMMREALQKSQTITDNVVSILGSFDSRLSALETAMRPTQIRTHAIRKAHENIDKSLKSAEVILAQFDLSRQAEAKILKGPHEDLEGYLGAIDQLRSNIRFFSSNKNFKNSEGVINHSNTLLAKAISKLEDEF

SEQ ID NO: 88185 - protein, 58 aa, Gossypium hirsutum
  Clone ID: LIB3083-017-Q1-L1-F5.pep
VKAIFFIKFRKKRCQSSLLDLLYFIWLSTSCPSTSAYITYKLACNLITFYTILIENLI

SEQ ID NO: 88186 - protein, 34 aa, Gossypium hirsutum
  Clone ID: LIB3083-018-Q1-L1-A5.pep
PRQYGSSQPLRSTDFLSTLALSFVSALSKEFLHS

SEQ ID NO: 88187 - protein, 58 aa, Gossypium hirsutum
  unsure (1)..(58): unsure at all Xaa locations
  Clone ID: LIB3083-018-Q1-L1-A6.pep
FEVLIGVMFYMLGRYDEXRKSFESAVTNLRASVERKSDFLGVVLIHMGFACVQLFNID

SEQ ID NO: 88188 - protein, 58 aa, Gossypium hirsutum
  Clone ID: LIB3083-018-Q1-L1-B1.pep
LSKYIFQLIVYHVQINQVIGISARDSDKEICTSIAIIALTLYMLIECPNKAVTVYCNM

SEQ ID NO: 88189 - protein, 47 aa, Gossypium hirsutum
  Clone ID: LIB3083-018-Q1-L1-C4.pep
IECFYDVYYYLCRGDYASCYALNLVKYFKWFTVCYAYSCFICVCIET

SEQ ID NO: 88190 - protein, 36 aa, Gossypium hirsutum
  Clone ID: LIB3083-018-Q1-L1-C5.pep
INTQNGLLHVILIHVKYVYAFNLDIYVDFILIKLLI

SEQ ID NO: 88191 - protein, 77 aa, Gossypium hirsutum
  unsure (1)..(77): unsure at all Xaa locations
  Clone ID: LIB3083-018-Q1-L1-C6.pep
RFAAPILELGNKLARRNQSKGPYFALHLLIDKDVWVRTGCLPGFTNXYNYIVHNETRRHPXYFTAKSNLIYHYRKLL

SEQ ID NO: 88192 - protein, 56 aa, Gossypium hirsutum
  Clone ID: LIB3083-018-Q1-L1-D5.pep
NPHLILHSPINYKTMYYFKIPIDFYLTLHSPLFYIHKNIHNIYHKLNIYTFFILTF

SEQ ID NO: 88193 - protein, 42 aa, Gossypium hirsutum
  Clone ID: LIB3083-018-Q1-L1-E5.pep
NHLYTFYTPSGYSYLVKWPCQSQPLQCYKIKLLNLFYQCSFL

SEQ ID NO: 88194 - protein, 53 aa, Gossypium hirsutum
  unsure (1)..(53): unsure at all Xaa locations
  Clone ID: LIB3083-018-Q1-L1-E6.pep
VMLSRKEFLNWYIGEXMDELEFMEVDSDMNDLVXEVLXYEDGVVDDNDEGYEH

SEQ ID NO: 88195 - protein, 53 aa, Gossypium hirsutum
  Clone ID: LIB3083-018-Q1-L1-F4.pep
NSGSPYCEEFSLGLTLTHTHTNPTGEFQWPKHLYYKANTLYQIPLYSNLNNLT

SEQ ID NO: 88196 - protein, 72 aa, Gossypium hirsutum
  Clone ID: LIB3083-018-Q1-L1-F5.pep
HLPFTHTTHISENEIFHMPKHLYYKVNLLYHIPHCSNLTKLNTTQSHYIIFTHQHPYKIYHYNYLLYNTTYL

SEQ ID NO: 88197 - protein, 38 aa, Gossypium hirsutum
  Clone ID: LIB3083-018-Q1-L1-G1.pep
KTFIDFPILVLIAEWCNPFMNMKYMMIIIDDYNSTNSH

SEQ ID NO: 88198 - protein, 84 aa, Gossypium hirsutum
  Clone ID: LIB3083-018-Q1-L1-H1.pep
LPLFLLVFDSLQLNPYMHMKAHLSLYLIANIHNRLPINHLLYLRSFSNLWLSFIDYPYFINLHLRHSLDSLTNHTLILKNTDLH

SEQ ID NO: 88199 - protein, 47 aa, Gossypium hirsutum
  Clone ID: LIB3083-018-Q1-L1-H4.pep
LFSLNPTLASRSTVSFNLFNMIYYFHTIRLKSYKTMLITHRELQHAP

SEQ ID NO: 88200 - protein, 40 aa, Gossypium hirsutum
  Clone ID: LIB3083-018-Q1-L1-H5.pep
FSLNPTLASKATVSINLFNMIDYSLTIRLKIYKTIHITYL

SEQ ID NO: 88201 - protein, 72 aa, Gossypium hirsutum
  Clone ID: LIB3083-018-Q1-L1-H6.pep
LPLFLPVFDSIQLNRNIHIKAHLSLHLIANILNRLPIKHLLYFRSFSNLCQSLISDPDFINTHLHHSLDIPH

SEQ ID NO: 88202 - protein, 70 aa, Gossypium hirsutum
  Clone ID: LIB3083-020-Q1-L1-A2.pep
NQNPNLHHISSKSEMPKSNSSNSFYYEDVKAPNIFERAKEEIRAVIHVGKIHPFGKETHWKRDDIKKNTP

SEQ ID NO: 88203 - protein, 59 aa, Gossypium hirsutum
  Clone ID: LIB3083-020-Q1-L1-C4.pep
VRDCRVLGAMKRLLLLFGLVNENACINGSHSHACALVGYQIETIAIVSQLASSGALNQF

SEQ ID NO: 88204 - protein, 118 aa, Gossypium hirsutum
  unsure (1)..(118): unsure at all Xaa locations
  Clone ID: LIB3083-020-Q1-L1-D7.pep
SAKTNTYIATAVCLWDAGEYVXKIYHDIHVNLATLGVTVARHSKKPRVYIGCVRSDPVLARKGAKYQEPEYWKMGEVGNKYLRHATGQLYAISKDSATYISIDQHVLHQYAKEEVYLR

SEQ ID NO: 88205 - protein, 62 aa, Gossypium hirsutum
  Clone ID: LIB3083-020-Q1-L1-D8.pep
CSCELLDIINSKKQHKSHVINIVKSIMVINIKSMGNWKFSLSSSVMFCVKLVCHNMYESDTE

SEQ ID NO: 88206 - protein, 64 aa, Gossypium hirsutum
  Clone ID: LIB3083-020-Q1-L1-D9.pep
LASVWSIGLDYVAGFIPFVWLWCFLEPENKVISENYLNPKASLCCHCHCCCCYSICFLKSMLTF

SEQ ID NO: 88207 - protein, 90 aa, Gossypium hirsutum
  Clone ID: LIB3083-020-Q1-L1-E10.pep
GETLLIPTTNVSSIPSNTWKICSWIFSEDRRDHYAIRADGEHLKRSFFFLPDKTLDCHRCKCDYIFNNVRILAIGSMIAYIQMAQPVFPL

SEQ ID NO: 88208 - protein, 53 aa, Gossypium hirsutum
  Clone ID: LIB3083-020-Q1-L1-E6.pep
IITALGICQNHQTKLLQIAKTQYICFTTIKYRLNLGSSIYCPNSILSPFPLHA

SEQ ID NO: 88209 - protein, 65 aa, Gossypium hirsutum
  unsure (1)..(65): unsure at all Xaa locations
  Clone ID: LIB3083-020-Q1-L1-E7.pep
HHRNTVDVTWVFHLLVKCDYSALRYHHVPAFNAQFDXRYVMKSDCSCQSGHAEIGFPFLFIFRSL

SEQ ID NO: 88210 - protein, 52 aa, Gossypium hirsutum
  Clone ID: LIB3083-020-Q1-L1-G12.pep
FSRQSSPSNLSTTFFHYLSTATQNFQRPETNPENPVQLRNRIGFLVREKKLF

SEQ ID NO: 88211 - protein, 111 aa, Gossypium hirsutum
  unsure (1)..(111): unsure at all Xaa locations
  Clone ID: LIB3083-020-Q1-L1-G3.pep
APCFYKSAPPPKHGDNPPXIGKSTPPPXPSPPPPYYYKSPPPPVHSPPPPYYYKSPPPPSSSPPSPYYYKSPPPPKHLXQPSYIYKSPPPPSSSTPPPYYYKSPPPYYYKS

SEQ ID NO: 88212 - protein, 47 aa, Gossypium hirsutum
  Clone ID: LIB3083-020-Q1-L1-H1.pep
LAPFLKRTIHKRLLIHQCAKLNKINFNHHARLTLSASKMHFFLNCPN

SEQ ID NO: 88213 - protein, 132 aa, Gossypium hirsutum
  Clone ID: LIB3083-021-Q1-L1-A2.pep
YNETDVILNVYDRTALNNYSYWVGFGIFHSGIEVHGKEYGFGAHDFPVSGVFEVEPKSCPGFIYRSSILLGRINMPYSEFREFIENVASEYHGDTYHLISKNCNHFTDDMAQRLIGRHIPGWVNRMARLGSL

SEQ ID NO: 88214 - protein, 102 aa, Gossypium hirsutum
  unsure (1)..(102): unsure at all Xaa locations
  Clone ID: LIB3083-021-Q1-L1-A7.pep
KKLSSAVSNIGAWAFNVGSSVGLIMAYKQLMFPARYSFVFATTFTXFHFCITLIYXIIVTNAXFTTQKKVPLWELLWVSIVANTPNTLMNSSPILYTTGYYH

SEQ ID NO: 88215 - protein, 58 aa, Gossypium hirsutum
  Clone ID: LIB3083-021-Q1-L1-B10.pep
PILYDFYNYDTEKKEFGILFTKFTQNLALLGALFFYIGMKNSMPRRQHKKKAPKTKTF

SEQ ID NO: 88216 - protein, 85 aa, Gossypium hirsutum
  Clone ID: LIB3083-021-Q1-L1-B8.pep
PENLFHLENIFQTMRKIPYILGKCLTVSISVRHFPVLLLHPGIFLFLHKAFFSGLGLRFTFLLLFVKILLLFQPTKNLKRQHRKK

SEQ ID NO: 88217 - protein, 56 aa, Gossypium hirsutum
  Clone ID: LIB3083-021-Q1-L1-C2.pep
IGLKSDQIGYTRKEIELHTQSFHFMRFCGYTIKGNGPSAVPHFCSNEFWLLINLCS

SEQ ID NO: 88218 - protein, 118 aa, Gossypium hirsutum
  Clone ID: LIB3083-021-Q1-L1-C3.pep
HPHTHSHSSTSIPTTGTCCKCGGATTHAPPSQSPTSWPDLSSPPAYRPIRAPALNLPPNNTQAIILTPVPQSQEVPTITPPFHFQIPSKKITSPDDIRKFHDSPTSKNFLGFIVALSE

SEQ ID NO: 88219 - protein, 88 aa, Gossypium hirsutum
  Clone ID: LIB3083-021-Q1-L1-C5.pep
LNVLHCFIIIMIVIIILFFYLHRFLPIPLSSQTWYPFLPSCSLVNPSFDPNKNTQLIPISHHCCGDLQVRLRKCGPLEKPNRDQYSST

SEQ ID NO: 88220 - protein, 73 aa, Gossypium hirsutum
  Clone ID: LIB3083-021-Q1-L1-C8.pep
YQPYRNPLPLLFSARLLRTVVRRITIQCPSTYNILSMKTLTLPNSISLHLIHISPASINIEQIHTDLTSQSLL

SEQ ID NO: 88221 - protein, 59 aa, Gossypium hirsutum
  Clone ID: LIB3083-021-Q1-L1-E4.pep
IGFDNFGSRTYTGFGYIFDGHGPYCHLVAKTVRDHLPLKLSAHWEANVSSEDVFRDFSL

SEQ ID NO: 88222 - protein, 58 aa, Gossypium hirsutum
  Clone ID: LIB3083-021-Q1-L1-E8.pep
KFESCVWIRIDEYWFYELMIDFVYNKSRFNDDVCLIRLVYGQWILCMSQFRWAGYLVK

SEQ ID NO: 88223 - protein, 80 aa, Gossypium hirsutum
  Clone ID: LIB3083-021-Q1-L1-F12.pep
FEDYMQKMLEVDVDIKEGDVYCMWYLGWNNSMFGFIEKDDVIKDVQKYVLDGLLDDIRVVVFTSIIDPAKLIYLEEKNQK

SEQ ID NO: 88224 - protein, 72 aa, Gossypium hirsutum
  unsure (1)..(72): unsure at all Xaa locations
  Clone ID: LIB3083-021-Q1-L1-G2.pep
MIGGHTMXSAARHTFHTQTTXSELSQFASKFYSRGESEYIQSTYHEXYPIHDKPAMCNVDNLIPCYHHEQYH

SEQ ID NO: 88225 - protein, 131 aa, Gossypium hirsutum
  Clone ID: LIB3083-021-Q1-L1-G9.pep
GGQFVGKHDGEVAELSMCQWLTTRLASASVDGTVKIWEDRKPIPLAVLRPHDGHPVYSATFLTAPHRPDHIVLITGGPLNCEVKIWASSGEEGWLLPSDGESWQCMQTLELRCSAESEVDNAFFNQVLALW

SEQ ID NO: 88226 - protein, 131 aa, Gossypium hirsutum
  Clone ID: LIB3083-021-Q1-L1-H12.pep
LLEKALATSAGMGSELEQKKQKKKEEQQRLDEEGAAIAEAVALHVLVGEDSDDSCTVMLNKEEGFNPWDYANNLNLFMDVGRGRGCFLQQGQANWGGQVSDSYKDGWEWAMLENSNWSLPYGAYGGDLQAS

SEQ ID NO: 88227 - protein, 70 aa, Gossypium hirsutum
  Clone ID: LIB3083-021-Q1-L1-H4.pep
HWLSHSVWSFSTSLKTRSGAFSTQKQGAGLLRLYIARACACLLTALGTKRLSFLKPISNANRRALSHAQA

SEQ ID NO: 88228 - protein, 60 aa, Gossypium hirsutum
  Clone ID: LIB3083-022-Q1-L1-A2.pep
KREEDVDGSGDWFLVTIVSKRLSSYMPITTSSNSAAAGWLHRACILWSMNDFPINKQIPS

SEQ ID NO: 88229 - protein, 135 aa, Gossypium hirsutum
  unsure (1)..(135): unsure at all Xaa locations
  Clone ID: LIB3083-022-Q1-L1-B1.pep
VASQCYGSRGARLLXRSCYLRYELYAFYEGANETSASPKTQPTTRSGGSGRKIWVIIVLTIGSAFLVVVLMASFVYCGAMKKGTRKGKDEILRNHVQLHNSGDSENPDFQDFEGLDELKANDSYIDLATIHSATK

SEQ ID NO: 88230 - protein, 138 aa, Gossypium hirsutum
  unsure (1)..(138): unsure at all Xaa locations
  Clone ID: LIB3083-022-Q1-L1-B11.pep
VAGADKEITAGFLLKKSAETNGWSRRWFVLNEKTGKLGYTKKQEEKHFRGVIVLEECSIEEIPDEEEPAPKNSKDKKANGSDKQPSLVFKITSKVPYKTVLKAHSAXVLKAESMADKTEWLNKLSKVIQPSTGPVKGG

SEQ ID NO: 88231 - protein, 90 aa, Gossypium hirsutum
  Clone ID: LIB3083-022-Q1-L1-B12.pep
EIESLKRELEKAEIYKEKLMEKEAVIEQLNVELQAARMAESYARNVLEECKNRVQELEIPIEETKKFEPSRFEFFEFGIKPLEDHHHSLD

SEQ ID NO: 88232 - protein, 126 aa, Gossypium hirsutum
  Clone ID: LIB3083-022-Q1-L1-B5.pep
QRGWEFCAKDYHDPPPAPLIDAEELTKWSFYRAVIAEFIATLIFLYVTVLTVIGYKVQTDPAKNTVYPDCSGIRILGIAWAFSGMIFILVYCTAGISGGHINPAVTFSLFVRRKVSLIRSLMYIVA

SEQ ID NO: 88233 - protein, 136 aa, Gossypium hirsutum
  Clone ID: LIB3083-022-Q1-L1-B7.pep
QLLFDAREMVDNVRSTDHDPSANLNALLMLFNCAHDRSINYLLTHVDRVSKWGELLQMVVLDLIRKVCTTNRVEKGKYIKIIISLLNAPSTAVIYECAGTLVSLSSAPTAITAAANTYCQLLFSQSYYNVKLIVLY

SEQ ID NO: 88234 - protein, 129 aa, Gossypium hirsutum
  Clone ID: LIB3083-022-Q1-L1-B8.pep
MVSGSLECAVRWQMLSSVVPAKATGGNKDLELTNMDLAMKLHYIKGVYFFQPEAAQGLSIHDLKEPMFQCLELYYAASWRIRRSESGRPFIKCNDCGVRIVEAQCDNSVDEWLAMARNNDHMLRHDQSL

SEQ ID NO: 88235 - protein, 98 aa, Gossypium hirsutum
  Clone ID: LIB3083-022-Q1-L1-C11.pep
NFSDTSVVKNRKGNGKEEKKKVRSSKLSKGEEQYYYKRNGEGSYALAQKMKELEMMDVGDMEHVLDVEEALHYYSRLKSPVYLSIVDKFFMDMYSEFS

SEQ ID NO: 88236 - protein, 129 aa, Gossypium hirsutum
  unsure (1)..(129): unsure at all Xaa locations
  Clone ID: LIB3083-022-Q1-L1-C3.pep
EEKQTTGEEGKKEEIKEKMNSGGSGIMSTESFESLGLSEPTFKAIKEMGFQYMTQIQARAIPPLMIGKDVLGAARTGSGKTLAFLVPAVELLYNVRFTSRNGTGVIVICPTXELAIQTHAVAKDLLKYH

SEQ ID NO: 88237 - protein, 55 aa, Gossypium hirsutum
  Clone ID: LIB3083-022-Q1-L1-C5.pep
PGNKGLNLQKQPKFHTVPVNISTLMFDVDQSHHSQAVTSNLIYCLLSQCLKTHTH

SEQ ID NO: 88238 - protein, 35 aa, Gossypium hirsutum
  Clone ID: LIB3083-022-Q1-L1-C6.pep
LLIKSLTFKAGSWPNLYKVPPLKFLLKNIPSTRSI

SEQ ID NO: 88239 - protein, 65 aa, Gossypium hirsutum
  Clone ID: LIB3083-022-Q1-L1-C8.pep
FPLLLPLIPLSINQNFLYLNLYNLLLFYYNMHIFQFYLLKILYHLRFPFSPIPYHFLSTKSYHFL

SEQ ID NO: 88240 - protein, 48 aa, Gossypium hirsutum
  Clone ID: LIB3083-022-Q1-L1-D10.pep
PSLQPEPSISDTFIPIISYFFLLSLKKGPRYSIQNLELAPNNTDEEDS

SEQ ID NO: 88241 - protein, 76 aa, Gossypium hirsutum
  Clone ID: LIB3083-022-Q1-L1-D12.pep
VPYHGDQYKSTRDIKSTLKQSKLFTHKSLLEWEELYSLKAQNHIYLLEKEKEADAFIFHLNLHYCLSFEVWTNPST

SEQ ID NO: 88242 - protein, 36 aa, Gossypium hirsutum
  Clone ID: LIB3083-022-Q1-L1-D5.pep
RILSLSCKGDLLSGQHVTTINSISTTILIYFFHYTH

SEQ ID NO: 88243 - protein, 65 aa, Gossypium hirsutum
  unsure (1)..(65): unsure at all Xaa locations
  Clone ID: LIB3083-022-Q1-L1-E12.pep
SLGVIYWLESKLHFSVXNVTDANECITAAWTATNAIYVPAAHQGNLDMQSGILNADDTDYKTAYS

SEQ ID NO: 88244 - protein, 51 aa, Gossypium hirsutum
  Clone ID: LIB3083-022-Q1-L1-F10.pep
KHGFRSRGIPSSSCHLLIGHRRLLLLFKNYPFNFFLIFINPFSLNPKNKPL

SEQ ID NO: 88245 - protein, 60 aa, Gossypium hirsutum
  Clone ID: LIB3083-022-Q1-L1-F4.pep
LTLPQLLQTLLHSKHHHHLHPDNTLIQQPHSPTTIATSPLTASTSTYSTITAPAESTATT

SEQ ID NO: 88246 - protein, 62 aa, Gossypium hirsutum
  Clone ID: LIB3083-022-Q1-L1-F6.pep
DAQPEKRRTILEVVKLLKGESKEKLSELENSDLFKNPQSAVCNDEILASEESSDTIKEEKDS

SEQ ID NO: 88247 - protein, 52 aa, Gossypium hirsutum
  Clone ID: LIB3083-022-Q1-L1-G10.pep
EQQLQQQKKGSLVVNYCFPVQQLIYPFSSIRGGFVHALFCIALTYISSSFGC

SEQ ID NO: 88248 - protein, 43 aa, Gossypium hirsutum
  Clone ID: LIB3083-022-Q1-L1-G12.pep
RFRLYFKVHGDLELNYEAICAVVDTEKNRSHKVSDGPLFSDTV

SEQ ID NO: 88249 - protein, 117 aa, Gossypium hirsutum
  unsure (1)..(117): unsure at all Xaa locations
  Clone ID: LIB3083-022-Q1-L1-G3.pep
KLKKMAAASYDYKNDGRWAYYCSNVLIPTHMASSSDVVDHFKRKFYQRYIDPDLVVXAMSSSTPSASXSTSSSSANESIRSRNASSTTISTRASAAATSNTTSMRWDQQTIQCSVNA

SEQ ID NO: 88250 - protein, 37 aa, Gossypium hirsutum
  Clone ID: LIB3083-022-Q1-L1-G5.pep
DIHVMICYIREMLVKLVSIMLLTIILDAYTSSPSSVP

SEQ ID NO: 88251 - protein, 114 aa, Gossypium hirsutum
  Clone ID: LIB3083-022-Q1-L1-G8.pep
MACKHSRDQAMDFQGFLNDLQDWELSLKDKGKNKKMTSQASGKEQLNITEKGRPTGKRSLNNSSSTTSSEQYDYLKNYDKRSNLSTSFVTEENMPDAASEKELGNEYFKQKKFK

SEQ ID NO: 88252 - protein, 44 aa, Gossypium hirsutum
  Clone ID: LIB3083-022-Q1-L1-H4.pep
HGFKLSLWVDGPIVTRPVSVFDWDEISLLTIYKERCQTSIKVAR

SEQ ID NO: 88253 - protein, 54 aa, Gossypium hirsutum
  Clone ID: LIB3083-023-Q1-L1-A10.pep
HTQKIYDEILSYKILTIYNNILVQLMTLTNNTKHYLHNYFTIYNNNYTLTIFYT

SEQ ID NO: 88254 - protein, 59 aa, Gossypium hirsutum
  Clone ID: LIB3083-023-Q1-L1-A6.pep
MSAFAQILYITNNIYFFLFTIHGKSCKLIISWYLDYLIFPALPQRLKNHKMMSIQLCER

SEQ ID NO: 88255 - protein, 107 aa, Gossypium hirsutum
  unsure (1)..(107): unsure at all Xaa locations
  Clone ID: LIB3083-023-Q1-L1-B1.pep
MLQQAIAARTIKGSAMVAMLFIIATNLWTGSMAQSICTNVLISMSPCLYYIQGNSSKPSSSCCSQLANVVRSNPXCLCQVLNGCASSLGVSVNHTQAMAFPTACNVE

SEQ ID NO: 88256 - protein, 104 aa, Gossypium hirsutum
  unsure (1)..(104): unsure at all Xaa locations
  Clone ID: LIB3083-023-Q1-L1-B10.pep
AAQAYVDAVHRYXTTNVKDALYCLKDALYIFCDIIMAHXSDKYYNEIAQLXEXKQNTEQTIDHYEQATDCLQNQDLSTSANQCKQKVPQLAANILQYHKAFVIY

SEQ ID NO: 88257 - protein, 84 aa, Gossypium hirsutum
  unsure (1)..(84): unsure at all Xaa locations
  Clone ID: LIB3083-023-Q1-L1-B2.pep
WSLYSAILHEFQCMDHDLAGLVAIRVVKITEPHFKCYIHQLLFGLEHCHISISAIXDINWSNLFIDDEGLLNIAYFXLATFFDP

SEQ ID NO: 88258 - protein, 47 aa, Gossypium hirsutum
  Clone ID: LIB3083-023-Q1-L1-B6.pep
KERSIFVLYNINNLIITLKMIMNMKNDIYISSTYNNLIFKSTHNVNM

SEQ ID NO: 88259 - protein, 56 aa, Gossypium hirsutum
  Clone ID: LIB3083-023-Q1-L1-B7.pep
EEIIAYAYLILYIALSSGQIFFNKFVLSSNEINFPYPLWFTLVHMDLSSGLCFLLT

SEQ ID NO: 88260 - protein, 49 aa, Gossypium hirsutum
  unsure (1)..(49): unsure at all Xaa locations
  Clone ID: LIB3083-023-Q1-L1-B9.pep
MMIWRIGAIYIHMPTMAVIALKCPDTXVAIADISLPMISIWNNDHILIY

SEQ ID NO: 88261 - protein, 33 aa, Gossypium hirsutum
  Clone ID: LIB3083-023-Q1-L1-C12.pep
LHMHHSLIETTLLHLTIVFFFSLLLYTTPSKFT

SEQ ID NO: 88262 - protein, 68 aa, Gossypium hirsutum
  Clone ID: LIB3083-023-Q1-L1-C3.pep
RSTTSGSRYSASYSARGTRRCIKSDLTQYKPGLTNLSSHTAFSTTLTCLYIVTIITNITHHYVSQLPY

SEQ ID NO: 88263 - protein, 137 aa, Gossypium hirsutum
  unsure (1)..(137): unsure at all Xaa locations
  Clone ID: LIB3083-023-Q1-L1-C4.pep
ILGMLCGVVSVVVARLVSWXTAAFEYIKEKLGLPTVICPALGGLRAGIIALRYPGILYWGFTNVNEILHTGKSASAPGIWLLTQLAAAKVVATALCKGSGLVSGLYAPSLMIGAAVSAVFGXGSAAELINSAISGNA

SEQ ID NO: 88264 - protein, 68 aa, Gossypium hirsutum
  Clone ID: LIB3083-023-Q1-L1-C6.pep
LNVLGVCIRSWVQVPHFNSFYLSFYLILFFSKFLSLSRKIDLRFSFAFLCSFIPHLFLILLYFASIHQ

SEQ ID NO: 88265 - protein, 84 aa, Gossypium hirsutum
  unsure (1)..(84): unsure at all Xaa locations
  Clone ID: LIB3083-023-Q1-L1-D12.pep
RALQSPQPCFQQGDLIGDPGNLEWMMEANCPDVADITHSLQQPAXRKLDSGGVTSGGFRELIPCIAXTAIAVGEDCVFIEVHYY

SEQ ID NO: 88266 - protein, 73 aa, Gossypium hirsutum
  Clone ID: LIB3083-023-Q1-L1-D4.pep
IYKKSIALNILNTEKPTFLHFFSPMFNNPFLIIVQTSKPSILEQRKGKGKGKERQKIIIAAIKKGDIFNSLLG

SEQ ID NO: 88267 - protein, 73 aa, Gossypium hirsutum
  Clone ID: LIB3083-023-Q1-L1-D9.pep
WGAGVYPRCADTSTCMTYWALACLQKNARFTVPLPKHNLHMGLNNCTASKAHLLYDLCTTTCTSIGLTSFSSP

SEQ ID NO: 88268 - protein, 111 aa, Gossypium hirsutum
  unsure (1)..(111): unsure at all Xaa locations
  Clone ID: LIB3083-023-Q1-L1-E2.pep
WDYSVRSKEQIEARLFSKHEAAMRRERTMAYSFTHQQTWKNAXRSMNPLFMDPSNPSWGWSXMERRMTARPWEVRGGMIHIEHLLYQSSLKSARSNFSGEIIKAYARYQLN

SEQ ID NO: 88269 - protein, 90 aa, Gossypium hirsutum
  unsure (1)..(90): unsure at all Xaa locations
  Clone ID: LIB3083-023-Q1-L1-E3.pep
MEDGECVLVLEPAKKDFWNPTCMDLADTSKPFKVTNSGPAKHWTDAISIXNGRLGAMVYGGIASETLQLNDDTFWTCVSGDYTNPEAPIS

SEQ ID NO: 88270 - protein, 48 aa, Gossypium hirsutum
  Clone ID: LIB3083-023-Q1-L1-E6.pep
KIQIMDIVDKVKLLIRRKIVVEGEKVFRFCCLCYSLRMIETVKTSVEE

SEQ ID NO: 88271 - protein, 89 aa, Gossypium hirsutum
  Clone ID: LIB3083-023-Q1-L1-E7.pep
DRGSLIDWAKDYVELPEVMSHIVDPELKHFTYDDLKLICEIISLCIHPDISRRPSMQEISLMLESRIDTSVSIELESSSLAWAELALSS

SEQ ID NO: 88272 - protein, 60 aa, Gossypium hirsutum
  Clone ID: LIB3083-023-Q1-L1-E9.pep
EAAPVRTARLKWEIKVHKVQFDFFFYYYQRFSLIDYQRIWKYISLVSIGITIPVAILSII

SEQ ID NO: 88273 - protein, 79 aa, Gossypium hirsutum
  unsure (1)..(79): unsure at all Xaa locations
  Clone ID: LIB3083-023-Q1-L1-F1.pep
QYACRGSRCNVHSHSWGGXILHLVQFIVYDVVLLNMPYLPTVFCQLQFTTLTIEKTWILLITLTLKSIIPNALFSMVKL

SEQ ID NO: 88274 - protein, 49 aa, Gossypium hirsutum
  Clone ID: LIB3083-023-Q1-L1-F11.pep
FYTRSKLSFSLTSISIGNGFILRRIFKIKYKLFNIHMSNPLHNKFLSII

SEQ ID NO: 88275 - protein, 127 aa, Gossypium hirsutum
  Clone ID: LIB3083-023-Q1-L1-G10.pep
KPLLPKDRIDELATFMDKVETWLDEKEAEQKKTSGYSTPVFTSEEVYEKVFNLQDKAASIKRIPKPKPKVEKPVKNETETKSENTTSSEKDTSENDKPAGDSDSLTNEKIKGGSEPHDEVLSVFNTT

SEQ ID NO: 88276 - protein, 55 aa, Gossypium hirsutum
  Clone ID: LIB3083-023-Q1-L1-G11.pep
NTLTRMDSIQTQSVLRMKDSKQKRSKNKSSKASYISVQSSEWDGIHKITLALMVM

SEQ ID NO: 88277 - protein, 79 aa, Gossypium hirsutum
  unsure (1)..(79): unsure at all Xaa locations
  Clone ID: LIB3083-023-Q1-L1-G3.pep
DNVTSKIHDKERSSPDHERLTDALKQLXRGGTPCNYHVQRELSLHSELPIRGGIHISGKTLTVRTITLYVISSDTIDYG

SEQ ID NO: 88278 - protein, 63 aa, Gossypium hirsutum
  Clone ID: LIB3083-023-Q1-L1-G9.pep
TIYNDMPTLSIFIHLTFSSKKTNLTKPFNYFMKALLIFPLLTPMHLFLIHSIIFIWNSSTQFH

SEQ ID NO: 88279 - protein, 120 aa, Gossypium hirsutum
  Clone ID: LIB3083-023-Q1-L1-H1.pep
VDPNIYPELALALRGSMEEERARQEAAAKKAAEESSNPEKEEEVQPQSDSQHATEHVTDPMDEDDALLKHALALSMNIPGSDSSAGDAEMSEATNDQELAMALQMSMQDSLKDPSSESDV

SEQ ID NO: 88280 - protein, 132 aa, Gossypium hirsutum
  Clone ID: LIB3083-023-Q1-L1-H11.pep
NTMEPVEKVLRDAKIDKGCGHDIVLAGGSTRIPKVQKMVSDFFNGKEPNMSINPDEAVAYGAADQAVILSGDTSEKTQDLLLLDDAPLSLGIRTVRGVMTALIKRNTTVPTKKSEVIFTYADYQPGVLIQVF

SEQ ID NO: 88281 - protein, 67 aa, Gossypium hirsutum
  Clone ID: LIB3083-023-Q1-L1-H12.pep
STIIECISIHIAQAHIQFRNACWELYCLEHRIQPHCQIPSDKTFQTGDDSINTFISETGSRKHFPRS

SEQ ID NO: 88282 - protein, 42 aa, Gossypium hirsutum
  Clone ID: LIB3083-023-Q1-L1-H4.pep
HPIHFYRVRSSTNQWIKSHTTFITILLSYSPLNHYLNQINNF

SEQ ID NO: 88283 - protein, 116 aa, Gossypium hirsutum
  Clone ID: LIB3083-023-Q1-L1-H5.pep
PIPMQPGVGPRALARPPFFGPAPGFMIGPGYPGALCYVPIAPPGSIRGPHSPRFVPYPINPETTVLPPEMVTLRANIMKQIEYYFSDENLQNDHYLISLMDDQGWVPVSTIADFKK

SEQ ID NO: 88284 - protein, 36 aa, Gossypium hirsutum
  Clone ID: LIB3083-023-Q1-L1-H7.pep
YRGLILLSVQIYYVVTLILRERMKVERTLNGKGTIQ

SEQ ID NO: 88285 - protein, 49 aa, Gossypium hirsutum
  Clone ID: LIB3083-024-Q1-L1-A3.pep
SDLYTILLEDSFRKRAHIIVLLGFCFTFGLVLIFLYIPRDFSFVFNLVN

SEQ ID NO: 88286 - protein, 142 aa, Gossypium hirsutum
  Clone ID: LIB3083-024-Q1-L1-A6.pep
RSLELEEVLQTSHGKLEGTDKKVNELELLLEAEKYRIQELEEQISNLEKKCGDAEGESVMYSDKVSKLSSELEAFQARTSSLEIALQMANEKEKELTECLNLATDEKKKLEETSQSSNEKLAEAENLVEILRSDLNLTQQKL

SEQ ID NO: 88287 - protein, 129 aa, Gossypium hirsutum
  unsure (1)..(129): unsure at all Xaa locations
  Clone ID: LIB3083-024-Q1-L1-A8.pep
VDGGPNISINLPGSQRLWYNGXQFTLIVPFIYPEYVTPTVKKISTKEKIHLIVNSCIVTGILCKATSHTFKETXRHAVKLSFLYESEVLTWSKTDFTFTYSVSSSNKFXSVLLQSAPLYDHDQKDMFCV

SEQ ID NO: 88288 - protein, 114 aa, Gossypium hirsutum
  Clone ID: LIB3083-024-Q1-L1-B2.pep
HSRVLGRISWGWRLLNSQISSNVLIETIIHHLIKGLSSLSIMATRSWSRVGWCCPLHGSKHITLDIVSYGSFRIHLLYKNTLSLSGFITLLLFINMACIARLTYTMLVLESTKS

SEQ ID NO: 88289 - protein, 73 aa, Gossypium hirsutum
  Clone ID: LIB3083-024-Q1-L1-B7.pep
QVVSSGLIRGLCTIFCLFSSSFYTHLLIFSILLISYLNSHLKKLSSLSYEYPLLLYHFLTFQTFNNAPLSPYI

SEQ ID NO: 88290 - protein, 35 aa, Gossypium hirsutum
  Clone ID: LIB3083-024-Q1-L1-B9.pep
ATFSSHDTTHNHSTILFIVGPTFLIHVTTYIHLYK

SEQ ID NO: 88291 - protein, 62 aa, Gossypium hirsutum
  Clone ID: LIB3083-024-Q1-L1-C11.pep
QNHLLSIFLILFTNSSNPLCFILTSLNIYHHIIIHTYTKSFLLKKPLLTNTSYTRLICKLKK

SEQ ID NO: 88292 - protein, 144 aa, Gossypium hirsutum
  Clone ID: LIB3083-024-Q1-L1-C5.pep
YQSRLGLLVTGKLDYGTLSQILAPRCGIPDGESSSPTLHVNKNYVFFPGKPRWARPVPMTLTYGISPDNLIHYLSLSDIRKTFKRAFSRWASVIPVSFVETNDYGFADIKIGFYTGDHGDGEPFDGVLGILAHSFSPESGRFHL

SEQ ID NO: 88293 - protein, 65 aa, Gossypium hirsutum
  Clone ID: LIB3083-024-Q1-L1-C6.pep
HFSVLGFEQPVWCNRGWLIRFSNLQTHQCNGNEIITQTHTKRNYKSNFLFFFQISLQVLNNQTEL

SEQ ID NO: 88294 - protein, 42 aa, Gossypium hirsutum
  Clone ID: LIB3083-024-Q1-L1-C7.pep
TCSPSMATVTLKGPTKIYYLIIYVSTLIQDLNFNSFHINLST

SEQ ID NO: 88295 - protein, 103 aa, Gossypium hirsutum
  Clone ID: LIB3083-024-Q1-L1-C8.pep
RMHFSLGAGCSAAAGPVGRVLEADLRAGDSGSGMCYSYSCSKGAFVGVSLEGNIVATRMDTNLRFYGDPYLTTADILLGTVDRPKAAEPLYAALHNLYSSLRF

SEQ ID NO: 88296 - protein, 60 aa, Gossypium hirsutum
  Clone ID: LIB3083-024-Q1-L1-C9.pep
DEEHHLTHLHIIDTIVALYLTVGFLISALRLATLTIHLPMATLITHIMITLSVTLSKLMP

SEQ ID NO: 88297 - protein, 38 aa, Gossypium hirsutum
  Clone ID: LIB3083-024-Q1-L1-D2.pep
FHSNNYTIILHILQIPNLPNSSKTNNHPLKHTHNNYIK

SEQ ID NO: 88298 - protein, 48 aa, Gossypium hirsutum
  Clone ID: LIB3083-024-Q1-L1-D4.pep
ICNLVIQLVISLQVEYPISKIYKLVTELLISLQIYTLITQSLHHYSLI

SEQ ID NO: 88299 - protein, 42 aa, Gossypium hirsutum
  Clone ID: LIB3083-024-Q1-L1-D6.pep
SNLPIFYFIPLHLSYLNYLFSNFISITSLSLPSNHIHYITFK

SEQ ID NO: 88300 - protein, 58 aa, Gossypium hirsutum
  Clone ID: LIB3083-024-Q1-L1-D7.pep
PALIIRVCMLRKGMGVNKAVLSQIILVGLIPIRRLSLGGIIHVILGPIRILIGQMIVN

SEQ ID NO: 88301 - protein, 61 aa, Gossypium hirsutum
  Clone ID: LIB3083-024-Q1-L1-D9.pep
GSQAPTTPLHTGTTIHPAREDQHIKAESTSNHRDCTYNKGLKPMITDIIIIYFIFEPCQVS

SEQ ID NO: 88302 - protein, 77 aa, Gossypium hirsutum
  Clone ID: LIB3083-024-Q1-L1-F1.pep
VVLEQIKKNPGLILLDKTEKYWPEFNDENNGIEHYLHAYKKSYTQSINKVSFFHHTDHLEFDTYRDTKLALHARRKP

SEQ ID NO: 88303 - protein, 88 aa, Gossypium hirsutum
  Clone ID: LIB3083-024-Q1-L1-F10.pep
RVGSMYQNPNLAPYLIPMYIKDCANIYLRVQGYFLANNLATPFIAAYASKSSLWSIFSYIKQICSTKLTQGNTCLPMMYAHHFHLLTC

SEQ ID NO: 88304 - protein, 51 aa, Gossypium hirsutum
  Clone ID: LIB3083-024-Q1-L1-F12.pep
STHTRFTMYPIHNGKSSHTLSANTLTNHTPNLNLIQIHDHSDSLSLFLHLP

SEQ ID NO: 88305 - protein, 115 aa, Gossypium hirsutum
  unsure (1)..(115): unsure at all Xaa locations
  Clone ID: LIB3083-024-Q1-L1-F4.pep
RAFLFCMQIRAREYLIKFPRVNTNEKDTTTRYQEHDTFIPQTTQKPXEQEPRFIPETQNRYGLYXHQSRSRSRSCISQLTSTTKETYEPYVTPVRFHPDXPYNNIPEFSNHENTY

SEQ ID NO: 88306 - protein, 59 aa, Gossypium hirsutum
  Clone ID: LIB3083-024-Q1-L1-F7.pep
KGCMDGIFQFQVSIHYLLRSRYVCDLHGCVSFNIRVGCFILLNCGRPSYREDFLRFMQP

SEQ ID NO: 88307 - protein, 55 aa, Gossypium hirsutum
  Clone ID: LIB3083-024-Q1-L1-G12.pep
SVHTTYYVIDSKLTSKLYYHTQYISNNNLINLQFFQLQLLLSTLIKQQSLYTMIH

SEQ ID NO: 88308 - protein, 58 aa, Gossypium hirsutum
  Clone ID: LIB3083-024-Q1-L1-G3.pep
TLINNSTPTLLHLIIHLLIFQLNPSFLLISTIKPPFLSLSNITLFLILIIFIPFLIIF

SEQ ID NO: 88309 - protein, 121 aa, Gossypium hirsutum
  unsure (1)..(121): unsure at all Xaa locations
  Clone ID: LIB3083-024-Q1-L1-G4.pep
IYSIFFSINAGXILLTLSLHGKGHENSTNHLLYSQSDIYHEDCNQFKSTCKLSQDIFNAKAPCLKITKGIVKTIAGQLEKVFNKNKENSRTDDSPSDLSSTVSDHEEGHSCHCSFEEAIDS

SEQ ID NO: 88310 - protein, 136 aa, Gossypium hirsutum
  Clone ID: LIB3083-024-Q1-L1-G5.pep
NESRASFVGTFEACVDSAQIVAETRSAIRKKSKFRKRMEQLDSSDCSDQSQIDKHPEEVGLTNTDQTNTVSGPTLSDEGNSEEKIDSFDANETSDVSLAIVKPPVSQSRKKLLVLDLNGLLADIIYNPPIDYTPDA

SEQ ID NO: 88311 - protein, 124 aa, Gossypium hirsutum
  Clone ID: LIB3083-024-Q1-L1-G6.pep
KSGSHANVNKTFENVFHFPEDISVQEETSLSWPLWFHAAVPGSIPLYITIYYEMEGVSSIMKYRTLRMHYNLQVLPSLDVSFQLSTRPSRSQEFLLRMDVVNKTTSECFQVHQLSSVGQQWEIS

SEQ ID NO: 88312 - protein, 32 aa, Gossypium hirsutum
  Clone ID: LIB3083-024-Q1-L1-H2.pep
IHVYNIYLVSVLGITASIGDHHSCVNHHYNPF

SEQ ID NO: 88313 - protein, 93 aa, Gossypium hirsutum
  Clone ID: LIB3083-024-Q1-L1-H8.pep
MPELRSGGRRSKRLGDLEPPSQPVVQAENWVLPAQNRSRRRVGGRGRGNAVGVAKGPSPAVPTRPRAAGRGRCIRLTDFDPELCQVLPEAAPL

SEQ ID NO: 88314 - protein, 104 aa, Gossypium hirsutum
  Clone ID: LIB3083-027-Q1-L1-A10.pep
FLRKEADAIGDGEKITPLIHPLDTLLQSTRVRSRGSGPPYYLPEPQIKLHDCPKRLKELRNLPRKQVHTQTPRQGTNGNRSPQRQSKPSTATTIPSPQVQHPPP

SEQ ID NO: 88315 - protein, 105 aa, Gossypium hirsutum
  Clone ID: LIB3083-027-Q1-L1-A12.pep
FHLFLSDTSLTLIVSSGEHYSLGLTTSSSFLSSSTFLTVSSSSFIVFNFSSTSSVLSLLRTIIRPLTKKASFANFSSLLIEFFYSVSFTTNLTLTVSTFTNTIFS

SEQ ID NO: 88316 - protein, 93 aa, Gossypium hirsutum
  Clone ID: LIB3083-027-Q1-L1-A2.pep
SKFCFLGYVCLGFWRSDYSVFFFCFLLVMELKKDKLVRFYSDGKRHKETPWGKNDPSFLEKSSSGYKISFSSVLKPEIGMDGGRNRLPEMGKI

SEQ ID NO: 88317 - protein, 58 aa, Gossypium hirsutum
  Clone ID: LIB3083-027-Q1-L1-B10.pep
EPGLRPTAFSFGNLHSIPPPMEPGRSRAKPAVTNELAIEPLPNTEAAFTSTTNRYSPS

SEQ ID NO: 88318 - protein, 70 aa, Gossypium hirsutum
  Clone ID: LIB3083-027-Q1-L1-B11.pep
QKRRQRYQQPTNGNQSGHYRGDGKENDLVKSEIFSAYRQIRLGGTGQAFFESRPNLGNKFDSIQGSYEPK

SEQ ID NO: 88319 - protein, 108 aa, Gossypium hirsutum
  unsure (1)..(108): unsure at all Xaa locations
  Clone ID: LIB3083-027-Q1-L1-B2.pep
KLRESNSYSQNARAVFAXAEPGTTIADIAAVSTDISGIYECWEQPVEAXSSKPKALTQLLDKRXHQSTIAGIVHXIRVMPYILGRHDESLNSFESAFTYIRASNHEDI

SEQ ID NO: 88320 - protein, 63 aa, Gossypium hirsutum
  Clone ID: LIB3083-027-Q1-L1-B9.pep
LLIRLYDFFLGPFGRELIGAAGLMSRLTVNNQFSKVRITGTPGIGIALSLAGSTSLRVGIPDP

SEQ ID NO: 88321 - protein, 67 aa, Gossypium hirsutum
  Clone ID: LIB3083-027-Q1-L1-C10.pep
DRKYSDAYFTMDQDFKSNSGVYQAELLTLSRVFNRKSHLGSVGPQEVTYTAPYSSSTRGKKAPRGGV

SEQ ID NO: 88322 - protein, 74 aa, Gossypium hirsutum
  Clone ID: LIB3083-027-Q1-L1-C12.pep
DCVEGMFSRCFFRYLGDRRSGVLPLVDDDDYRRRGGAFPSEFRVDSATGSRLKGTSGCWFPCFYEITFLRSGRG

SEQ ID NO: 88323 - protein, 77 aa, Gossypium hirsutum
  Clone ID: LIB3083-027-Q1-L1-C2.pep
MSSSRSVRKLEVVSPVPADIDIANSVEPFHISEIAKDLNLSPNHYDLYGKYKAKVLLSVLDELESSDNGYYVVVGRI

SEQ ID NO: 88324 - protein, 123 aa, Gossypium hirsutum
  Clone ID: LIB3083-027-Q1-L1-C6.pep
ARVGDIYGGMDDAKIGLSASTIASSFGKAISDKKELQDYRPEDISLSLLRMISYNIGQISYLNALRFGLKRIFFGGFFIRGHAYTMDTISFAVHFWSKGEAQAMFLRHEGFLGAVSAFMSYQK

SEQ ID NO: 88325 - protein, 53 aa, Gossypium hirsutum
  Clone ID: LIB3083-027-Q1-L1-D10.pep
DIGKHAPGADDISKVPETGVAETSTARENTDTNRHTPKNSAIGEAATKYPNKE

SEQ ID NO: 88326 - protein, 74 aa, Gossypium hirsutum
  Clone ID: LIB3083-027-Q1-L1-D11.pep
ISHVSLSTRDTCGSIRRGRAHELRVLISLRTGMSSPNGIPISRLKRLNSLISVVIPTETTTNVPVLLLEKIPTC

SEQ ID NO: 88327 - protein, 90 aa, Gossypium hirsutum
  Clone ID: LIB3083-027-Q1-L1-D12.pep
DSCIVLTRIRCTSPIVTTGLVIGLLEGSVTSDETLARRQEAEFAVPKASSSLTLSATTHAAQAAGADGPSERVIPRRKPGTFLGSLLVLQ

SEQ ID NO: 88328 - protein, 109 aa, Gossypium hirsutum
  unsure (1)..(109): unsure at all Xaa locations
  Clone ID: LIB3083-027-Q1-L1-D2.pep
MANEGALRSAIVWLSVIMVLVGLFTFSLKKIMVTYAFGMLGISGILLPDWDFFDRDFSRWPYPVTADERAALQARRSGFKRYRIYPMRLIIYTXXYSIGPYKVWIFVSS

SEQ ID NO: 88329 - protein, 124 aa, Gossypium hirsutum
  unsure (1)..(124): unsure at all Xaa locations
  Clone ID: LIB3083-027-Q1-L1-D9.pep
SSDGTLTRSRPRGGNNGEPAGPKPQGSSRLWPGSRQRRNPGTASHRGRRPLEIRKSVPSLRLLSQKDGKENKGGDRLGRFTLRRSLALERVRLITFRERDPDRSYEPRGVTRGKTRSFPRXRFP

SEQ ID NO: 88330 - protein, 148 aa, Gossypium hirsutum
  unsure (1)..(148): unsure at all Xaa locations
  Clone ID: LIB3083-027-Q1-L1-E10.pep
LAVGTVRVLDGSVGVTFFKATNRLSXKADGHRIIAPGRGCPAPSSPPSMSGHGINSRLCVRLRLTATPLTVRHISGLSFRREVRRQVAYLRQIRLTHTLRRLPSPYLDRRIILISGPQGRNRMMSKRIPNKMEGLIKTRSYEPKSPLI

SEQ ID NO: 88331 - protein, 128 aa, Gossypium hirsutum
  Clone ID: LIB3083-027-Q1-L1-E11.pep
GKFRAVLVFQVVGRRLSTGICDCVCFVNRPEIASCARRTGLVRVVLVGKCKLGPPWAMGAFQAFFVFMQRVKRMPTSSTVLIPRMGRMTRYPRKEGGRSLNRPGRAAREYQKLLLLLPPSFRPFLRSG

SEQ ID NO: 88332 - protein, 91 aa, Gossypium hirsutum
  Clone ID: LIB3083-027-Q1-L1-E12.pep
LATGIITITPVGPGEGDPRDLKSSSFPLWTLFKSSRYLLLSLSTSSLPVSIRFPGFRWSSFRRSVHSTSVSVPGPGDVIDSYQVPTTQKAR

SEQ ID NO: 88333 - protein, 53 aa, Gossypium hirsutum
  Clone ID: LIB3083-027-Q1-L1-E4.pep
ASMHLNLTHCDLPTPSSRTHNPFLLISQLYQTSFLFFHRIVLLLIPHDALPSS

SEQ ID NO: 88334 - protein, 111 aa, Gossypium hirsutum
  unsure (1)..(111): unsure at all Xaa locations
  Clone ID: LIB3083-027-Q1-L1-E6.pep
VEPIAPASYFNERIDYMKGKVHPNLAKERRAIIREYEQLKVRINALFSKAHTKPKQGWLMQNGTPWSXNNTLDHPGMIHVYLXSAGALHVDRKXLPRLDYVSRXKRPDYQH

SEQ ID NO: 88335 - protein, 113 aa, Gossypium hirsutum
  Clone ID: LIB3083-027-Q1-L1-E7.pep
LSNTTNPSLGNNGSLSETGKLKGDSLESLHVKQIKKHISTPVPHDSYSVLSISSSGKYLAIVWPDIPYFSIYKVSDWSIVDSGSARLLAWDTCSDRFAILESALPSRMPIPPK

SEQ ID NO: 88336 - protein, 60 aa, Gossypium hirsutum
  Clone ID: LIB3083-027-Q1-L1-E9.pep
MYLQTGVTRVREIRRTGVMAKTRLGTVRTLTSHGFFAPGIVREKAPAPCSRRSGGVLRLK

SEQ ID NO: 88337 - protein, 74 aa, Gossypium hirsutum
  Clone ID: LIB3083-027-Q1-L1-F11.pep
SNSRHTSRRKIKSSYRGLTFIVQKTSTIDHIHHRTSRTVHYSIYRPGESPILKGALAFNLIHNELHHNLSVPYS

SEQ ID NO: 88338 - protein, 88 aa, Gossypium hirsutum
  unsure (1)..(88): unsure at all Xaa locations
  Clone ID: LIB3083-027-Q1-L1-F12.pep
XFRSWHYYRYYRYMALSLNRGSPPRSLARGISGWLLLYYLGVLLLYSYYFTSLWLFQMGTXQGCERLLSQLANRKLNAPRPCVLKSQR

SEQ ID NO: 88339 - protein, 84 aa, Gossypium hirsutum
  Clone ID: LIB3083-027-Q1-L1-F2.pep
HDNGFHTPYKYSWGQERSPRSALSPRSDSLDLAIDGVVATSIEQLYHNVYEMQSSDQSPSMSSYGSYGEESRIDSELRHLVGDL

SEQ ID NO: 88340 - protein, 57 aa, Gossypium hirsutum
  Clone ID: LIB3083-027-Q1-L1-G10.pep
VFEFDYKFEAFLRWRLIVSSGIRNFGIIWLLIGGTLPFRKVRGQLPNSSKQGPSNQK

SEQ ID NO: 88341 - protein, 75 aa, Gossypium hirsutum
  Clone ID: LIB3083-027-Q1-L1-G11.pep
ESAFLILSFNLSVIGDIKTLGFRNSNFPNGDLRGGLRAAAGAGRRIRNKFLLSIMVDRDTTVFGLLANGSRPLLI

SEQ ID NO: 88342 - protein, 52 aa, Gossypium hirsutum
  Clone ID: LIB3083-027-Q1-L1-G12.pep
FHFLKVCSIGLRIVPPSYLQRGNPWTDEHPTRIPLYNFLYPELDMKISYPPS

SEQ ID NO: 88343 - protein, 74 aa, Gossypium hirsutum
  Clone ID: LIB3083-027-Q1-L1-G7.pep
ATSSPPKTNNLSVDFLKRESVLHTIPYSTTIISKTKHPVPSTYSVLNHYYTSPLTRLHMNTSLHYHYYSSYNYL

SEQ ID NO: 88344 - protein, 72 aa, Gossypium hirsutum
  Clone ID: LIB3083-027-Q1-L1-G9.pep
ESLASLIHLTDSLETPWKRLIEVRTSPGKAKNGGRSRSHKSQPRYTITLSYRRKKRGIHSHRSRRNAAITSP

SEQ ID NO: 88345 - protein, 108 aa, Gossypium hirsutum
  Clone ID: LIB3083-027-Q1-L1-H10.pep
SAAGRNSVLRVREVCVLSRFITPVALPHGIFPIRFRFYSLAGGFGYVVGWAPYCRSTEGGEPVIVQLRELAEAYIVVLLTVRRLLVTSTFSVPSVILVVVVRLVIGIG

SEQ ID NO: 88346 - protein, 97 aa, Gossypium hirsutum
  unsure (1)..(97): unsure at all Xaa locations
  Clone ID: LIB3083-027-Q1-L1-H11.pep
AEIALYISPCSLVAVVIIVGILPKVVSSLILLTLLLIKLIASKLCPILLLLLWHLLTLKLSTVYYALIKINVTAVKTGIAFLLALEMILSDPYIXAP

SEQ ID NO: 88347 - protein, 130 aa, Gossypium hirsutum
  Clone ID: LIB3083-027-Q1-L1-H12.pep
ATTMAAISSSGSSTATSASTQLKFISDCIPSVGVLAIRSFSHIPRDFLIARDGRSGTSKSSDLAVVGSLQLSSFAGHARNFFGNPMINNPYRPSSRTPRLSVDNDRRLRTSRGRKAGERAGEDELIPGSY

SEQ ID NO: 88348 - protein, 56 aa, Gossypium hirsutum
  Clone ID: LIB3083-027-Q1-L1-H6.pep
FARSHVLHSIKIEVGEIFIHIHISIGNLSLQYILLVIFLFHFFSSNKCNHLSHCIV

SEQ ID NO: 88349 - protein, 77 aa, Gossypium hirsutum
  Clone ID: LIB3083-027-Q1-L1-H7.pep
NCGCPPIQQPSYTNLDKTIHNSLPIIYTILIIFIYSSSYNYNSLSLSLLIFLNTHNISFHYFSRNSTMNTTIFNTFI

SEQ ID NO: 88350 - protein, 122 aa, Gossypium hirsutum
  Clone ID: LIB3083-028-Q1-L1-A10.pep
GYPNDGKHLPETTESRRHTYYHCPTVRNTIRGGAGRGVLPKRTGHPQVRPAPETKENRETPRSRGHTPKPLKHLPLTTPPNEYSATDPQSRMLSSPAISLIRNVAPNVKGQKKLTNATRPTR

SEQ ID NO: 88351 - protein, 87 aa, Gossypium hirsutum
  Clone ID: LIB3083-028-Q1-L1-A11.pep
GSNKVLSGAFSHVRPIYPILHKNPGARTTKHLSLVSRLGTSTLIRPRLEPNLNGKTLSASAEESGSLSVIERSTLRTRGPKFRRYRL

SEQ ID NO: 88352 - protein, 74 aa, Gossypium hirsutum
  Clone ID: LIB3083-028-Q1-L1-A12.pep
ELKVPRIWVNLLDVLWVSEGLFFKSSGSRARYGISAELRISSQRVETGGRHLPMTSHTRFLRPKKSADSETGTA

SEQ ID NO: 88353 - protein, 67 aa, Gossypium hirsutum
  Clone ID: LIB3083-028-Q1-L1-B10.pep
SYSVDGVLGIPPANVSVTSRRSGTLQSEQTTLRSTPPVYYSVISRDHSTNYRDLRPKKSADSETTTA

SEQ ID NO: 88354 - protein, 101 aa, Gossypium hirsutum
  Clone ID: LIB3083-028-Q1-L1-B11.pep
SPGVHYQGSRAVEKEPFQERALNYRPDGSLTLRVSNFLLYKSSSIFNLGSVFTFKSVISYAASTDSDVIGSPKFPELGNPAYSLIPGSYDPKSPLILRQPP

SEQ ID NO: 88355 - protein, 42 aa, Gossypium hirsutum
  Clone ID: LIB3083-028-Q1-L1-B12.pep
LSHNQRTFWVVRTWYETFLHLSSPRNYGAASNVRGGHRLIYI

SEQ ID NO: 88356 - protein, 79 aa, Gossypium hirsutum
  Clone ID: LIB3083-028-Q1-L1-B2.pep
VPPKRFFSLTCKKRDRERVEQRYFPFINKTAQEIINKSESLSIYTYDQECSLWEPTVFKHPATFETLAMDPHLKEFIMK

SEQ ID NO: 88357 - protein, 48 aa, Gossypium hirsutum
  Clone ID: LIB3083-028-Q1-L1-B3.pep
VSSYYALKQHKAISIFIYHNTTTHLLISYLFINHCSGTTYHYIILFIT

SEQ ID NO: 88358 - protein, 105 aa, Gossypium hirsutum
  Clone ID: LIB3083-028-Q1-L1-B5.pep
MAIGNAPWPIGVAMVGIHERSAREKIYTNSVAHIMNDETTRKYLQSVKRLMTFCQRRYPTLPSKAVEFNSLANGSDLQSLLAEERDSRVSSSDDKLRLMPTSTDT

SEQ ID NO: 88359 - protein, 90 aa, Gossypium hirsutum
  Clone ID: LIB3083-028-Q1-L1-B8.pep
HLQEMRFLLGLLTHYRWMKVSSTTDELLKGVVFPNLKFLLLVGDYFVETSLEISSEFFEGVKAIQVCALKDQLISLDAFKFNMNIRTFCL

SEQ ID NO: 88360 - protein, 80 aa, Gossypium hirsutum
  Clone ID: LIB3083-028-Q1-L1-B9.pep
VRGFYGPGPLDFFGSSKIRVGDSSPEDPAGPYAFDNNGAGNARSGGYGDLALFKFDGVRDNPGAYACPATGKASFVGENN

SEQ ID NO: 88361 - protein, 91 aa, Gossypium hirsutum
  unsure (1)..(91): unsure at all Xaa locations
  Clone ID: LIB3083-028-Q1-L1-C10.pep
FILLLVMLRIPFRLKLPLLTGEHVGSLTRKRRDRGRLRASLKKFLPVKDTETNEEEIRTSGRYNKGSRRYAPHKARLETRKSAGLDKAGXL

SEQ ID NO: 88362 - protein, 44 aa, Gossypium hirsutum
  Clone ID: LIB3083-028-Q1-L1-C11.pep
GMIAYYYSISSSLKQSPYSRSHNHNLSPYSSYYLYLLNLNFHSL

SEQ ID NO: 88363 - protein, 141 aa, Gossypium hirsutum
  Clone ID: LIB3083-028-Q1-L1-C2.pep
RISERGRELSFPEYGWVLFTVLDYLEQGKTSFFLYSPFSTEVVQLPHLGEPLFFEVGTFSLDATCPKCLIFVLGTNRNNCYVLLVVQHGRFFSSIMVSLSLILLLMLLMPKGFSIVFSMEVNVELKEWSGILIDQRFPGVL

SEQ ID NO: 88364 - protein, 90 aa, Gossypium hirsutum
  unsure (1)..(90): unsure at all Xaa locations
  Clone ID: LIB3083-028-Q1-L1-C3.pep
MGTLTTPTFGTYESPNYWKPPTPVFKPSKVKPPPYXPNPPMYXPPKKEKPXPKPPVYSPSKKENPXPKPPIYXPSKKENPXPKPPIYTPS

SEQ ID NO: 88365 - protein, 66 aa, Gossypium hirsutum
  Clone ID: LIB3083-028-Q1-L1-C4.pep
NKHEESLMEKIAENIHGHDSSSSSSDSDDYKQSESSIKDKVFRLFGREKPVHHVYGGGIPADILLW

SEQ ID NO: 88366 - protein, 93 aa, Gossypium hirsutum
  unsure (1)..(93): unsure at all Xaa locations
  Clone ID: LIB3083-028-Q1-L1-C6.pep
MESDLAKLFIGGISWDTDEERLKEYFMKYGQVVEAMIIRDRFTGPARRFSFIVFADPADAXKVIMDKHMIDGHTVXANKAVPKDDQNILNKNI

SEQ ID NO: 88367 - protein, 82 aa, Gossypium hirsutum
  Clone ID: LIB3083-028-Q1-L1-D1.pep
KKILLYIYIFHSSISPSFPCLISHKNLLPKFYLFISSFFSIWFLDSIFLKIQKQGFYPFLGELLLFVYLKKTRVVRSQSLDL

SEQ ID NO: 88368 - protein, 76 aa, Gossypium hirsutum
  Clone ID: LIB3083-028-Q1-L1-D10.pep
LRISGLFRSYEPRIRLPFLHNTFHYNRGSLKSGKDLASHPRKLPITQLSILLTLSPINYLAYTNITISISKLPLTH

SEQ ID NO: 88369 - protein, 74 aa, Gossypium hirsutum
  Clone ID: LIB3083-028-Q1-L1-D12.pep
PFPVVSGYHLPPASIPWVTIFPRIIGMLLGREIYAVFLPGRGSPPSSFLVRAGWGRLIPGSYDPKSPLILRQPP

SEQ ID NO: 88370 - protein, 36 aa, Gossypium hirsutum
  Clone ID: LIB3083-028-Q1-L1-D4.pep
EREKDFSGSVGTPIGMEYLVKRVWDQLVNRKFKKEL

SEQ ID NO: 88371 - protein, 61 aa, Gossypium hirsutum
  Clone ID: LIB3083-028-Q1-L1-D7.pep
SCILSLLVPTNEWQVYIRNAIVFFLKSGYSFWGYKNALIIYAYRQLTLCSSLLLSTVEINL

SEQ ID NO: 88372 - protein, 99 aa, Gossypium hirsutum
  Clone ID: LIB3083-028-Q1-L1-D9.pep
IAMGGPPAPLKNSHPSHKKQEQLNRDVRQHRQQPKNWRTLIDQSTVKGPHPQSDRRNKQQFTDRPEPLSNLPVLTTPFYGHRESSRFRRRHSRPHHYTR

SEQ ID NO: 88373 - protein, 101 aa, Gossypium hirsutum
  Clone ID: LIB3083-028-Q1-L1-E10.pep
KLTPRSIRKTLNSNPSPPLPSKPLAAYSISPSRQRRRGRLPSKPRSQLYRTRISYRGTYIRRRNLRSLTLASRTFESLVQGPLSIRYSRRLNGRRRTKRIH

SEQ ID NO: 88374 - protein, 80 aa, Gossypium hirsutum
  Clone ID: LIB3083-028-Q1-L1-E11.pep
RGYGLCCRSLVSLVLRSVDYVTCGCDYDVVPSFRVYLGVPKSSLGPCGTPFRSFRPSLGYLRVGFLRIYSYQVPTTQKAR

SEQ ID NO: 88375 - protein, 72 aa, Gossypium hirsutum
  Clone ID: LIB3083-028-Q1-L1-E12.pep
NVCFMLRSRSRLYGTLAVTPAYRIMITRPGGRVFMYGILRAPLNGWYVQVLPLLGRGRRSSVGSILCNACSL

SEQ ID NO: 88376 - protein, 99 aa, Gossypium hirsutum
  Clone ID: LIB3083-028-Q1-L1-E6.pep
VKLKGTAGNVCGEDNECGSQFFDSPGLEDMVSGRRSHYTEGGSPVFDDSDHRVCDHSHPTSLSSDSFLEGEVCKRVVISQDACTGETQSSDSDSSEEDE

SEQ ID NO: 88377 - protein, 79 aa, Gossypium hirsutum
  Clone ID: LIB3083-028-Q1-L1-E7.pep
MGSFSGQSSGSCDLSFKILLIGDSSVGKSSMLLSFISASAEDLAPTIGVDFKVKLLSVAGKRLKLTIWDTAGQEKFRTL

SEQ ID NO: 88378 - protein, 99 aa, Gossypium hirsutum
  Clone ID: LIB3083-028-Q1-L1-F11.pep
AEDSSLALMSSSYSPRTPQTLRERSVSSVGVMLNTWTLTESGGRQAVHSLSPYRFRTGMTRRALGGIIPRSITATLTEDILPIPKKPGVEAPFRNLLVP

SEQ ID NO: 88379 - protein, 48 aa, Gossypium hirsutum
  Clone ID: LIB3083-028-Q1-L1-F12.pep
VVLMGTYYMCIGATSQSSGPTDVYEFVSDEGNYHIRFLRPKKSADSET

SEQ ID NO: 88380 - protein, 104 aa, Gossypium hirsutum
  Clone ID: LIB3083-028-Q1-L1-F8.pep
IEGFRQLLDEASEDIDHDTNYQTFKRKWGSDPRFEALDRKDRGLLLNERVLLLKRAAEEKARVIRAAAASSFKSMLKEKGDINVNSRWSRVKDSLRDDPKYKCV

SEQ ID NO: 88381 - protein, 61 aa, Gossypium hirsutum
  Clone ID: LIB3083-028-Q1-L1-F9.pep
YVRFGTFRSFVALTALGFALANSRKDDLWSSPEWCLNIVGFRFLWDFECLCVCRIALIAWV

SEQ ID NO: 88382 - protein, 140 aa, Gossypium hirsutum
  unsure (1)..(140): unsure at all Xaa locations
  Clone ID: LIB3083-028-Q1-L1-G1.pep
SPNLFSMSILFLCAVFYMQRHAREYFSKFPRVNINYKETSTRXQKYETLLHQTTQNPELQDPRFIPXTQNGYRLYCHKSCSGXSSGSISSSPSFTTYVTYXPYVTTNRFHYDELYNIIXESFNNQYTYYYNKNVYKSTKL

SEQ ID NO: 88383 - protein, 61 aa, Gossypium hirsutum
  Clone ID: LIB3083-028-Q1-L1-G10.pep
TLSDILWLTPAHPCGPPHDANNDFEGGHHVRGVRVVARENPKNNLSPDTPIEYLIIHHEDT

SEQ ID NO: 88384 - protein, 136 aa, Gossypium hirsutum
  unsure (1)..(136): unsure at all Xaa locations
  Clone ID: LIB3083-028-Q1-L1-G11.pep
VSHGHGLFLTLRRVKLLRLLRLRRRFGKKEFKDLLESHRDVQWEESDVVTPNSRETDNHDEHERXRRLSKXSPEKIPGPLLAPTELISTENGGSVELVNFLISTKEVTYATGRGHEEKIVRGKETGRTHGLAIEDT

SEQ ID NO: 88385 - protein, 89 aa, Gossypium hirsutum
  Clone ID: LIB3083-028-Q1-L1-G12.pep
WKLCAGVSKGEVQTRGADANPVKCLRRTGFVEDVVGTILHNHYDYHLKEYDNLPSSLYDNDDLLLDDLLLTYIKRRLRVWPPRRVCATV

SEQ ID NO: 88386 - protein, 106 aa, Gossypium hirsutum
  Clone ID: LIB3083-028-Q1-L1-G9.pep
GGPTVIASVPGSRGVREREAVTSGRCCCPAGPVGLGTVFCVRLVPSLRLETQVRRGFCVDLLRSMRGFWSLRSWRACPSSFAHDSVSAVDICYFPSYQVPTTQKAR

SEQ ID NO: 88387 - protein, 72 aa, Gossypium hirsutum
  Clone ID: LIB3083-028-Q1-L1-H1.pep
STPLCIIRWNNIRCRFTQQYDIYITNRNNANRGCYYIQSLCLQNSDASHTTYAIFYKLKQHILPSYAQYILI

SEQ ID NO: 88388 - protein, 59 aa, Gossypium hirsutum
  Clone ID: LIB3083-028-Q1-L1-H10.pep
KRVLTQIPRIQISIISGTLSLGVSIRALSNPSTLNVPPKFYLSLNSTLHRYNYPNRIYN

SEQ ID NO: 88389 - protein, 77 aa, Gossypium hirsutum
  Clone ID: LIB3083-028-Q1-L1-H11.pep
SETVWSGFSLASLAVSHSTIIIGRCPHSIEVFVGWSIESQPTGSDQQVTYKETWPSWVTHTRFLRPKKPADSETATA

SEQ ID NO: 88390 - protein, 138 aa, Gossypium hirsutum
  unsure (1)..(138): unsure at all Xaa locations
  Clone ID: LIB3083-028-Q1-L1-H12.pep
GYRIFVVVSLFGYXCVLPXGRIGEDDIFPPSRTIGPVPDYRIHRSLITCAFFPRPHGLIEIRSQLRARRVNDGDRTRRHIPGRLRCFMQRIFTTQEIHRNFFRRSFIFALMFGTLLRNNSCQPIRIDSYQVPTTQKAR

SEQ ID NO: 88391 - protein, 76 aa, Gossypium hirsutum
  Clone ID: LIB3083-028-Q1-L1-H7.pep
QMGENDLKELGMAMYPGAYHVTDEKIYNLCLLTINLGDSIKWVVIRVSSRFKSIIIYLCEYIVWALGRRHFWLCCL

SEQ ID NO: 88392 - protein, 75 aa, Gossypium hirsutum
  Clone ID: LIB3083-028-Q1-L1-H9.pep
MRASGPITICRVSGILFPRTVFKASVPPAHTPTPTLNVNPSTSAPSTTGSRRANSSSGPSFSNSSSPEVVVGSNV

SEQ ID NO: 88393 - protein, 52 aa, Gossypium hirsutum
  Clone ID: LIB3083-029-Q1-L1-C12.pep
THTVSKSTLHTKFGTPKYLFTHLISQIIYIFIYIYYNTPSIFNLYILFYLTN

SEQ ID NO: 88394 - protein, 52 aa, Gossypium hirsutum
  Clone ID: LIB3083-029-Q1-L1-D4.pep
ENLPKKNKFIATHFIYLYIYINHQFLIIKYFLSLYYFSSLLTITHFSYLLIL

SEQ ID NO: 88395 - protein, 68 aa, Gossypium hirsutum
  Clone ID: LIB3083-029-Q1-L1-E10.pep
WFIGLDVDHIDDRSLCCGTTDCEWKVKAGSVCVVSFDWTCSGICKSVERMKDVHGRCGEGKNALWNEA

SEQ ID NO: 88396 - protein, 57 aa, Gossypium hirsutum
  Clone ID: LIB3083-029-Q1-L1-E11.pep
FLHPLLSTISRSVATSFYLHLLFPLVRVNFKLIIIIFIAFSCLKLISSHISTHTYYP

SEQ ID NO: 88397 - protein, 40 aa, Gossypium hirsutum
  Clone ID: LIB3083-029-Q1-L1-E4.pep
RNTTYKISSLSYHLSKTILLISKKKSPSLFLIIHLSVLAF

SEQ ID NO: 88398 - protein, 62 aa, Gossypium hirsutum
  unsure (1)..(62): unsure at all Xaa locations
  Clone ID: LIB3083-029-Q1-L1-F11.pep
HSILMDVFYNITSQPXKINNFKHANLFVSLGSKAYIHIHNIVIYMTTYICIYNDTYFIQRNY

SEQ ID NO: 88399 - protein, 59 aa, Gossypium hirsutum
  unsure (1)..(59): unsure at all Xaa locations
  Clone ID: LIB3083-029-Q1-L1-F5.pep
NQYTXFFIYACSRISYKTLKIIQATYFXSYKFFTSIIINITSLIIIHNKSLHTIYSKQH

SEQ ID NO: 88400 - protein, 60 aa, Gossypium hirsutum
  Clone ID: LIB3083-029-Q1-L1-F6.pep
LIGLIRMCFYSDLWDDVMIWDFYNRENRLVKRYIVLFERGLCWAPLSLKLFRIRRDLLFI

SEQ ID NO: 88401 - protein, 124 aa, Gossypium hirsutum
  unsure (1)..(124): unsure at all Xaa locations
  Clone ID: LIB3083-030-Q1-L1-A3.pep
VNVHPIFDLVLKKAEKGAGPFQPGQGWYDFRAGFWGVLGGPCLGIIPRFIEXFNYPMPENCAGGTTGVFVNGRELHQKDLDLLANIRLPTDRDRSYIIXISGRILDEYTCEXLDCLGKLAPTVD

SEQ ID NO: 88402 - protein, 58 aa, Gossypium hirsutum
  Clone ID: LIB3083-030-Q1-L1-B4.pep
FTNDTSYNFRIIIHHHLSLNLHIYTLFFQILLTLLFVTYNSIPFLTFPFQIFQTLYIF

SEQ ID NO: 88403 - protein, 72 aa, Gossypium hirsutum
  Clone ID: LIB3083-030-Q1-L1-B5.pep
PHNTSHVYYFYLTLYAKVADDYANSRTYVSYLTTIQHVRQYPSLIPNAQTLHCAFPSFTHQLPSVAFIPHLS

SEQ ID NO: 88404 - protein, 75 aa, Gossypium hirsutum
  Clone ID: LIB3083-030-Q1-L1-B7.pep
LDSFAGDLENLLDAEEFEEGEEGNNNNKVDKADAVKGLKMRRRPYKAQAEEETEPEAAEAAELCRLLMDDDDDQK

SEQ ID NO: 88405 - protein, 82 aa, Gossypium hirsutum
  Clone ID: LIB3083-030-Q1-L1-B8.pep
LVVFQDAMCMVQYKVDMVNAMVIHIIICLYIIIHSRLCALSKRLDPERLRERVPLSNTATYCTRSKEHDRSVILNCSLYIFS

SEQ ID NO: 88406 - protein, 83 aa, Gossypium hirsutum
  Clone ID: LIB3083-030-Q1-L1-C1.pep
LPNKRSFILQVFGNSREMFDVILPGSEIAEWFSQQRGESWFKINLPLEVRNDSQWMGVALCCIFVSDDAPTDEYLMCRAAIPW

SEQ ID NO: 88407 - protein, 123 aa, Gossypium hirsutum
  unsure (1)..(123): unsure at all Xaa locations
  Clone ID: LIB3083-030-Q1-L1-C3.pep
KDVYDEDFKGDNNEEXDALKMAIEHVRDRPSLLKSFRLDNYLESKKRGNKRETFFDIRRELIQGFQDWRKPYKEPSQDEELYMISGETEDTLAQGGVEPVQVRRVQGGREICALESGLPGMIM

SEQ ID NO: 88408 - protein, 83 aa, Gossypium hirsutum
  unsure (1)..(83): unsure at all Xaa locations
  Clone ID: LIB3083-030-Q1-L1-C4.pep
XXRLTXIKAXPRGFTXXYGFXXLRYVRCGXIVKADXTIXXTKETXXMTMIXXPKLEXLTPSLKXGTPKPRRLHRRMDGHSSKN

SEQ ID NO: 88409 - protein, 70 aa, Gossypium hirsutum
  Clone ID: LIB3083-030-Q1-L1-D4.pep
HTDTYVATPTHKLLTATSSDKTQLQHYTSQTDNKPNLHKESLPSCNIISPWLTYLFRRLAFTFKSYTGEG

SEQ ID NO: 88410 - protein, 71 aa, Gossypium hirsutum
  Clone ID: LIB3083-030-Q1-L1-D6.pep
DRHTLDAKLSLGDSNGVQTLPAQRHKLALILTQAVNALLRAQNELALHFETDAHTSSSATNIVPTIIHNAS

SEQ ID NO: 88411 - protein, 86 aa, Gossypium hirsutum
  Clone ID: LIB3083-030-Q1-L1-E7.pep
YYMKTRHLNHIRINITHIYIYNLQNNIQFTLMVKRRPYFHDSTEMFPLLGFVIYGAVTFIDVGTGYDRSFTIPAPILLCPTTRPLL

SEQ ID NO: 88412 - protein, 62 aa, Gossypium hirsutum
  Clone ID: LIB3083-030-Q1-L1-F1.pep
IHDCIHGKLLPEMVSGYHTIHHTRYGHNYGRYTIRMDGMLATLRDPSDEESETVTDLPSSSS

SEQ ID NO: 88413 - protein, 65 aa, Gossypium hirsutum
  Clone ID: LIB3083-030-Q1-L1-F6.pep
THRIHYRQNERWGIWNSGSGEIWTVRLYLSERNMKLSQILIGTVEKDFLSICPNDNIPKLIFYTI

SEQ ID NO: 88414 - protein, 74 aa, Gossypium hirsutum
  Clone ID: LIB3083-030-Q1-L1-G2.pep
NSRMVSKKKARDWCASRVNIPYCETSAKEDYNVDEAFLCVANAALASEHEQHDIYFRGISETTSEVEQRVGCAC

SEQ ID NO: 88415 - protein, 46 aa, Gossypium hirsutum
  Clone ID: LIB3083-030-Q1-L1-G4.pep
FLIIYINIIILSFPPFLLTYHFIPHISTSYPLTLISNSSILTHIIY

SEQ ID NO: 88416 - protein, 111 aa, Gossypium hirsutum
  Clone ID: LIB3083-030-Q1-L1-G7.pep
KSNFTLKFYHQNHIKKFINLDNLYTLSQNIHLHILILEINLTFYTQYIVRRRQLTFRDNPFNPIARNSYPNFPLAKFLYPWRSTHSIYTATSMELQLLIPLLQINFQLALI

SEQ ID NO: 88417 - protein, 61 aa, Gossypium hirsutum
  Clone ID: LIB3083-030-Q1-L1-H5.pep
KLDLDLLLSLIYNLPTGGLHQNYALADSTYLDTISNYSLVTTLLLPVLTLNTIAVTSFYQA

SEQ ID NO: 88418 - protein, 68 aa, Gossypium hirsutum
  unsure (1)..(68): unsure at all Xaa locations
  Clone ID: LIB3083-031-Q1-L1-A10.pep
KNXISNHHQSLFFLQYSLKNTAAFIKIVGHTHKTIYSYFQSITETSPIMNYTPYYKPTTHLIKLTPIS

SEQ ID NO: 88419 - protein, 109 aa, Gossypium hirsutum
  Clone ID: LIB3083-031-Q1-L1-A6.pep
PHTPRFLKTKSRPTKPNQNTTYQLLPVGISPSPSDYNVSITSKLQKARLSYLSAPQSSFPCSSEQLLLHYQLPVRLPSLLPSLNLKHLIDHFCSFHIYFPCCHLLNISL

SEQ ID NO: 88420 - protein, 52 aa, Gossypium hirsutum
  Clone ID: LIB3083-031-Q1-L1-B10.pep
FIPNTLKHIPTPYYPIIISNLLHLTSPLLYIPNSFLIISTPTLISSYSHIIP

SEQ ID NO: 88421 - protein, 78 aa, Gossypium hirsutum
  Clone ID: LIB3083-031-Q1-L1-B4.pep
LQRQKETDYDLDTSIEGSQDDYEGNKDAARALLRVKQKLDGYEEGEMRSVHGQVQQLIQYAIDPERLCQMFPGWGAWM

SEQ ID NO: 88422 - protein, 65 aa, Gossypium hirsutum
  Clone ID: LIB3083-031-Q1-L1-B6.pep
LFVLLVAIRYLLNHYLSQNIFVVTKSPKKSYKIERNTFPLILYSKTIAFTSKACIFLPTKLVSPQ

SEQ ID NO: 88423 - protein, 51 aa, Gossypium hirsutum
  unsure (1)..(51): unsure at all Xaa locations
  Clone ID: LIB3083-031-Q1-L1-B7.pep
KTTXHKHYYFISTPKKKYTRSFYINVTPPNKPYTLSSILNSQLTHITIHNT

SEQ ID NO: 88424 - protein, 118 aa, Gossypium hirsutum
  unsure (1)..(118): unsure at all Xaa locations
  Clone ID: LIB3083-031-Q1-L1-B9.pep
FFXXXNYTFYFXDLLRASAEGYIKGTDGISYKAVLEDATTVVVKRLKEVSVGKRXFEQQMEVVGSIRHPNVIXLKAYYYSKDERLMVYDYYSQGSVSSILHGKKGETRTPLNWDTRMK

SEQ ID NO: 88425 - protein, 59 aa, Gossypium hirsutum
  Clone ID: LIB3083-031-Q1-L1-C10.pep
APSFPPQSLNILNTQSHLLYKIIQILFFLIKKIYLSYDTPSLNLKSSHITKRPFRNFII

SEQ ID NO: 88426 - protein, 119 aa, Gossypium hirsutum
  unsure (1)..(119): unsure at all Xaa locations
  Clone ID: LIB3083-031-Q1-L1-C11.pep
FNFKNGGVFFIKFENEKGICGNELFWPXLVRSGLYFFEMEVEEINKGNYEYYMQKEINEQLESLSXTMWGRLKRGGSTKAKSVILGGLKDFIRSILVRNRPVFIGCGTRYNXALXGRXI

SEQ ID NO: 88427 - protein, 89 aa, Gossypium hirsutum
  unsure (1)..(89): unsure at all Xaa locations
  Clone ID: LIB3083-031-Q1-L1-C12.pep
TXKTAFINYYHNFISYTISHFIWRVSHKPGPSTIILSFPNNYITPFLHFTPLLILPNSIFKSFFSHSIQILTSHLIIYHPKTIIIFQFF

SEQ ID NO: 88428 - protein, 41 aa, Gossypium hirsutum
  Clone ID: LIB3083-031-Q1-L1-C3.pep
VKKILYHPYNGSKNKVHDHLLKLQTTTFPNSQCIAKLEFPY

SEQ ID NO: 88429 - protein, 147 aa, Gossypium hirsutum
  unsure (1)..(147): unsure at all Xaa locations
  Clone ID: LIB3083-031-Q1-L1-C4.pep
TDIASLLXDPSVKDDLHNVTSKSLFREELVATLVESCFQLSLPLPEQKNSGMESRVIGALAYGTGYGALNWTETALEVVEVCRPCVKWDCDGRTYAVDCYLKLLVRLCHIYDTRGGVKRVNDGASQDQILNETRLQNLQRDLVNDLR

SEQ ID NO: 88430 - protein, 78 aa, Gossypium hirsutum
  unsure (1)..(78): unsure at all Xaa locations
  Clone ID: LIB3083-031-Q1-L1-C9.pep
SRKSIMKVIEEEFSKXKFHVTFIDISQVSSYXKDAQTSIYKKQWSPLRVEQLANTVSYDDCVHWCLSGLQDTWNELVF

SEQ ID NO: 88431 - protein, 153 aa, Gossypium hirsutum
  unsure (1)..(153): unsure at all Xaa locations
  Clone ID: LIB3083-031-Q1-L1-D12.pep
NKIVLRNILKKYFIFRICSYKEQLALINYLDKFLSEHKDVKVIVVNSVTFHFRQDFDDMALRTRVLSGMALKLMNLAKRFSLAVVLLNQVTTKHTEASFQLALALGDSWSHTCTNXIXLYWKGNERYAYIDKSQTNRSASAAYSVQLGRTVFL

SEQ ID NO: 88432 - protein, 109 aa, Gossypium hirsutum
  unsure (1)..(109): unsure at all Xaa locations
  Clone ID: LIB3083-031-Q1-L1-D4.pep
LVNXTEFVVSALHVNQMEEHDCNKWXMRLQAAFEKFDVDRDGYITPEELRMHTGLRGSIDPLLEEADIDKDGKISLSEFRRLLRTASMGSRNVSSPSGNRNTQKLLIKK

SEQ ID NO: 88433 - protein, 63 aa, Gossypium hirsutum
  Clone ID: LIB3083-031-Q1-L1-D5.pep
GRVRMLDETLHYNRNFRMKGLIIYLEKKKERKKVKFLILLQCIGICTFFFWVTSLTACVWKLC

SEQ ID NO: 88434 - protein, 41 aa, Gossypium hirsutum
  Clone ID: LIB3083-031-Q1-L1-D8.pep
AFHQILNGLARKLPHQKSIYLKPGEKILNWTAGPVGDLKPW

SEQ ID NO: 88435 - protein, 96 aa, Gossypium hirsutum
  unsure (1)..(96): unsure at all Xaa locations
  Clone ID: LIB3083-031-Q1-L1-E11.pep
HRSYXLIPSQFIYLYNPSFNSWIHFTRGCGKIPPSINKTYQIHPVHFFSPFFPFHSASPHSLTVYIPYPNMHKLIPKIYHLSSYQTIDILTHHHIK

SEQ ID NO: 88436 - protein, 58 aa, Gossypium hirsutum
  Clone ID: LIB3083-031-Q1-L1-E12.pep
LKKINTTTTCFKLTLISYHPCYHLNLCATTNSKPNHSSITIIYYFQCLLLFFPLYHHI

SEQ ID NO: 88437 - protein, 74 aa, Gossypium hirsutum
  unsure (1)..(74): unsure at all Xaa locations
  Clone ID: LIB3083-031-Q1-L1-E2.pep
SKXTFHICVKHECSSKKSGGSHKEKGGKKKEKKLFSNIHASRFPPKKTLELKQGFQILVSRLSVKFNIRDRKRD

SEQ ID NO: 88438 - protein, 56 aa, Gossypium hirsutum
  Clone ID: LIB3083-031-Q1-L1-E7.pep
TKSDESLYTCTLLNNESLNISVWCQLLRVDNIFGTQCIIDVRSMTLNLFLSSTNQI

SEQ ID NO: 88439 - protein, 46 aa, Gossypium hirsutum
  Clone ID: LIB3083-031-Q1-L1-F3.pep
LGIKEGDKIEDCKAMIRKVDIDGDGMVNFDEFKTMMKNGGRLVSAF

SEQ ID NO: 88440 - protein, 57 aa, Gossypium hirsutum
  Clone ID: LIB3083-031-Q1-L1-F7.pep
QYIYTYIYCHVYNNVLYCILLLSQENQIHLHVLNYLFSGVKLKITQNMINTQCSKWI

SEQ ID NO: 88441 - protein, 59 aa, Gossypium hirsutum
  Clone ID: LIB3083-031-Q1-L1-G11.pep
KFYNSSSDSIINLGATTLTNFHRNEGENLKIPQTHLNAYQPFFLNNKQNLIYLGGKTQP

SEQ ID NO: 88442 - protein, 50 aa, Gossypium hirsutum
  Clone ID: LIB3083-031-Q1-L1-G2.pep
IDSLFQSFRLFLAWLLLLLSLYTYANQYIYPLVLNLASIDSRRRIAIYVN

SEQ ID NO: 88443 - protein, 77 aa, Gossypium hirsutum
  Clone ID: LIB3083-031-Q1-L1-G6.pep
NVPQHTNPFFHITHILKANQNNFCQNHYKPLLFPTNNNMGPHINMNTIFFFLMNFHIPHILSYSHFYLITLISFLDT

SEQ ID NO: 88444 - protein, 44 aa, Gossypium hirsutum
  Clone ID: LIB3083-031-Q1-L1-H10.pep
AGVNQVIRSITSHDHDQMLGHNEADSVFTQHNERKYCLTLHKFA

SEQ ID NO: 88445 - protein, 80 aa, Gossypium hirsutum
  Clone ID: LIB3083-031-Q1-L1-H11.pep
YKRYEQTLALDRNQCMVKRCDTHKIIHAIHEEFIVFKLAQYVSIITYYESTIWGFYSESRSGSCLELLWDASYVLTLEES

SEQ ID NO: 88446 - protein, 144 aa, Gossypium hirsutum
  unsure (1)..(144): unsure at all Xaa locations
  Clone ID: LIB3083-031-Q1-L1-H2.pep
KEVVEVLLEPFVLILGKVGDRGVVGKIRSNVFDVLVKTGRRLLELKQSGDEVDESDDVVVFGTIGLVMGFSTKFYELGSSVDCCQGNKKAVLALHEEFLKLEKDLTSLXIDISIPEGNEGNEENEVPELIPVGGETDANVSNDV

SEQ ID NO: 88447 - protein, 47 aa, Gossypium hirsutum
  Clone ID: LIB3083-031-Q1-L1-H6.pep
KNPFNSKLSYFTHEFYFHFLIHELVNQFVGEPNCGGRDQVEGSKCVF

SEQ ID NO: 88448 - protein, 56 aa, Gossypium hirsutum
  unsure (1)..(56): unsure at all Xaa locations
  Clone ID: LIB3083-037-Q1-G1-A2.pep
MEKVGFNCQLLLSEIRLTTDSSHXTWFHKTVRFSRSKSSRFYMNNVCLNMFYSILV

SEQ ID NO: 88449 - protein, 68 aa, Gossypium hirsutum
  Clone ID: LIB3083-037-Q1-G1-A5.pep
LPFFNSNNHTRNSPSLYRLVSSFAITQGTLGVSRDHYCKHLRPGLNLWTPAQFSDMEVCLTCWQHMMY

SEQ ID NO: 88450 - protein, 118 aa, Gossypium hirsutum
  unsure (1)..(118): unsure at all Xaa locations
  Clone ID: LIB3083-037-Q1-G1-B1.pep
MIECKKWEPSWEDIEGEYWRIVEQGKDEVEVYYGADLETGTFGSGFPKLSSVLTGNDADKYATSGWNLNNFPRLQGSVLSFERCDISGVLVPWLYVGMCFPSFCRHVXDHHLFSLNYM

SEQ ID NO: 88451 - protein, 37 aa, Gossypium hirsutum
  Clone ID: LIB3083-037-Q1-G1-B9.pep
KADCDTYREREKPILVDLFNGVQILQRIVEANENYDH

SEQ ID NO: 88452 - protein, 67 aa, Gossypium hirsutum
  Clone ID: LIB3083-037-Q1-G1-C7.pep
FRPGPWRITSYLPSGGPFVRMDTHVYPDYLGPRGYYSVLGQLILWAPTTEHAIDRINTVLDDTVITR

SEQ ID NO: 88453 - protein, 142 aa, Gossypium hirsutum
  Clone ID: LIB3083-037-Q1-G1-C8.pep
PVDFSQPFIAMVVVVAAAFLVVTYWRLISKRLVPVILRLLSFFRRRRRRRRFLPSTTTDLDSLPPSDPFDLPLSPYGLDDSAIKTLPLSLYTSKNRPNNSPKDCAVCLLAFDDNEYVRTLPVCSHAFHVDCIDVWLKSHANC

SEQ ID NO: 88454 - protein, 50 aa, Gossypium hirsutum
  Clone ID: LIB3083-037-Q1-G1-D3.pep
SCCHFKNTVILGLVSLTLPSTYHNLFSNHTWAGNHILPKGLLNILQHRTL

SEQ ID NO: 88455 - protein, 101 aa, Gossypium hirsutum
  Clone ID: LIB3083-037-Q1-G1-D5.pep
MDSYCYQAKEGGPGNMQDLECYSANYPNSVQPPNQLGKEIKMKKSKSTFGSSSKSWSFNDPELQRKKRVAGYKVYAVPGPMKGSLRKSFRWIKDYVLYGWR

SEQ ID NO: 88456 - protein, 138 aa, Gossypium hirsutum
  Clone ID: LIB3083-037-Q1-G1-D7.pep
DASNAWRTAAWVRIPYPLQWGVPIFHFRTSVMRIIVSLVASVDSVGTYHSASLLVSSKPPTPGVVSRGIALEGFCSLLAGIWGSGTGSTTLTENTHTIHITKMASRIALVFGALFLILSSLVGKVGAIRASIPLSLAA

SEQ ID NO: 88457 - protein, 56 aa, Gossypium hirsutum
  Clone ID: LIB3083-037-Q1-G1-E12.pep
QSTHLLIIISHYHKRVVSSSRVVILMLTEVRVSMQYSQVSMVNRHNQLLHMYSQST

SEQ ID NO: 88458 - protein, 104 aa, Gossypium hirsutum
  Clone ID: LIB3083-037-Q1-G1-E4.pep
SDSSKRTQVLVGKRDDNRKGESRQLQLDICVLIQLIYPFRKKKFNKFNSNLSSRVLCLYLVLIFLFHGDDLIPDVPSYTSKKQRKTNPKKCFNNSNHTNCDSQV

SEQ ID NO: 88459 - protein, 82 aa, Gossypium hirsutum
  Clone ID: LIB3083-037-Q1-G1-E5.pep
HEILCLFTSSSSLFFVLLVPLRWPFFISTRHLWVLGLSLFFRASSSCILFMVLVYALLSFPSLVLSLRFLYSLFPSGIALPL

SEQ ID NO: 88460 - protein, 106 aa, Gossypium hirsutum
  unsure (1)..(106): unsure at all Xaa locations
  Clone ID: LIB3083-037-Q1-G1-F11.pep
DSRNAGVLHVAPRALLFCLACGGYFGVRDLAGRWLRLWFLGGDLIILPAGFYHRFTLVASNYVKLMRLFLGESVWTVYNRXPQEDYPARNTSINGLTEKVGVPLPA

SEQ ID NO: 88461 - protein, 43 aa, Gossypium hirsutum
  Clone ID: LIB3083-037-Q1-G1-H10.pep
QNFGEPFFLVIHETEGLPEVSVRVHKRFQVPSGEFAECKFALR

SEQ ID NO: 88462 - protein, 130 aa, Gossypium hirsutum
  Clone ID: LIB3083-040-Q1-G1-A4.pep
ELPPKIPSISQNWPSFPHDKMPSMANFFPSTITNHPSWVDEFLDFSSARRGAHRRSMSDSIAFLEQPLVEEECRDSNATPMMTTTTVSNLHMFDRLDHDQLMSLFSDDVAVTMAAPAPTVSFVQSIDADV

SEQ ID NO: 88463 - protein, 121 aa, Gossypium hirsutum
  Clone ID: LIB3083-040-Q1-G1-A5.pep
PAASSSDQVGGFYFIPSGTSGRNFQEAENPLSTRFHPWERDHLSPFSLNQVDRESGWNTFHQSATGAPDPGIRSSSFRQKYGSERMQSQHHSYLISSPFKPLLGEANYPTMNETKHVLCML

SEQ ID NO: 88464 - protein, 47 aa, Gossypium hirsutum
  Clone ID: LIB3083-040-Q1-G1-B5.pep
SLLGVDSDKLINCWTSTLGWGLTSLREPTSQREFHLFRPFNDFTTKH

SEQ ID NO: 88465 - protein, 80 aa, Gossypium hirsutum
  unsure (1)..(80): unsure at all Xaa locations
  Clone ID: LIB3083-040-Q1-G1-C1.pep
AHAQSTLYGLHAPDTTMFTARPHFTPLYQLAAEANTTELIARLRQLHTXLGHVAPVVTLTNLSIDTLHQGVHGVRWGNGI

SEQ ID NO: 88466 - protein, 63 aa, Gossypium hirsutum
  Clone ID: LIB3083-040-Q1-G1-D1.pep
PPECTNSATLGPGSPCLKPLLQSAIFMYTRNTPFCNHYCRDDQMGLVEPRDNAWKSPISLRTS

SEQ ID NO: 88467 - protein, 125 aa, Gossypium hirsutum
  unsure (1)..(125): unsure at all Xaa locations
  Clone ID: LIB3083-040-Q1-G1-D2.pep
RLCTRVVGTLFGYRRGHVDFAFQEKAAVNPAFXIHLAAPTSVLVREXASGLGRIALQCEKNMGKKGVNLLNEPVWGTYCTGNKCGFAMRRXCGSHDWHLLQAVEPISLGAGVLPGHCNETGPGSE

SEQ ID NO: 88468 - protein, 72 aa, Gossypium hirsutum
  Clone ID: LIB3083-040-Q1-G1-D6.pep
QSDRCPKLNRTLEEMTTAFQAKEKHLSSYTEQGKENFANLLLRDDMFGGGKGVSPASARSNGHSQACCSRVW

SEQ ID NO: 88469 - protein, 90 aa, Gossypium hirsutum
  Clone ID: LIB3083-040-Q1-G1-E2.pep
LPTNFWCRPTTVCTSLICVYTTVVSGAAEADDTWCVVYVMCPCADVVHKFTAERVIIKHLGNRIFFSPKNIVLLKPWPLCTLISWRNSAT

SEQ ID NO: 88470 - protein, 88 aa, Gossypium hirsutum
  Clone ID: LIB3083-040-Q1-G1-F4.pep
KRRFGRQSGDDSSVKLLADSIQKFSDIYEKIENSKRQQMLELEKMRMDFHRELEMQKRQIMERAQAEIAELQHGENEANDASGENASG

SEQ ID NO: 88471 - protein, 37 aa, Gossypium hirsutum
  Clone ID: LIB3083-040-Q1-G1-G4.pep
IIVLLITNYVLSFSLLSSFDENYMAFWEEEEEETVAT

SEQ ID NO: 88472 - protein, 100 aa, Gossypium hirsutum
  unsure (1)..(100): unsure at all Xaa locations
  Clone ID: LIB3083-040-Q1-G1-G6.pep
PLTSTQISNRLIGNLKNTHHXHKSFAPTGIAFAAHITGAVNSFNGHQWVHLVRIHIISSXRTFSHFHTINSPIRTLAGNSSNGXFPIIVTTSSNTLVSNK

SEQ ID NO: 88473 - protein, 63 aa, Gossypium hirsutum
  Clone ID: LIB3083-041-Q1-G1-A11.pep
ISPHTVFGPSSVWSTALHISRLMKPAGRDGRTASLSTYSVKLFMDDGILEKNISVKISTTPVI

SEQ ID NO: 88474 - protein, 45 aa, Gossypium hirsutum
  Clone ID: LIB3083-041-Q1-G1-B9.pep
FIILVCHHHPLKRGMGSVYHTDSPGTPPVNCLTLLSHPCVLFPIP

SEQ ID NO: 88475 - protein, 62 aa, Gossypium hirsutum
  Clone ID: LIB3083-041-Q1-G1-D10.pep
QPRIFLTTLFFLWLIDIASSMSLKLVCLAVLCMVVGVPLASRGCNLWSSHKLLRTLALATSS

SEQ ID NO: 88476 - protein, 73 aa, Gossypium hirsutum
  Clone ID: LIB3083-041-Q1-G1-G10.pep
QLILLLKTKTKIPLCKSFISLLFLSLSDRLGPFSLPLCYSIPHCNIISLSKRRQPKDDKYHPGLWTVVFRTTH

SEQ ID NO: 88477 - protein, 62 aa, Gossypium hirsutum
  Clone ID: LIB3083-042-Q1-G1-A11.pep
SLQRDIFLQYSIIHEQLHGKGAHRTGAGNTSRWLYESTIWGTLWPTQKCVGRQCGVTLALAP

SEQ ID NO: 88478 - protein, 49 aa, Gossypium hirsutum
  Clone ID: LIB3083-042-Q1-G1-A8.pep
RSRFVNRVVSSMLRRVSGKRIAILGFAFKKETGDSRESAGSDVCKGLLG

SEQ ID NO: 88479 - protein, 55 aa, Gossypium hirsutum
  Clone ID: LIB3083-042-Q1-G1-B6.pep
ELVYIHRSSFLPLSGNLYSSHRSAIPVNFAVIDPSQRDLSYTVMVCKDADSYPAE

SEQ ID NO: 88480 - protein, 92 aa, Gossypium hirsutum
  unsure (1)..(92): unsure at all Xaa locations
  Clone ID: LIB3083-042-Q1-G1-B9.pep
IRRATLVSENAQGTDGFTISTTAGEIDSRHSGLLTESRLAAAAEQTELHAFATDPAHVHHLTHRCLPHASHYPLLEESDFXTDSVNPDLDMA

SEQ ID NO: 88481 - protein, 82 aa, Gossypium hirsutum
  Clone ID: LIB3083-042-Q1-G1-C9.pep
LPCLKELSLDSSHHVCAALASVVMGMAPVLGNDASFDQLLPIFLSLLKDEFPDVRINIITILDQVNQVIGIDLLSQSLPLPI

SEQ ID NO: 88482 - protein, 40 aa, Gossypium hirsutum
  Clone ID: LIB3083-042-Q1-G1-E7.pep
TNRSSVIDVLHDNQRDDGEHLRGVLLVVADSRGPRPRTRP

SEQ ID NO: 88483 - protein, 76 aa, Gossypium hirsutum
  Clone ID: LIB3083-042-Q1-G1-F11.pep
YPNSPNIYLSSKTRTIPKIPSPIYKRPKPERNLSSREHQKLLEHARTVPGVGLPRAVSPHGLFHVRLSPLLCTAVS

SEQ ID NO: 88484 - protein, 83 aa, Gossypium hirsutum
  unsure (1)..(83): unsure at all Xaa locations
  Clone ID: LIB3083-042-Q1-G1-F7.pep
LVPSWSRWAAYGVLHKPDLRNMALKFIKQLGHALHSVASTRNPKQQLQLVYVVGPPHSDALQQXDFGPADLQSVSGSVDGFSL

SEQ ID NO: 88485 - protein, 89 aa, Gossypium hirsutum
  Clone ID: LIB3083-042-Q1-G1-G11.pep
SPVFFSSFFFFLSNFPFSCLQFSTFSDEQEKINKNSRLSRGFATLHNPYTHLRSGNLLQAAVSFDGTSTASSVQGIPVFFTCSPLPTAP

SEQ ID NO: 88486 - protein, 78 aa, Gossypium hirsutum
  unsure (1)..(78): unsure at all Xaa locations
  Clone ID: LIB3083-042-Q1-G1-H12.pep
MLLTTTMNGTLGYLDEDLVSTDLVGYSKXGIFDAKAGIALHDTFTKLVAWHDNXWGYSSRVIDLVRPMASCQLCEVLA

SEQ ID NO: 88487 - protein, 60 aa, Gossypium hirsutum
  Clone ID: LIB3083-042-Q1-G1-H2.pep
FLFLFSFFAQYYLFIYLFFAFESRLFLGGFNFLYASFLPLYLVFSRFFFRISSIISSIVS

SEQ ID NO: 88488 - protein, 71 aa, Gossypium hirsutum
  Clone ID: LIB3083-042-Q1-G1-H4.pep
NAWGENHKLFIQWKHIEAKAIAYYLHGLILEEGNTSAGIAAAALQAAEEYLKESKMACDSFHVTLPSVSNP

SEQ ID NO: 88489 - protein, 60 aa, Gossypium hirsutum
  Clone ID: LIB3083-042-Q1-G1-H6.pep
SSSFFALLIMETGSIDPALRKEFNPVTFVTQKVVTFIDGNTFLAWEQHVLLSIKTQHLQS

SEQ ID NO: 88490 - protein, 47 aa, Gossypium hirsutum
  Clone ID: LIB3083-046-Q1-G1-A2.pep
VVHYWLHTSLEAISRQMSLSQARHDDALNKSLTSNARLLTWNPISRL

SEQ ID NO: 88491 - protein, 48 aa, Gossypium hirsutum
  Clone ID: LIB3083-046-Q1-G1-A4.pep
YWLQQLPFENTTSGNSVHSVTRFKSTSVSGTNDIAGQLAVYGSITFYH

SEQ ID NO: 88492 - protein, 27 aa, Gossypium hirsutum
  Clone ID: LIB3083-046-Q1-G1-A5.pep
CHRNQKRITILVRLRCHDDGDQSHVKM

SEQ ID NO: 88493 - protein, 57 aa, Gossypium hirsutum
  Clone ID: LIB3083-046-Q1-G1-B1.pep
HELGTSPDRPHEHNLFSLAWSPDTSTIMSTIIYASSKGRFERELDRTPVELQPPDSH

SEQ ID NO: 88494 - protein, 131 aa, Gossypium hirsutum
  unsure (1)..(131): unsure at all Xaa locations
  Clone ID: LIB3083-046-Q1-G1-B11.pep
GATTRPKEIAFWLMDKDMYDFMALDRPSTPRIDRGIALHKMITLVTMGLGGEGYLNFMGNEFGHPEWIDFPRGPQSLPNGSVIPGNNNSFDKCRRIFDLGDADYLRYRGMQXSFDQSKLGQHLEGKYNSDI

SEQ ID NO: 88495 - protein, 68 aa, Gossypium hirsutum
  Clone ID: LIB3083-046-Q1-G1-B5.pep
LGNLDHDNAVIIQNIYVFQSHSNGNEYAGEHVRNGLSHILVHHDPLAGQLTISSEGTLILDCTEEGAV

SEQ ID NO: 88496 - protein, 46 aa, Gossypium hirsutum
  Clone ID: LIB3083-046-Q1-G1-B7.pep
FLLPLLMKDSIRLTEDGNQGDGMARAMKQVTKEPSIPLRSEGPQWQ

SEQ ID NO: 88497 - protein, 47 aa, Gossypium hirsutum
  Clone ID: LIB3083-046-Q1-G1-B8.pep
SNVFIGVVVMCVNQLSTFTPLYSALSMSYPYKRVKRKCKQRKYPQLN

SEQ ID NO: 88498 - protein, 162 aa, Gossypium hirsutum
  unsure (1)..(162): unsure at all Xaa locations
  Clone ID: LIB3083-046-Q1-G1-C10.pep
YGPKIGGQAGIQVGNACWELYCLEHGIQADGQMPGDKTIGGGDDAFNTFFSETGAGKHVPRAVFVDLEPTVIDEVRTGTYRQLFHPEQLISGKEDAANNFARGHYTIGKEIXVDLCPLIXASGXXPFADNCTGLQGFLVFNAVGGGTGSGLGSLLLERLSVD

SEQ ID NO: 88499 - protein, 103 aa, Gossypium hirsutum
  Clone ID: LIB3083-046-Q1-G1-C12.pep
GRDFRGVQPYVIADPEIKEEVVDSSLEFLILASDGLWDVVTNEEAVAMVKPIQDPQEAANKLLEEASRRGSSDNITVIIVRFIDGTTGEKSGDDKETTNDQHS

SEQ ID NO: 88500 - protein, 85 aa, Gossypium hirsutum
  unsure (1)..(85): unsure at all Xaa locations
  Clone ID: LIB3083-046-Q1-G1-C3.pep
RILIGLKCPGEHVLGSPHSRFNTRYXVMGINIGGKGTRFPVQPHXAIVCPNGFAHXSGIHQDGMLNHTRSYRINSPEDIAPHRSN

SEQ ID NO: 88501 - protein, 42 aa, Gossypium hirsutum
  Clone ID: LIB3083-046-Q1-G1-C5.pep
ESLLNGCRRGHRRLSPPLASLPITLNSSTTLWTAPFRLHVQP

SEQ ID NO: 88502 - protein, 130 aa, Gossypium hirsutum
  Clone ID: LIB3083-046-Q1-G1-C6.pep
FVPITFLAWAVLVPVNYTNKTLELQLKNVTSSDIDKLSISNVPDGSDRFWTHIVMAYAFTFWTCYVLLKEYEKVANMRLQFLVSEKRRPDQFTVLVRNVPPDSDESVSETVEHFFLVNHPEYYLTHQVVC

SEQ ID NO: 88503 - protein, 53 aa, Gossypium hirsutum
  Clone ID: LIB3083-046-Q1-G1-C9.pep
ATKGSSIPTRRNTDLTSKWAIFRMLRTNQNWNDKSIHRRPRCAGLFRTRGSTR

SEQ ID NO: 88504 - protein, 67 aa, Gossypium hirsutum
  Clone ID: LIB3083-046-Q1-G1-D1.pep
NRSGLKTSWRAWIQEVLLPGPIPATLSSASKIGEGDTRFPVQPPKATAGTNAFAHESGLHQDGMLKH

SEQ ID NO: 88505 - protein, 35 aa, Gossypium hirsutum
  Clone ID: LIB3083-046-Q1-G1-D7.pep
CPDIIKPGECKIGIMPGYIHKPSPVRIGSPLGTLT

SEQ ID NO: 88506 - protein, 99 aa, Gossypium hirsutum
  unsure (1)..(99): unsure at all Xaa locations
  Clone ID: LIB3083-046-Q1-G1-D8.pep
SLLTCLNHSDIPATPKGVPHVTVCIHIVHTGIMQVSAAEIMTGHTTKITITNDNGRLIYDQIXKMVHEAAKYMSYDEDHSNKVEAKDTLENYAYNMKNT

SEQ ID NO: 88507 - protein, 134 aa, Gossypium hirsutum
  unsure (1)..(134): unsure at all Xaa locations
  Clone ID: LIB3083-046-Q1-G1-E10.pep
TQRRTSAAGEHCKPSCRGPERRPEEGDVACDVTGSIRRRNRRRRRRRKRPEPAAEQPPRRGAVRPVVLRRLGEGAVRRLQLYDVVVVVCHLPTGCCCCQGERXKREXNRKGGRHGGGGGQVRVLRVHGXVHAGV

SEQ ID NO: 88508 - protein, 86 aa, Gossypium hirsutum
  Clone ID: LIB3083-046-Q1-G1-E5.pep
RIGNTRPQRYVPWMYYAWRKDCQAAKFGCNQNWFGHNQNCDHLPHSRRALQSIVRVGIFTSGFSDSWPLDTATGCTIVKLRSELSA

SEQ ID NO: 88509 - protein, 68 aa, Gossypium hirsutum
  Clone ID: LIB3083-046-Q1-G1-E7.pep
RQADACPLVIPRRLLRHLTRDHHGSFKRHFTFSCLVLEKIPVTQQSHQNNCKIRFLLLFSFIPFNFCR

SEQ ID NO: 88510 - protein, 67 aa, Gossypium hirsutum
  unsure (1)..(67): unsure at all Xaa locations
  Clone ID: LIB3083-046-Q1-G1-F1.pep
SLQKDLNRNIPTDGANRGICSVALTVVADPLXAIVTGTPTVLAVTIISQSLETSEKEKDSEFETSGL

SEQ ID NO: 88511 - protein, 146 aa, Gossypium hirsutum
  unsure (1)..(146): unsure at all Xaa locations
  Clone ID: LIB3083-046-Q1-G1-F10.pep
AEGSWRFCIDYRMLNDRTSHDKFPILVVNWENFLGWTSIGAKYFTKLDLQFGYHQVRMHLEDIEKTVFHTHHTHXFLVMPFDLFNASVMFXTLMNDVLIPFCRFMLVLDALRAHDLHMKWSKCYFGASSIVYLGHVICAYDHHGRV

SEQ ID NO: 88512 - protein, 61 aa, Gossypium hirsutum
  Clone ID: LIB3083-046-Q1-G1-F11.pep
VNGLRFQSLDFKISGFPLIDALVRHSVAYQFGVYGDNKLIPFNLLEDINRCEYVDLPIFIV

SEQ ID NO: 88513 - protein, 87 aa, Gossypium hirsutum
  Clone ID: LIB3083-046-Q1-G1-F8.pep
CLTLNSFSAASCFNSPATYMQHMHSPITHITRMIYSQYTLGNIYPNHLALVAISTHIFADRLSALSIIPVTLMLTSATILARIDSSS

SEQ ID NO: 88514 - protein, 63 aa, Gossypium hirsutum
  unsure (1)..(63): unsure at all Xaa locations
  Clone ID: LIB3083-046-Q1-G1-F9.pep
FLHYVIGLAFQAAHFNISGFYLIHPLVGHSLAYQFGGXVDNKLIPFKLFHDVNPWXYVDFPIF

SEQ ID NO: 88515 - protein, 64 aa, Gossypium hirsutum
  Clone ID: LIB3083-046-Q1-G1-G12.pep
MEHKEAGCQAPEGPILCINNCGFFGSAATMNMCSKCHKEMITKQDQAKLAASSIDSIVNGSDGR

SEQ ID NO: 88516 - protein, 100 aa, Gossypium hirsutum
  Clone ID: LIB3083-046-Q1-G1-G2.pep
LSLLKTVSMELSLFSYHQNSFSLLHKPFFSLPISGKRVPKRDPFLLQCHCTLSSSSNDDDNIKAAIVSLQHEGRMVVLGSLLIAAAAMYISDVAEAASTS

SEQ ID NO: 88517 - protein, 52 aa, Gossypium hirsutum
  Clone ID: LIB3083-046-Q1-G1-H1.pep
LPPLEANGDVDMECVWEIQHASTRLSVELSYDPVTDAYDLQNEWQMIELNWK

SEQ ID NO: 88518 - protein, 127 aa, Gossypium hirsutum
  Clone ID: LIB3083-046-Q1-G1-H10.pep
GPPRVRTHVRAKCIGNRIVAGKVIKESYGKQKQQHTFTIQVFWSKGPGKLPPLHLLLVKGRNLYRMMTFRQPWANEAERLKILEEKHNRGDDARRVRALNRPNSAGNTLKGKKKLHKGGNTVRSETT

SEQ ID NO: 88519 - protein, 76 aa, Gossypium hirsutum
  unsure (1)..(76): unsure at all Xaa locations
  Clone ID: LIB3083-046-Q1-G1-H2.pep
MAVHDDCKLNFMDLRANPTHRFSVCKIEEKQEQVXAVDKLGEAXDSYEDLTRCLPADERPYASXDFDFLTAENRSV

SEQ ID NO: 88520 - protein, 55 aa, Gossypium hirsutum
  Clone ID: LIB3083-046-Q1-G1-H4.pep
LLLMASEVSLLTNGLRWKGSKGAVEKSSTHCLPEWHTWAMMNAIMVTHYGFIPLV

SEQ ID NO: 88521 - protein, 47 aa, Gossypium hirsutum
  Clone ID: LIB3083-046-Q1-G1-H5.pep
DANILRSEPMETKKLSSVLSKSPFGIVVKMCKLVSYPSRALICLQIG

SEQ ID NO: 88522 - protein, 81 aa, Gossypium hirsutum
  unsure (1)..(81): unsure at all Xaa locations
  Clone ID: LIB3083-046-Q1-G1-H9.pep
CQPRFKRCVSDGNVDSVMCENKKVSGRPTCADRDVSDGFSGGQWKLNGYMVPPCXSVDVLFRNQQYTKTPEDAATKVRFEQ

SEQ ID NO: 88523 - protein, 58 aa, Gossypium hirsutum
  Clone ID: LIB3083-047-Q1-G1-A2.pep
MGATPLTSSKIYGARLFCKCIWFLILQLISVSFLLKVLRSPLNQLRQKPSLPNMPRRP

SEQ ID NO: 88524 - protein, 51 aa, Gossypium hirsutum
  Clone ID: LIB3083-047-Q1-G1-A3.pep
DDDGSIGNDTMTSFESLFHCEVSPIGSWLYGPQLISEALAECVSEIILVPN

SEQ ID NO: 88525 - protein, 114 aa, Gossypium hirsutum
  Clone ID: LIB3083-047-Q1-G1-B1.pep
EPNSPERSNRDLAQMQSINQGGGKSRSSELRHSGSEKALSPNANGSMDQPDRLVEFGSFGAIPLAPACIETSKQNPPGSPNTQNSTGTERLKSAASIGRDRIFVQPFHLNLQSG

SEQ ID NO: 88526 - protein, 124 aa, Gossypium hirsutum
  Clone ID: LIB3083-047-Q1-G1-E2.pep
EHLYANIPEAQEKLQKLREIELETQLTSSEIRKREEEHLKLAADLKKQPEVASRRSYIERIKEITKNSGKLDSDIERILRDTRTLQLESNSIQESLHRTYAVIDEIVFREAKKDTKRGQAYILL

SEQ ID NO: 88527 - protein, 32 aa, Gossypium hirsutum
  Clone ID: LIB3083-047-Q1-G1-F3.pep
QELITYHIKKLIVLITLFYCIHTSCGQLTNES

SEQ ID NO: 88528 - protein, 65 aa, Gossypium hirsutum
  Clone ID: LIB3083-047-Q1-G1-F4.pep
SVHLFLTQNLALLFLFFSLLFSFPYTKNPNFCASSSSSLRIREALLFPARRTRMQAARAKSPIAS

SEQ ID NO: 88529 - protein, 99 aa, Gossypium hirsutum
  Clone ID: LIB3083-047-Q1-G1-F7.pep
GSHIANTESAVLPEDTKTKANVDQPVLEARSVQDIDLAFKQLYEWIDVDEVIHPSMIDDPHDQADYNPKLPVVDVRSLDDTCNLFNNPGIQISQNCHNS

SEQ ID NO: 88530 - protein, 44 aa, Gossypium hirsutum
  Clone ID: LIB3083-047-Q1-G1-G1.pep
NSSISELRGLRIPIALTAANSRSLVYGLLLSLFFIIIFLLEFHL

SEQ ID NO: 88531 - protein, 33 aa, Gossypium hirsutum
  Clone ID: LIB3083-047-Q1-G1-G5.pep
MNSALCCFMCIHGGCIINPSIYISYERKLYCCY

SEQ ID NO: 88532 - protein, 61 aa, Gossypium hirsutum
  Clone ID: LIB3083-047-Q1-G1-G6.pep
CITKRSFKIFQSLSTVNPLSDRGQQVTNHCSFALFRARNRSLAAATAFRTPFMMVIFGLIN

SEQ ID NO: 88533 - protein, 59 aa, Gossypium hirsutum
  Clone ID: LIB3083-048-Q1-G1-A12.pep
MWTLKIAKGGVRYSGGWLMTLTNHERSQVWEFCPESGTPEDLSKVEMGRQSFRDNRFHK

SEQ ID NO: 88534 - protein, 96 aa, Gossypium hirsutum
  Clone ID: LIB3083-048-Q1-G1-C3.pep
PWQRLHRRLAHFGCYSSPQASSLCELGPLKVPPVTCLLLLPVQTFFITISFLGTRVSGLCPNRLFARPFSIPKVIDRPALPRDKNHENLILSLERS

SEQ ID NO: 88535 - protein, 87 aa, Gossypium hirsutum
  unsure (1)..(87): unsure at all Xaa locations
  Clone ID: LIB3083-048-Q1-G1-C9.pep
PGTKIRADDSHLVRDYFANRLVPHFVQYFNINTINDILPLSTALRRLRTACSXAHRTLSSTAQPTTHLRPLXDGTHFYSSITQATFY

SEQ ID NO: 88536 - protein, 50 aa, Gossypium hirsutum
  unsure (1)..(50): unsure at all Xaa locations
  Clone ID: LIB3083-048-Q1-G1-D10.pep
TAPSPQVIDQWGWKNKRNEVRKSEIKCCLVIINLEREQLDARXEFXXPGG

SEQ ID NO: 88537 - protein, 91 aa, Gossypium hirsutum
  unsure (1)..(91): unsure at all Xaa locations
  Clone ID: LIB3083-048-Q1-G1-D2.pep
VDPPPAPLIDMAELTSWCFXRALILDFRGTLLFLYVTVCTVIGHTKKEDASDGVGPLGIAWAFRGMILILVYCTAGIFXGHINLAVIFGLF

SEQ ID NO: 88538 - protein, 119 aa, Gossypium hirsutum
  Clone ID: LIB3083-048-Q1-G1-E1.pep
GLQKTRVSITGGTFCIALWRGTQVAVKRVGDEVFTDDDKLTAFRDELALFHKIRHPNVLQFLGAITQSSPMMIVTEYLPKGDLRAFLKRKGALTPMTALTLALDIARGMNYLHENKPAP

SEQ ID NO: 88539 - protein, 60 aa, Gossypium hirsutum
  Clone ID: LIB3083-048-Q1-G1-E9.pep
RRFMMDNTSTMIFEPCHHHLFPHISHYHLLHVIGVARAFLCYYYREPLSFLFFSFYLICS

SEQ ID NO: 88540 - protein, 71 aa, Gossypium hirsutum
  Clone ID: LIB3083-048-Q1-G1-F3.pep
TKQSKAEEVISAIHFPMVFSFLLLVFAHIFHRYISKKNKHKRRKSERNLSFYQYLPCESVFDPLSFRRNRS

SEQ ID NO: 88541 - protein, 51 aa, Gossypium hirsutum
  Clone ID: LIB3083-048-Q1-G1-F8.pep
SKLSSYFVEWIPNNVQSTFCDILRTRLKTGSTFIWGSASTHDIFRRVSDQF

SEQ ID NO: 88542 - protein, 56 aa, Gossypium hirsutum
  unsure (1)..(56): unsure at all Xaa locations
  Clone ID: LIB3083-048-Q1-G1-F9.pep
ANNFSERYAIGTSAXTDNDYGEARAPPFFDXGGLKSWSFYRPGIAEFVATFLFLYI

SEQ ID NO: 88543 - protein, 52 aa, Gossypium hirsutum
  unsure (1)..(52): unsure at all Xaa locations
  Clone ID: LIB3083-048-Q1-G1-G11.pep
MESLSMHDGFLLGAWVESAKXLVQGEEEEKQFEWNAXTQIIMWFDNTEDEAS

SEQ ID NO: 88544 - protein, 86 aa, Gossypium hirsutum
  Clone ID: LIB3083-048-Q1-G1-G2.pep
NANVNEISNTITERWMNNMLAQRLKDFLTRLVRDHESIDLEWLTHVPADKAQDYLLSIRGLGLNSVECVRLLTLHHLAFPLDTHVG

SEQ ID NO: 88545 - protein, 91 aa, Gossypium hirsutum
  Clone ID: LIB3083-048-Q1-G1-H12.pep
IIAASSLGMPVECCAPAFDRSVFPLCCVTITSGWISRSVIIASFSSARLVNAERVRVVECSSGSGSSSVNAVQNQLTWLQHSVSICGEKPT

SEQ ID NO: 88546 - protein, 53 aa, Gossypium hirsutum
  Clone ID: LIB3083-048-Q1-G1-H9.pep
RPKMNQPKHDPLPLIKKHAFHITTCSNFAANPNNTQPLPIQNQKDAHYTYTFT

SEQ ID NO: 88547 - protein, 47 aa, Gossypium hirsutum
  Clone ID: LIB3083-049-Q1-L1-G10.pep
RNKGSCRVNVSSSDIGSECKVRIKIMLPIAHAIAQGLGPSHALSCVL

SEQ ID NO: 88548 - protein, 80 aa, Gossypium hirsutum
  Clone ID: LIB3083-049-Q1-L1-G6.pep
NLLIKRREGLLSRQQHPERRRLLSSVVGSEKKLESLPAMVAGVWTDDRNMQLEATTQFKKLLSIERIPSINEVAQTGVIP

SEQ ID NO: 88549 - protein, 87 aa, Gossypium hirsutum
  Clone ID: LIB3083-049-Q1-L1-H10.pep
QSNSIFLLCGRSLQERLTLPLLYLNYNEHNLPCYMRLTTGDSHRFQLPKIECVNHIIMRPAPLHHNHNHHPTWMPASASTNIILCTA

SEQ ID NO: 88550 - protein, 89 aa, Gossypium hirsutum
  Clone ID: LIB3083-049-Q1-L1-H11.pep
NCCLLWWHHSTIMQILSDALTRLNSSTKDYFMQVCSNSSSVSSSVLRNVCKHSVYYDTALESQQNIYIGHNTSCTSPPRYCNLGRMSCH

SEQ ID NO: 88551 - protein, 74 aa, Gossypium hirsutum
  Clone ID: LIB3083-049-Q1-L1-H4.pep
VLPLILIHQIPINISFNFTSITCCNNIIINLLQLYQSKYYTTNTIPTSSIATKISTTATIYTHTVPQINPAAQS

SEQ ID NO: 88552 - protein, 71 aa, Gossypium hirsutum
  Clone ID: LIB3083-050-Q1-L1-A10.pep
VSSEHISPFMIVDCSCHGYKWYLQQSRLCHLKLSQPLVAVDLEPVPEFSDAWVNGHRGLIWFPKRPSGWQR

SEQ ID NO: 88553 - protein, 121 aa, Gossypium hirsutum
  Clone ID: LIB3083-050-Q1-L1-B11.pep
GEYSDLEDGATVHTETQHGEHSDLNSQQDRNPVDGITEMEIDKDNAEAVNASNHFALNEFGVSFPTNLGTEFLLEESKANTSADGSIAECFAPIENGTNSIVTLQTAESVNGSQNAYEAEN

SEQ ID NO: 88554 - protein, 59 aa, Gossypium hirsutum
  Clone ID: LIB3083-050-Q1-L1-B7.pep
FHRVRLGDGSMGSLLDLKNSEPDPEPEPLDNKFDSSQNSTGALPVRGVWKKGGSKKLFL

SEQ ID NO: 88555 - protein, 144 aa, Gossypium hirsutum
  unsure (1)..(144): unsure at all Xaa locations
  Clone ID: LIB3083-050-Q1-L1-C10.pep
RCHPHDPLGPDHASLTIIRFVLNHRSRGPXSRCDFTILLNHIVLGCMFVRSSVNKVCIAKLIVLAGDINIXGEEQKILDVLSNEDYIKALLSSGRTRILISEDDEHAIIAEPSKCVRYCASLNSLHRSFNIDCIVYLETIFGLY

SEQ ID NO: 88556 - protein, 71 aa, Gossypium hirsutum
  Clone ID: LIB3083-050-Q1-L1-C11.pep
LWFFNIHAVYTTRGIGRYVLVRPLKQTQVIIMLYSSLPTYIIHMQLSSINLHTEPTERPTSTLFNKPGLCF

SEQ ID NO: 88557 - protein, 127 aa, Gossypium hirsutum
  unsure (1)..(127): unsure at all Xaa locations
  Clone ID: LIB3083-050-Q1-L1-C12.pep
EPGLDGRLPTRTGPSGQRGHMDEPGYSMNINMSSCNGPLPVKRGPPPRSGGPATXRSAHSGPVRINRGMGRRPAVSRTRDSYGRPPGQEPLSSRTDVYMCPKDEGYYSTDSIFRRNDPSSGDTRDYA

SEQ ID NO: 88558 - protein, 60 aa, Gossypium hirsutum
  Clone ID: LIB3083-050-Q1-L1-C4.pep
VHEIIITNETTPSQQMTPIMQDQQENLVIDTNATHSITKAINGDYTLTDSMSLNETIMNS

SEQ ID NO: 88559 - protein, 51 aa, Gossypium hirsutum
  Clone ID: LIB3083-050-Q1-L1-D10.pep
PFVSRIRPLWPFTHTSDTSGTCGIHQSPWTFTSFSTVFYILTDDSTSTSCS

SEQ ID NO: 88560 - protein, 64 aa, Gossypium hirsutum
  Clone ID: LIB3083-050-Q1-L1-D12.pep
TTDQEEQNSILYLKSKLYRFDKHTNQCKERHTNTVKLFNHKKTTKVQLFIKQSKTLKICTNHYM

SEQ ID NO: 88561 - protein, 132 aa, Gossypium hirsutum
  unsure (1)..(132): unsure at all Xaa locations
  Clone ID: LIB3083-050-Q1-L1-E11.pep
PTVCHLNTASHSGGTCWIHPVSDTTNDIQLYATLXHQPIVFQHTISDDHGIRETTPTTTTTPIRHNPRPYPXNVAHEALYDTTISWSPFHDTYEFIISCHPVVTDEQPLQFTVPTTYTSATLTGLTSGAIYN

SEQ ID NO: 88562 - protein, 85 aa, Gossypium hirsutum
  Clone ID: LIB3083-050-Q1-L1-F2.pep
SRFLDLKVNESLELVPLVDEKMVKMMMFNESRRKLGTFQICAACTCCGGPKGVCLPSPCCYAFNCNIPNRPFGFCSFTPKTCNCF

SEQ ID NO: 88563 - protein, 113 aa, Gossypium hirsutum
  Clone ID: LIB3083-050-Q1-L1-F5.pep
MMNEQRLTLLAEVGFLKRRHKFLMQDQSSKPQAERHFLQPQDIVIRSKSNMKAKKSTGKGTSSNRAMAFHLNQKGKTNSVKGTCFTHPALMLDVNRKQQKISSGKEVTLRSSL

SEQ ID NO: 88564 - protein, 131 aa, Gossypium hirsutum
  Clone ID: LIB3083-050-Q1-L1-F8.pep
EIGNHETGDAHPLLRGGGRKTTYTHGFSSAQIRSLAATCEALIPPLPLDSAHQASSLDAFYKASGAEPPLPDEVAEMMVKRVVEPRVLSFVKVVLAVISFRLGALLLCGWDCCDWKWPFIHKVSELPMEKR

SEQ ID NO: 88565 - protein, 143 aa, Gossypium hirsutum
  Clone ID: LIB3083-050-Q1-L1-F9.pep
LSNPILHLLPFTNASASTGPCCTHPDYDTVNGIQFHATPVHQPSVGQQMIFDEHLLRLTTPSTTATPIMHTPRPYPTHVRLETLSQTTISYAPFQDTSEYIISCHPVGTDEEPLQFRVPGTSTSATLTGLTKCATYNIILDAL

SEQ ID NO: 88566 - protein, 125 aa, Gossypium hirsutum
  unsure (1)..(125): unsure at all Xaa locations
  Clone ID: LIB3083-050-Q1-L1-G2.pep
NIIISQSKLWEITFETKTGSLNSWKVEGVPIMKNGLFPCFWRAPTDNDKRGGLSSYQTKWKAACIDEIVFLTESCSIQNKTDNVVXIAVVYLGFIYGEDGTIDESKKARALFKVDMLYTIHASGD

SEQ ID NO: 88567 - protein, 87 aa, Gossypium hirsutum
  Clone ID: LIB3083-050-Q1-L1-G4.pep
EMAAMKRDAEHYSRQEHMELEKRYRELTDLLYYKQTQLETMASEKAAAEFQLEKEIKRLQEAQVEVERSRVPRRASSSWEEDTDIKS

SEQ ID NO: 88568 - protein, 95 aa, Gossypium hirsutum
  Clone ID: LIB3083-050-Q1-L1-G8.pep
RKPVYLPGERISNFIYASGYYTELLYSQRTQTITMEGEIAPANFQIRTAIEHIPTPQVKDIRGEITMRLNLSVRTTLMSHLLMHQHITNYPYYQS

SEQ ID NO: 88569 - protein, 35 aa, Gossypium hirsutum
  Clone ID: LIB3083-050-Q1-L1-G9.pep
ELYSSITPHDKTSTDPSKHQNTYHHHIAFRGPHLI

SEQ ID NO: 88570 - protein, 40 aa, Gossypium hirsutum
  Clone ID: LIB3083-050-Q1-L1-H11.pep
DREIYSDIVISMLTCFFVRGMLYICIFIGSECLMFRVGWD

SEQ ID NO: 88571 - protein, 124 aa, Gossypium hirsutum
  Clone ID: LIB3083-050-Q1-L1-H4.pep
ERRSFEEAIEKLHRVEGLTRSSLGVRVAATEALVGLYLQLGQDDTSSVLADKCLDFLHKDDLRSNGGSKESLIVRAKAVKGLVELVTGNLESAESFFHGVQDIEAWNGTCCLSYGEFLHATQQV

SEQ ID NO: 88572 - protein, 72 aa, Gossypium hirsutum
  Clone ID: LIB3083-051-Q1-L1-A6.pep
SYNLISYMLHSITSLHNHHAQNFTDRHRMNIHHLDNPYISHQHTTNIHPLFKTSTYRESSIQCIHRLTIPKQ

SEQ ID NO: 88573 - protein, 118 aa, Gossypium hirsutum
  unsure (1)..(118): unsure at all Xaa locations
  Clone ID: LIB3083-051-Q1-L1-B6.pep
MDCGSGGGGLGASGSGGDHDSSDLSRRKKPYHRHTAHQIQRLESMFKECPHPDEKQRLQLSRELGLAPRQIKFWFQNRRTQMKAQHERADNSALRAENDKIRCENIAIXEALKNVICP

SEQ ID NO: 88574 - protein, 147 aa, Gossypium hirsutum
  Clone ID: LIB3083-051-Q1-L1-B7.pep
KSGALRHDIHYWLGGDTSQDEAGADALKTVELDAALGGRAVQYREVQGHETDKFLSYFKPCIIPQEGGVSSGFKHVQEEEHKIRMSVCRGIHVVHVKEVPFARSSLNHDDIFILDTKSKIFQFNGSNSSIQERAKALEVVQYIKDTY

SEQ ID NO: 88575 - protein, 59 aa, Gossypium hirsutum
  unsure (1)..(59): unsure at all Xaa locations
  Clone ID: LIB3083-051-Q1-L1-C9.pep
SNGLNLRIRRGGHDYEGLSYVCYDPXDGLDFTNYQSLKIDLTNKLTWFQYGALLYELHS

SEQ ID NO: 88576 - protein, 127 aa, Gossypium hirsutum
  Clone ID: LIB3083-051-Q1-L1-D1.pep
ARVNDRSSRSHSCWRVHVQGKDLTSGNIIHGCMHLVDLAGSERVDKSEVMGDRLKEAQHINKSLSALGDVIAALASKGSHVPYRNSKLTQLLQDSLGGQAKTLMFVHIAPEYEASGETISTLKIAER

SEQ ID NO: 88577 - protein, 144 aa, Gossypium hirsutum
  Clone ID: LIB3083-051-Q1-L1-D6.pep
EELIKCRYVLKEKEVIISQQKQAENALAHQACALRSDLEKAVKDNALLFLKIGREDKLNADNRVVVNNYQVELAQQIGSICNLVSSLMSQQNEHLESVEKLCCSFTDTHQKAILDMKKKVTAARTLHVSQMEAVQNIVRLHKGS

SEQ ID NO: 88578 - protein, 70 aa, Gossypium hirsutum
  Clone ID: LIB3083-051-Q1-L1-E6.pep
VHYIKIALNIYNTIWEREISDLLHNRNARTKYGILILHYNIICQHPVEHDKRTIISSLLTKRFTPNTIDH

SEQ ID NO: 88579 - protein, 95 aa, Gossypium hirsutum
  Clone ID: LIB3083-051-Q1-L1-F1.pep
LNVNNEYVKFLDRIIIVNTSVNSVSHIMRAKTTHHLVVFIQMQLLCLSNLIIVYCICNSKSYVFFPLCVFGLGRTLVFYPPHMLSSQTTFTTSPF

SEQ ID NO: 88580 - protein, 55 aa, Gossypium hirsutum
  Clone ID: LIB3083-051-Q1-L1-F10.pep
MAGNDWINSYLEAILDVGPGIDYAKSSLLLRERGNFSPTRYFVDEVITGFYDTDL

SEQ ID NO: 88581 - protein, 53 aa, Gossypium hirsutum
  Clone ID: LIB3083-051-Q1-L1-F11.pep
VKLHLWRLCLKSWILGLTSSQTKATYMVCSWYIFECIELMMSPFLYGPQIMSM

SEQ ID NO: 88582 - protein, 121 aa, Gossypium hirsutum
  Clone ID: LIB3083-051-Q1-L1-F7.pep
TTINHFIYSTMTAIPCGALLPGPVSSNIRKLIISPIPLTTLHLSILSFTPTTSLLIHQYKPSILPELTQLSKLAKNLMLTDYPLHFQNLTLSKHISYTIYTIHQLYHTNNIHLMNSTSIHE

SEQ ID NO: 88583 - protein, 78 aa, Gossypium hirsutum
  Clone ID: LIB3083-051-Q1-L1-G12.pep
VCEIRRKFSTGENTFTVGGAYAVDHLTLIKAKLNNHGRLGALLQHEVIPKSLLTVSGELDTKSLDKSPRLGLAFALKP

SEQ ID NO: 88584 - protein, 68 aa, Gossypium hirsutum
  Clone ID: LIB3083-051-Q1-L1-H1.pep
ASIKELITLERHFIFWITLSLIFSLCPLIDYFICGSLRENERKIKCEANTSLLNKSGRSISKVKKGSK

SEQ ID NO: 88585 - protein, 67 aa, Gossypium hirsutum
  unsure (1)..(67): unsure at all Xaa locations
  Clone ID: LIB3083-051-Q1-L1-H2.pep
MLSCEYSCNFYTQFDLVSEINRRILSARRYTSYSSLRINTSPCSRRLSSYYHCRSXAQSNSYSRWCS

SEQ ID NO: 88586 - protein, 146 aa, Gossypium hirsutum
  unsure (1)..(146): unsure at all Xaa locations
  Clone ID: LIB3083-051-Q1-L1-H7.pep
TCDLELAVVVFALVIYTDHKSLKYLLTQKELNLRQCRWIELLKDYDYTIEYHSGKANMVVDALSRRAMTDLRAISRXILFEDGSLLAELXLSRHRLSRLRISXLEDESLXTLILXIEGGSTTGFGLNSDGVLCFRERICVLNDTDL

SEQ ID NO: 88587 - protein, 46 aa, Gossypium hirsutum
  Clone ID: LIB3083-052-Q1-L1-A3.pep
RARCINLITLIMRVGDSLRLAFTVLARLITENIVHQLTVSPTHNDP

SEQ ID NO: 88588 - protein, 139 aa, Gossypium hirsutum
  Clone ID: LIB3083-052-Q1-L1-B8.pep
YQEIVDAYGVAGYEEANPAVYTVVTFPFLFAVMFGDWGHGICLLLGALVLIAREGRLSTQKLGSFMEMLFGGRYVLLLMSLFSIYCGLIYNEFFSVPFHIFGGSAYKCRDVTCSDAKSAGLIKFRDPYPFGVDPSWRGS

SEQ ID NO: 88589 - protein, 62 aa, Gossypium hirsutum
  Clone ID: LIB3083-052-Q1-L1-C12.pep
YTMNWGRVNVIYFTDKWFNIILGFKAEVIHTLFWKRNQLGQILLTLTLLSLLQEPGIQINLI

SEQ ID NO: 88590 - protein, 55 aa, Gossypium hirsutum
  Clone ID: LIB3083-052-Q1-L1-C2.pep
CNGSSSFHRFHGFNPWFRGLRFHVVHPVSCTLQSQICGKPVCSIQQLLSPPTPAP

SEQ ID NO: 88591 - protein, 92 aa, Gossypium hirsutum
  unsure (1)..(92): unsure at all Xaa locations
  Clone ID: LIB3083-052-Q1-L1-D1.pep
ETGKSKGLSRGRALWXVSKSDRPGDNMPASGASQVLTEIWRDSSSSKGSQNNRLSPEQPSHSIKXREFFFQQVXXESLGAXXRNSNWQITIR

SEQ ID NO: 88592 - protein, 89 aa, Gossypium hirsutum
  unsure (1)..(89): unsure at all Xaa locations
  Clone ID: LIB3083-052-Q1-L1-D10.pep
ADTIDLIAAHVGIGNRSXRVSAPNDHYCLRHSQDIDYPRTVYECHSCSDLAAXMADALASAYIDFKDIKTYSXKLVHGARTLFKFASDQ

SEQ ID NO: 88593 - protein, 97 aa, Gossypium hirsutum
  Clone ID: LIB3083-052-Q1-L1-D2.pep
ILQLFFSIFIYYFFFFLLSLLFCFFFYSLPLTILFTIPLTNTSFIIPIPFKPYTNFTYINPFKTFTYFKNIYTSSNTKPTLNTTHINHTILLYLILT

SEQ ID NO: 88594 - protein, 45 aa, Gossypium hirsutum
  Clone ID: LIB3083-052-Q1-L1-E6.pep
FEVKFGNSLGVKITVFLKIWKGFFLFFLDHKEFGLRMGLFSSDRW

SEQ ID NO: 88595 - protein, 26 aa, Gossypium hirsutum
  unsure (1)..(26): unsure at all Xaa locations
  Clone ID: LIB3083-052-Q1-L1-F11.pep
QTIQKPEEQEPRVIPXTQNGYGLYGL

SEQ ID NO: 88596 - protein, 53 aa, Gossypium hirsutum
  Clone ID: LIB3083-052-Q1-L1-F2.pep
HTITAATSLTKLRESLLHRLVTTDCLTTIFLPYNRNPTFLDTNILYLIYHEMI

SEQ ID NO: 88597 - protein, 49 aa, Gossypium hirsutum
  Clone ID: LIB3083-052-Q1-L1-F6.pep
LEMLSPICSCYSLHTNPHFHPITKSWTITHPTSATTSYHFRMINTTCPQ

SEQ ID NO: 88598 - protein, 39 aa, Gossypium hirsutum
  Clone ID: LIB3083-052-Q1-L1-G1.pep
SYIGVVCSVYNLVAKYSLDSKWSNKYSHSFKNVTSGAVV

SEQ ID NO: 88599 - protein, 53 aa, Gossypium hirsutum
  Clone ID: LIB3083-052-Q1-L1-G10.pep
FKKLYPLIKNCLKPPYGVLYLTTKNNYVSFNTAARHLMSLIHEQGIFGSHLIQ

SEQ ID NO: 88600 - protein, 85 aa, Gossypium hirsutum
  Clone ID: LIB3083-052-Q1-L1-G2.pep
LLSPGNPYAEILNPLNNQTSIIIRSLLPRCTNFTTTHGGLIQINHGRPQPLHYVVNAGFLAALYRDHPDAADTPGCDSGPNFYST

SEQ ID NO: 88601 - protein, 96 aa, Gossypium hirsutum
  Clone ID: LIB3083-052-Q1-L1-G8.pep
CSSHLKKESSEAYNKNPTVFIVDLVASFIYTMVFVSKIHIIDLYFNKMFGNRNKIPNPSNFHFLLISKSAKSVDGIINYEFLFWYKNLCNLFEIAF

SEQ ID NO: 88602 - protein, 109 aa, Gossypium hirsutum
  unsure (1)..(109): unsure at all Xaa locations
  Clone ID: LIB3083-052-Q1-L1-H1.pep
HKHATDLVNLQMGEYWYDSLESKEHIDASLXTEHTAAMRLDRAMAYSFTHQQTLKTWSKCMNPSFMDMNNPSLGCSWIQLWMIARSSEGHGVTGKEPDNDQSSGRNAHF

SEQ ID NO: 88603 - protein, 55 aa, Gossypium hirsutum
  Clone ID: LIB3083-052-Q1-L1-H2.pep
YSCFYSPIFLSSGNLVLIFRTLRCLPLAVLYITNHGSVPNKATSYLFSCQHTLYA

SEQ ID NO: 88604 - protein, 37 aa, Gossypium hirsutum
  Clone ID: LIB3083-052-Q1-L1-H8.pep
CQMDHIEHIMPHHWVKIQPNFQATLPRKVDGEIRIDS

SEQ ID NO: 88605 - protein, 51 aa, Gossypium hirsutum
  Clone ID: LIB3083-052-Q1-L1-H9.pep
AIMIIHLYAIYLKFRLDICILILRSDHKFIQNMQGLLVILGLPCPHDRMRR

SEQ ID NO: 88606 - protein, 115 aa, Gossypium hirsutum
  Clone ID: LIB3083-053-Q1-L1-A1.pep
RHANTNAETSRAHGSIIPLELFSGSKRGTGHGSFQHFPSQAGYTSSSGSDHSPPSLNSDAQDRTGRIIFKLFDKDPSHFPGTLRTQIYNWLSNSPSEMESYIRPGCVALSVYVSM

SEQ ID NO: 88607 - protein, 115 aa, Gossypium hirsutum
  Clone ID: LIB3083-053-Q1-L1-A8.pep
VHQLIHTIEFVLGAVSNTASYLRLWALSLAHSQLSIVFYEKVLLLAWGYNNMVILVVGIIIFIFATVGVLLIMETLSAFLHALRLHWVEFQNKFYEGDGYKFYPFSFILIDDEDY

SEQ ID NO: 88608 - protein, 133 aa, Gossypium hirsutum
  unsure (1)..(133): unsure at all Xaa locations
  Clone ID: LIB3083-053-Q1-L1-B1.pep
HEQKLDCGGGYMKLLNGDTDHNKSGGDTTYSVTFGPDMCGYSANIVHAILTYNVTNHLIKKEGARETDQLTHVYTFILRSDATYSMLIDNVDKQTGSLYTDXDILPPHXINDPEANMPDDCDDKEYIPSPAYK

SEQ ID NO: 88609 - protein, 141 aa, Gossypium hirsutum
  Clone ID: LIB3083-053-Q1-L1-B12.pep
KDIEALELFREMQSAGVKPNSVTIPCLLPACGNIAALVHGKAAHGFSLRTGIIADVHVGSALVDMYAKCGRIHLSRLCFDRIPNKNSVCWNAIMGGYAMHGKANEAIDIFHLMQQKGHKPDFISFSCVLSACSQGGLTEQG

SEQ ID NO: 88610 - protein, 128 aa, Gossypium hirsutum
  Clone ID: LIB3083-053-Q1-L1-B2.pep
QVPPVRQENWGPKKTMKFHSNVDPEGHACLQETTADCKLNLPKPSKDGKNNVGRRDPSGQWSSDNRMEAQSNKKHEVDAKTAAACSTKGKTAPEKNVIQDFDGQTRQVEIRNGISKSSLHCENESQQE

SEQ ID NO: 88611 - protein, 125 aa, Gossypium hirsutum
  unsure (1)..(125): unsure at all Xaa locations
  Clone ID: LIB3083-053-Q1-L1-B4.pep
QRLRSLRPNASVSEQHEAVETWRNEKLKEAKNLALGGERLDSTLLREEAGNLVKVLESNWAALSEEIGLWIPNEIKNQEHNDKPEDVEDTDDPEQILAGRPPLPECRTELHTDYDGDCVRWXLTH

SEQ ID NO: 88612 - protein, 68 aa, Gossypium hirsutum
  Clone ID: LIB3083-053-Q1-L1-C1.pep
MGWLTKILKGSSNKGRYHERYGDGRTWDEPRRSTEGSDGFDKDEIDCAIAISLSEVDQKGKIVIEDES

SEQ ID NO: 88613 - protein, 105 aa, Gossypium hirsutum
  unsure (1)..(105): unsure at all Xaa locations
  Clone ID: LIB3083-053-Q1-L1-C5.pep
GKPFFALKKTNVAPWHNKFFHLYYHLSQLSMLREPLMLISGXLLFSVDCIVYMHADTSISKYSATYLAKQQXNRTXAFMQQVHTIISXCLTTHDNMEASLPDLSR

SEQ ID NO: 88614 - protein, 126 aa, Gossypium hirsutum
  Clone ID: LIB3083-053-Q1-L1-C6.pep
SSYVDESGKQLVAAGDTGNSVELVGGSELVITKRSDEGILSKTLGSREYMRYYQQKPRPSPANNMAITAALASRYRSMGIATVQSREQMVRMKVMKAMNRGGVEAMRTKVGMKNNVIRNLPKNVPY

SEQ ID NO: 88615 - protein, 99 aa, Gossypium hirsutum
  Clone ID: LIB3083-053-Q1-L1-D11.pep
PWDHIECEGSTVTSLDLSDINLRSISPTFGDLLDLKILNLHNTSLSGATQNLGSLQHLEKLNLSFNQLTSFGYDISSLVNLRVLDLHNIRLHGIVSDIL

SEQ ID NO: 88616 - protein, 93 aa, Gossypium hirsutum
  Clone ID: LIB3083-053-Q1-L1-D3.pep
EGKVRSLKHKHRAAIRMISRLASLLYRVRIHIHRRSRVRTRCAHKTCHDDTSSSAVEFVNDTLLAWPVAPPEPSREFHLPGASPNINVRFCKR

SEQ ID NO: 88617 - protein, 127 aa, Gossypium hirsutum
  unsure (1)..(127): unsure at all Xaa locations
  Clone ID: LIB3083-053-Q1-L1-D5.pep
MEPPPTGEEPTSWDELYNINLIPSELFLKFRKEIQGFRVGVNLEFFNAPMNDFQTKLVLKPLSPERRWKFAYEPIRQDVRLISKKIPVTKFLNLQVGIGHNFKMNAIXWKXWKLTTCFGGNGIFSIR

SEQ ID NO: 88618 - protein, 137 aa, Gossypium hirsutum
  Clone ID: LIB3083-053-Q1-L1-E11.pep
ILAPLPGIGNVRILFLFLMTRSALGTLAFDSETEKTARANRKETKLRKKQSAVVGTQSNPSPEIRIDDEAESKVNENPTQTFEGEKVEVDSPEEVLNARVDVNLNLAPQPMAHTIRQLAEAPTEQPPLCIAYPTMDT

SEQ ID NO: 88619 - protein, 131 aa, Gossypium hirsutum
  unsure (1)..(131): unsure at all Xaa locations
  Clone ID: LIB3083-053-Q1-L1-E2.pep
KIWGHYXLGEKCHVFLDHKSLKNLMPHRDLNLRKRRWLESLKDYELVIDYHPGKANMVADALSRKSLFALRAMNVHLSVLPDNVLIVELKAKPLLIHQIREAQKVDDELVAXRAECAPNKESEFQIDDDDW

SEQ ID NO: 88620 - protein, 77 aa, Gossypium hirsutum
  unsure (1)..(77): unsure at all Xaa locations
  Clone ID: LIB3083-053-Q1-L1-E3.pep
MAASTANGTGWYKGRVIAVPSGDSLVIMALTSNRPGPPPEKTITLASLIAPRLARRGGVDEPFACDSXEYLRKLCIG

SEQ ID NO: 88621 - protein, 47 aa, Gossypium hirsutum
  Clone ID: LIB3083-053-Q1-L1-F12.pep
SNHFLSAIQHHSLFTTQVLFRAIVSIEKDWNRDLSTGLRTFSLACYL

SEQ ID NO: 88622 - protein, 66 aa, Gossypium hirsutum
  Clone ID: LIB3083-053-Q1-L1-F4.pep
MFYFFPFHFSSLLSKGQKENYFVLSIFSSFLPSTSMERKIIFFIFLFFYPSIFYHSNFFLLYQAKI

SEQ ID NO: 88623 - protein, 59 aa, Gossypium hirsutum
  Clone ID: LIB3083-053-Q1-L1-F6.pep
DHISSIFGFQKVHDLGIYLGVPLFHQRLTNSTTNFVVEKVWGSYIVGTPKKSPLLVVFI

SEQ ID NO: 88624 - protein, 95 aa, Gossypium hirsutum
  unsure (1)..(95): unsure at all Xaa locations
  Clone ID: LIB3083-053-Q1-L1-F7.pep
HIGCHILAAGINGYMAAISNIKNPVDKWCCGAAPLQAMMSVKRWSQNPNVASIGLLAIHPVSVDVKGTAYDMLRQNAARYLPHDIYRXAGPIQFD

SEQ ID NO: 88625 - protein, 42 aa, Gossypium hirsutum
  Clone ID: LIB3083-053-Q1-L1-H3.pep
LLSNYHERNTTVMWTFCEERHNITTYIWDFLKLTIITRSSTT

SEQ ID NO: 88626 - protein, 76 aa, Gossypium hirsutum
  Clone ID: LIB3083-053-Q1-L1-H4.pep
RKTLLPDIFCFLLQAVSLETNMAACSALIYTIITPQTVFFSPKSFYNLRLLPTTNVRTVRTATLATGSQSATGPRT

SEQ ID NO: 88627 - protein, 57 aa, Gossypium hirsutum
  Clone ID: LIB3083-053-Q1-L1-H7.pep
INIIGRKVLYGNKKPFKHLNIFMCKYISNAQIKQHMKSGYPFHTPSLLSLSPHFLPF

SEQ ID NO: 88628 - protein, 82 aa, Gossypium hirsutum
  Clone ID: LIB3083-054-Q1-L1-A12.pep
LLLYYAITVIDLSYFFNYSSLLPHYKTDETPSTVRINMNSTHKQPDTSCHITRTTTNNTVSYNPNIINIAKWTHDMEILKRT

SEQ ID NO: 88629 - protein, 45 aa, Gossypium hirsutum
  Clone ID: LIB3083-054-Q1-L1-A9.pep
EHVNCGHLCFKARCGYLLNYTPMMSRFDNWLLGTLNIPSLFFIIP

SEQ ID NO: 88630 - protein, 35 aa, Gossypium hirsutum
  Clone ID: LIB3083-054-Q1-L1-C9.pep
KGLSSSSHKNLMVLCVYSSVNSVCMVLKWNGCSIR

SEQ ID NO: 88631 - protein, 32 aa, Gossypium hirsutum
  Clone ID: LIB3083-054-Q1-L1-D11.pep
NSRMGWSLDIGQALKDFRDVNYVPLLMGLRRW

SEQ ID NO: 88632 - protein, 132 aa, Gossypium hirsutum
  Clone ID: LIB3083-054-Q1-L1-E12.pep
DNPRNLTYVPIVEKVTVWWRSARGQPLAFYGSWTLFTLAHHNTVWLSTELVDPGLFTTYAILGSDIVIGDAEVAAIKLSCFPLGYRDFESRTLKPFPFGRALNQPGRELQTPVLCLNGPTWGKTGNECGRDN

SEQ ID NO: 88633 - protein, 142 aa, Gossypium hirsutum
  Clone ID: LIB3083-054-Q1-L1-F10.pep
AVTSISTPISVVSASKAAAVRVIPAAPLQFEGTLGWKGSAATSAFRPASPRRNSDGDKRLSLGGTSSSSKRRLDCLDFDLNVADAGDEKGAELMSGKQVTASSGLYSAESSLKASQRKSERLELDLNCVSDDGDGPALEFRV

SEQ ID NO: 88634 - protein, 138 aa, Gossypium hirsutum
  Clone ID: LIB3083-054-Q1-L1-F11.pep
RSSRGRYRAQSKNRGPDRGYRIGSGSKAFGKNNRQNMAPKVVRGRGPRSYEPNMKISSQAPPIQGRLSGKPLEKTSQANSGRASTLATNAGTVSDPNPKHIFASSLSSASPPFYPAASSNDTALTHKKDVHAESVSGN

SEQ ID NO: 88635 - protein, 44 aa, Gossypium hirsutum
  Clone ID: LIB3083-054-Q1-L1-G10.pep
TLFSMLIHTIKFFTLLPKININNKYTTTINQKHNTFHLHTTQNP

SEQ ID NO: 88636 - protein, 53 aa, Gossypium hirsutum
  Clone ID: LIB3083-054-Q1-L1-G12.pep
IKKVIEQYLMPNIRDDLLKTCADDPCLADHWPYLVCNYFNESTVITDMELASN

SEQ ID NO: 88637 - protein, 44 aa, Gossypium hirsutum
  Clone ID: LIB3083-055-Q1-L1-A1.pep
KLSLFHPSTFVRPFGKIGVTLTKGKGKLSCNSIEGSHTLAGAHS

SEQ ID NO: 88638 - protein, 41 aa, Gossypium hirsutum
  Clone ID: LIB3083-055-Q1-L1-A3.pep
HRLVVNIQMSFKAKPYIDPTPIHILQILYKDILSLNHISTT

SEQ ID NO: 88639 - protein, 36 aa, Gossypium hirsutum
  Clone ID: LIB3083-055-Q1-L1-A4.pep
LMTYDKALKHSTFMLLYPDLAHILHRTSIKHILYTS

SEQ ID NO: 88640 - protein, 66 aa, Gossypium hirsutum
  Clone ID: LIB3083-055-Q1-L1-A5.pep
ISMKGPFYLGKITPIITKSQDRGTAVNRAAFQAAFSLLYIKLYRFNGNCLPCLFNQKNMHLPSQLI

SEQ ID NO: 88641 - protein, 64 aa, Gossypium hirsutum
  Clone ID: LIB3083-055-Q1-L1-A6.pep
SFSCMSMNLIHVLFFLCTNSGYISLNVVCINTLSSVNNWRVDQIEFQSLDLDTKLKKIKVCSAH

SEQ ID NO: 88642 - protein, 44 aa, Gossypium hirsutum
  Clone ID: LIB3083-055-Q1-L1-A8.pep
SQTNTFVAFPSLISCNEPFPMISFISQMCLARLKPVHVPKFQPF

SEQ ID NO: 88643 - protein, 60 aa, Gossypium hirsutum
  Clone ID: LIB3083-055-Q1-L1-B1.pep
LPQPYHASMSFDPRIRKKMSRASQTPTHSHTLRYLHLAIYIIEITKNIYKLFPTPNTISI

SEQ ID NO: 88644 - protein, 59 aa, Gossypium hirsutum
  Clone ID: LIB3083-055-Q1-L1-B10.pep
KSPHMFNDFIIDKYIYNNPYYFIQKQNHSNYFFHIYIIINLSLISIFVNNASNLNTLIS

SEQ ID NO: 88645 - protein, 47 aa, Gossypium hirsutum
  Clone ID: LIB3083-055-Q1-L1-B11.pep
KDVYITFFYILYNQITQFTNILPPYKNNYTTLKYKIKKTISKSNKIK

SEQ ID NO: 88646 - protein, 49 aa, Gossypium hirsutum
  Clone ID: LIB3083-055-Q1-L1-C10.pep
IQYHYYIDIYNLDLRNVLSTTKTIVLALKLSLLLYLTTTFTTESLNLNI

SEQ ID NO: 88647 - protein, 57 aa, Gossypium hirsutum
  Clone ID: LIB3083-055-Q1-L1-C12.pep
PPTFRPPKPSIILIMPRCPSTHSCAPSIVTFTNTYYNSNSYKTILFSITTIHLLINS

SEQ ID NO: 88648 - protein, 38 aa, Gossypium hirsutum
  Clone ID: LIB3083-055-Q1-L1-C5.pep
YPLLHTFHPPIWAWAFLVPSTLNNDLLLRTILIPYSQL

SEQ ID NO: 88649 - protein, 48 aa, Gossypium hirsutum
  Clone ID: LIB3083-055-Q1-L1-C9.pep
SDRFKHDMLLMHISDVGLNIAKGFFCSKVVDLNFSVIRSSVFDKWQWI

SEQ ID NO: 88650 - protein, 80 aa, Gossypium hirsutum
  unsure (1)..(80): unsure at all Xaa locations
  Clone ID: LIB3083-055-Q1-L1-D2.pep
NQKAIDRYLNSWNETLTCRLPAIPENTPAIDCAYYEANVSNAVSMDXDLTRSLDALNVTVPXDKHTGHEDAAQEEDAKSC

SEQ ID NO: 88651 - protein, 94 aa, Gossypium hirsutum
  Clone ID: LIB3083-055-Q1-L1-D5.pep
FNKKLQSKLLKHAEAEEDLALKQQLELYVERIYDVDPEVHKVALESMRQEVRTSISSMTYVPKLLKFLRPHYGTLKAFYETMLDSDLKVLLVLL

SEQ ID NO: 88652 - protein, 89 aa, Gossypium hirsutum
  Clone ID: LIB3083-055-Q1-L1-D9.pep
FYPHYPPSTLSTSISFYPLGLFSKGFSQHTFPLLLISHYYLTYNTTIFNNTKPQTSISHPNLSPIYNIKITYTPSITLHSPITILSTFL

SEQ ID NO: 88653 - protein, 76 aa, Gossypium hirsutum
  Clone ID: LIB3083-055-Q1-L1-E11.pep
FISHFNSYYTFLKYLLYDNIITVPLIPSDQSSDSPSVPPFSALTLYPSSITLSHHPHTIFLTLRTLLYIALNYLTC

SEQ ID NO: 88654 - protein, 64 aa, Gossypium hirsutum
  Clone ID: LIB3083-055-Q1-L1-E12.pep
LIHKTIYNHMVSRKQKPIRKHRFIVIFKQINYYSILYPQYICARVGRRNSRPDTDDGGYMGVPT

SEQ ID NO: 88655 - protein, 47 aa, Gossypium hirsutum
  Clone ID: LIB3083-055-Q1-L1-E2.pep
YSNIVMMIYLNIILISVVTYWLQILKTTCRYIYLYSSKFLHDALLLE

SEQ ID NO: 88656 - protein, 57 aa, Gossypium hirsutum
  Clone ID: LIB3083-055-Q1-L1-E4.pep
EQKSYVEEGLLKQFLLGWRFFDIEVNIFTYDVDSNRIGCNLCIKVILPCKCACMFSM

SEQ ID NO: 88657 - protein, 43 aa, Gossypium hirsutum
  Clone ID: LIB3083-055-Q1-L1-E5.pep
YIIYILFCSNIFRTKQLFVTRVIQAFASGYILGTIYLNVGNDQ

SEQ ID NO: 88658 - protein, 83 aa, Gossypium hirsutum
  Clone ID: LIB3083-055-Q1-L1-E6.pep
YAELHSFHTCAGVWFQTLIMVSKHNPSGNKEPLPLSICAPTDTASSLLHSVYIASHWFYCKPYTKSLDVTHHAYCNLLTHTRL

SEQ ID NO: 88659 - protein, 43 aa, Gossypium hirsutum
  Clone ID: LIB3083-055-Q1-L1-E8.pep
WDGEIVNIGNYAGNGADELGDMCVNGNRMVRLGMFVRGVSSLF

SEQ ID NO: 88660 - protein, 78 aa, Gossypium hirsutum
  Clone ID: LIB3083-055-Q1-L1-E9.pep
FNIYKLFLQLILTDRLTITTIPPYQPLNSLLPILSTTSHPLPSFKPLPSSFTISSPTNSPYIYTYTPSYPISLTFTIS

SEQ ID NO: 88661 - protein, 53 aa, Gossypium hirsutum
  Clone ID: LIB3083-055-Q1-L1-F10.pep
IIHVSFDNYMVCRQQRVIVKHGFIVIFKWISYFSMHYPLLNSPDGSTNSRPVR

SEQ ID NO: 88662 - protein, 57 aa, Gossypium hirsutum
  Clone ID: LIB3083-055-Q1-L1-F11.pep
LKLFLYKPQFLTSLYPTRSTRYSIMRLAILSQIASTSLPNSTPSLSTITTPTWTPTY

SEQ ID NO: 88663 - protein, 121 aa, Gossypium hirsutum
  unsure (1)..(121): unsure at all Xaa locations
  Clone ID: LIB3083-055-Q1-L1-F12.pep
NDPPSAVSSIDGRQYTRGDKPGLETVMAEWTNLQHLFYGQYESIVNSEVLWKLLQHGINADDKRVQDIRVKADEIYSMDEGIRTRLSQPKNHXRWTNITLLLKILKLIINEICNIIEANAR

SEQ ID NO: 88664 - protein, 74 aa, Gossypium hirsutum
  Clone ID: LIB3083-055-Q1-L1-F3.pep
TNRSHPYKIHHDFIPYTHTFLPHGNIFSNYFISHINIIYHNITPHIYYNFIYKLHYLFIPSYQTTYLYLLSIFT

SEQ ID NO: 88665 - protein, 49 aa, Gossypium hirsutum
  Clone ID: LIB3083-055-Q1-L1-F9.pep
PHYNLHKYTLNNTINHQFFAILTKQNKHSLLQSQKNNLISFSLKLQNSP

SEQ ID NO: 88666 - protein, 49 aa, Gossypium hirsutum
  Clone ID: LIB3083-055-Q1-L1-G2.pep
DQMKVDKEALDMISVIGMDDIQGLVKVDPVAVTVLKIGLGIGVGSGRRF

SEQ ID NO: 88667 - protein, 70 aa, Gossypium hirsutum
  Clone ID: LIB3083-055-Q1-L1-G7.pep
KVDTLQAKPSVMLYDKEELLNAAVCRVDALEAELIVAKKALHDALMRQEELLAYLDRQEEAKLRKNKFCW

SEQ ID NO: 88668 - protein, 63 aa, Gossypium hirsutum
  Clone ID: LIB3083-055-Q1-L1-H3.pep
MFSSDAHLSLTNMFNTPHMHLMHDGLMHISIIYARPTCQPHRPRKLTFDILEHYTCQFTLHEI

SEQ ID NO: 88669 - protein, 89 aa, Gossypium hirsutum
  unsure (1)..(89): unsure at all Xaa locations
  Clone ID: LIB3083-055-Q1-L1-H4.pep
IASSVAHLARSNMFNTPHMLLMHNGLWDFYISSTNTTCQPLIPRNSAYDNVEXYLCEYSFAKYYTLTIFDGVLKCLLTHTSYECMDLLK

SEQ ID NO: 88670 - protein, 86 aa, Gossypium hirsutum
  Clone ID: LIB3083-055-Q1-L1-H6.pep
SLPYHQLSSKASRNLFSKPESAHKQRSTSIFDSLLIDPDFVRTKKLLPSAIHFKAEAFTSGGGEVGTTGEVVSPRWGRISIAAVGA

SEQ ID NO: 88671 - protein, 148 aa, Gossypium hirsutum
  unsure (1)..(148): unsure at all Xaa locations
  Clone ID: LIB3083-056-Q1-L1-A10.pep
KLRALQFSPEDEVEGEIIFXXHRLLGNAVSRNHVTDNLVSRVAKSLPQEVEASRIKIWDTMLVNRYLYELREAKKQGRKERRHKEAQAVLAAATAAVAASSRISSRKDGLEDSSHQENVLKLNAFVGRAGINSQTRAKDALSRNAVSR

SEQ ID NO: 88672 - protein, 79 aa, Gossypium hirsutum
  Clone ID: LIB3083-056-Q1-L1-B1.pep
LTVRSTRSSSALSSAQMDASGTDSHAYGGASSNSRRHRILSNSNIIQVTVSSQLEYSCLLRTSRSIHQESDPLITNPNL

SEQ ID NO: 88673 - protein, 49 aa, Gossypium hirsutum
  unsure (1)..(49): unsure at all Xaa locations
  Clone ID: LIB3083-056-Q1-L1-C3.pep
FDIMNLKRVFVHWYVXRDCNKVNFRKSVXDMSAFEKDYVKVGDEGEDYE

SEQ ID NO: 88674 - protein, 132 aa, Gossypium hirsutum
  unsure (1)..(132): unsure at all Xaa locations
  Clone ID: LIB3083-056-Q1-L1-C9.pep
PNSYGSMTKIVDRLDSDVQKAANLQITVQDLKKKVQIIETGKKGKGIEYGTANEQIEEAEEAITKLFDVNHKLMTHVEDGFWTIDGKYALXPYENGNMRIRKVSEHARRGFEKIERLQLYVHNIQIFLLNHD

SEQ ID NO: 88675 - protein, 74 aa, Gossypium hirsutum
  unsure (1)..(74): unsure at all Xaa locations
  Clone ID: LIB3083-056-Q1-L1-D10.pep
YNNMYMIIFDTRFESRDHALFVKLNGLNGXRSILPQSFDYNYGDLIPILTPFLRGYLKLCNEVKEITLHLFKDQ

SEQ ID NO: 88676 - protein, 102 aa, Gossypium hirsutum
  unsure (1)..(102): unsure at all Xaa locations
  Clone ID: LIB3083-056-Q1-L1-D5.pep
GSNDKHTLSDTEAKQLIGRLIYAELSXTELEFTIVRPFNLIAPNIDFIPSIDCPSEXFPRDTACSINYLLHPEPLKLNNCGQIXKTLIFIKESLEAQLLTIE

SEQ ID NO: 88677 - protein, 71 aa, Gossypium hirsutum
  Clone ID: LIB3083-056-Q1-L1-D7.pep
MGSVCCCLRPEDFEDYINPNSNVYRNCVCLSCFVQNFVHVYTTLFPKGELRSGPSSIYGTRSIISSASLDN

SEQ ID NO: 88678 - protein, 62 aa, Gossypium hirsutum
  Clone ID: LIB3083-056-Q1-L1-E12.pep
ARILHDNKYTNILYLPTVDLTQEHQDQLSQVNLTVINNHIYKILFWSAIPFFPHLYSNPIYY

SEQ ID NO: 88679 - protein, 63 aa, Gossypium hirsutum
  Clone ID: LIB3083-056-Q1-L1-E2.pep
WMSMNRNDQLQYKVDNMLLIELEHARVNIGSHVISEFHVASCGWATYAGNVMLTAGISRLQAC

SEQ ID NO: 88680 - protein, 82 aa, Gossypium hirsutum
  unsure (1)..(82): unsure at all Xaa locations
  Clone ID: LIB3083-056-Q1-L1-E3.pep
MASSNSLNLACVTLLCIHLITPLSHSSETCCQFTNYLTPCIGYXQDNETGTIPPICCGDIKSFNSVSHTTPDLLAICICIKY

SEQ ID NO: 88681 - protein, 89 aa, Gossypium hirsutum
  Clone ID: LIB3083-056-Q1-L1-E5.pep
GPRAPFYTTSNNDKPLPKPPMYEPPKKPPMYEPKPPKPPFYTPSKKEKPYPNPSMYQPPNYPPIYEPKPPKPPIYAPPKEEKPIPKPPF

SEQ ID NO: 88682 - protein, 81 aa, Gossypium hirsutum
  Clone ID: LIB3083-056-Q1-L1-E8.pep
FSVRIAGVFYMHDDRGRYNVGGRHRRTRGGRNLWEFKDDRKWVHDKFEEMTLQEKHYEVGRSSIGTYRAHSNKSWTTSWLS

SEQ ID NO: 88683 - protein, 107 aa, Gossypium hirsutum
  unsure (1)..(107): unsure at all Xaa locations
  Clone ID: LIB3083-056-Q1-L1-F10.pep
MPVSGIALWSPAETGQADALKAALAYFISTLIFDFADEGSAIAFNKLTDDGSSTPAXLVAAVLANTLTLLXAVSILANNFCGHLNSVVTFXDFRGGHITLVRSIMYW

SEQ ID NO: 88684 - protein, 92 aa, Gossypium hirsutum
  Clone ID: LIB3083-056-Q1-L1-F3.pep
VLTEQSSTSGDHSPVAANNKTQYSSLTVMKKRHDSDNPRFTQLNQISEHTTYNNRPNIIMTHSDRTYQLLLTPNSKFQTETINIWNKLAIYE

SEQ ID NO: 88685 - protein, 160 aa, Gossypium hirsutum
  Clone ID: LIB3083-056-Q1-L1-F6.pep
ALQILQAHTDEVWVLRFSHNGKYLASSSNDQSAIIWEVYETGVSLKHKLSGHQKPLSSVSWSPDDRQLLTCGAEEVVRRWDVSSGECLHVYEKTGLGMVSCGWSPDGKWIFSGLNDKSICMWELDGKELECWKGQRTLKISDLEITGDGKQIISICREQQ

SEQ ID NO: 88686 - protein, 62 aa, Gossypium hirsutum
  Clone ID: LIB3083-056-Q1-L1-F7.pep
RDNENFTNTNEYYVLYKTQIVFDYGSPFPHLLNTTPHSTTKTSVVYKSIITKTYKLYKFSTH

SEQ ID NO: 88687 - protein, 120 aa, Gossypium hirsutum
  unsure (1)..(120): unsure at all Xaa locations
  Clone ID: LIB3083-056-Q1-L1-G11.pep
IFLRFVREAALSGAIVGHNALMENAWHDTEMLAEAELHAHAHGRPTLKNLVDACNKVLHNEVEHTPSAKTDATAAFLASLDEPKLTRXSEAWKKPPIEILPSDMSALSDSITVYTKPVPL

SEQ ID NO: 88688 - protein, 73 aa, Gossypium hirsutum
  Clone ID: LIB3083-056-Q1-L1-G3.pep
YVTTYTTNLCNRFETIVSTCMKHQLKPYELLHAQPIHNMSDNGLTWNNQDMLTFRQWLFMFNTGRIFDFTLKS

SEQ ID NO: 88689 - protein, 38 aa, Gossypium hirsutum
  Clone ID: LIB3083-056-Q1-L1-G8.pep
STNSPYTIVNTTPIHFLHSTTSPMKLYPTQTFYVYDHN

SEQ ID NO: 88690 - protein, 34 aa, Gossypium hirsutum
  Clone ID: LIB3083-056-Q1-L1-H10.pep
QPYLNNIIAYGSIKTSKQNKSNPYNILNTIFKND

SEQ ID NO: 88691 - protein, 119 aa, Gossypium hirsutum
  unsure (1)..(119): unsure at all Xaa locations
  Clone ID: LIB3083-056-Q1-L1-H12.pep
GPRLKSFSDWLLKTMGSYSVEAIFSAATREYAPLVEELWKHAFIQETYIRRNELEMLPSVASYYLERXMRLLKTDYEPSDLDILYAECVTSSNGLACVDFSIPQSSPDENIGTAEQHDS

SEQ ID NO: 88692 - protein, 116 aa, Gossypium hirsutum
  unsure (1)..(116): unsure at all Xaa locations
  Clone ID: LIB3083-056-Q1-L1-H3.pep
KGMALTKVPQIKNLIIIEGAKFKNXTVAENTYSSPIHCPSLHFLGENDFLKPYGLELLESCVDPVVIHHPKGLTIPRFDESGLEMMLSFLKRVEKDILSEQEKDLCYKEEENAVEA

SEQ ID NO: 88693 - protein, 39 aa, Gossypium hirsutum
  Clone ID: LIB3083-056-Q1-L1-H4.pep
SLFITKLNDGARVKINSNKFILNKISLFNYLNQMVWINT

SEQ ID NO: 88694 - protein, 80 aa, Gossypium hirsutum
  Clone ID: LIB3083-056-Q1-L1-H5.pep
MDEEYDVIVLRTSLKECILSGLLFVDGLKALHMDRNDYYGGESTSLNLVQLLKHFTGDEKPSEKLGASREYNGDMIPLVM

SEQ ID NO: 88695 - protein, 67 aa, Gossypium hirsutum
  Clone ID: LIB3083-056-Q1-L1-H9.pep
TIYYLIYNKCLKLPSYYLYYNNHCNLIDIASFIHYFHKSYYYLPSTYTIFFHYIQQIPCYLIPFSFL

SEQ ID NO: 88696 - protein, 101 aa, Gossypium hirsutum
  unsure (1)..(101): unsure at all Xaa locations
  Clone ID: LIB3083-057-Q1-L1-A11.pep
RDQYQSNFSGGNLNITXSFLIQTXRDSIXKMAHFGFPIMGTCXIVEMVNDSQSKISXYEXGDXXGKALQKKTXEPERHISKHRGLFHYXMXLNNXXVGFRH

SEQ ID NO: 88697 - protein, 106 aa, Gossypium hirsutum
  Clone ID: LIB3083-057-Q1-L1-A9.pep
MVFLQKQFYPLCIIFQMTMNTTSPKVQLLYDLCKTTFSNSGLSSSASSQSIQILCSLLDTFTPADVGLKEGNPIDDEGHGRVARCTQPITYLHIHECDGFTMCIFC

SEQ ID NO: 88698 - protein, 51 aa, Gossypium hirsutum
  unsure (1)..(51): unsure at all Xaa locations
  Clone ID: LIB3083-057-Q1-L1-B10.pep
GWACQGRAQFSCNQTRHDYFRTDQSENLLAKRISPCVHADSFXTYHSFITS

SEQ ID NO: 88699 - protein, 45 aa, Gossypium hirsutum
  Clone ID: LIB3083-057-Q1-L1-E10.pep
MLSEGGWNTTPMKINSLTTLYIYYSINYFDSAHNTSSSIQQQSET

SEQ ID NO: 88700 - protein, 74 aa, Gossypium hirsutum
  unsure (1)..(74): unsure at all Xaa locations
  Clone ID: LIB3083-057-Q1-L1-E12.pep
LKPENWLRDSNXSEEGRIWGYTTHMRDRHILLTQVGNPHYAVPEIVSAELYTLPQKDARRCGVIXYALLRGTLS

SEQ ID NO: 88701 - protein, 77 aa, Gossypium hirsutum
  Clone ID: LIB3083-057-Q1-L1-E9.pep
PHMIRNSTIHMRLTQLSYNRYISHYTDATNVPFTGPSSATSENYPTTYSYIKLLLHTSNVNIVPYLQSTKSQPLSYN

SEQ ID NO: 88702 - protein, 75 aa, Gossypium hirsutum
  unsure (1)..(75): unsure at all Xaa locations
  Clone ID: LIB3083-058-Q1-L1-B7.pep
YKYLKKKTIIFKEYFNLTYYIXALQRPQELKTPAYHPXYYKKAISVAFNKSPPSYXPYSKLLQYSFIKKDLTTKD

SEQ ID NO: 88703 - protein, 90 aa, Gossypium hirsutum
  unsure (1)..(90): unsure at all Xaa locations
  Clone ID: LIB3083-058-Q1-L1-C7.pep
XHLKHYTKKPCLNYCCIKVPPSFLGIIDTRRRCLKLILISYHGCYQLNLGATTSSKPNHSSSTIIYYFQCLLLCVPVYQHIEIVSVSCKC

SEQ ID NO: 88704 - protein, 38 aa, Gossypium hirsutum
  unsure (1)..(38): unsure at all Xaa locations
  Clone ID: LIB3083-058-Q1-L1-D9.pep
NFXISPTFKHSLHLNIQLSHYQXSTKLSXXNHYFHHFS

SEQ ID NO: 88705 - protein, 114 aa, Gossypium hirsutum
  Clone ID: LIB3083-058-Q1-L1-F8.pep
EIWFHQGGKGPNWMGGRIPDGGNQIGIQASNLHPNVNGVRSNQHQLSQQHQHQQPIFPKQTGVGYGAQIPLQSGGQLGSPGIRSGMHGIGDQGISNGLIQAGALQGGSMGMVGL

SEQ ID NO: 88706 - protein, 30 aa, Gossypium hirsutum
  Clone ID: LIB3083-059-Q1-L1-A3.pep
NIPRLFLIVFPFCNKIPLINNFYFNLKFLK

SEQ ID NO: 88707 - protein, 118 aa, Gossypium hirsutum
  unsure (1)..(118): unsure at all Xaa locations
  Clone ID: LIB3083-059-Q1-L1-B11.pep
DGGNRRRLTLLEQISAVENGRDALAGLTLDAVLGNAKRPEQPPAQNRTLLEIIRDDDSNKEKKSWKALRDKLRLKRLAVSARTSSVRIPASDVIVNDNNRSQFSRHXSFRFTRLTRLV

SEQ ID NO: 88708 - protein, 97 aa, Gossypium hirsutum
  Clone ID: LIB3083-059-Q1-L1-B8.pep
YDTRNTYLLSSARDGTTGTRKFPYHESNFIKFPVQPSCCATAKFLSCWILKLLISLVCTPGILKLLVGFASLRVFEAGEATVRPGGGLGIFLFLSSG

SEQ ID NO: 88709 - protein, 59 aa, Gossypium hirsutum
  unsure (1)..(59): unsure at all Xaa locations
  Clone ID: LIB3083-059-Q1-L1-D9.pep
KKKXXXXXICKYPYIXLMPKILPGSLFFFPLELISYFINLSTTYTSIIYYTDFNPHSYL

SEQ ID NO: 88710 - protein, 80 aa, Gossypium hirsutum
  Clone ID: LIB3083-060-Q1-L1-A10.pep
KANIVKLNKYIPIKIHIPSKAKLFSFPSHFTKRNFRLFFILAFCVISGAETLKPSIFTDPFHISTRPDLGPIPFLLLQMK

SEQ ID NO: 88711 - protein, 35 aa, Gossypium hirsutum
  Clone ID: LIB3083-060-Q1-L1-A2.pep
HPFFLFQLLLITVSLMIGSHTFYSSARPIFQSQTC

SEQ ID NO: 88712 - protein, 64 aa, Gossypium hirsutum
  unsure (1)..(64): unsure at all Xaa locations
  Clone ID: LIB3083-060-Q1-L1-A3.pep
SVRQWYSIWRSRHCSQRLKSTWSVSGSQLCEANPILEIVAEDSSTIPVYSTGEXSEISSHKSRA

SEQ ID NO: 88713 - protein, 68 aa, Gossypium hirsutum
  Clone ID: LIB3083-060-Q1-L1-B10.pep
ISTFSKYNRTIRATRTIILETLSNAHNHYPYEATFIFRRDLHRQHLCQSNIRTPTLLSSTHPLPPPQS

SEQ ID NO: 88714 - protein, 115 aa, Gossypium hirsutum
  unsure (1)..(115): unsure at all Xaa locations
  Clone ID: LIB3083-060-Q1-L1-B11.pep
MCPQFPYTMREILHIQGGQCGNHIRSKFXKALCSKHAINSTALYGADSELXLDRINVYYNEPSFCPFVPRTASIYLEPLTIYRVTSGPYGQIFLPDNFVFRQSVAQNNCANAHYT

SEQ ID NO: 88715 - protein, 106 aa, Gossypium hirsutum
  Clone ID: LIB3083-060-Q1-L1-C10.pep
VFGSFPSDIQILQKPEGLLNGNLFEKSNLDLSKPANSSAYAFQHQSERGKQQQHHVGNYRETLRPPPGFSGKSRGGRNRDFGARRNHLEHNVDKLRAEYSQLSNDN

SEQ ID NO: 88716 - protein, 39 aa, Gossypium hirsutum
  Clone ID: LIB3083-060-Q1-L1-C2.pep
KEKAQLYLFKTNVNDFEKLLPLNSIKEPSLQSNNFKGIY

SEQ ID NO: 88717 - protein, 80 aa, Gossypium hirsutum
  Clone ID: LIB3083-060-Q1-L1-C4.pep
VTLSRIESSSFIFRTESYHDQKHQIAPIYMLCCKEYIFVGLSWSMYILVKVELTIDVSCKPLEKGENGEMLIFVTHEIIV

SEQ ID NO: 88718 - protein, 50 aa, Gossypium hirsutum
  Clone ID: LIB3083-060-Q1-L1-C6.pep
TLKKFLYNGRLENLSKVGLKTKITNYKKMKNGIKATRNENCNASKTHLEI

SEQ ID NO: 88719 - protein, 58 aa, Gossypium hirsutum
  Clone ID: LIB3083-060-Q1-L1-C8.pep
LLENFKTKSLRGTVIYKGFGILSLIMAFCSMTCCEKGMARLIPKGPKPPTFQMPNLVE

SEQ ID NO: 88720 - protein, 77 aa, Gossypium hirsutum
  Clone ID: LIB3083-060-Q1-L1-D1.pep
TSSSDTMTKLSNPNPISSLSSSSKPRSSSSLKCFFVFPTTPTFSSNLVPSYTSSSINTHPFKTSLFISCSLSHRNPT

SEQ ID NO: 88721 - protein, 53 aa, Gossypium hirsutum
  Clone ID: LIB3083-060-Q1-L1-D3.pep
IRLLVRLWMIMCMIVILIGCGQVSRDSSGMGFKRLAFCVIFLVWVIVHSLYVN

SEQ ID NO: 88722 - protein, 51 aa, Gossypium hirsutum
  Clone ID: LIB3083-060-Q1-L1-D5.pep
QPRVMNAKTKCDMWYQRSVDNLLCVCSCDSNAFYTWIGIRLRHLLCCLSFH

SEQ ID NO: 88723 - protein, 62 aa, Gossypium hirsutum
  Clone ID: LIB3083-060-Q1-L1-E1.pep
CAKRAPSKQQETKSQGTTRQAPANVSKTQMSRTLKASGNAKNNKVTNHQPKLTKANPNSSNH

SEQ ID NO: 88724 - protein, 59 aa, Gossypium hirsutum
  Clone ID: LIB3083-060-Q1-L1-E10.pep
VDCAELIIGLVIKVICVSFLDSYIGGSVFVVMLLQGCYEWLIKVYLWHREYFRVLKIYI

SEQ ID NO: 88725 - protein, 84 aa, Gossypium hirsutum
  unsure (1)..(84): unsure at all Xaa locations
  Clone ID: LIB3083-060-Q1-L1-E11.pep
NIYSFLRPESKPEAISRTFNVDKYLLVVLQRQIMKEQDEDLYKLYETILSTNHISLSVNEXLDLQTQLIHYLDQHVDVSYSLTA

SEQ ID NO: 88726 - protein, 63 aa, Gossypium hirsutum
  Clone ID: LIB3083-060-Q1-L1-E5.pep
DKSNISFNIIHNPYNGNQYDHIITQFKPTLLPPLITLISSLLSKLLHTTINTTYNLPKYPFTL

SEQ ID NO: 88727 - protein, 60 aa, Gossypium hirsutum
  Clone ID: LIB3083-060-Q1-L1-E6.pep
FTWFRVFAYQNTLFQAEMSNNLDPFFSLRFHKCSKELSWGKINEKKRPAEWFGLKSLHVR

SEQ ID NO: 88728 - protein, 144 aa, Gossypium hirsutum
  unsure (1)..(144): unsure at all Xaa locations
  Clone ID: LIB3083-060-Q1-L1-F1.pep
CVVRDSARGIMQTVLQLIMLIFMPGKTTLLFVIRAKTNTPLEYLEPILREDIQKIWNVVSKPAAHKDTPLSEFFNVEVTALSSYEEKEELFKEQVAQLMQRFFNSISPGGLAGDRRGVVPAYXFSFSAQQILRVIKKNKDLDLS

SEQ ID NO: 88729 - protein, 70 aa, Gossypium hirsutum
  Clone ID: LIB3083-060-Q1-L1-F2.pep
RDIKVKKNRKKREDRGIRRIEGRAKNNGKEKAGRRGQSSLATARHFVTCVESCHPEILPLFLILFLLELN

SEQ ID NO: 88730 - protein, 52 aa, Gossypium hirsutum
  Clone ID: LIB3083-060-Q1-L1-F5.pep
MLRIFVVELDGRSYRGKFCRTHLALPDDLVSRSFHCRRWKAYLFNNACNIPR

SEQ ID NO: 88731 - protein, 56 aa, Gossypium hirsutum
  Clone ID: LIB3083-060-Q1-L1-F8.pep
SRPALHGFCTSNIQHFKPISKNPSKNGLIAKLKMLHPSSLTNIHTVKRTHAIRPYN

SEQ ID NO: 88732 - protein, 49 aa, Gossypium hirsutum
  Clone ID: LIB3083-060-Q1-L1-G1.pep
EEKRASFTYLCSYVFSLCSNEFMKSGLIRFARSSRRSIGLPVMYVEKLI

SEQ ID NO: 88733 - protein, 92 aa, Gossypium hirsutum
  unsure (1)..(92): unsure at all Xaa locations
  Clone ID: LIB3083-060-Q1-L1-G10.pep
KTFSTSFQCLLKRQVANLSAWXYPFNAAGVNITFMIIQILDLDAFKPMTFIRSVFLHISSDNVSTFYLLYCVSFAFMHTQWLYKNATYMESN

SEQ ID NO: 88734 - protein, 35 aa, Gossypium hirsutum
  Clone ID: LIB3083-060-Q1-L1-G8.pep
QIEYYSIRKQSMIMIIVDSSNSPWSFSPLVTTIAY

SEQ ID NO: 88735 - protein, 104 aa, Gossypium hirsutum
  unsure (1)..(104): unsure at all Xaa locations
  Clone ID: LIB3083-060-Q1-L1-H1.pep
FVSKINLLVSTIGXAPGACIETIYVLVFIFYAPKTEKARILGLFACVLTVFSAVALISLFALHGNGRKLXCGLAATIFSIIMYASPLSIMRLVIKTKSVEFMPF

SEQ ID NO: 88736 - protein, 46 aa, Gossypium hirsutum
  unsure (1)..(46): unsure at all Xaa locations
  Clone ID: LIB3083-060-Q1-L1-H11.pep
RPFWCFFSFLGVVFSFILRSDRGIYKKPLSLSFCVKELRKGKXWLV

SEQ ID NO: 88737 - protein, 80 aa, Gossypium hirsutum
  unsure (1)..(80): unsure at all Xaa locations
  Clone ID: LIB3083-060-Q1-L1-H3.pep
CFXXLGKQHLHWNHLVQLTRHFLTYIKSLIIHHYSHLHNLQLDNYSILPPFYSNYCYSHCNSTHFTDLYPGLRDFSDSIL

SEQ ID NO: 88738 - protein, 62 aa, Gossypium hirsutum
  unsure (1)..(62): unsure at all Xaa locations
  Clone ID: LIB3083-060-Q1-L1-H8.pep
FPTVHRGLPXIPVKINSIIKLRKPHFQMQKLKLVYFHRYTNIILLQNPNSPRKTTGFDSMRI

SEQ ID NO: 88739 - protein, 85 aa, Gossypium hirsutum
  Clone ID: LIB3083-061-Q1-L1-A11.pep
LVAFVGQLASCERKLEEMGCWYPVMYDPDTEVFIYDFVTHEWIQGKDMPSKRSFFVIMACGCQIFVAVGHDQNKIVSITAWVYHL

SEQ ID NO: 88740 - protein, 113 aa, Gossypium hirsutum
  Clone ID: LIB3083-061-Q1-L1-A12.pep
EDIARQSLSNNWLKYGAKGHLLNAGICQLCKGDVAITNALQRYQELDPTFSGTREYKFLADIASSIDEEDVTKFTDVVKGIDSMSPLDSWKTTLLLRVKEKLKAKEMEEDDLT

SEQ ID NO: 88741 - protein, 41 aa, Gossypium hirsutum
  Clone ID: LIB3083-061-Q1-L1-A9.pep
FPSQIWGLSLENPYPIPFIKKETESNRLFDSTLFLNNTRSS

SEQ ID NO: 88742 - protein, 53 aa, Gossypium hirsutum
  Clone ID: LIB3083-061-Q1-L1-B11.pep
KLGTNVPPPARRRETSTLHLSDEYLSFWYTCKKQLEKDEEVYMHRSEKAFCNF

SEQ ID NO: 88743 - protein, 77 aa, Gossypium hirsutum
  Clone ID: LIB3083-061-Q1-L1-B12.pep
LNMVYYINKRLDNDEEIYMHIRENAFCSTDCYTEHILPYDDMHKTCNNSSSDRSSELINDQHVSLMPMSINMSRTIA

SEQ ID NO: 88744 - protein, 50 aa, Gossypium hirsutum
  Clone ID: LIB3083-061-Q1-L1-C11.pep
PNLTAYKNKIPQPSPFNISKMKLLFFCFLILLSSAFYTPIAIHVPDAHST

SEQ ID NO: 88745 - protein, 39 aa, Gossypium hirsutum
  Clone ID: LIB3083-061-Q1-L1-C12.pep
LLSSHFVCYYCAPFLTSLQTSHILSSFTTLLLYYSISFP

SEQ ID NO: 88746 - protein, 32 aa, Gossypium hirsutum
  Clone ID: LIB3083-061-Q1-L1-D10.pep
IYMLQLFLFTNHIMTFSTSFISPFYTTLNSLH

SEQ ID NO: 88747 - protein, 53 aa, Gossypium hirsutum
  Clone ID: LIB3083-061-Q1-L1-E11.pep
TLHTWILPLTYTTFFSNSLYIISHYPIHTLTTSLSHPYLLNYINPNQYPPLNL

SEQ ID NO: 88748 - protein, 58 aa, Gossypium hirsutum
  Clone ID: LIB3083-061-Q1-L1-G11.pep
SPLKIALFSLGKMCAYPNCRQFLRSSELFPVIERFRQSPESSIVKLAVAIVSKVTDAS

SEQ ID NO: 88749 - protein, 64 aa, Gossypium hirsutum
  Clone ID: LIB3083-061-Q1-L1-G9.pep
FHGIIKGNSLQHNQNYPFVLLVLHLITTLLSQPQTITPLSKLLYPTHTDLINYRLRNYSSLLPH

SEQ ID NO: 88750 - protein, 138 aa, Gossypium hirsutum
  Clone ID: LIB3083-061-Q1-L1-H11.pep
AGDEDDFIEVRGKRQVLNDRREQREKEIKAKSRVAKPPRKPRSIPQSSNRNSASASGVMNNVRSDLDCTEGRNLANSELSTAFSATIVSQPLAPIGTTATKTDAQADIRTQAVKSLHTSSLQATSSGGQSLVSGLMFE

SEQ ID NO: 88751 - protein, 91 aa, Gossypium hirsutum
  Clone ID: LIB3083-062-Q1-L1-A11.pep
SGLIVIINLLALRYFPVLCLSQDFYFFYFVLQWPGSYCYTKHICWYPNTVKPSADFRIHGLWPNFNNGCYPFNLDPNQSFDKSQISSLIGN

SEQ ID NO: 88752 - protein, 48 aa, Gossypium hirsutum
  Clone ID: LIB3083-062-Q1-L1-A9.pep
NITTSNELEWKYLANFYGASKSPEKPHEFLKLFSITQHVADTNSNNGS

SEQ ID NO: 88753 - protein, 49 aa, Gossypium hirsutum
  Clone ID: LIB3083-062-Q1-L1-B11.pep
EETLPGGCTDNVHKAISRNLGLPLSLINSFALPISFSLNNVIMPSNPLL

SEQ ID NO: 88754 - protein, 43 aa, Gossypium hirsutum
  Clone ID: LIB3083-062-Q1-L1-B9.pep
HHYILSMPLNCVAPKPEHACNGLVQSETSKSQKKASLAFPIQH

SEQ ID NO: 88755 - protein, 85 aa, Gossypium hirsutum
  unsure (1)..(85): unsure at all Xaa locations
  Clone ID: LIB3083-062-Q1-L1-D10.pep
MTTEKATKPTSLPSYPQLIMNAIESFYHKNYSNXTLLSKFIQSKYAYLNAAHTSLLSHQLIGIKHTRELVLLYNNYIRTHPNSPP

SEQ ID NO: 88756 - protein, 75 aa, Gossypium hirsutum
  unsure (1)..(75): unsure at all Xaa locations
  Clone ID: LIB3083-062-Q1-L1-D12.pep
NTYRTFCKRRNGVLNKAYYLEFLCHAQIALINFYTRDRLYEYYNNNIISTILRYNMACYESXNTNTVTEINAQYY

SEQ ID NO: 88757 - protein, 126 aa, Gossypium hirsutum
  Clone ID: LIB3083-062-Q1-L1-F12.pep
EGLKLNHEVTDSGSTVKLKDDMDEENGWQLDSGDLLSNAEGLSQSVSKNHLPSNMPELGNTDGVPDVNIGMPDAHDQLTTTVSEKSKSTGSCRSLVSNDVKRTPQLTSDGSSDSDSDSESYSGSES

SEQ ID NO: 88758 - protein, 42 aa, Gossypium hirsutum
  Clone ID: LIB3083-062-Q1-L1-H12.pep
GSLIPVDAQLRKMSLCFSIPQVSVLRRLAENFYLFSEEISST

SEQ ID NO: 88759 - protein, 79 aa, Gossypium hirsutum
  Clone ID: LIB3083-063-Q1-L1-B7.pep
LEKLLFMFCSWGFIVSIHSLANQTSCLDLEPHSSLTHFTAKHNLGCSAAWILDMILLSFLQTRENKIDKSNRVNILFGT

SEQ ID NO: 88760 - protein, 55 aa, Gossypium hirsutum
  unsure (1)..(55): unsure at all Xaa locations
  Clone ID: LIB3083-063-Q1-L1-C1.pep
VGYLVPYSXISLYXXGPPHFFXLNXLSXXKNXQRXSHHLXAXSNYLSXNDXXXNF

SEQ ID NO: 88761 - protein, 72 aa, Gossypium hirsutum
  Clone ID: LIB3083-063-Q1-L1-C10.pep
MSSSSATHSSHWFLPPPLRRQPLPSPIQTLSRTTLQHKMQPKKEISIQREKFASHLQLEMDPNARVSKSVEI

SEQ ID NO: 88762 - protein, 103 aa, Gossypium hirsutum
  Clone ID: LIB3083-063-Q1-L1-C12.pep
DTHKMICSEANKGELGCSDSWASALIAELDQFKNEKTVNRSLPGSSIEIDIMDDFLEMEQLAALPATKSKNQCLESKATAKVSNNDGDNSLLKAELEAMIHRT

SEQ ID NO: 88763 - protein, 61 aa, Gossypium hirsutum
  unsure (1)..(61): unsure at all Xaa locations
  Clone ID: LIB3083-063-Q1-L1-C2.pep
MAAMASDSEDSYRSSGHGKLNNKVXSFRPSTPPPTSVNYRTAKRRKGIPHRAPMGGLIIQY

SEQ ID NO: 88764 - protein, 42 aa, Gossypium hirsutum
  unsure (1)..(42): unsure at all Xaa locations
  Clone ID: LIB3083-063-Q1-L1-D11.pep
SXQRQCGSNHISHPRRRRRRRRRRSCVINRGFSFEEYIGNDF

SEQ ID NO: 88765 - protein, 42 aa, Gossypium hirsutum
  Clone ID: LIB3083-063-Q1-L1-D2.pep
RDLYADFLFLEQIMVYVLRVVMQSVSAPSNGMYIALHGRQCR

SEQ ID NO: 88766 - protein, 74 aa, Gossypium hirsutum
  unsure (1)..(74): unsure at all Xaa locations
  Clone ID: LIB3083-063-Q1-L1-D9.pep
TPTPWKFSQQRHNSNGQAGNXSSNNIGRNHSSSYSAAGFTSHDSYSQSNFQWGPFSKTGGTSTATQAASVVQQA

SEQ ID NO: 88767 - protein, 53 aa, Gossypium hirsutum
  unsure (1)..(53): unsure at all Xaa locations
  Clone ID: LIB3083-063-Q1-L1-E12.pep
PYKKVFCFSWGKNCIKPFYGITGVIFIFLKKKNKPXPXXXXXXEXXKXEKKKK

SEQ ID NO: 88768 - protein, 62 aa, Gossypium hirsutum
  Clone ID: LIB3083-063-Q1-L1-E4.pep
PQDKMQISNSKTEIVYKSEQANAILNHAWESELSGSALPWWNLTTMHVILSALPRVNAVSVN

SEQ ID NO: 88769 - protein, 73 aa, Gossypium hirsutum
  unsure (1)..(73): unsure at all Xaa locations
  Clone ID: LIB3083-063-Q1-L1-H12.pep
FRLNDRPNIFTIDDKGRQIVLSSQFCRDTIKGQFFIPKISNIHIYIVYVCIHIYRLEASPFFSSMFIXXCSKV

SEQ ID NO: 88770 - protein, 56 aa, Gossypium hirsutum
  Clone ID: LIB3083-063-Q1-L1-H3.pep
CECIISGILTVLFMMVRNKMERKGGKIVVKMVDCKKGKLFYWFLFIKVMLCIFCNN

SEQ ID NO: 88771 - protein, 103 aa, Gossypium hirsutum
  Clone ID: LIB3083-064-Q1-L1-A5.pep
LTTHSRVASKRLSIALSVLALIAFGSPAADSHTLYTVNILQDTALNYNYCVYDSHISTDYTVTTSMFLMASQPLETAASKCFCSRKVLIPTESRAWTHILFIV

SEQ ID NO: 88772 - protein, 123 aa, Gossypium hirsutum
  Clone ID: LIB3083-064-Q1-L1-B1.pep
GTRIYWSPSNKCGFHFPNGTQSGPSMSSGRKKNKELASDNSPEEKRRRHQGTSDTDVASTSKKHPKPKIKYKLKELIDEKPVETIVKVLKDRIDRKMKNDKMADMESVILVVRTMMANNASHL

SEQ ID NO: 88773 - protein, 110 aa, Gossypium hirsutum
  unsure (1)..(110): unsure at all Xaa locations
  Clone ID: LIB3083-064-Q1-L1-B7.pep
TRKVHSLRIFHGKDHDRRSMAHDSSSSAHDTDYHNQSESYFKDQVYRIYGKXKPVHHVLCVAKPVDIYTEPNTMISARSLAXRTCDMTLXELLEYYLLTLMCHLVLLTVA

SEQ ID NO: 88774 - protein, 59 aa, Gossypium hirsutum
  Clone ID: LIB3083-064-Q1-L1-C11.pep
HSSSSPYYSYLVLGLGFLFSSSLMFIYLPFLSSTIFVYVEIHLVQDFISTTDPLVLVQL

SEQ ID NO: 88775 - protein, 116 aa, Gossypium hirsutum
  Clone ID: LIB3083-064-Q1-L1-C12.pep
MELMVQVISEEIVKPSSPTADRLRRYQLSFLDQLNASFYNALVYFYPKICDTEANKITVSNRLKHSISNALTYFYPLAGRITDDQLFVDCNDEGIPFLEVGVECQLSDVLNNPIPK

SEQ ID NO: 88776 - protein, 111 aa, Gossypium hirsutum
  Clone ID: LIB3083-064-Q1-L1-C5.pep
MYFFMEKVDMIIARLWAFLLRLTRLEKLLNRRLRERHMKEPKKDDEINPEADSEDLYVERIRLENMDLSIKKLVSKTTIQEPTFDRIIVVYRRASPKPNTDRGIYVKHFKN

SEQ ID NO: 88777 - protein, 66 aa, Gossypium hirsutum
  Clone ID: LIB3083-064-Q1-L1-C6.pep
LAPHSSPLPFPLSLLFIYLFYILWCYYDFSVFKKDRALGAKESKIGKLMELTVVAVVEVADECVLS

SEQ ID NO: 88778 - protein, 63 aa, Gossypium hirsutum
  Clone ID: LIB3083-064-Q1-L1-D10.pep
VLNYIFNRRLQSGASWCCWNMYSGMILGWHRIKGLINLVDTNYYCLEYTRLCVRMDLIENLTH

SEQ ID NO: 88779 - protein, 41 aa, Gossypium hirsutum
  Clone ID: LIB3083-064-Q1-L1-D4.pep
GSCYVCVDLLIPFGTDVLQLHSIYLADSLGSIFHPFSVHHI

SEQ ID NO: 88780 - protein, 56 aa, Gossypium hirsutum
  Clone ID: LIB3083-064-Q1-L1-D6.pep
AKGEFLASSSVSSSEHSVMMVPVKSNAPRTGQVRMNSLLKNTGHGSVPLFIFRWLF

SEQ ID NO: 88781 - protein, 76 aa, Gossypium hirsutum
  unsure (1)..(76): unsure at all Xaa locations
  Clone ID: LIB3083-064-Q1-L1-D9.pep
SALLCIAVAXFLGQAPTKSPTSTPSPPTPPSSTTATTTQATSTPTVTPSSGSISTATLLPFPVTSSPPPITTSSPI

SEQ ID NO: 88782 - protein, 92 aa, Gossypium hirsutum
  Clone ID: LIB3083-064-Q1-L1-E1.pep
SIDYLLSNRFGRKLMDSTQKTKPIRIKCDPSKPNSAWSWLERWMSVSLSKRPSTTELSIEQPEREKSDNCDFQVTTTVPESFPESNEPKLYV

SEQ ID NO: 88783 - protein, 56 aa, Gossypium hirsutum
  unsure (1)..(56): unsure at all Xaa locations
  Clone ID: LIB3083-064-Q1-L1-E10.pep
TWVMLMATLITIYHLIRLDYTYRNSYLMTVDLSYFSSKSLAKQLMTIXRRINYLTL

SEQ ID NO: 88784 - protein, 45 aa, Gossypium hirsutum
  Clone ID: LIB3083-064-Q1-L1-E9.pep
NDEVEEYEEELQERKNDKMKDIEAKEKKKGQTKKDEVQEDEDEEL

SEQ ID NO: 88785 - protein, 121 aa, Gossypium hirsutum
  unsure (1)..(121): unsure at all Xaa locations
  Clone ID: LIB3083-064-Q1-L1-F7.pep
HHPSIDIFEAFDXLLLVKRGGRVIYGGKLGVRSQILIDYFQSIDGIPFIPDGYNPATWMLEVTNPAIEHRTDRDFADIYQNSEQYREVEGSITRLSVPTPDSQPLKVSSIYSQDQLSQFLI

SEQ ID NO: 88786 - protein, 68 aa, Gossypium hirsutum
  Clone ID: LIB3083-064-Q1-L1-F9.pep
GLGRRISSRSTAVIGVRPSGSCNRQARRHAEADSPCDVVSYVKNQYADRVMVQMTRSRYCQNPLSSLS

SEQ ID NO: 88787 - protein, 61 aa, Gossypium hirsutum
  unsure (1)..(61): unsure at all Xaa locations
  Clone ID: LIB3083-064-Q1-L1-G11.pep
FIKNVKKGPFAEHSPLLXDDISAVPNWKKVNSAMLNMYQADVLEKVPSMRYFLFACLINWE

SEQ ID NO: 88788 - protein, 92 aa, Gossypium hirsutum
  Clone ID: LIB3083-064-Q1-L1-G4.pep
SYGGQGSYGGGNNYGTGGVSYGSDFGQSGVDGGNFNVGGSDSFATGGSTGYGGDSMGFGGGEHGYKGAYDGNDALNDNSRDEYESGDFVKRA

SEQ ID NO: 88789 - protein, 67 aa, Gossypium hirsutum
  Clone ID: LIB3083-064-Q1-L1-G8.pep
VSSQSSGWSSCRRNSLETYSVEEILAVVLFFYVEITRRSLKYSIAQPDLVLCYDSSIVSSSRLALCR

SEQ ID NO: 88790 - protein, 57 aa, Gossypium hirsutum
  Clone ID: LIB3083-064-Q1-L1-G9.pep
KVNMGPFAEHSPLLEDIGAVPNWKKVNSGMLKMYKAEVLEKVPIMQHFLFGWLIKWE

SEQ ID NO: 88791 - protein, 43 aa, Gossypium hirsutum
  Clone ID: LIB3083-064-Q1-L1-H7.pep
YLFIQLNSSKDNIKFSHTFNSYFIPHHINPQITVSHRTISLPT

SEQ ID NO: 88792 - protein, 51 aa, Gossypium hirsutum
  Clone ID: LIB3083-065-Q1-L1-A11.pep
IYAHCAMYVRETRGSFLFLEVLTKSRSILSKDSYRIANMQPKDNQFALLYD

SEQ ID NO: 88793 - protein, 44 aa, Gossypium hirsutum
  Clone ID: LIB3083-065-Q1-L1-A12.pep
PAVQSLVSSCTVSEIYTSVKSSGISVSTISTSLICSFSTSLLKP

SEQ ID NO: 88794 - protein, 81 aa, Gossypium hirsutum
  Clone ID: LIB3083-065-Q1-L1-A5.pep
FFFFYFNLYRFLGYIIYCLSFTTFFGLIILSIYTKKRKSQINIHQLPSYCPLFFSVPLFRYVLACYILNLLVFGTYFVHRF

SEQ ID NO: 88795 - protein, 116 aa, Gossypium hirsutum
  Clone ID: LIB3083-065-Q1-L1-B10.pep
VKSWIKTRIDRLKGWVDRNLQQEVWDPQANKERFAPSSVEVLRIVDEALEAFFLLPISIHAALLPDLTNGIDRCLQHYISKAKSDCGTRSTFVPSMPALTRCSSRSKRFGLNLKKR

SEQ ID NO: 88796 - protein, 135 aa, Gossypium hirsutum
  Clone ID: LIB3083-065-Q1-L1-B8.pep
TLTRLIPCVQVTGHISSLVHHLKIVLDGKNDELRKDAVDALCCLAHALGEDFTIFIPSIHKLLLRHRLQHKEFEEIERRLMRREPLIVGSTAAQRLSRRPPVEVVSDPLNDMENDPYEDGNDVQKHPRGHQVNDG

SEQ ID NO: 88797 - protein, 74 aa, Gossypium hirsutum
  Clone ID: LIB3083-065-Q1-L1-C2.pep
NRISPMGRRAAEQFTRRLSCCFLLIWTEIGRMFLLIRMACKASGAALDLMKLFKGGSSVVRYAPYPDSEVVTFA

SEQ ID NO: 88798 - protein, 110 aa, Gossypium hirsutum
  unsure (1)..(110): unsure at all Xaa locations
  Clone ID: LIB3083-065-Q1-L1-C5.pep
FFMEYHPSTXGSRMVVHRSRKLQSLIKDAKKLYKRTTHLQSEPNQPQYKHVGVFLHRVDLEDHYGKKSXHIKENMILERSETSLATQEAQAAFGAFKSRDCAVHAFHMKQ

SEQ ID NO: 88799 - protein, 141 aa, Gossypium hirsutum
  Clone ID: LIB3083-065-Q1-L1-D4.pep
DSRPDPTSWTGVTGDANSDSIVSLNLDRLGLVGDLKFHTLTPLKNLQNLSLSGNAFTGRVAPALGSITSLQHLDLSNNQFIGTIPGRIMDLYELNYLNLSGNKFDGGLPAGFRNLQQLRVLDLHNNALRGDIGQLFTELRN

SEQ ID NO: 88800 - protein, 42 aa, Gossypium hirsutum
  Clone ID: LIB3083-065-Q1-L1-D9.pep
LKFALSSCNLSFHHILDMVRAKVNFNILDRLYSLYREISLAD

SEQ ID NO: 88801 - protein, 138 aa, Gossypium hirsutum
  unsure (1)..(138): unsure at all Xaa locations
  Clone ID: LIB3083-065-Q1-L1-E5.pep
LQREEELLSSGWKEYAECCEGPRGRSSSGKKLDLGEDSSSSKGLQSAQLYGFEEERVGVPVKGGLYEVDLVKRHCFPVYWNGENRRVLRGHWFARKGGVDWLPLREDVAEQLEIAYSNKVWHTRTFXPSGLXAARVDL

SEQ ID NO: 88802 - protein, 58 aa, Gossypium hirsutum
  Clone ID: LIB3083-065-Q1-L1-E9.pep
GGKERDQDSIASTHIHYSTDVSEIFPWGFIHRKIVMCQLCILNKLETVETSGFLLCWN

SEQ ID NO: 88803 - protein, 128 aa, Gossypium hirsutum
  Clone ID: LIB3083-065-Q1-L1-F12.pep
RSSGSSSPESTGSGETSISSHFGGMNYPSLFSSRPTTYGASQPSERSGGSRFNHPSSMHEGYGSPIREEPPPYTSPERYESFENPLAGRGSHSFESKDDDRMSSGNPQFGTALHDFTGSGDDELSLTT

SEQ ID NO: 88804 - protein, 56 aa, Gossypium hirsutum
  Clone ID: LIB3083-065-Q1-L1-F5.pep
LIPIYIITLYRAMGDTHLQTLHSLYTLLLNLILILQCKPYLTYLHFNHHFFYFISI

SEQ ID NO: 88805 - protein, 114 aa, Gossypium hirsutum
  unsure (1)..(114): unsure at all Xaa locations
  Clone ID: LIB3083-065-Q1-L1-G10.pep
MVAADPINHNLAPRTMYDYAKLTLTGAESSIVRPAIIANNFELKLNTIQMIQQFVQFDGLQDEDPNTHLTNFLEFCDTFKINGVSXDEIRLRLFPFSLRNKAKQWLNSSPRRCL

SEQ ID NO: 88806 - protein, 47 aa, Gossypium hirsutum
  Clone ID: LIB3083-065-Q1-L1-G12.pep
MLLRSEPRWGNLGEPPTPTTVHVRSILDLTNRPSYLFYVLDSPSLSQ

SEQ ID NO: 88807 - protein, 79 aa, Gossypium hirsutum
  Clone ID: LIB3083-065-Q1-L1-G3.pep
MAQDTSSVAESPRRRSGLLRDQVQLIKRKDCDRYEIVPIEDKLSFEKGFFIVIRACQLLAQKNDGLILVGVSGPSGAGK

SEQ ID NO: 88808 - protein, 105 aa, Gossypium hirsutum
  Clone ID: LIB3083-065-Q1-L1-G6.pep
IMLVVGKIHLLRKLGGSHRSDFSLAVTCATYSSAPRAVVLPEALNSYLGRTRKDFHSLYSIKKGNKANQSKGLTLNPQTKWNDGNITIPRLSVLPRSRRMLLKLK

SEQ ID NO: 88809 - protein, 30 aa, Gossypium hirsutum
  Clone ID: LIB3083-065-Q1-L1-G8.pep
VKDQSKPPVRIYEVPADAFESDYVEEPLPE

SEQ ID NO: 88810 - protein, 60 aa, Gossypium hirsutum
  Clone ID: LIB3083-065-Q1-L1-G9.pep
QRKSANYHLGFSFESLIIEIVNYLSHLHTGSMVVVGYVYLLIGSITILFKTLERLLRNLF

SEQ ID NO: 88811 - protein, 93 aa, Gossypium hirsutum
  Clone ID: LIB3083-065-Q1-L1-H10.pep
YSAFSIQYQNLKIFILRSYSMSIQRSKEKPKPLTFSIGMSKKDKSRQCKPKQNKNPPKWLEKGLILLLQRERSSSQVETPSFVVVVVVRLPSG

SEQ ID NO: 88812 - protein, 55 aa, Gossypium hirsutum
  Clone ID: LIB3083-065-Q1-L1-H11.pep
FLHIHLIILNPSIKSYSPLPPCHSSYLYMSHSPLPHHHHHSRNPTSLSHYTYRYT

SEQ ID NO: 88813 - protein, 44 aa, Gossypium hirsutum
  Clone ID: LIB3083-065-Q1-L1-H3.pep
DVLLMQQRLCYTFRSFLLFIHSCLSWLQRNPCRLFHLQQHTARI

SEQ ID NO: 88814 - protein, 68 aa, Gossypium hirsutum
  Clone ID: LIB3083-065-Q1-L1-H4.pep
ANISEREHHGVTNLGKLGEKIKGIGVGEKWFGNNKMGKKREEISSEILGFLWDGGPEPILGKERREER

SEQ ID NO: 88815 - protein, 138 aa, Gossypium hirsutum
  unsure (1)..(138): unsure at all Xaa locations
  Clone ID: LIB3083-066-Q1-L1-A6.pep
EEQLPASTTAPNSGGGWGGWGFSAFSVLSDLQKAATVAAEEISRNASVVAEKAAKSIADMQIAEESESSKADEAEESPSEKESEDEDDKLRKSALDKLEKASGDSFLGQGLKVFDNSVENFASGAWQALXSAWKGGTN

SEQ ID NO: 88816 - protein, 63 aa, Gossypium hirsutum
  Clone ID: LIB3083-066-Q1-L1-B12.pep
CLAVQQFSYMGGYKLILLEIFCHVTMIFFLFQEAKKIDLLCILVHTQNRTPLFILSNTKWQSN

SEQ ID NO: 88817 - protein, 130 aa, Gossypium hirsutum
  Clone ID: LIB3083-066-Q1-L1-B2.pep
QVLCCLLVVPKICDSASLTGLSQKSSGFRNPSADHVNHSAHDSVDHKVDTVKENKAEMPYSGGHLQKGEDITQNDISTVPGPHTVFKHPTHLVTPSEILSTMASSTENAQISQVINDREATVEDVVENDA

SEQ ID NO: 88818 - protein, 72 aa, Gossypium hirsutum
  Clone ID: LIB3083-066-Q1-L1-C10.pep
GRLDGSPARNSASFFFFKPLHGKDSPEFQYMINLSGIKKKKLFIGSHDQQMLSYLITDKKCLKKQRLKKVIN

SEQ ID NO: 88819 - protein, 64 aa, Gossypium hirsutum
  Clone ID: LIB3083-066-Q1-L1-C12.pep
ERKIYRARAHQSVSQRPCFTLVKYNLIIIDICDMERYIFMLHVIQKNNYLLSPERQPFSATMHH

SEQ ID NO: 88820 - protein, 78 aa, Gossypium hirsutum
  Clone ID: LIB3083-066-Q1-L1-C2.pep
FQDICIEGDSLTVIHKLNTVEEDKSEISSLVKEIKGRALIFRSVSFRYMPREANKAAHGMAMEGRRHENLEYWIEEVP

SEQ ID NO: 88821 - protein, 43 aa, Gossypium hirsutum
  Clone ID: LIB3083-066-Q1-L1-C3.pep
KNAKHPISSNPSELVVKHYIQPKSFLKPTYEQFIVWFLPQFFL

SEQ ID NO: 88822 - protein, 84 aa, Gossypium hirsutum
  Clone ID: LIB3083-066-Q1-L1-C8.pep
QNLLFFLTLNQTGTILILPPLHIQPIPLSHYNKKIKLNTPTIFVQFITKLHIQFSNYRSLPLLTTIILNPLKPSTAFTINTTTS

SEQ ID NO: 88823 - protein, 81 aa, Gossypium hirsutum
  Clone ID: LIB3083-066-Q1-L1-D9.pep
VLKLSPWAKNPSVFLVLEIKIPIVLTICKFLYKHPYHPPIPNQYPNQKARRTNNPETKASNPTSNLRLAAPKFLSIGYRFP

SEQ ID NO: 88824 - protein, 117 aa, Gossypium hirsutum
  Clone ID: LIB3083-066-Q1-L1-E4.pep
NIAMQLCARALTRIEVERRLILPIDCLPALPRFEGSYENGITFQVMDDVEILWNFRCKKRNGAADRLAIETDWIQFVNSKKLRSGDIVAFYKDDDRVSGTLCKIEVKRRTSIYNKEL

SEQ ID NO: 88825 - protein, 66 aa, Gossypium hirsutum
  Clone ID: LIB3083-066-Q1-L1-E6.pep
RRCFLKLDVTFSLSLITHQGYAGPINEPIFRTELQAPLFPFVTPFIPFYQCSVICLKLVCFTKLDP

SEQ ID NO: 88826 - protein, 48 aa, Gossypium hirsutum
  Clone ID: LIB3083-066-Q1-L1-F1.pep
KSRFYLMVMMQTKSSLFVCKIIPLFIKIQQHDRFTDGSIGFSNGLFSI

SEQ ID NO: 88827 - protein, 56 aa, Gossypium hirsutum
  Clone ID: LIB3083-066-Q1-L1-F2.pep
WTIGVNNVDQTYIVWNEFRTNRIRQTFNLELIDDIVELLNPITENYLPNELNLFSK

SEQ ID NO: 88828 - protein, 93 aa, Gossypium hirsutum
  Clone ID: LIB3083-066-Q1-L1-G10.pep
SESPIYSSYYSKCRKTHRQSMKFLAPRNSYISTLNRCNRTRNQPTILWDNRRRSRLRRCPKTLHRQKHLIHMISGDPPVTNHSILHSRIHHSG

SEQ ID NO: 88829 - protein, 111 aa, Gossypium hirsutum
  unsure (1)..(111): unsure at all Xaa locations
  Clone ID: LIB3083-066-Q1-L1-G4.pep
DAEEDGCDGLNYKEFDKGFNNKRVTVPPPSHFWRIDSNKFLHRGCKTQTIDEIMICHCKRPPDGNLGCGDECLNRMLNIECVQDTCPCGELCSNQQFQKRKYAXMMWDRFG

SEQ ID NO: 88830 - protein, 78 aa, Gossypium hirsutum
  Clone ID: LIB3083-066-Q1-L1-G6.pep
MSNNIKKISSRKQTMQRMCWVFVWEKDVRIRYRQPQPGACPYCGGMLQAMNIKTHWKLCFLPVFFWKKRKIHCSTCAK

SEQ ID NO: 88831 - protein, 127 aa, Gossypium hirsutum
  unsure (1)..(127): unsure at all Xaa locations
  Clone ID: LIB3083-066-Q1-L1-G8.pep
MGGFAAVNDDGVQNILFRLPASSFASAACVSKSWNKVCDRVLTCPKLASALSLNPSLPDAVKEALDKVLSKPIRPQFAIASIGLXSTLEAAHQIITERLGSXVPVVTNAACGIIGRDAITNTMREVR

SEQ ID NO: 88832 - protein, 105 aa, Gossypium hirsutum
  Clone ID: LIB3083-066-Q1-L1-H6.pep
EKAKALEVIQFLKEGVHEGTCNVAIIDDGKLDTESDSGEFWVLFGGFAPIGKKVTSEDDVIPETTPAKLYSITDGEVKIVEGELSEGLLENNKCYLLDCGVEIFV

SEQ ID NO: 88833 - protein, 68 aa, Gossypium hirsutum
  Clone ID: LIB3083-066-Q1-L1-H7.pep
NNIWVFGNGSKVKTIQLKTVPFLFFWFFKVLFVEALYSMISFFILIRTPDPHSIQLTGLPLENKKLDK

SEQ ID NO: 88834 - protein, 122 aa, Gossypium hirsutum
  unsure (1)..(122): unsure at all Xaa locations
  Clone ID: LIB3083-066-Q1-L1-H9.pep
GVRYLLNLIYPLVWKSTRDKNDHVEYTSDAPLPWLAFYQGLPFYYITSFNQTHTDPRVKETPKEKETLNERSCTGSNTGSVSQIENRERNSDSVDSQCQNPCPRXKMTSXKFSKGFVPYKRC

SEQ ID NO: 88835 - protein, 44 aa, Gossypium hirsutum
  Clone ID: LIB3083-067-Q1-L1-C10.pep
IVGFRRFLAWSTEPCVLVERHVRRRCVVRLCRHPEPIEMCRHRS

SEQ ID NO: 88836 - protein, 98 aa, Gossypium hirsutum
  Clone ID: LIB3083-067-Q1-L1-E10.pep
MQKPGGLGTGPGKEVGLLDNCGILPSNCLPCLASTVSSVEKRRSLSSSPPSARKKNALKLPFKWKEGHPNAALFSSKRLLQRPKAGSQVPFCPTEKRM

SEQ ID NO: 88837 - protein, 97 aa, Gossypium hirsutum
  Clone ID: LIB3083-067-Q1-L1-F11.pep
HTIAIRSDAVVGNTGSCTSPWTIRQRQRPLVLRLLTCTFDGHIAAGALRSLLETASMCSPIASVVSPVFTNRTLLSSLVAVRTCSATRCVSSRTPDR

SEQ ID NO: 88838 - protein, 114 aa, Gossypium hirsutum
  Clone ID: LIB3083-067-Q1-L1-H10.pep
RPVKLSSLAFNQILAINHLHMFTDEELERLLCGECDIWAFNELLEHIKFDHGYTASSPPIVNLLEIIQESEYSQRRAFLQFVTGAPRLPPGGLASLIPKLTIVRKHSSNCADTE

SEQ ID NO: 88839 - protein, 69 aa, Gossypium hirsutum
  Clone ID: LIB3083-067-Q1-L1-H11.pep
GSTPYGYTYEDETCLFTCSTTTKISYINLQGAYLPVMADLLKSSPLTIDRICYLSQTLLANRWPSFHPH

SEQ ID NO: 88840 - protein, 53 aa, Gossypium hirsutum
  unsure (1)..(53): unsure at all Xaa locations
  Clone ID: LIB3083-068-Q1-L1-A12.pep
FSQHKYXDGYMHFHKGQRGIQSQCLVQCLCKVQLIICLLQCHKVIRWAMNPFH

SEQ ID NO: 88841 - protein, 90 aa, Gossypium hirsutum
  Clone ID: LIB3083-068-Q1-L1-B9.pep
QPPLAVKSILQFGSQRVIELLADTSYDSFQEDSVLSSVHEGTEVAFCNSMLVVCSIDDGDWAVSVASIGLQGWPWTHVMKSGRQTSQFSQ

SEQ ID NO: 88842 - protein, 38 aa, Gossypium hirsutum
  Clone ID: LIB3083-068-Q1-L1-C12.pep
GASVTTFNPNMIVVFVTYQNIFFKSLFSTSLSFSLIQY

SEQ ID NO: 88843 - protein, 85 aa, Gossypium hirsutum
  Clone ID: LIB3083-068-Q1-L1-D11.pep
HSEFRDYIDQGFRRPRRYFPQKEEVKIEGKKMVADGIDASQGHLDDNADDWLPAVSRSTHRRYLMRKARREFYEALVEKDCQEDM

SEQ ID NO: 88844 - protein, 55 aa, Gossypium hirsutum
  Clone ID: LIB3083-068-Q1-L1-D9.pep
KKETGMSLTTTLLLNSVSKGFYPHTIGIFIHTISSNRILAVGLWIIYIGDPNSLI

SEQ ID NO: 88845 - protein, 96 aa, Gossypium hirsutum
  unsure (1)..(96): unsure at all Xaa locations
  Clone ID: LIB3083-068-Q1-L1-E11.pep
KNQFAHLLQSEQEQKLEMQQYDSTIQTLHAKVKSLELQLNEAMCSGEAKSVSSEKVSXVSTILKTAADGIDSLVETNKLDDELKKLDALIERLLEE

SEQ ID NO: 88846 - protein, 78 aa, Gossypium hirsutum
  Clone ID: LIB3083-068-Q1-L1-F10.pep
AYIEMHNYALLFRECNHTMQNGAPYHRSVNNKLHNISICNCNALIMNVLLHIWWEPNQFSSWIQTVFAPSSCSPSLGL

SEQ ID NO: 88847 - protein, 38 aa, Gossypium hirsutum
  Clone ID: LIB3083-068-Q1-L1-F12.pep
IALTRKGITSQMVSSSRIRQSLITMMYLAMINSLKRLS

SEQ ID NO: 88848 - protein, 55 aa, Gossypium hirsutum
  Clone ID: LIB3083-068-Q1-L1-F9.pep
TVLLTQYITSTKLSKSSLKDSPKAFSSKSKGVISKKRLIRKKKKRESSAISVQTP

SEQ ID NO: 88849 - protein, 39 aa, Gossypium hirsutum
  Clone ID: LIB3083-068-Q1-L1-H12.pep
KRASANLTKAPVIPNIDCDHYVNNSTSFRKAMCFLMDPQ

SEQ ID NO: 88850 - protein, 39 aa, Gossypium hirsutum
  Clone ID: LIB3083-070-Q1-L1-B11.pep
LLGRSPELPIELQSFNPPVDYYFIEILVENVFYVSIIVP

SEQ ID NO: 88851 - protein, 34 aa, Gossypium hirsutum
  Clone ID: LIB3083-070-Q1-L1-B9.pep
RALIIFLTQKPLNKLAILKLKNIFFFTALFIALH

SEQ ID NO: 88852 - protein, 38 aa, Gossypium hirsutum
  Clone ID: LIB3083-070-Q1-L1-F12.pep
RNSYITQNFLYLCWLLVLKKEDSIFFDRLSLQITCISS

SEQ ID NO: 88853 - protein, 100 aa, Gossypium hirsutum
  Clone ID: LIB3083-071-Q1-L1-A12.pep
MNKKIAGSSSRPRKPTGTVLPYQTQRIRDHYFLGKKLGQGQFGTTYLCTDKVTGIRYACKSIPKRKLVCREDYDDVWREIQIMHHLSENPFVVQIKGTYE

SEQ ID NO: 88854 - protein, 58 aa, Gossypium hirsutum
  unsure (1)..(58): unsure at all Xaa locations
  Clone ID: LIB3083-071-Q1-L1-A7.pep
TTGSIYRVLLRLIRRPSEAITEAXFQLLTHRLSSCHLPLLQSSSFLRPGSLSRRVLHR

SEQ ID NO: 88855 - protein, 38 aa, Gossypium hirsutum
  Clone ID: LIB3083-071-Q1-L1-B12.pep
RLPPELGYGMKGAGCKGGSCIIPPDSVLLFDVEFIGKA

SEQ ID NO: 88856 - protein, 52 aa, Gossypium hirsutum
  Clone ID: LIB3083-071-Q1-L1-B7.pep
WELLKCALQSLVATRAFIFSKLQLAILKYNISHGLPWVLLMNRLQSCFGDSE

SEQ ID NO: 88857 - protein, 48 aa, Gossypium hirsutum
  unsure (1)..(48): unsure at all Xaa locations
  Clone ID: LIB3083-071-Q1-L1-D11.pep
KKKKAGGYSRRKGAGLFAKTKTXMSGFIKGTLQNINRTKQTTTLHYFV

SEQ ID NO: 88858 - protein, 55 aa, Gossypium hirsutum
  Clone ID: LIB3083-071-Q1-L1-D5.pep
NRVHVSFMVHFQVRGYHSQQSWCLSFIILIQTKPLHPHQNLNTHKASSISNCLVA

SEQ ID NO: 88859 - protein, 106 aa, Gossypium hirsutum
  Clone ID: LIB3083-071-Q1-L1-E1.pep
KDLLSMEEEKEGNLNVLMDGPELTQVAYSKEESPEIQPKHLEFYIEGDGCHLIPIELMASVGVESQRIYNFREEDEGIAGNGDVILDFDMHCGTPLELVVENSCGS

SEQ ID NO: 88860 - protein, 80 aa, Gossypium hirsutum
  Clone ID: LIB3083-071-Q1-L1-E8.pep
KNFLPQLATLAFIDIFVEENKQEEDQQGETVWLFQEEGKSEPNMVADNGDEPDDDNNKLTLHVPETSHQISTDSWFQAGF

SEQ ID NO: 88861 - protein, 42 aa, Gossypium hirsutum
  Clone ID: LIB3083-071-Q1-L1-F5.pep
HLRGNIDLVLESKLPIACGDMEKQTNKSLVQNLIERCLQLYM

SEQ ID NO: 88862 - protein, 37 aa, Gossypium hirsutum
  Clone ID: LIB3083-071-Q1-L1-G11.pep
HFNASKIKDLQAQDDGVKAMNESAYKDLLNVSHDLYV

SEQ ID NO: 88863 - protein, 65 aa, Gossypium hirsutum
  Clone ID: LIB3083-071-Q1-L1-G5.pep
MMKGYRGKLPLSIITVTLCGFAFLALLYTERLSFLSSSSFLKSKSCARRTSAVVKAKDETAEKNL

SEQ ID NO: 88864 - protein, 113 aa, Gossypium hirsutum
  Clone ID: LIB3083-071-Q1-L1-H10.pep
AFDNFQVANLTEIMLKNTSPSRKETDFALAALREIPSQYKATIELNILGQKGNVLERIPLPPPTYGAASFNSSKPSYSTSVQYGSASFSSSKPSHPTGFSPSVPPYLEESNPI

SEQ ID NO: 88865 - protein, 64 aa, Gossypium hirsutum
  unsure (1)..(64): unsure at all Xaa locations
  Clone ID: LIB3083-072-Q1-L1-A3.pep
FQAPMAFXLIENRWRMKERMKKIKASPYFMIFLVKLVTKFHLTVTLQIXYICVQPLTNVWSSTQ

SEQ ID NO: 88866 - protein, 51 aa, Gossypium hirsutum
  Clone ID: LIB3083-072-Q1-L1-A8.pep
QHIQRQRSAVGLVSARAKNASVDASGPKTKLRVGRGTSFRPVSGATVREGR

SEQ ID NO: 88867 - protein, 58 aa, Gossypium hirsutum
  unsure (1)..(58): unsure at all Xaa locations
  Clone ID: LIB3083-072-Q1-L1-B11.pep
LSSXISHEPEDRPTYIRLQQCRTYSXTISLQSQPYISNHVLSTPLNQRPIFTYAPTQH

SEQ ID NO: 88868 - protein, 81 aa, Gossypium hirsutum
  unsure (1)..(81): unsure at all Xaa locations
  Clone ID: LIB3083-072-Q1-L1-B2.pep
HMSVVMMVVMPMSMITMMMMPMVTMRRRHTELTPETQIQTHHNQNLHKKDRCFLEHHCLSFXIKHKRNISELLAFSEIESK

SEQ ID NO: 88869 - protein, 62 aa, Gossypium hirsutum
  Clone ID: LIB3083-072-Q1-L1-B3.pep
QSSNLDSDLGFLFSFTEVVCGGWTTIMIADPKSCDVLFVFVLFAIISSSNAWFTPYLSHLLK

SEQ ID NO: 88870 - protein, 59 aa, Gossypium hirsutum
  Clone ID: LIB3083-072-Q1-L1-C12.pep
PSKYFPYTFVFLVIKSIWLSSSVPLKLACGGGVVHGSGCTPGSRGRNLWQVKTPPPDNT

SEQ ID NO: 88871 - protein, 128 aa, Gossypium hirsutum
  unsure (1)..(128): unsure at all Xaa locations
  Clone ID: LIB3083-072-Q1-L1-C2.pep
TATIPPKPTEEAXTVWIEHTSANGRRYYCGGKTRQSSWEKPLELMTPIERADASTNWKEYTSPDGRKYYYNKVTNLSTWSLPEELKLAREQVEMASAKGPQSEVSSHFPAPVPTASKAQSGADTSSTI

SEQ ID NO: 88872 - protein, 46 aa, Gossypium hirsutum
  unsure (1)..(46): unsure at all Xaa locations
  Clone ID: LIB3083-072-Q1-L1-C4.pep
VIDSLPLMALCITFYTDRHCPLMDEQPXSRNVVNYFNRPWWGLLHV

SEQ ID NO: 88873 - protein, 33 aa, Gossypium hirsutum
  Clone ID: LIB3083-072-Q1-L1-D3.pep
GICVVKDESCHDLGTISGNKSLWVNNRFAYDMV

SEQ ID NO: 88874 - protein, 55 aa, Gossypium hirsutum
  Clone ID: LIB3083-072-Q1-L1-D6.pep
RLQNRPANRSDLHLSAQKKRSKYGSILVGSLTHEDLLHRKSTPIKYMRCNLVTRA

SEQ ID NO: 88875 - protein, 47 aa, Gossypium hirsutum
  Clone ID: LIB3083-072-Q1-L1-E3.pep
FLQFLILFLLLSTTVHSSSNIISGENLSVLINCKVQGTIINFLSLPP

SEQ ID NO: 88876 - protein, 101 aa, Gossypium hirsutum
  unsure (1)..(101): unsure at all Xaa locations
  Clone ID: LIB3083-072-Q1-L1-E5.pep
YRKVYIXIQLWCSLLMGNDKGGTMVMEQSNNLHSRPKLGTLFKSEPSXFPTGAEDDEVPNRKTAHNGSPGVHSRRRAGGSRYMYLINSLLIHGITLSQLYA

SEQ ID NO: 88877 - protein, 60 aa, Gossypium hirsutum
  Clone ID: LIB3083-072-Q1-L1-E6.pep
RKTIVPPTQGTASITELVNQDMATTTTRAVPIPTQETLFSSQAPLFMFESTMTPIDKGST

SEQ ID NO: 88878 - protein, 30 aa, Gossypium hirsutum
  Clone ID: LIB3083-072-Q1-L1-F6.pep
TPPSSIIEPFFTQKLGNHKIIKMMFQEKRQ

SEQ ID NO: 88879 - protein, 47 aa, Gossypium hirsutum
  Clone ID: LIB3083-072-Q1-L1-G4.pep
DPRLQIAGVFEFLFDFLSQNFRSCKTYRQTSLRVLLARRTETIRWKH

SEQ ID NO: 88880 - protein, 106 aa, Gossypium hirsutum
  unsure (1)..(106): unsure at all Xaa locations
  Clone ID: LIB3083-072-Q1-L1-G6.pep
MYVSFLARCYHSGRIGLXEAHGNSQALQYNCVIGNEAVVFHTNETSSVNSDKVEEALESVSRTILTIHTNGDKQGASLLLHXYCTMTNPLNGALHKLEYIHVPVDI

SEQ ID NO: 88881 - protein, 60 aa, Gossypium hirsutum
  unsure (1)..(60): unsure at all Xaa locations
  Clone ID: LIB3083-072-Q1-L1-G9.pep
HVKSISTLEPHLIEKENHKIGRTYRRYRHXALGTVVLITLYLEFVLDAFWFSKSYLSALL

SEQ ID NO: 88882 - protein, 62 aa, Gossypium hirsutum
  unsure (1)..(62): unsure at all Xaa locations
  Clone ID: LIB3083-072-Q1-L1-H1.pep
AGPLLPCFTHLTLTPGFVTMANSVNLSCTXVTLWFLATLTHDRPEVIGDSCITDLTLTRIYE

SEQ ID NO: 88883 - protein, 59 aa, Gossypium hirsutum
  Clone ID: LIB3083-073-Q1-L1-A5.pep
REMEGWDPQNLILPEVGKLCRSQSEYLDQHFKTQKDVSSSSVSSSSCLLSEWTKRCPDY

SEQ ID NO: 88884 - protein, 83 aa, Gossypium hirsutum
  unsure (1)..(83): unsure at all Xaa locations
  Clone ID: LIB3083-073-Q1-L1-A7.pep
GNSSCRVRVHFGGKSNALALNGGLRSAPTFLTSSYQSLLHKSGNRGSHSTGVNRMGGGHXHDEPHYLHAQHMYNLDRMKNQKL

SEQ ID NO: 88885 - protein, 54 aa, Gossypium hirsutum
  Clone ID: LIB3083-073-Q1-L1-A8.pep
WSAGGLLGRKCILHHLPKSYHCHLIRYLSDLQFWPRIRHCYNPAFTSTTVQYSS

SEQ ID NO: 88886 - protein, 85 aa, Gossypium hirsutum
  Clone ID: LIB3083-073-Q1-L1-B10.pep
TDRVWKALVKAFATQIKSAFTASSFVKEIFTNGYPKLYSMMENLLDGILGDTDVKGVLPAITLEGKAQMVAAIETFQMASLGSCL

SEQ ID NO: 88887 - protein, 88 aa, Gossypium hirsutum
  Clone ID: LIB3083-073-Q1-L1-B12.pep
GWAYMQKSRYLTAEVVYRKAQMIDPDANKACSLGICLIKQGRYDDARLVLEEISQRKIPGSEEIRARNRAAELLMEINTFEPPPSDVS

SEQ ID NO: 88888 - protein, 85 aa, Gossypium hirsutum
  Clone ID: LIB3083-073-Q1-L1-B9.pep
ALNERSGISHSILTVHVRGTDIKTNAVLRGSLHLVDLAGSERVDRSEATGDRLREAQHINKSLSALGDVIFALAQKNSHVPYRNS

SEQ ID NO: 88889 - protein, 62 aa, Gossypium hirsutum
  Clone ID: LIB3083-073-Q1-L1-C9.pep
YQSLNTSSCQHGMSFDDCLILRLSRITQSTYIGFAPPVHSIFPRAEYLQSGGYTRSIEPPTP

SEQ ID NO: 88890 - protein, 84 aa, Gossypium hirsutum
  Clone ID: LIB3083-073-Q1-L1-D7.pep
VVVAPTGAAVGLAFFSYGFPQAGSCIEVSVPLLLLVLICTLYLRGISIFGHRLFRIYAVPLSVTITWIYAFFLTAGGAYDYKGC

SEQ ID NO: 88891 - protein, 78 aa, Gossypium hirsutum
  Clone ID: LIB3083-073-Q1-L1-D8.pep
VCLVLLGLLTTGPKGVRCENIGNPLIPGSTAMDSFLAYKYLKRGARHFTSSIDYKVLSHWYRRSNTSRREKVNPYERP

SEQ ID NO: 88892 - protein, 85 aa, Gossypium hirsutum
  Clone ID: LIB3083-073-Q1-L1-F4.pep
ARKAHRRVIQNVILSIITKAAILALAFAGHPLVWAAVLADVGTCLLVIFNSMLLLHGTHKHAGKCCKSSAASHKDKQGCKTSHCH

SEQ ID NO: 88893 - protein, 85 aa, Gossypium hirsutum
  Clone ID: LIB3083-073-Q1-L1-G12.pep
EKPLVDKIRKGWAEEFRAKIDDDLERVEFWLKNTIRVFDELSCMLEECVKCTVSLLRDSTYQWWNTLVSVGPRERIAWEFFQEEF

SEQ ID NO: 88894 - protein, 65 aa, Gossypium hirsutum
  Clone ID: LIB3083-073-Q1-L1-G5.pep
NPCPLSRVCFVSFLCGTSFICLVIKILLNLAVFVLFFSCLNLHIRQCYISLGRPFWSYEILKVEL

SEQ ID NO: 88895 - protein, 85 aa, Gossypium hirsutum
  Clone ID: LIB3083-073-Q1-L1-G6.pep
GHTCKPSYQHSEYGTAITWDDALRSSARNFEHKSYNLFTCNSHLFVANCLNRLCYDGSMDWNMITVVALVIIKGHWVNNMSIIRS

SEQ ID NO: 88896 - protein, 84 aa, Gossypium hirsutum
  Clone ID: LIB3083-073-Q1-L1-G8.pep
PTKISGMVDMLNEGSVETKINCTRFIEKLMDEKEFRAESISSHRLLVGLMRLVKDKRHTNGIMPGLSLLRSICLHKQVMGLIVS

SEQ ID NO: 88897 - protein, 37 aa, Gossypium hirsutum
  Clone ID: LIB3083-073-Q1-L1-H5.pep
KKFKKPCFAFLNLAFHIFIHGFYSSSDCFLFTYPGKF

SEQ ID NO: 88898 - protein, 61 aa, Gossypium hirsutum
  Clone ID: LIB3083-074-Q1-L1-A2.pep
IFLIWQDVHYYASFFEMLEAESLAKVLPGVKTINESVQVYRKFYTEEKEKTNGVAAICVAK

SEQ ID NO: 88899 - protein, 130 aa, Gossypium hirsutum
  Clone ID: LIB3083-074-Q1-L1-A4.pep
QVLEQLGLPAAGRRSTAGYPKGLQNGFTNTVVNRFLLPPSDCEFTLNSLLDELQTDQWPVQAGHRASRCTGVALSVAARLLGACLPGTGARIIALVGGPCTEGPSTIVSKDLSEPVRSHKDLFKDAAPYF

SEQ ID NO: 88900 - protein, 75 aa, Gossypium hirsutum
  Clone ID: LIB3083-074-Q1-L1-B2.pep
GLVAKVQLKLHLGLVSELMSKQLQQKFFGMLINKTHLFPFLLLVYLKFVHETYFFSPINLKTSSLISSPTPPLSV

SEQ ID NO: 88901 - protein, 56 aa, Gossypium hirsutum
  Clone ID: LIB3083-074-Q1-L1-B3.pep
KAGGRTIKKTLILTLKIKRKKFQNSSFFFLKILRFKTSALLNIIIQNRDFLCLFGK

SEQ ID NO: 88902 - protein, 121 aa, Gossypium hirsutum
  Clone ID: LIB3083-074-Q1-L1-B4.pep
MWSSGADLKENLHKIALDVYDDEDEEREIYGSGNGDHSPFFDRRNSHRFAHSKPVSVSPIANGTDSPINSEIERYRAEIKKLQESEAEIKALSFNYAALLKEKEEQISRLNQENGSLKQNL

SEQ ID NO: 88903 - protein, 129 aa, Gossypium hirsutum
  unsure (1)..(129): unsure at all Xaa locations
  Clone ID: LIB3083-074-Q1-L1-B7.pep
TNSGGDTTARKGNIHGILNTVTCGILITLATIIARYITSCEXPEPAWFYLHVLGQISAYAIXIACWGTDLXLGSEFCDITYSTHRYMGIDLCLLXTDKVYVYFYGHKXDHMLRFYWNIYHXHNFGYTIL

SEQ ID NO: 88904 - protein, 57 aa, Gossypium hirsutum
  Clone ID: LIB3083-074-Q1-L1-C4.pep
VSTFSCLQSNRCGYIISLYISTSKQATNITRKPTNYNKSERFISILTDHEHSLTESP

SEQ ID NO: 88905 - protein, 59 aa, Gossypium hirsutum
  Clone ID: LIB3083-074-Q1-L1-C5.pep
HTHRGVTITNLDDKKITFQFYYEMDLDTLIDESPWTYNNHLLLFHPIKERNDPISITIG

SEQ ID NO: 88906 - protein, 60 aa, Gossypium hirsutum
  Clone ID: LIB3083-074-Q1-L1-C7.pep
HNQSFGVPHALAYNISYFDFFFLSGFWLLSFRISWRLYYSEKFVYNDYRIIGSNIRVSFI

SEQ ID NO: 88907 - protein, 49 aa, Gossypium hirsutum
  Clone ID: LIB3083-074-Q1-L1-C8.pep
LPSYPSIYTTFINFYHNNYTLLLYNIQFSLIKKNKINSKLSTTTQYQPI

SEQ ID NO: 88908 - protein, 126 aa, Gossypium hirsutum
  Clone ID: LIB3083-074-Q1-L1-D3.pep
PPVTAPNYDILGEASATHSMPIWQPPPPPDASTRDESVIGRVEEPPASKEGVQSKKRQVGGDPKTPKAKKPRKPKDNTNSSVKPAKKSMDITINGYDMDISSISIPVCSCTGTAQQCYRWGCGGWQ

SEQ ID NO: 88909 - protein, 125 aa, Gossypium hirsutum
  Clone ID: LIB3083-074-Q1-L1-E5.pep
KDLFKLYDPGGGEHFNIFAAGLKTADRVVTVSHGYAWEIRTLEGGWGLHGIINECDWKLQGIVNGIDMEDWNPQHDVHLKSDGYTNYSIETLQPGKAQCKAALQKELGLPVREDVPLIGFIGRLD

SEQ ID NO: 88910 - protein, 41 aa, Gossypium hirsutum
  Clone ID: LIB3083-074-Q1-L1-E7.pep
LKSYITENLGRRIDAMLEEVKLAGRIWMFKKGIEDVKLNGF

SEQ ID NO: 88911 - protein, 89 aa, Gossypium hirsutum
  Clone ID: LIB3083-074-Q1-L1-G2.pep
QVFCGLIICKSTQVLVIFFFFATNTAFTPFGSSTIQRTFVFSPTSMGVYNKCHSQDCSLQENHSRLYFFQTNHQHNFLCAHSQKIPAAY

SEQ ID NO: 88912 - protein, 42 aa, Gossypium hirsutum
  Clone ID: LIB3083-074-Q1-L1-G5.pep
PNSFFILLIPFVAVLNFSYPKIKQCLYIHILQAHILLLNTSL

SEQ ID NO: 88913 - protein, 38 aa, Gossypium hirsutum
  Clone ID: LIB3083-074-Q1-L1-G6.pep
LEEILYNLFPPPISSRFYLKRKFTLKASTNKRKPKINV

SEQ ID NO: 88914 - protein, 76 aa, Gossypium hirsutum
  Clone ID: LIB3083-074-Q1-L1-G8.pep
PHSLDYSKLVRINRHCPLRGSRRYTLDIISYSSIKMLSLYENTFSNVRSYHTIVIYNMACIDRLTRAMLVLESTKP

SEQ ID NO: 88915 - protein, 127 aa, Gossypium hirsutum
  Clone ID: LIB3083-074-Q1-L1-H3.pep
DTENRSESHMAASSVLNPVHENLPVKELQTKTVEETASHEACSLADSKQENIEASDAMTVSNSSTVEHALVSSNAGVGTSLEVTTGHSFHTDTESDRFHVLNSVDLTNERMHASEPKEAMSDVAVMN

SEQ ID NO: 88916 - protein, 53 aa, Gossypium hirsutum
  Clone ID: LIB3083-074-Q1-L1-H4.pep
SMFYSIRVLNCNSTRRSNILIALNLLLRRKNSKQFHTQVMFVVLSHLCFDEGI

SEQ ID NO: 88917 - protein, 69 aa, Gossypium hirsutum
  Clone ID: LIB3083-074-Q1-L1-H5.pep
PDSKSTKLNNQSSKQILRTELKSDTLLTNLMTEKLYSTELEVEQMPPDVEHTVRCNDILRCQLQNATDN

SEQ ID NO: 88918 - protein, 91 aa, Gossypium hirsutum
  Clone ID: LIB3083-076-Q1-L1-A3.pep
SLAAMQMEGWQYQRMMEEQSEYDQEALQLLNELMVKREKEKVELEKELEIYRRRVQDYETREKMIMLRRRKDDGTRSATSGTCSNAEDSDS

SEQ ID NO: 88919 - protein, 74 aa, Gossypium hirsutum
  Clone ID: LIB3083-076-Q1-L1-A5.pep
FKGRTGYQPYIDHTEMQTLNELMDERENEDGAFNIQTENFRRAGLDMDNRDNQTLLKERKHDGSRRAGSATGAT

SEQ ID NO: 88920 - protein, 52 aa, Gossypium hirsutum
  Clone ID: LIB3083-076-Q1-L1-A6.pep
ESAFCFEIVCIYICYLEEHLLLYTLVECKLLPETSICFNNIQFNSMDPLYWN

SEQ ID NO: 88921 - protein, 55 aa, Gossypium hirsutum
  Clone ID: LIB3083-076-Q1-L1-B10.pep
SLVKVNFNRLQHLDIRSFGSYRLDILSAHRNNLPNLETDLVPSLSPLTHEASLSF

SEQ ID NO: 88922 - protein, 49 aa, Gossypium hirsutum
  Clone ID: LIB3083-076-Q1-L1-B5.pep
GSKLTTYALIKFSLLRLMFSTMELGLSVPATTKPYRSFTMIKPAPIFHP

SEQ ID NO: 88923 - protein, 86 aa, Gossypium hirsutum
  Clone ID: LIB3083-076-Q1-L1-B8.pep
YELKEGEGCAASAHACTESCMLEFDLRCAYAAIKQANWDASKVREKLQRDIDAHLLSVRDAKLSELVARYEEKLRQLLCEPVESLF

SEQ ID NO: 88924 - protein, 91 aa, Gossypium hirsutum
  Clone ID: LIB3083-076-Q1-L1-C12.pep
IKSKHFENAKAKMGLSVQTVAPSLALISHQTSIKFLISRESTIFIFLFQKDGPNIQVVVLFSDSPFALRISPQTSFPLCPRFSRSHPPLPS

SEQ ID NO: 88925 - protein, 87 aa, Gossypium hirsutum
  unsure (1)..(87): unsure at all Xaa locations
  Clone ID: LIB3083-076-Q1-L1-C3.pep
GDSWLKEHEQNKEYYSAVFFRESWAKLPVHXSREGLIMLSGGRANARDLXKKRLTTFNEPAEETAKKHPGSVIPRRDLREKTCQLIV

SEQ ID NO: 88926 - protein, 56 aa, Gossypium hirsutum
  Clone ID: LIB3083-076-Q1-L1-C5.pep
SRSHFSQGPQVLLCSLLSQPSIQCFGSVLCLGAFKLQHEFSVFVVLSCYIDCVATL

SEQ ID NO: 88927 - protein, 76 aa, Gossypium hirsutum
  Clone ID: LIB3083-076-Q1-L1-C6.pep
VAWNRQQITEASTREVILGTENGQLYEIAVDEKDKREKHIKPLFELAELPEAIMGLQMETAIVSNGSRYYVMAVTP

SEQ ID NO: 88928 - protein, 50 aa, Gossypium hirsutum
  Clone ID: LIB3083-076-Q1-L1-C7.pep
ELVIRTFSLTAFLVKRDYRKLYDFLYHSIGYDQDEPEKLGICQEEVRHNL

SEQ ID NO: 88929 - protein, 87 aa, Gossypium hirsutum
  Clone ID: LIB3083-076-Q1-L1-D1.pep
GLSLGRPTYVEELVIRTFPLPPFLVKKDYRRLYDFFYHSSGFVQDEAEKLGISREEVCHNLLFATCFNTFGGMKIFFPNMLKWISRA

SEQ ID NO: 88930 - protein, 63 aa, Gossypium hirsutum
  unsure (1)..(63): unsure at all Xaa locations
  Clone ID: LIB3083-076-Q1-L1-D3.pep
MVGTYNDLSYAAGLKKLDEHQHTRSYICGYQAXEDDFTDYAYLSGASSSNYGNDYQWYKHIDA

SEQ ID NO: 88931 - protein, 83 aa, Gossypium hirsutum
  unsure (1)..(83): unsure at all Xaa locations
  Clone ID: LIB3083-076-Q1-L1-D4.pep
MERSTASRLRTLGIQLSLCFALYIGLNLGQPQTLVYNDNGGPFDLYFISDRGGSRSLXEQTHLLKLMGNVAKAYDLNFEVNIS

SEQ ID NO: 88932 - protein, 74 aa, Gossypium hirsutum
  Clone ID: LIB3083-076-Q1-L1-D7.pep
NTNAALLSTRAPSDAVHKSRRLRSRSINKCKQIIVISNKPNLLLTLKECSFIKLHNFMPRKGIHHPISSKDRAI

SEQ ID NO: 88933 - protein, 89 aa, Gossypium hirsutum
  Clone ID: LIB3083-076-Q1-L1-E3.pep
RGQISQTKAVSANDVKQGGSPISRMESTSSCEGSVTGIQISRRESTPTSGGLITGDQLPRAELTYTPAKVIIGNQTSRRESTPTSGGIV

SEQ ID NO: 88934 - protein, 67 aa, Gossypium hirsutum
  Clone ID: LIB3083-076-Q1-L1-E6.pep
CNRWAKAVTNVARRLKKHGCDLKSLSKTKSYGVPGRKDGTRSTVPYVTHVQGVLVNQDWLLLWTETD

SEQ ID NO: 88935 - protein, 88 aa, Gossypium hirsutum
  Clone ID: LIB3083-076-Q1-L1-F11.pep
LGKARVEGGSYERWNTPPRAINTHFCSRKTGTSKRLCEFKKMKTVLPYKKEEALTTLSLIRETFGAEKAVEITKMREARGPRNKLKSR

SEQ ID NO: 88936 - protein, 34 aa, Gossypium hirsutum
  Clone ID: LIB3083-076-Q1-L1-F12.pep
AIFYSMMVVKDLKVYFEGKGVTRFIKTTIKEGFR

SEQ ID NO: 88937 - protein, 51 aa, Gossypium hirsutum
  unsure (1)..(51): unsure at all Xaa locations
  Clone ID: LIB3083-076-Q1-L1-F2.pep
PPXXVXXXXXXXLXRLCLALXXXXXCPXVSXXXXXSXXXLCVVSPPSXXVS

SEQ ID NO: 88938 - protein, 67 aa, Gossypium hirsutum
  Clone ID: LIB3083-076-Q1-L1-G1.pep
LPIVGKAIVDIQNLKDAVGSAVDVMHAMASSICSLSSKVKEMNSLVNELVSVAANERILLEQCKEHL

SEQ ID NO: 88939 - protein, 38 aa, Gossypium hirsutum
  Clone ID: LIB3083-076-Q1-L1-G3.pep
WAAVAVRSDHPQGGYPCPPLKIIILDEAYSMTEDAQNA

SEQ ID NO: 88940 - protein, 60 aa, Gossypium hirsutum
  Clone ID: LIB3083-076-Q1-L1-G4.pep
RNTDITPPLSSSSSDVLRKARLFSYVCTVLAYLAFGTMPYGQDLMCILGQLEPITGRAMY

SEQ ID NO: 88941 - protein, 44 aa, Gossypium hirsutum
  unsure (1)..(44): unsure at all Xaa locations
  Clone ID: LIB3083-076-Q1-L1-G7.pep
LDIIGELATFFKNESDVVCLYRRRRSYLSYVLHQRILTLAXATA

SEQ ID NO: 88942 - protein, 77 aa, Gossypium hirsutum
  Clone ID: LIB3083-076-Q1-L1-H4.pep
SLGHCQVRGCAVLTNAPFILNLDCDHYINNSKAIREAMCFLMDPQFGKKLCYVQFPQRFDGIDRHDRYANRNVVFFD

SEQ ID NO: 88943 - protein, 59 aa, Gossypium hirsutum
  Clone ID: LIB3083-076-Q1-L1-H5.pep
GFPFRLGLNVPVLNLLFPYSIEKLSSEESRLQINCYVMFSQKKKKSNAQLKITCKTTKR

SEQ ID NO: 88944 - protein, 53 aa, Gossypium hirsutum
  unsure (1)..(53): unsure at all Xaa locations
  Clone ID: LIB3083-076-Q1-L1-H7.pep
GAPILYLLISVWVSFLVFPSVEYMKNSLRPPAIEPHHKDLISESNXFVQGGGS

SEQ ID NO: 88945 - protein, 47 aa, Gossypium hirsutum
  unsure (1)..(47): unsure at all Xaa locations
  Clone ID: LIB3083-076-Q1-L1-H9.pep
XWTQIIYDYTKFPVISYIPSQIFIVIYLLLRIDPLPQASSNLISSNL

SEQ ID NO: 88946 - protein, 41 aa, Gossypium hirsutum
  Clone ID: LIB3083-077-Q1-L1-A11.pep
LNLTKRHLQCLFSLLLWLCIYVLLDTSIYSCCVICLLNGGI

SEQ ID NO: 88947 - protein, 127 aa, Gossypium hirsutum
  Clone ID: LIB3083-077-Q1-L1-A6.pep
RISKASSGSDLTKAPIPTDVQGMKKSDSENRLSEVDISGLVSQLKDLQKKNAELEENNQMLSVELQAKEAEHETLQTRFNDLEQNTVPSLRKALKDVAMEKDAAVVAREDLSAQLRMLKKRLKEAED

SEQ ID NO: 88948 - protein, 45 aa, Gossypium hirsutum
  Clone ID: LIB3083-077-Q1-L1-B10.pep
CQASIGDLVTSKASIYTITQDLGIASFIVLFSGMYRDSSIYLLFC

SEQ ID NO: 88949 - protein, 45 aa, Gossypium hirsutum
  Clone ID: LIB3083-077-Q1-L1-B11.pep
NSNRHTGMTINILSFLPTIRTHTSWLIYKTLNKLSGPYSRQKTNQ

SEQ ID NO: 88950 - protein, 130 aa, Gossypium hirsutum
  Clone ID: LIB3083-077-Q1-L1-B2.pep
PNREAYATVLHASESYVCGAITLAQSLLKSGTNRDLILLLDDSISEPKRHALELAGWRLRFIKRIRNPRAQKHTYNEYNYSKFRLWQLTDYEKVIFIDADIIVLKNLDHLFHFPQLTATGNDVWLFNSGI

SEQ ID NO: 88951 - protein, 116 aa, Gossypium hirsutum
  unsure (1)..(116): unsure at all Xaa locations
  Clone ID: LIB3083-077-Q1-L1-B4.pep
PNLFSYATELHGSVSYISGPTTLSQNLLKSHTNRNLILLLYYSISEPKRHSLQXAAYHNLFIKIILNPLTQKHTYXXYNYSKFLLLQLTHYKKVIFIYSHIILLKNLNHLFHYPQI

SEQ ID NO: 88952 - protein, 77 aa, Gossypium hirsutum
  Clone ID: LIB3083-077-Q1-L1-B6.pep
ICIHGYRFSSMVFSLEPVALMRKNVLVLHHGGYYHWNVRESALHVYISQVKLVLSGFELCGFLYFIKINFLHPPRWH

SEQ ID NO: 88953 - protein, 127 aa, Gossypium hirsutum
  Clone ID: LIB3083-077-Q1-L1-B7.pep
LLFTIAVREDPLDYVRNAKAIIDRKKRSLEAFCTFYIADWALNLFGIKAASALSHKVISRTTMCFSNMVGPVEEIGFCGHPMAFLAPSSYGQPYALMINFQSYIDKMTIVLSVDEGTIPNPHQLCDD

SEQ ID NO: 88954 - protein, 54 aa, Gossypium hirsutum
  Clone ID: LIB3083-077-Q1-L1-C12.pep
FTKTKHFRRFLKKIALSNQPLSPSLSSINLQTNIKLLISPESTTFIFLFQNDGP

SEQ ID NO: 88955 - protein, 93 aa, Gossypium hirsutum
  Clone ID: LIB3083-077-Q1-L1-C7.pep
FVLGSVNRHMRGALTRNRPFLHVACHGEELGTDPWNNINRTDMHDYYELDELKQLLQEGEWESHYKKMEEAENDSDAEGERILLVFLLKICWL

SEQ ID NO: 88956 - protein, 91 aa, Gossypium hirsutum
  Clone ID: LIB3083-077-Q1-L1-D2.pep
GYNWLSILGEFMEMWQTSWIPFTYCVPKRNENQRPIQLRRLTAWGTSKSLCSIQIAIPFYYSDVAMSTWYHESLTFAANENQRPMSCYATL

SEQ ID NO: 88957 - protein, 51 aa, Gossypium hirsutum
  Clone ID: LIB3083-077-Q1-L1-D4.pep
LYDHIVREVERPGLMLHKKETCEAFTIFETPPMVVVGVITYVKTPLFFPTL

SEQ ID NO: 88958 - protein, 123 aa, Gossypium hirsutum
  unsure (1)..(123): unsure at all Xaa locations
  Clone ID: LIB3083-077-Q1-L1-E1.pep
SNIQPRFVSTTAGAILPAGTGNDMARELSWGGGLGAMDRHGGLCMVFQQIEHAAATILDRWKASILNQQGKQLXSPKFMNNYLVIGCDANEALDIHNLREDNPPKLYNQFINKALYSREGARS

SEQ ID NO: 88959 - protein, 64 aa, Gossypium hirsutum
  Clone ID: LIB3083-077-Q1-L1-E11.pep
LYLTLYPPLPTHIQTNNHTPLIKILYPSPHTYHTINNLISYLLFQNSNNYIHYLLYNLNSLSNI

SEQ ID NO: 88960 - protein, 41 aa, Gossypium hirsutum
  Clone ID: LIB3083-077-Q1-L1-E12.pep
VAPTTKVYQHPYTNIPNVYLPHNFFKSNTITSTNPKKTKKQ

SEQ ID NO: 88961 - protein, 127 aa, Gossypium hirsutum
  Clone ID: LIB3083-077-Q1-L1-E3.pep
TFCYMSACAFLSCVSIVCMKLVPLQPIKSRPQFLKIATLSVVFCGSVVGGNISLRYLPVSFNQAVGATTPFFTALFAYFMTFKREAWVTYGALVPVVAGVVIASGGEPSFHWFGFIMCLSATAARAF

SEQ ID NO: 88962 - protein, 63 aa, Gossypium hirsutum
  Clone ID: LIB3083-077-Q1-L1-E5.pep
NSDQELYSSLFGIETKSLVQKYAADPVAFFNQFSDSMVKLGNIMNSDRFINGEVRKNCRFVNT

SEQ ID NO: 88963 - protein, 88 aa, Gossypium hirsutum
  Clone ID: LIB3083-077-Q1-L1-E7.pep
NLNLTTLHQKTAGFYIPPSPTKHKIQTTKLFISSNLHRNLTLTFIPFSNSNSSNPNNILHNLKPQNITKTISQKFHSLLPYHSCLFQI

SEQ ID NO: 88964 - protein, 48 aa, Gossypium hirsutum
  Clone ID: LIB3083-077-Q1-L1-E9.pep
QPKRHYSFINFIVFFCTSTKVTSLHVDTSFPAYHSGLVDLDTSSNPDF

SEQ ID NO: 88965 - protein, 126 aa, Gossypium hirsutum
  unsure (1)..(126): unsure at all Xaa locations
  Clone ID: LIB3083-077-Q1-L1-F2.pep
VYHYLLTGDKLRWDSIPYNEIYNGMFWKVEGKRINQGAVNEHIEANPSAKRGDNNEGVDDQTINVVDINYTFILHEQPAFDKNQFVTFIXRYITNLTPKLQPDKQESFTNNIXGATKFLISKLKDL

SEQ ID NO: 88966 - protein, 92 aa, Gossypium hirsutum
  Clone ID: LIB3083-077-Q1-L1-F4.pep
MRVERFQGKVYEAAELSPPRPNSPITTEDDNDNNGEELFVPPLNFAMVDNGVFRSGFPDYANFSFLQSLGLRSIIYLCPESYPEANNEFLKA

SEQ ID NO: 88967 - protein, 73 aa, Gossypium hirsutum
  Clone ID: LIB3083-077-Q1-L1-G10.pep
FTSFFFFDVFKSAVACNLLSSSPMEKSPSFLIKRSIYTFLQYYHYFTASAQILGFPYSLSVLVSQKIEPLSPF

SEQ ID NO: 88968 - protein, 90 aa, Gossypium hirsutum
  Clone ID: LIB3083-077-Q1-L1-G11.pep
GELYSPGHTDLGSITLLFRQPVAALQILNSEQQWKWVKPQDETITINICDALQALTGNFLKSSIHRVHTPPDDQAHIDRLGVLFFARPNN

SEQ ID NO: 88969 - protein, 59 aa, Gossypium hirsutum
  unsure (1)..(59): unsure at all Xaa locations
  Clone ID: LIB3083-077-Q1-L1-G5.pep
PRGSLEKHLFRKAGCNHTWSTGIMNDLKAPXRLALLHGVDTPIISYAITHMKHFIACGL

SEQ ID NO: 88970 - protein, 30 aa, Gossypium hirsutum
  Clone ID: LIB3083-077-Q1-L1-H10.pep
QVFYLKPVARIHNQTITESTIIMAMDALKV

SEQ ID NO: 88971 - protein, 129 aa, Gossypium hirsutum
  Clone ID: LIB3083-077-Q1-L1-H2.pep
ELFYQMKGMPSGGDVETGDIPSLTDLGLNTAATMAQDGRPSVSASMAGGENEALQRLKKFAAECKAQPYKGSKDGNQETIYGANFSCKISPWLAMGCLSPRFMFDELKKTANRTVSATSKKNDGGSDSP

SEQ ID NO: 88972 - protein, 125 aa, Gossypium hirsutum
  unsure (1)..(125): unsure at all Xaa locations
  Clone ID: LIB3083-077-Q1-L1-H4.pep
SLYSITSQVSSERKFSGLSDHQLYDDSNINEVDSNLENYEKLSGVTLNHSKELLENGXIDSLFGTKHMSTADFTCQGAMAAEGSSIELVNAIQPACNNSPSADSVMSNKTDSILCFTTKHAHSSL

SEQ ID NO: 88973 - protein, 83 aa, Gossypium hirsutum
  unsure (1)..(83): unsure at all Xaa locations
  Clone ID: LIB3083-078-Q1-L1-A11.pep
VSTSXWAGAVQTSSRVAFSCDEFLWYCFVFLDQVVLAQMVLPILNSAIPLLPAASCHGIYYRFFLHFLVSFTAFQRPFVNNSY

SEQ ID NO: 88974 - protein, 80 aa, Gossypium hirsutum
  Clone ID: LIB3083-078-Q1-L1-A12.pep
LFLFFLTMAHNWGRSFLLVPLLLITVSLVNRLSHQLFSLLTFYSIHKHTSSDLSQLASLILNAPKCLKLSDPISRKVPGT

SEQ ID NO: 88975 - protein, 55 aa, Gossypium hirsutum
  Clone ID: LIB3083-078-Q1-L1-A2.pep
CSSKPLSLFFKNNIRLIYLLFKNIVLYNLPRRQHPPQRHIQTYCHAILILSSELY

SEQ ID NO: 88976 - protein, 123 aa, Gossypium hirsutum
  Clone ID: LIB3083-078-Q1-L1-A6.pep
GKSFAKAANLSLLIISRNEFNGSLPEEIGLVDNLVQLSASGNKFGGSLPKSIVKLDGLGILDLHGNELEGELPSGIESLKKLNELNLADNKFSGKIPDGIGSLSVLNYLDLSNNQITGRVPLG

SEQ ID NO: 88977 - protein, 85 aa, Gossypium hirsutum
  Clone ID: LIB3083-078-Q1-L1-B2.pep
GLRSYNFTGPFIHRKYQKLVHHPRYSTLKTPIPNQHVNSSPLPTDNGSFLNTPPHPLRLSHQTQRPLLYNFFPAQLELYVPQKTF

SEQ ID NO: 88978 - protein, 69 aa, Gossypium hirsutum
  Clone ID: LIB3083-078-Q1-L1-B9.pep
MAYDSKQKRNVEPVKVQTSPSSEERSYINLPNFFLSVMLKYVKLGYHYIISNAMYLKLEPLLSIALVHF

SEQ ID NO: 88979 - protein, 69 aa, Gossypium hirsutum
  Clone ID: LIB3083-078-Q1-L1-D10.pep
ISFSYRDRALLWVGIIPAAENPNFLLDKSSLENLSRLASTLALLAQAVFEDKINGAFGLGNLKDNVFDS

SEQ ID NO: 88980 - protein, 111 aa, Gossypium hirsutum
  unsure (1)..(111): unsure at all Xaa locations
  Clone ID: LIB3083-078-Q1-L1-D12.pep
KHGIQYPKIPANIDKQDAYKEHKNEEYHXITXSKEHEEYEKEKPTFPKRKKPNEHKKHPFKYPXILVYTEKHDKSKEHKHXEFHKSHXSKDHEEYEKEKPNLYKWKKPKRA

SEQ ID NO: 88981 - protein, 84 aa, Gossypium hirsutum
  Clone ID: LIB3083-078-Q1-L1-D2.pep
LDITFSESDLDSMDYITMPTTTQLASYMSSYHRRQAFVMYLQANPGGITIFGWTVDRGLINTIFFLELTLVTFVLGQTVVFNSA

SEQ ID NO: 88982 - protein, 51 aa, Gossypium hirsutum
  Clone ID: LIB3083-078-Q1-L1-D3.pep
TANPFTKCNHSNQSTNFNLKNEKEKSRKKCTANLDYQEKYENVKKSHQLQF

SEQ ID NO: 88983 - protein, 69 aa, Gossypium hirsutum
  Clone ID: LIB3083-078-Q1-L1-E9.pep
MMVKKSFFLQKQFIHTNNILSNRGPLIQIPLETIFQVNKNLLILSSIKIIFSVYKKISLFPNTTRIIIL

SEQ ID NO: 88984 - protein, 104 aa, Gossypium hirsutum
  unsure (1)..(104): unsure at all Xaa locations
  Clone ID: LIB3083-078-Q1-L1-F10.pep
RLIPANGAGMIYWESAPSLIADLSKPNTIAXQKSTVXVKTASAVETTSTHINTGINSYILCTPQFLTNGTMIHDLFNPDRVLIGSNATPEGHTAITNLRDVYAH

SEQ ID NO: 88985 - protein, 46 aa, Gossypium hirsutum
  Clone ID: LIB3083-078-Q1-L1-F3.pep
KNQESQTLKLMIYIIKPCSKQKGQRHQSKSKNNKRNHRFQKHVFHN

SEQ ID NO: 88986 - protein, 118 aa, Gossypium hirsutum
  unsure (1)..(118): unsure at all Xaa locations
  Clone ID: LIB3083-078-Q1-L1-F7.pep
IHSSYERCTICTREEITLWSKFTFAQTFGRNITVERSHIPKRHSGMACDAIEDDPQWQLKVHLYDLPTKTNNKIFQKDLKSLSHMXSKYIYMHRXLLYNSVTTQSSQETLWFYTCLYD

SEQ ID NO: 88987 - protein, 67 aa, Gossypium hirsutum
  Clone ID: LIB3083-078-Q1-L1-G12.pep
LAILCLNSLNQFRTTHVKQVYLFDTTYSPSVLVTGHIASFLNSSSRKAENCTRLRQSAKAKTQGAAR

SEQ ID NO: 88988 - protein, 69 aa, Gossypium hirsutum
  Clone ID: LIB3083-078-Q1-L1-G2.pep
NIDPGIPVLLYCGAMSTQSLTEMRTKCISGGRKRLPHGTDNLRDHVCRLSRRMRAVTTYHTIGLRDLLC

SEQ ID NO: 88989 - protein, 98 aa, Gossypium hirsutum
  unsure (1)..(98): unsure at all Xaa locations
  Clone ID: LIB3083-078-Q1-L1-H10.pep
GKLFFLQKHPXGEGFKNPHLRALANKFNGDDTTNVILTFKDVTVEGHRTRCGTHESTRVGTRPIFTTYVCAXTRTTNGPXQSAWPFHQPIYGSQTLPL

SEQ ID NO: 88990 - protein, 94 aa, Gossypium hirsutum
  unsure (1)..(94): unsure at all Xaa locations
  Clone ID: LIB3083-078-Q1-L1-H2.pep
RRSLSSRQLLYDRIVTAKDHIRQHPFHQQRMILTSKHFEDGLTLFEYNMQKEXTLHLELRLSGVKQIYLKTLTRKTVTIKVESSDTTDNIDAKI

SEQ ID NO: 88991 - protein, 120 aa, Gossypium hirsutum
  unsure (1)..(120): unsure at all Xaa locations
  Clone ID: LIB3083-078-Q1-L1-H6.pep
DILSPFAGKKQXYTYETMDFWEQIKTPGMSLKCSGLYLAQFRYTSPDLLAGGDGTKSASILGDVYVHPSAKVHPTAKIGPNVSISANVRIGAGVRLIGCIILDDVEVQENAAVINFIGGW

SEQ ID NO: 88992 - protein, 106 aa, Gossypium hirsutum
  unsure (1)..(106): unsure at all Xaa locations
  Clone ID: LIB3083-079-Q1-L1-F12.pep
YESSSSLSFGPNSEKGRELTYRESASPMIXDVSKSNKIVVDKSTVPLITSVTQGKMLAHNNELLILQIMFQHLLIVKGTEIQDLFNTDPVLIGSPVTPQSLKAIPI

SEQ ID NO: 88993 - protein, 123 aa, Gossypium hirsutum
  Clone ID: LIB3083-079-Q1-L1-G10.pep
EKFYLKLMIEEREPMDVPMVFICPISLEPMHDPVTLCTGQTYERSNILKWFSLGHCTCPTTMQELWDDSMTPNKTLQQLIHSWFSQKYLAMKKRSEDVQGRVKEILENLKKIKGQARVQALKE

SEQ ID NO: 88994 - protein, 69 aa, Gossypium hirsutum
  Clone ID: LIB3083-079-Q1-L1-G9.pep
NQKEISLYAVNYNQMLNEGSNETSTRASYHSSNLPEPDLEKQGNNQVLPQDERLPGSVRGSACESSPTL

SEQ ID NO: 88995 - protein, 35 aa, Gossypium hirsutum
  Clone ID: LIB3083-080-Q1-L1-A11.pep
KFLPTPYKQASVVLIALAVGMITIEMAYKPLLDKA

SEQ ID NO: 88996 - protein, 46 aa, Gossypium hirsutum
  Clone ID: LIB3083-080-Q1-L1-A8.pep
SYMVRQYVSIHTDPMLIAGNDNWPVGPLSRPDALFIGHDTGQENVM

SEQ ID NO: 88997 - protein, 53 aa, Gossypium hirsutum
  Clone ID: LIB3083-080-Q1-L1-B7.pep
VSRDLKFHCLHNFFYKRLDSISFNFIFYSFSNSISTSFGDFSKLDFCCCPKQF

SEQ ID NO: 88998 - protein, 102 aa, Gossypium hirsutum
  unsure (1)..(102): unsure at all Xaa locations
  Clone ID: LIB3083-080-Q1-L1-C4.pep
FDMKNEQGRRSEQELWLRLKNKPRILIILDDIWESINLMEEIGIPIGDDHKGCKVLLTTRHXQVCRAMDCQNVVQLGCLNDDEAWTLFENKAGLDDFSDDSI

SEQ ID NO: 88999 - protein, 102 aa, Gossypium hirsutum
  Clone ID: LIB3083-080-Q1-L1-D5.pep
YAFMQYADQIMGRFLRVFACRSATVHEEAMLAIGALAYAIGADFAKYMPEFYRYLEMGLQNFEEYQVCAVTVGVVGDISRALEEKIVPYCDGIMTQLLKICL

SEQ ID NO: 89000 - protein, 69 aa, Gossypium hirsutum
  Clone ID: LIB3083-080-Q1-L1-E1.pep
SGYIAFDMFHCQAGSMDDAFDSNNMGHITCGFTQGHDCTSSGKRYKRDLFIWIGCTRKQSCFNGERRDF

SEQ ID NO: 89001 - protein, 108 aa, Gossypium hirsutum
  Clone ID: LIB3083-080-Q1-L1-E11.pep
LVPLVVDIISLSIKELIELGAVTFLVPGNFPIGCSPSLLTSFHGSEKDQYDPLTGCLTWLNQFSQHHNELLRKELENIRNLHPQINIIYVDYYKASTPFYQSPKNYGF

SEQ ID NO: 89002 - protein, 36 aa, Gossypium hirsutum
  Clone ID: LIB3083-081-Q1-L1-A2.pep
KYGLDTSEFTYNPSKSNRYQPVAPQPAEERSRCSIM

SEQ ID NO: 89003 - protein, 90 aa, Gossypium hirsutum
  Clone ID: LIB3083-081-Q1-L1-A6.pep
MADSSGTTLMDLITADPAPVPAAASTVSSSSASSTTAAASPAATQQQYVSTKTALGEKKSKRAALMQIQNDTISVAKAALNPVRTNIISH

SEQ ID NO: 89004 - protein, 83 aa, Gossypium hirsutum
  unsure (1)..(83): unsure at all Xaa locations
  Clone ID: LIB3083-081-Q1-L1-A7.pep
GKLNKTLTCSGSSGVDDMLVGCRWHNDHLVTVSLRGTMSIFSASNLXKSPIPLSGHMKNFHLIAGPKRGPKCGLANSYYAPNS

SEQ ID NO: 89005 - protein, 105 aa, Gossypium hirsutum
  Clone ID: LIB3083-081-Q1-L1-B12.pep
PNRFSERWAEWGDLSRIFPEYVCPSYPSIPPLDFAMDVSRMRNVACYISHSSSPNVLVQCVLYDHNNLMFPHLMLFAMENIPPMRELSIDYGVADEWTGKLSICN

SEQ ID NO: 89006 - protein, 102 aa, Gossypium hirsutum
  unsure (1)..(102): unsure at all Xaa locations
  Clone ID: LIB3083-081-Q1-L1-B4.pep
EAKENLQKDLGRDPTEDELAEATNSSAAQVRRQLEVGRAARNKLIKHNLRLVLFVIKKYFQDFANGPRFQDLCQAGVKGLITAIDRFEPRRRFRLSTYXLFW

SEQ ID NO: 89007 - protein, 60 aa, Gossypium hirsutum
  Clone ID: LIB3083-081-Q1-L1-B9.pep
EINKIQSDNTYNTIHHESRNAKERIKINNPTKQRINHFIHFTKLRVITNHPSLLTSIPAL

SEQ ID NO: 89008 - protein, 53 aa, Gossypium hirsutum
  Clone ID: LIB3083-081-Q1-L1-C12.pep
HPESPFYLEGKGGLFEFIEERLKENGHIVIVVAERAGQEYLAQSMQGIDEKDA

SEQ ID NO: 89009 - protein, 85 aa, Gossypium hirsutum
  unsure (1)..(85): unsure at all Xaa locations
  Clone ID: LIB3083-081-Q1-L1-C9.pep
MLQQQTNNNSSSSNIPVSERYWTLVDKADKKFSKIRDLPYYEHNRYETYFYKVFXYAQLWEFLPENRQKLVEAGLMRWEMGEIAS

SEQ ID NO: 89010 - protein, 112 aa, Gossypium hirsutum
  Clone ID: LIB3083-081-Q1-L1-D12.pep
HIFVVALMAIKSNLHDPYNVLENWDSNSVDPCSWRMVTCTADGYVSALGLPSQSLSGSLSTSIGNLSYLQSVLLQNNAISGSIPATIGKLEKLVTLDLSNNTFSGEIPAFLG

SEQ ID NO: 89011 - protein, 133 aa, Gossypium hirsutum
  Clone ID: LIB3083-081-Q1-L1-D9.pep
TFHHSFAFNLYIQKNKAENKTQMSSSKLVVVKDDDEAERTSSLEFQNDKKKKKKKMMMISSGELKANDDEDEDEDEDEDERNSLEFQDRKKKIISLGELKANDDGDDDGFKTPTSLDHKIPVMKQCPPAPRKP

SEQ ID NO: 89012 - protein, 66 aa, Gossypium hirsutum
  Clone ID: LIB3083-081-Q1-L1-E2.pep
FLGVLGHEIVQPVRVASLWSWSYIFCRQAACCCTIARQWERPYQEPFLEQTDPTICIAAYLYACLR

SEQ ID NO: 89013 - protein, 50 aa, Gossypium hirsutum
  Clone ID: LIB3083-081-Q1-L1-E5.pep
TLKVSGCNNSIKVNYARLGSVNARHTWIRWTGTKFGSAIDNACLVIVSYL

SEQ ID NO: 89014 - protein, 74 aa, Gossypium hirsutum
  Clone ID: LIB3083-081-Q1-L1-G3.pep
ISFYEKALPLSTKSLSTYAGLAYTYHLQDNFTSAITYYHKALWLKPDDPFCTEMLNIALADECRHGIEPKIDFH

SEQ ID NO: 89015 - protein, 94 aa, Gossypium hirsutum
  Clone ID: LIB3083-081-Q1-L1-G6.pep
KMASKIKASSALFFSFNLLFFTLVNSYNIDDDSKDSKNPVFIRPGAVYSNNQDQLASFRVWGVGCWRMLISKTHLQHHVAACLQEWGILKLKFG

SEQ ID NO: 89016 - protein, 122 aa, Gossypium hirsutum
  unsure (1)..(122): unsure at all Xaa locations
  Clone ID: LIB3083-081-Q1-L1-H10.pep
LRESEERLGFVSEERDQLIKQRDSAMQEAHMWRNELAKARERVVILEAAVLRAEEKVRVAETDAEARIKEAEQKEAAAVKEKQDLLAYVNALQAHLQRQQSDTKXIFEEKMESSNTSNSPPD

SEQ ID NO: 89017 - protein, 62 aa, Gossypium hirsutum
  Clone ID: LIB3083-081-Q1-L1-H12.pep
HFCAPLAISSMSSHHLDGSSALPISPFCFAISFPLTISIQISIRQVRFCGSKAVISVLCVRQ

SEQ ID NO: 89018 - protein, 111 aa, Gossypium hirsutum
  unsure (1)..(111): unsure at all Xaa locations
  Clone ID: LIB3083-081-Q1-L1-H2.pep
IMYYARKYLPGLGRWQSTQGGKARTFASFSLTPATVDQKVLLESIETLLPKKKGKSFCRXLLGLLRVASILGVNQTCQDSLERRIGMQLELASLDGLLIPSYSDSDTLYKY

SEQ ID NO: 89019 - protein, 46 aa, Gossypium hirsutum
  Clone ID: LIB3083-081-Q1-L1-H4.pep
WFGVYECDEHLVSVKTFFTFESCGNVSKLPGINFSLGTLWYFYSIE

SEQ ID NO: 89020 - protein, 75 aa, Gossypium hirsutum
  unsure (1)..(75): unsure at all Xaa locations
  Clone ID: LIB3083-082-Q1-L1-A1.pep
KLKNQSALLPTKTATASFXQQKKKYSERQLTVVSLCCKIFNLEMCLFFFHHVNAFGFVVHFMFLCHCLSSFAIVS

SEQ ID NO: 89021 - protein, 133 aa, Gossypium hirsutum
  Clone ID: LIB3083-082-Q1-L1-A11.pep
ISSDSLLEPQFTSELCAPACCHNCPNIVDLFFNLAAGEGVFLPDLCEAQRINPRRSMVELMSSSGAALGPISSEASALAPSPTPPITSEVPDSNEGLASILSPSSISSEASTPGPGLAPISSEASSSTSSPGP

SEQ ID NO: 89022 - protein, 114 aa, Gossypium hirsutum
  Clone ID: LIB3083-082-Q1-L1-A5.pep
DMKYAISKLDDSEFRNAFSRAYIRVKKYDSRYDSRRSYSRSRSPYSRSPSRSRSYSSRSRSRSRSRSKSPRARYTSQSPSVSRSVSPCSHSVSPARSYSRSGNLRQSGDWMLGT

SEQ ID NO: 89023 - protein, 118 aa, Gossypium hirsutum
  Clone ID: LIB3083-082-Q1-L1-B12.pep
QEKRGLVGNYGDAGHDQAEQEEEEDYLMAEARQPLWRKVPISSSLINPYRIVIVLRLFVLIFFLRFRIITPAYDAFPLWLISVICEVWFAFSWILDQFPKWFPITRETYLDRLSLRVE

SEQ ID NO: 89024 - protein, 103 aa, Gossypium hirsutum
  Clone ID: LIB3083-082-Q1-L1-B8.pep
AKARQSSCPRTSGSGDNNLAPLDVATPNSFDLKYFNNLLNKKGLLHSDQILFNGGSTDSLVKTYSSNTKKFYSDFVTAMIKMGDITPLTGSNGEIRKNCRKPN

SEQ ID NO: 89025 - protein, 86 aa, Gossypium hirsutum
  Clone ID: LIB3083-082-Q1-L1-B9.pep
FNSSHLQHQIALFLSSLLCDHHSGKKKQTENLPFCKTESSDAGLPQIWSTLSLNHGFNEVRASKTEFLSSNRLLLHESNSLFDAGP

SEQ ID NO: 89026 - protein, 125 aa, Gossypium hirsutum
  Clone ID: LIB3083-082-Q1-L1-C10.pep
RNSSVTADVPFFLVSIGSDSHAAVRHLKDLEACQRDGQKLLFAFYDPCHLPNNPGWPLRNFLALISARWNLKTVRFLCYRENRGFADLNLSLVGEALITVQQGWREQQCVPNAVGWELNKGRKVP

SEQ ID NO: 89027 - protein, 124 aa, Gossypium hirsutum
  Clone ID: LIB3083-082-Q1-L1-C5.pep
HTVGCGDSFVAAMAFGFIHNIPLVTTLAFANAVGAATAMGCGAGRNVAALKQVVELMEAPNLNEDDGFWNELLGEHLDSQEVTFLSKMILNGSNGRMNRVTFQKAVSELLPKLKSSQLEGTLSC

SEQ ID NO: 89028 - protein, 63 aa, Gossypium hirsutum
  unsure (1)..(63): unsure at all Xaa locations
  Clone ID: LIB3083-082-Q1-L1-D10.pep
PDQQRLIFAGKQXEDXRTLADYTIKKESTFNWWLLFRGGLQILGKTLTGKTITLKVKSFTPFI

SEQ ID NO: 89029 - protein, 125 aa, Gossypium hirsutum
  unsure (1)..(125): unsure at all Xaa locations
  Clone ID: LIB3083-082-Q1-L1-D12.pep
GVPKSDIPIILGKRPQLCGISLSENLIPTMTFLEDLGVDKKQWAKVIYRFPALLTYSKQKFKTTGDFLYEMGLSSKNVGKVLTRCPTIISYSVEDKLRPTAKYFRSLGADVSLLLLXVPQTFGLS

SEQ ID NO: 89030 - protein, 124 aa, Gossypium hirsutum
  Clone ID: LIB3083-082-Q1-L1-D9.pep
VDEVERKSPFYFLIRVPRYDDENLKEKIRLAQIRVDEKTQSRDAIPIEIQKMRAGCKKYGDHIDAAISQERSRPDLHKSKRQEIDSIQSMMNIEDIDAQIRNMEHMIQHETMPLKDEKQFIHQI

SEQ ID NO: 89031 - protein, 68 aa, Gossypium hirsutum
  Clone ID: LIB3083-082-Q1-L1-F4.pep
TSPPYFRTLTMPEPRSPIDGIVLQAQSQFGAVVPAAVSVAVHRNSVAVHICSVLSLVLSCPCRIHGSN

SEQ ID NO: 89032 - protein, 106 aa, Gossypium hirsutum
  Clone ID: LIB3083-082-Q1-L1-F9.pep
QCLLDSPSKPHENTLILMLHTVLINTAHHPTITRLPHTTSTVYICYTDTKHEMLLSPIYLLTNLCLQVLVCITFNSITIHAYLQVHSYFNCTIITIQAYVHVLIFN

SEQ ID NO: 89033 - protein, 62 aa, Gossypium hirsutum
  Clone ID: LIB3083-082-Q1-L1-H12.pep
ALLLAKVPLIRPVLQNQKSFKWRYQIRNSTPSLSLVQIYISDAEEKLNSIRKSFRKAAVLTA

SEQ ID NO: 89034 - protein, 92 aa, Gossypium hirsutum
  Clone ID: LIB3083-082-Q1-L1-H4.pep
AAQRSRRLDAIEAQLKAEQQMGESLLAGRGVVFYKILEAVPFQGSGDKIKLPPSCFTELSDQGAFDKGPMYFQLSLVHQEGSSATKDDEKGN

SEQ ID NO: 89035 - protein, 66 aa, Gossypium hirsutum
  Clone ID: LIB3083-082-Q1-L1-H7.pep
SNRVIHRDQTSSEIFVTKDADMRLGDFGRDKLLNTDDLTYSDAGTPNYMWTQLLADLPYGYKSDVW

SEQ ID NO: 89036 - protein, 77 aa, Gossypium hirsutum
  Clone ID: LIB3083-083-Q1-L1-A12.pep
PPREGCLSVSWKVALVSKGYRSKLDPFYLFTDMLFIEWILHVKNETRYTNTYLKNLVKLMKIEICNHKQGFKLRSRT

SEQ ID NO: 89037 - protein, 109 aa, Gossypium hirsutum
  unsure (1)..(109): unsure at all Xaa locations
  Clone ID: LIB3083-083-Q1-L1-A3.pep
ELLPVVYTPTVGEAGHTYWSILRPPYYLFITLKHTGNSYXFLRKCPYTYISVIVYTDGESIFGVHYLCCXGMAIFIXNLSLYPELQGVHASPHLPATIYVTTYNEPSYG

SEQ ID NO: 89038 - protein, 129 aa, Gossypium hirsutum
  Clone ID: LIB3083-083-Q1-L1-A4.pep
QQRIHNITRQREELLQMEVELRAQAIARSRVLEIQSSCDAKITAHVNAVAKLEEQLDEREQTIHEFERKMEEKDRELHSIKVDKEEVWAKEDLLREQNKELATFRRERDHSEAERAQHIKQIHDLQEHV

SEQ ID NO: 89039 - protein, 50 aa, Gossypium hirsutum
  Clone ID: LIB3083-083-Q1-L1-A7.pep
KHETAVEMAPPIETPTTCSGSHHASHPPLKERRLFSMSSRCVAAHPRRDL

SEQ ID NO: 89040 - protein, 67 aa, Gossypium hirsutum
  Clone ID: LIB3083-083-Q1-L1-B1.pep
VFPTSTRYDTMYSYKDANKRREWVAHLQAGAGIVADSVPADEQRECENKAAALARAIDLAESSFVDK

SEQ ID NO: 89041 - protein, 128 aa, Gossypium hirsutum
  Clone ID: LIB3083-083-Q1-L1-C3.pep
GRIPLVANVVIMTPHGYFAQDNVLGYPDTGGQVVYILDQVRALEEELLHRFKLQGLDITPRILVITRLLPDAVGTTCGQRLEKVYGTKYSDILRVPFRTEKGIVRPWISRFKVWPYLETYTKDVAAEI

SEQ ID NO: 89042 - protein, 129 aa, Gossypium hirsutum
  Clone ID: LIB3083-083-Q1-L1-C6.pep
LGFFLHSPFPSSERYRTLPVREELLRALLNSDLIGFHTFDYARHFLTCCSRMLGLSYQSKRGYIGLEYYGRTVSIKILPVGIHIGQLQSVLNLPETESKVAELRNKFRGQTAMLGVDDMDIFKGISLKL

SEQ ID NO: 89043 - protein, 128 aa, Gossypium hirsutum
  Clone ID: LIB3083-083-Q1-L1-D9.pep
LVPKEMHLVDCVKKSDEEKTYLEKEINRLVNLLKQSEEEASVSEEEAQLKENLKEVESNVIYLQEAVKEVKIESMKMKESMLVKETELQSVIQENEELRAREVASLKKVEELSKLLEEAMIKKQSEEN

SEQ ID NO: 89044 - protein, 128 aa, Gossypium hirsutum
  Clone ID: LIB3083-083-Q1-L1-E11.pep
HANRPKSSDGKSSSKDQSSISKVPSISELENRGATILLKEDQVSKVFQEYPYMFAHAGDLTVKDVEELLNNYTQLVFKYVCLLKGSDGASASFPLSKSQAQAQQHVETFKESQDHRAIAQNIGLQNDT

SEQ ID NO: 89045 - protein, 126 aa, Gossypium hirsutum
  Clone ID: LIB3083-083-Q1-L1-E2.pep
NIFGGKLAWGPEAIVCDDPNFQGHGNPSSGDIFHAAPNIDHSQHFVRKDVKEWLYWLRNDIGYDGWRLDFVRGFSGTFVKEYIEASNPAFAIGEYWDSMAYEHGNLCYNQDAHRQRIVNWINATGG

SEQ ID NO: 89046 - protein, 122 aa, Gossypium hirsutum
  unsure (1)..(122): unsure at all Xaa locations
  Clone ID: LIB3083-083-Q1-L1-F2.pep
SDSAALNVKNASLRIKAMGAGVLQDNGSHNLSVNSGPSSSAAFCLDNDNHTSPVNIPPELPPTKNPHSPALSTADTELSLSLPTKSNSTIVPTVSHSEASSSSYPGVLYGHWAPXDKKDEMI

SEQ ID NO: 89047 - protein, 128 aa, Gossypium hirsutum
  Clone ID: LIB3083-083-Q1-L1-F3.pep
CLQAKVYLQRELFGRYEYHAEGRPRFGVSLGLFVDCLNSFSAPGRSSMIEIQYPGPDMQLLIKSVDSLDACIYAEIRTRISDTISWDYNFEPAGSTPLTFTVKSAALKEAIDDLEWPGSSIHINLQPD

SEQ ID NO: 89048 - protein, 53 aa, Gossypium hirsutum
  Clone ID: LIB3083-083-Q1-L1-F5.pep
FLEIRECKLSSIPRDMFGVLESASYMLRFWDIFDTMSHLVCWRSVYSMSGDRA

SEQ ID NO: 89049 - protein, 75 aa, Gossypium hirsutum
  Clone ID: LIB3083-083-Q1-L1-F6.pep
LIESIMGGLEGLINILDSESGFGALEMQLLPEQAAFYLNNASRVSIPSAKSPKGAVAYPLPGHESYPENNNSIKM

SEQ ID NO: 89050 - protein, 78 aa, Gossypium hirsutum
  unsure (1)..(78): unsure at all Xaa locations
  Clone ID: LIB3083-083-Q1-L1-G6.pep
AAACVRHSARRRPRMSQIVRALEGDASLSXLNEGMRPGQSGVYSSYGSSDYDTSQYNEDMKKFRKMALGTQEFGASSE

SEQ ID NO: 89051 - protein, 94 aa, Gossypium hirsutum
  Clone ID: LIB3083-083-Q1-L1-H10.pep
MGSFQAPPGMRSSALLETSCGYLLQELQMIWNEVGEDQSEREKVLLELEQECLEVYRRKVDRANMSRARLHQELAESEAEFTHLLLSLGERSLP

SEQ ID NO: 89052 - protein, 121 aa, Gossypium hirsutum
  unsure (1)..(121): unsure at all Xaa locations
  Clone ID: LIB3083-083-Q1-L1-H7.pep
PQLVAKYEKQDEAEYETPEYKHPKCDQEYPKHEKPEIHTEEKQKPCXQHEQYHQSHKSKDHEEYQKEKPELPKLEMPTEPEKHTVEYANIPACKANQDEGKEHIHEGDHESRESEEHEKYE

SEQ ID NO: 89053 - protein, 77 aa, Gossypium hirsutum
  Clone ID: LIB3083-086-Q1-L1-B9.pep
MAYRRRHGISRSATFKEEIDHSSPAAAAVAGDNDFKTKTLTSSYSFSKTSKGFNTFEDSRNDSKGFWGVLARKAKAI

SEQ ID NO: 89054 - protein, 46 aa, Gossypium hirsutum
  Clone ID: LIB3083-086-Q1-L1-C11.pep
WHKRSSVFHLILVFHFIIRDKMASYIISFHYCGHALLFVIIWCYGL

SEQ ID NO: 89055 - protein, 48 aa, Gossypium hirsutum
  Clone ID: LIB3083-086-Q1-L1-E12.pep
YNVTATLILIILAKITTSPTPTTSQATWISLSRILNYPLLPVLSLPTT

SEQ ID NO: 89056 - protein, 39 aa, Gossypium hirsutum
  Clone ID: LIB3083-086-Q1-L1-F11.pep
ERKIKMLQQKLFHVHNLVLHHYWQSHVNVDPNNNSPSLK

SEQ ID NO: 89057 - protein, 103 aa, Gossypium hirsutum
  unsure (1)..(103): unsure at all Xaa locations
  Clone ID: LIB3083-086-Q1-L1-F12.pep
FLYFFSGYEAVTKSRSCDAYNLTYPITNGQVYNWDAMERYXWQQCIFNYXLRCDPEDHYFLLTESPLTAPENREYTGEIMFETTNVPGLYIAVNSVLALAAVY

SEQ ID NO: 89058 - protein, 87 aa, Gossypium hirsutum
  Clone ID: LIB3083-087-Q1-L1-A5.pep
TIILVACDSFYSNDICYVIDTQNKACYSSVLNATIENVRLLTPATPKPLVIVTPLHTSDIKATFRCSRSNGLNLSIPSGDNDFEGPS

SEQ ID NO: 89059 - protein, 46 aa, Gossypium hirsutum
  Clone ID: LIB3083-087-Q1-L1-A9.pep
NMNSVRRVQIFFGFNKRTMALVLVAFGWYGKQRSGACTKWMLSLHP

SEQ ID NO: 89060 - protein, 113 aa, Gossypium hirsutum
  unsure (1)..(113): unsure at all Xaa locations
  Clone ID: LIB3083-087-Q1-L1-B11.pep
GTNFSGXXGPXEGEXXXTARDXXKXXKXXXDXEPXRKXXXXPKXTXXXXAXXXXXGXXAXRXXXEEXGAQQSXXXNXTPKEDXGGGQPXPXXXKAKEXXERXGKGKTNXXXEP

SEQ ID NO: 89061 - protein, 47 aa, Gossypium hirsutum
  Clone ID: LIB3083-087-Q1-L1-B12.pep
INQFITTIIFFRACFKVQNLLIYTQIYSQTLRNNEFFNALNPLTHSI

SEQ ID NO: 89062 - protein, 130 aa, Gossypium hirsutum
  Clone ID: LIB3083-087-Q1-L1-B5.pep
DHQQGECLDMNEVSNFITSPPTPNSALDDPPYKINNQGIQRPINNKTVPATALHFGNLTEYDVHNLYGLLECKATHAALTNLTGKRPFILSRSTFVSSGKYTAHWTGDNAATWEDLAYTIPSILNFGLFG

SEQ ID NO: 89063 - protein, 63 aa, Gossypium hirsutum
  Clone ID: LIB3083-087-Q1-L1-B6.pep
MATKLLLTFAICRLIVTVGLTLDPTELLLLGVDAQLSVDPTDVKAASLDFGLLTGAQPPLAVM

SEQ ID NO: 89064 - protein, 123 aa, Gossypium hirsutum
  unsure (1)..(123): unsure at all Xaa locations
  Clone ID: LIB3083-087-Q1-L1-C4.pep
HLPCFDQRTVNHNSLGMKAELIGINYPRTKAALXGCIYEVESMYTCFIKRLGSYEEDITVSIDTAHSXITTRWQNIGPVTNDLARSNEPREIQFAHYRSHRTRISIYTRDNXDTGFYKRIVPC

SEQ ID NO: 89065 - protein, 118 aa, Gossypium hirsutum
  Clone ID: LIB3083-087-Q1-L1-D10.pep
MYTVYAEMGAFCCCSCGDDCEEYAYPSNSIYRHCICLRFFFYQLFTGYGALFHRLDGRPASHIQGASLSSTTTVTAISDNSAIETHVTMSRPVPYYAEQRYSRLQRDGLVSMRDKFVT

SEQ ID NO: 89066 - protein, 83 aa, Gossypium hirsutum
  unsure (1)..(83): unsure at all Xaa locations
  Clone ID: LIB3083-087-Q1-L1-D4.pep
AFXLVXFFFSLFVLGLPCPPLLWFLSLSLGAFSSXSVSLASVSSPLFPSASGWALLAAFPAGVFAXLVPLLGCFPXFLFIISL

SEQ ID NO: 89067 - protein, 130 aa, Gossypium hirsutum
  Clone ID: LIB3083-087-Q1-L1-E10.pep
RPDTLFYNCLIHALGRAGQVEDAIKVFEVEMPKTGVSPNTSTYNCMIAMLCHHAQQQKALSLLQDMGNLKICKPEVQTYYPLLKSCFKTGKIDNLLSKLLNDMVNKHHLSLDSSAYSLLIHGLCRASRSE

SEQ ID NO: 89068 - protein, 62 aa, Gossypium hirsutum
  Clone ID: LIB3083-087-Q1-L1-E4.pep
KDQLSQRPVAHLSTERILICKGSTNSKHIRNIPQCWDVSSVLTEIFTARSFPNHVPSEFNWI

SEQ ID NO: 89069 - protein, 65 aa, Gossypium hirsutum
  Clone ID: LIB3083-087-Q1-L1-E7.pep
FSFLWASTKVLICSKSILLVEARPFMTKAPPCLSHGRFVRLYVKSLYRWGTWDCLGSTIRRKLLF

SEQ ID NO: 89070 - protein, 66 aa, Gossypium hirsutum
  unsure (1)..(66): unsure at all Xaa locations
  Clone ID: LIB3083-087-Q1-L1-G12.pep
QXXXRQTXGQRXRRGTASSNXGRXXKKXPXXQXDTEEGAXGPKGRXKXXRTRKXHKGXXRGXTQKT

SEQ ID NO: 89071 - protein, 76 aa, Gossypium hirsutum
  Clone ID: LIB3083-087-Q1-L1-G3.pep
EDLFSFFLRKQLTSWDNIYQTKWLSNPILETNIIKTISKENKDLKSIKAFNKASCLLYLHRSFTSQKNQVPFFCQN

SEQ ID NO: 89072 - protein, 39 aa, Gossypium hirsutum
  Clone ID: LIB3083-087-Q1-L1-H11.pep
SAPQLTQSNESRQSSIKRSFKPTKCGAASFNNPTISSAF

SEQ ID NO: 89073 - protein, 94 aa, Gossypium hirsutum
  Clone ID: LIB3083-088-Q1-L1-A12.pep
LTRNLEAQLWETVNQIGDLQKQMENAKASDLESVRIVTLELDGAKESLQKVAEEENSLRSMVESLQLELENVKKEHSKLKEKNVETESIAWNLH

SEQ ID NO: 89074 - protein, 54 aa, Gossypium hirsutum
  Clone ID: LIB3083-088-Q1-L1-A8.pep
LMKLVNILTYKTLFQHLMVILPKVTDKIRMAIQPDRSMGNNLPLYFNYGWERIK

SEQ ID NO: 89075 - protein, 43 aa, Gossypium hirsutum
  Clone ID: LIB3083-088-Q1-L1-B8.pep
IIIKWNPVLFTVAECHCVVHGDNLIDSSMKKIVRVYKWREFDQ

SEQ ID NO: 89076 - protein, 48 aa, Gossypium hirsutum
  Clone ID: LIB3083-088-Q1-L1-D8.pep
IRRLCRCLSNLFLIHCDMISVCFQFLEHRFCFRIRLVEIFHYCSEFEL

SEQ ID NO: 89077 - protein, 67 aa, Gossypium hirsutum
  Clone ID: LIB3083-088-Q1-L1-F2.pep
SSFSFLSLTSSSLKNISQPPARPQQNHPGIFFTSYSYLTPSPQASYNTPFPSSSMVGGFSTTFIFKN

SEQ ID NO: 89078 - protein, 84 aa, Gossypium hirsutum
  Clone ID: LIB3083-088-Q1-L1-G2.pep
PKLNFAQSSSASSIYIYILCNAPKTRKQKKNLQKFTNVPKCSNKTGIPHICYPPIIYLFYRPAQCNQLNSSYFLHLLSNLFGRA

SEQ ID NO: 89079 - protein, 57 aa, Gossypium hirsutum
  Clone ID: LIB3083-088-Q1-L1-G8.pep
LYLLYIGDHSTGMFSINGQKPTFHTAAHYFLLNQNHIITPYFNSHLTLSFYFNQHHN

SEQ ID NO: 89080 - protein, 95 aa, Gossypium hirsutum
  Clone ID: LIB3083-088-Q1-L1-H4.pep
EGKQLFRVTSATSDCDFSSTQYMHSIQFWRLWWSNHSAGDNHDVLVLALAFMECCAYSMFYILRGHLYALSELKDSFLCPPLFHHLIVTCDVDSC

SEQ ID NO: 89081 - protein, 49 aa, Gossypium hirsutum
  Clone ID: LIB3083-088-Q1-L1-H8.pep
LIHFFIIPFTLLVLLLLLVWCTPNSSLLQLKTFHYIPHHCFILLIYPRH

SEQ ID NO: 89082 - protein, 65 aa, Gossypium hirsutum
  Clone ID: LIB3083-089-Q1-L1-A10.pep
PPVKTNLLTPQNPRFFYYGNCFWFLSQPRFQIQTVRKSEFETFSPLFPQIQRHLTLHLYPHKRRS

SEQ ID NO: 89083 - protein, 50 aa, Gossypium hirsutum
  Clone ID: LIB3083-089-Q1-L1-B12.pep
GFNFAETSLGSGPIGPVGFLKVLGKLGKSVGFEIGLWVLNGHFNFSLVFV

SEQ ID NO: 89084 - protein, 48 aa, Gossypium hirsutum
  unsure (1)..(48): unsure at all Xaa locations
  Clone ID: LIB3083-089-Q1-L1-C12.pep
PPVXIFQINEDPHSLIKELNPYLSITXTYTNTLINKKIKLFDMGSLFF

SEQ ID NO: 89085 - protein, 131 aa, Gossypium hirsutum
  Clone ID: LIB3083-089-Q1-L1-C6.pep
NRYHGVPAVVFSLGGYAGNNFHDYTDIIIPLYLTSRRFNGEVKFLITNKNPWWINKFKTILRNLSHYDPIDIDNEQQVHCFPTVIIGLKRDPKELTIDPSRSPHSMKEFRQFLRTTYSLKKTTAVKLTNNN

SEQ ID NO: 89086 - protein, 66 aa, Gossypium hirsutum
  Clone ID: LIB3083-089-Q1-L1-D2.pep
QRILRFGSRVVHEALNHAVCLIFHDRGQEIVTSVVYSIIGVPQVIAIMDWSIQMVESPGKLIAPPK

SEQ ID NO: 89087 - protein, 67 aa, Gossypium hirsutum
  Clone ID: LIB3083-089-Q1-L1-D4.pep
IKHFDYNQNLSLIIIQILKTKHLISHLITVKKILYKTSTINTITLKNVISNAIIILFSSNILQKNKF

SEQ ID NO: 89088 - protein, 56 aa, Gossypium hirsutum
  Clone ID: LIB3083-089-Q1-L1-E8.pep
VDPHTLVKAKLNNHGNLGALVQHELRPKSFLTISGAFDTKALEKTPKFGLALSLKP

SEQ ID NO: 89089 - protein, 68 aa, Gossypium hirsutum
  Clone ID: LIB3083-089-Q1-L1-F10.pep
EKRVPVFFLSPKLCHTSKICINTYAITFPFFVHRNIEQFGKKNPTSCKEIHFLLFLTFPFRKKDPKPN

SEQ ID NO: 89090 - protein, 50 aa, Gossypium hirsutum
  Clone ID: LIB3083-089-Q1-L1-F12.pep
PYTTVKYLTHSIGHFIVHPKTLTTLKSVYLNNLYFRIHDLFLFHTLLTSI

SEQ ID NO: 89091 - protein, 129 aa, Gossypium hirsutum
  Clone ID: LIB3083-089-Q1-L1-F4.pep
FCPFNGPANLKIGLMNIQMNKIGQHVGDWEHFTLRISNFTGELWQVYFSQHSGGEWVDAFNLEFIEGNKPIVYSSKHGHASFPHPGIYLQGSDKLGIGIRNDTARSNYFVDSSTRYQIVAAEYLGGVVT

SEQ ID NO: 89092 - protein, 129 aa, Gossypium hirsutum
  unsure (1)..(129): unsure at all Xaa locations
  Clone ID: LIB3083-089-Q1-L1-G8.pep
LSQQLSERDIIVACIDYRNFPQGTISDMVEDASQGISFICNNISEYGGDPNRIYLMGQSAGAHIAACTLVNQAIXETGEGDSVSWSVSQIKAYLGLSGGYNLFNLIEHFHTRGLYRSIFLSQNFADTLR

SEQ ID NO: 89093 - protein, 88 aa, Gossypium hirsutum
  Clone ID: LIB3083-089-Q1-L1-H12.pep
MEGMIQDPSQPASQPQQQNQAVVGAERLNQALQQQLNLESVKTRAISLFKAITRILEDFDAYSRTNTTPKWQDILGQYSMVNLELFNI

SEQ ID NO: 89094 - protein, 88 aa, Gossypium hirsutum
  Clone ID: LIB3083-089-Q1-L1-H6.pep
QLEASTTRAFLQELSSTKSSLQQNITSLKQKVYFINKMVPELETKKKVAAASKNFKEAARLAAETKSLSTEKESVQIEMDKAVLDLGK

SEQ ID NO: 89095 - protein, 51 aa, Gossypium hirsutum
  Clone ID: LIB3083-090-Q1-L1-A1.pep
IAFLTTAENILCVTACSLSIVKGYTRVKESIGELTVFFLSAVREDFVFSSK

SEQ ID NO: 89096 - protein, 92 aa, Gossypium hirsutum
  unsure (1)..(92): unsure at all Xaa locations
  Clone ID: LIB3083-090-Q1-L1-A11.pep
YATIARAFSPKRLVMXILFLFAPFSMQIHAIEYFSKFPRVNIIEEETPSREQKLETFFPHTTPKPQKHEPLVIFETQKGYGLYSHKSCSSLG

SEQ ID NO: 89097 - protein, 69 aa, Gossypium hirsutum
  Clone ID: LIB3083-090-Q1-L1-B10.pep
PRRRRAFLYCRHWILEGVGSPLFHFFGSRGLGFQGSCETRAKNDFLRNASHQPRRRPWPTKGWAERETK

SEQ ID NO: 89098 - protein, 121 aa, Gossypium hirsutum
  Clone ID: LIB3083-090-Q1-L1-B12.pep
MAESNPRACIWGHQALGGGTFNHVLLWRERCNGVLMLTLSTTVWNLIERAGYNLMSFMANVMPLTVAILFFWGKNDFVLNRSLPCLPNLEIIENTVVILTDELHQWINHTLFIAHNIANAR

SEQ ID NO: 89099 - protein, 84 aa, Gossypium hirsutum
  Clone ID: LIB3083-090-Q1-L1-C3.pep
LNTSNNESMSVLPGGCFDPRDDRKSSFGFDKTGPYRATFLIEFGSDLRMNLQARGSDLVVRIVKPVCVMVEYSKSFLGRLFLCL

SEQ ID NO: 89100 - protein, 68 aa, Gossypium hirsutum
  unsure (1)..(68): unsure at all Xaa locations
  Clone ID: LIB3083-090-Q1-L1-C7.pep
EGFLRAVAERNVFLLPRRGNVVFCLAHINLAXMGLGFNPFADLYTGFKKFVRLFLNFYSGCKKGFLID

SEQ ID NO: 89101 - protein, 84 aa, Gossypium hirsutum
  unsure (1)..(84): unsure at all Xaa locations
  Clone ID: LIB3083-090-Q1-L1-C8.pep
IFILMGLQHCGVTFIGNWLPSGISGGEKMXLSIALVIHTMPKMLFLDEPTSGLDSASAFFVDQXIRNIFRDGRTFVYSIHQPSY

SEQ ID NO: 89102 - protein, 101 aa, Gossypium hirsutum
  Clone ID: LIB3083-090-Q1-L1-D1.pep
KSTGSGGKKKGPAQFRVYNLGNTSPVLVSDLVSILERLLKVDAKRNVMKLPQNGDVRFTHANISLAQRELGYKPSTDLQTGLKKFVRWYLSYYSGGKKAAG

SEQ ID NO: 89103 - protein, 61 aa, Gossypium hirsutum
  Clone ID: LIB3083-090-Q1-L1-D12.pep
CNFVFCYTTSLHTVNNSMYLHAKDQNRDFFKSNIPLLPKIQQKSPLLFHHRNGELKPLNAF

SEQ ID NO: 89104 - protein, 91 aa, Gossypium hirsutum
  unsure (1)..(91): unsure at all Xaa locations
  Clone ID: LIB3083-090-Q1-L1-E1.pep
RDTGKEGAKXGPNGGXRRGGAAKQHXNKRXDRRRAKXQRGHTRRTHKGAEEKGTXRGTQEEDXAGKXGXTTAKEHKAAAGDARKTNXTTXG

SEQ ID NO: 89105 - protein, 39 aa, Gossypium hirsutum
  Clone ID: LIB3083-090-Q1-L1-E11.pep
VFALIFTLGLLVNNVAMAYALVYDHSNTTETEPQDVKPY

SEQ ID NO: 89106 - protein, 66 aa, Gossypium hirsutum
  Clone ID: LIB3083-090-Q1-L1-E2.pep
PVTQLIDKIIRLGMGANTWHTLTKFNNAEFKREKKTHESSPNSELISQNQFKTEEIEMKMKIKPII

SEQ ID NO: 89107 - protein, 129 aa, Gossypium hirsutum
  unsure (1)..(129): unsure at all Xaa locations
  Clone ID: LIB3083-090-Q1-L1-E8.pep
FEKIQKTVKNVLDAVNIFKTPVNISDAAHVRKEYDESSAKLSKIQSRISSLTQKLKHDFGLEKEFYAFYDRCFEIKQNKYVYKVCPYKQASXEEGHMTTPLWRWDKFEDAYQMMVFSNGDKCWNGPQRN

SEQ ID NO: 89108 - protein, 92 aa, Gossypium hirsutum
  Clone ID: LIB3083-090-Q1-L1-F10.pep
NRLKGEMSQVRNVMIENIDKVLERGDRLELLVDKTANMQGNTFRFRKQARRFKNTVWWRNVRLTVALIIILLIVAYIVTAFVCKGPTLPSCV

SEQ ID NO: 89109 - protein, 117 aa, Gossypium hirsutum
  unsure (1)..(117): unsure at all Xaa locations
  Clone ID: LIB3083-090-Q1-L1-G1.pep
AXGDPRPXQEEKHGGESQEKRQKGXAQPSEXDKGNTPTETEKREXTKPEHRKXTAKGQRERPGPQGQDEGHNXRSTKTRERKATKKDETERRKRDPGTKGQNNQARRRKHPGPRKTE

SEQ ID NO: 89110 - protein, 84 aa, Gossypium hirsutum
  Clone ID: LIB3083-090-Q1-L1-G12.pep
HKQHCCLRQQPSLVPSFLICLYGNQTKVNCFCYGRLDLWFFGIWLGWVGFEVWLKRLGNLVYVNGYTERGKGTVEMKTRISLTG

SEQ ID NO: 89111 - protein, 86 aa, Gossypium hirsutum
  unsure (1)..(86): unsure at all Xaa locations
  Clone ID: LIB3083-090-Q1-L1-G3.pep
VFPCFLGXXGXLCWAXAFCLFGGCSPLCAVAWXGLCFWFCLPPPXCFFWFFPXVCFPVLSSSAPXXFCXXAGVXFVFSFRFLAARG

SEQ ID NO: 89112 - protein, 126 aa, Gossypium hirsutum
  unsure (1)..(126): unsure at all Xaa locations
  Clone ID: LIB3083-090-Q1-L1-G8.pep
VERLENSRQKLLMEIDNQSSEIERLLEENSNLSSSYQEATNTAKQWENQAKDCLKQNEXLRRILDNLRTEHATLLSKNGSGAIQTGSQGNTADILSLYGQLVHDHNIAHSLSAEQMHLSARLQQAT

SEQ ID NO: 89113 - protein, 129 aa, Gossypium hirsutum
  Clone ID: LIB3083-090-Q1-L1-H3.pep
AKLQPDGIGFSDLPNHKAILETSLRQHATLSQDDVLTVKYGELTYKLRVLELKPSSSISVLETDIEVDIVNPGVESERTDQYVLKPLAFGASESGLVEEGNYMYYKFSIDDDTWEKLVSDDVKIEVKID

SEQ ID NO: 89114 - protein, 47 aa, Gossypium hirsutum
  Clone ID: LIB3083-091-Q1-L1-A10.pep
VRMVWFLMKAEIVGRKSGEKEVKKCVKKCLNIGWNCLDYNCGGGGDG

SEQ ID NO: 89115 - protein, 55 aa, Gossypium hirsutum
  Clone ID: LIB3083-091-Q1-L1-A5.pep
RVGSVYIAKGIYKYTHGSTGPKLIFKVFMAKVNLINVKLNHGKIRTCIPLYLYVY

SEQ ID NO: 89116 - protein, 49 aa, Gossypium hirsutum
  Clone ID: LIB3083-091-Q1-L1-A7.pep
RCENKQHTTNHISPVITKRMNILTALLNGGLKTQHTKTHMQPNGAKENR

SEQ ID NO: 89117 - protein, 46 aa, Gossypium hirsutum
  Clone ID: LIB3083-091-Q1-L1-B7.pep
APVPNSDSLILRGALKGKGFLYSTSPQEHSYLRQASPHGLFKCFQT

SEQ ID NO: 89118 - protein, 40 aa, Gossypium hirsutum
  Clone ID: LIB3083-091-Q1-L1-C3.pep
WARCRIPRACTLITPIWRIDSICPKWPCTLRLLTVLNQPD

SEQ ID NO: 89119 - protein, 126 aa, Gossypium hirsutum
  unsure (1)..(126): unsure at all Xaa locations
  Clone ID: LIB3083-091-Q1-L1-D1.pep
VPQDTGPVGGGVNHVLDYLRRMQAENPSFFYAIQGDNDHTGGSIFWADATSRMNYAYFGDTVIFDTTYRTNRYRVPFASFTGLNHHGQPVLFGCALILNDSXASFAWXIQTWLHAMSDRRPISITT

SEQ ID NO: 89120 - protein, 84 aa, Gossypium hirsutum
  Clone ID: LIB3083-091-Q1-L1-E3.pep
CEYVTSDHVFDAVNITYAVIPSGLLFIKYDISICGTRGLLIIGLALNLGRFGLLNIKMIILYPILKTNLIHCFGISHSKVNKLA

SEQ ID NO: 89121 - protein, 84 aa, Gossypium hirsutum
  Clone ID: LIB3083-091-Q1-L1-F1.pep
RPATRALKRALLVALRCVDPDANKRPKMTQVVRMLEADEYPFREDRRNRKSRTASMEIESLKEPTDAESKAGESQSSVTKTTHE

SEQ ID NO: 89122 - protein, 120 aa, Gossypium hirsutum
  unsure (1)..(120): unsure at all Xaa locations
  Clone ID: LIB3083-091-Q1-L1-G3.pep
ASTSALQKAFWGPGCFNPKTXMIVGKKGLSAGSKARPVFVQFVLEPLWQVYQAALEPDGDKGTLEKVIKSFNXSIPPRELQNKDLKIVLQAVMSRWLPLSDAVLSMVVKCMPHPISAQSH

SEQ ID NO: 89123 - protein, 108 aa, Gossypium hirsutum
  unsure (1)..(108): unsure at all Xaa locations
  Clone ID: LIB3083-092-Q1-L1-A10.pep
GPIVILREEYPQLGGVFTLNLVNKKITLLVGPGVSSHFFKASESDLTQQDVYQFNGPTFGPGVVFDVDYTIRQEHVLFFTEALRVNXLKGYVDQIVTEAXDYFSKRGD

SEQ ID NO: 89124 - protein, 107 aa, Gossypium hirsutum
  Clone ID: LIB3083-092-Q1-L1-B9.pep
MGLMEISIMLHVGLVLFLLWTLSQFNLCHPVAYFVSLIYLYLVHERYVARLRKKLEFEEKRQQFRRRVLSDSESVRWLNHAVEKIWPICMEQIASQKILLPIIPWFL

SEQ ID NO: 89125 - protein, 36 aa, Gossypium hirsutum
  Clone ID: LIB3083-092-Q1-L1-C2.pep
PPVNVQRMVPPGLGKYLPPWGFKGRYFKNKGRGILN

SEQ ID NO: 89126 - protein, 45 aa, Gossypium hirsutum
  unsure (1)..(45): unsure at all Xaa locations
  Clone ID: LIB3083-092-Q1-L1-D1.pep
RLSSTPLISQCLRXWXKGALLAEKISPDLAWDVGGIPQMIGKGGD

SEQ ID NO: 89127 - protein, 51 aa, Gossypium hirsutum
  Clone ID: LIB3083-092-Q1-L1-D10.pep
FPFLAPFLERSEKLTLFLADGNEGNSIFKTSASFCFLSFVLFPPLLLFYQI

SEQ ID NO: 89128 - protein, 57 aa, Gossypium hirsutum
  Clone ID: LIB3083-092-Q1-L1-D11.pep
VYRTHVRPLQEQLQKLPKPFPILKINPEKNNIDSFVASDFKLIGYDPYKKIEMKMGG

SEQ ID NO: 89129 - protein, 53 aa, Gossypium hirsutum
  Clone ID: LIB3083-092-Q1-L1-D12.pep
YQTMAMADPALHHQIQPIKEIALDYTPEARTHWPGFNSITLTLDPPGGPRGPS

SEQ ID NO: 89130 - protein, 68 aa, Gossypium hirsutum
  Clone ID: LIB3083-092-Q1-L1-D9.pep
IFATHCKSVLEIPHWQRMGMKTMIGFGSHEENFVHSLIIFMLYTRARSAIYTDINTCSNEILFSNWGS

SEQ ID NO: 89131 - protein, 103 aa, Gossypium hirsutum
  unsure (1)..(103): unsure at all Xaa locations
  Clone ID: LIB3083-092-Q1-L1-E7.pep
SRVLSAXXXDSSYNNVYPGNEDEARDPPVVPPHLHHTLLRYPASMNTSGNLPLPENVILNHLYIENREPPRSVVALGFTQRFRAKYVTGVLYKPVPRRGSSNT

SEQ ID NO: 89132 - protein, 59 aa, Gossypium hirsutum
  unsure (1)..(59): unsure at all Xaa locations
  Clone ID: LIB3083-092-Q1-L1-F8.pep
QGTTPDGQIPYDKTDMGGQYAXNTSMSETRAGKHIPSAAFQDLEPTVLDEGRTASYRLL

SEQ ID NO: 89133 - protein, 42 aa, Gossypium hirsutum
  Clone ID: LIB3083-092-Q1-L1-G10.pep
RKEYIKYIILQMRVKIMIWKTIYAMFYLFTHVLVYYQYSDTS

SEQ ID NO: 89134 - protein, 43 aa, Gossypium hirsutum
  Clone ID: LIB3083-092-Q1-L1-H7.pep
FTSIVYLLLFLWVDFVKLGAVFFFQFVFLLGLRWLTRMMIKKR

SEQ ID NO: 89135 - protein, 122 aa, Gossypium hirsutum
  Clone ID: LIB3083-094-Q1-L1-A8.pep
KDSNKEERERMGRRSKFEEPRIEQIQDLENDMMKYFREDLHRRLLSTDFKKQVDGLEMLQKALPSIGKEIIEVLDILLRWFVLQLCKSNTTCLLKVLEFLPELFDSLKGEAYSLTEAEAAIF

SEQ ID NO: 89136 - protein, 95 aa, Gossypium hirsutum
  Clone ID: LIB3083-094-Q1-L1-D1.pep
PPLFSKHPYKYKSGALPSPPKHPYKYKFPPSPPPVYKNKSPPPEPASSPMLPYKYKSPPPPPSHSYKYKYQPPPPASSPKHPYIYRFTPPPPSPP

SEQ ID NO: 89137 - protein, 83 aa, Gossypium hirsutum
  Clone ID: LIB3083-094-Q1-L1-E1.pep
MQPICKYVPSNALVSTAYTKAMCDIKEAVANGWGFHSCYWKRSRIHLKHAHEGHTGAYESDIEIDNKMNPLKLLDDANRWEYD

SEQ ID NO: 89138 - protein, 49 aa, Gossypium hirsutum
  Clone ID: LIB3083-094-Q1-L1-E11.pep
MLSGTFTSVIKSKSFSAYRHSSEGTHVVKSVQLYVGTPSFATITRDNLS

SEQ ID NO: 89139 - protein, 59 aa, Gossypium hirsutum
  Clone ID: LIB3083-094-Q1-L1-F5.pep
VGAASKFTGSGGAVVAFCPEGPPQVKRLEDECRKAGFSIQAIQVVPSCLNDVDLKTLSK

SEQ ID NO: 89140 - protein, 86 aa, Gossypium hirsutum
  Clone ID: LIB3083-094-Q1-L1-F6.pep
MEKKQGFLSALKEDIVRGLSPSRSRSNSPARPLSLMSTTLRGNKDNHHGGAHVVKPEPLMARSGTVRPVGEALSPLMEGPEPDRGK

SEQ ID NO: 89141 - protein, 47 aa, Gossypium hirsutum
  Clone ID: LIB3083-094-Q1-L1-F8.pep
QLRPLSKGAPDGGAENRIHRNSKALLRELQLDLFKLNTQQEPKHITQ

SEQ ID NO: 89142 - protein, 78 aa, Gossypium hirsutum
  Clone ID: LIB3083-094-Q1-L1-G3.pep
SLCEFVFNSHCSPKTRLTYQVTLVESTVFLSELITLIPKVWRSSYTEVPIIFDSGSRFHFIRFPSIQHLTFLKYSYKS

SEQ ID NO: 89143 - protein, 106 aa, Gossypium hirsutum
  Clone ID: LIB3083-094-Q1-L1-G7.pep
ALDFIHEMGWLLHRNHLNRKLGDMNPNLNLFPFRRFKWLMEFSMDHDWCAVVKKLLGILFDRTVDLGDHSSMEFALLDMCLLHRAVRRNCRPMVELLLRYVPNKGL

SEQ ID NO: 89144 - protein, 123 aa, Gossypium hirsutum
  Clone ID: LIB3083-094-Q1-L1-H4.pep
ESFDEALQRDDVKAIVVAGANGKFSGGFDISAFGGIQQGAVQQPKSGYVSVEVLTDTIEAARKPSVAAIDGLALGGGLEVAMVCHARISTPTAQLGLPELQLGLIPGFGGTQRLPRLVGLAKS

SEQ ID NO: 89145 - protein, 121 aa, Gossypium hirsutum
  Clone ID: LIB3083-094-Q1-L1-H8.pep
YLVQGYDDAGPSASLLSPYLTDIISCLISTADRTDGGDSKLRSSAYETLNEVVRCSNIAETSSVIAQLLPVIMNKLGQTMDIQIVSSDDREKQGDLQASLCGVLQVIIQKLSSTDETKTII

SEQ ID NO: 89146 - protein, 106 aa, Gossypium hirsutum
  Clone ID: LIB3083-095-Q1-L1-A10.pep
EEVVIVLSIFIIGFFSTYAKLYPAMKPYEYGFRVFTLTYCFITVSGYRTGEFVHTAVTRFLLIALGASVSLVVNIGIYPIWAGEDLHNSVAKNFMSVANSLEGCVK

SEQ ID NO: 89147 - protein, 108 aa, Gossypium hirsutum
  Clone ID: LIB3083-095-Q1-L1-A11.pep
QAPESENEELQEENDDEEEEESKGEGSQNTRRSKSDKKAKKRGGGFQTVCSLSPQLQRVVGESKLARTEVVKKLWAYIKEKDLQDPKNKRNIICDELLRDIFRVNSIN

SEQ ID NO: 89148 - protein, 101 aa, Gossypium hirsutum
  Clone ID: LIB3083-095-Q1-L1-B10.pep
MGNPNFNIQSETAELKKIDEKVLQESGNDLPKTCTPRRLNLPNAFNFPERSPTDSVVSPVTRGLLARDRKAGGSLLPPSINQAKIHELRVEEIGLFSELKK

SEQ ID NO: 89149 - protein, 91 aa, Gossypium hirsutum
  Clone ID: LIB3083-095-Q1-L1-B9.pep
GFFFFFFFFFFFFFFYLTNLLQSWKNFQVLKTFYWQYTRERGPEKHYQIPKKRPLIIGGKNPISSIKDEHETISRSFTKRKYLLKCIQKAQ

SEQ ID NO: 89150 - protein, 78 aa, Gossypium hirsutum
  unsure (1)..(78): unsure at all Xaa locations
  Clone ID: LIB3083-095-Q1-L1-C1.pep
MEAGVVGDIACLDPELLQLQEMSPLALKSKXPEFTQTLFEQWLSLPDTYKLVTQLVSDAKARNPLNVPGNASSGSTAA

SEQ ID NO: 89151 - protein, 109 aa, Gossypium hirsutum
  Clone ID: LIB3083-095-Q1-L1-C10.pep
HAQSVQAILTSASGSVTADTIRLLPHLGLVVTTSQGINHIDCSECRRRGIAVAGAGTIFSTDCADSAVGLLLDVLRKVSAANRYVKQGLWSSQGNYPLGNKLGGKQVGI

SEQ ID NO: 89152 - protein, 43 aa, Gossypium hirsutum
  Clone ID: LIB3083-095-Q1-L1-C11.pep
VKAHDQLKYRKDFNRTPIQPNHIMFRLMLNRVMLAPKKHYEKS

SEQ ID NO: 89153 - protein, 44 aa, Gossypium hirsutum
  Clone ID: LIB3083-095-Q1-L1-C7.pep
SHQQYVLFPFAYVGATVGLQGTSTWCEDHSRRFSAGIPVLDAPR

SEQ ID NO: 89154 - protein, 73 aa, Gossypium hirsutum
  Clone ID: LIB3083-095-Q1-L1-D6.pep
SSLSIFALDSLLLPQLLTSIRSIHDFHFSIISYFFAFLFLYNQDFLCSFIELRRIWRLVTRGLLGLFSAMRTL

SEQ ID NO: 89155 - protein, 78 aa, Gossypium hirsutum
  Clone ID: LIB3083-095-Q1-L1-E8.pep
KQNQQPQLVLRKPLQPNNKKHSDDDESYSVTSITLVSSQTAKPKSTVASAPTFRCSERAEKRKEFYSKLEEKHQALEA

SEQ ID NO: 89156 - protein, 53 aa, Gossypium hirsutum
  Clone ID: LIB3083-095-Q1-L1-F1.pep
INLVKNVIMTCINYQLSTCQKAAFKKETSFCCYFCKFGWGFQLVDSSVNTFTL

SEQ ID NO: 89157 - protein, 109 aa, Gossypium hirsutum
  Clone ID: LIB3083-095-Q1-L1-F3.pep
CHPLQDCIKHWPQKPVRYREVVATYTIEAKKLGLRILELVSEGLGLESRYFGDKLSESEILSINHYPPCPDPSLTLGVAKHCDPNLLTLLHQGDVSGLQVFNNGEWIGV

SEQ ID NO: 89158 - protein, 107 aa, Gossypium hirsutum
  unsure (1)..(107): unsure at all Xaa locations
  Clone ID: LIB3083-095-Q1-L1-F5.pep
IHNHLTFTVKYHKDPLSGSARIVGFEVKPFSVKHEYEGEWNEKTRLTTCDPHAKRAVTSSESPQEVEEKKEIIFTYDVXFQESDIKWASRWDTYLLMADDQIHWFSI

SEQ ID NO: 89159 - protein, 76 aa, Gossypium hirsutum
  Clone ID: LIB3083-095-Q1-L1-G2.pep
QVECRRHLRANRLSGFLLINWLSERIKHGIPSKLGQLAFLKVLHLFHNSLSQTTTCFHPTVLDLSLIELSGLIPNL

SEQ ID NO: 89160 - protein, 100 aa, Gossypium hirsutum
  unsure (1)..(100): unsure at all Xaa locations
  Clone ID: LIB3083-095-Q1-L1-G4.pep
SRVRCSKRCYRRNEKKRGGLIQRLPRPYMNLSSESKANKTDLVVCRYYDHVFVMATQIGTMGTILHARMVEGYTVQPTFNVTXILGIRDEPLLPSITRDL

SEQ ID NO: 89161 - protein, 45 aa, Gossypium hirsutum
  Clone ID: LIB3083-095-Q1-L1-G8.pep
LFGWLSAHKQTSHLVQSSSSKMGTQITLYCAVVLFIISITHLFGQ

SEQ ID NO: 89162 - protein, 98 aa, Gossypium hirsutum
  Clone ID: LIB3083-095-Q1-L1-H11.pep
MASSLQGIFKLEDFTSDHSEKSVKGFKFIDTRSLWLNLKAIKRLVDTSALNLDNLSTLKLFENSIGMSIPQSRFLPLNSTSDLFLLQSDLYSFTESMF

SEQ ID NO: 89163 - protein, 109 aa, Gossypium hirsutum
  Clone ID: LIB3083-095-Q1-L1-H2.pep
VATHSQLVKSLPRELSKSDQLQEILDRVAVYSNPSGFNQGMYSLRWAYWKELDLYHPRWNSRDLQVAEERYLRFCGVSAMTTQLPKWTKIYPPLEGVARIATCRETLKI

SEQ ID NO: 89164 - protein, 111 aa, Gossypium hirsutum
  Clone ID: LIB3083-095-Q1-L1-H3.pep
IERLILVEDIFAGFNCTLRGGNVSHHEYIQVGKGRDVGLNQISMFEAKVASGNGEQVLSRDVYRLGHRLDFFRMLSFFYTTVGFFVNTLMVILTVYVFLWGRLYLALSGVE

SEQ ID NO: 89165 - protein, 57 aa, Gossypium hirsutum
  Clone ID: LIB3083-095-Q1-L1-H8.pep
KRVEDSHTLLDFFSMRKILGTLPCGLPSNNSTREVQPSLSGVTRQASAPDMSKVRAG

SEQ ID NO: 89166 - protein, 57 aa, Gossypium hirsutum
  Clone ID: LIB3083-095-Q1-L1-H9.pep
KSKPKLWSRTQVPSCFMFIFSDLTAFPCCSTFDSYIYFFPFSLSFFLISKRETQVQV

SEQ ID NO: 89167 - protein, 61 aa, Gossypium hirsutum
  Clone ID: LIB3083-097-Q1-L1-A1.pep
MGSPAEPKRRVAFVLIDGLGDVSIPRFGNRTPLQAADVPNLDAIASAGVNGLMDPVEVGLG

SEQ ID NO: 89168 - protein, 81 aa, Gossypium hirsutum
  Clone ID: LIB3083-097-Q1-L1-A2.pep
LLNKGPGIYYYYLEKTTCKLPFLIKTFKQKPFLKRSGEKKKNFFLFFLPVLFGGVVLNMHLHWKKHETVFVICKPCQPGQV

SEQ ID NO: 89169 - protein, 127 aa, Gossypium hirsutum
  Clone ID: LIB3083-097-Q1-L1-A4.pep
EEMSVIWALGLMKPPDTIRPYYWPQNHGGPMMVAYGHLRLNVSENVDDCFGPLDADDKQDQDLIIASAKVPLVVTTGEALHYPNPPNPSKVLYINKKEAPVLRVERRVPVKVSVQTGHDVALYITSD

SEQ ID NO: 89170 - protein, 130 aa, Gossypium hirsutum
  Clone ID: LIB3083-097-Q1-L1-C2.pep
EFLFMLASSVARLLDLIVGNVNDRGLLSTLPVIDILIQCFPTEVPPLISSTLQKLVVICLCGGDDKDPLKTAVKASSAAILARIWVMNTNYLAQLTSEPSLSSLLQQTGVAIEDNILLCLGDIWLDKVDN

SEQ ID NO: 89171 - protein, 120 aa, Gossypium hirsutum
  Clone ID: LIB3083-097-Q1-L1-E3.pep
MGFLSTLLGIFGFGIGTSIGLLIGFFLFIYSKPKTVKEPVPRPLYELDNDQLLDILPDIPLWVKCPDYERVDWLNKFVADMWPYLDKAICAQIRSATEPMFAEYVGKYQIEAIEFDNLSL

SEQ ID NO: 89172 - protein, 116 aa, Gossypium hirsutum
  Clone ID: LIB3083-097-Q1-L1-F2.pep
SIGRRPVNYTKLARRDSSPVEGVVVYGDEDDEADLSRVICNGYETDSDLVSLKISLLGDCQIGKTSFLIKYVGDEEEKSLQMSGLNLVNKTLSVQGARIAFSIWDVGGDSNSLDHL

SEQ ID NO: 89173 - protein, 112 aa, Gossypium hirsutum
  Clone ID: LIB3083-097-Q1-L1-F5.pep
APLESLFAQFCLHSLWFGNCSIRAIAVLWVEFVREIRWYWEESQPLPKMPAHGSIDLTSCLINHKLQMLAICIEKKRELNEEFQDCLGSNDDVFAHMEVEDIQVGEESTSFL

SEQ ID NO: 89174 - protein, 82 aa, Gossypium hirsutum
  Clone ID: LIB3083-097-Q1-L1-H1.pep
KYKKICPKTIYLCLYIIRGNMNEMLFNENNICFYKGLQNEIIPINMHPGGNHKKLPFLHNKFERKTNPNKHHFLSSSFGACA

SEQ ID NO: 89175 - protein, 73 aa, Gossypium hirsutum
  Clone ID: LIB3083-097-Q1-L1-H2.pep
KQVQSISLFGQESTSPNYTSKNTGCCCYFLFSFFSLHFTLQTNPKFGFLRQTLILNNFKRCQPYKQTKKRESN

SEQ ID NO: 89176 - protein, 93 aa, Gossypium hirsutum
  Clone ID: LIB3083-099-Q1-L1-A10.pep
FLAWMYEDKGLKDLWGVHILLICTLRGFIHQLWSSYNNMFFLTRNRWIKQQGVDFKQIDDEWDWDNFIILQAMLASMACLIFPSLNTLPLWNL

SEQ ID NO: 89177 - protein, 92 aa, Gossypium hirsutum
  Clone ID: LIB3083-099-Q1-L1-A9.pep
NSSSIHCAMCEKEVHGDQSLCCGRCRAVVYCTSLCQKQHWKESHKSMCGLYKAMMEREEELVMKIFMFPCSAAQPCKWLESLGIHQKGMWRR

SEQ ID NO: 89178 - protein, 91 aa, Gossypium hirsutum
  Clone ID: LIB3083-099-Q1-L1-C1.pep
LPFTTGCSSQASVAVGKSPPRKQKPEPNCQNLISKQVVGEECSSKEKKKNSFGRLALSKPNISNGIHRLIRITVRSFSQLFVYKDIEEVTT

SEQ ID NO: 89179 - protein, 92 aa, Gossypium hirsutum
  Clone ID: LIB3083-099-Q1-L1-C10.pep
PLQNKSDVPSYVMLGIPKHEEGPPTPQHPLSPMGDACSRMDLTAIHQILIMTHYKDDEGTNELSFQEWTQQMRDMLEARKRGDVAFRDKDFK

SEQ ID NO: 89180 - protein, 87 aa, Gossypium hirsutum
  Clone ID: LIB3083-099-Q1-L1-C3.pep
IPPLLNSSRYKTPYSDITMAGIWLLFFTMAALTAEANGHKSGNPPVNIVTGPTLGDLRWVSHGRPLIWRYPTKYGLLLGHLCANMRA

SEQ ID NO: 89181 - protein, 48 aa, Gossypium hirsutum
  Clone ID: LIB3083-099-Q1-L1-C4.pep
LPILFCQTSPAISPAISFADMNYKDLKTLNPMLPYPNFEKCPLHPNHL

SEQ ID NO: 89182 - protein, 92 aa, Gossypium hirsutum
  Clone ID: LIB3083-099-Q1-L1-C5.pep
EVDCPFYLKTGSCKYGSTCRYNHPDRNAFIPPVALGHSLIASANNLNIGVVNPASSLYQTIDPRLSQTALLAQQTMPTLVGTQTVYPQRPGQ

SEQ ID NO: 89183 - protein, 81 aa, Gossypium hirsutum
  Clone ID: LIB3083-099-Q1-L1-D10.pep
MNGEEELKEAFDVFDKDKDGLISFEELGSVLFSLGLKEGNKLQDCKAMIRKVDIDGDGMVNFDEFKKMMRSGGGLVSVSAF

SEQ ID NO: 89184 - protein, 92 aa, Gossypium hirsutum
  Clone ID: LIB3083-099-Q1-L1-D5.pep
SDRDSEDEVDDDIADLEDRRMLDDFVDVSKDEKQLMHLWNSFVRKQRVLADGHVSWACEAFSKLHGPDLVKSPALFWCWRLFMIKLWNHGLL

SEQ ID NO: 89185 - protein, 92 aa, Gossypium hirsutum
  Clone ID: LIB3083-099-Q1-L1-D7.pep
HQCSYIFRWKELEIGKLGTGYGLLQLPSMPEVKHHSLSTEGFTPVENINMDDIKFKDKSREKQRKKNLQTKKEREQQESKPEKPERATYAAA

SEQ ID NO: 89186 - protein, 81 aa, Gossypium hirsutum
  Clone ID: LIB3083-099-Q1-L1-E4.pep
HTHIHNHLQSIVTEQNSIYTEFPMLLISQEQISINTLPIVTHILHIYYKKSIIQTFLHNTKFVLPLHLIFSSIKLLTMATS

SEQ ID NO: 89187 - protein, 92 aa, Gossypium hirsutum
  Clone ID: LIB3083-099-Q1-L1-E7.pep
TKLLTALNECTEWGQVFILDALSRYKASDAREAENIVERVTPRLQHANCAVVLSAVKMILQQMELITSTDVVRNLCKKMAPPLVTLLSAEPE

SEQ ID NO: 89188 - protein, 43 aa, Gossypium hirsutum
  Clone ID: LIB3083-099-Q1-L1-E9.pep
EPYDVPMRRFLRGRALDVDKASSVCLKVPEWRRSFGPKGLIHP

SEQ ID NO: 89189 - protein, 92 aa, Gossypium hirsutum
  Clone ID: LIB3083-099-Q1-L1-F1.pep
SELERMKNENLVLSKDAHHFDTKFPGLQQELMQLDKVNEELGSIFPMFNEYSETGNALERVLALELELAEALQTKKSSILFQSSFLKQHNDE

SEQ ID NO: 89190 - protein, 92 aa, Gossypium hirsutum
  Clone ID: LIB3083-099-Q1-L1-F7.pep
MVFCSLQGGFLKENNKSRFTWILIKSIRTTTLCICHIFKNHASSIEAVAHAKLMTWLLIFRFFNIIIRLVNNAFHIYTLIIFSPNKPNQTTI

SEQ ID NO: 89191 - protein, 55 aa, Gossypium hirsutum
  Clone ID: LIB3083-099-Q1-L1-F9.pep
GLYFFNQMNDVSQYPEPMDDHLDAYNKPIFAELQMSVSIEANRPSRCHFTQFIKD

SEQ ID NO: 89192 - protein, 66 aa, Gossypium hirsutum
  Clone ID: LIB3083-099-Q1-L1-G3.pep
AYNLKQLIYTILNKKKKRKEARLIALFLNQYLHNPQIPWIKSNSNYPKSGKSFPVNQISKFKDNNP

SEQ ID NO: 89193 - protein, 67 aa, Gossypium hirsutum
  Clone ID: LIB3083-099-Q1-L1-G5.pep
MASTGRKIILKSSDGENFEVDEAVALESQTIKHMIEDDCADNGIPLPNVTSKILSKVIEYCKKHVEA

SEQ ID NO: 89194 - protein, 70 aa, Gossypium hirsutum
  Clone ID: LIB3083-099-Q1-L1-H12.pep
RNFIFLSIIYYLKPRQKPWTRSTLWFHFYNLISHLQFRAKSKSLISSFFFCPFRFLRFHGHHIRSHGYQI

SEQ ID NO: 89195 - protein, 61 aa, Gossypium hirsutum
  Clone ID: LIB3083-099-Q1-L1-H3.pep
KAVMQTDGFEYLKESCPGVLTELLQYVAKIGEHSVISCGYRKEGSLDGSDVNGRRVKPRLQ

SEQ ID NO: 89196 - protein, 93 aa, Gossypium hirsutum
  Clone ID: LIB3083-099-Q1-L1-H6.pep
MEKENEHADGKMQALVEELSITKEMLQASEKEIASLKFEKKQSSEKIQKLQGQLDTAQREIITWKSKLNTERREVSKLQERIAMLKNSLSDRD

SEQ ID NO: 89197 - protein, 96 aa, Gossypium hirsutum
  Clone ID: LIB3083-100-Q1-L1-B2.pep
MANKDLEFVKAAAWAWYQRGSSGSPMAIPEFDVIRTRRAPGPGPSRYKLEAMRNNNKNSMGSSTTTTHNSLLDPWEVQSISKRLDHLIQLSGIQFL

SEQ ID NO: 89198 - protein, 73 aa, Gossypium hirsutum
  unsure (1)..(73): unsure at all Xaa locations
  Clone ID: LIB3083-100-Q1-L1-C11.pep
MAKAESISKKKMEITNITEXSAIAQRQVPQDGIEXYASGAEDQYTHKANLNARSRKLLLPLIITGEGKMDMTT

SEQ ID NO: 89199 - protein, 100 aa, Gossypium hirsutum
  Clone ID: LIB3083-100-Q1-L1-C12.pep
KHAKTKSSSNDASHRILYLVKTNTLLTHIYPYFTNNTPNNNQIQRLRQASCYKFFHETTLNITNLKICELNSKQFSFLVSNIGHQIDLDLNYVLLLINRD

SEQ ID NO: 89200 - protein, 60 aa, Gossypium hirsutum
  Clone ID: LIB3083-100-Q1-L1-D12.pep
IHVLYLGKHKKAKRVINGPKTDKMGLIQYFTRLKHFHTGKPHACVSWPCRLKTKLELHTA

SEQ ID NO: 89201 - protein, 123 aa, Gossypium hirsutum
  Clone ID: LIB3083-100-Q1-L1-E11.pep
RALEEKIVPYCDGIMTQLLKNLSSNQLHRSVKPPIFSCFGDIALAVGEYFEKYLMWAMSALQSAAELSTHIASDDELVEYTNSLRNGILEAYSGIFQGFKNSSKTQLLITYAPDILQFLDAYT

SEQ ID NO: 89202 - protein, 82 aa, Gossypium hirsutum
  Clone ID: LIB3083-100-Q1-L1-E7.pep
KNFAGGNKKALSRQDVIGVFFKAGKCFRTPLFFFKKNPYFGKVFGYWKTEGILSKIVSCGVWPPQPHLKVKLVLVGALKKNF

SEQ ID NO: 89203 - protein, 61 aa, Gossypium hirsutum
  Clone ID: LIB3083-100-Q1-L1-F3.pep
NQLHYILIGSENSTFTLTFNYKAIQLKLGLKTYMLYTSNDCDAILFDQFETRQFSTQYDYT

SEQ ID NO: 89204 - protein, 116 aa, Gossypium hirsutum
  Clone ID: LIB3083-100-Q1-L1-F4.pep
RSFAQREDGGLHDTRQNWFEGSYNLQAATIGRTDTFYLPDDDNVHNTELRELLSRRSVSTLLRSGFRESLDQLIQSYVERQNHASIDWDLNEAVPTPESLEQDIEQQSMDQNEGQS

SEQ ID NO: 89205 - protein, 108 aa, Gossypium hirsutum
  Clone ID: LIB3083-100-Q1-L1-G2.pep
AYATILHSAHVYVCGAIAVAQSIRLSGSTRDLVILVDEMITAYHKSGLEAAGWKVRTIQRIRNPKAEKDAYNEWNYSKFRLWQLTDYDKIIFIDADLLILRNIDFLFA

SEQ ID NO: 89206 - protein, 50 aa, Gossypium hirsutum
  Clone ID: LIB3083-100-Q1-L1-G4.pep
APLQRWLDVKKDLASTVIYLISDGSRYMTGTTIFVDGAQSIVRPRMRSYI

SEQ ID NO: 89207 - protein, 71 aa, Gossypium hirsutum
  Clone ID: LIB3083-100-Q1-L1-G8.pep
KDRSMQLSGLAIEDMEFLESRGLFQKPKSMSSSLVLHVDVGLGFGGLICKDKSGNSSIFSFLTPKQSLPLS

SEQ ID NO: 89208 - protein, 77 aa, Gossypium hirsutum
  Clone ID: LIB3083-100-Q1-L1-H9.pep
SKQYIKAAAATLFFIFLKFSNRPRSVLDSTRSFSAKSNRHSPVWAQNFQLRNRENQVLEEDSWYLLQQSILSFFVYN

SEQ ID NO: 89209 - protein, 50 aa, Gossypium hirsutum
  Clone ID: LIB3083-101-Q1-L1-A10.pep
VLYSFQFNLFQEKENCSGFKALKVRDQKDKDVELELCFVLFCFVLSGFCF

SEQ ID NO: 89210 - protein, 46 aa, Gossypium hirsutum
  Clone ID: LIB3083-101-Q1-L1-A2.pep
SYEGRHCNPCRLSSVCFVSFLWATSFICLVSNILLNLAGFVLFFAV

SEQ ID NO: 89211 - protein, 86 aa, Gossypium hirsutum
  Clone ID: LIB3083-101-Q1-L1-A3.pep
AVIFFFIFWGSNAGIGGHNSLVAVPYETMFALVDMWFGIIVPLVIAGGYIGFKKPAIEDPVKTNKIPKQIPEHVLLINPIFFILIV

SEQ ID NO: 89212 - protein, 124 aa, Gossypium hirsutum
  unsure (1)..(124): unsure at all Xaa locations
  Clone ID: LIB3083-101-Q1-L1-A7.pep
ASIFPHNNGLRATRDPKLGKKIRAATTLESRATGIPYVFAPCITVCRNPTWGLTLXESYNXYPHLVHAKTDIVPGLQGDIPARSSTGIPFVAGNKNDAACAKHYVRDGGTTTGINENNTLTTWD

SEQ ID NO: 89213 - protein, 99 aa, Gossypium hirsutum
  unsure (1)..(99): unsure at all Xaa locations
  Clone ID: LIB3083-101-Q1-L1-A8.pep
XSFFPVTSSPDGSDSKNKKLGSGSTNLGGIKSKPSASSGSLQVKANAQAPPKINGTTVVTSPAEGFKNEDGAGSPHPRTFINQLPDWSMLLAAITTNFL

SEQ ID NO: 89214 - protein, 48 aa, Gossypium hirsutum
  Clone ID: LIB3083-101-Q1-L1-C8.pep
CPFAMLAFQARRLVGVPSGRRGLDGIIGLLPSLACLLSPGKRHRESTA

SEQ ID NO: 89215 - protein, 130 aa, Gossypium hirsutum
  Clone ID: LIB3083-101-Q1-L1-D11.pep
KKGVWIKLPIQHVNLVEAAVKEGFWFHHAEPNYLMLCYWIPEGTHILPANASHRIGIGAFVMNEKREVLVVQESTGRFRGTGVWKFPTGVVNEGEDICAAAVREVKEETAVDTKFIEILSFRQSHIAFFD

SEQ ID NO: 89216 - protein, 54 aa, Gossypium hirsutum
  Clone ID: LIB3083-101-Q1-L1-D8.pep
AYCFKRDGDEGFEADFWLKKKSPDANPAGSQLTKQPPLCLMNQSPKTADEFAAS

SEQ ID NO: 89217 - protein, 58 aa, Gossypium hirsutum
  Clone ID: LIB3083-101-Q1-L1-D9.pep
EKSKTKGEAPKKVCSKMLWRAFQFAFRVYTFAGGHDDRADKLTRELAHEIETDPEHQQ

SEQ ID NO: 89218 - protein, 104 aa, Gossypium hirsutum
  unsure (1)..(104): unsure at all Xaa locations
  Clone ID: LIB3083-101-Q1-L1-E10.pep
YLCVEYLRRELTYLNKLKARKVALGEDKRTLVRDKKDAAEKXWKEENTKLVNALGEEKKXKPLIIFKIXVSEKLDLFSQHSSGLIKTIYCGAIQALPFSFNLKK

SEQ ID NO: 89219 - protein, 99 aa, Gossypium hirsutum
  Clone ID: LIB3083-101-Q1-L1-E12.pep
MISGARQILKLQSFITREKADVVPKGHVAVYVGETLRKRFVVPIIVLNHPSFKDLLKRAGKEFGFDQPMGGLPRRCLCESHFRVALKWSLLVKSNNHKF

SEQ ID NO: 89220 - protein, 94 aa, Gossypium hirsutum
  unsure (1)..(94): unsure at all Xaa locations
  Clone ID: LIB3083-101-Q1-L1-E5.pep
GGKKTRRKGQXREKQKAXXQEEPXXEKRKGAQXLQELQQAKALEEQFEARFKQEEKAKEEILTRASLIRKEREEIETSTKLKEDMMKSKAETSL

SEQ ID NO: 89221 - protein, 99 aa, Gossypium hirsutum
  Clone ID: LIB3083-101-Q1-L1-F12.pep
LIFFFFFFFSFFACGFFVYELPAFQFFINILQIKISGHLIIFTFMRKQKNPPRKNHSVLKQLPFFGRAATKKNCFKYHMAMILRQDHAHPRENKKKAGG

SEQ ID NO: 89222 - protein, 130 aa, Gossypium hirsutum
  Clone ID: LIB3083-101-Q1-L1-F2.pep
TSRTCAVCLEDYTIGEKLRILPCHHKFHAFCIDSWLTTWRTFCPVCKRDARTTVGDLPASESTPLLSTSPSSVSSVLSCVRSRIASSSSIQIDTAAWTSPPASHAHSLASVPSIQPSVRSYHHSPSISFS

SEQ ID NO: 89223 - protein, 48 aa, Gossypium hirsutum
  Clone ID: LIB3083-101-Q1-L1-F3.pep
SLFICKTIGNWKYANKNHRFRYFTGKEIAIEIFFLVIQTETSKPGNYA

SEQ ID NO: 89224 - protein, 57 aa, Gossypium hirsutum
  unsure (1)..(57): unsure at all Xaa locations
  Clone ID: LIB3083-101-Q1-L1-F4.pep
KAKRTPLCFFFFFYFFFFFLFLFFFFFQKKQLRNIKKKFLHLNCIIXSLPGXXICNP

SEQ ID NO: 89225 - protein, 71 aa, Gossypium hirsutum
  unsure (1)..(71): unsure at all Xaa locations
  Clone ID: LIB3083-101-Q1-L1-G11.pep
VXXFFFEHQWGAMGALLPNLICQIPHSNLTPSFMFWVLLSILSLLTLNSVLASPLACAKAPQEKEWALVKS

SEQ ID NO: 89226 - protein, 115 aa, Gossypium hirsutum
  Clone ID: LIB3083-101-Q1-L1-H10.pep
MVLRGVGWGLFIVMATNKGEGAKDVSKTETKPIEEMVLGCIIGNLTDKKDLFTKADKIHIKSSDLQLVKHLNKARSRDKYGSLVTKKEECENDLVNLDIIHVVAHGTYGIVYRGV

SEQ ID NO: 89227 - protein, 65 aa, Gossypium hirsutum
  unsure (1)..(65): unsure at all Xaa locations
  Clone ID: LIB3083-101-Q1-L1-H2.pep
RPVSMSNACWELTASAWNPPDGQMPSXKTVGGGDDAFNTFXSETGAGKHVLRAVFVVLEPIVFDK

SEQ ID NO: 89228 - protein, 123 aa, Gossypium hirsutum
  Clone ID: LIB3083-101-Q1-L1-H3.pep
MALNLMKKKSSTDLTCSIPEQHIEPTYKEETRPPSPAPRFTEADVLSSVVRRLGDLEEKIEMLQSKRFEMPHEKEELLNAAMYRVEMLEAELIATKKALHEAIIRQDELLARIQSEVVVKPGR

SEQ ID NO: 89229 - protein, 69 aa, Gossypium hirsutum
  Clone ID: LIB3083-101-Q1-L1-H6.pep
YSSIKSLCIACVVHILWTKIFMSKMSRSHSSNKTCVTSFTYCQVEDKSHIVKQDSLVTLKISGESQPGV

SEQ ID NO: 89230 - protein, 111 aa, Gossypium hirsutum
  unsure (1)..(111): unsure at all Xaa locations
  Clone ID: LIB3083-102-Q1-L1-A1.pep
NIRRDVHWWKQNKRTLMNEMTNMIEQLKDQKEKESTLREQVEKLQIKANKEENEKENLMKSVKQLENKVELLERAIKEKDEGILGLGEEKREAIRQXCTWIDYHRSRCDDL

SEQ ID NO: 89231 - protein, 74 aa, Gossypium hirsutum
  Clone ID: LIB3083-102-Q1-L1-A2.pep
AFFFQDPLSENALAFTQVRDPLNKAKNARYRRKVDVHWRIKRMQAMQKRISLIFLAGMCPQSLSDTGLSALEAK

SEQ ID NO: 89232 - protein, 85 aa, Gossypium hirsutum
  unsure (1)..(85): unsure at all Xaa locations
  Clone ID: LIB3083-102-Q1-L1-A4.pep
SYPPSSSLSFFHTLYFLHLLLIFYTTXXFEVRYFVGMWVNIDGTGVVRTNSSKEGKSRVALRAGACLLGVDCLGLCNSLGLLGCR

SEQ ID NO: 89233 - protein, 131 aa, Gossypium hirsutum
  Clone ID: LIB3083-102-Q1-L1-B5.pep
EGCLEDGKVAAEEMSEKHLGSHAVNHSIWTLSSDSSASPGHSPEGKQKVSLSQESGEASDPVLTGRANRSPLKKTSKGKSPKKGVKARVQTPKKEKNVKDDAKIKENDVNVETAEEEASEKHIEPHVSTSR

SEQ ID NO: 89234 - protein, 54 aa, Gossypium hirsutum
  Clone ID: LIB3083-102-Q1-L1-C4.pep
PNNPPIYEPKPRKPPVYAPPEEEEPEPKPPVYEPPAHEPPCGHYSGHPPLGKPR

SEQ ID NO: 89235 - protein, 123 aa, Gossypium hirsutum
  unsure (1)..(123): unsure at all Xaa locations
  Clone ID: LIB3083-102-Q1-L1-C5.pep
RIVPTVGDLSHHNRAYMLFSSNTSSSYSTSIHIHSSKYLPLYGELVWVGRSLRVLGARINSSLLTGNFYPKADAGNQRVGGIHAPHLCYSYSXXXFIVLEREVAKVVPFFVFEIPPMIFCFNK

SEQ ID NO: 89236 - protein, 128 aa, Gossypium hirsutum
  Clone ID: LIB3083-102-Q1-L1-C7.pep
PVLPSEGLTRQGSGIIGTFGQSEELRCVIVVIRHGDRTPKQKVKLKVTEEKLLNLMLKYNGGRPRSETKLKSAVQLQDLLDATRMLVPRYRPGRGSDSEAEDIEHAEKLRQVKAVLEEGGHFSGIYRK

SEQ ID NO: 89237 - protein, 57 aa, Gossypium hirsutum
  unsure (1)..(57): unsure at all Xaa locations
  Clone ID: LIB3083-102-Q1-L1-D7.pep
TIYVSMVLHSYILSVLFSVLQVLALAYYAISYFPXGSAGLKFLTSALTSSITTCFGR

SEQ ID NO: 89238 - protein, 76 aa, Gossypium hirsutum
  unsure (1)..(76): unsure at all Xaa locations
  Clone ID: LIB3083-102-Q1-L1-E5.pep
PVGSYYLEMPPNLSLAXLVCWQCQTICRPRYGIHFCDVRCIYSQTQGDRQNFLCGIFEPYKMVECRDHPTQMIAYE

SEQ ID NO: 89239 - protein, 73 aa, Gossypium hirsutum
  Clone ID: LIB3083-102-Q1-L1-F1.pep
GDFRSIEGFEFSGFELSDDRRDRSPKWRVLCKGEGESGSDLANHLLSLLAPLGVAGETLLGVSNLDLADMFDN

SEQ ID NO: 89240 - protein, 78 aa, Gossypium hirsutum
  unsure (1)..(78): unsure at all Xaa locations
  Clone ID: LIB3083-102-Q1-L1-G5.pep
KFLSMVIPTLLMITLSTNGGFLTHSTITISIYFNXFASSVRQKTINIKCTSSHETQRGSRAYIQKERCRRNHIKREEP

SEQ ID NO: 89241 - protein, 59 aa, Gossypium hirsutum
  unsure (1)..(59): unsure at all Xaa locations
  Clone ID: LIB3083-102-Q1-L1-H1.pep
LQIPPSPLSCPPHFLPMGVNYIFHCRXGLGQTRGSETLKGFLCYASSPEVRVSRKEKKG

SEQ ID NO: 89242 - protein, 119 aa, Gossypium hirsutum
  unsure (1)..(119): unsure at all Xaa locations
  Clone ID: LIB3083-102-Q1-L1-H7.pep
FLNQRLSSPLPIASPSRVLKLXXXXSTPLIAKEIFNAATTQPDFRHSYSSFLILILKLDRSMHFSLIDDLLVRLKFDQYQVTPTLFFYLIKIYAEADLPEKALNVFYKMLDFNVKPLPR

SEQ ID NO: 89243 - protein, 52 aa, Gossypium hirsutum
  Clone ID: LIB3083-103-Q1-L1-D10.pep
DGGSFQQWNPATYTLSHVHINSHGANLRPISRLVRNQPDYNGCGFEQVIGCK

SEQ ID NO: 89244 - protein, 129 aa, Gossypium hirsutum
  Clone ID: LIB3083-103-Q1-L1-D9.pep
ASDSKIVGKISRRVSLVHYMSPDEYEKLSSDKKLLHQRSSGTLMTDSSNPFSSPMQSKGRKGSHSMGRTVSTHGSQHKSTVSGINEQSKPSKRKHDHESTGSMNQPTHSHETNPISGSSEHSHKSKSKK

SEQ ID NO: 89245 - protein, 66 aa, Gossypium hirsutum
  Clone ID: LIB3083-103-Q1-L1-E12.pep
KSEGPCGIPNIIRKANNYISQLHLRSIIIGILPPGGGLTLREPLHQRQRKCTYENYTTVIHKRICN

SEQ ID NO: 89246 - protein, 116 aa, Gossypium hirsutum
  Clone ID: LIB3083-103-Q1-L1-G9.pep
WQQSETTVMNQCTQLLSSSTEPNYVMTYLNRSFPQHRQYLCAGAWILMQGHPENINSGNLARVLREFSPEEVTSNIYTMVDVLLHHIHIELQHGHSLQDLLLKTCANLPFFVWTHE

SEQ ID NO: 89247 - protein, 56 aa, Gossypium hirsutum
  Clone ID: LIB3083-103-Q1-L1-H11.pep
PCYLPYWQKRLNGCIAHDVDPMNWSVAPALCKRWSPYDCKRNLVGSIVTKNCCVCA

SEQ ID NO: 89248 - protein, 57 aa, Gossypium hirsutum
  unsure (1)..(57): unsure at all Xaa locations
  Clone ID: LIB3083-104-Q1-L1-A1.pep
NXKNHGDDXIGGLFFIFYLLLLGSDFGCFCKFQRYIISMLNLARLNFFSNGWFVVQQ

SEQ ID NO: 89249 - protein, 71 aa, Gossypium hirsutum
  Clone ID: LIB3083-104-Q1-L1-B6.pep
ANAFSSQATASTWSSAPVFKLRSFTARQEEAPSGIMQKYESQSCSPAWVFQRDLSHQESQSPPSIFNSSLQ

SEQ ID NO: 89250 - protein, 129 aa, Gossypium hirsutum
  Clone ID: LIB3083-104-Q1-L1-B8.pep
ILFSKASQVFPDWSAMVRKLRAMAYNAEDQIRARKNEESYLVQLAGRTTPKGLHCLSMQLTAEYFSLQPEEREFPNQKNLNDPDLYHYAVFSDNILACAVVINSTISSAKEPEKIVFHVVTNYLNLPAM

SEQ ID NO: 89251 - protein, 52 aa, Gossypium hirsutum
  Clone ID: LIB3083-104-Q1-L1-C2.pep
PNMSKMTNTPIIFLTHWVFSSSHPQVFYQQNLKHPFLGSPKFIKDILLFLHV

SEQ ID NO: 89252 - protein, 63 aa, Gossypium hirsutum
  Clone ID: LIB3083-104-Q1-L1-C5.pep
NASTDSLMWKENGLGKLFGEAGSHIILDYFSLPYLKKKKKSFIGLIFFLSFDFKYLVDFRIRS

SEQ ID NO: 89253 - protein, 120 aa, Gossypium hirsutum
  Clone ID: LIB3083-104-Q1-L1-D4.pep
DRLMNPVLMDKIEKLKHELNQSLSAAPNYTILKYKLDMLKEVSTAKSLSKAATMKQEVSKKLSEIMGRPEIKEKLEALEAEVQSSGSSSFIDLDEGVKDKILKLKSEIELEMISALESLS

SEQ ID NO: 89254 - protein, 127 aa, Gossypium hirsutum
  Clone ID: LIB3083-104-Q1-L1-D8.pep
NMIIAILPMSAEWNWNPATVGLIQSSFFWGYLLTQIAGGIWADTVGGKTVLGFGVVWWSIATALTPVAAKLGLPFLLVVRAFMGIGEGVAMPAMNNILSKWVPVAERSRSLALVYSGMYLGSVTGLA

SEQ ID NO: 89255 - protein, 100 aa, Gossypium hirsutum
  Clone ID: LIB3083-104-Q1-L1-F7.pep
VSYYEEQGFSSAAIQSYHSGNAGESDDSCHRSEPSLQRNFTVRPSEESEGFGNRRPHPEEFEGNEDTVAGEDQNWLGLEGVTRVNSLIQLPRFSEERPNP

SEQ ID NO: 89256 - protein, 77 aa, Gossypium hirsutum
  Clone ID: LIB3083-104-Q1-L1-G1.pep
QKIYFFYTKRNMGGGERCIGEGEKKRTRIRIKERDRELERAIERERQRASNIHFLEKMIGGEYKDVLIFKQGEENDA

SEQ ID NO: 89257 - protein, 131 aa, Gossypium hirsutum
  Clone ID: LIB3083-104-Q1-L1-G6.pep
SVSKDDPYGGQQDRVQQNPPPPVNQSSAVPTKPSPPPVTAWRPQAMPPPPLFMSSSGGSGSNYSGSENPLPPPSPGIVLGFSKNRFTYEELARATDGFSDTNLLGQGGFGYVHRGVLPNGKQVAVKQLKAG

SEQ ID NO: 89258 - protein, 56 aa, Gossypium hirsutum
  Clone ID: LIB3083-104-Q1-L1-G8.pep
LTEHSTTMFLGGLRSSIYLSSYLCYFVEAEYVIFGRCLISSVYILPQTCIISTCCF

SEQ ID NO: 89259 - protein, 100 aa, Gossypium hirsutum
  Clone ID: LIB3083-105-Q1-L1-A1.pep
KYSATCRLFKYQELVSATSNFLAENLIGKGGSSQVYKGCLRDGKELAVKILKPSEEVLKEFVMEIEIITTLHHKNIISLLGFCYEDNNLLLVYDFLSRGS

SEQ ID NO: 89260 - protein, 65 aa, Gossypium hirsutum
  unsure (1)..(65): unsure at all Xaa locations
  Clone ID: LIB3083-105-Q1-L1-A12.pep
KRFYIFKKQVYHLQAMKKNNMCSESSKAFYIVKNFAHFIGNHSKPWFAPQLAQXLKVVSLGLWLE

SEQ ID NO: 89261 - protein, 97 aa, Gossypium hirsutum
  Clone ID: LIB3083-105-Q1-L1-A3.pep
FNHLLTELVYEDLKAALEEVKTLGEELGDIYDYVAPCFPPRYEIFQLMVNLYTERFIQMLRLLSDRANELTNIEILKVTGWVVEYQESLIGLGVDET

SEQ ID NO: 89262 - protein, 64 aa, Gossypium hirsutum
  Clone ID: LIB3083-105-Q1-L1-A4.pep
AIPLKRCAVKLHGNGIAISWSRWFTFSSKVTLLRKAYLHFGNNSYNQCIYVAVENKGVLLTSVL

SEQ ID NO: 89263 - protein, 82 aa, Gossypium hirsutum
  unsure (1)..(82): unsure at all Xaa locations
  Clone ID: LIB3083-105-Q1-L1-A5.pep
PTKNDTKEKRGPTFGYTMNVLYGDYTCWLGDIDPVNIMIFHYLHYLDLLSVXREEARPHEELSXSXHKAFNPTRATPAANAT

SEQ ID NO: 89264 - protein, 70 aa, Gossypium hirsutum
  Clone ID: LIB3083-105-Q1-L1-A6.pep
MIKDRLMSKGEGLEKIVEEFLSFLDPKSADFDGLLKKVKEILESNESRRIPKTPKGTRDFAKEQMTIRKK

SEQ ID NO: 89265 - protein, 98 aa, Gossypium hirsutum
  Clone ID: LIB3083-105-Q1-L1-B10.pep
VIHAYLHVLLLLLIALYFHLPFFFSHPPSYYKMMSLLSSILRRKPAVLLQVRLLSSYGPPPGTTSQQKRIEKILVGNRGEIACRIVRTAKRLGIRTVA

SEQ ID NO: 89266 - protein, 96 aa, Gossypium hirsutum
  unsure (1)..(96): unsure at all Xaa locations
  Clone ID: LIB3083-105-Q1-L1-B12.pep
VKKSRPLNQLNISALENSQGANENLEKEKRTPKANQFYHNSEVLPAXNRFLPLKRTKKLKXTGKNQVEGQSTHGFGMGNKLFKNCSSLLQTLMKHK

SEQ ID NO: 89267 - protein, 100 aa, Gossypium hirsutum
  Clone ID: LIB3083-105-Q1-L1-B6.pep
KLDEVGGKDEELDLNHKKLQEQIIEAEQRYSLQLSNLQEALQAQETKQKELTEVKEAFDGLNIEIENSRKRMQELEQDLQSSVEEARKFEELHKQSGSHA

SEQ ID NO: 89268 - protein, 78 aa, Gossypium hirsutum
  unsure (1)..(78): unsure at all Xaa locations
  Clone ID: LIB3083-105-Q1-L1-C5.pep
FHTPPKRERPEPKPPMYEPPKKPARDEPKPPKPPAITPPKNEKPXPKPPMDYPPRLIKKLEGIRVKXPVYAPPTDEKP

SEQ ID NO: 89269 - protein, 83 aa, Gossypium hirsutum
  Clone ID: LIB3083-105-Q1-L1-C6.pep
MASGWGINGTKGRCYDFWVDFSECMSRCREPKDCALLREDYLECLHHSKEFQRRNRIYKEEQRKLRAAARKDKEGEAGVHHHR

SEQ ID NO: 89270 - protein, 44 aa, Gossypium hirsutum
  Clone ID: LIB3083-105-Q1-L1-D2.pep
VRWAHYSCKGWIPPNMAYSYDVDNQLKRKLYQRYLETDLVAQAI

SEQ ID NO: 89271 - protein, 49 aa, Gossypium hirsutum
  Clone ID: LIB3083-105-Q1-L1-D6.pep
GVGKTLFSIRYEQYLVLEYDLFYSETRNSLSFLVLNCWNFITLLSFSLL

SEQ ID NO: 89272 - protein, 74 aa, Gossypium hirsutum
  Clone ID: LIB3083-105-Q1-L1-E3.pep
ERKGPNYSILFWRLYHPFAQLHHNTTTPSPSAAVSARKLAASLWEFYQFLQPPQPKMHRGANNTNGRYHQRHHN

SEQ ID NO: 89273 - protein, 41 aa, Gossypium hirsutum
  Clone ID: LIB3083-105-Q1-L1-E4.pep
RRGAPGPHVFIYFFCKSYLGVSLLLGVKPFCFYFCFLNRLK

SEQ ID NO: 89274 - protein, 87 aa, Gossypium hirsutum
  Clone ID: LIB3083-105-Q1-L1-E7.pep
EDFFQNTVPSLQVAAALPPPGSYLSKLDQTPQKVEVGGKVPPDHVNAPAADIGLPGGGVPPQSAEQPIPPESLALSGGGIPPQYSAP

SEQ ID NO: 89275 - protein, 98 aa, Gossypium hirsutum
  Clone ID: LIB3083-105-Q1-L1-F3.pep
WNVELEQQWNLVELKGFESEKELKESSEKISELTNKLGEVMEEKNQLNNQMQEYQEKINQLESALNQSTTQNLELAEELKVALERSAHHEDRANMSHQ

SEQ ID NO: 89276 - protein, 99 aa, Gossypium hirsutum
  Clone ID: LIB3083-105-Q1-L1-G11.pep
GSAVSNVQSGTFQDQVGPIAAMENKLCSNPFEADKKMADPSSGIEMHKPIHASGFPVNLMHLPPQQTQVIHEDTRYVQPNMPGMQPVTSYYPVYYPVPQ

SEQ ID NO: 89277 - protein, 98 aa, Gossypium hirsutum
  Clone ID: LIB3083-105-Q1-L1-G8.pep
VLFHIWQGRPPLEFFGMIQARPLPRDLFISYARCYKHEFLKDFFLSTGQLQEVAFLLWKESLELGKNPMASKGSPLHGPRIKLIDKAQHLFAETKEHT

SEQ ID NO: 89278 - protein, 83 aa, Gossypium hirsutum
  Clone ID: LIB3083-105-Q1-L1-H12.pep
SKQKPGSDLRFYLDFILDQILAYLHISASSSAAVRVDDWESNWGNDKFPEMARASVALSLVAFIALALSSLVSGYNLCTSKSI

SEQ ID NO: 89279 - protein, 98 aa, Gossypium hirsutum
  Clone ID: LIB3083-105-Q1-L1-H2.pep
RVRRKYAAGSDRCSAFASQLLDEQLTAVIYLQSVIRGWLARRHFNNMHNLKQSNRGSVKSRRKMGRKIFEAKDMLHEQQIQVLPSVMAELQRRVLKAK

SEQ ID NO: 89280 - protein, 39 aa, Gossypium hirsutum
  Clone ID: LIB3083-105-Q1-L1-H3.pep
NSSLTLKLTTTRWGDLNHNISYTMTRYNMLAKVLQPAEL

SEQ ID NO: 89281 - protein, 64 aa, Gossypium hirsutum
  Clone ID: LIB3083-106-Q1-L1-B12.pep
HLKFGEEGNGHFRHATGQLYAISTDLASYISINQHVLHKYANEHVTLGSWFIGVDVHHIDDRGL

SEQ ID NO: 89282 - protein, 39 aa, Gossypium hirsutum
  unsure (1)..(39): unsure at all Xaa locations
  Clone ID: LIB3083-106-Q1-L1-D10.pep
KLSSPQTHNIYARSPNHIITDPYHSYSHNPTXTAAINNN

SEQ ID NO: 89283 - protein, 55 aa, Gossypium hirsutum
  Clone ID: LIB3083-106-Q1-L1-E10.pep
YSIARNGGSWGGGLFWQLLSLGMDNMGDGYQVILEQSPSTASVIAQQSRLLSSLT

SEQ ID NO: 89284 - protein, 54 aa, Gossypium hirsutum
  unsure (1)..(54): unsure at all Xaa locations
  Clone ID: LIB3083-106-Q1-L1-F11.pep
LFGRGXGXXFWXXGGGXCXXFXXAPLSXXGXXVVXSPRXFXPLPLXPCXLLXXA

SEQ ID NO: 89285 - protein, 76 aa, Gossypium hirsutum
  unsure (1)..(76): unsure at all Xaa locations
  Clone ID: LIB3083-106-Q1-L1-F9.pep
VGPAVRSCGLSSASSLLGWSSPSFFSGAVPPRSXPGXXVGPLFFFVVXGLSGXFFAGSLSAXSCFPWRRXVALGFS

SEQ ID NO: 89286 - protein, 33 aa, Gossypium hirsutum
  Clone ID: LIB3083-106-Q1-L1-G10.pep
KPEPFQHAPLVECIRTRWPRAVCNWVGDPPSIV

SEQ ID NO: 89287 - protein, 96 aa, Gossypium hirsutum
  Clone ID: LIB3083-107-Q1-L1-B1.pep
DIGAPFTGDEKRVRDAIAMEECNSVCVVNEYDDLGFIDLRINGGSVRWSSRSRLLKGKMPDEPCYPKLALHNGQLFSSMNDSISVFCGPDWVLTSR

SEQ ID NO: 89288 - protein, 56 aa, Gossypium hirsutum
  Clone ID: LIB3083-107-Q1-L1-B11.pep
AAFWAVEYLFSFYAVLFAWCRFQFNRSDLSSIPSGCSAFYGGTSKGWLPMFLSVLS

SEQ ID NO: 89289 - protein, 45 aa, Gossypium hirsutum
  unsure (1)..(45): unsure at all Xaa locations
  Clone ID: LIB3083-107-Q1-L1-B12.pep
YGSFSCNAYRSKLCYGSLRXLLMLWHDGIFNRSLGAXNAKLFKTL

SEQ ID NO: 89290 - protein, 42 aa, Gossypium hirsutum
  unsure (1)..(42): unsure at all Xaa locations
  Clone ID: LIB3083-107-Q1-L1-B7.pep
GGSSDTFNNVNAQIQDKERVLPYQXELIFAGKSLXDGRTLAD

SEQ ID NO: 89291 - protein, 55 aa, Gossypium hirsutum
  Clone ID: LIB3083-107-Q1-L1-C6.pep
SFLFFRGANGRRAFLYLNIIDLLGILHGNAKKISSLLRTNNIAFIDENFHSSFYR

SEQ ID NO: 89292 - protein, 94 aa, Gossypium hirsutum
  unsure (1)..(94): unsure at all Xaa locations
  Clone ID: LIB3083-107-Q1-L1-D10.pep
KNNRLHPGEKCIAGAHNSSATLTMESSMIITKAHPSLNEPCGISKNIXDGFSAKLNTTLESLHEEELMRLEKLHTTGEELTNLWRLMHTYYGDR

SEQ ID NO: 89293 - protein, 77 aa, Gossypium hirsutum
  unsure (1)..(77): unsure at all Xaa locations
  Clone ID: LIB3083-107-Q1-L1-D11.pep
PLKNSFFGSYSQAXLTXLSGTXSFRSTXYQLGGSSNSXHRGSPISSRAXRSGLRPQSYLAXCPDFQANVPSLLPSNF

SEQ ID NO: 89294 - protein, 74 aa, Gossypium hirsutum
  Clone ID: LIB3083-107-Q1-L1-D2.pep
DIETHGGIPYRGSPNLTCTARYASVNTHLGNEQSRKDEAESIGYVLLYLLRGSLPWQGLKTGTKKQKYDRSTEK

SEQ ID NO: 89295 - protein, 47 aa, Gossypium hirsutum
  Clone ID: LIB3083-107-Q1-L1-D5.pep
LIRYPPASPMVYVWRGVEGTGLIVRLRWYKARGKHRAVGWRFISVRI

SEQ ID NO: 89296 - protein, 54 aa, Gossypium hirsutum
  Clone ID: LIB3083-107-Q1-L1-D9.pep
LRISFNLAVQRNLNPLFKVSHVVALPSLPRTATNKVMRRVLRQQLAQVDHNSKL

SEQ ID NO: 89297 - protein, 66 aa, Gossypium hirsutum
  Clone ID: LIB3083-107-Q1-L1-E1.pep
LTNALGGSRGDGYLHGLPQLNFIHPDPYPSKILDGDDMRANDEDYASVQLAPVHGKHSIETRLVST

SEQ ID NO: 89298 - protein, 75 aa, Gossypium hirsutum
  Clone ID: LIB3083-107-Q1-L1-E11.pep
LCALIESGVNRELATTTAQTSLSLHYTMPTKTTTPPPSTSPPPTTSAPMTLPTPPPTTTAPSASSRNNSHCTTPT

SEQ ID NO: 89299 - protein, 45 aa, Gossypium hirsutum
  Clone ID: LIB3083-107-Q1-L1-E12.pep
LFQPQLPIGGLFEGQPLFLYLPNYLYINLSSENLFVIQFTYRAQT

SEQ ID NO: 89300 - protein, 59 aa, Gossypium hirsutum
  Clone ID: LIB3083-107-Q1-L1-E2.pep
FNLDIVNKQKFVEMSSQTLPPASTTRRDSQKRRSNSTKKSHSFNHAKPMSPSSIPGERT

SEQ ID NO: 89301 - protein, 38 aa, Gossypium hirsutum
  Clone ID: LIB3083-107-Q1-L1-E6.pep
AINIYSIWMNSRFTNIPGIGILRQAPFRPLREKRWPRE

SEQ ID NO: 89302 - protein, 41 aa, Gossypium hirsutum
  Clone ID: LIB3083-107-Q1-L1-E7.pep
RASFFFFFGVFFLFCCFFLKKQIIFCFTIEFYAKNQFFFYI

SEQ ID NO: 89303 - protein, 66 aa, Gossypium hirsutum
  Clone ID: LIB3083-107-Q1-L1-F1.pep
LTIALGVTRGDGYLHGLPQQNFIHPDLNPSKILVGDDMPANVADYGSRRLAPVDCKHTIDTGLACT

SEQ ID NO: 89304 - protein, 53 aa, Gossypium hirsutum
  Clone ID: LIB3083-107-Q1-L1-F11.pep
LWFLFFFFRWGVTNNAGKTGQIGNKRNISVIDLMIQSIRANFKGYLLIWRQQP

SEQ ID NO: 89305 - protein, 78 aa, Gossypium hirsutum
  Clone ID: LIB3083-107-Q1-L1-F5.pep
QLHIWPVRDIVELFTDLLGLLFFGSRPDTRVLILVVPSLFVTDSIQVESRSCATLEVYIHMKFLSTHNSPLQEGHETS

SEQ ID NO: 89306 - protein, 99 aa, Gossypium hirsutum
  Clone ID: LIB3083-107-Q1-L1-F9.pep
FVPFTPITFLDRGAVIYPDSVSLVHGDVKYTWKQTRQRCVRLASALAQLGIAPRHVVAVLAPNVPAMYELHFGVPMAGAVLCTLNIRHDSSMVAVLLKH

SEQ ID NO: 89307 - protein, 96 aa, Gossypium hirsutum
  Clone ID: LIB3083-107-Q1-L1-G1.pep
LRIVKQLQGIASDEMDNKLLQLYAYEKSRRSRRFDVVYHENARVLLHDENIYRIECSSTPTCLSIQLMDYGHDKPEVTAVSMDPKFAAYLHNDFLS

SEQ ID NO: 89308 - protein, 37 aa, Gossypium hirsutum
  Clone ID: LIB3083-107-Q1-L1-G12.pep
AIRRIGLWATFILTGFHACAGNASIVCMPPGWQGENY

SEQ ID NO: 89309 - protein, 54 aa, Gossypium hirsutum
  Clone ID: LIB3083-107-Q1-L1-G8.pep
NWLAEKLWLKGKGFCCWGVCVMSIKIMVLWRCTGLLQTNVMDSGVSSRGFCLRE

SEQ ID NO: 89310 - protein, 56 aa, Gossypium hirsutum
  Clone ID: LIB3083-107-Q1-L1-H1.pep
CPFTRFLNNLLPIQTTKISCFNPNTNKTLKSLTYSKPFQVFNMLKTINTCITRKQQ

SEQ ID NO: 89311 - protein, 120 aa, Gossypium hirsutum
  Clone ID: LIB3083-108-Q1-L1-A6.pep
MDKKKIAVPLVCHGHSRPVVDLFYSPVTPDGFFLISASKDSSPMLRNGETGDWIGTFEGHKGAVWSVCLDTNALRAASASADFSAKVWDALTSDVLHSFEHKHIVRACAFSEDTHLLLTG

SEQ ID NO: 89312 - protein, 71 aa, Gossypium hirsutum
  Clone ID: LIB3083-108-Q1-L1-A8.pep
TECSSICVCSLNEHKNFVHTRLFNLINEHKRTLYKRFINNVLSIYTCDTILPYHPIKKPLKIHLNTSFSLL

SEQ ID NO: 89313 - protein, 113 aa, Gossypium hirsutum
  Clone ID: LIB3083-108-Q1-L1-A9.pep
LPVVGGRHVVIPTTNAEVSEAEMSEIELMKERFAKLLLGEDMSGGGKGVCTALAISNAITNLSASVFGELWKLEPLSPQRKMMWRKEMDWLLCVSDSIVELKPSLQEFPGRGT

SEQ ID NO: 89314 - protein, 111 aa, Gossypium hirsutum
  unsure (1)..(111): unsure at all Xaa locations
  Clone ID: LIB3083-108-Q1-L1-C6.pep
PGEGRAHADIELSHGESCQIHGQQKQNRKPEAVDIDRWLQRNEALGAAFIHAEEVGAYXQRQWYSKLVKADINGNDQEGYSIKLPGDPKLGEGKPGNQNHAIILTRREAIQ

SEQ ID NO: 89315 - protein, 126 aa, Gossypium hirsutum
  Clone ID: LIB3083-108-Q1-L1-D1.pep
KPLEVKQNTIWGESKKMWAIAGPAILVSVSQFSIGFVTVAFAGHLGELELAAVTITTNVIEGFVFGIMLGMGSALETLCGQAVGAGQHNMLGIYLQRSWIITGITALCLTPCYLLATPILNLLRQD

SEQ ID NO: 89316 - protein, 122 aa, Gossypium hirsutum
  Clone ID: LIB3083-108-Q1-L1-D12.pep
MPKSYTTLFIVSALFKNTMSKKTILSVELLCPKCRQKVMHVISELVGITSITLDPSKNTVMVTGEADPFKIIKKVRKFRKHASIVSIGAAEEKKKDENKDEKKDSRKDVVIYSSKTCQRCEV

SEQ ID NO: 89317 - protein, 128 aa, Gossypium hirsutum
  unsure (1)..(128): unsure at all Xaa locations
  Clone ID: LIB3083-108-Q1-L1-D6.pep
RVFRGTCSLKERCCLLEGQAVHKLVALLDHTNAKVVEAALAALSTLLDDGVDIEQGVSVLCEAEGIKPILDVLLKKQTENLRRRAVWVVERLLRNDDIAYEVSGDQNVSTALVDAFHHADYRXPQIAE

SEQ ID NO: 89318 - protein, 136 aa, Gossypium hirsutum
  Clone ID: LIB3083-108-Q1-L1-E1.pep
RPKKKRIRVSWNSLITGYEQNGPASAALQVFLRMMDCGIEPDELTYASVVSACASLSAIKSGKQIHARVVKCNKLRDDLVLGNALVDMYAKCNKINEARCIFDRMPVRNVVSETSMVSGYAKVASVRTARSMFAKM

SEQ ID NO: 89319 - protein, 64 aa, Gossypium hirsutum
  Clone ID: LIB3083-108-Q1-L1-E3.pep
FTLVGGYFSMGLRSLVRISAWVWGSFILLNDFVYYSVGGACVVIKLYYSIAPILHTFLCFFWHF

SEQ ID NO: 89320 - protein, 98 aa, Gossypium hirsutum
  Clone ID: LIB3083-108-Q1-L1-E9.pep
SSLLQIFDSWYSSKKVKDKTDNSANSEGLVDCSEYDVKPSGAAGESMKTEKYLEDYGKKQRMQKKYSFVADPVGNDRDKLINVILGSLRKSRESRMKA

SEQ ID NO: 89321 - protein, 66 aa, Gossypium hirsutum
  Clone ID: LIB3083-108-Q1-L1-F1.pep
TDREKNTTRVTLLTPTDRFLLIYSIFIEIYFLHEFSLKMETSPLIFRICDIFGIYFPFGQRSLLIG

SEQ ID NO: 89322 - protein, 80 aa, Gossypium hirsutum
  Clone ID: LIB3083-108-Q1-L1-F7.pep
MWLMLHKWKQEYLCNYKSITYLLGINDTFLMVNPRIQHRPTICYRPIKPSDLETLERIHSDVFSIKYESEFFQKVVNGCD

SEQ ID NO: 89323 - protein, 35 aa, Gossypium hirsutum
  Clone ID: LIB3083-108-Q1-L1-F8.pep
WTRACGLILQALLMNATISQHPHYSILGFRRFSNH

SEQ ID NO: 89324 - protein, 104 aa, Gossypium hirsutum
  unsure (1)..(104): unsure at all Xaa locations
  Clone ID: LIB3083-108-Q1-L1-G7.pep
EVSTLLISFDDXEANFAAAMAGTRQCGILYLANPLDACSDLSNKADKGSNITSLFALVIRGGCISDDXAGRVHKARYQPAIDYDNDDGFSVAMARNAGGINIHA

SEQ ID NO: 89325 - protein, 91 aa, Gossypium hirsutum
  unsure (1)..(91): unsure at all Xaa locations
  Clone ID: LIB3083-109-Q1-L1-A2.pep
VQHISPXMYKANRSFYREPPWLFSKLSDKPSNKIXFSNPLKLSVFVCPSLPLXWFVLRNGKXGLKGINXTFFSXERYXXIKVPWRVIHRLF

SEQ ID NO: 89326 - protein, 85 aa, Gossypium hirsutum
  unsure (1)..(85): unsure at all Xaa locations
  Clone ID: LIB3083-109-Q1-L1-A7.pep
ALSEFASDTVSSPLRGVEQVRKEDDQIGAEGSSEGRSPARDRNVFCQTIIIKNPSFGIVRGVQGPNASVWPPEISFFPAKDSXYA

SEQ ID NO: 89327 - protein, 49 aa, Gossypium hirsutum
  Clone ID: LIB3083-109-Q1-L1-B11.pep
GRRVVKNGKKKMLVFCHLLEESMLWDYIETHTGGEASFSIGFRNNFRFD

SEQ ID NO: 89328 - protein, 59 aa, Gossypium hirsutum
  Clone ID: LIB3083-109-Q1-L1-C1.pep
RISSRWALSSVSCPFHTGKDEYSAKCNSCPLGFSLMEKRRYFHSSTRRAQAIGVSINKL

SEQ ID NO: 89329 - protein, 76 aa, Gossypium hirsutum
  Clone ID: LIB3083-109-Q1-L1-C5.pep
MGKNVVSDEEEELELDEDGEPIEGDTLNGRDPDDDDDEEDDEGQDEYENDGFIVDDVEDEEVDEAEEREDSDEERR

SEQ ID NO: 89330 - protein, 119 aa, Gossypium hirsutum
  Clone ID: LIB3083-109-Q1-L1-C7.pep
LCLDNILNIVIRKSDEDEHMETSDDFIRHMQEQFKEKARKSESVYYAATDVVILRFMVEASWAPMLAAFSVPLDQSDDEAVTALCIEGFRCAIHVTAVMSMKTHRDAFLTSLAKFTSLH

SEQ ID NO: 89331 - protein, 120 aa, Gossypium hirsutum
  Clone ID: LIB3083-109-Q1-L1-C8.pep
EDDQWEVERRYRDFCTLYRRLKSIFSEQGWNLPPPWSSVETESRKLFGNASPNVIAERSVLIQECLRSIICSRFSSNPPGALIWFLSPQDAFPGIPPSNIHLSQSTYFSRGQGTENISPL

SEQ ID NO: 89332 - protein, 62 aa, Gossypium hirsutum
  Clone ID: LIB3083-109-Q1-L1-D10.pep
RIQALLLVGNRMIVEVINHLLGERKNLHKVREMNPLSLMILALRGNPKREFLRKSPKRSHYP

SEQ ID NO: 89333 - protein, 96 aa, Gossypium hirsutum
  unsure (1)..(96): unsure at all Xaa locations
  Clone ID: LIB3083-109-Q1-L1-E3.pep
IFHDIQIPSEVIICRLEKAYIGSSTLRRAALGALAXTLTIPQVAYLREQLLMVGPNQRGITLTQKFKTAMTENSTDAMKDSRVLDYVNMISCIQYR

SEQ ID NO: 89334 - protein, 127 aa, Gossypium hirsutum
  Clone ID: LIB3083-109-Q1-L1-E5.pep
FNVSTLTPPFNIYANTASFVAAAKGFSAFIQQYYAGIIPSIVGNDQQQLVTQIGLSQSAGLGVLRTLLNDVINSTVQPYTFTAAELSNRTSEVVNRLGGCGVKAEGLIVPLQLGAENRTTSNVVPGD

SEQ ID NO: 89335 - protein, 80 aa, Gossypium hirsutum
  Clone ID: LIB3083-109-Q1-L1-E6.pep
VSFASSRNPCGILIENALEVGPGVCYQIHDPCRGKCMRSRVLSPDRRKNARIKDRWSMTIREGHILPHSNGPSAHSRWRA

SEQ ID NO: 89336 - protein, 100 aa, Gossypium hirsutum
  unsure (1)..(100): unsure at all Xaa locations
  Clone ID: LIB3083-109-Q1-L1-E9.pep
NPFQLEDVDGPLVKLPPPTTKLPREKHLPKPKPPTNWEEFAKXKKRKKDKVAWDEQTGTWKRRFGYDSVNDDKDIAIIEAKMTDEPGEDPFAKRQDDKKK

SEQ ID NO: 89337 - protein, 87 aa, Gossypium hirsutum
  Clone ID: LIB3083-109-Q1-L1-F10.pep
LLYLVNREGGDGEEKKQESGSLPSGVVGLGMGLPDLKSKKKGKQKVSSESHVTEALDKMREQTRETIKGLESMSKPGGDDFGEDGLI

SEQ ID NO: 89338 - protein, 45 aa, Gossypium hirsutum
  Clone ID: LIB3083-109-Q1-L1-F3.pep
PSKLTFSSEPLFSYYIDKLIPLKSYEFELVVSSNFKYIIQNHRVA

SEQ ID NO: 89339 - protein, 89 aa, Gossypium hirsutum
  Clone ID: LIB3083-109-Q1-L1-F8.pep
VITGHSIKDQRFRYGSPYTTVFESTYIWHLYEGVHWHQSWEIFVVFMSKFVVIIRYLEMPSSFILDCLRFCSLDYNIYIILSKRTSSSP

SEQ ID NO: 89340 - protein, 100 aa, Gossypium hirsutum
  Clone ID: LIB3083-109-Q1-L1-G5.pep
MVCYANKSYWFSLLFPYHGICCLYNIRVGFVEGIWLVGVIDELRMPENGSDRNPILVDTKTRVRDTLPAEPQSRNGRLDILLAFCIMQLLSRFDIYTMHQ

SEQ ID NO: 89341 - protein, 112 aa, Gossypium hirsutum
  Clone ID: LIB3083-109-Q1-L1-H11.pep
MSSPPPGGTPAPSSPPPSTNTTSPPPSSAGAPPPSSPPSQSPPSTANPPPTTTPSTPSPTAATPPPTNTPTPPPTAAAPPPTSPPSPPSGTPSPPPATPSASSSSSTTSFPF

SEQ ID NO: 89342 - protein, 66 aa, Gossypium hirsutum
  Clone ID: LIB3083-109-Q1-L1-H12.pep
SLIAMALQLPYNWFGLKMSFLSCFQVMSKLMLLSANRDKRISLCIHVIMFQIPKADMKIICNCRRL

SEQ ID NO: 89343 - protein, 80 aa, Gossypium hirsutum
  unsure (1)..(80): unsure at all Xaa locations
  Clone ID: LIB3083-110-Q1-L1-A10.pep
NQSVYNNWGSFSPLIGKQLSKKKGNIYRCFYQITNKKGIFLLSGLFSFPFLWVYTLFAEALKFLKKKNKTKKKKKKKKXS

SEQ ID NO: 89344 - protein, 59 aa, Gossypium hirsutum
  Clone ID: LIB3083-110-Q1-L1-A11.pep
GCPEVGLMILFSHHVGAQNKVFVANKCRVTADKSRSDLQVLTPLYVPRMLCLYSCGLMA

SEQ ID NO: 89345 - protein, 60 aa, Gossypium hirsutum
  Clone ID: LIB3083-110-Q1-L1-D11.pep
IFFNHNHFFHLFSQNTNQNFFKKTKSFKTVSKTSNDKKKIEKKITLKLPETTTLNQKPFA

SEQ ID NO: 89346 - protein, 131 aa, Gossypium hirsutum
  Clone ID: LIB3083-110-Q1-L1-E11.pep
GMRSMLRWVRKNMDRKKTRVFFTSMSPTHAKGIDWGGEPGENCYNQTTMIEDPNYWGSDSRKSIMKVIGEVFSKSKYPITFLNITQLSNYRKDAHTSIYKKQWNPLTPEQLANPISYADCTHWCLPGLQDT

SEQ ID NO: 89347 - protein, 63 aa, Gossypium hirsutum
  unsure (1)..(63): unsure at all Xaa locations
  Clone ID: LIB3083-110-Q1-L1-F9.pep
KIRFFSFSFFHPFIHYFLIRFFYXISSFFIIPYFLSFVISQNNPIHFSLYYTLFIFFSFFFII

SEQ ID NO: 89348 - protein, 50 aa, Gossypium hirsutum
  Clone ID: LIB3083-110-Q1-L1-G10.pep
SYYINISWTLSTFMAPRKITRESAPILYKTISLLEIIIMQLQDIGDNIPS

SEQ ID NO: 89349 - protein, 90 aa, Gossypium hirsutum
  Clone ID: LIB3083-110-Q1-L1-G9.pep
KYEKVAALYNARCPMCCLTHCISCVALSGADSIFFFESYVWSDARRFFCLVLCVDCAPAVVDNLFQGFWSVQSKSETLQFFGLTTPQAMT

SEQ ID NO: 89350 - protein, 83 aa, Gossypium hirsutum
  Clone ID: LIB3083-110-Q1-L1-H11.pep
FCEEEGICGNLSSNGVAFDDRRNCLPEKPRQRSEKVCEAALEHPVECLDYHCGGGGDGSIAIPPAMVPVATPMLSPFMAPGHA

SEQ ID NO: 89351 - protein, 107 aa, Gossypium hirsutum
  Clone ID: LIB3083-111-Q1-L1-A6.pep
QAQAEYEKAKKQEQSSSSTKPSEMPGGFPGGMPGGMPGGFPGSMPGGMPGNVDFSKILNDPELMAAFSDPEVMAALQDVMKNPANLAKHQANPKVAPVIAKMMSKSK

SEQ ID NO: 89352 - protein, 90 aa, Gossypium hirsutum
  Clone ID: LIB3083-111-Q1-L1-B3.pep
HPFQIGHFLQLLPPWDLSLKFWPLKGYYLPPTYKTKQLKNNQFRSTVIFNGLDFVGQPCSSKKLAEKDAAAQALLWLTGEDHSTSRDIDH

SEQ ID NO: 89353 - protein, 79 aa, Gossypium hirsutum
  Clone ID: LIB3083-111-Q1-L1-B8.pep
TNVAWGLYSNFCDTLSLCYVLSYIIANLLSLSIDMDQLYYAVSTCMEVLNKYALCVLYFEMGLLFVSKINNIIPVSESV

SEQ ID NO: 89354 - protein, 63 aa, Gossypium hirsutum
  Clone ID: LIB3083-111-Q1-L1-C6.pep
HAHVKLIHTYIQHSHFGPSNMALLRSLRFTNSYLMLYQLKVQEQVLGGSHSPHDTVHQEMNSS

SEQ ID NO: 89355 - protein, 61 aa, Gossypium hirsutum
  Clone ID: LIB3083-111-Q1-L1-C8.pep
ALSPGMCMSYRVYPKQATNGTKGASNPQFPPLKHNYTDPPALSTNHNPDKTVTVPNLILAD

SEQ ID NO: 89356 - protein, 119 aa, Gossypium hirsutum
  Clone ID: LIB3083-111-Q1-L1-D2.pep
MRLTFVGMICAGLTIGMYASPLSVIRTVIKTKSVEYMPFLLSFFLFLNAGVWSAYALLVKDIYIGVPNAIGFILGSAQLILYLMYNNKKSAEAVEEEKRGGRGSTHVKEALRCIQLRTI

SEQ ID NO: 89357 - protein, 42 aa, Gossypium hirsutum
  Clone ID: LIB3083-111-Q1-L1-D7.pep
AASGVTPYTVPLCIKVKLKGNYTLSPSNICKYNIYDVIIHRH

SEQ ID NO: 89358 - protein, 108 aa, Gossypium hirsutum
  unsure (1)..(108): unsure at all Xaa locations
  Clone ID: LIB3083-111-Q1-L1-E7.pep
PILSDDTNGTIAAGEYLHKGVYRPNVYIXIPATTPCIPSIQEFMAHRINVNTTHLFYGTGYNAPFLIYNRLNMMLHIYLDLFRPSSNSIFFDTLVKTLFNIKLEHIFT

SEQ ID NO: 89359 - protein, 117 aa, Gossypium hirsutum
  unsure (1)..(117): unsure at all Xaa locations
  Clone ID: LIB3083-111-Q1-L1-E8.pep
ARVEDVIDNYIGVFASKKGGTIXNSIIHRKELHNLASEIEKLKSRITDLTRSLQTYGITARKEGEGSRILSERQRQLRWSYSHIVEEHIVGFEENIKELMVKLIHEEKRCRVVSICG

SEQ ID NO: 89360 - protein, 58 aa, Gossypium hirsutum
  Clone ID: LIB3083-111-Q1-L1-F1.pep
IKRDRPYGSHHLSLKLFTDFREMDVACPTLLTIDEKVKPFYLDQLKPFGYFIFKDSFL

SEQ ID NO: 89361 - protein, 74 aa, Gossypium hirsutum
  Clone ID: LIB3083-111-Q1-L1-F5.pep
MNEFHSSWINDHKVLQMFDQFAAKLGEIEEIINERNKDMRLKNRTGAGIPPYELLLPSSGPGVTGRGITNSISI

SEQ ID NO: 89362 - protein, 128 aa, Gossypium hirsutum
  unsure (1)..(128): unsure at all Xaa locations
  Clone ID: LIB3083-111-Q1-L1-G4.pep
MAGNFHQMDTQSAAEKAVSVIGYGYDLCNDLRLSACKPGPSGSRLIELDSVVSRELVFPGGVAVKNVPNSIKCDKGERTXFRSDVLSFNQMSEKFNQDLSLSGKIPSGLFNAMFEFKGCWQKDASSTK

SEQ ID NO: 89363 - protein, 64 aa, Gossypium hirsutum
  Clone ID: LIB3083-111-Q1-L1-G6.pep
SIPIRQFLIKSFLEPPLPNNVVTPQLFENHILPRKYALFLVGRPHKVIKLLKLSFSLGPTLFQS

SEQ ID NO: 89364 - protein, 116 aa, Gossypium hirsutum
  Clone ID: LIB3083-111-Q1-L1-H4.pep
MLNSNLYAGLPEDEVKHETARTKNNKTRVSKHVSKPAAANVRTKHTVPQPFALATEKRASSGPRPAVSEANAGTGLNKSSSINCALHLNTRKQNQQPQLVLRKPLQPNNKKHSDDD

SEQ ID NO: 89365 - protein, 63 aa, Gossypium hirsutum
  Clone ID: LIB3083-111-Q1-L1-H7.pep
VASLTGKTITLEVESSDTIHNVQTKIQDTERIPLYQQRLIFVAPQLEDCRTLNAYNIHKECTL

SEQ ID NO: 89366 - protein, 39 aa, Gossypium hirsutum
  Clone ID: LIB3083-112-Q1-L1-A5.pep
GCFYNLKFPAVWGCDLKAQNFFSVIKMDIFFSQSINRPF

SEQ ID NO: 89367 - protein, 69 aa, Gossypium hirsutum
  Clone ID: LIB3083-112-Q1-L1-B4.pep
RKLEPQYWMQRSWLMYKLGKRNRMFPFHRRRSGKENLVRLVGGRIMLKKRRGCSGKVASILVLILDLCN

SEQ ID NO: 89368 - protein, 47 aa, Gossypium hirsutum
  Clone ID: LIB3083-112-Q1-L1-C3.pep
KVIYKFFFSSKQSGMQSKISNNIFSLLRAPRGLDLSRETSSLPFHYC

SEQ ID NO: 89369 - protein, 132 aa, Gossypium hirsutum
  Clone ID: LIB3083-112-Q1-L1-F2.pep
ASWGVDYIVLTSVDRDDLPDGGSGHFAKTVQAMKNLKPDIMVECLTSDFRGDLKAVDTLVHSGLDVFAHNIETVKRLQRIVRDPRAGYEQSLSVLRHAKVSKEGMITKSSIMLGLGETDDELKEALADLRAI

SEQ ID NO: 89370 - protein, 132 aa, Gossypium hirsutum
  unsure (1)..(132): unsure at all Xaa locations
  Clone ID: LIB3083-112-Q1-L1-F3.pep
LSYLSDGTNDKIQARIYAGVXGRLEELLTHPCAXELIPTLRTDGNIATGDDGQTQCIINHQAWPCLINLLTNDIKKSIQTEAGMTISNITTXNKEPIQAVIDADIISALAHLLESAESDIKKEAAXAISNAT

SEQ ID NO: 89371 - protein, 57 aa, Gossypium hirsutum
  Clone ID: LIB3083-112-Q1-L1-G1.pep
ASSGWRINTSLIWRTISLLEKHSQITTRLQQIVLTFLINRVWHHTTLFARELTGSCT

SEQ ID NO: 89372 - protein, 59 aa, Gossypium hirsutum
  Clone ID: LIB3083-113-Q1-L1-A5.pep
PKKQVEESDPKLQLSDHPVVVVDVAKLGSDVNAVIPNSTNSNNGGNNGGRTEGNAFSKV

SEQ ID NO: 89373 - protein, 55 aa, Gossypium hirsutum
  Clone ID: LIB3083-113-Q1-L1-A8.pep
MWQAYVTATNKALTWNVEDWIPPAEKYILNLSSKEELKKRHIHSDAECVWSWAAT

SEQ ID NO: 89374 - protein, 101 aa, Gossypium hirsutum
  Clone ID: LIB3083-113-Q1-L1-A9.pep
QIFFSPSFYLSHICPLITELIQNSTQIHASKTTCQEWRIQTHSMFFCLLSLALTNIAPLILLTAVPLLIYLVDSILTNITPCKALLYPSSYSSKQQMYFPH

SEQ ID NO: 89375 - protein, 36 aa, Gossypium hirsutum
  Clone ID: LIB3083-113-Q1-L1-B1.pep
SIRMPAAVRIQNLSKFYLMQHPGRFRGRGSSMILAR

SEQ ID NO: 89376 - protein, 47 aa, Gossypium hirsutum
  Clone ID: LIB3083-113-Q1-L1-B10.pep
KMLVKESGGYTCDLSEELLLVLPSDPFDQLDVDRKITIIDFSTRAFL

SEQ ID NO: 89377 - protein, 68 aa, Gossypium hirsutum
  Clone ID: LIB3083-113-Q1-L1-B3.pep
STSTPTSISDPSKCIFLSGHTKTKSSGGGLSNKVREHTAPVPALAPLPIGPQPHFPEQQDIFSFVVRK

SEQ ID NO: 89378 - protein, 56 aa, Gossypium hirsutum
  Clone ID: LIB3083-113-Q1-L1-B4.pep
VHHSLHECSKSCMCYNLSRPVKPKSVNGMCRCIVRDQEALIPALATRALGRSASVP

SEQ ID NO: 89379 - protein, 68 aa, Gossypium hirsutum
  Clone ID: LIB3083-113-Q1-L1-B9.pep
FCHALCFRGSYLYYTQNFWVYTHVYGSVCFSVGFFFFIFFIEPPTEFLFFFDPPPSKKNINHQSRGFI

SEQ ID NO: 89380 - protein, 49 aa, Gossypium hirsutum
  Clone ID: LIB3083-113-Q1-L1-C11.pep
KSKCHSFNVVLTKDASTCGVEGSRLYLFFDRVRQIEHRIGVAHPAYDKE

SEQ ID NO: 89381 - protein, 64 aa, Gossypium hirsutum
  Clone ID: LIB3083-113-Q1-L1-C9.pep
SFVNSHVNDRVTVSFYFAENSKGSLAKNWWLECTKFQAVICDGVQLHCSPLYYHEIKFTLKTNI

SEQ ID NO: 89382 - protein, 93 aa, Gossypium hirsutum
  Clone ID: LIB3083-113-Q1-L1-D1.pep
RVESSPDSDHLLSHRVGDNCGTHVCGARVLSARYWSWVCDVCRIRNSVACMALLSILPTCYQIYKMDSCIGFQAIPYLITFVYCKAKDLLCAG

SEQ ID NO: 89383 - protein, 40 aa, Gossypium hirsutum
  Clone ID: LIB3083-113-Q1-L1-D11.pep
HKIQLVLYIVYAPKKLTSYNLSNRVELLYNHSFWKLFYFL

SEQ ID NO: 89384 - protein, 49 aa, Gossypium hirsutum
  Clone ID: LIB3083-113-Q1-L1-D4.pep
GRPVTSQWDTTLIGEATNTKGARMGMQRLTPKVNVMTKSASSPIRCLNP

SEQ ID NO: 89385 - protein, 43 aa, Gossypium hirsutum
  Clone ID: LIB3083-113-Q1-L1-D8.pep
EMLFFTPKFANLLRQEINFAWLIPLNSLSHMVSGYGNTGDFYK

SEQ ID NO: 89386 - protein, 105 aa, Gossypium hirsutum
  Clone ID: LIB3083-113-Q1-L1-E2.pep
AAHHIVKALGTTKNLSDDLRKILIDLDAHLSLITSNIDSKGGKGFVEVEERLKRVERKIVIWESDRIMIWDSGPKEAFDYLEAVDEVQTLIDSLRGLSMNENQKQ

SEQ ID NO: 89387 - protein, 124 aa, Gossypium hirsutum
  Clone ID: LIB3083-113-Q1-L1-E9.pep
EPYCSTINQVTNSKRVYNHKGSEMAIVDYVAVDTKNKQHLEKVNIRFRHPRNPIIGDKFSSRHGQKGVCSQLWPDIDMPFSGVTGMRPDLIINPHAFPSRMTIAMLLESVAAKGGSLHGKFVDA

SEQ ID NO: 89388 - protein, 52 aa, Gossypium hirsutum
  Clone ID: LIB3083-113-Q1-L1-F11.pep
TSKTSTLFQQIFFKASKTLKLNKKGLIDLPIKALNLKPLAFPFFSFFFLLCF

SEQ ID NO: 89389 - protein, 40 aa, Gossypium hirsutum
  Clone ID: LIB3083-113-Q1-L1-F4.pep
LDWKRIFSHGRGCFAVNLNLVLLHVKRRISFYACLSLCLV

SEQ ID NO: 89390 - protein, 49 aa, Gossypium hirsutum
  Clone ID: LIB3083-113-Q1-L1-F7.pep
DKLMFKLYQTLELVKLFPLKHPFRVLPPGPNRLCSFKFHLSESSGRGSL

SEQ ID NO: 89391 - protein, 74 aa, Gossypium hirsutum
  Clone ID: LIB3083-113-Q1-L1-G5.pep
ISPLLLYSIVFHQNFQTHLGVYRKLDSRLLCMEEVGVCLFDVIVSDMAFMESLSLKLDRTNWSVFSGLQFYGCS

SEQ ID NO: 89392 - protein, 38 aa, Gossypium hirsutum
  Clone ID: LIB3083-113-Q1-L1-H4.pep
LSAMVSQVLAEVGKYFAGNIPQKIACFQQGLFLRLCMS

SEQ ID NO: 89393 - protein, 110 aa, Gossypium hirsutum
  Clone ID: LIB3083-114-Q1-L1-A11.pep
MAVTEAENPLVGEITCGSSLQKLQEIWDEVGESDEERDKMLLQIEQECLDVYKRKVEQAAKSRAQLLQALSDAKLELSTLVSALGDKSFISIPETTLGTINEQLAAIAPA

SEQ ID NO: 89394 - protein, 135 aa, Gossypium hirsutum
  Clone ID: LIB3083-114-Q1-L1-A6.pep
ILNGSTSFVQLLQMVGSARLHEVQSHQNMSPNENSNVRTSQFQNHQRENCDNSNGPKSFTREDLMPSANYHPYLTLNSEVRETGQFETLKEETRVSEASKTIDENMIKRLSPLTQESASQSMDQNDKTRSVQVTQ

SEQ ID NO: 89395 - protein, 131 aa, Gossypium hirsutum
  Clone ID: LIB3083-114-Q1-L1-B1.pep
ELEKIFSAIALKCCPSTVSSSRTRSQSLLLTSSNDEVVVHGSPGMELTSEQTKANCHWETLEHYLEKYKNFHSRLPVIVAETLLRTDPHIELPLWLVKMFKENQRERPWGMTGPKPSSASLFRLYVDYGRY

SEQ ID NO: 89396 - protein, 104 aa, Gossypium hirsutum
  Clone ID: LIB3083-114-Q1-L1-B12.pep
ATHFYYALLVKHLLFAWLAELLAQTSIKNTIGQTIFDGGHTPRIQGIYPAYVQRTTCALSCKIPPPTNKDLITLLWNPQKIPLSYLGNSQDGLPNQDWISKRIK

SEQ ID NO: 89397 - protein, 81 aa, Gossypium hirsutum
  Clone ID: LIB3083-114-Q1-L1-B4.pep
EILIKIIIHCLYTRSNNCLQSSNSQKLQITLPQELHFLFLLLCIWQSKLVAPQELNAEFSFKCLLCLLSPLAAVLQKKEKM

SEQ ID NO: 89398 - protein, 124 aa, Gossypium hirsutum
  Clone ID: LIB3083-114-Q1-L1-C12.pep
ERAIRHAIQERIPIVVVINKVDRLITELKLPPKDAYHKLRHTLEVINNHISAASTTAGNVSVIDPAAGNVCFASASAGWSFTLQSFAKLCVKLHGIPFDAEKFASRLWGDIYYHPDTKAFKRKP

SEQ ID NO: 89399 - protein, 48 aa, Gossypium hirsutum
  unsure (1)..(48): unsure at all Xaa locations
  Clone ID: LIB3083-114-Q1-L1-C5.pep
VAVALVVGVPALVXVVLLPSGXVFFVPVXAVSSRSPPVXVVRPLXPGS

SEQ ID NO: 89400 - protein, 113 aa, Gossypium hirsutum
  Clone ID: LIB3083-114-Q1-L1-D6.pep
TKCFAKIALQAIKQASAIKDKDYKQLTISTIYQDLKCCKSIHNEYALRMNHVSPTYTTTQQDKFRPVYVSSLVFDGKTYRGEVAGSKKEAEQLVARIAIESLLGTFSRASFHM

SEQ ID NO: 89401 - protein, 64 aa, Gossypium hirsutum
  Clone ID: LIB3083-114-Q1-L1-E12.pep
TSPQLSVAWARGALISMGVPSTHASLKDIELAVWMNLKKIERVRKILAWSSSTIGDFRGRWNEP

SEQ ID NO: 89402 - protein, 65 aa, Gossypium hirsutum
  unsure (1)..(65): unsure at all Xaa locations
  Clone ID: LIB3083-114-Q1-L1-E7.pep
LLLNLLAGIVSIAFLERVXEDSYKRFCGGKAATVSAKRINREFGSQLKEHIPNFVDHTQKINKLA

SEQ ID NO: 89403 - protein, 59 aa, Gossypium hirsutum
  Clone ID: LIB3083-114-Q1-L1-E9.pep
SIFPQKRNMLSTTPTFLITQHKRKTQNPSQNTSKQVISGNQIHKEPSPPLSFSFSKPSF

SEQ ID NO: 89404 - protein, 75 aa, Gossypium hirsutum
  Clone ID: LIB3083-114-Q1-L1-F12.pep
YEDISSLEGLDKVSLQKMKMPPMIRIRIRIYIYISPPLFGFSCSHLFVVKKKKKSHPLFAKNKVSLLGNAISPSD

SEQ ID NO: 89405 - protein, 33 aa, Gossypium hirsutum
  Clone ID: LIB3083-114-Q1-L1-F4.pep
YQVKKKLTSNKLSMIKVFLILPKFPKQVTGKSS

SEQ ID NO: 89406 - protein, 61 aa, Gossypium hirsutum
  Clone ID: LIB3083-114-Q1-L1-F7.pep
SKSLFVSAQTMALCFSISKSIHSLLQQLPSSENFMTTHAQTFFFTACLFYLLITIPTIFLL

SEQ ID NO: 89407 - protein, 137 aa, Gossypium hirsutum
  Clone ID: LIB3083-114-Q1-L1-G1.pep
ATWRHYPSDADLLVRFEIMISNNISQQEDCSLSEVSSSRSRYNSRGAEERLSFNICEKLVQMMHGNMWVIQNPLGSAQSMAVVIRFQIRPSITTTITESGESSDQPRSNSIFHGLHVLLADDDTVNRAVTGKLLEKL

SEQ ID NO: 89408 - protein, 140 aa, Gossypium hirsutum
  unsure (1)..(140): unsure at all Xaa locations
  Clone ID: LIB3083-114-Q1-L1-G4.pep
EVPSVFKNFFTMINRQFDKQVKMVRSDNGKEFTCMENYFMEHGIIXNLXCTGTPQQNGRVERKHRHILNVARALRFQGSLPIKFWGECILTVGYLINRTPCSGLNGKTPYEALYGRQPDFGHLRXFGSLCYAHCKTRDNF

SEQ ID NO: 89409 - protein, 60 aa, Gossypium hirsutum
  Clone ID: LIB3083-114-Q1-L1-G5.pep
MREYLSVHILQAGFHVGNACCELYCLEHRIHPVGQKPSHMTDGGRDVVQNTLCTEPSAGK

SEQ ID NO: 89410 - protein, 127 aa, Gossypium hirsutum
  Clone ID: LIB3083-114-Q1-L1-H9.pep
RPELNPKWIALLILEKACLSKISLEDATGMVRKTGCNLKEKLREHGGLDVVFEVALECHSVLEGWLEQSSSSPLIEDKKDVQSLVLLLKCLKIMENAAFLSSDNQSHLLEMKGQLNSHGSRISFTKL

SEQ ID NO: 89411 - protein, 103 aa, Gossypium hirsutum
  Clone ID: LIB3083-116-Q1-L1-A11.pep
PASLFSGISAKCACSCEKNVDIWRSKAQKLKMVQPYDVFLSNPHVSASGTIGAVLSANFGESSVRLVEDAKDIKQLSYHNPTLKSYPLGDIFASMSFTAQHGN

SEQ ID NO: 89412 - protein, 56 aa, Gossypium hirsutum
  Clone ID: LIB3083-116-Q1-L1-A2.pep
CPLCYRVFGSGQALGGHKRSHLLAATPNSGKFYNNLIDLNLPAPLEDDEFSVVSDA

SEQ ID NO: 89413 - protein, 42 aa, Gossypium hirsutum
  Clone ID: LIB3083-116-Q1-L1-A3.pep
TCKLHWKMMSLVWFFMLKLNYGAIHVDLMLYIQCFYALFFFF

SEQ ID NO: 89414 - protein, 59 aa, Gossypium hirsutum
  Clone ID: LIB3083-116-Q1-L1-B1.pep
NAEISGRGGPSTPSPSSLPLKNRTIACKAIHVLMEHHKTSAPPSSTTPSPTTSAPSLIP

SEQ ID NO: 89415 - protein, 106 aa, Gossypium hirsutum
  unsure (1)..(106): unsure at all Xaa locations
  Clone ID: LIB3083-116-Q1-L1-B12.pep
MVVIYRHRWGIPITTSYPISLLYTWFFLFFIXIFIFNFYFXLFFYFIFFFFNYCFSLLYIIYFFFIYFNLFIYFFLFFLFFFYIFFFXYFYLYFFYLYFFFIFYIF

SEQ ID NO: 89416 - protein, 106 aa, Gossypium hirsutum
  Clone ID: LIB3083-116-Q1-L1-C4.pep
VKRLQARKHICGMTGDGVNDAPALKKADIGIAVADATDAARSASDIVLTEPGLSVIISAVLTSRAIFQRMKNYTIYAVSITIRIVLGFMLLALIWKFDFPPFMVLI

SEQ ID NO: 89417 - protein, 131 aa, Gossypium hirsutum
  Clone ID: LIB3083-116-Q1-L1-D11.pep
DSEQLAILGIAFTIMDELLPSMVVKIWSPKNENQEPGNENIVPNASTTTELKDWRRQLQYSFDKLRDHFCRQYVLSFIYSREGKTRLNAQIYLGGDGEDSQWDTLPSLPFQALFAKLQQLATVAGDVLLGK

SEQ ID NO: 89418 - protein, 107 aa, Gossypium hirsutum
  Clone ID: LIB3083-116-Q1-L1-D2.pep
FCASDFKANGKYILFKEKELNVTFNCEECTSLPAGTFNTDTNNDNKGNELRVAIIVLIVLVASTVTIFGLMMAYKYWQKRKRQQDQARFLKLFEEGDDLEDELELGN

SEQ ID NO: 89419 - protein, 106 aa, Gossypium hirsutum
  Clone ID: LIB3083-116-Q1-L1-D5.pep
HDLPPPGKKGRTYICSCMIFLRPKDGAKLVMKKWIEELQAQPWSKAKKANDQPAFNWALNKTAGLVDLYLLPQAAFPTGGLYFKNQTWVQQTKGMHVIIHNNYITG

SEQ ID NO: 89420 - protein, 44 aa, Gossypium hirsutum
  Clone ID: LIB3083-116-Q1-L1-E12.pep
PPFFSHTELYLGWFNNKCGCKKHYIFFLPNSLTYPHIIIPFPSQ

SEQ ID NO: 89421 - protein, 50 aa, Gossypium hirsutum
  Clone ID: LIB3083-116-Q1-L1-F10.pep
NCLIIICRTIYGLSLIWFSKNLIFLCNLLVYFFGILIYSLFYYFLFYIIF

SEQ ID NO: 89422 - protein, 107 aa, Gossypium hirsutum
  Clone ID: LIB3083-116-Q1-L1-F2.pep
GLDIIGVQTVINYACPRDITSYVHRVGRTARAGREGYAVTFVTDNDRSLLKAIAKRVGSKLKSRIVVEQSITKWSQKIEEMEEKVTEVIEEERAERALRKAEMEATN

SEQ ID NO: 89423 - protein, 54 aa, Gossypium hirsutum
  Clone ID: LIB3083-116-Q1-L1-F5.pep
VQPCRTNCLSEESAITLVDGKVVQDICLRLRNVECGEVEIQLQWIELPGSKGLL

SEQ ID NO: 89424 - protein, 72 aa, Gossypium hirsutum
  Clone ID: LIB3083-116-Q1-L1-G5.pep
NPYSNSPINSPENSLCLKTHCQSMNFQAHFTSCISSLNRLFRSRYLTFIFRILLYFFFYLYFFFFFIISFFF

SEQ ID NO: 89425 - protein, 53 aa, Gossypium hirsutum
  Clone ID: LIB3083-116-Q1-L1-G7.pep
MPREIITLHVGQCGNHIGMEFWKQLCLEHGIIKEGFLEDFSSHVGDRKDLFFY

SEQ ID NO: 89426 - protein, 51 aa, Gossypium hirsutum
  Clone ID: LIB3083-116-Q1-L1-G9.pep
SDICCLLDFVGSFFFFIIFMFFIFYLVLLYFFYIYCLDIYFFIFLFIFYFF

SEQ ID NO: 89427 - protein, 80 aa, Gossypium hirsutum
  Clone ID: LIB3083-116-Q1-L1-H3.pep
PYWDRPRLRRQRSFLRRQDRKGARISSFVFFGSRRLDLRFPFETGLKSRSSRFIGHRVRWRFGGQWGTPTVGDKRGKRHE

SEQ ID NO: 89428 - protein, 39 aa, Gossypium hirsutum
  Clone ID: LIB3083-116-Q1-L1-H4.pep
SLLPSSISSENESKPPTSFDMSSKQWLIHEVSPFMMKNS

SEQ ID NO: 89429 - protein, 108 aa, Gossypium hirsutum
  Clone ID: LIB3083-116-Q1-L1-H6.pep
ESSSGLHIYDLSSGHYTGSVHWTDQDDPRIYKARVCAIANSPDSVFVSFDCPHRENSVLVIDKSTLQVSSELTRQSGSAAKNTFPGKLTWLPETGLVIGSAVTCGAFG

SEQ ID NO: 89430 - protein, 56 aa, Gossypium hirsutum
  Clone ID: LIB3083-119-Q1-L1-A10.pep
IPLDSIKPPTQQRYQKVVYREKENSDGGEACFIWEIRDGEAVRERDFRQSLQRERI

SEQ ID NO: 89431 - protein, 58 aa, Gossypium hirsutum
  Clone ID: LIB3083-119-Q1-L1-A6.pep
LPLLSYRVQELQLKKKINLQNAKKKLKQRRKEVDCFIVCGTEKKKPLALALFLSVISS

SEQ ID NO: 89432 - protein, 97 aa, Gossypium hirsutum
  Clone ID: LIB3083-119-Q1-L1-A8.pep
IDYRQLNKVTIKNKYPLPRIDDLFDQLKGASVFSKIDLRSGYYQLRIRDSDIPKTAFRTRYGHYEFLVMPFGLTNAPAAFMDLMNRIFRPYLDRFVV

SEQ ID NO: 89433 - protein, 98 aa, Gossypium hirsutum
  Clone ID: LIB3083-119-Q1-L1-B12.pep
EKEKKLKEARELEEKEKKLKEACEREENERRLKEIREREEIEKRLKEAREREEKEKKLKEAREQEENEKRLKEAREREENDKRLKEAREREEKLKEAR

SEQ ID NO: 89434 - protein, 57 aa, Gossypium hirsutum
  Clone ID: LIB3083-119-Q1-L1-B3.pep
YFGVWIGYWKLQQRLKNGKHGPQTQSLKSINFLCWNPPLIMILLLFLLRSFERSEKE

SEQ ID NO: 89435 - protein, 65 aa, Gossypium hirsutum
  Clone ID: LIB3083-119-Q1-L1-B7.pep
PLTCRQVCFQPIAFYKKVRDNVLNDALQSMYMCKTTRGTQLNMITPYSNVIIMVLMDIGKHRSIL

SEQ ID NO: 89436 - protein, 48 aa, Gossypium hirsutum
  Clone ID: LIB3083-119-Q1-L1-B9.pep
KSENPYSKQFRSTEKIDFKNLIIKSKILGFPKSGLYKKGTYNGTGLQL

SEQ ID NO: 89437 - protein, 47 aa, Gossypium hirsutum
  Clone ID: LIB3083-119-Q1-L1-C10.pep
DRQLVTIFSAPNYCGEFDNAGAMMSVDESLMCSFQILKPADKRSRFI

SEQ ID NO: 89438 - protein, 38 aa, Gossypium hirsutum
  Clone ID: LIB3083-119-Q1-L1-D3.pep
SAVRNEDFHEMISYHKILTRLFSLHEWLVKSSLDQSLK

SEQ ID NO: 89439 - protein, 96 aa, Gossypium hirsutum
  Clone ID: LIB3083-119-Q1-L1-D7.pep
RKGVEATKIIRLVHDAFSKELGPVSLTAQGKVPVPDGLTLNENLGDLETICGDIELPSSNTFSFGYPSEEKDVSSFSNLQIKEDSGQSNESTSLLA

SEQ ID NO: 89440 - protein, 98 aa, Gossypium hirsutum
  Clone ID: LIB3083-119-Q1-L1-E10.pep
PEEQLLKTYACYLSTSAGPVMGVLYLSSQKLAFCSDNPLSYQVGAQTQWSYYKVAIPLHQLRAVNPSTSKANPAEKYIQIISVDNHEFWFMGFVHYDS

SEQ ID NO: 89441 - protein, 95 aa, Gossypium hirsutum
  Clone ID: LIB3083-119-Q1-L1-E11.pep
LNCPGGSTYSVLAIYDCMSWIKPKVGTVCFGVAASQGALLLAGGEKGMRYAMPNARIMIHQPQSGCGGHVEDVRRQVNEAVQSRYKIDKMYAAFT

SEQ ID NO: 89442 - protein, 98 aa, Gossypium hirsutum
  Clone ID: LIB3083-119-Q1-L1-E4.pep
VPEIVKIYNDPTKRGINNVKVTASDDLTREGLQSKFRDLVNQLYDNGNDKVKCKDFPGLEQALKNARGEIPEYLESIAIQIEKDRGETTEFVLINIQI

SEQ ID NO: 89443 - protein, 98 aa, Gossypium hirsutum
  Clone ID: LIB3083-119-Q1-L1-E5.pep
FKLKFFRVIPSFQFCRSKKPSHLPETPGPVTHRLSPVNPKALDIFYPNLPAPPPSTPDYSFFKCHLSPKIATVGCGCRARSSHTQYLPSVDVSFESPD

SEQ ID NO: 89444 - protein, 97 aa, Gossypium hirsutum
  Clone ID: LIB3083-119-Q1-L1-E7.pep
VTLLLPMLYGDIPTGLSSPNPYTNCARCAHSSSTSTSKRTLDFNPILTPPQSLMPDVPRCLLIHCGRLEVLILNFLSNINRFLLLYLHHLIWNHPVF

SEQ ID NO: 89445 - protein, 74 aa, Gossypium hirsutum
  Clone ID: LIB3083-119-Q1-L1-E9.pep
KLGYGSTVFPTCQTPPPHEILARFTHTKKKQVKQNLSPLEHVSSSPYFIFLDVWQRNLILTRFFSISLFLIFCL

SEQ ID NO: 89446 - protein, 51 aa, Gossypium hirsutum
  Clone ID: LIB3083-119-Q1-L1-F6.pep
FMNGGGNPINVGGFKRQPKPRLLTGFGHTKYKFRMGSLLELRSHRDNHYSS

SEQ ID NO: 89447 - protein, 98 aa, Gossypium hirsutum
  Clone ID: LIB3083-119-Q1-L1-F8.pep
VLSHGDWVPLLAQVNEHSMLSMLRNATCTLSNFCRGTPQPTFDQVRPALPALERLIHSNDEEVLTDACWALSYLSDGTNDKIQAVIEAGVCPRLVELL

SEQ ID NO: 89448 - protein, 68 aa, Gossypium hirsutum
  unsure (1)..(68): unsure at all Xaa locations
  Clone ID: LIB3083-119-Q1-L1-G11.pep
QALQPLQIFAPRPPAXPAPTPAKPKNKTATTAADSPDVTPTDNSDAGTLQNVDMKEATPLVKALPSPP

SEQ ID NO: 89449 - protein, 98 aa, Gossypium hirsutum
  Clone ID: LIB3083-119-Q1-L1-G2.pep
FHVDCIDMWFYSHSNCPMCRAPIQAVIPVNPPKTLEQTAATVSETALPLPPGDDIEANSFFPPSCSSSSSSSLEMESCPMKRLELVGLGTVVEVTIGT

SEQ ID NO: 89450 - protein, 93 aa, Gossypium hirsutum
  Clone ID: LIB3083-119-Q1-L1-G4.pep
MHQKKSGKHQEIGKASSDCISSDFDHSTSLLIPSLDDHRFNRNNLQKNPNVPTQNRSHLIIQIPSSTNPSPPPPPPSTTTTHHQERPNDFSPT

SEQ ID NO: 89451 - protein, 100 aa, Gossypium hirsutum
  Clone ID: LIB3083-119-Q1-L1-G5.pep
KTDVTEGMNRGSHTPEKSPAIVGHSTKGTDKKASPTGSNDMMETFNVVKAEKDVEADVRSQASDKEKRKPDWEMVPAQKVEHMEENLEGSECPEPYCGLS

SEQ ID NO: 89452 - protein, 98 aa, Gossypium hirsutum
  Clone ID: LIB3083-119-Q1-L1-H3.pep
KVEDVDEEKEKEEKKKKKIKEVSHEWSLVNKQKPIWMRKPEEITKEEYAAFYKSLTNDWEEHLAVKHFSVEGQLEFKAILFVPKRAPFDLFDTRKKPN

SEQ ID NO: 89453 - protein, 55 aa, Gossypium hirsutum
  Clone ID: LIB3083-119-Q1-L1-H7.pep
TNLTTNSSPSFLFGTLHLQLILLRCVSKHTGLVLFSTFLDPHLHEFYLINNLHYR

SEQ ID NO: 89454 - protein, 34 aa, Gossypium hirsutum
  Clone ID: LIB3083-120-Q1-L1-A12.pep
RNIPRDLNMSVFKNNNSYLKHIRSLINNVAKYDS

SEQ ID NO: 89455 - protein, 66 aa, Gossypium hirsutum
  Clone ID: LIB3083-120-Q1-L1-A4.pep
NFLLHDTWLYIATQEEKRNYLALHIDILFEIALLCQKKDSYTDSIYSKSIFGTMLTIYITTCLVLL

SEQ ID NO: 89456 - protein, 77 aa, Gossypium hirsutum
  unsure (1)..(77): unsure at all Xaa locations
  Clone ID: LIB3083-120-Q1-L1-A5.pep
TSHSSRLANFQRKGFDVLYKGAYIPFLSQYQPXILDLIEHAXTQPNLTIGVLVSIGGNILTNFFKLIFCGEKPPIFE

SEQ ID NO: 89457 - protein, 97 aa, Gossypium hirsutum
  unsure (1)..(97): unsure at all Xaa locations
  Clone ID: LIB3083-120-Q1-L1-B1.pep
RTFLRNQKSNIFKGGSEKRISPKDHFDSSPAPLIELAXIKPWSFYRTLIAQYNATLLFLYHTITTGIGHKKQHEACHGGGPLGIAWAFCGLNFIPGY

SEQ ID NO: 89458 - protein, 89 aa, Gossypium hirsutum
  unsure (1)..(89): unsure at all Xaa locations
  Clone ID: LIB3083-120-Q1-L1-B12.pep
FGATPVMCQKNLIWVVTPMPGVVDRYSTLGEVVQGHTLVNASGKNGLPRDWLVTNNETGGIFTPATRVLVVVNXRLERYFKFPKRVGGE

SEQ ID NO: 89459 - protein, 86 aa, Gossypium hirsutum
  Clone ID: LIB3083-120-Q1-L1-B4.pep
ITSQKRWSLPVLSPSFLTREAIVRVLESTCFRPWSKGFSSKSMNPPVWGSPFPLSKLGWGKENFGEFGSFERTRTFPGWGYLVVEI

SEQ ID NO: 89460 - protein, 47 aa, Gossypium hirsutum
  Clone ID: LIB3083-120-Q1-L1-B5.pep
FGAGGLKKVKGGEKFGAQIGCKNNPLWGIGNTIGPDGSGVLKVKNRL

SEQ ID NO: 89461 - protein, 71 aa, Gossypium hirsutum
  Clone ID: LIB3083-120-Q1-L1-B7.pep
HACLKQTKYLHNAVSKMKENPRNKQEIISVYLLYHFQFRAEDVKQNRDISGGEIKGRSSNKLGNPRNEIYD

SEQ ID NO: 89462 - protein, 100 aa, Gossypium hirsutum
  Clone ID: LIB3083-120-Q1-L1-B8.pep
VLYLEESPAIFQEERLSILEQLKILEEKMVSLNDEELHFEDVKSIELLYEENGNGFYGSSDFTYETNGVTNGHFEGANGKHHQEKKLMACNAKRLLPLFD

SEQ ID NO: 89463 - protein, 53 aa, Gossypium hirsutum
  Clone ID: LIB3083-120-Q1-L1-C1.pep
SPYLKTKMGEGFNRWMPRKNGSFATTTLFGGHQLALEYLVPNLLELYGGIEFT

SEQ ID NO: 89464 - protein, 124 aa, Gossypium hirsutum
  Clone ID: LIB3083-120-Q1-L1-C11.pep
AKPSGSEQSVLEKHVAFFDRNHDGIVYPWETFEGFRAIGAGYLLSMTGAFLIHFALSSKTRPGKYPSPFFPIEVKNIHLAKHGSDSGVYDSDGRFVSLKFEEIFRKFARTHGNALTSGELMAML

SEQ ID NO: 89465 - protein, 41 aa, Gossypium hirsutum
  Clone ID: LIB3083-120-Q1-L1-C6.pep
KSGESLFVEPNSGGILRFSYVLVAVLTTACLDMIFLGFLSH

SEQ ID NO: 89466 - protein, 48 aa, Gossypium hirsutum
  Clone ID: LIB3083-120-Q1-L1-D11.pep
NFMYRKQGENRALLHSYLNYITWRIHNKACENNLITLYTKTRSLPNEP

SEQ ID NO: 89467 - protein, 44 aa, Gossypium hirsutum
  Clone ID: LIB3083-120-Q1-L1-D2.pep
IGSPSWFNLDPRIGFKVGGAGFLTHFDLGHQVVPPKNQRLNQEP

SEQ ID NO: 89468 - protein, 90 aa, Gossypium hirsutum
  Clone ID: LIB3083-120-Q1-L1-D3.pep
KPKVERKGGKTNGKFSTSMHEDGTTGEEKPKKKKKLEKRAELDIIDDAGASFTELFATDVADPIHDGKRKIVDRANQDTKSSDSLVTYPV

SEQ ID NO: 89469 - protein, 62 aa, Gossypium hirsutum
  Clone ID: LIB3083-120-Q1-L1-E1.pep
TKNTNREPGIIKVFRTEIPPKGFYWQPQKEPGPSNLPTFPNGTRGHRLIKGLNPKPCLNKSG

SEQ ID NO: 89470 - protein, 43 aa, Gossypium hirsutum
  Clone ID: LIB3083-120-Q1-L1-E3.pep
TKTGWGIGSLLAGQISCGTRGILTSTHSFLDLGWHFRKSRSSR

SEQ ID NO: 89471 - protein, 126 aa, Gossypium hirsutum
  Clone ID: LIB3083-120-Q1-L1-E4.pep
LPPPVPIYKPPPVEKPHPPPVPIYKPPPVEKPHPPPVPIYKPPPVEKPHPPPVPIYKPPPVEKPYPPPVPVYKPPPVEKPHPPPVPVYKPPPVPVYKKPCPPPVPVYKSPPVPVYKKPHPPPVPVY

SEQ ID NO: 89472 - protein, 112 aa, Gossypium hirsutum
  Clone ID: LIB3083-120-Q1-L1-E7.pep
MPRSKSPVSIALSFLFTFFSISNAFFGPSSPVLQLTPSNFKSKVLNSNGVVLVEFFAPWCGHCQALTPTWEKAANVLNGVATVAALDADAHQSLAEKYGIRGFPTIKVFAPG

SEQ ID NO: 89473 - protein, 124 aa, Gossypium hirsutum
  Clone ID: LIB3083-120-Q1-L1-F11.pep
NKPVILVLLCGGPVDITFAKNDQNIGSIIWAGYPGEAGGRALAEIIFGDHNPGGRLPITWYPQNLTKIPMTDMRMRPEPSSGYPGRTYRFYQGLKVFEFGYGLSYTNYSYEFLPLTKDKGYFIT

SEQ ID NO: 89474 - protein, 92 aa, Gossypium hirsutum
  Clone ID: LIB3083-120-Q1-L1-F4.pep
VFPHYRPHILFLFSSLRHPQKRESKKETHFHHVSLSLLDIKNLPSFLGFSFSTFRFSVLDIAELLVFIYRTAEIGSYLRKEIEVCSKVIRQC

SEQ ID NO: 89475 - protein, 130 aa, Gossypium hirsutum
  unsure (1)..(130): unsure at all Xaa locations
  Clone ID: LIB3083-120-Q1-L1-F6.pep
QAMSILISTFHHGKNPSAIDQMTFARYTERTAFERPLTSGVAYAVRVLHSEREQFEKHQGWTIKRMDTLEKNPVHKDDYNPDLFEPSPIQEEYAPVIFAQDIISHVISIDLLXGKEDRENVLRARKSGKG

SEQ ID NO: 89476 - protein, 40 aa, Gossypium hirsutum
  Clone ID: LIB3083-120-Q1-L1-F8.pep
TDIAHSNWTQRVLNNTDCGGDLIGLPITQLPLVFQCSNPI

SEQ ID NO: 89477 - protein, 120 aa, Gossypium hirsutum
  Clone ID: LIB3083-120-Q1-L1-G12.pep
MNVVDAMPSIAAEHPIEVERNSDILPMKKKKITPKESILKSEPVRQMMTDQEKQQLSTELESLLGELPENIIDFLKEHSSTEGQMGEEEIEIDIDALSDETLFQLRKLLDGYLLGKQKNQ

SEQ ID NO: 89478 - protein, 91 aa, Gossypium hirsutum
  Clone ID: LIB3083-120-Q1-L1-G5.pep
SRIIFRSGVRSSPRASLGFAASSLSFGRFFPLPSSTALNPSPSFELKFISSFTFFLTRRLFHNTAFVHNKNEYHQPGEEELPFWYSLFPFF

SEQ ID NO: 89479 - protein, 62 aa, Gossypium hirsutum
  unsure (1)..(62): unsure at all Xaa locations
  Clone ID: LIB3083-120-Q1-L1-H1.pep
LFFYNFEKKIISSQFLQFKHVYSIKKISNHLYFYEIYIFLYKPKYARAQTNKQAQLTAXNPN

SEQ ID NO: 89480 - protein, 55 aa, Gossypium hirsutum
  unsure (1)..(55): unsure at all Xaa locations
  Clone ID: LIB3146-001-P1-K2-A1.pep
MRSAGIGLSRYRVLSLEEMEYASNNFNPSXFMGEGSNGQLYKGWLVDWSVMVGKR

SEQ ID NO: 89481 - protein, 90 aa, Gossypium hirsutum
  Clone ID: LIB3146-001-P1-K2-A11.pep
NALEANGWPLMLPAYSMSKVVLNAYTRILARKYPNMCINCVHPGYVNTDLNWHTRVITTEEGARGPVKCALIPDVGPTGCYFDQTEVAEF

SEQ ID NO: 89482 - protein, 61 aa, Gossypium hirsutum
  Clone ID: LIB3146-001-P1-K2-A2.pep
NSKGTKNDQIIVKGLNPPKARWHKDFLAIDALCLMPARYTYMICTYHQHLCVFCSRLFWSN

SEQ ID NO: 89483 - protein, 35 aa, Gossypium hirsutum
  Clone ID: LIB3146-001-P1-K2-A5.pep
NYMASFRIASIYIKHLQRNLIHQNEKKLRPQTSIT

SEQ ID NO: 89484 - protein, 86 aa, Gossypium hirsutum
  unsure (1)..(86): unsure at all Xaa locations
  Clone ID: LIB3146-001-P1-K2-A8.pep
YKWTVEQFEGFNNMGNGGLIVMQKGYGGRYSLSMHHNEEELREFGLTDEMLIDQXWQKIARIGELNYDCPMVNSFFPHFEDEGCIT

SEQ ID NO: 89485 - protein, 55 aa, Gossypium hirsutum
  Clone ID: LIB3146-001-P1-K2-B11.pep
KGSCFLFQVLLSICSLLTDPNPDDPLVPEIAHMYKTDRAKYESTARIWTQKYAMG

SEQ ID NO: 89486 - protein, 47 aa, Gossypium hirsutum
  Clone ID: LIB3146-001-P1-K2-B5.pep
PRVRPLFRCSLKPAAETGPYGQVQPRLARVVPITVVNTRQTSRTSDP

SEQ ID NO: 89487 - protein, 53 aa, Gossypium hirsutum
  Clone ID: LIB3146-001-P1-K2-B6.pep
YDLTVPCKVLNQLIENIILIVLQTGLTNLNQAPTCTRSTNLPISHLPPSGRVG

SEQ ID NO: 89488 - protein, 135 aa, Gossypium hirsutum
  unsure (1)..(135): unsure at all Xaa locations
  Clone ID: LIB3146-001-P1-K2-C12.pep
PRVLPLFRSFFLTLKEFQHMGXVICERCPQTQLYLKSKPVRNIFHRSSQVKGKASKESIELTIVEFKSALSEVDTQLKNLSATAQVSNQQGAYFAKFFNRMEECEINPEGPTRINGTRRHCFLPFKYKHLVQFCS

SEQ ID NO: 89489 - protein, 53 aa, Gossypium hirsutum
  Clone ID: LIB3146-001-P1-K2-C4.pep
VIVNVNMIHIEYLSVTSLWMHISSLFTKDLSDPFSSNLRHIDVKHGVSFAVLE

SEQ ID NO: 89490 - protein, 109 aa, Gossypium hirsutum
  Clone ID: LIB3146-001-P1-K2-C6.pep
NEVTKVLDVLVLQPPWSYNEVLLQLKEKALTRAGLVEDDVIRLINERAEVRRNKDFLKSDQMRAHLQAKGIALMDVGTETIWRPCVPVQQDSEIVPSEGQKVPPKPESA

SEQ ID NO: 89491 - protein, 106 aa, Gossypium hirsutum
  Clone ID: LIB3146-001-P1-K2-C9.pep
HASANVQALMHKVKLAEDMLAGGSFTCGLNQLVQSHLTSQQPIATNNHNLGRVVNVSPTITVQGDSSSYAGFTDMGNSPNLGLPTLDFTNSNQNNIGIGGDAMSWP

SEQ ID NO: 89492 - protein, 88 aa, Gossypium hirsutum
  Clone ID: LIB3146-001-P1-K2-D1.pep
GIERPSMGDVLWGLEFALQLQESGEAKLKSVNGGAATEADIDEEAPFKSQSLELEDDSGDVFSSPRDHVLNFKSTSTFSLTTSDDQSF

SEQ ID NO: 89493 - protein, 72 aa, Gossypium hirsutum
  unsure (1)..(72): unsure at all Xaa locations
  Clone ID: LIB3146-001-P1-K2-D2.pep
VIKWKPPLVAPLPQLKKKKTSXGGGVQSLSFFRRFTVIGICLFPCFFPYVKDFGGPSVPLNRPLVTFGAILL

SEQ ID NO: 89494 - protein, 64 aa, Gossypium hirsutum
  Clone ID: LIB3146-001-P1-K2-D8.pep
WPGLRTILTTTIKPQDDCCNPFKEEVPNDLSCLGNLYKDLKVLASLNIYTAQALNVTRECGVTY

SEQ ID NO: 89495 - protein, 67 aa, Gossypium hirsutum
  Clone ID: LIB3146-001-P1-K2-E12.pep
VYLETLFPFRFVFISFLLNIIFYKPLIDKFFAKENGKTLNKTLDLLLLINNMIFPSRNIKIVLEIGP

SEQ ID NO: 89496 - protein, 62 aa, Gossypium hirsutum
  Clone ID: LIB3146-001-P1-K2-E7.pep
ATVSSGVSCSLILSSGTSVTSFGLFANVILDSFNCGFSFFCFCFFFFFFFFFFFDFKPLIFF

SEQ ID NO: 89497 - protein, 65 aa, Gossypium hirsutum
  Clone ID: LIB3146-001-P1-K2-E8.pep
FTIVNSNFIHGLIIFLRSYFNLIMFGSYVIILTIMVRYIYSFPHYAQLYIISCDAFYFTQLIRRN

SEQ ID NO: 89498 - protein, 144 aa, Gossypium hirsutum
  unsure (1)..(144): unsure at all Xaa locations
  Clone ID: LIB3146-001-P1-K2-F2.pep
HASAPFSLVYEMEAVLPIEVEIRSLQVLSELKLDEEEXIKSRYDQFNLIEEKRLRAIRHGQMYQKRMMRSYDKNVRPREFHEGDLVLKKILPIQKDFRGKWMPNXEGPYVVKKAFSGGALILAEIDGKNLPYPVNSDTVRKYFT

SEQ ID NO: 89499 - protein, 40 aa, Gossypium hirsutum
  Clone ID: LIB3146-001-P1-K2-F3.pep
MGRGRVQLKRIENKINRQVTFSKRRSGLLKKAHEISVLCD

SEQ ID NO: 89500 - protein, 83 aa, Gossypium hirsutum
  Clone ID: LIB3146-001-P1-K2-F7.pep
RMKRLILIICLNNFMEGTTPKWVFQLSNALKNTQRGESPEYMELIAVRIRKGCGKAIDFSHNSIQVLVHPRDGKCANLDCIRQ

SEQ ID NO: 89501 - protein, 56 aa, Gossypium hirsutum
  Clone ID: LIB3146-001-P1-K2-G1.pep
LRVSSSISSLWRVTIVSIRLISHVFIDSDSDIGNNGKFGSYYVTKIIVSNYCVRVG

SEQ ID NO: 89502 - protein, 37 aa, Gossypium hirsutum
  Clone ID: LIB3146-001-P1-K2-G2.pep
IKEMIIFIKFEKFSKKYPSININFTKSKYHIKIEIFS

SEQ ID NO: 89503 - protein, 126 aa, Gossypium hirsutum
  unsure (1)..(126): unsure at all Xaa locations
  Clone ID: LIB3146-001-P1-K2-G3.pep
SKIQSALGYMAPEFACKTVKRTEKSDVYGFGVLVLEVITGKKPVEYMEDDVVVLCEMVREALEDGKVEECVDGRLRSNFPTXEVIPVIKLGLICASQVPSNRPDMEEVVNILELIQCPSEGQEEVE

SEQ ID NO: 89504 - protein, 68 aa, Gossypium hirsutum
  Clone ID: LIB3146-001-P1-K2-G5.pep
PTRPQQTMSMIQERASLRIICIQPVFAGAARKTSHAVGQATKTIMNIIYRGESESENGDDSVIDRVEI

SEQ ID NO: 89505 - protein, 90 aa, Gossypium hirsutum
  Clone ID: LIB3146-001-P1-K2-G6.pep
FEIANIVVNRFVFLSSFCRKRLFRMINELPTIFEVVTGNVKQPTEQYANHNSSGKSKSSAKVVQSSKIETWMFSVVFSSPLYVLLLIDVT

SEQ ID NO: 89506 - protein, 46 aa, Gossypium hirsutum
  Clone ID: LIB3146-001-P1-K2-H1.pep
KQGQDIIYSVVSLVPYKVHMNRPSMPICKFLINTINTPVVYNWKIF

SEQ ID NO: 89507 - protein, 58 aa, Gossypium hirsutum
  Clone ID: LIB3146-001-P1-K2-H11.pep
TIIPKSIYNYLITAGARQNTKKTELDKKIKPSTKNTEPGWDKLGISLDIAYIDFEEPN

SEQ ID NO: 89508 - protein, 98 aa, Gossypium hirsutum
  Clone ID: LIB3146-001-P1-K2-H8.pep
GISEEKLVCFCAQVLRDTFDFQSTIGETSSVDIHRVLELRSPVIVKVLKGMCFMNNKIFRNHLGVFYPLLTKLICCDQMDIRGALGDLFRVQLKALLP

SEQ ID NO: 89509 - protein, 42 aa, Gossypium hirsutum
  Clone ID: LIB3146-002-P1-K1-E10.pep
MARSASSFKFLGAYDTDAHYVYISRRGYSGAPSAAVTASFER

SEQ ID NO: 89510 - protein, 77 aa, Gossypium hirsutum
  unsure (1)..(77): unsure at all Xaa locations
  Clone ID: LIB3146-002-P1-K1-E12.pep
PITPARCLGAAVRTCALLRRPLAVFVGPWPSRAFLGRLTGGGAPWGLHGCCGGPVVESFGCXLKVSVQGLSAAAAAW

SEQ ID NO: 89511 - protein, 44 aa, Gossypium hirsutum
  Clone ID: LIB3146-002-P1-K1-G10.pep
LSASRRVSGRPCFRVVAPAFILFSVCLLEIRNKAMFRSAHPTRL

SEQ ID NO: 89512 - protein, 99 aa, Gossypium hirsutum
  Clone ID: LIB3146-002-P1-K1-H12.pep
CYNLCLFNVLFLFISVFCFLTSFLHLFLLFLRFACTSFCPDVLSVGINMRGVILIILILSKATVIWGSLTFFEINTCLWFFLCLLEGFSLLTRARERTR

SEQ ID NO: 89513 - protein, 44 aa, Gossypium hirsutum
  Clone ID: LIB3146-002-P1-K2-A2.pep
EINTNGKKSFLFVHMTLVTQNLDLILNNWKVAWTWFIQEISHLV

SEQ ID NO: 89514 - protein, 63 aa, Gossypium hirsutum
  Clone ID: LIB3146-002-P1-K2-A4.pep
VEMKKVLPPCPRFDFMVDKYWYQFSVQECYRCPCAFPLMGALFASSSISLFYLFIPRKNYILS

SEQ ID NO: 89515 - protein, 127 aa, Gossypium hirsutum
  Clone ID: LIB3146-002-P1-K2-A6.pep
ADGSVQNISEIPHELKAIYRTVWEIKQKTLVDMAVDRGCYIDQSQSLNIHMDQPNFGKLTSLHFYAWSKGLKTGMYYLRSRAAADAIKFTVDTSMLKEKPKVEDDETRMAQMVCSLTNREECMSCGS

SEQ ID NO: 89516 - protein, 112 aa, Gossypium hirsutum
  Clone ID: LIB3146-002-P1-K2-A8.pep
PTRTPSKMLAGLPAIHWNQGRGYSLRGHHRPQHIAKSMIIVIQTVIQTVKKQVEKQVISPRTTPNPTHGHTDTDYCTNYVLNDNLSDKFCTSQHPWHLPIGNHTGMDCGIKG

SEQ ID NO: 89517 - protein, 62 aa, Gossypium hirsutum
  Clone ID: LIB3146-002-P1-K2-B7.pep
IYDYYSILQLGLYSKTLIILSNIKHFCKVISIKCILQKQKRHKPKRGLIHLNYFNSFFLCNF

SEQ ID NO: 89518 - protein, 65 aa, Gossypium hirsutum
  unsure (1)..(65): unsure at all Xaa locations
  Clone ID: LIB3146-002-P1-K2-C2.pep
PTRAQSADDYLFQKCSQSFIKSITDFQNGGXRSFKGNKCQMHQVIDVITLDMKAALNARRVLHKP

SEQ ID NO: 89519 - protein, 119 aa, Gossypium hirsutum
  Clone ID: LIB3146-002-P1-K2-C5.pep
ENQSADVLHGLFSKRNLIGRLILRSLYVIFCGFMAAMLPFFGDISGVAGAIGFIPLDFILPMLLYNMTYKPSRSTLTYWINLSIIIVFTGVGIMGSFSSIRKLVLDANKFKPFSSDVVD

SEQ ID NO: 89520 - protein, 60 aa, Gossypium hirsutum
  Clone ID: LIB3146-002-P1-K2-C6.pep
GHEAGLIGHKQWFSMLHTIGIMFKMKSQMVRYFDQVLKWKCHVCKYLILTFQGLVGILWF

SEQ ID NO: 89521 - protein, 64 aa, Gossypium hirsutum
  Clone ID: LIB3146-002-P1-K2-C8.pep
LDGVIPICLTSASVSNQSLRFGLLLVSVPCMVVGPPHTFVVVTFDPSDVIFLSVWKAPAGVSVY

SEQ ID NO: 89522 - protein, 76 aa, Gossypium hirsutum
  Clone ID: LIB3146-002-P1-K2-D12.pep
LNLFHSRKVESVFLISLCKLFPALRQGVERGPSRSDRSQGISCGLLEVFITSVWFIKFHQSTSGDKRIRMTPIMAG

SEQ ID NO: 89523 - protein, 48 aa, Gossypium hirsutum
  Clone ID: LIB3146-002-P1-K2-D3.pep
MPSCCCSSRRLRVLGSSFLRRSVPSTVLSLSCCLSAACLKMRKPACEP

SEQ ID NO: 89524 - protein, 124 aa, Gossypium hirsutum
  Clone ID: LIB3146-002-P1-K2-D7.pep
MDMEFLTELNELGITDHQRLTGGRMGRRKLEDDDDNNNSKEFKSKNLQAERRRRQKLSDRLLTLRSLVPIITNMNKATIIDDAITYIQELQKTSQVLSEQLLEMERSAEESVMPMKLGIDVGQH

SEQ ID NO: 89525 - protein, 93 aa, Gossypium hirsutum
  Clone ID: LIB3146-002-P1-K2-E12.pep
NPIANFNPSPTENGPKTPARSLGAAAPTRTPQQRPHTVFVAPCPSRALHGHQTGGSEPSRRHRCCATLEVELKRQRKGESSPYGGCSSDARST

SEQ ID NO: 89526 - protein, 123 aa, Gossypium hirsutum
  Clone ID: LIB3146-002-P1-K2-E2.pep
MSRPGDGNCRSCQHLNFQRRDNCQRCGESRYGVRVGSTFGFTAGSDVRPGDWYCTAGNCGTHNFASRSTCFNCGAFKDESAGGFDLDMSRSKRFGSNRSGWKSREWICTRLGCNEHNFASRME

SEQ ID NO: 89527 - protein, 93 aa, Gossypium hirsutum
  Clone ID: LIB3146-002-P1-K2-E4.pep
ISRSKLLPFGSVRRTCRIMGLGHRILGVFLRSLIQCFKCERVGEKEIYMTEPSRMNPTSISIFIFKDFNMCITIFNMSMYLLGSSVLFKEQKI

SEQ ID NO: 89528 - protein, 78 aa, Gossypium hirsutum
  Clone ID: LIB3146-002-P1-K2-E8.pep
NRDKGFELRGHFDACWPWISQLGSFETLELSSLFFLVYGIFAFIVCSCNLFCFLCQFFSFFFCFCIFLFERKHKASIY

SEQ ID NO: 89529 - protein, 101 aa, Gossypium hirsutum
  unsure (1)..(101): unsure at all Xaa locations
  Clone ID: LIB3146-002-P1-K2-F12.pep
VRKVSLNYFKKCQXIWQYIXISYAIIIKLSAPPPILRPFYFSIKHTYNSKQSLSISLLLNLPLSIIIHTYTSSTVIYFFFTTTSISSISHSLYTLQYIPSF

SEQ ID NO: 89530 - protein, 158 aa, Gossypium hirsutum
  unsure (1)..(158): unsure at all Xaa locations
  Clone ID: LIB3146-002-P1-K2-F4.pep
PYRTGYHFQPLKNWMNDPNGPVYYKGVYHLFYQYNPYAAVWGNITWAHSISYDLVNWINLDIALSPGDPFDINGCWSGSTTFLSXEKPVILYTGSDTMNRQVQNLAEPKNLSDPLLREWVKSSHNPLMSPGDGIDPKNFKDPTTAWQGPDGLWRVLVG

SEQ ID NO: 89531 - protein, 141 aa, Gossypium hirsutum
  Clone ID: LIB3146-002-P1-K2-F5.pep
LNSETTLRKKIQKACSILEFSDPPLVHFENEAYQNYLNFLQDLIKNNPSVVEKMNLESQLVAVCEKILQIYLNCTINQNMVQISVNKPTSRWVLPLGSAKREELAARTSLLVSALKTLSGLEKDRFRKYIASFFHLFVALI

SEQ ID NO: 89532 - protein, 138 aa, Gossypium hirsutum
  unsure (1)..(138): unsure at all Xaa locations
  Clone ID: LIB3146-002-P1-K2-F9.pep
HASAHASELFGLFLALCMAFGVISIYTIRHFGTYSVIATVKSNIVPCDEDETTSLDHWRKPPSNLLHSMSDEELLWRASFMPRIKKYPFNRVPKIAFMFLTNGPLPLSPLXERFFDGHQGLYSVYVHSLPSFEAEFPP

SEQ ID NO: 89533 - protein, 120 aa, Gossypium hirsutum
  Clone ID: LIB3146-002-P1-K2-G9.pep
DFFGQSVKNVVFKPFDFDALAEELWDDINQSFCKSTGAGCLLEIESKAMEQLVAVAYVSDEKRVVRDWVEQVLSKGFAEVKKKYKFNAHTVVKLVPYDALTSEEQTLGLGVCVPPKVVLN

SEQ ID NO: 89534 - protein, 46 aa, Gossypium hirsutum
  Clone ID: LIB3146-002-P1-K2-H12.pep
PLVRFQIQNPLFIQRKNLILIAISNNLNAPHNLVVFAIPRLPLNIP

SEQ ID NO: 89535 - protein, 54 aa, Gossypium hirsutum
  Clone ID: LIB3146-002-P1-K2-H7.pep
IYMCFQQCMNSYPVALYGLHVARFVIARKVLNGAGIDHSIRGIRVRTELARLAK

SEQ ID NO: 89536 - protein, 45 aa, Gossypium hirsutum
  Clone ID: LIB3146-003-P1-K1-A1.pep
LSRATKMKSIMDEHQQGCLQTHHTLTPPSLLPSIISFCLSLSPFF

SEQ ID NO: 89537 - protein, 139 aa, Gossypium hirsutum
  unsure (1)..(139): unsure at all Xaa locations
  Clone ID: LIB3146-003-P1-K1-A10.pep
SQLELSINEHDVLGKVSPDEGGDQPAALITLSSSRXVARPDILIYSVPAGNLDXEECVTVYGFSTADTNLVVREFEKCGAILNHVPGPRDSNWMHIIYLNLSDAYTALSKNVMLINGALIIGVNPVHPMHRVALNERMN

SEQ ID NO: 89538 - protein, 49 aa, Gossypium hirsutum
  unsure (1)..(49): unsure at all Xaa locations
  Clone ID: LIB3146-003-P1-K1-A12.pep
MGDANASIPTPDPVLSRPMFGXAFGRAASANSIAFVSRAALNRGVKESY

SEQ ID NO: 89539 - protein, 78 aa, Gossypium hirsutum
  Clone ID: LIB3146-003-P1-K1-B10.pep
TSTAAGILLQFGLSVLPPFVRFDATDSTRRTLTHIHYRRDVTSLLLALVLLLAFHRCVTGISCNTAVADLYPTLSYMT

SEQ ID NO: 89540 - protein, 91 aa, Gossypium hirsutum
  Clone ID: LIB3146-003-P1-K1-B2.pep
LDQSYKSHYQNLTTKIFKSKGVNRLVHTQFTVLTNYYKLLIWILVIIYYRLNLRTFLENYGICNYHLKLQLQSGAPPGIILPLWEISDIEE

SEQ ID NO: 89541 - protein, 69 aa, Gossypium hirsutum
  Clone ID: LIB3146-003-P1-K1-B4.pep
YNSVKSSYVTIIPIALLKCPHFCNSIHNSITPPYIHIRHAGHIISTSNIYVASSAPRSGSDPVPESALS

SEQ ID NO: 89542 - protein, 37 aa, Gossypium hirsutum
  Clone ID: LIB3146-003-P1-K1-B9.pep
TYHSFICLVRMLYPRVLQQLGGPILDFLQSSNGCFGS

SEQ ID NO: 89543 - protein, 116 aa, Gossypium hirsutum
  Clone ID: LIB3146-003-P1-K1-C5.pep
PDSVYFVGSGGAEVDVKRLPKRPAPPRFGRKLTEAQKARATHICLDCGYIYTAQKPFDEQPDTYGCPQCQAPKKRFAPYDINTGKAIGGGLPPIGVIIGLLAGVGAVGALLVYGLQ

SEQ ID NO: 89544 - protein, 70 aa, Gossypium hirsutum
  Clone ID: LIB3146-003-P1-K1-C9.pep
STSRATAFGRNWTYNGMILALPLRCKLTQVEHRLHLRIQLDQAVLPHQGHASETLIINYGLWGLKHGQHY

SEQ ID NO: 89545 - protein, 66 aa, Gossypium hirsutum
  Clone ID: LIB3146-003-P1-K1-D10.pep
TMSPLIERSYDHSGATECTTIQFDAALTTEIFDRLRVWWFGTDCVCCKPQRRFYNENISSPFAAEA

SEQ ID NO: 89546 - protein, 57 aa, Gossypium hirsutum
  Clone ID: LIB3146-003-P1-K1-D2.pep
QKHIRCISPLNIKPKSNQYHNGELKIRKISPLFPLLILLHEDEMHFSRLIKQRKYNI

SEQ ID NO: 89547 - protein, 53 aa, Gossypium hirsutum
  Clone ID: LIB3146-003-P1-K1-E8.pep
MEKQSIQIFGQQLFSLCESDSELKTFPSMRLGFKVSTSNGSIPRTPKQLPSLC

SEQ ID NO: 89548 - protein, 127 aa, Gossypium hirsutum
  unsure (1)..(127): unsure at all Xaa locations
  Clone ID: LIB3146-003-P1-K1-F10.pep
RTTNWLAPLANFIHGMCYIEDDLITTDHSITATQITVRRPXMKAWRGCRXASFNIILSITGASKTIIHVVSASNGKLNGMAFRVPTVAVSVGYXTLTLDMTYNDEHINAVIPIESVTNLYDILNYAY

SEQ ID NO: 89549 - protein, 96 aa, Gossypium hirsutum
  Clone ID: LIB3146-003-P1-K1-F2.pep
VWRADPSFTPHERQRGCFSPVWVAFSILIGGLLLDVLISVTLGVSALPVNIIIGVIVVLGLGTALRLALEFCHEWSIRRAMQRVEVNATLQYHPAL

SEQ ID NO: 89550 - protein, 57 aa, Gossypium hirsutum
  Clone ID: LIB3146-003-P1-K1-F4.pep
LIVILINFFSFYVFYCCMLFLVLFFFLFFFVLFFFFFFFFFFFFILKYPCLYRRKFM

SEQ ID NO: 89551 - protein, 68 aa, Gossypium hirsutum
  Clone ID: LIB3146-003-P1-K1-F8.pep
YFSRILTFFFITITDIQLNRETYSNHYNFSIIHIIFSTDIVTYFYHLASSKTSIIIFNPSVSIIILTF

SEQ ID NO: 89552 - protein, 53 aa, Gossypium hirsutum
  Clone ID: LIB3146-003-P1-K1-G10.pep
LLYIFYIKRLKLKLINNKIKKLIHNKIKKKISKKKKKIIKYIGRDHAKGEFQH

SEQ ID NO: 89553 - protein, 45 aa, Gossypium hirsutum
  Clone ID: LIB3146-003-P1-K1-G12.pep
RPRYWILKNSWGPKWGDRGYMRIKEDIKPKRGQCGLAMNASYPIM

SEQ ID NO: 89554 - protein, 71 aa, Gossypium hirsutum
  Clone ID: LIB3146-003-P1-K1-G6.pep
CERCQNTEQESRLLTALGSKILLVGNVSYPYDRIWDTERCKTLFLFTVGYNSSALFPQSFLVPSSYKLQSA

SEQ ID NO: 89555 - protein, 82 aa, Gossypium hirsutum
  Clone ID: LIB3146-003-P1-K1-H3.pep
PTRPPTRPLKLKIYKSSSILLSTWPTQGPHQRPMRLYPSWLMAREQRKQEEPSLGPISTPKKGSPMIETAGKFPCYSPLFVF

SEQ ID NO: 89556 - protein, 37 aa, Gossypium hirsutum
  Clone ID: LIB3146-003-P1-K1-H5.pep
ILHLISSIFPLYKKNPNPGNRRASHMHFHSTISIFHP

SEQ ID NO: 89557 - protein, 75 aa, Gossypium hirsutum
  Clone ID: LIB3146-003-P1-K1-H6.pep
KKKKKKKNLNLKKKKKKHKRKDIYNYHFKTSNISIHLHSTSYPLLLCHLISITLPLFYIFASQKILPLPTLISFN

SEQ ID NO: 89558 - protein, 66 aa, Gossypium hirsutum
  Clone ID: LIB3146-003-P1-K1-H7.pep
LLPAFVCFYTICCVVQQLGCVTVRKGQRPHLHKSVPLSFTYTYIMYLIVSSIVLLMMMMMTVMILH

SEQ ID NO: 89559 - protein, 128 aa, Gossypium hirsutum
  Clone ID: LIB3146-003-P1-K1-H8.pep
HWEEVVSFEDEASLTSSVKREISNGTKYLASQEIRGFDYAQPSASSADIISTIYSLGGLSGLDDYALHGYEQALTYPGQVTNSLICDTDITQTFCDEHHLRYFDSDLQPQILGLESQADLLTVVDRFF

SEQ ID NO: 89560 - protein, 65 aa, Gossypium hirsutum
  Clone ID: LIB3146-003-P1-K1-H9.pep
HASAFITYPRSLPSYQLILREGTGNNIRIIQLVMAVALPLISFLMVLHQRRYQLLNHMQRHAHDP

SEQ ID NO: 89561 - protein, 79 aa, Gossypium hirsutum
  Clone ID: LIB3146-004-P1-K1-A3.pep
QKNLQKKGLFFQWWYFGVCGGSLLGVILMSYIQDTLGWVLGFAIPMFAMVISVVFFTCGNRTYAHKPDRTMYNKHFSNM

SEQ ID NO: 89562 - protein, 60 aa, Gossypium hirsutum
  unsure (1)..(60): unsure at all Xaa locations
  Clone ID: LIB3146-004-P1-K1-A9.pep
WVRQKKAFQENERNSRRKNVYLTLDEGEECRSRRKQARRCRLSVFEVIICEDKIGFIXTR

SEQ ID NO: 89563 - protein, 72 aa, Gossypium hirsutum
  Clone ID: LIB3146-004-P1-K1-B10.pep
FIDASSLKSQFFELIIRSLKQNNFADASCLKSHFFELIMLKTEMKKRGKQMEKQKRMKNKEEKKADAWADAW

SEQ ID NO: 89564 - protein, 73 aa, Gossypium hirsutum
  Clone ID: LIB3146-004-P1-K1-B8.pep
DAFMHAFDYSCEHACGQYVKMRQGHLRNRQLRNPLFQIISWANLNQTLSDVLDLKPSILRQQHKMMMFEIAWK

SEQ ID NO: 89565 - protein, 129 aa, Gossypium hirsutum
  unsure (1)..(129): unsure at all Xaa locations
  Clone ID: LIB3146-004-P1-K1-C1.pep
HAFAHAXVTFGYASFDYEDXEYQQSDLVKLDILLNGKPVDAMATIVHSLKAQRVGRELVDKLKKFIDRQMFEIIIQAAIGSKVIARETISAMRKNVLAKCYGGDVTRKKKLLEKQKERKKRMKRVGSGD

SEQ ID NO: 89566 - protein, 100 aa, Gossypium hirsutum
  Clone ID: LIB3146-004-P1-K1-C2.pep
YIEEKKKKKKEKKDKEKKKEQTSNKEDDVKDDEEKKKDKKDKEKKKEKKSDEEDDVEDAKEAKEKKKKDNKDKEKKKDKKCDKEDDVEDAKEEKKKDKKD

SEQ ID NO: 89567 - protein, 73 aa, Gossypium hirsutum
  unsure (1)..(73): unsure at all Xaa locations
  Clone ID: LIB3146-004-P1-K1-D4.pep
MLIELKKGRIELDWYLSXKHDELLASTLQPGTYRKTLSLVIVDGFAVEITEAQANVLRSANGVRVVEKNQELA

SEQ ID NO: 89568 - protein, 40 aa, Gossypium hirsutum
  unsure (1)..(40): unsure at all Xaa locations
  Clone ID: LIB3146-004-P1-K1-D5.pep
TNSTVLTFVNQLPPIQHYFLTNFYLRYRIQQVSFWFPXXP

SEQ ID NO: 89569 - protein, 127 aa, Gossypium hirsutum
  Clone ID: LIB3146-004-P1-K1-D9.pep
TYNNYHYHQCSSFNHSRESSTSRFSVSGNIPRTLSGWKHEQIGHGDDDNDEEDDDGRSNSNNVRLPYVFCLVLVLLVVFAVVVLIRWDARKRYEPEIFVKRIVFENLYYQAGNDELRVPTDMLSLNS

SEQ ID NO: 89570 - protein, 55 aa, Gossypium hirsutum
  Clone ID: LIB3146-004-P1-K1-E12.pep
IFFYYYFLFFFFFFMHFYGQPFLLINHKHLLSSYIKTINSIFTTNFSNIKQFYPF

SEQ ID NO: 89571 - protein, 72 aa, Gossypium hirsutum
  Clone ID: LIB3146-004-P1-K1-E2.pep
SSQCQPQSPEKLPCGPRTITNSKSMRAVSMELGTVKTFFDENPYATDEPIPLPNVSSKGLSTMIEYCKLHLF

SEQ ID NO: 89572 - protein, 118 aa, Gossypium hirsutum
  unsure (1)..(118): unsure at all Xaa locations
  Clone ID: LIB3146-004-P1-K1-E5.pep
MYYVISQLSFGXTVSPHDLNDGKRIIPYLGRSHDKMNGRAFINDRDLDANVTIEHYLXVVKTEVDTTKSSDDHRIIEEYEYTAHSSLSHSVYIPDANFHSEVSPMHVVVTDDSESFSH

SEQ ID NO: 89573 - protein, 55 aa, Gossypium hirsutum
  Clone ID: LIB3146-004-P1-K1-E8.pep
LSPNIKSIYNKSSAQTNNPNKKPKFCRPKTKNPPKHSPEPRHFQPKETLGAAASM

SEQ ID NO: 89574 - protein, 95 aa, Gossypium hirsutum
  Clone ID: LIB3146-004-P1-K1-F3.pep
KNIKKKNKKKKKKAPPFKKPKFTSPFFQLYIFFFWPPKLNYLPPLLQPLTWKNPALPQLIPFEKNPLFPTWYKNKKPPPNPLSKNISTLNSKWTP

SEQ ID NO: 89575 - protein, 28 aa, Gossypium hirsutum
  Clone ID: LIB3146-004-P1-K1-G3.pep
SENPIIRIEKTLSSSLCHYNNKEHVYMA

SEQ ID NO: 89576 - protein, 139 aa, Gossypium hirsutum
  unsure (1)..(139): unsure at all Xaa locations
  Clone ID: LIB3146-004-P1-K1-G5.pep
EKVFGSASKFSEQEGDLGIGDDVQMELYGLHKVATEGPCHESQPXAFMVASRSKWNAWQKLGNMISDAAIEQYVALVSDKVSEWTKYTSDGERKLESADQGVDGSVAPDIDSFLDKHAIFIPEKNADSNTVSASGVITE

SEQ ID NO: 89577 - protein, 57 aa, Gossypium hirsutum
  Clone ID: LIB3146-004-P1-K1-G6.pep
PTRLRVRPRVREGIIDSDGEVIARGNVTYKGNQKPLMAYDKVQITVDQGLATLFAPK

SEQ ID NO: 89578 - protein, 34 aa, Gossypium hirsutum
  Clone ID: LIB3146-004-P1-K1-G7.pep
MESQVSFFYDLGFVRSSFVGDLTDISTGLFFLIL

SEQ ID NO: 89579 - protein, 61 aa, Gossypium hirsutum
  Clone ID: LIB3146-004-P1-K1-H3.pep
FLCVAGKGQDYWDEENISKEMPACRQMFNIFHPFDPVAYRLVLTCNELFYSSLVQRISDLK

SEQ ID NO: 89580 - protein, 55 aa, Gossypium hirsutum
  Clone ID: LIB3146-005-Q1-K1-A9.pep
KIRRNYHKTIKSSLTLLIKKLCTCKIRRINKKIKNSFLISRKKKKKKKKKRKKIY

SEQ ID NO: 89581 - protein, 141 aa, Gossypium hirsutum
  unsure (1)..(141): unsure at all Xaa locations
  Clone ID: LIB3146-005-Q1-K1-B1.pep
HAXERILQQLHCTLEEKLECVVSLLKKEAYQWWDTVSXYSSTLIVDLEVLSSGIXKKYINEIYLEQRKREFLYLEQNNMTVAEYKREFVRCXEFVSTEADICAQFEPGLNYGIRVYLIALKIQEFSTLVKRALKVEQVMNE

SEQ ID NO: 89582 - protein, 63 aa, Gossypium hirsutum
  Clone ID: LIB3146-005-Q1-K1-B2.pep
LLTYGRRIPYAELFARIDAVDPAAIKRVANRFFYDRDMVIAAIGPVQDLPDYNWFRRRTYWNR

SEQ ID NO: 89583 - protein, 125 aa, Gossypium hirsutum
  Clone ID: LIB3146-005-Q1-K1-B5.pep
PSHLYATSKLWHMVYNSLVYAGKNYMFLLCNGLLVLIATSSGLIGSCSVETDIKAEKAVKMSKGGSQTEPEAEPKGSISKETVVAEYDQREEEVALVVELEDEGEEDRPNEGVSVEEDEDEDEEV

SEQ ID NO: 89584 - protein, 26 aa, Gossypium hirsutum
  Clone ID: LIB3146-005-Q1-K1-B7.pep
NFCSYNKTSISLSRMTSWYYHRRSPQ

SEQ ID NO: 89585 - protein, 54 aa, Gossypium hirsutum
  Clone ID: LIB3146-005-Q1-K1-C1.pep
SPFPPNNTSKPYLFGSWDTDLRLLFANQVTAIGFYLEPEVEGIYNIGRVSPGTC

SEQ ID NO: 89586 - protein, 140 aa, Gossypium hirsutum
  Clone ID: LIB3146-005-Q1-K1-C10.pep
PTRPPTRPQQSQWKESSAPTERIYIPITSHRNNNAAPTVQRSDTAIGLTQERAYMPTSHKNDGLVPVSNRNRSISPASDQIYMMATTHLNDTMGQRIQRTDAPMFPTSERIYLPATPHRPDHMGSTSQRNDVALRPGSES

SEQ ID NO: 89587 - protein, 133 aa, Gossypium hirsutum
  Clone ID: LIB3146-005-Q1-K1-C11.pep
KGEPTGEYSVRSAYKLLHNANLDPSNYLLQPEIKKFFGKLWILQLPSKITIIIWCISWNYIPTLGNLRCRRIVKNASCPCCSYREEDCYHIFRQCPISTEVWQLLNLSWITNIMHQNFWEWLTAIFKQGTNEQ

SEQ ID NO: 89588 - protein, 91 aa, Gossypium hirsutum
  Clone ID: LIB3146-005-Q1-K1-C5.pep
QWTEALYRCESIVKQGMLHSRGELLLMLDADGASKVTDLEKLENQIHAIVRKDYHPGDSVAGEATFRISDIPIVAFGSRAHHEEKALATRK

SEQ ID NO: 89589 - protein, 45 aa, Gossypium hirsutum
  Clone ID: LIB3146-005-Q1-K1-D11.pep
NIGCNPFLFTYRFLSQSLRFYGRCLPNNALKFMAICDKASHIFYS

SEQ ID NO: 89590 - protein, 80 aa, Gossypium hirsutum
  Clone ID: LIB3146-005-Q1-K1-D6.pep
EVIREILIIICAHNGGHNDGHTHALTCDSMRPSNQRPNPSPFPRHKICHITLSLDSALDREIASRIASTTRPRTRGRTRG

SEQ ID NO: 89591 - protein, 105 aa, Gossypium hirsutum
  unsure (1)..(105): unsure at all Xaa locations
  Clone ID: LIB3146-005-Q1-K1-F1.pep
VVSCDSSKRYKKNPPVNIGAKKWVDIGLWXSPKECFKILKSRGYRIATTHVGMDAVSIYDMDWSKPTAIVVGNENRGISDEALELSNLHCSIPMKGMXDSFNVSM

SEQ ID NO: 89592 - protein, 37 aa, Gossypium hirsutum
  Clone ID: LIB3146-005-Q1-K1-F10.pep
KEILSMKILTKTIQNYVLRELIIQDFPNQTCNSTIRA

SEQ ID NO: 89593 - protein, 106 aa, Gossypium hirsutum
  Clone ID: LIB3146-005-Q1-K1-F12.pep
KVYSSLWDADEWATRGGLVKTDWSKAPFKAYYRNFNAYSWNSVGTDVWRTRALDATGRRWLRWAQKYHMVYNYCADLKRFPHGRPFSVGALGSFNRPKRMLLQSRI

SEQ ID NO: 89594 - protein, 39 aa, Gossypium hirsutum
  Clone ID: LIB3146-005-Q1-K1-G2.pep
LIVILVVIFSLLFLNLTAEVSIWLTGRQRWRVSGSGVRN

SEQ ID NO: 89595 - protein, 140 aa, Gossypium hirsutum
  Clone ID: LIB3146-005-Q1-K1-G8.pep
LINGLCGEGRIEEAAKLKDEMDNSKVLPDVVTYNTLIDGYFKHGSSEEGFRLVEEMREKGMELNAVTNNILVKWYCKEWKMDETSERVRMMEESGFPPDKVTYNSLINGYCKAGKLGEAFEMMDLMGRKGFKMDTITLNT

SEQ ID NO: 89596 - protein, 105 aa, Gossypium hirsutum
  Clone ID: LIB3146-005-Q1-K1-H2.pep
LNWDKQSTKANQKPSRTSSLLSPSTPKSASIPARKLKSASPRSGVAGLDDETRSIVSMKSDRNRRHSIAGSSVRDNESLANSPSLPSYMVPTKSARVKTSLQSPL

SEQ ID NO: 89597 - protein, 64 aa, Gossypium hirsutum
  Clone ID: LIB3146-005-Q1-K1-H7.pep
SLAVYEGFMFCSELWIADQGYGLLALETVPMLMWLSYFTLKIGKTQYKGNTVHISSLENSRHCQ

SEQ ID NO: 89598 - protein, 86 aa, Gossypium hirsutum
  Clone ID: LIB3146-006-Q1-K1-A1.pep
PSKCAFSGARARTRVSVVVVSAASRYARSCISISSCHTSSQFRILMLQFLAWHYVVTDTQAVFLMLMKGSQSVWSQDTRTSWVELG

SEQ ID NO: 89599 - protein, 46 aa, Gossypium hirsutum
  Clone ID: LIB3146-006-Q1-K1-A2.pep
DVILDSRRPYRSIISRCWSSLLLFLVKNLSYRAGWKPASRKALRHF

SEQ ID NO: 89600 - protein, 134 aa, Gossypium hirsutum
  Clone ID: LIB3146-006-Q1-K1-B1.pep
MVHGNKSCRAHAITFLIEAYKRALPVYLPVYLIPALIVHHQGLFKRPCTILGKGIVDIARSSLFLATYCTSAWMWTCILFGFLRRCSIPLIAIGSFPAGLSVAIEKKSKRMEISLYCLARAIESFFTWMADIGY

SEQ ID NO: 89601 - protein, 90 aa, Gossypium hirsutum
  Clone ID: LIB3146-006-Q1-K1-B6.pep
DMELFQGKAMVPQDDLSSAPTTQKDLRVHNFICSPMLPRRPRVLRWEALLGEQSRSMLMQPRFSKEPCVHNVSMELDNAHSAKALLLEVL

SEQ ID NO: 89602 - protein, 57 aa, Gossypium hirsutum
  unsure (1)..(57): unsure at all Xaa locations
  Clone ID: LIB3146-006-Q1-K1-B8.pep
FLIFXLGQSLEIFGLKRIICYIKFSIGGALENQPSTPVNKNYKFSLLIEVIFLQKEK

SEQ ID NO: 89603 - protein, 125 aa, Gossypium hirsutum
  Clone ID: LIB3146-006-Q1-K1-C1.pep
LKSQVTLNLPIKKMTTKIAIYTTLINPLTKYAIITAPITTAIEETSLFCNSRSLSILIRTALVSSTVIVALTIPFFGYVMAFIGSFLSVTASMLLPCLCYLKLNKAARKMGLELIIIADAWADAW

SEQ ID NO: 89604 - protein, 59 aa, Gossypium hirsutum
  Clone ID: LIB3146-006-Q1-K1-C10.pep
PNCKIIKTSTKSYISKLKNYKYHTHNITYYQTYIYQLTLTLTRSSINQSSNQNYHFRLP

SEQ ID NO: 89605 - protein, 51 aa, Gossypium hirsutum
  Clone ID: LIB3146-006-Q1-K1-C2.pep
GRSVISVVNDLWLYCWMYYVKYRTLIFKLQNQIFVRVRVFEFVSMAPVEWS

SEQ ID NO: 89606 - protein, 149 aa, Gossypium hirsutum
  Clone ID: LIB3146-006-Q1-K1-D3.pep
EIAVPKVLKANGDSRHLSSSYSAACEILKPTVGSDEPAPSASASKIFEIPESEFYNFDADKTKEKFLVGQVWALYGDDDGLPKYYGEIKNIESHPVFKIHVTWLLPCQSERRTKWYDTSMPTCCGRFSRKGSQVYTSTDSFSHKLKAES

SEQ ID NO: 89607 - protein, 57 aa, Gossypium hirsutum
  unsure (1)..(57): unsure at all Xaa locations
  Clone ID: LIB3146-006-Q1-K1-D9.pep
YFLFYINLFFFFFFFFFFXNKTIQYSYFCTKLSHKLRLNSTKHHKTFNMIPQCISYK

SEQ ID NO: 89608 - protein, 70 aa, Gossypium hirsutum
  Clone ID: LIB3146-006-Q1-K1-E1.pep
GWHLVLLLKKLMQGKPRNSFLFFFLKMIIVNLNLKFRKTKNYEKKATDICIVRQYINKVKNKKKKLKMKT

SEQ ID NO: 89609 - protein, 131 aa, Gossypium hirsutum
  Clone ID: LIB3146-006-Q1-K1-E4.pep
PRVRSHISANGQRVLPSGGISADGPPTTLSGTGVDRMAFLQANITRDNTKFINGAIVGERNVFQVDQGLGIGSKFPFFNRHQLTLTRFLQLRQVEEGVGKPPPPVLVLHGHYGGCVGDLPSYDAFTLGGPY

SEQ ID NO: 89610 - protein, 133 aa, Gossypium hirsutum
  Clone ID: LIB3146-006-Q1-K1-F1.pep
GPEKSGRDNKLPRHIKFPFTYPVRCRIVQITLSLPLQRPGSSSVNFDKDINLLSLDDTPFPQETRSFEAAMPRDPCLHAKRIVIAGSPANEEIGLRSSQSTDQINYINRLNQTPQLRFKVPIEAEKLMYHDLV

SEQ ID NO: 89611 - protein, 91 aa, Gossypium hirsutum
  Clone ID: LIB3146-006-Q1-K1-F11.pep
KRLKDGEEVHTPLHIDTSLAAQGQHIGLSSAPGDNSGFLVKVMHLRRRLGACDSRFARFSYLFKLNRRSVQMILTVVFAFMLLGILVSHVT

SEQ ID NO: 89612 - protein, 128 aa, Gossypium hirsutum
  Clone ID: LIB3146-006-Q1-K1-F7.pep
YLYFPWQARLMTTHGETAATSTLDAHMHRACSLQEGIAEFYDQSSGLWEDIWGDHMHHGFYDPDSNVSGSDHPAAQIRMIEESLRFAGITDDPAKQPKTIVDVGCGIGGSSRYLARKFGAECRGITLS

SEQ ID NO: 89613 - protein, 97 aa, Gossypium hirsutum
  Clone ID: LIB3146-006-Q1-K1-G12.pep
MDEVEISKAEIFCGHSERLAVAFGLINTVHGTPIWVTKNLYMCQSCHSTIKFISKIVRREISVRDTEEFHHFKDGICSCGDVEILRKALTNTTSERN

SEQ ID NO: 89614 - protein, 105 aa, Gossypium hirsutum
  Clone ID: LIB3146-006-Q1-K1-G5.pep
AALFCFHSQANQNNYNASSFGGSMHPQLRTDPPREGKEYAGNEGFESWSPDNSPNRSSEYVAGRNYMEPRMNSGWNYRADRPSWQGNSSGYRDPNRQGNRRRDRR

SEQ ID NO: 89615 - protein, 38 aa, Gossypium hirsutum
  Clone ID: LIB3146-006-Q1-K1-G8.pep
MVFPHAVNNILPPGLSIIIHRTATLLLKFYDKWYLPSS

SEQ ID NO: 89616 - protein, 93 aa, Gossypium hirsutum
  unsure (1)..(93): unsure at all Xaa locations
  Clone ID: LIB3146-006-Q1-K1-H5.pep
PRCRRHDAHGAISTNGCGRKWGXXFKXSLEPHIGVTRCXXYXXDKFKYIXXPVYDXXANSFLLYLVESRAHLNXLLIPLKGDFGEPNLDNKPS

SEQ ID NO: 89617 - protein, 49 aa, Gossypium hirsutum
  unsure (1)..(49): unsure at all Xaa locations
  Clone ID: LIB3146-006-Q1-K1-H6.pep
KGVVFICASEQSKCLVFSLLVVCCDQSFAAFYNFHIKKQKGSXLYVSFG

SEQ ID NO: 89618 - protein, 133 aa, Gossypium hirsutum
  Clone ID: LIB3146-006-Q1-K1-H7.pep
GVIHPAIAGLAVTYGLNLNILQASMVWNICKTENKIISAERILQYCSIPSEPALVVETNRSDHCWPYHGEVQILDLHVRYAPHMPLVLRGLTCTFSGGLKTGIVGRTGSGKSTLIQTLFLIGEPSTGSYHNRL

SEQ ID NO: 89619 - protein, 53 aa, Gossypium hirsutum
  Clone ID: LIB3146-007-Q1-K1-A8.pep
ISPTSFQLYFLFNLFLKQGNSFHRGANSQAKNQSHSWEEANQKSGPPLHLHPT

SEQ ID NO: 89620 - protein, 46 aa, Gossypium hirsutum
  Clone ID: LIB3146-007-Q1-K1-B12.pep
HTSENRSIFYSTAEASLLGWLSITSGHLSFIPSTIITLSAALSLEY

SEQ ID NO: 89621 - protein, 31 aa, Gossypium hirsutum
  Clone ID: LIB3146-007-Q1-K1-B2.pep
CIAEWGDNYESWNMIENTKQCPSFSGEFFSI

SEQ ID NO: 89622 - protein, 40 aa, Gossypium hirsutum
  Clone ID: LIB3146-007-Q1-K1-B8.pep
PILKKIMMDPHVAAVGFTYEAMRDTVMAGWWARYLSLYEY

SEQ ID NO: 89623 - protein, 41 aa, Gossypium hirsutum
  Clone ID: LIB3146-007-Q1-K1-B9.pep
DEFLSIKYKLQHQYNSRYVVKVINASLCQISVIKASTSALS

SEQ ID NO: 89624 - protein, 77 aa, Gossypium hirsutum
  Clone ID: LIB3146-007-Q1-K1-C11.pep
VLWVSSSASIGCVVGDGSGSDSGSGRAFGRGRLSLFAWDTAYAFAHGGLSPTGVKLIRKNKSLRINEKETPYFLFVF

SEQ ID NO: 89625 - protein, 53 aa, Gossypium hirsutum
  Clone ID: LIB3146-007-Q1-K1-C5.pep
HQSMFTAKARAVILYYTTSPFSEQTGPVHYSLPNSKGYLSSFPITTLLKLIAS

SEQ ID NO: 89626 - protein, 92 aa, Gossypium hirsutum
  unsure (1)..(92): unsure at all Xaa locations
  Clone ID: LIB3146-007-Q1-K1-C6.pep
GGIGGSDPASHTLIYSFEHAEIYGPSLTTRVLKECTMHLVQILLGGIQLFMQTLNRXTSPLEVDSAQSINNVWGTTQDKAGVPPNQQRMNLD

SEQ ID NO: 89627 - protein, 31 aa, Gossypium hirsutum
  Clone ID: LIB3146-007-Q1-K1-C9.pep
SFRLVSHHFITLLYLIRPAEGVPNIQRPNMI

SEQ ID NO: 89628 - protein, 135 aa, Gossypium hirsutum
  Clone ID: LIB3146-061-Q1-K1-H8.pep
GRTISKKSLDSAIRQMDIINGTTNIRSLSSTTLFPQSIRSATAKTQSLRSLSASDSDNSNGSPGRLKNRDLPENGNSISRAAECGSDFHDGRYYAKLSEVDIYESSRYDVILLKEDLKNTNWLHSIDDKSDLVSI

SEQ ID NO: 89629 - protein, 76 aa, Gossypium hirsutum
  Clone ID: LIB3149-001-P1-K1-A6.pep
DLVRIYQSPQLQILCLLNCATIGNRGRVNLLSWSRLVRSRTLIQTCSQSKWRSERTLVRRSLRGKRSGSTQLCRCT

SEQ ID NO: 89630 - protein, 68 aa, Gossypium hirsutum
  Clone ID: LIB3149-001-P1-K1-B12.pep
DDVGMSIAVLLAGVVPCEYLGVSEILNVVVGWLRVRMACCIVFDLYIYMVCMSELCRFTRDDVSDVPY

SEQ ID NO: 89631 - protein, 119 aa, Gossypium hirsutum
  unsure (1)..(119): unsure at all Xaa locations
  Clone ID: LIB3149-001-P1-K1-B5.pep
MAKPSLLFCRLLLLSATVAAGERIDDEDDLLIRQVVPDAEDHHLLNAEHHLSAFKXKFGKTYATHEEHDHRFRIFKNNLLRAKSHHKLHPSAVHGVTSVSDLTPAEFRRQFLGLKPLRL

SEQ ID NO: 89632 - protein, 139 aa, Gossypium hirsutum
  Clone ID: LIB3149-001-P1-K1-B7.pep
LSTVESRMRQKQEAQQSHGRNMPQEYYSSIQPASPHQAQGLPAQASSQGLSHLYSHSRFSSVASQPLLHSSGLTLPMYATAAPYMTSANPLYANFQPSGLYASQYNIGGYPLNPAFLPPFMGGYPSHAAISLPFDSTAS

SEQ ID NO: 89633 - protein, 147 aa, Gossypium hirsutum
  Clone ID: LIB3149-001-P1-K1-B9.pep
SGIEDKLQQGVPEAIESLRTAGIKVWVLTGDKQETAISIGYSSKLLTSKMTQIIINSKSMESCRKSLEDAIIMSKKPTTTSAISGTTNNTGGTSGAGSTPIALIMDGTSLVYILDSELEERLFQLSCNCSVVLCCRVAPLQKAGIGS

SEQ ID NO: 89634 - protein, 86 aa, Gossypium hirsutum
  Clone ID: LIB3149-001-P1-K1-C3.pep
RAAKKIFLRWLFYHFLFPFFCLIFISIQIRKYEIKGEKVSTSRFASQEGFFGPLLVVTEANEGLVLALFVAGRKRTVGRRKSLGFF

SEQ ID NO: 89635 - protein, 34 aa, Gossypium hirsutum
  Clone ID: LIB3149-001-P1-K1-C5.pep
PRVRDTNLCAIHAKRVTIMAKDIQLARRIRGERA

SEQ ID NO: 89636 - protein, 85 aa, Gossypium hirsutum
  Clone ID: LIB3149-001-P1-K1-D1.pep
DSPYGTDIVNTARLNDSTNYDPNWYYARSCSIARKIYSRRRLGSTPLDMTNRAAKVVACLLLILATTVVLLLETYFSRCRICTSF

SEQ ID NO: 89637 - protein, 42 aa, Gossypium hirsutum
  Clone ID: LIB3149-001-P1-K1-D12.pep
KKYKLNNCLTVLQLSILYHTTVLIFLNLLLKSYTLSPAFTHP

SEQ ID NO: 89638 - protein, 144 aa, Gossypium hirsutum
  unsure (1)..(144): unsure at all Xaa locations
  Clone ID: LIB3149-001-P1-K1-E12.pep
AVLGSVGAPFTLASYVVEGGASKNFTKIKKLAFSQPKVLHSLLQKFATSMTKYIRYQADNGAQSVQIFDSWATELSPVDFEEFSLPYLKQIVDAVKQTHPDLPLILYASGSGGLLERLAXTGVDVVSLDXDCDMAEGRKRLGHD

SEQ ID NO: 89639 - protein, 99 aa, Gossypium hirsutum
  unsure (1)..(99): unsure at all Xaa locations
  Clone ID: LIB3149-001-P1-K1-E5.pep
MSNREEFAPWHFFLLLLLLWGFVGGDAPAREVWCVAKNNSEDTALQSSVEXACGACXADCRAIQGRGPCFDPSSVQNTASHAFNDYFRIHAISEENCNF

SEQ ID NO: 89640 - protein, 66 aa, Gossypium hirsutum
  Clone ID: LIB3149-001-P1-K1-E8.pep
MGTNVISDEEDELEVDEEGEPMEGDNINDRDPDDEDEEDEDGQDEYENDGFIVDDVEDEDVDEDEE

SEQ ID NO: 89641 - protein, 43 aa, Gossypium hirsutum
  Clone ID: LIB3149-001-P1-K1-F1.pep
MRIMLFLGAYTNGADRLFSSIACYFDCALHTGELGGPIVTPAR

SEQ ID NO: 89642 - protein, 123 aa, Gossypium hirsutum
  unsure (1)..(123): unsure at all Xaa locations
  Clone ID: LIB3149-001-P1-K1-H5.pep
IATVTSAAXVFIPSFTGLKAGACKVSAGLKDSAPQATRLGIKASLKDVGVARCATAASAVLASNAMAIEVLLGGDDGSLAIVPNNFSVAFGENIVFKNNSCFPHNVVFDEDHIPSIHDARKIS

SEQ ID NO: 89643 - protein, 55 aa, Gossypium hirsutum
  Clone ID: LIB3149-002-P1-K2-C9.pep
MMQLINLIYDLHQKMASLLAKLEGWKLDCLSHSSDSSCRMISENPEPSTIHNSIL

SEQ ID NO: 89644 - protein, 125 aa, Gossypium hirsutum
  Clone ID: LIB3149-002-P1-K2-D11.pep
PRVRNFLGKGKSKLEKRVREMEKVVSEAEELPKAIVRRVVKEKLSECSPDYDFNVHKDAHLAFTESARIFIHYLSATANDICKESKRQTMNAEDVFKALEEIEFSEFVKPLRASLAEFRKEECCE

SEQ ID NO: 89645 - protein, 115 aa, Gossypium hirsutum
  Clone ID: LIB3149-002-P1-K2-E12.pep
LGLCMMEIGLCLARICDMAIGGNELEQSLLESCAAKGRLIHYHSMVDSLVLREAGPKKGSSKRNANNHARSKENLLKGANLDTNGNEVRLCEIHPNLWQQWHYDYGIFTLLTDPM

SEQ ID NO: 89646 - protein, 87 aa, Gossypium hirsutum
  Clone ID: LIB3149-002-P1-K2-F8.pep
MATNDYESGLKMMEELTTDARQIQDQLLGELLSKNAETEYLQGFLHGQTDKQLFKKKVPIVTYEHLKPYIDRIANGEHHLISFKLNP

SEQ ID NO: 89647 - protein, 139 aa, Gossypium hirsutum
  Clone ID: LIB3149-002-P1-K2-G5.pep
LRIVVQVLFFEQLQLRTSRAGCFLVSDNLDGSRQLRSGITGSTEGGWASAVRENQVLKVGMDTMRMRVSELEKECSNMRQEIEKLGRVKGSSTWGNVSKKFGFKLKSQMCNAQEDSVSNQKNGSGKIEKPKGKAQEKHK

SEQ ID NO: 89648 - protein, 49 aa, Gossypium hirsutum
  Clone ID: LIB3149-002-P1-K2-G7.pep
LRSSTQFQNQLIKVQTTVLESERQVTLKSIWLTLASFPISFHLHFLFRI

SEQ ID NO: 89649 - protein, 40 aa, Gossypium hirsutum
  Clone ID: LIB3149-002-P1-K2-H2.pep
GPTHPCDHKQIKSRFIYSLISTKNFCPNKKTKKEIKYIKI

SEQ ID NO: 89650 - protein, 66 aa, Gossypium hirsutum
  Clone ID: LIB3149-002-P1-K2-H7.pep
KISLMAFSIIFHSLLKDTTISHKVDCFTISSQSHPYHSITWEQLEHGIYSMSNRYNIRLFFGFLRA

SEQ ID NO: 89651 - protein, 99 aa, Gossypium hirsutum
  Clone ID: LIB3149-003-P1-K1-B10.pep
KKSTLKITMKKSSMPHPYHSSKVADPNVNGDHLKDNRGVRSNVTEKKSAAGAATNKLEKNPSVDINESAEAFIQKFRHQLLLQRLESIENYEKMLARGL

SEQ ID NO: 89652 - protein, 50 aa, Gossypium hirsutum
  unsure (1)..(50): unsure at all Xaa locations
  Clone ID: LIB3149-003-P1-K1-B8.pep
MLLPSSFPLLESCSIWCTLGLSAPPSLSPPPCTLLFSILATLXLFSIGSR

SEQ ID NO: 89653 - protein, 55 aa, Gossypium hirsutum
  Clone ID: LIB3149-003-P1-K1-D8.pep
RLPFIYRYPSSFNFPTFYILFSYKKLFFLNILFFLLIHISLVFLNINKSNPFLLF

SEQ ID NO: 89654 - protein, 106 aa, Gossypium hirsutum
  Clone ID: LIB3149-003-P1-K1-D9.pep
NDCNLGHRYQREEAKIQAWVNLQNAKAEAQSRKLEVKIQKMRSKLEEKLMKRMAVVHRKAEEWRASAQQQHAEQMQKPNNILISNRSNLQFSGNISCGCFPCNNSR

SEQ ID NO: 89655 - protein, 52 aa, Gossypium hirsutum
  Clone ID: LIB3149-003-P1-K1-E5.pep
FPIRTKAILGFGLGPYYQGQYLAALFLYEPVAFHSNLEKRRGATGIRPDLSD

SEQ ID NO: 89656 - protein, 77 aa, Gossypium hirsutum
  unsure (1)..(77): unsure at all Xaa locations
  Clone ID: LIB3149-003-P1-K1-E7.pep
KFEQDEDVNLDDIDAVFNDSTEHLVTERKEKPVSMNAFELISRSQSXSLDKLFERQCGSGNPKPVSLPTPSNEILPK

SEQ ID NO: 89657 - protein, 90 aa, Gossypium hirsutum
  Clone ID: LIB3149-003-P1-K1-F12.pep
ESCILRCGIHTILHLRHLYFNTHIMERMPLYSDFFLLDAFHHPRLILLKYYLQKIQRLLINNDILLGTKKKKIDWWFYHDKINYNNADNI

SEQ ID NO: 89658 - protein, 53 aa, Gossypium hirsutum
  Clone ID: LIB3149-003-P1-K1-G8.pep
HFASSPYPKLIYLASSFFFSDLAFYVSAKIFDSFCLLFVRSLIKVLLMAAKGF

SEQ ID NO: 89659 - protein, 69 aa, Gossypium hirsutum
  unsure (1)..(69): unsure at all Xaa locations
  Clone ID: LIB3149-003-P1-K1-H7.pep
FIHCLKNIISDESYVYFFEELNDNLLKXKTHKNISLSFILFSFFFFLFLFFIYFFLFFYFLFFNILFYI

SEQ ID NO: 89660 - protein, 65 aa, Gossypium hirsutum
  Clone ID: LIB3149-003-P1-K1-H9.pep
LWLGKLSELPNKYQKDALPTLFYGFRFWIPVTLLNFWMVPLQARVAFMSVGSIFWNFYLSSTMSK

SEQ ID NO: 89661 - protein, 47 aa, Gossypium hirsutum
  Clone ID: LIB3149-004-P1-K1-C4.pep
SFKGSNITGADFTDVPLRDDQREYLCKVADGVNPTTGNATRDTLLCN

SEQ ID NO: 89662 - protein, 82 aa, Gossypium hirsutum
  Clone ID: LIB3149-004-P1-K1-C8.pep
SSSHILDGTFTDSYFLTMKMFDANRHEFTCIRFDFDFGLASSVADSGKITMLFFYPCKVVYMLYVTINSVHIIACIAWIIPH

SEQ ID NO: 89663 - protein, 72 aa, Gossypium hirsutum
  Clone ID: LIB3149-004-P1-K1-D2.pep
VSSRAPGGVSGGHWTSSSHIVHGTFTDSYFMPMNMCDANRHVFTCVRLDYDFGLPSSVADLGKITVLYSHSL

SEQ ID NO: 89664 - protein, 74 aa, Gossypium hirsutum
  Clone ID: LIB3149-004-P1-K1-D6.pep
HVPGFIEKACQLRSNIDDESPCTGTAYIRGRMLFNTCHSANMVRTIIVRRNYLDYIKIYQRYEIKALQLFQVIY

SEQ ID NO: 89665 - protein, 108 aa, Gossypium hirsutum
  unsure (1)..(108): unsure at all Xaa locations
  Clone ID: LIB3149-004-P1-K1-E11.pep
VDSVKVEKYHFICTMSTSTRAAHRAYIVQSRPLSLVVAPSLQRHLQNVMNYISDIXPPLTVPSELTNLSILSYGSAIPLVHRPRLMLRGDDGPDLKHKGPPVTNELEN

SEQ ID NO: 89666 - protein, 60 aa, Gossypium hirsutum
  Clone ID: LIB3149-004-P1-K1-G1.pep
IYHSENEYWTLRRVNGHTRWLLGVMLRLKDSHYIGSFVCLAIDAYNALIYACLYFTFYTL

SEQ ID NO: 89667 - protein, 47 aa, Gossypium hirsutum
  unsure (1)..(47): unsure at all Xaa locations
  Clone ID: LIB3149-004-P1-K1-G4.pep
MPSHMTVRMTMKLAKKMRQNMPIHXRIRMRTDITIRYTAKRKDWRRT

SEQ ID NO: 89668 - protein, 36 aa, Gossypium hirsutum
  Clone ID: LIB3149-004-P1-K1-G6.pep
YFSSSVVRSFFITPKNMERLVLFSSLIYSLAYLSIY

SEQ ID NO: 89669 - protein, 43 aa, Gossypium hirsutum
  Clone ID: LIB3149-004-P1-K1-H3.pep
EFNKIKLMPKQRLSVWYRCLLIQYDREATKLDDRILYAHIKQG

SEQ ID NO: 89670 - protein, 44 aa, Gossypium hirsutum
  Clone ID: LIB3149-005-Q1-K2-A4.pep
YLCRECTLQFIQPGLRLPSRALLQLGQGLHPFYSSNVSKPNRTF

SEQ ID NO: 89671 - protein, 69 aa, Gossypium hirsutum
  Clone ID: LIB3149-005-Q1-K2-B3.pep
SDYMHEFQPLEYYSFAFFPIKVGTLTILKYLSYFQHNAFLMTMLVGVHPSESVSHLIEEQFFHSILVCV

SEQ ID NO: 89672 - protein, 48 aa, Gossypium hirsutum
  Clone ID: LIB3149-005-Q1-K2-B7.pep
KYQKDRPSFTRHQHLYTGVVNHHRGAFSPQILPTITHILTVFILHLRT

SEQ ID NO: 89673 - protein, 72 aa, Gossypium hirsutum
  Clone ID: LIB3149-005-Q1-K2-B8.pep
RTHGFNMRLSEGKQILLLVIRRLLHGHRLRCHQVQPTLMLLLKTTEPVGMHACLLHHLADAGFFLNPPVLYS

SEQ ID NO: 89674 - protein, 52 aa, Gossypium hirsutum
  Clone ID: LIB3149-005-Q1-K2-C2.pep
SGDCHTQSTTRYFKCYAVGISSLRISYQYVTAITTVLPFLSLTLSSLKSAHT

SEQ ID NO: 89675 - protein, 63 aa, Gossypium hirsutum
  Clone ID: LIB3149-005-Q1-K2-D1.pep
IRLKSHIVAFLVSSILLSLRIIFISKRANYPNHPIYFCVSWLKIYAFTHTFSFNINANSEYTS

SEQ ID NO: 89676 - protein, 59 aa, Gossypium hirsutum
  Clone ID: LIB3149-005-Q1-K2-D2.pep
CVLQKNSVVCVIKLLLSSKRDITKALSVVEHNRFYMQRLLCSCDSDRIKMTLVCDLSCT

SEQ ID NO: 89677 - protein, 136 aa, Gossypium hirsutum
  Clone ID: LIB3149-005-Q1-K2-E1.pep
AYKDLGKMLLKYPWILSTSSQENYEQILLFFEEEKIPKTSVDRAIRSWPHLLGCSTSKLKLMVDQFGELRIRNKKFGRVIAKSPQLLLKKPQEFLQVVLFFEELGLAQETVGKLVSRCPEVFAANIDTTLKKKVEL

SEQ ID NO: 89678 - protein, 50 aa, Gossypium hirsutum
  Clone ID: LIB3149-005-Q1-K2-E3.pep
ISLGRRAEILYGIEYVIVLDKIYGPVIWYGASWLEEGLGIRRSDPKVMYM

SEQ ID NO: 89679 - protein, 57 aa, Gossypium hirsutum
  Clone ID: LIB3149-005-Q1-K2-E8.pep
MGVPLGPGKFYGSSLPRPRIYNETRVNSERVNPPVPVLDPLLSWANEAHWSMGGLNF

SEQ ID NO: 89680 - protein, 95 aa, Gossypium hirsutum
  Clone ID: LIB3149-005-Q1-K2-F2.pep
PHAACPVTRFLGRYSTTFSVTGPSPAGPTYPTEDSEDSPTKTPVPVAESPTTPKAKPSACLPLAPAYSHLLSSCQETITAGTHCTRGGQSLITTT

SEQ ID NO: 89681 - protein, 34 aa, Gossypium hirsutum
  Clone ID: LIB3149-005-Q1-K2-F5.pep
AHAAGPVYQFLGRYSSLGSFTDTREAGQSYPTDD

SEQ ID NO: 89682 - protein, 50 aa, Gossypium hirsutum
  Clone ID: LIB3149-005-Q1-K2-G1.pep
WLLYKTSGTVIFLKRYANCMVPLGTAYSTDTPFSFMWVMIMGSSTYMKYY

SEQ ID NO: 89683 - protein, 57 aa, Gossypium hirsutum
  Clone ID: LIB3149-005-Q1-K2-G3.pep
IIAGFLMTRTSHNLREGSENLSKEHWMPSVEQSLIKMLGNAAIVNIECVMYVFKWES

SEQ ID NO: 89684 - protein, 46 aa, Gossypium hirsutum
  Clone ID: LIB3149-005-Q1-K2-G5.pep
IIDVHKGTMQFAYFIRKMTVPHSPIEVPSTYMPNFPLYIHTLCSRF

SEQ ID NO: 89685 - protein, 38 aa, Gossypium hirsutum
  Clone ID: LIB3149-005-Q1-K2-G6.pep
AKKVLNKALKSDYRNPSWGCLLCGDAFICDWKPSEELS

SEQ ID NO: 89686 - protein, 74 aa, Gossypium hirsutum
  Clone ID: LIB3149-005-Q1-K2-G9.pep
STNLSQVASVYISLLMPSSFFPIYQIYFSPLNVSHPRYYSPSILLNKTFPDSQITNSNILLFISTLFLTTYTCI

SEQ ID NO: 89687 - protein, 93 aa, Gossypium hirsutum
  unsure (1)..(93): unsure at all Xaa locations
  Clone ID: LIB3149-005-Q1-K2-H1.pep
MATKARTVPTRKVMTYRPLCRKQLTIEVLPSVKPNVSNAELKDKLCRMYEEKDPCSIFGCKSRTHFGKRKATGFRXIYDSDXNAKMSEPKYRL

SEQ ID NO: 89688 - protein, 86 aa, Gossypium hirsutum
  unsure (1)..(86): unsure at all Xaa locations
  Clone ID: LIB3149-005-Q1-K2-H12.pep
VEPRVRPIGYSIKGLLLLSXXLRAVLGRFDFVGSHVLPISAVDEAHVHKVKELEDLXHLKLDFWRGPVRPGSPIYIIISYPFFLIY

SEQ ID NO: 89689 - protein, 60 aa, Gossypium hirsutum
  Clone ID: LIB3149-005-Q1-K2-H2.pep
LFSFKSVVYYRFFIVCTIVALVRYCQQMSFDDLRLNILKSPEVLGSVNIEGANDVFNDLA

SEQ ID NO: 89690 - protein, 49 aa, Gossypium hirsutum
  Clone ID: LIB3149-006-Q1-K1-B2.pep
SFSVQMLRPLFPPRWLNMDACLENPVFIHLLMKMTWNMLIVIHDAVHLF

SEQ ID NO: 89691 - protein, 87 aa, Gossypium hirsutum
  Clone ID: LIB3149-006-Q1-K1-B8.pep
PDRKNGATHAYERHARTASTFPELNQDKTGEDMSVGEAAPGDVNEGSFAVSAANGKETQRFVIELDHLTNPEFLSLLDEAREGYGSY

SEQ ID NO: 89692 - protein, 35 aa, Gossypium hirsutum
  Clone ID: LIB3149-006-Q1-K1-E12.pep
QTSEGRNETSSLVNFINHPQVRKANTKLSNSFCSA

SEQ ID NO: 89693 - protein, 40 aa, Gossypium hirsutum
  Clone ID: LIB3149-006-Q1-K1-F6.pep
CVIPSTYIFTILSSSPHTSVINTIINLESEPIRSGTLGEA

SEQ ID NO: 89694 - protein, 103 aa, Gossypium hirsutum
  Clone ID: LIB3149-006-Q1-K1-F8.pep
MSIPLDQTNLTLGAVTETSATANWTINASNIRTVKVSNISLAASERDIKEFFSFSGDIQYVEMRRETENAQVAYVTFKDTQGADTAILLTGAKIVDLSVNITP

SEQ ID NO: 89695 - protein, 99 aa, Gossypium hirsutum
  unsure (1)..(99): unsure at all Xaa locations
  Clone ID: LIB3149-006-Q1-K1-G12.pep
MCGLFGGGNIILGRVSVXCNEAVGATTPFXTAVFAYFMTFKREAWVTYAALVTEVAGVVIASGGEPEYYWGGFNMCLSATDGRAFKYVLXGFLVCVEGE

SEQ ID NO: 89696 - protein, 120 aa, Gossypium hirsutum
  unsure (1)..(120): unsure at all Xaa locations
  Clone ID: LIB3149-006-Q1-K1-G8.pep
NPAPFKADMDTAAPALQRAQAALERARVQTTRLKPLVEADAISRQVYDDSVSQRDQAAADVAQARATLARRKLDLKFATVEAPITGRIDQALVPEGALVASSDSQPMARIQQXAQVSVGP

SEQ ID NO: 89697 - protein, 65 aa, Gossypium hirsutum
  unsure (1)..(65): unsure at all Xaa locations
  Clone ID: LIB3149-006-Q1-K1-H1.pep
FVFVAXSPPPFWVLSLSSPXLFRXXPSPARLLFLARXXGXXSRSGFLCCPRSXXRSRPPPSXPSR

SEQ ID NO: 89698 - protein, 68 aa, Gossypium hirsutum
  Clone ID: LIB3149-007-Q1-K1-A1.pep
DYHIGKNGQIFFWGILMVKIKVVVWYRKGPRRPIPRLGGEQGIGKALRQILRFCFVCSRGASEEWTSF

SEQ ID NO: 89699 - protein, 69 aa, Gossypium hirsutum
  unsure (1)..(69): unsure at all Xaa locations
  Clone ID: LIB3149-007-Q1-K1-B2.pep
QRGXRKGKKGDERRKDAGGREEDQATTRAARGGQQGERSKHRARYNAGLENPADPNKRVEHNHLSSRGK

SEQ ID NO: 89700 - protein, 45 aa, Gossypium hirsutum
  Clone ID: LIB3149-007-Q1-K1-B3.pep
WHTTQILLRTLQKTSPIKIMSFSSCHKKSILKIQKTYLCEEKRVG

SEQ ID NO: 89701 - protein, 44 aa, Gossypium hirsutum
  Clone ID: LIB3149-007-Q1-K1-B6.pep
IISWNYLPTRVNISCRNLVNSPTMSFVVATPLQSIPPIILEFVQ

SEQ ID NO: 89702 - protein, 53 aa, Gossypium hirsutum
  unsure (1)..(53): unsure at all Xaa locations
  Clone ID: LIB3149-007-Q1-K1-C3.pep
GIDVKLMNEAVXKLVTVEDKSGELYRGSMVKCEDNWNXXLEIINFTGKDGKVS

SEQ ID NO: 89703 - protein, 78 aa, Gossypium hirsutum
  Clone ID: LIB3149-007-Q1-K1-E1.pep
NVGSVKQSGEEDAMVAGKENACNEAEEKEPEYKEMTLEEYDKIVEEKRKALLALKTEERKVDTKEFESMQQLLSKKNN

SEQ ID NO: 89704 - protein, 104 aa, Gossypium hirsutum
  unsure (1)..(104): unsure at all Xaa locations
  Clone ID: LIB3149-007-Q1-K1-E11.pep
RWTKVSGVSNVEINHDFLKNISPKIDWKAXSDAARTMGYDELSEQAPDPSVLESDLDFLTIFHHALLELHLEEGALVCPETGRKYPVNKGIPQYASCMKNEVKG

SEQ ID NO: 89705 - protein, 85 aa, Gossypium hirsutum
  Clone ID: LIB3149-007-Q1-K1-E2.pep
VHPVGLKINCPAILNKRRVIFTVHFPHKTFEAGIICSVIPAGIMYQQQQQILIQLLEQLCIQLPRHSLPNDELLHKFKFRKVPLN

SEQ ID NO: 89706 - protein, 115 aa, Gossypium hirsutum
  unsure (1)..(115): unsure at all Xaa locations
  Clone ID: LIB3149-007-Q1-K1-G10.pep
RGPGTGHATGQXKNXRAPRAADKRKARKRGELDEKKGTATQIKTTQEGRTQNTRAQNRAGGGNSTTKGRVIDTGDAHXQGGKQRQRASDRTPGASNMKIAKAGGDREKERSPNKK

SEQ ID NO: 89707 - protein, 48 aa, Gossypium hirsutum
  Clone ID: LIB3149-007-Q1-K1-G3.pep
GRKTGSVSSGSRLGWLQEDQRAIVQFSARENYHRVTKDTVQERSLRSL

SEQ ID NO: 89708 - protein, 142 aa, Gossypium hirsutum
  Clone ID: LIB3149-007-Q1-K1-G6.pep
VQANNLLEDQSQIESGSLSTLESGPLVTFVGIYDGHGGPETSRYINDHLFQHLKRFATEQQSMSVDVIKKAFQATEEGFFSVVAKQWPMKPQIAAVGSCCLVGVVCNGTLYIANLGDSRAVLGRRVKATGEVLAIQLSSEHN

SEQ ID NO: 89709 - protein, 40 aa, Gossypium hirsutum
  Clone ID: LIB3149-008-Q1-K1-A1.pep
MVILCKRTILHLKPKRSCYCWPSSSALLKEISDVFVAYTM

SEQ ID NO: 89710 - protein, 64 aa, Gossypium hirsutum
  Clone ID: LIB3149-008-Q1-K1-A3.pep
YFSKLTRVDDFLSLGLGASLCIQPLLVYNLNAVVCNIICFPFCSIVDAEGILVLFPGQRLLSLT

SEQ ID NO: 89711 - protein, 76 aa, Gossypium hirsutum
  Clone ID: LIB3149-008-Q1-K1-B1.pep
SFQDQNHWGKKRQTTVLSNYETLSHLQFALKSRKLIKYLNLVTCLRHMHKKNGPKTAIFPLSNINRALAHRKSSVP

SEQ ID NO: 89712 - protein, 107 aa, Gossypium hirsutum
  Clone ID: LIB3149-008-Q1-K1-B11.pep
RMAPLSRKNGILEVQSATALGSRDTAERTLSSALKSKEEMEKKFADAMKEMELLKEKLAGIELAHEEANNLFNIVHSDNVRLEHDVAILKAGLDESQKELHSTRRGL

SEQ ID NO: 89713 - protein, 63 aa, Gossypium hirsutum
  Clone ID: LIB3149-008-Q1-K1-C1.pep
THATGKTRKKNAAHSKQNRRETTKGPKAEKKPAEKKPAEEKKTTAAEKSPAEKKPKAGKKLPK

SEQ ID NO: 89714 - protein, 106 aa, Gossypium hirsutum
  unsure (1)..(106): unsure at all Xaa locations
  Clone ID: LIB3149-008-Q1-K1-C11.pep
RGDPRRGGGDDRSGECTGSIQARISGGEXGHEGGGVAELVGVPNKDEAFKTQTGNLLNERTLKGTNVGNYKPRTDIPAGGERYMNKEHEPDKGITHSRPFSENNKA

SEQ ID NO: 89715 - protein, 56 aa, Gossypium hirsutum
  Clone ID: LIB3149-008-Q1-K1-C2.pep
ILIGSHGRSPKFICHMTFAHHDIPPISGSSGRVDAGNCRSFQYPRPYGRTHQQTGV

SEQ ID NO: 89716 - protein, 51 aa, Gossypium hirsutum
  Clone ID: LIB3149-008-Q1-K1-D1.pep
LAIYPLPHIIGLQSFGPVIIRASDTGARTVPVSTAANASGADVSIPGDIQI

SEQ ID NO: 89717 - protein, 83 aa, Gossypium hirsutum
  unsure (1)..(83): unsure at all Xaa locations
  Clone ID: LIB3149-008-Q1-K1-D12.pep
DIYRIQTGWMVPDPQLREERXISISEKVIPAYRSFMGRLGRQLESGRHAGKYIKDTPEDLQDYLLDVFEGSPLGLYHMRRKSP

SEQ ID NO: 89718 - protein, 122 aa, Gossypium hirsutum
  unsure (1)..(122): unsure at all Xaa locations
  Clone ID: LIB3149-008-Q1-K1-D2.pep
MTCPMTDLPPSKEPLEWNTRMKIASGXASKGXEYLHDKANPPVIYRDFKFFNILLEEGFHPKLSDFGLAKLGPCGDKTHVYTRVMGTYGYCAPEYAMTGQLTVKSDVYSFGXVFLELNTGRK

SEQ ID NO: 89719 - protein, 107 aa, Gossypium hirsutum
  Clone ID: LIB3149-008-Q1-K1-D3.pep
TGYNTNPYAEFNILGDPIAGEEVFHSGIPVTLASLDATNTIPITEEFFKAFEQSHWTYEAQYCYKSLKMARDTWLEDRFYTSYFMWDSFTSRGAVAIKRNYGKNNGE

SEQ ID NO: 89720 - protein, 44 aa, Gossypium hirsutum
  Clone ID: LIB3149-008-Q1-K1-D7.pep
YSNVVSDMVYFINRACINSGGGIYVFYVLTNDANFLNESFSILH

SEQ ID NO: 89721 - protein, 105 aa, Gossypium hirsutum
  Clone ID: LIB3149-008-Q1-K1-E10.pep
ERSRRGPGSCNERAAYARGAGELERKEAADDSPDEKTKCHTSGNTELKGEKIIDKEECEPRANVSAYGDDANLKGDKSSTCAEDLEPRPNGRAYGGEEAGPKGQK

SEQ ID NO: 89722 - protein, 117 aa, Gossypium hirsutum
  Clone ID: LIB3149-008-Q1-K1-E4.pep
TGAEFKNTGSVETTSAVNTNHYADLSDENEKLKKDNEMLSSELAQAKKQCDELVAFLTECVKVGPDQIDRIMRQGNGGSTLEGDDLGRFYGVDDNYHDEKGGGENGNRRLKLFGGWV

SEQ ID NO: 89723 - protein, 49 aa, Gossypium hirsutum
  Clone ID: LIB3149-008-Q1-K1-E9.pep
CLELCTIPNTYPKKRVSFLLFGDIQLYLLIMVVGDILGLKNNEHRRRKE

SEQ ID NO: 89724 - protein, 41 aa, Gossypium hirsutum
  Clone ID: LIB3149-008-Q1-K1-F1.pep
TPPPLILITNGNLLLLLCVVYTRMELLHLQRVFTYWHGLWR

SEQ ID NO: 89725 - protein, 101 aa, Gossypium hirsutum
  unsure (1)..(101): unsure at all Xaa locations
  Clone ID: LIB3149-008-Q1-K1-F12.pep
RAETRDAHATKKDRXXKKGAEAEEKTAGGGMQTEASKEKPSIGTGIADGPGTXDEEGKRKPQTAAPGKTETXTKDAGNDNKGKEGTSENAHRATDGKEGQP

SEQ ID NO: 89726 - protein, 48 aa, Gossypium hirsutum
  Clone ID: LIB3149-008-Q1-K1-F8.pep
NCVQHSVAVLPGQVYSMYCSFYYISLYSCVLHSKLVLQFSTIFFLGPH

SEQ ID NO: 89727 - protein, 83 aa, Gossypium hirsutum
  Clone ID: LIB3149-008-Q1-K1-H5.pep
QPCFLLKNGHRIWHSTRRKNNLNLTLAIQLWPCFLQRSNLMCCDWCLKHHRNEALSVSLPWFHPQDLLQGKDESMRRLPHPLR

SEQ ID NO: 89728 - protein, 49 aa, Gossypium hirsutum
  Clone ID: LIB3149-008-Q1-K1-H7.pep
LLHLTSKSTRKIFCWLTIPEEAAITACFQLSCSVFPVPPNNVRAPISCL

SEQ ID NO: 89729 - protein, 67 aa, Gossypium hirsutum
  Clone ID: LIB3149-013-Q1-K1-A11.pep
DINHRHLLQMQQIAHHVLLLSLDPQLLHVLLHVKQIVHLLLSSVESFPRRHRYFHKQMNIFCVIEYG

SEQ ID NO: 89730 - protein, 56 aa, Gossypium hirsutum
  Clone ID: LIB3149-013-Q1-K1-C12.pep
CDNRDAVSNKVHEIVRKMLHLGILMRHIATIGLNSCTFRHSPSRRIQACQQACHYS

SEQ ID NO: 89731 - protein, 57 aa, Gossypium hirsutum
  Clone ID: LIB3149-013-Q1-K1-D4.pep
MFSHCTHLGSDVFMCTNNDNASWSLECTINTLSVMIGVSNDNSHRNEVSLAFTICII

SEQ ID NO: 89732 - protein, 82 aa, Gossypium hirsutum
  Clone ID: LIB3493-042-P1-M1-H11.pep
GRVGWGTINEPLHIAVGGYDTGRSAPGRNHNSSIETYLAAHHMILAHAAAVSIYHSKYKDKQGGQIGLVVDCEWAEANSDKI

SEQ ID NO: 89733 - protein, 87 aa, Gossypium hirsutum
  Clone ID: LIB3493-042-P1-M1-H2.pep
VDPTPDFLLPLCKAGVSTKSLFLLILNFRFSFLSPLAGVSSHSRSLSLSHIQVLVFFIQFSCSSCRFSGWDSRLCSLMLFLGRFSPS

SEQ ID NO: 89734 - protein, 32 aa, Gossypium hirsutum
  Clone ID: LIB3493-042-P1-M1-H3.pep
STHAYRGSFVPFTDTNDVQSGPITGRHTYVDE

SEQ ID NO: 89735 - protein, 117 aa, Gossypium hirsutum
  unsure (1)..(117): unsure at all Xaa locations
  Clone ID: LIB3493-042-P1-M1-H7.pep
AKESSSPSPYPSPSVSSPAPSLNSPPTPTSISLTKEXGDFSFGSRVGPCGGLLEFFDNGLKSGGGENEKAVGCPGTEYCGPRDYPIGEAQEGLCLKNAGDYLGGAARKRKVVKHKLP

SEQ ID NO: 89736 - protein, 84 aa, Gossypium hirsutum
  Clone ID: LIB3493-042-P1-M1-H8.pep
MAAKAEKKPAEKKPAVEKKTVAEKAPAEKKPKAGKKVSKEGGAGAGDKKKKRGQKEAGNLKNYIFKGLEQGHPGIGILRQGLGI

SEQ ID NO: 89737 - protein, 39 aa, Gossypium hirsutum
  Clone ID: LIB3493-042-P1-M1-G9.pep
ERSCLTELVLGGGSMVLMEDSHFNFNRFPLGLTFHSNFA

SEQ ID NO: 89738 - protein, 60 aa, Gossypium hirsutum
  Clone ID: LIB3493-042-P1-M1-H1.pep
CIPIASSDEYSWKRSRELLLDVARRGEESGYGVPCLLIAAKDDLDPFPMSLQNSARVTQQ

SEQ ID NO: 89739 - protein, 62 aa, Gossypium hirsutum
  Clone ID: LIB3493-042-P1-M1-G2.pep
FLIMDFSKNKKKQSNDMNPKPAVYGSVKDHLLEKPQEKKVEYLILWRLLTREHTADSDYSCI

SEQ ID NO: 89740 - protein, 33 aa, Gossypium hirsutum
  Clone ID: LIB3493-042-P1-M1-F9.pep
RCEKLTITMVHGTGLSVLSHQGKERGLALARAF

SEQ ID NO: 89741 - protein, 82 aa, Gossypium hirsutum
  Clone ID: LIB3493-042-P1-M1-F1.pep
PFDYVKTQIQKMQPDAEGKYPYNGSLDCAMKTLKCGGPLKFYTGFPVYCVRIAPHVMMTLIFLNQIQKAQKNMGVWISQQWG

SEQ ID NO: 89742 - protein, 60 aa, Gossypium hirsutum
  Clone ID: LIB3493-042-P1-M1-F5.pep
WNPYWREALHPDESRHLLQCPIEISKHGSATLLPGAEYLHNTKAAILASKSDYLAPILTT

SEQ ID NO: 89743 - protein, 58 aa, Gossypium hirsutum
  Clone ID: LIB3493-042-P1-M1-E8.pep
FWRWFYLYPSIPVLSFFKNNPMMTPKTLTLFLPMMHSNLTRLIDPGVAFNKNNFFQKG

SEQ ID NO: 89744 - protein, 75 aa, Gossypium hirsutum
  Clone ID: LIB3493-042-P1-M1-E1.pep
MDLLKEELLKKRQSLAQETGGRRVFKRSEIEQKQIQKLREQEKRELEAKSRRQSNASSSAANDASAKSNPSASST

SEQ ID NO: 89745 - protein, 33 aa, Gossypium hirsutum
  Clone ID: LIB3493-042-P1-M1-D12.pep
ASFTYQYQNLINTHRMVMKIFQTIKKKEKRKKT

SEQ ID NO: 89746 - protein, 136 aa, Gossypium hirsutum
  Clone ID: LIB3493-042-P1-M1-D11.pep
VTVIDFLNNMGHCNFEFVPKWFYTIFPPLKYIIYTPSFHSLHHTQFRTNYTLFCPLYDYVYGTVDKSTDSVYENALKREAESPDVVHLSHLTTPDSIYHLPLGFPSFASKPQVFKWVLLFMWPVTCWSMLLTCFVA

SEQ ID NO: 89747 - protein, 47 aa, Gossypium hirsutum
  Clone ID: LIB3493-042-P1-M1-B9.pep
HVDCKPRWCSKLRSTLSTSQTRVSKSTWSLNPLLLLVTQFPTPTILI

SEQ ID NO: 89748 - protein, 106 aa, Gossypium hirsutum
  unsure (1)..(106): unsure at all Xaa locations
  Clone ID: LIB3493-042-P1-M1-B2.pep
AIAFGTLAADAASTSNGVXIDNDDSDLDRPTEGFASILEAIEDIRQGKMVLVVDDEDRENEGDLIMAAELATPEAMAFIVKHGTGIVCVSILEEDLERLHFPLMAN

SEQ ID NO: 89749 - protein, 72 aa, Gossypium hirsutum
  Clone ID: LIB3493-042-P1-M1-A9.pep
MANFWNINLNCNVPKKGIGFLLTPQGRAIFALALLLVYKKKPWKWELRFYSPYFAKKLECSPIFLWDEYILV

SEQ ID NO: 89750 - protein, 135 aa, Gossypium hirsutum
  unsure (1)..(135): unsure at all Xaa locations
  Clone ID: LIB3493-042-P1-M1-B1.pep
MDTKNKDVIRLERESVIPILKPKLIMTLANLIEHSSDRAEFLKFCKRVEYTIRAWYLLQFEDLMQLYSLFDPVHGAQKLQQQNLSSEEVDVLEQNFLTYLFQVMEKXXFKIATDEENDVALAGQYLLNLPIIVDE

SEQ ID NO: 89751 - protein, 86 aa, Gossypium hirsutum
  Clone ID: LIB3493-042-P1-M1-A10.pep
NFDLGLINLWFFSGSAGMATDPLPQIPMRARSKSLNHSIHPRDVGTPPVWASTPILFRGIKPFQEWIPWVGSGFGGGYTGMVIITL

SEQ ID NO: 89752 - protein, 47 aa, Gossypium hirsutum
  Clone ID: LIB3493-042-P1-M1-A11.pep
ESNCISVFVRIHRPAGITNIESENNRKEVKSALILVTHSFLLILHIK

SEQ ID NO: 89753 - protein, 97 aa, Gossypium hirsutum
  Clone ID: LIB3493-026-P1-M1-H9.pep
HKSNVQFLLLFIDISNNPFPLEYKNWQLNDMLMQSQYCTCNTNHSLSSRQISHMLSLSKYQKKKIKPIKIHSLKKSYRNSKKYVLPSKRIQRPCNLQ

SEQ ID NO: 89754 - protein, 46 aa, Gossypium hirsutum
  Clone ID: LIB3493-026-P1-M1-H3.pep
KLVAIKRMRLDQSFLHDETRFICSPAIVNLSLQIGHYSYSFANKHL

SEQ ID NO: 89755 - protein, 141 aa, Gossypium hirsutum
  unsure (1)..(141): unsure at all Xaa locations
  Clone ID: LIB3493-026-P1-M1-H5.pep
MHLSENEGIEGNTFVVTGGLTILSSPLCLELIRRGARQDRSFDLRHYYPWSLQLTNHGVRCLQGDLTSKQPFGISYCGAICVIDLAFYGMLGKEMLQFSRVDQVNINGTCHVLEACLEFGITRLGYXSTYNVVFGGKEIVM

SEQ ID NO: 89756 - protein, 87 aa, Gossypium hirsutum
  unsure (1)..(87): unsure at all Xaa locations
  Clone ID: LIB3493-026-P1-M1-H6.pep
PDSCTRLDILGKDHXRTRVANAXYFSITIVITRATGFATGSYSGWYKILTFTMTDAWDVDCANLKSAFFLDRKLIQASTYVTELDLI

SEQ ID NO: 89757 - protein, 70 aa, Gossypium hirsutum
  unsure (1)..(70): unsure at all Xaa locations
  Clone ID: LIB3493-026-P1-M1-E5.pep
SNFKLYDQFXLLKYEDRLVFKSLESPDQGFSIYRRQGNIEPLSDESSFGKPSKTFTIYGVAGTIRLLAGT

SEQ ID NO: 89758 - protein, 79 aa, Gossypium hirsutum
  Clone ID: LIB3493-026-P1-M1-E12.pep
SNPEWNQVFAFSKDRLQASLLEVTVKDKDFVKDDFIGKVFFDLNEIPKRVPPDSPLAPQWYRLEDRQGHKVKGGVDVGC

SEQ ID NO: 89759 - protein, 87 aa, Gossypium hirsutum
  unsure (1)..(87): unsure at all Xaa locations
  Clone ID: LIB3493-026-P1-M1-D7.pep
MSICQFLFFFFPLFTLYTPMSVHANTELRSLMELKASLDPTNKXLRSWKSDGDPWXGSFVGVACNEHRKVANISLQGKGLSGQVSPA

SEQ ID NO: 89760 - protein, 153 aa, Gossypium hirsutum
  Clone ID: LIB3493-026-P1-M1-D12.pep
DLQIFLSTRWAILLNLHVEMFRVNNVEDILQVLIVFAVESLELDFALLFPERHMLLRVLPVLGVMATSSEKDSESLYKRVKINRLINIFKNDPVIPAFPDLHLSPTAILKELSNYFQKFSSQTRLLTLPSPHELPPREAQDYQRHYLIAITLE

SEQ ID NO: 89761 - protein, 77 aa, Gossypium hirsutum
  Clone ID: LIB3493-025-P1-M1-H1.pep
GLLTSSLLCLLFTWLLLQAFNSFRNGRKSSQRKLPPGPWAKPIIGNLFDLGDKPHRSFAKFAQIHGPVMGLKLGSLI

SEQ ID NO: 89762 - protein, 37 aa, Gossypium hirsutum
  Clone ID: LIB3493-025-P1-M1-H3.pep
DYCMHDLQIPYLITARYRKDKLYAESLARFKVDLHTY

SEQ ID NO: 89763 - protein, 110 aa, Gossypium hirsutum
  unsure (1)..(110): unsure at all Xaa locations
  Clone ID: LIB3493-025-P1-M1-H8.pep
MQRLRSWSSDVVQLDLSPLPPPQPPPSSSNNTPMSTTAISGAGFSIDEEEPTEARIRRLISEHPVIIFSRSSCCMCHVMKKLLATNRVHPTVIELDDXEIAXLPPPPAHD

SEQ ID NO: 89764 - protein, 155 aa, Gossypium hirsutum
  Clone ID: LIB3493-026-P1-M1-A3.pep
ALRTFLLRKLDNLSKDDKCQITMISTWATELYLDKINRLLLEDDTALVNRNSEYQSIIKEFRAFLSDCKDVLDEVTTMRLLESYGRVEELVYFASLKEQHEIVIHYYIQQGEAKKALEVLRKPAVPIDLQYKFAPDLITLDAYETWEFWMASNNL

SEQ ID NO: 89765 - protein, 127 aa, Gossypium hirsutum
  Clone ID: LIB3493-026-P1-M1-A5.pep
AIPLVKKQRVVEICDSRIPFPMYMESRIRRILSVASRCSSDKEEHRPSIGEIIVAMETCSIEPVRSITAWNSVIQYLVQLKRRRKLSGEYCRRSAVYSTRQDEDVNSHVSTGKVVLLKEMLADVRLK

SEQ ID NO: 89766 - protein, 109 aa, Gossypium hirsutum
  unsure (1)..(109): unsure at all Xaa locations
  Clone ID: LIB3493-026-P1-M1-B6.pep
LEVNDETYESIATIAEXAGHCTTREPYHRPDMGHVVNVLSPLVEKWKPVDDESECYSGIDYTQPLPQMLKVWQAAESQGVSYTSLADSKRSIPAXPAGFADSFTSVDGR

SEQ ID NO: 89767 - protein, 133 aa, Gossypium hirsutum
  Clone ID: LIB3493-025-P1-M1-G8.pep
SIELALRWLSFMGSSGIRTNNFIVRQLFESCMKNGLYESAKPLLENYVNSAAKVDLILYTSILAYLVRCQEEHNERHLMAILGATKHKAHAFMCGLLTGPEQRKQPVLIVGGGVFQGIDYELEEGACRYFVNV

SEQ ID NO: 89768 - protein, 72 aa, Gossypium hirsutum
  Clone ID: LIB3493-025-P1-M1-G2.pep
PVIVSTGQTYERSCIEKWLEQGHGTCSKTQQTLNSPGFTPNYLLGSLITQWCEANGIEPAKRPRRSRSNKTT

SEQ ID NO: 89769 - protein, 103 aa, Gossypium hirsutum
  unsure (1)..(103): unsure at all Xaa locations
  Clone ID: LIB3493-025-P1-M1-F7.pep
NNIIARRESFKDDLHLLCLRYCRSRRLEQRAGILYFSNILFDRHYPFLEHRDSELKTPSEEETNQGKAGNVPSKYXSSSYPSIINRICCCHCTKFPSSNFTVS

SEQ ID NO: 89770 - protein, 55 aa, Gossypium hirsutum
  Clone ID: LIB3493-025-P1-M1-F1.pep
EVRKVKVKVDARSVIKKIQSKWADKSEIQAYISDYQDLSNSFQTCVFLFGHRSKN

SEQ ID NO: 89771 - protein, 98 aa, Gossypium hirsutum
  Clone ID: LIB3493-025-P1-M1-E12.pep
LTGTIPEQVGNLKSLTSLSLSSNKFIGHIPASISRLQNLWSLNLSRNGFSDPLPDVSNRGIPSLLSIDLSLNNLSMWTVPKWITYRQLSDVNLAGCKL

SEQ ID NO: 89772 - protein, 116 aa, Gossypium hirsutum
  Clone ID: LIB3493-025-P1-M1-D8.pep
MEVDSVPAAALEGFSPVSTTRIFWNSRKRSASGRNLDKVTEETANVTPTKQEEQTLDQDNTPDSATSSELSERRKALFEPLEPIKNINGRRPSAESLLPPPDFDAASYPKGWLIGK

SEQ ID NO: 89773 - protein, 51 aa, Gossypium hirsutum
  Clone ID: LIB3493-025-P1-M1-D5.pep
QKVSNGSIFMPLPVQEGPVEIFWPVRVDKVSNRSMGRKLNERVMVAYEFIP

SEQ ID NO: 89774 - protein, 63 aa, Gossypium hirsutum
  Clone ID: LIB3493-025-P1-M1-D10.pep
VPRGSERPRRLLILTDKEFSASRLIMLTFRKQKARATPQYYLGSVLTSSVMSAILRIGADAKE

SEQ ID NO: 89775 - protein, 123 aa, Gossypium hirsutum
  Clone ID: LIB3493-025-P1-M1-D11.pep
ASLYLGPTIFYHVTLLTYQPADQPTNPMATTTQKPVDGATSTHTPTTPACVTLAAILSAEPNPTKIVSSFTDKCDPPNAEGSLKESGGSKTTGTTVGSVVGDESGPVNDMQKKIRRAERVGEP

SEQ ID NO: 89776 - protein, 87 aa, Gossypium hirsutum
  Clone ID: LIB3493-025-P1-M1-B6.pep
FREVVYTNPVSLGKKFWKHLSVVFPSRSKRELVSYYFNVFILQRRAVQNRSSSLDIDSDDDELCGNQPSYKVQALEEDENSAHESLA

SEQ ID NO: 89777 - protein, 103 aa, Gossypium hirsutum
  Clone ID: LIB3493-025-P1-M1-B3.pep
DAWADAWADAWADAWGNGSINISNILTGKCLAKIRASNGFPVEKQCSCCDVECGCRSKVHSSSSRIRSTVAEALEDITALFYDEERNEIYTANRYGLVHVWSN

SEQ ID NO: 89778 - protein, 54 aa, Gossypium hirsutum
  Clone ID: LIB3493-025-P1-M1-B4.pep
RTRGFRFKKQTKAAIIVQAALRCHLAYSYYKSLQKAALTTQCGWRGRLLERAKS

SEQ ID NO: 89779 - protein, 36 aa, Gossypium hirsutum
  Clone ID: LIB3493-025-P1-M1-A5.pep
TAERVKSFQTDEDPSFVELVFQYGRYLLISSSRPGT

SEQ ID NO: 89780 - protein, 45 aa, Gossypium hirsutum
  Clone ID: LIB3493-025-P1-M1-A7.pep
YHQEPNGLYLLIFYLTYDTLTESKKHILMHINGIPVLNKLQLLEM

SEQ ID NO: 89781 - protein, 73 aa, Gossypium hirsutum
  unsure (1)..(73): unsure at all Xaa locations
  Clone ID: LIB3493-025-P1-M1-A11.pep
HCNTEDDCIQLTRLIPSTEAALLDWAINLMADVVQHEQYNIMDARYIAMVLXNMTQMADPCGMIMLSSMNSKT

SEQ ID NO: 89782 - protein, 70 aa, Gossypium hirsutum
  Clone ID: LIB3493-025-P1-M1-A12.pep
MSADWGPVFVAVGLFILLSPGLLFQLPSRTRVIEFGNMCTSGIAILIHAIIYFCIITILVIAVGVHIHIE

SEQ ID NO: 89783 - protein, 57 aa, Gossypium hirsutum
  Clone ID: LIB3493-025-P1-M1-A2.pep
DPRVPTPSTEHNVSCSHFLTYVGAMAGRVITVSGILDSFIYHGHKAVEKKRETGIYS

SEQ ID NO: 89784 - protein, 50 aa, Gossypium hirsutum
  Clone ID: LIB3493-025-P1-M1-A3.pep
FDLGYCQGMSDLLSPIIFVMEDESESFWGFLALIEPPGPKFNRDPNWLHS

SEQ ID NO: 89785 - protein, 98 aa, Gossypium hirsutum
  Clone ID: LIB3493-024-P1-M1-H8.pep
APVSDREYRATLPETAAMIDLATSMIKEGLGSDLMPKEADPSPITAYRYNSLCAYMGDDDMFSSDLNEHQLRMRLGHMSSTPCQVIFSMDDEYVPEYV

SEQ ID NO: 89786 - protein, 107 aa, Gossypium hirsutum
  Clone ID: LIB3493-024-P1-M1-H2.pep
MASSLPSSSIARGGSGIITTLHPDIIRALILTRLDGPDLASTACVSSYLRSLSTEENLWRDICCSTWPSLDHPRLKQVISTFPSGYRSFFSESFPFPNLQPPKPNVR

SEQ ID NO: 89787 - protein, 138 aa, Gossypium hirsutum
  Clone ID: LIB3493-024-P1-M1-G8.pep
EESNEEGASSIMLDQVLDLLSRRWDRINGAQALRLLPRETKLQNLLPFLGPLLKKSSEAYRNFSVIKSLRQSENLQMKDELYNQRKAVVKISSDSMCSLCNKKLGTSVFAVYPNGTTLVPLCCFRDSQSMKAVSKVSQ

SEQ ID NO: 89788 - protein, 133 aa, Gossypium hirsutum
  Clone ID: LIB3493-024-P1-M1-G12.pep
MRNFNFFRRLSRAFDDYPSLSKIIVVSTISGGSLIAYAEANAFNGSKGHIAHADAVASNDDRRIASSEQVPKKKKVVLLGTGWGGMSFLKSLNNPNYEVQVVSPRNFFVFTPLLPSVTCGKVEARSIVEPIRN

SEQ ID NO: 89789 - protein, 111 aa, Gossypium hirsutum
  Clone ID: LIB3493-024-P1-M1-F7.pep
KKYGQVMQDVLLLHMGRLEGNEEWNPSTNLLIKINFDASFNQTQARPGSGVVARNALGEIVASKMILHTVVASPFTVEVYACLQALLLGQQLKLWKEEYQISLLKLWEEGD

SEQ ID NO: 89790 - protein, 97 aa, Gossypium hirsutum
  Clone ID: LIB3493-024-P1-M1-F11.pep
KESKAYKKWAKKVAEMKPPTSPLRRKGKSNKQPESDLFAIISQRRNERKDRFDSMFSSLVSKYGGNAESEPTEEEFEAAKRKVESKKASNNSKRKRQ

SEQ ID NO: 89791 - protein, 113 aa, Gossypium hirsutum
  Clone ID: LIB3493-024-P1-M1-E3.pep
SEDPHKGSIYAASWSPDGEQVLTVSADKTAKVWDISEDGSGKLKKTLTCSGSGGVDDMLVGCLWQNDHLVTVSLGGTIRIFSSSNLEKSPLQLSGHMKNITSLAVLKSDPKCI

SEQ ID NO: 89792 - protein, 140 aa, Gossypium hirsutum
  Clone ID: LIB3493-024-P1-M1-E10.pep
QPPRLSIPYSPAFKSGALPFFAITQHFFSTLPSKNHQPLLKSTPQSSALPVVPLDGKEHNVETVNKQLPEGSQQEDKSFWGAVSLIIGTAVGPGMLGLPAATIISGPLPSTVAIIISWGYVISSIILIAELSFAVMEEEV

SEQ ID NO: 89793 - protein, 96 aa, Gossypium hirsutum
  Clone ID: LIB3493-024-P1-M1-D6.pep
LHEQRIQLERRLLKPSLGGSKPLLPTPKQSPGTSVSSPSTPTTTATLPNGNRVPFRRLTPTEAAHRRSQGLCYHCDEKYEWGHKCKAKSHMLLLEE

SEQ ID NO: 89794 - protein, 32 aa, Gossypium hirsutum
  Clone ID: LIB3493-024-P1-M1-D10.pep
RRMVKIFLNEPHSHWCGNNLDFSSHQKFLFSL

SEQ ID NO: 89795 - protein, 74 aa, Gossypium hirsutum
  unsure (1)..(74): unsure at all Xaa locations
  Clone ID: LIB3493-024-P1-M1-C7.pep
MEVADSLADPYHTRHECTLLLTFQFCDVIFLFACSLGSTDAVEFTVAWIYTWKPVSFTXTISAILKVVKRLFIT

SEQ ID NO: 89796 - protein, 28 aa, Gossypium hirsutum
  Clone ID: LIB3493-024-P1-M1-C4.pep
HETYLKRSADRLPERQAKHIYHLLIMQQ

SEQ ID NO: 89797 - protein, 82 aa, Gossypium hirsutum
  Clone ID: LIB3493-024-P1-M1-B11.pep
MDDQEKADLERIFKRFDANGDGKISSAELGDALKTLGSVTPEEVSRMMSEIDTDGDGFISYDEYIAFASANRGLMKDVAKIF

SEQ ID NO: 89798 - protein, 120 aa, Gossypium hirsutum
  Clone ID: LIB3493-024-P1-M1-A7.pep
AHYFVDALEARLAGTGTQIYTSLVAKRMSAADMLKAYQVYISVCPFVKVPIIFANNYISKAAEKATKLHIIDFGIFYGFHWPALIHCLANRTCGPPKLRITGIEFPHPGFRPAETVQETG

SEQ ID NO: 89799 - protein, 42 aa, Gossypium hirsutum
  Clone ID: LIB3493-024-P1-M1-B1.pep
SDKIEVLDRRTANGTSVYRSCRSDTVLLEIVGWSKLKNPTVR

SEQ ID NO: 89800 - protein, 100 aa, Gossypium hirsutum
  Clone ID: LIB3493-024-P1-M1-A6.pep
EIFSPATNDHIFFNYSFTVENIKFLHFCPMLNCRCTRFMASITCFFFYKSFCQTSEIAKTKPPGLSIAWQHSLHQCHIQAKTRCNSLSSCRCFTTSIELL

SEQ ID NO: 89801 - protein, 47 aa, Gossypium hirsutum
  Clone ID: LIB3493-024-P1-M1-A10.pep
TLSEEKNRNFLANRTPCLIYLQSISDIKKFTTRCCFHSIKPLFNKLF

SEQ ID NO: 89802 - protein, 74 aa, Gossypium hirsutum
  Clone ID: LIB3048-001-Q1-L1-A9.pep
PFSGFYSLIKYPGRSFLFQTTSFLSSFGGNPKLLAWIWIYLWYKILSFIHIYNNFQFISLYFPSSGKYHGKQSK

SEQ ID NO: 89803 - protein, 110 aa, Gossypium hirsutum
  Clone ID: LIB3048-001-Q1-L1-C1.pep
VHGSSAAHITGPASSDTNAAAVGTSWSRSPTPDPQLVARPPSPCLTPIGGGRVGNSDKRNLNSPSTFGGVSSGVSESADLVCALSGMTLSSNGAPDEDNRLPSQTEQDAE

SEQ ID NO: 89804 - protein, 41 aa, Gossypium hirsutum
  Clone ID: LIB3048-001-Q1-L1-D4.pep
WNPPAGRNPPRAKFHSLFRPQTAGAFRNHLRHARIAYPKAR

SEQ ID NO: 89805 - protein, 104 aa, Gossypium hirsutum
  unsure (1)..(104): unsure at all Xaa locations
  Clone ID: LIB3048-001-Q1-L1-D5.pep
GFLGIVMGYYGGPFGLGNLYVNLYXGVTLNALSELPALLITFILIGEMIRNDSLQGLTILSGVCSVNCVVERIVSPSIHIALKLIYFFNACSACNMRLICTSQL

SEQ ID NO: 89806 - protein, 73 aa, Gossypium hirsutum
  Clone ID: LIB3048-001-Q1-L1-E10.pep
MGRQVVRTKRAWVGGGNGFGGSMLVKLVLEKGYAVNTTVRDPDKQKKNSHLVTLQELGDLKIFQADLTDEGSF

SEQ ID NO: 89807 - protein, 56 aa, Gossypium hirsutum
  Clone ID: LIB3048-001-Q1-L1-E9.pep
LQHANDFKQTTSNDFHLLLDFSIQFVDLNFQPSTKKSFHSLPNSNEILKGFQTQSA

SEQ ID NO: 89808 - protein, 76 aa, Gossypium hirsutum
  Clone ID: LIB3048-001-Q1-L1-F11.pep
NTVKQTKRFFMAGGSRAHSTIFSKTFLFHRINGFKRFSFCLPFSSSAGASLSSKKKWETPRAFCMLELGGNQICQR

SEQ ID NO: 89809 - protein, 100 aa, Gossypium hirsutum
  unsure (1)..(100): unsure at all Xaa locations
  Clone ID: LIB3048-001-Q1-L1-F9.pep
GLKKHLKRLNGPKHWMLDKVGGAFAPKALSGPHKSREWLALNLNLGNKLKYALTYREVIAILMQRHVXVDGKVRTDKTLPCGFMDVVSISKTNEDFRLLY

SEQ ID NO: 89810 - protein, 55 aa, Gossypium hirsutum
  Clone ID: LIB3048-001-Q1-L1-G1.pep
NLIKQLFVRNHRLMKAKGKNPQAGWVFTWSLFSKKALSFDNLWPGNKGLGPESFQ

SEQ ID NO: 89811 - protein, 85 aa, Gossypium hirsutum
  Clone ID: LIB3048-001-Q1-L1-G11.pep
SWLNQIRVLKKAIKLELGFGQPIAGTFTSVWEMDFNNAKQRLKSAYEWRERPGNFKGAQVSSSFEENKDNYVSAQVVNESVETGR

SEQ ID NO: 89812 - protein, 36 aa, Gossypium hirsutum
  Clone ID: LIB3048-001-Q1-L1-G3.pep
RTRIPFGWKKKINRLGSNQSWAFLGLEGFQRIPFLN

SEQ ID NO: 89813 - protein, 62 aa, Gossypium hirsutum
  Clone ID: LIB3048-001-Q1-L1-H10.pep
SFFTTGASNWDLSCPLQLLGKNAVLIFGLCPVPTNQPRKLSHPPFWWETPQEIFRFWQGKLP

SEQ ID NO: 89814 - protein, 67 aa, Gossypium hirsutum
  Clone ID: LIB3048-001-Q1-L1-H11.pep
GPTPFSLGFFAPNGSFLSFIFSFPLSLSFLPSIFSPFPFFLPIMKKIATGFSTFKVPCQPFPFNTPF

SEQ ID NO: 89815 - protein, 49 aa, Gossypium hirsutum
  Clone ID: LIB3048-001-Q1-L1-H12.pep
EGRFNVLTYYLLFRCSTLAKASFMPMPSHFLVALPFFKNFTLVGGELIG

SEQ ID NO: 89816 - protein, 88 aa, Gossypium hirsutum
  Clone ID: LIB3048-002-Q1-L1-B2.pep
PNETIDVIAQSICLNNLSNDSGFSLAPDVKYCMLQIMQDAIKCMHRSKMTILTPDDCESALSLRNGEPRYGFTSGGTMQFKRAIEHMD

SEQ ID NO: 89817 - protein, 79 aa, Gossypium hirsutum
  unsure (1)..(79): unsure at all Xaa locations
  Clone ID: LIB3048-002-Q1-L1-D2.pep
NLKIDGYVQYEHGTCWQDICYAISQARRSIYIARWSEYHNVRLGRETGXASKTTLGDLIKIKSHEGVRVMLLGWGESTS

SEQ ID NO: 89818 - protein, 47 aa, Gossypium hirsutum
  Clone ID: LIB3048-002-Q1-L1-D5.pep
IYDLAVISSPSCSVVSMMSTILRHRSSCRGRCKSVHCVIIHYICQNL

SEQ ID NO: 89819 - protein, 100 aa, Gossypium hirsutum
  unsure (1)..(100): unsure at all Xaa locations
  Clone ID: LIB3048-002-Q1-L1-D6.pep
LYDHGTCWEYVCYAICQARRLIYIAGWSVYHNVRLVRETDKASKTTLGDLLKIKSQEGVRVLLLVWDDPTSMSILRYKTDFHKGIMNTNDEDTXQLFKHS

SEQ ID NO: 89820 - protein, 127 aa, Gossypium hirsutum
  Clone ID: LIB3048-002-Q1-L1-D9.pep
KPSVEEWDSDLEPNSSLKQTNLGSDHAATPTSGTGQMAHSSPTDPAENASGWDSIVPEPNEYSFGDESVSDLLAEVEAMESLNGLASPTSSLRYDRELVHGAEPGCFCPVGRFSPAPDPGKNDGLSS

SEQ ID NO: 89821 - protein, 78 aa, Gossypium hirsutum
  Clone ID: LIB3048-002-Q1-L1-F12.pep
MKISFHVVNYLLVISSPPVLQNLQAGIVWVNCSQPCFCQAPWGGNKRSGFGRELGEWGLDNYLSVKQVTQYVSDEPWG

SEQ ID NO: 89822 - protein, 40 aa, Gossypium hirsutum
  Clone ID: LIB3048-002-Q1-L1-H6.pep
MQHLDLLQLFISSIPFSLTSFIRSPIRSKTSCNIIAYFLY

SEQ ID NO: 89823 - protein, 67 aa, Gossypium hirsutum
  Clone ID: LIB3048-003-Q1-L1-C4.pep
GRRILDYFIKIFILRAKRDTQMDVLSSATSMRTKKTDAVRISVVHLSIHRSTVSELTVTACEALWVL

SEQ ID NO: 89824 - protein, 98 aa, Gossypium hirsutum
  unsure (1)..(98): unsure at all Xaa locations
  Clone ID: LIB3048-003-Q1-L1-D10.pep
MAATIDFVKARPILHRRRNSTPEVDVKISNGIKAKAATPNVAYTGIYEALENTNGRSDYLGXGVSNAVANANTIIGPALIGKDLTEQTAIDNFMGQHL

SEQ ID NO: 89825 - protein, 114 aa, Gossypium hirsutum
  unsure (1)..(114): unsure at all Xaa locations
  Clone ID: LIB3048-003-Q1-L1-D11.pep
QTYKKKHKQHKKDDGDPNSTVTANGKQDSTQFDDKEKVLVNGKNATEAKYAPVKSLANSELPHNVXDCCQGFSSPSPMQAHTWTFLLHAHDFIGIAKTASGETLAFXVPAMMHV

SEQ ID NO: 89826 - protein, 120 aa, Gossypium hirsutum
  Clone ID: LIB3048-003-Q1-L1-E11.pep
MNRLELGLCLKIEKKAMNSSSSSWVDSLDLNASSTKSLQLETPVSHPNTSNSLIVFGRKLSVKEESGALVEELNRVNAENKKLTEMLKAMCESYNALQSQLVDLMNKNTEKELSPTKKRK

SEQ ID NO: 89827 - protein, 52 aa, Gossypium hirsutum
  unsure (1)..(52): unsure at all Xaa locations
  Clone ID: LIB3048-003-Q1-L1-G10.pep
VTLSCSIYILFPAXADFCPYSIRRESTVWGVYMMAGYLGNDAFTSTCQDKLF

SEQ ID NO: 89828 - protein, 36 aa, Gossypium hirsutum
  Clone ID: LIB3048-003-Q1-L1-G11.pep
SRLTFFWNWSHFADIMTSISVTKVSYSASRANPLVL

SEQ ID NO: 89829 - protein, 38 aa, Gossypium hirsutum
  Clone ID: LIB3048-003-Q1-L1-G2.pep
ELSTKFSWNLVTLVTPIKILLDQRLNVVAMLPRFGCSN

SEQ ID NO: 89830 - protein, 86 aa, Gossypium hirsutum
  Clone ID: LIB3048-003-Q1-L1-G7.pep
SNTRPSLNKQKKNGVTGLPYNLILTDLSCFLRFISCPLSSVLVPRDLQHGLQMQKRLHLFLLAFSLYQQIFDTLAVVSHLNGNIQR

SEQ ID NO: 89831 - protein, 71 aa, Gossypium hirsutum
  Clone ID: LIB3048-004-Q1-L1-A11.pep
LSTAFTCQEFAEAHEKSTLHLEGHRPGPLPLNPHLTWKCNYRLAYGAYYPSDLSDSYTDACTDVLIALTMA

SEQ ID NO: 89832 - protein, 81 aa, Gossypium hirsutum
  unsure (1)..(81): unsure at all Xaa locations
  Clone ID: LIB3048-004-Q1-L1-B11.pep
QLEDGRTLTDDSIQXESSLHLVLRLRSGMQIYVKTLTGKTFTLDEDSSDTIDNVKSKIHDKEGIPPYQQRLILAGKQLEDG

SEQ ID NO: 89833 - protein, 75 aa, Gossypium hirsutum
  unsure (1)..(75): unsure at all Xaa locations
  Clone ID: LIB3048-004-Q1-L1-H10.pep
YQPYPYHATSFLGRGPISPYKPYFSKKPTVPVQHNSLIIPDISQVIEHQELIVNAIWXSCGRSQYPSMLSISRTC

SEQ ID NO: 89834 - protein, 76 aa, Gossypium hirsutum
  Clone ID: LIB3048-005-Q1-L1-A2.pep
TYRIKPAAPSLQMCHLKGPDIQKQLKIVYDPFKLFAKILSLERNISNNYLSSSHYLNYLKSFLTFHYRNNIAGQLL

SEQ ID NO: 89835 - protein, 66 aa, Gossypium hirsutum
  unsure (1)..(66): unsure at all Xaa locations
  Clone ID: LIB3048-005-Q1-L1-B12.pep
RCYFHSIYQNPLAKQFILDQLPKTAILYKLKTFXFISAVHLFPIPFLMYLNLLTLSYNKKRPQPLK

SEQ ID NO: 89836 - protein, 63 aa, Gossypium hirsutum
  Clone ID: LIB3048-005-Q1-L1-B2.pep
FTLNPCREEENKKGVFSWIPNLPIWFFLEIAQEKCHTWGLNNRNQAWFHKLFFKHQLFINLAF

SEQ ID NO: 89837 - protein, 80 aa, Gossypium hirsutum
  unsure (1)..(80): unsure at all Xaa locations
  Clone ID: LIB3048-005-Q1-L1-B4.pep
IPTHPIPYPFFPWRFLTCQPALTTGAGVKVKDQMELPEPGKKIFDSFLNTLRHFNLQTQFRVAGGWVRDKLLGXECYDID

SEQ ID NO: 89838 - protein, 59 aa, Gossypium hirsutum
  Clone ID: LIB3048-005-Q1-L1-D2.pep
LEFNWEKELNLCGEDVATSQCPHSHHHDVIRHCNVRKLLVMVPSSIRLKIRGTPYKYPS

SEQ ID NO: 89839 - protein, 94 aa, Gossypium hirsutum
  Clone ID: LIB3048-005-Q1-L1-F3.pep
RLQKPKKFQLVLQLEYGRWKATKNLPNLFKRKNFQKSFTQRKISPRKKQETVAPTNANSMASFSAQPNTPAGFFGNIPVSSNFKMISKNEDITK

SEQ ID NO: 89840 - protein, 124 aa, Gossypium hirsutum
  Clone ID: LIB3048-005-Q1-L1-F8.pep
LHENQIQFALERGIPSTLGVLGTKRLPYPSRSFELAHCSRCRIDWLQRDGILLLELDRLLRPGGYFAYSSPEAYEQDPENRKIWNAMYSLLKRMCWKVVAKRGQTVMWSKPLSNSCYLKRDPGT

SEQ ID NO: 89841 - protein, 37 aa, Gossypium hirsutum
  Clone ID: LIB3048-005-Q1-L1-G5.pep
QITDPIDMEILPQLLTLRNLDIHYLGPIMEFAVTTLL

SEQ ID NO: 89842 - protein, 45 aa, Gossypium hirsutum
  Clone ID: LIB3048-005-Q1-L1-H3.pep
GVIRYFISFALNGAALDFMTSILFFPITGDLSRSSHSFHCMTDYW

SEQ ID NO: 89843 - protein, 54 aa, Gossypium hirsutum
  Clone ID: LIB3048-006-Q1-L1-B12.pep
RLLDLWMHVYIVNSNILATTDIKNAVCYRKHVTFHERFFFFTVFLKDDEMASLF

SEQ ID NO: 89844 - protein, 53 aa, Gossypium hirsutum
  Clone ID: LIB3048-006-Q1-L1-B2.pep
HAQTRITVFCLRMVSECTIRVLSSSGQSARVLRIHLSSSMSICRYTLGIDRHV

SEQ ID NO: 89845 - protein, 53 aa, Gossypium hirsutum
  Clone ID: LIB3048-006-Q1-L1-B3.pep
PFLSPISYLQDLIPASKRYRCRNSSRRFKLKGCRIWISLSIIWSTGNVDVAQR

SEQ ID NO: 89846 - protein, 58 aa, Gossypium hirsutum
  Clone ID: LIB3048-006-Q1-L1-B7.pep
QLEADQLNVPTGTHGVVYDVDYSITHQQFTIFTLALPVNKLTDYVDQTVTEAQDYYYK

SEQ ID NO: 89847 - protein, 57 aa, Gossypium hirsutum
  Clone ID: LIB3048-006-Q1-L1-C2.pep
LLHSHNKKCLNRNCFKPRDNFQTHYHMTLPEPTVMAKLGLGCYKRPLLKSLTIDALD

SEQ ID NO: 89848 - protein, 50 aa, Gossypium hirsutum
  Clone ID: LIB3048-006-Q1-L1-D10.pep
PTREFKILKVVVEMFMELLLFISVQKLMSRNHLSGLFTSLGQPMKNLEPL

SEQ ID NO: 89849 - protein, 68 aa, Gossypium hirsutum
  Clone ID: LIB3048-006-Q1-L1-E4.pep
RVVSKSKVCSQALQGTKMKWVPDEDVSSGVYMVDLHSAGTLNADIVLKACYINEVTIMLEKALPITRL

SEQ ID NO: 89850 - protein, 112 aa, Gossypium hirsutum
  unsure (1)..(112): unsure at all Xaa locations
  Clone ID: LIB3048-006-Q1-L1-E5.pep
KSLTSTCIKWAPSNLGRFFSFQDILDPTNKLDESLLFKLGGYRRVYTDTLEHETKVAVKIGNPKSEQCLAEFRTXFKILSKLHHLHIVSLIVYCHQISTMIHDYKYIANGPL

SEQ ID NO: 89851 - protein, 124 aa, Gossypium hirsutum
  unsure (1)..(124): unsure at all Xaa locations
  Clone ID: LIB3048-006-Q1-L1-F1.pep
YSSFNGDTAIATQSPPPPPNYRNLISISLPPAASESPLTPAYWCKEEEISKYGIHLLVLSHVYSVPQLKQRCSKGVSQRLTVENAVDVXQLARLCDAPDLYIKCMKYIAXHFKSVEQTRAWNFM

SEQ ID NO: 89852 - protein, 61 aa, Gossypium hirsutum
  Clone ID: LIB3048-006-Q1-L1-F2.pep
AKFALNWILVISECCTNPSKGSMRDDEYSQSLHHSPTRLKDRYVVNMSLSIDVAIDDETQD

SEQ ID NO: 89853 - protein, 51 aa, Gossypium hirsutum
  Clone ID: LIB3048-006-Q1-L1-F4.pep
NIDVARLVYATEYNDIMRKYLVHKFSSVLYSPSTIVCLESAQQQALLRPQF

SEQ ID NO: 89854 - protein, 70 aa, Gossypium hirsutum
  Clone ID: LIB3048-006-Q1-L1-F8.pep
DLVSSFFFFFWGLFIFFFFFFLFSFPSLNFLSALQAFFFHFKHAFLVLLNLLKNFKFKGTIQLRTIKIFI

SEQ ID NO: 89855 - protein, 58 aa, Gossypium hirsutum
  unsure (1)..(58): unsure at all Xaa locations
  Clone ID: LIB3048-006-Q1-L1-H7.pep
IYHDAKAWTKGGAHMYGXLNQHSWPXMYQEHYDPCGSDLKCTYIWADTDFRTKSSYKI

SEQ ID NO: 89856 - protein, 114 aa, Gossypium hirsutum
  Clone ID: LIB3048-007-Q1-L1-A9.pep
PEQILTLCNAEEDVKKKVHAIIDKFADRGLRSLGVARQQVPEKSKDGAGTPWQLDGLLPLVDPPRHDSAETIRRALNLGVNVKMITGDQLAIAKETGRRLGMGTNMYPSASLLG

SEQ ID NO: 89857 - protein, 95 aa, Gossypium hirsutum
  unsure (1)..(95): unsure at all Xaa locations
  Clone ID: LIB3048-007-Q1-L1-B3.pep
STYSARDYSLLYRYSIYTSQIQMFANTLTDTTMTLKIXSLDTNTNVKVIIQHNACITTYQQHLIFARXHLDDDLTLADYTIPDASTLHLVPRIHG

SEQ ID NO: 89858 - protein, 82 aa, Gossypium hirsutum
  Clone ID: LIB3048-007-Q1-L1-C2.pep
KTVHASFKIGPRSALRKNKFSSHQACTKAAFKRPITATPGHLDDKNEKKKKPGSKVPQSAVVSLCSKHISRGGTPFHYLFVH

SEQ ID NO: 89859 - protein, 29 aa, Gossypium hirsutum
  Clone ID: LIB3048-007-Q1-L1-E12.pep
LIILWKKHHPHLFIIHNQISQISFIIHQI

SEQ ID NO: 89860 - protein, 106 aa, Gossypium hirsutum
  Clone ID: LIB3048-007-Q1-L1-G12.pep
PVVRIATVAAGGRHTLALSDTGQVWGWGYGGEGQLGLGSRIRMVSSPDPIPCIEPSSLGKDRASALSRGSLSSYRQNFRVPGSYVKGIVCGGRHSAVITDAGALLT

SEQ ID NO: 89861 - protein, 95 aa, Gossypium hirsutum
  Clone ID: LIB3048-007-Q1-L1-G6.pep
LHYLIPANQALKSHGMDCRWNTVQSGRDRISNYHRQTDFKFCAIHFNLTCNLMSIRKLTQDLNCVTNFFPTHCEFQDLESGRMIDNPKKCVGLYL

SEQ ID NO: 89862 - protein, 71 aa, Gossypium hirsutum
  Clone ID: LIB3048-007-Q1-L1-H5.pep
TICVLSYDIYVIRLRKQCKTGLIAILQKSNVYLSRSKTESTNDDQNLLCLTGHTNSDSAPYLQHHILMLKD

SEQ ID NO: 89863 - protein, 109 aa, Gossypium hirsutum
  Clone ID: LIB3048-008-Q1-L1-A11.pep
MGNCTSSCFIQVSDMAKVIDAQGKLRKVKLPVKAAELMLDEPGHVISSVEELKLTRRVVPMRAEDELLAAKAYVLVPIQRVNRKVTDVDVAIIEAACSGKKRAKSGAKV

SEQ ID NO: 89864 - protein, 39 aa, Gossypium hirsutum
  Clone ID: LIB3048-008-Q1-L1-A9.pep
LVDPNAEIILHKPFFKYHFNSFTYLYSGKLRQTISTLTY

SEQ ID NO: 89865 - protein, 66 aa, Gossypium hirsutum
  Clone ID: LIB3048-008-Q1-L1-B5.pep
YQSNRYPQPHMATLHPILPIVSPITIHCPSFYNVATDKHPCYPILIHLHHIRTLETYLIANKPSSN

SEQ ID NO: 89866 - protein, 59 aa, Gossypium hirsutum
  Clone ID: LIB3048-008-Q1-L1-C5.pep
FTRLIITKSILWEPGSFSLLFIYTSHSTFHISTTTTLIIPHHNPSNSSSISFISHHLAN

SEQ ID NO: 89867 - protein, 40 aa, Gossypium hirsutum
  Clone ID: LIB3048-008-Q1-L1-C7.pep
LDYHYLNHPIGYLLILMPGTTFLFLHNAFLNPTYPSRYIP

SEQ ID NO: 89868 - protein, 127 aa, Gossypium hirsutum
  Clone ID: LIB3048-008-Q1-L1-E6.pep
QDSLGGNNRTVMIACISPADINAEETLNTLKYANRARNIQNKPVVNRDPMSNKMLKMRQQLQYLQAELCARGGSDEVQVLKERIAWLEATNEDLCQKLHEYRKKCNITEQCEIDSRNFDEEAAKEWE

SEQ ID NO: 89869 - protein, 34 aa, Gossypium hirsutum
  Clone ID: LIB3048-008-Q1-L1-G4.pep
MQRCDRTSYSRILVNLEGCFRGGSMLVIVLVGVC

SEQ ID NO: 89870 - protein, 65 aa, Gossypium hirsutum
  unsure (1)..(65): unsure at all Xaa locations
  Clone ID: LIB3048-008-Q1-L1-G8.pep
SQSSPFIPXRMKNLHHIYVMSPIINXRIGAFGFNVKLALIXGSLEISLPFQMVLKLIGXXLNGMA

SEQ ID NO: 89871 - protein, 112 aa, Gossypium hirsutum
  unsure (1)..(112): unsure at all Xaa locations
  Clone ID: LIB3048-009-Q1-L1-A3.pep
SVPLASVSGRLPPXSXXPLCFPFGXXLXXXVLPXXSSPXXPLLAXWVCPRLRXRXAXXCLXXSXVCPPLXSAFSSXRPXSSXLALVLXXSAVARAVFLPPGGXXRSXAAAXA

SEQ ID NO: 89872 - protein, 117 aa, Gossypium hirsutum
  unsure (1)..(117): unsure at all Xaa locations
  Clone ID: LIB3048-009-Q1-L1-A4.pep
ETRTTKPTAGEGXANPRGKQREQAQKRHPPTGKTXENXAQRGGETRQEQEQXAXEXHRKAXXATXXGKSKXETXPGATKKXEPKTGDEKXXTSXXDEGNRANTXGAERGKPKPGGKK

SEQ ID NO: 89873 - protein, 77 aa, Gossypium hirsutum
  unsure (1)..(77): unsure at all Xaa locations
  Clone ID: LIB3048-009-Q1-L1-A5.pep
QXEEGRTGXEDKXQKETTXHQGQRXRGGRQSXGKXRXGKTRTXEGERTXTREKGKAKKQDKEGDPPDQQRRXXXGKQ

SEQ ID NO: 89874 - protein, 84 aa, Gossypium hirsutum
  unsure (1)..(84): unsure at all Xaa locations
  Clone ID: LIB3048-009-Q1-L1-B4.pep
LXFXSXRSXXXLXFLXALLAGFGFCXSSXLLFFPGFPCGFVXXPLPXXCGGFXFCXRPRLPRSLVVXRXPCCLXLXLXSWXFFF

SEQ ID NO: 89875 - protein, 81 aa, Gossypium hirsutum
  unsure (1)..(81): unsure at all Xaa locations
  Clone ID: LIB3048-009-Q1-L1-C2.pep
LXRVXXPXXXFLXGRXFVSLPVXAAXSGLXRPLPVXVPWVCSLRVRSWSWAPLXALXVXCRSPRLLRCPSLSLSPSPFGCA

SEQ ID NO: 89876 - protein, 90 aa, Gossypium hirsutum
  unsure (1)..(90): unsure at all Xaa locations
  Clone ID: LIB3048-009-Q1-L1-C6.pep
SLGPXCLLPFFLGSSRGVLPXGCLFLPSLPLSLAXXLXLVLLFCCRAFSALPSGWPVXPLLPRRRFXCFFARAAFLRLGGPPRSXAAAXA

SEQ ID NO: 89877 - protein, 99 aa, Gossypium hirsutum
  unsure (1)..(99): unsure at all Xaa locations
  Clone ID: LIB3048-009-Q1-L1-D1.pep
GATQTRQGRDXKPRTXQRRRGANKQTEAXSXKPTGGXRGKTRPEGEXXPERRXTGTSEGGEDEAPHGKEPKXQARKEQREEPAGRPRPDRXAPREKEPG

SEQ ID NO: 89878 - protein, 88 aa, Gossypium hirsutum
  unsure (1)..(88): unsure at all Xaa locations
  Clone ID: LIB3048-009-Q1-L1-E1.pep
PKXXAEKGGAXXXQAXXKXEDXEKEXNTXARRXXEXEXXQXPERXKXXQDXNRXAKAXKPXXDXAXXXKXDXXEXXPEEXETEXKEAA

SEQ ID NO: 89879 - protein, 49 aa, Gossypium hirsutum
  Clone ID: LIB3048-009-Q1-L1-E11.pep
KENFLDLESAIIDIEMFLHLRNHDTGLNRSVLILNYFNYPYHMCNSLFK

SEQ ID NO: 89880 - protein, 71 aa, Gossypium hirsutum
  Clone ID: LIB3048-009-Q1-L1-F1.pep
MMKIRIEITLCLVLFLVLAPFCICSGERLLVGMTLVRNATAHGAVWLDGSLPAYHLYRRFGAGSNNWILQF

SEQ ID NO: 89881 - protein, 113 aa, Gossypium hirsutum
  unsure (1)..(113): unsure at all Xaa locations
  Clone ID: LIB3048-009-Q1-L1-F6.pep
GFPLSXRACFSSAVGGLVVAPAWRCWPGSLFFVRSGGAFRRLSLPFSSLSXCGCCSSVRSLGALFVVPSPGLPXPALXSRSSPPPVVSVCFPASRAAFLRPGGAPGSXAAAXA

SEQ ID NO: 89882 - protein, 116 aa, Gossypium hirsutum
  unsure (1)..(116): unsure at all Xaa locations
  Clone ID: LIB3048-009-Q1-L1-F7.pep
ANALXALPAIDRATMGNESSTSYMSRHMYEIAREIASLIGDYLWLKPGTTVYEESDRISDLDIVTFNLNSRNPTPNTGGIIQMAATLSFSTSKPVHYYTEISIAVPVRTIPMQFLN

SEQ ID NO: 89883 - protein, 111 aa, Gossypium hirsutum
  unsure (1)..(111): unsure at all Xaa locations
  Clone ID: LIB3048-009-Q1-L1-G2.pep
TPGRQESGTSRTRRPEGAQNEEATEXQTNQXPXPRSHGSXXEAXDXAAEKADHEQPTEAEKTNXAXEPXXRXAKXDPRHGKDXXXSXKHRGESGPKXGKAAXATXKTKRTN

SEQ ID NO: 89884 - protein, 74 aa, Gossypium hirsutum
  unsure (1)..(74): unsure at all Xaa locations
  Clone ID: LIB3048-009-Q1-L1-G7.pep
VVVVCVGLRARVWLFSRRRRVGCRRALPVSAVVPPRFVLAGLVSRGAVLLARXRRSXXPLLRSXLWCPASVLGX

SEQ ID NO: 89885 - protein, 63 aa, Gossypium hirsutum
  Clone ID: LIB3048-010-Q1-L1-A6.pep
ITSSRHKNANALTWIHKKSICAYNLSLTGPEIRSVITHIVYPKTLNQRPHAVSLKSKGFKDTL

SEQ ID NO: 89886 - protein, 128 aa, Gossypium hirsutum
  Clone ID: LIB3048-010-Q1-L1-D7.pep
MVAKIGEKPSIKSLLGRIFCERRKCSSLPSTNQDSVKDRWDNNVEELGNYFQQLLSLNLDEEIDMLQANPMESDTPESINSNMNDEEKMEAVQCKIDEAHEAIILKKKETKADVERHAKAKSAIDLCN

SEQ ID NO: 89887 - protein, 46 aa, Gossypium hirsutum
  Clone ID: LIB3048-010-Q1-L1-E4.pep
RGLFTFRLAEQKTVNKDELLQMVRFGAEMVFSSKDSTITDEDIDRI

SEQ ID NO: 89888 - protein, 103 aa, Gossypium hirsutum
  unsure (1)..(103): unsure at all Xaa locations
  Clone ID: LIB3048-010-Q1-L1-E7.pep
QLMAANEARLVDILCYLLHLGQXLLMTLKRTNNFXSIITEAVQMLEADIRAVTWIPAMICIWILNRLASGPEERKLSDVEIQIQLKVLADVYSRSFASPTYPS

SEQ ID NO: 89889 - protein, 119 aa, Gossypium hirsutum
  Clone ID: LIB3048-011-Q1-L1-A12.pep
GRFHWDFCHCLLSLRSSSGSDASCQKRKKGRPPGTGKKQQLATLGEWMNSSAVLAFAPHVVTAGIGEDIVAKMLSFSQHRPIAVCILSGSGTVSSVTLRQPASSTPTVTYENGSLKCRT

SEQ ID NO: 89890 - protein, 135 aa, Gossypium hirsutum
  unsure (1)..(135): unsure at all Xaa locations
  Clone ID: LIB3048-011-Q1-L1-A8.pep
RFFNWNVTYGDIYALGVRQQGILINGQFPGPDLYSVTNDNLIINVYNNLDEPFLLSWNGMQQRRNSYEDGVYGTTCPIPPGKNFTYILQAKDQIGTFYYXPSLXXHKACCGFGGIRILNRPKIPVPFPDPAGDFT

SEQ ID NO: 89891 - protein, 63 aa, Gossypium hirsutum
  Clone ID: LIB3048-011-Q1-L1-B12.pep
IQHETRSKMPQMTGPSRQARMERGAMLVIKGGSIAIKAKVTMETTYRCQNLSKTASNAAFLRP

SEQ ID NO: 89892 - protein, 114 aa, Gossypium hirsutum
  Clone ID: LIB3048-011-Q1-L1-C2.pep
SLSLITIFFLLFCALIVANATVPPSRTFKYINEGETGELSVEYFADYRALPIFLLPFQLCFYNTTPNAFTLRLRMGSRRSESLMRWVWDANRRRPILENATLTFGSNGNLVLAD

SEQ ID NO: 89893 - protein, 135 aa, Gossypium hirsutum
  unsure (1)..(135): unsure at all Xaa locations
  Clone ID: LIB3048-011-Q1-L1-D11.pep
NIQFKTIWQAPTSESKMPPLESFKLTXNMVGERANDNVIIVTFGNFXLMDFILTWAKHLTDLDVSNLLVGAMVTKLLYALYWKGASVFDMGSHMSTLDVLWGSATFHKMAREKVLLINAILTSGYELSMCDTDMV

SEQ ID NO: 89894 - protein, 55 aa, Gossypium hirsutum
  unsure (1)..(55): unsure at all Xaa locations
  Clone ID: LIB3048-011-Q1-L1-D4.pep
LLXDQXLVPYFYFXXLLSFQGLFHFLKTRXLPPNLXSSGLEIHFFIXSLFQKGPT

SEQ ID NO: 89895 - protein, 84 aa, Gossypium hirsutum
  Clone ID: LIB3048-011-Q1-L1-D9.pep
IGLVQLGGPCCYVNLVRRDSKTDLSSASNSGVIPSPTDNLSQLINIIQALGFSAKDMDAVSDIIDHSFLPCTALLYYIYTSVIS

SEQ ID NO: 89896 - protein, 100 aa, Gossypium hirsutum
  Clone ID: LIB3048-011-Q1-L1-E1.pep
YTLHLVLRLRGGMQIFVKTLTEKTITLEVESSDTIDNVKARIQAKECIPADHQMLIFAVKHLEDWRTLADYNIQKESTLYLALRLSYVMQIVLKTLTGKT

SEQ ID NO: 89897 - protein, 52 aa, Gossypium hirsutum
  Clone ID: LIB3048-011-Q1-L1-E5.pep
TLLFLNSHCKNLANASYKLNHHAFLQKPHFKIPSSHSHLCPTILFFRKHQCI

SEQ ID NO: 89898 - protein, 138 aa, Gossypium hirsutum
  Clone ID: LIB3048-011-Q1-L1-F11.pep
GMLHCEILDVLCRQELDIALEEKPDKMDDKEWAKINRQACGTIRLCLAKEQKYSVMRETSAKKLWDTLEEKFLTKSLENRLYMKKKLFRFTYAPGMSMNDHVNSFNKILADLLNLDEKFEDENIALLLLNSLPDEYDH

SEQ ID NO: 89899 - protein, 53 aa, Gossypium hirsutum
  Clone ID: LIB3048-011-Q1-L1-F12.pep
PSHYYNSTPEPIFLFLCPSIAPFLLLALLFYPLKDLISYHNLLLTSFSYYPNI

SEQ ID NO: 89900 - protein, 135 aa, Gossypium hirsutum
  unsure (1)..(135): unsure at all Xaa locations
  Clone ID: LIB3048-011-Q1-L1-F7.pep
ISCLQHPNLVKLYGCCIEGNQLLLVYEYLENNSLSRALFGPEYSRINLDWPTRQKICVGIAKGIAFLHEESRLKIVHRDIKGTNVLLDRDLNPKISDFXLAKLSDEDKTHISTRIAGTIXYIAPEYALWGYLTYK

SEQ ID NO: 89901 - protein, 37 aa, Gossypium hirsutum
  unsure (1)..(37): unsure at all Xaa locations
  Clone ID: LIB3048-011-Q1-L1-H1.pep
FRSPLVVVXXSDLQYRAHNMNWCHSLSIYGMAFMPSE

SEQ ID NO: 89902 - protein, 83 aa, Gossypium hirsutum
  unsure (1)..(83): unsure at all Xaa locations
  Clone ID: LIB3048-011-Q1-L1-H10.pep
MMRRQEENHRHQDQQSRVFHELSALVLNLIRSPSIPFADESPVPGWRSHPQYLSTTTISXAGYAWLMLGISVSLMLCGSVTFF

SEQ ID NO: 89903 - protein, 68 aa, Gossypium hirsutum
  Clone ID: LIB3048-011-Q1-L1-H8.pep
LVKLKYVIQVMPTKRARQLKNVVVKLTYVIQVLQKISGLIMSPDSELKYFTTLINEISTAKCNISKPS

SEQ ID NO: 89904 - protein, 43 aa, Gossypium hirsutum
  Clone ID: LIB3048-012-Q1-L1-A3.pep
CFIFIIHTSNKVFQSFSNLYLFLMSSQWPNHNNIIARKTITLL

SEQ ID NO: 89905 - protein, 86 aa, Gossypium hirsutum
  unsure (1)..(86): unsure at all Xaa locations
  Clone ID: LIB3048-012-Q1-L1-A4.pep
HEHYADTPQTVIQEELEEAQGLLKTTNFTRQSKEARLARVCAGLSSRLQXYQSENAHLEELLIAERELSKSYEARIKHLQHDLSAS

SEQ ID NO: 89906 - protein, 52 aa, Gossypium hirsutum
  Clone ID: LIB3048-012-Q1-L1-A6.pep
LRELCRYDGRIVVGKHFEEWIQQYLGIVLGDDSECHISVWGHLRSSLKVSRR

SEQ ID NO: 89907 - protein, 132 aa, Gossypium hirsutum
  Clone ID: LIB3048-012-Q1-L1-A9.pep
VIKFFETYHKEEYKVYNLCSERLYDASLLEGKVASFPFDDHNCPPIQLIISFCRSAYSWLKEDIENVVVVHCKAGMARTGLMISSLLLYLKFLPTAEESIDYYNQKRCVDGNGLVMPSQIRYVKYFERTLTY

SEQ ID NO: 89908 - protein, 83 aa, Gossypium hirsutum
  Clone ID: LIB3048-012-Q1-L1-B4.pep
FKSIPFPSPFSLTSNTNIENKKNIFVPSITNPSPYHHYHYHQPTSTTTTAAFSYHFHLILTTISIHFVLSSVILSLLISVSYY

SEQ ID NO: 89909 - protein, 39 aa, Gossypium hirsutum
  Clone ID: LIB3048-012-Q1-L1-C4.pep
TFTSTTSNSSFPYPGSRVSFNLLKNYLSILKLIINIYLT

SEQ ID NO: 89910 - protein, 71 aa, Gossypium hirsutum
  Clone ID: LIB3048-012-Q1-L1-G1.pep
RLRITNVLIANSCLKEHPSSTIFLKVMNFTGSTHIHLTAVLQLKGYAIRVQVPTNKLYNPIGNFYTQRIHH

SEQ ID NO: 89911 - protein, 75 aa, Gossypium hirsutum
  Clone ID: LIB3048-013-Q1-L1-A10.pep
SHIKFLSYRTQIPSFSAYMKLLDSDTKNGSYPGCMGPFTGRNPNLKNPECLKHNAPQGHMFYQVKQSFSRLKLNT

SEQ ID NO: 89912 - protein, 71 aa, Gossypium hirsutum
  Clone ID: LIB3048-013-Q1-L1-A12.pep
FNLYMSTLFSIGTLLHLMGLATLSHHNVPTATAVLAVYTLHPTILLSNYSTEYDNLHWQNRSSQSSCFGIY

SEQ ID NO: 89913 - protein, 55 aa, Gossypium hirsutum
  Clone ID: LIB3048-013-Q1-L1-A4.pep
NENMLAVLSWGPYLPISPFPWVQDTIAVYVIMNFVCILIIKACRLFPRVRSVETC

SEQ ID NO: 89914 - protein, 49 aa, Gossypium hirsutum
  Clone ID: LIB3048-013-Q1-L1-A5.pep
WVDGVFDDIITPSLDYQHHDIELAKGYPFPLDKQAHHKPFPEQRPSIHS

SEQ ID NO: 89915 - protein, 127 aa, Gossypium hirsutum
  Clone ID: LIB3048-013-Q1-L1-A8.pep
MALSTMIHTHLPPALSGGGMNRISAVFVHQGVASDTKLNRGARRLAESLTTLLNLNIEPLCSRKNLQYSNWDSFDDEKHNTPTTSPKEMIADKWRELHGSSDWEKLLDPLHPWLRREIVKYGEFAQA

SEQ ID NO: 89916 - protein, 92 aa, Gossypium hirsutum
  unsure (1)..(92): unsure at all Xaa locations
  Clone ID: LIB3048-013-Q1-L1-B2.pep
KLFLLKLELINDWVLVKEESVANHKRLTPHEEKAPEDRSKVDYFTGSPISVXNSEELITENHSIASSTFEPEYYLVTLSLTYNDHIMHCMCY

SEQ ID NO: 89917 - protein, 83 aa, Gossypium hirsutum
  Clone ID: LIB3048-013-Q1-L1-B7.pep
FDAGLNTLLQGLLGSRLNADIGSLYTFAPTAITIILADRVNDRSDPIERFKRILQSNQGALIATYTLKIVLDLTSLCRNVSKI

SEQ ID NO: 89918 - protein, 49 aa, Gossypium hirsutum
  Clone ID: LIB3048-013-Q1-L1-C4.pep
HRVFTFDGSQLLVGMRICLQTAHKPTSENDCDIATTRHFKHYIRINVPF

SEQ ID NO: 89919 - protein, 69 aa, Gossypium hirsutum
  Clone ID: LIB3048-013-Q1-L1-D9.pep
FNNESSIWLINNFSFSLRIYLNSSMSEDFRSLYLLPLLSEVCAVDLRRLCLTKWLSNVRHTKERLQHTN

SEQ ID NO: 89920 - protein, 139 aa, Gossypium hirsutum
  unsure (1)..(139): unsure at all Xaa locations
  Clone ID: LIB3048-013-Q1-L1-F1.pep
ESTHDDIIGNVEDCSSKEHALENTHESALPTTEDVSSVATEIADDAGSKISPDVDKKENEVLSDISEGISREELSRIVASRWTGESTKNQGGNKDHADDSHEETPKDTHDEPYDHHATDXCVDTGKDDXEKYDYEIDDE

SEQ ID NO: 89921 - protein, 74 aa, Gossypium hirsutum
  Clone ID: LIB3048-013-Q1-L1-F8.pep
NASNIECPGLCPTIACTVCSMARIHVELEKIASYRHIHVACSIKSMAVDIYSYNDDWILRGGYCACCSRTKFEP

SEQ ID NO: 89922 - protein, 55 aa, Gossypium hirsutum
  Clone ID: LIB3048-013-Q1-L1-G11.pep
FMPQAKHDHHYEIFPCSVTYILNSCNIFNNHPYPLGLYKFKGFSRFDLGETKLYQ

SEQ ID NO: 89923 - protein, 104 aa, Gossypium hirsutum
  Clone ID: LIB3048-013-Q1-L1-G12.pep
LTSFLELNLPKGIERNMSMFSLGVAEPKLGSHIFDTTKISCQSVEFALDLLRGVQLPFDKSIIDLISGHSTKAQIGLAHSYRSSHAKLNVNQLVNLAIQAIFPT

SEQ ID NO: 89924 - protein, 52 aa, Gossypium hirsutum
  Clone ID: LIB3048-013-Q1-L1-H12.pep
FYWDYLFESAELLPKRFKNNIDYTTGILQKVQASNQTSWLAFSSSLERSHSL

SEQ ID NO: 89925 - protein, 65 aa, Gossypium hirsutum
  Clone ID: LIB3048-013-Q1-L1-H2.pep
FLETISYLYIKAATTAYVHNQLLITILIVTNTIDFVAYIKHCVSCSTCCKEHARHVRIYRTFGST

SEQ ID NO: 89926 - protein, 132 aa, Gossypium hirsutum
  Clone ID: LIB3048-013-Q1-L1-H3.pep
MKSKIESKIFPLDPNGIYLVLTAKDVTVERFCMASCGFHDSILVGGSTRVVFAHVGDPTVQCPGLCAWPYALPAYGPPGPALVAPNGIGTDGMIINIATLLAGATTNPFKTGYFQRDALAPLEAVTACPGIF

SEQ ID NO: 89927 - protein, 49 aa, Gossypium hirsutum
  Clone ID: LIB3048-014-Q1-L1-A5.pep
EILAGGHLGYEEVRGVLKDVLALKFEDGESTGVSESLRSAFLIGQRMNR

SEQ ID NO: 89928 - protein, 117 aa, Gossypium hirsutum
  Clone ID: LIB3048-014-Q1-L1-A9.pep
EYEFLSDIGMTSGNVPCSVNGILKGSAPVLPTVNSANNQKIAVVNQALMQQYEERIQVSYETLNIWLLVIHPNKMDINRQICDALKAKLQHLEPLATVETVQDLPEGIGEVQEIIDM

SEQ ID NO: 89929 - protein, 97 aa, Gossypium hirsutum
  Clone ID: LIB3048-014-Q1-L1-B1.pep
VYGSVIVMLVFLPVGLAMRMVPSILPLDISGSDPYTEIPDDMLIFQICMPFADEHFKLRATIMSCLCYWFSAVEWALGLTDFLLPILCENGGHDNVN

SEQ ID NO: 89930 - protein, 46 aa, Gossypium hirsutum
  Clone ID: LIB3048-014-Q1-L1-B10.pep
NNSDWVSMMIKLQPYELIMICIGRGITSGLVERKYVLFNSLIQSDR

SEQ ID NO: 89931 - protein, 56 aa, Gossypium hirsutum
  Clone ID: LIB3048-014-Q1-L1-B7.pep
LTATSDAQVMKGLLMKQQTGRFCSAYLFINNEIDGLPRDTPGHVLVRWRVRASLVR

SEQ ID NO: 89932 - protein, 58 aa, Gossypium hirsutum
  Clone ID: LIB3048-014-Q1-L1-C9.pep
MDLPPPVDFVMLPNVHPNSRGDAAAASLNFIAPISFTRILKQQSAICIACDRPKLSRR

SEQ ID NO: 89933 - protein, 64 aa, Gossypium hirsutum
  unsure (1)..(64): unsure at all Xaa locations
  Clone ID: LIB3048-014-Q1-L1-D10.pep
KGKRGEKEYDLVMAPSDVEHSSGYESDXSECSIGWKEPHGPGFHGEDDDDGFAVLVPCYRPGCK

SEQ ID NO: 89934 - protein, 103 aa, Gossypium hirsutum
  unsure (1)..(103): unsure at all Xaa locations
  Clone ID: LIB3048-014-Q1-L1-D6.pep
GRCKLQHETFIPIVKEFVEALGGFSITDLFPSIKLLPMISGMRAKLERCHHDLDMMLESIIEEHRASNANLGNSDDETDDLLDVLLNLQDHGXLKFPLTTDNI

SEQ ID NO: 89935 - protein, 56 aa, Gossypium hirsutum
  Clone ID: LIB3048-014-Q1-L1-E8.pep
VYGSLIAMLVCLPVRLAMRMVPYTLPLDISVSDPYTAIPADMLLVQISLPFACEHF

SEQ ID NO: 89936 - protein, 47 aa, Gossypium hirsutum
  Clone ID: LIB3048-014-Q1-L1-F8.pep
NSCLKHNKKVIRDEHCRSGYSMQSCDGMLGLEATIYRLSGSGSTLKT

SEQ ID NO: 89937 - protein, 117 aa, Gossypium hirsutum
  Clone ID: LIB3048-014-Q1-L1-G12.pep
WSPTGGPDLMGGDCVHATLLNHVCVNSDDVHEKTGQMTDPALTDYAEFQIVLTIIRYTLRASPTTYSTMKVRSQACSAETTTDANRLYPMQARGTWSVPDINVNDSVTNSKIDNLNG

SEQ ID NO: 89938 - protein, 36 aa, Gossypium hirsutum
  Clone ID: LIB3048-014-Q1-L1-H10.pep
TLFTPFYTPTELLSILSLIYPCLSSLTITTLLSFFL

SEQ ID NO: 89939 - protein, 91 aa, Gossypium hirsutum
  Clone ID: LIB3048-014-Q1-L1-H11.pep
LSYYYLTTCLLDWPTSPHFSIFTYLTSKLSARYLPTSLLQLVCKPPYIHVITNTHLFIHQSETLNNLQTFHVSRNLIQCLRTITSYFNAEY

SEQ ID NO: 89940 - protein, 126 aa, Gossypium hirsutum
  unsure (1)..(126): unsure at all Xaa locations
  Clone ID: LIB3048-015-Q1-L1-A2.pep
MSSSSSSVICSVVIILAVFFNSLLLCNGGKTSIYVRKEEKTVDMPLHSDVFQAPLGYNAPQQVHITXGDHVGKAVIVSWVTQDEPGSNTVVYWTESSTEKMKALGKISTYKYYNYTFGFIHHCTVK

SEQ ID NO: 89941 - protein, 60 aa, Gossypium hirsutum
  Clone ID: LIB3048-015-Q1-L1-A4.pep
HTNDEQLCIAITSLYQEHYCHERRLMKDSFKWLLGIRKTDYTTMCYTQMTVLLIDHTVAL

SEQ ID NO: 89942 - protein, 107 aa, Gossypium hirsutum
  Clone ID: LIB3048-015-Q1-L1-B10.pep
PAVAVAIAIAIAIAGTLSFLPFSRVFALLINIYSLSSSSSPALILSSSVKQTHILSLFWDLVEISIISSGFSSKLVPTLFFPLSFSLVLVGYLKLEKNQKNELRKVY

SEQ ID NO: 89943 - protein, 48 aa, Gossypium hirsutum
  Clone ID: LIB3048-015-Q1-L1-C6.pep
VHSDLPSQIQVQGLNAKARELVEGQSESVSVFENLAGAITSSNFDVLV

SEQ ID NO: 89944 - protein, 40 aa, Gossypium hirsutum
  Clone ID: LIB3048-015-Q1-L1-C7.pep
SINYALSRCLALRRGINYIVFADNKYDKPLAIYIVRPVRL

SEQ ID NO: 89945 - protein, 51 aa, Gossypium hirsutum
  Clone ID: LIB3048-015-Q1-L1-D12.pep
TFLISYKLFLSLRTLHSTKICHHHLLDLLYSLFKFSQPSFTNHYASSDSTF

SEQ ID NO: 89946 - protein, 64 aa, Gossypium hirsutum
  Clone ID: LIB3048-015-Q1-L1-E12.pep
NKGGSSIRKVEIDENKVISLARNVNHDIWLVFIKIHVLKIIAYFHMDRESWLGISSFKLNSLVN

SEQ ID NO: 89947 - protein, 52 aa, Gossypium hirsutum
  Clone ID: LIB3048-015-Q1-L1-E2.pep
SRAELAIGAMIAIIIGNVFVLFPEVIAEVVNVGGETEPVSVVRVIKSGKVQV

SEQ ID NO: 89948 - protein, 97 aa, Gossypium hirsutum
  Clone ID: LIB3048-015-Q1-L1-E3.pep
VTGLSTEQRKRLTIAGELVANPSIIFMDEPTSGLDARAAAIVMRTVRNTVDTGRTVVCTIHQPSIDIFEAFDELLLMKRGSQVIYSGPLCLNSHKII

SEQ ID NO: 89949 - protein, 102 aa, Gossypium hirsutum
  Clone ID: LIB3048-015-Q1-L1-E8.pep
DGLASYDDSEFIEAGPIKKDMGYLFEFIACYVACGRAKIPKTVLNQILEYLTSINDRSTKGSTMNTGRSQRREKPLLALLEVVPETEWDPSYVLQLCENACF

SEQ ID NO: 89950 - protein, 104 aa, Gossypium hirsutum
  Clone ID: LIB3048-015-Q1-L1-F1.pep
MLAGCSSSTLLSPRDRLRSETSAVQFQACHFQTSMSTQRLDLPCNFSRKETSKSQTIRPAVESKAKTSSCSIKQNTRLPPLTTTSANPFEGRIEIKGKKFEEVC

SEQ ID NO: 89951 - protein, 77 aa, Gossypium hirsutum
  unsure (1)..(77): unsure at all Xaa locations
  Clone ID: LIB3048-015-Q1-L1-F8.pep
LCKGDVEQWFYFIPRQEREARGGRASRTTASGYWKATXSYGYVYSSDDRLDRMKKTMVFYXGKSPNWKETQWEMDEF

SEQ ID NO: 89952 - protein, 132 aa, Gossypium hirsutum
  Clone ID: LIB3048-015-Q1-L1-G1.pep
LSEKVSHVFAISSDARFHHVDDDRLARFKGHVLLYQWLEESLAAGEKVSEDFYILKVDPEGFDIFDKSLKAKLANKNSSSYDEHSHCKRIKSSHEEKKTNEEKKGDIETNSVSWASNTEPHFPSSLTNSPEI

SEQ ID NO: 89953 - protein, 51 aa, Gossypium hirsutum
  Clone ID: LIB3048-015-Q1-L1-G2.pep
QMEFLQWECTVMFFLTLLLFLLLLLLSAFTFFFVLRLNIHTTHVIIYMKKI

SEQ ID NO: 89954 - protein, 60 aa, Gossypium hirsutum
  Clone ID: LIB3048-015-Q1-L1-G3.pep
AYQLFDDLPLKASSFLPNSVLFCQQRQTPYSKWRCICLERPLHTHRLGILGSLLGCVVSA

SEQ ID NO: 89955 - protein, 146 aa, Gossypium hirsutum
  Clone ID: LIB3048-015-Q1-L1-G6.pep
KREKYSDLGNNCSDGSYIDQRVNVSNSGDLTSVRRNADSAAYYSCSSSTSVPCGPCSSKRRVDCNGSDFITECDFDFPPLPITDLLEKNEDEKEFDANEEVFSAQYKLMFEDDHMHRFQINNNADLIMESNVSCSLSKNVSCRYNS

SEQ ID NO: 89956 - protein, 97 aa, Gossypium hirsutum
  Clone ID: LIB3048-015-Q1-L1-G9.pep
ANSRIGSDYSVNSGGVTGDFSVRSAYKLLQETSLDPNTFISHVKIKNFYRKLWKLYIPLKILIQYGKSYGTLFRPLLNSNLKKIFVETQFPKGRQNV

SEQ ID NO: 89957 - protein, 56 aa, Gossypium hirsutum
  Clone ID: LIB3048-015-Q1-L1-H1.pep
IDASGGVSSEKFGYIFVYIWIFVNGISLNIIKLTKLIERGIGLQRPQPHVRRMNNS

SEQ ID NO: 89958 - protein, 70 aa, Gossypium hirsutum
  Clone ID: LIB3048-015-Q1-L1-H2.pep
KTLTLKNTQKFLKGRTNRSTKKGRLGIISKKNSGIYLGTYPIREKPNTTVQLKIMTGIFFSCETRFWIER

SEQ ID NO: 89959 - protein, 64 aa, Gossypium hirsutum
  Clone ID: LIB3048-015-Q1-L1-H4.pep
EQRAYYSRVFFFIFWGGNLYYINKKDSYIELKQIKKKKYKGKELPKDHTNLFDTTNFFLILFLI

SEQ ID NO: 89960 - protein, 79 aa, Gossypium hirsutum
  Clone ID: LIB3048-015-Q1-L1-H8.pep
GPGWGIRTRPHLYLALIPLFSLCYNPNPTSPTTYFPSASSIFYLNFPRFLSLFPLICDFNLQDLTWKDGKSNQNPKMPN

SEQ ID NO: 89961 - protein, 126 aa, Gossypium hirsutum
  Clone ID: LIB3048-016-Q1-L1-A10.pep
EMMSLNQQKRIEELEAQLGEAEDIVRDLRAELREVQDELEKLTKNSMQCSSEQKSRHDGACSEEMSNGKTINDFRSGKSSLVDAQTDIGTVSDIKNSCPSGTNVGIKCSCKDNCYVCNPDFASIVM

SEQ ID NO: 89962 - protein, 51 aa, Gossypium hirsutum
  Clone ID: LIB3048-016-Q1-L1-B10.pep
NYINSTPYQFHSLIPPYISNCMIFLIYYPPTILTTITNYPFTIPLLLFTTT

SEQ ID NO: 89963 - protein, 79 aa, Gossypium hirsutum
  Clone ID: LIB3048-016-Q1-L1-B3.pep
LLSNDFLRECVEEFSVPSRGFEANSRIFPQKHLNIVDPLRENNNLGRSVSKGNFYRIRSAFTYGARKLGQILYQSEETL

SEQ ID NO: 89964 - protein, 28 aa, Gossypium hirsutum
  Clone ID: LIB3048-016-Q1-L1-B7.pep
GLGGCDLPKPAKATFRLRSGHYIIPQFL

SEQ ID NO: 89965 - protein, 95 aa, Gossypium hirsutum
  unsure (1)..(95): unsure at all Xaa locations
  Clone ID: LIB3048-016-Q1-L1-C4.pep
SYSLPHTHRMWMXRELIGLXDRIYMVPLNLXYIPDCYMEKDYPXYNVTCLVHNGKVIAASLDXINYGDSNLKSPYLLPDDTDKDVYFDTTMSHID

SEQ ID NO: 89966 - protein, 55 aa, Gossypium hirsutum
  Clone ID: LIB3048-016-Q1-L1-C5.pep
PNAFAIMLQGRHVVFRVILVHVTRWRLSSFSTKILSDGSISNWPTDHQNVMCVMG

SEQ ID NO: 89967 - protein, 52 aa, Gossypium hirsutum
  unsure (1)..(52): unsure at all Xaa locations
  Clone ID: LIB3048-016-Q1-L1-D1.pep
PVIGLGVCRMDGKEVRDLIINSIKLVYRHFDCAADYQNXTEIREAFSEAFKT

SEQ ID NO: 89968 - protein, 59 aa, Gossypium hirsutum
  Clone ID: LIB3048-016-Q1-L1-D2.pep
VVDRLLVQYDQDHIQVRFLSVVLTTRLSSPAAICRFVRLVAAAAADISLAYALPQFVGG

SEQ ID NO: 89969 - protein, 47 aa, Gossypium hirsutum
  Clone ID: LIB3048-016-Q1-L1-D9.pep
AINHFHPNERYFLLKFVSSLYLAPLLTFKYLHTAFKIHNLSINSPSL

SEQ ID NO: 89970 - protein, 117 aa, Gossypium hirsutum
  Clone ID: LIB3048-016-Q1-L1-E1.pep
ACFNFRISVNDREPRSPSFLADKLARLMTAILEAYSSDDRHHVDYYRIGKSEEFRRYLNLTRDLQRVDLQLLSPDERLAFFLNLYNAMAIHAVITIGHPERILDRRAFFGEFQYVIG

SEQ ID NO: 89971 - protein, 63 aa, Gossypium hirsutum
  Clone ID: LIB3048-016-Q1-L1-E12.pep
MEKQQKSGQGVLVMAPFQGHLTPMLQLATILHSKGFSITIVHPELNSLNPSNHPEFTFVPIPD

SEQ ID NO: 89972 - protein, 92 aa, Gossypium hirsutum
  Clone ID: LIB3048-016-Q1-L1-E7.pep
TTNSYCILQALGIRHEHKCRLRKKLCAKVHLLLYSLTGLTIKIEEVSSDTIVNEYNILQDTEIILPDQLLMIIDRFSSMTIVPWPITSYIMN

SEQ ID NO: 89973 - protein, 126 aa, Gossypium hirsutum
  Clone ID: LIB3048-016-Q1-L1-E8.pep
RVKFDPDRIVMSGGSTGAHEMVAFCLADPGEAFLVPTPYYPGFDRDLKWKTGVELVPVNCESCINFKITRNALEAAYVKVQEANLRVKALLITNPSNPLGTVLDRDTLKSMVRFINDKNIHLIGDE

SEQ ID NO: 89974 - protein, 97 aa, Gossypium hirsutum
  unsure (1)..(97): unsure at all Xaa locations
  Clone ID: LIB3048-016-Q1-L1-E9.pep
DHVTVGDLVVKHGECIEATKESSLTFLIAKYDGILGLGFKEISTGNAEPVLDIMVNQGLVNEPTVSFXPKRNPEDYVGRQMGFGGMDSKHYKGEHTY

SEQ ID NO: 89975 - protein, 34 aa, Gossypium hirsutum
  Clone ID: LIB3048-016-Q1-L1-F10.pep
PHSFVCPFIHPQRTYLFNYSQPLNILYCLNRYNT

SEQ ID NO: 89976 - protein, 51 aa, Gossypium hirsutum
  Clone ID: LIB3048-016-Q1-L1-F11.pep
YGFLLIASCHPNITYKKSYQNNTNTTMIFNGQKGILLIIPIGPKKGDRKKN

SEQ ID NO: 89977 - protein, 69 aa, Gossypium hirsutum
  Clone ID: LIB3048-016-Q1-L1-F2.pep
YHHISSNSIQMILDAMLVTRTSSISMTMNSVVVIMTFNRFIVIRLGMLNLVIFIIRSAVNHGHSIFAIC

SEQ ID NO: 89978 - protein, 37 aa, Gossypium hirsutum
  Clone ID: LIB3048-016-Q1-L1-F5.pep
HSFKVVGKLRRGEDLLYWSWICWMCNRVSECSEVSYI

SEQ ID NO: 89979 - protein, 62 aa, Gossypium hirsutum
  Clone ID: LIB3048-016-Q1-L1-F6.pep
WMSKTGILKRAETVYSHNECLRQWNLEEPKNIVLLDYRVRSNFLDLEGHMYSRVQFQRLSRR

SEQ ID NO: 89980 - protein, 55 aa, Gossypium hirsutum
  Clone ID: LIB3048-016-Q1-L1-F8.pep
PSPAPLQVSRPGVDAPFQLSSVRRSTLELDVSHTCTSHHHRWQIHSSHCTIIKLV

SEQ ID NO: 89981 - protein, 38 aa, Gossypium hirsutum
  Clone ID: LIB3048-016-Q1-L1-G9.pep
IHICLLLNNSVHSVIYISWIAVGISSYMLISSFTAQVQ

SEQ ID NO: 89982 - protein, 66 aa, Gossypium hirsutum
  Clone ID: LIB3048-016-Q1-L1-H6.pep
VPYKFQLFGHGQANPKYGHLVHTVSDDVVYTSGVDIAIVNNRSKVEDFYQSYITTGLAIVSPIHNT

SEQ ID NO: 89983 - protein, 77 aa, Gossypium hirsutum
  unsure (1)..(77): unsure at all Xaa locations
  Clone ID: LIB3048-017-Q1-L1-B12.pep
PRKXVQRSTPNLPARXWAGVXVRXXLDVRRHALEEGVVKQPREEKGVYSMSFQVKAFLEKKFXXCGKHSYESXXEKK

SEQ ID NO: 89984 - protein, 34 aa, Gossypium hirsutum
  Clone ID: LIB3048-017-Q1-L1-B5.pep
TILEFFFFFFFCFILFFFYIILEHIITFLLHNIV

SEQ ID NO: 89985 - protein, 38 aa, Gossypium hirsutum
  Clone ID: LIB3048-017-Q1-L1-D8.pep
QCCILSALFYPQILKYDFKKKTIVILLFFSFSFVGTKK

SEQ ID NO: 89986 - protein, 53 aa, Gossypium hirsutum
  unsure (1)..(53): unsure at all Xaa locations
  Clone ID: LIB3048-017-Q1-L1-E3.pep
SGPSXEVPNHEPSWSLKHVLTLXFDMSLXSKXSVNQKLRKRSAWTLQLSERPI

SEQ ID NO: 89987 - protein, 57 aa, Gossypium hirsutum
  Clone ID: LIB3048-017-Q1-L1-E8.pep
NRKNIFIPCITNPSPYHHHHYHQPTSTTTTAASSYQLHLIITTYLFHLFLISVVGFF

SEQ ID NO: 89988 - protein, 46 aa, Gossypium hirsutum
  Clone ID: LIB3048-017-Q1-L1-G11.pep
HISRPLKITNILYYYPTKLTINSNTQKHSTLNYNNYAKTHLTISIH

SEQ ID NO: 89989 - protein, 130 aa, Gossypium hirsutum
  Clone ID: LIB3048-018-Q1-L1-A12.pep
LNLPSHYAAGVILVGCCPGGTASNIVTYLARGNVALSVLMTAASTLSAVIMTPSLTSMLAGKYVPVDAAALLNSTLQVVLLPVLGGAFLNQYFHGFVKFGSPLMPSIGVGTCGVLCGNAIAQSSFAILAS

SEQ ID NO: 89990 - protein, 58 aa, Gossypium hirsutum
  Clone ID: LIB3048-018-Q1-L1-A2.pep
CRAHHGVSARHFPYNFECIESSGFIALSCLLLSRYTTQNMIYRAPWHFVEHDTSLNGL

SEQ ID NO: 89991 - protein, 46 aa, Gossypium hirsutum
  Clone ID: LIB3048-018-Q1-L1-A4.pep
RKCGLSIYRVGYFHINFNSRISTDVEDMPSFDGDNSSSHEMIKRAL

SEQ ID NO: 89992 - protein, 38 aa, Gossypium hirsutum
  Clone ID: LIB3048-018-Q1-L1-B11.pep
NALSNTGLQIHIKDSYSYLLNVHRFTLRHHFVSSAFSN

SEQ ID NO: 89993 - protein, 123 aa, Gossypium hirsutum
  unsure (1)..(123): unsure at all Xaa locations
  Clone ID: LIB3048-018-Q1-L1-B2.pep
PQENYPLAIITDHKTDSVMHTCLALNPVYTAIIKFKGLHQFHWLTRKNLPVLLTLXNHHGIXNYYHCNHITXANIFNTTNLTFAFKFHAXNPNLIFLLNHLRIYLPYLFSNLDKKVFLYHYIV

SEQ ID NO: 89994 - protein, 104 aa, Gossypium hirsutum
  Clone ID: LIB3048-018-Q1-L1-B6.pep
ISNLLFFSVLFISAHAARFEILNKCSYTYWPAASPLPERRLNPRHTCTIYQPADTTISSIRNRTNSIYNPIVYYISQPLNIFYLFQSKYWINLLTTLLNNHFTN

SEQ ID NO: 89995 - protein, 76 aa, Gossypium hirsutum
  Clone ID: LIB3048-018-Q1-L1-B9.pep
DARHGAKTREEEGRLKFHYQSFVSFNVAYRTIMALWKARALSPEQKVQIVEEESEAKSLQSDESGSFLGLEDVSMV

SEQ ID NO: 89996 - protein, 105 aa, Gossypium hirsutum
  unsure (1)..(105): unsure at all Xaa locations
  Clone ID: LIB3048-018-Q1-L1-C4.pep
IKKTHDXQLVGDVHALYAGLKSYVTSFTEEXLTTCREACGGHGYAVVNRFVTLGNDHDIFYTFEGDDTVLLQKVTANLMKQIKDKFQGGAMCVTWNYLRESINTY

SEQ ID NO: 89997 - protein, 76 aa, Gossypium hirsutum
  Clone ID: LIB3048-018-Q1-L1-C5.pep
VRGRSASEKLTEGGGVKFSARVAIQVEVVKTFNDADGPQWRHSLFGNPNDQETFRRRCEIAETLVERNFDLAIQVI

SEQ ID NO: 89998 - protein, 56 aa, Gossypium hirsutum
  Clone ID: LIB3048-018-Q1-L1-D7.pep
LFPYGSIPRELTCSRIKSSKGLDLFTQFTKLNQRKKHDSTNCYKLTEEDRTTSDEF

SEQ ID NO: 89999 - protein, 61 aa, Gossypium hirsutum
  Clone ID: LIB3048-018-Q1-L1-D9.pep
KGGDEVTKSLNLDHLLEVSSKQCPRYNTMGEADIDNNNLMKAAYLQDATDDYLYLAEANDI

SEQ ID NO: 90000 - protein, 107 aa, Gossypium hirsutum
  unsure (1)..(107): unsure at all Xaa locations
  Clone ID: LIB3048-018-Q1-L1-E11.pep
VGYSWVLNGFTKHHSIDIINLKGYRYWKYHQSNISTTTSMFLVFLKLDSAFYYRGLYISAIRFWFIRPTVIVFXDXCXYFLTVCHYVSQILHILTRISYNLGAHCIL

SEQ ID NO: 90001 - protein, 45 aa, Gossypium hirsutum
  Clone ID: LIB3048-018-Q1-L1-F9.pep
RSYESYVVDIRVGAPIETHRSMKLSRIDICTWWYLSLCANRQQIV

SEQ ID NO: 90002 - protein, 48 aa, Gossypium hirsutum
  Clone ID: LIB3048-018-Q1-L1-G2.pep
AFTGCSHSLTAEEDDEVRRMRDEISHCKEKEINVTERMLLGRCPLTLT

SEQ ID NO: 90003 - protein, 54 aa, Gossypium hirsutum
  Clone ID: LIB3048-018-Q1-L1-G6.pep
WGCVATSLPRPCQFKENSKQKLLNKLVFFSNILMVIYNVIIGGSGKITGLSTIN

SEQ ID NO: 90004 - protein, 62 aa, Gossypium hirsutum
  Clone ID: LIB3048-018-Q1-L1-G7.pep
SLSLSLSYLVFAVSVFSYSRDQTLSSLPFFYIFSISFPHQPSPEIHLSLVAKICSMVASCVC

SEQ ID NO: 90005 - protein, 100 aa, Gossypium hirsutum
  Clone ID: LIB3048-018-Q1-L1-G9.pep
MRSQYMATMRLMKTLRGLFSRRKIHSQVLLIVASLHRINSLPLSKVQTDNFEEVCAICLETPANGETIRHLPCLHKFHKDCIDPWLSRKTSCPVCKSSIN

SEQ ID NO: 90006 - protein, 71 aa, Gossypium hirsutum
  unsure (1)..(71): unsure at all Xaa locations
  Clone ID: LIB3048-018-Q1-L1-H11.pep
MLQLSLLTLLVLLGSGLTRLVTSHEESGXWSCESNSEIQVLADFAPGVITLDCHTDDWKDIDGFNFSLLPA

SEQ ID NO: 90007 - protein, 61 aa, Gossypium hirsutum
  unsure (1)..(61): unsure at all Xaa locations
  Clone ID: LIB3048-018-Q1-L1-H12.pep
DITGDQGARSKXTGGRLGMGTNMYPSSSLLSQDKDSSIAALAIDXLIENADGLALEFTDQI

SEQ ID NO: 90008 - protein, 127 aa, Gossypium hirsutum
  Clone ID: LIB3048-018-Q1-L1-H4.pep
EHGIGKFRRRRLPEDEIFTSDELTKKFHGRVLEFFNHGCEVHFFMTWIAKVGSFGRREIMAVESVFKAHPNGCLMILSRTMDSVQGYRILEPVLGSGFKVLAVAPDFPFLVKNTPAEAWLDDMKSGK

SEQ ID NO: 90009 - protein, 68 aa, Gossypium hirsutum
  Clone ID: LIB3048-019-Q1-L1-A11.pep
SKEASVLNKMSFKYAWCAYKLKAELKLYITTDNAYWKYYTIKYYFTVIHSSLHFYLFMYMITITLHAY

SEQ ID NO: 90010 - protein, 74 aa, Gossypium hirsutum
  Clone ID: LIB3048-019-Q1-L1-A4.pep
QLTLNSIARVFSVGVLNTFSCRQYIIISLKAIRFILKTLLYQHTIIMLVTIESTDENVIFYFIHLLHVSFLLFP

SEQ ID NO: 90011 - protein, 42 aa, Gossypium hirsutum
  Clone ID: LIB3048-019-Q1-L1-A7.pep
MIISQKSKPYTFQGGFLSLSEVHLKLSLYYSNIYFSKLGYSS

SEQ ID NO: 90012 - protein, 43 aa, Gossypium hirsutum
  Clone ID: LIB3048-019-Q1-L1-A8.pep
CRMCCYALKLGSVRGLSDTTLCTDGLSIVNPLHIVCHRSMSIH

SEQ ID NO: 90013 - protein, 146 aa, Gossypium hirsutum
  Clone ID: LIB3048-019-Q1-L1-B1.pep
IPSGHTINLLRWCDETPPVLHLQLRNYLYSFEYLIDNKSWRASVHMYKKGRTRYAHYRQSDLILADAGWHCSFCFRYISDFIFKMKAYSHTDRVRFAHFLNSKRIQDVICRGSNLFDMLAEEYTFKEIIVKMGPIPYSYSAVHLPA

SEQ ID NO: 90014 - protein, 136 aa, Gossypium hirsutum
  Clone ID: LIB3048-019-Q1-L1-B10.pep
LKAQSVAVKLLDLGGLQGHREWLTEVIFLAQLRHPHLVKLIGYCCEEEHRLLVYEYMPRGSLENQLFRRYSVSLPWATRMKIALGAAKGLAYLHEAEKSVIYRDFKASNILLDSDYTAKLSDFGLAKSGPERDDTH

SEQ ID NO: 90015 - protein, 126 aa, Gossypium hirsutum
  Clone ID: LIB3048-019-Q1-L1-B2.pep
SSPPLKSSQAFSALVKSRSLGHRRWSRRHRRRPPHMVAGSSKGNFFIFFNNIYMYMYIERREKKQRKKIRKKREKEKKMQTFLLIFSFVFEVRRDFCVCLFFNLLKSPPFYTSFHGFYSPYTFIFY

SEQ ID NO: 90016 - protein, 67 aa, Gossypium hirsutum
  Clone ID: LIB3048-019-Q1-L1-C5.pep
AVKDEYALKTTKYLNILTLSRLTTISRKGWQYTLPLGVDKSKCLFDLGLDIPYQGLKAYSTYHDISH

SEQ ID NO: 90017 - protein, 60 aa, Gossypium hirsutum
  Clone ID: LIB3048-019-Q1-L1-C7.pep
AIPFSLLNPVTYPEACPHEDREDNHVQMIEYFFDLTPASKISINLKPKPMYTAIQISRMN

SEQ ID NO: 90018 - protein, 77 aa, Gossypium hirsutum
  Clone ID: LIB3048-019-Q1-L1-D4.pep
ITTFGASFLSRQPVFYDFPHLSNHPYIESLTLHLHFLTTPYVSSITHVQFKYIITRTILTLHIQQHMTLFMLIVSLS

SEQ ID NO: 90019 - protein, 67 aa, Gossypium hirsutum
  Clone ID: LIB3048-019-Q1-L1-D7.pep
MSQDVLKLLISGVIKYENVRPSKKSSFTVNVICEAQLSAVPMLLRLSKSPRRVNVMVLAIPLGCGSY

SEQ ID NO: 90020 - protein, 55 aa, Gossypium hirsutum
  Clone ID: LIB3048-019-Q1-L1-E11.pep
AQPKGEGERERERQRRSCGDRRFSFRSFFGASFFFLSLCFLSFLSLTFRCRIIPD

SEQ ID NO: 90021 - protein, 145 aa, Gossypium hirsutum
  Clone ID: LIB3048-019-Q1-L1-F11.pep
EEQGEVFFDESDIRDEIDVDEEDLPDAEDDIVEDSDDSIHIFTGHTGELYAVACNPTDPVLVATGGGDDKGFLWKIGHADWASELQGHTDSVSSLAFSHDGQLLASGGFDGLVKVWDTSGNLKSTLEGPGSGIEWIKWHPIGHLI

SEQ ID NO: 90022 - protein, 78 aa, Gossypium hirsutum
  Clone ID: LIB3048-019-Q1-L1-F2.pep
PLKMLTLFFFSIDPSLLWLHVSNPKNLISNTSSASIINHCGTHLCIGFLHSPNSISFRFAKLKKRYSLYFDKKPIGSL

SEQ ID NO: 90023 - protein, 43 aa, Gossypium hirsutum
  Clone ID: LIB3048-019-Q1-L1-F5.pep
LRCKSFVVSWLYGCTWRVDLSYDHMDWPTYGDSSDWESWMHGL

SEQ ID NO: 90024 - protein, 41 aa, Gossypium hirsutum
  Clone ID: LIB3048-019-Q1-L1-G2.pep
CKLYNIHMSDLQLLSSTHEPGVSDHMHQIIYMIPHIIYSDY

SEQ ID NO: 90025 - protein, 126 aa, Gossypium hirsutum
  unsure (1)..(126): unsure at all Xaa locations
  Clone ID: LIB3048-019-Q1-L1-H5.pep
RKYDESLLYAIKNXQSMAHMWASLAHDSNVATALVLAFFEILYRTAVLRYRKQIKDYEDRLKIDKAXAEDRXKMMELEREMERIDGEDDEAEQGVREHNPYLKMAIQFMKSGARLQKAQNKRLPQY

SEQ ID NO: 90026 - protein, 50 aa, Gossypium hirsutum
  Clone ID: LIB3048-020-Q1-L1-D10.pep
LQISNIVSPNIQKRNLVLFTGCFKKDYCLLKLLKCFIQNHGIHTFILYIY

SEQ ID NO: 90027 - protein, 103 aa, Gossypium hirsutum
  Clone ID: LIB3048-020-Q1-L1-D3.pep
SINGWYMERGLFGLVSGVDIFSGGIIRLQVAEAEVNNISIRFLDRKTGEPTKGKTKPETILRQLTTKKGQVYSMLQGKRDVDTVSTMGLMADVSIIPQPAGGE

SEQ ID NO: 90028 - protein, 79 aa, Gossypium hirsutum
  Clone ID: LIB3048-020-Q1-L1-E3.pep
RLQRKCLSIACRPLVSSVRSIVGRNMEHDMLCAVQPWGMSLLDPFKPFSTIHGSGREAMCLGDDLGSFIGIHTPRLVLN

SEQ ID NO: 90029 - protein, 97 aa, Gossypium hirsutum
  Clone ID: LIB3048-020-Q1-L1-E5.pep
LVHGTRLDGTHHVLAHLATTYLDLTRYQQSTCLIRTFLLKKLEIRIWDERIVRINMVAVHMRVCLCPIPLKMPLDVSVLVDSRKSRPIKFGIPTTTC

SEQ ID NO: 90030 - protein, 118 aa, Gossypium hirsutum
  Clone ID: LIB3048-020-Q1-L1-E8.pep
LPLYGNSLTMTGRSTTSQKSGTASCISLASSNLGRFFSFQEILDATNKFDESLLLGVAGFGRVYTGTLEDGTKVAVKRGNPRSEQGLAEYRTEIEMLSKLRHRHLGSLIGYRDERSEM

SEQ ID NO: 90031 - protein, 90 aa, Gossypium hirsutum
  Clone ID: LIB3048-020-Q1-L1-F2.pep
MSNLENPRDWRFTWEAQSHSSNLRSFLFHSQAKPSVQCRNLLAQLNLSQSHLLVTWLKEGAKEEVSIMVPIPRVLIDSEAPVNFIAFDDH

SEQ ID NO: 90032 - protein, 61 aa, Gossypium hirsutum
  Clone ID: LIB3048-020-Q1-L1-G11.pep
FTYFYLIHIFFGFFVFFIYYKPGQIGPITAAPLCSLSCNENSPKTLKAKPKKKKKKKKKGG

SEQ ID NO: 90033 - protein, 50 aa, Gossypium hirsutum
  unsure (1)..(50): unsure at all Xaa locations
  Clone ID: LIB3048-020-Q1-L1-H1.pep
STNLYTKSKVKLIEKXREFRSRISFQGRITEHNCPNYCKAKLIWLPSLFF

SEQ ID NO: 90034 - protein, 49 aa, Gossypium hirsutum
  Clone ID: LIB3048-020-Q1-L1-H10.pep
NTFNPMDLNTPRHGAYVGLHNISNFINRGTYGIANARWGHCCLKKLMMD

SEQ ID NO: 90035 - protein, 142 aa, Gossypium hirsutum
  Clone ID: LIB3048-020-Q1-L1-H3.pep
RNLQTVQSAASTEEPYRTGFHFQPPKNWINDPNGVMVYKGLYHLFYQYNPKGAVWGNIVWAHSTSKDLVNWTPHEPAIFPSQPSDINGCWSGSSTILPGGKPAMLYTGIDTKNSQVQNLAVPKNLSDPYLREWVKSPKNPLM

SEQ ID NO: 90036 - protein, 83 aa, Gossypium hirsutum
  Clone ID: LIB3048-020-Q1-L1-H9.pep
LSYRHGAETDSGRAKLIVRKIRSANLDCASVQATSEFAKPKRNLKKVFSTTTDMALPANPHYDLEYVTRYWRKVHNPVVENSE

SEQ ID NO: 90037 - protein, 38 aa, Gossypium hirsutum
  Clone ID: LIB3048-021-Q1-L1-A1.pep
LEEILRVIAATFKSLCKACQISHPFYLMIQTLQLRFDS

SEQ ID NO: 90038 - protein, 56 aa, Gossypium hirsutum
  Clone ID: LIB3048-021-Q1-L1-A4.pep
IHHYLNYFIYLYPSFSTAQTLITWLLHKIIPLLSYNQPFLTPFSFYPFIYHYPLTS

SEQ ID NO: 90039 - protein, 66 aa, Gossypium hirsutum
  Clone ID: LIB3048-021-Q1-L1-A7.pep
SIMVREYICGCDRGRLVKGMICQLPSQLALLEGLISHWSSDLVRLAPVPSRVAWLGNNECDYLIES

SEQ ID NO: 90040 - protein, 65 aa, Gossypium hirsutum
  Clone ID: LIB3048-021-Q1-L1-B4.pep
SQFHLKNTVYHILYFNSTSLHILLYLSFLHPPVLPPHSRPPLSNITIFHTNFLPFPPSIIDNTSP

SEQ ID NO: 90041 - protein, 111 aa, Gossypium hirsutum
  Clone ID: LIB3048-021-Q1-L1-B5.pep
HLFHNLMCIPNRLKDPNGTEFQKKIYHLIPICSTYTIFEHLILIRASDASYLTLSQYMLYTTFPTTMFYTRPCINSTIMLLLRTQPFAYPILNRHYSRAFTSDQPMQLYCY

SEQ ID NO: 90042 - protein, 50 aa, Gossypium hirsutum
  Clone ID: LIB3048-021-Q1-L1-B6.pep
LPKKYLHHEPYFYTLTHSSNTIILSYIQISLYNPITISIIKPSTYYYLLL

SEQ ID NO: 90043 - protein, 91 aa, Gossypium hirsutum
  Clone ID: LIB3048-021-Q1-L1-B8.pep
LLIHYIALHAECQWNFLAKHPFLTITFNIFTFRLLNYLKPDIKHTNLTAQKHFFILELHSKFSNSSSNIAQHLPLRTDYHINNYCITHVQK

SEQ ID NO: 90044 - protein, 144 aa, Gossypium hirsutum
  Clone ID: LIB3048-021-Q1-L1-C12.pep
LSTAVTCQRNGRPGSGYEKWKWKPNGCSLPRFDALKFLGKMRRKRIMLVGDSIMRNQWESLVCLVQGVIPTGHKKVTYNGLSMAFHALDFETSIEFSWAPLLVELKKGPENKRVLHLDLIEENARYWRGVDVLVFDSAHWWTHS

SEQ ID NO: 90045 - protein, 77 aa, Gossypium hirsutum
  Clone ID: LIB3048-021-Q1-L1-C2.pep
LQLVHPHNYTNSSLATHLLFCLHFYISLVVSQNSELYILHIYFYYTTISSSYSATTLHINHHHTITINDSSITYILN

SEQ ID NO: 90046 - protein, 61 aa, Gossypium hirsutum
  Clone ID: LIB3048-021-Q1-L1-C3.pep
HMVPHITSISSYYLVISISNYVIYLTNLHHSISSLDKTASNDNNNNYLPYNLSTYHNLIFH

SEQ ID NO: 90047 - protein, 79 aa, Gossypium hirsutum
  unsure (1)..(79): unsure at all Xaa locations
  Clone ID: LIB3048-021-Q1-L1-C5.pep
NHFTAGRVIDTMEHAIYHIETYHITTIRXNTPIYLMYQTIKSLQHKIVISAETFHNTFKRYSYLHKAPNKDQSHHLTYL

SEQ ID NO: 90048 - protein, 77 aa, Gossypium hirsutum
  Clone ID: LIB3048-021-Q1-L1-C6.pep
LKTFHQYYYFTTGRVIYTIGHHIYHLQKLQIPTNRYYIQIHQTNQTIKLLQKNLILSPNNIYNTLQIIPLIINIITF

SEQ ID NO: 90049 - protein, 80 aa, Gossypium hirsutum
  Clone ID: LIB3048-021-Q1-L1-C7.pep
FSLAQTVILLHYFTAECFIYIRKTLPKYSLNQFLNIYYYHISLIYYFNIHTVFIPTNTTFHNILFTYNINIHFPNQLITS

SEQ ID NO: 90050 - protein, 55 aa, Gossypium hirsutum
  Clone ID: LIB3048-021-Q1-L1-C8.pep
QPITCCIFIFSFNYLNFQKLSISLNKYQTTSPPFKTFSMIQNHHINHLHHLISYP

SEQ ID NO: 90051 - protein, 58 aa, Gossypium hirsutum
  Clone ID: LIB3048-021-Q1-L1-D1.pep
KTCLGRLNNWSRSQWRKNKRTFLPRLAHARLYLTNTSLPCINAFYLQMSPIMILLITL

SEQ ID NO: 90052 - protein, 62 aa, Gossypium hirsutum
  Clone ID: LIB3048-021-Q1-L1-D3.pep
DKPYVSYLYLLHYQSVFHHPMLHSQNLSTLPQEYFNDNHILRSHDLNNSHHNNSSQNLLTPH

SEQ ID NO: 90053 - protein, 121 aa, Gossypium hirsutum
  unsure (1)..(121): unsure at all Xaa locations
  Clone ID: LIB3048-021-Q1-L1-D5.pep
ASFTFYGSLNFAVTNFHTNLGPYPNIHFILYSYPPIISTDNAYHDHLSLPDITNISFEPSSMMAKYDPLHDKYISCFLMYQQDLLPKHVNSSLDTIKTKHTIQSIYCYPTXFKCSINYHPP

SEQ ID NO: 90054 - protein, 122 aa, Gossypium hirsutum
  unsure (1)..(122): unsure at all Xaa locations
  Clone ID: LIB3048-021-Q1-L1-D6.pep
KYFTLKASINLGRTNFNTHLLQYPHINFILYHYTXHIKMITITMNIISHPNIXTNITSEPSTIMANXYPPHYKHIYSCLIHRKYFNPIYHNAYQSTIKTKLTIQFLESYPTEFTCGINYQSS

SEQ ID NO: 90055 - protein, 48 aa, Gossypium hirsutum
  Clone ID: LIB3048-021-Q1-L1-E1.pep
IVHTTFNNEILLQSSITINKPTQLLLIYHTITLTITISIHPISPYKHT

SEQ ID NO: 90056 - protein, 71 aa, Gossypium hirsutum
  Clone ID: LIB3048-021-Q1-L1-E5.pep
HNNQYTTEHTRFLNLHKLNFSHNIHYIYILSFLSNMINALASNIYTKLVYALESLLHAQLLHNIITDDYTH

SEQ ID NO: 90057 - protein, 43 aa, Gossypium hirsutum
  Clone ID: LIB3048-021-Q1-L1-E7.pep
FLFKIKSSPLPILYPLLSTLFNILYLTSYIPLFTLILFIHIFY

SEQ ID NO: 90058 - protein, 48 aa, Gossypium hirsutum
  unsure (1)..(48): unsure at all Xaa locations
  Clone ID: LIB3048-021-Q1-L1-F1.pep
LSLFHYLNNNILYGMIHSNFRPYLNYYTNHXPTELFCNAKLASNFTDS

SEQ ID NO: 90059 - protein, 117 aa, Gossypium hirsutum
  unsure (1)..(117): unsure at all Xaa locations
  Clone ID: LIB3048-021-Q1-L1-F2.pep
HRYFHLLNNDYTHCXMYSIGGSANPTINIHVNRYLAPFNRFSKYVTKRVHRSKSKWRHWNWTSQRDMFLNGAYFTPSRALSSASYANASNLSTKSSYLVVTITSNAFSLSCHHGFMC

SEQ ID NO: 90060 - protein, 44 aa, Gossypium hirsutum
  Clone ID: LIB3048-021-Q1-L1-F4.pep
NEMNFQKDVLKDRFILIQDKDIISMNKVICYWIRREKLELVMIY

SEQ ID NO: 90061 - protein, 63 aa, Gossypium hirsutum
  Clone ID: LIB3048-021-Q1-L1-F5.pep
TSYFYSHHHLKLVRVFITLGMLTLYPQHYSTYFLYTSFQYINSYLLLQHHYLCSSNITSHHNY

SEQ ID NO: 90062 - protein, 54 aa, Gossypium hirsutum
  Clone ID: LIB3048-021-Q1-L1-F6.pep
WIFFIYLHLITRGAPFITHGVLKLASTNLVTSLYINISSIYLHISKLTISFIIS

SEQ ID NO: 90063 - protein, 92 aa, Gossypium hirsutum
  Clone ID: LIB3048-021-Q1-L1-F8.pep
YHYNYVFLLLLFFKAINAFLQFPFYPFDFNFTILIKLINISFLLFSTTTIVSTLFLAILYILSQNLYFTVSHFSSLTTNFPINFYFSNYHPF

SEQ ID NO: 90064 - protein, 120 aa, Gossypium hirsutum
  unsure (1)..(120): unsure at all Xaa locations
  Clone ID: LIB3048-021-Q1-L1-G4.pep
VWINSTLTNLFVIKMLINAAWYKLYSLRRQKILETISYLYSKACSPVNVRQQMFLTILNVVTNMIXSRSIEREANSNLCAKFKQIILXLTKLFGLPNFSDFFPAFAPLDLQSSMKHVRKS

SEQ ID NO: 90065 - protein, 91 aa, Gossypium hirsutum
  Clone ID: LIB3048-021-Q1-L1-G5.pep
LFSYTTSHHSSPSASSSTPDLSQTTYYTKWSKSLYSIFSYIIPSLNYSTSKLHNHLRQLNPIPSIPLKLKNKFYTPHELLYNLKQYTTIPT

SEQ ID NO: 90066 - protein, 85 aa, Gossypium hirsutum
  Clone ID: LIB3048-021-Q1-L1-G7.pep
PRVSDHMDHIKDMITHIINKYFGYVVDYYVFFADDKFPNYGNLSVQNLENNIAFEPVAVDSRNRNPSDFSLCKASNPGEPSCYSS

SEQ ID NO: 90067 - protein, 97 aa, Gossypium hirsutum
  unsure (1)..(97): unsure at all Xaa locations
  Clone ID: LIB3048-021-Q1-L1-G8.pep
STLAILFSAIDQRLTGLHILTESQGHASKLYSFKHDSMSSLIKTINTSEFFDSXTNGDLSRSKSKSINDDQNLLCLTRYAKSDSVPHLQQHFLSLKV

SEQ ID NO: 90068 - protein, 98 aa, Gossypium hirsutum
  unsure (1)..(98): unsure at all Xaa locations
  Clone ID: LIB3048-021-Q1-L1-H2.pep
NFKRSVFDDCIIDSVGPWYVLIGKLMWLSYXIMWMVSSXDKVWVSMSTLXYGRCMLEIWSIDGLEDTQVVSLVADACMIVATLVDYKVINKIERIVSL

SEQ ID NO: 90069 - protein, 109 aa, Gossypium hirsutum
  unsure (1)..(109): unsure at all Xaa locations
  Clone ID: LIB3048-021-Q1-L1-H3.pep
ALMMYDMVNDYWIKEVGIDYWMKKSVGKILDLIGRIMWFSYXILWMVCTCVXEYWREIVIIRSMVVXMSQLWCIAGLKVTKVVGLLAAAXMIEPTAVEYKGIDKIKRLA

SEQ ID NO: 90070 - protein, 81 aa, Gossypium hirsutum
  Clone ID: LIB3048-021-Q1-L1-H5.pep
QTGEIFLEYGTEFTFSELTDRDLASALTEYDSPYLKLNNCYCDDRNLFDVATSTDLNSNACWVSNVFDGRWNYCIKRITPP

SEQ ID NO: 90071 - protein, 119 aa, Gossypium hirsutum
  Clone ID: LIB3048-022-Q1-L1-A11.pep
HIHFYIASKYHNLVDCFYNAWSPLSVLLLKKSKRTQLALYVLPLTTQSLPSITFNRHLLPYVKNSDMPLFHSCIIGIMYYLQYKPYSISPFLNSLIHSFLSTIIIYLCISFDLTSSYTY

SEQ ID NO: 90072 - protein, 80 aa, Gossypium hirsutum
  Clone ID: LIB3048-022-Q1-L1-A12.pep
NTISLNSLSWLFPTLIYLYTTYTIPLHLQIITSLSLTTHLAIHNLLITAYSFTIYTLFYFYTIHIIPTNYAPYPTHSHHS

SEQ ID NO: 90073 - protein, 69 aa, Gossypium hirsutum
  Clone ID: LIB3048-022-Q1-L1-A2.pep
FSSCSIWKLSNEIEHGPILKGERSPKSAMLIFSKDSKFILRVMQVFNSQMLNINIENVPARELAPKRLL

SEQ ID NO: 90074 - protein, 49 aa, Gossypium hirsutum
  Clone ID: LIB3048-022-Q1-L1-A8.pep
LHHSNRFNVLKVGVNNNLRATNIHVDPLTSHIKSCYSYYINNLTHYNTT

SEQ ID NO: 90075 - protein, 106 aa, Gossypium hirsutum
  unsure (1)..(106): unsure at all Xaa locations
  Clone ID: LIB3048-022-Q1-L1-B10.pep
CLLLYSNAQFPVINEIQYKAIFLSNGYSHNEXIYYNEVLSPDLKHPTILIFLALITQYDLXLTHLYVKTSFIHNDLINDIYMTHPDLFKVSXNHNYICILTNSLYI

SEQ ID NO: 90076 - protein, 115 aa, Gossypium hirsutum
  unsure (1)..(115): unsure at all Xaa locations
  Clone ID: LIB3048-022-Q1-L1-B11.pep
MADSNLIVYLNVPFDDNFNITHNTKIRPLFPTINYLIFHTSKFILSSHSKLPITVTPNYSLXKPLIPTLSELLVFHVKITNHYIVXDAYKMVSTLPNTFISLLNNHKLYKHYHNN

SEQ ID NO: 90077 - protein, 121 aa, Gossypium hirsutum
  unsure (1)..(121): unsure at all Xaa locations
  Clone ID: LIB3048-022-Q1-L1-B9.pep
LHSTRVDPPCCNNSPPHLFFHFIYHQLSPRIIQNIIHNTFANPPIQLNNPSPHKSTNNPKHSINTLHDFISYHTHNNFSITLPHATFITYIXPLSTSYTSSQIHSXFDHLYSLFTYTLNNL

SEQ ID NO: 90078 - protein, 81 aa, Gossypium hirsutum
  Clone ID: LIB3048-022-Q1-L1-C10.pep
KKPNSLPTSISLPLFYSLNFIGQIRMQNIILYFDYIMHNQLENLFYTQHNFIPTYHNTISYNSLSYTIHTSYLYTSIYFFF

SEQ ID NO: 90079 - protein, 70 aa, Gossypium hirsutum
  Clone ID: LIB3048-022-Q1-L1-C11.pep
HSLPFLTYLTLLLDLLSILCKASLPPDLYDTISQPYLHTQWITNHSCLTTHFLNTPTPTISESTISLFQT

SEQ ID NO: 90080 - protein, 61 aa, Gossypium hirsutum
  Clone ID: LIB3048-022-Q1-L1-C12.pep
HCRLIYYSWLVYVSCNSQIILSYWFLRYIIAVKNLDSLCNFSKSFKCSKSWYMDIIGILRP

SEQ ID NO: 90081 - protein, 76 aa, Gossypium hirsutum
  Clone ID: LIB3048-022-Q1-L1-C6.pep
IYHISCVLFYSVLFISSHGARFEIRNDCSYTVCPATSPDGVLLLNLQQIWTINVLSGQRFDQIFGQPHFIHQAPNK

SEQ ID NO: 90082 - protein, 54 aa, Gossypium hirsutum
  Clone ID: LIB3048-022-Q1-L1-C9.pep
QSISSLNHTLLIISSILPKQTNLKFYHLNPIYPSSLTSLLTTNLNFSLHQNNIF

SEQ ID NO: 90083 - protein, 62 aa, Gossypium hirsutum
  Clone ID: LIB3048-022-Q1-L1-D10.pep
ISILNYTNLIHKTHFIITHFHNNSIYHFHLTQNLLTHQQHFILNNSLYHLKQSPISFFFQFT

SEQ ID NO: 90084 - protein, 126 aa, Gossypium hirsutum
  unsure (1)..(126): unsure at all Xaa locations
  Clone ID: LIB3048-022-Q1-L1-D11.pep
PASDDIKSSEYSLDRIYQKKIGIVPVFPKFSSQKFDNYISLSKKLHPQYEFIHTFYAKYLSRGESSMTDPIHRLFKPFDXLSADFKDFNVSSLQKFVAQSNFTLSTLYNNDPNYHTFIIKFYYNPL

SEQ ID NO: 90085 - protein, 78 aa, Gossypium hirsutum
  Clone ID: LIB3048-022-Q1-L1-D12.pep
PSSSHIKSTSHTLCLLYQNRTLFFYSLPKLSIPNFNYSISISKTHLSNSNFSNTSISNYHLPQNLLMTSTYLPTLPTF

SEQ ID NO: 90086 - protein, 92 aa, Gossypium hirsutum
  Clone ID: LIB3048-022-Q1-L1-D6.pep
MESQGQSSKLYHSTHYTISSFTKTFFTLTFNETKSKEYPSRSKTESMNLVYNILPITSDTKANLCSKYLTTLFTDKSRFNQLVIKKKISSSQ

SEQ ID NO: 90087 - protein, 41 aa, Gossypium hirsutum
  Clone ID: LIB3048-022-Q1-L1-D9.pep
MDHFDLYLAVVSSNVDLLDRVGERLTYNENTTAGRWRQNRN

SEQ ID NO: 90088 - protein, 139 aa, Gossypium hirsutum
  unsure (1)..(139): unsure at all Xaa locations
  Clone ID: LIB3048-022-Q1-L1-E11.pep
YKWGIPPAAIIHHDGLSILSLLLNSSISILNHVKTLTTKTITLDVESSDTIYNVQTKIQYKXSIPPHQQRLIFADKQLXDNRTLADYNIHKXSTLHLLLPLTCGMQIIVKTLTVXTITLXVESYYTIDNVKANIHDNEC

SEQ ID NO: 90089 - protein, 112 aa, Gossypium hirsutum
  unsure (1)..(112): unsure at all Xaa locations
  Clone ID: LIB3048-022-Q1-L1-F11.pep
MSVCSSSSSTGKACIVHSILAGTSIAISIDTHSYLDQSTKFLTHVNXIIPITYASSRFESKPFDHILEKPMIHRTXRXSKLATTLNHLVEATYDEKIAQCFQGYGADAIITS

SEQ ID NO: 90090 - protein, 100 aa, Gossypium hirsutum
  unsure (1)..(100): unsure at all Xaa locations
  Clone ID: LIB3048-022-Q1-L1-F12.pep
SALQLDDPPCCNNSPPPQLYHSHSFTHSQVXHPLILKTILSLYTDQSNFFHIFILTILQLSIILTPYPTSLNIPYTYFKNHTLYNTTKICTLYHISHLLY

SEQ ID NO: 90091 - protein, 144 aa, Gossypium hirsutum
  unsure (1)..(144): unsure at all Xaa locations
  Clone ID: LIB3048-022-Q1-L1-F3.pep
LSLKMVLFVHVLVVVGFGINGVYGLLSSSTLRNIDNINMEGPYLGIIVPNSFEMNPLLQTGSFLEDHKMPYLDFAGRRFRIGRLENERVIIVMTGLSMLNARIATQLLITIFKVKGILHYGIAXGNAKSQLQIGDVTIPQFWAH

SEQ ID NO: 90092 - protein, 63 aa, Gossypium hirsutum
  Clone ID: LIB3048-022-Q1-L1-F6.pep
MAMVPSIIYHNYRVNHLGSPCVHNGVSIDTIATQEFFYWILNQADTTMLRMSYYSIGVILDAH

SEQ ID NO: 90093 - protein, 74 aa, Gossypium hirsutum
  unsure (1)..(74): unsure at all Xaa locations
  Clone ID: LIB3048-022-Q1-L1-F9.pep
YRTPIAASITTHSYLSQASKFPSLLIXIIPTRYSSCIYQSXPFYHILIKPIIHSTFHKSNLSTTLNHLLTTTHN

SEQ ID NO: 90094 - protein, 57 aa, Gossypium hirsutum
  unsure (1)..(57): unsure at all Xaa locations
  Clone ID: LIB3048-022-Q1-L1-G10.pep
EWEFCECVYRIFIVEWFRIASMLXRKCRCVFFNNRRVGIESCGELLQQWGSSSCRRE

SEQ ID NO: 90095 - protein, 49 aa, Gossypium hirsutum
  Clone ID: LIB3048-022-Q1-L1-G11.pep
QQPPDYDHIINTRLLPYNSTIDLTLITQILHQSNAIYHLTTTSIAYTLT

SEQ ID NO: 90096 - protein, 48 aa, Gossypium hirsutum
  Clone ID: LIB3048-022-Q1-L1-G12.pep
INNTIMFMKLLIRFNMTYCNIRHIIIMNIMASAYVHTTLLLYLLLPFT

SEQ ID NO: 90097 - protein, 80 aa, Gossypium hirsutum
  unsure (1)..(80): unsure at all Xaa locations
  Clone ID: LIB3048-022-Q1-L1-G3.pep
IQYKTRIAPNQHIWMVHVKLLGVSKTLADSIIQNESTLHLVLRMRSXMQIIVKTFTGKTITLNEQRLTSYDNVNAIDQNK

SEQ ID NO: 90098 - protein, 26 aa, Gossypium hirsutum
  Clone ID: LIB3048-022-Q1-L1-G7.pep
PLTNTHFTSIIYHTNLNLYYLKFTLT

SEQ ID NO: 90099 - protein, 78 aa, Gossypium hirsutum
  Clone ID: LIB3048-022-Q1-L1-G9.pep
APTLFNNSPPSMFSHSITPTSKFCLLLSTPRFFPFIVCLIFPFLLKYFINLNVDVSPLYIYLIHSCMPFFFQLNSINP

SEQ ID NO: 90100 - protein, 97 aa, Gossypium hirsutum
  Clone ID: LIB3048-022-Q1-L1-H1.pep
NTPRIIIMDVASIGGVPILIACSICIIQRAIKTPHQLLKTDHDEVIMADCLQLDFDTDRTATNNFTDAHNACPIVGYRAVYNAQLPNGEEVAVKRLV

SEQ ID NO: 90101 - protein, 49 aa, Gossypium hirsutum
  Clone ID: LIB3048-022-Q1-L1-H7.pep
SCSICKLSNEICSCAYFSGSTRSYKCAANIQLRVANFFSVSFKLSIALC

SEQ ID NO: 90102 - protein, 79 aa, Gossypium hirsutum
  Clone ID: LIB3048-022-Q1-L1-H9.pep
SAIIHHQNTLYFSLKRPKDKEDFNTYSEIKTVFTGPYIFDKNGLSSSFIYRPSYNTLKFTINPRNLSFSIFPRNFFSIL

SEQ ID NO: 90103 - protein, 53 aa, Gossypium hirsutum
  Clone ID: LIB3048-023-Q1-L1-A2.pep
DSYYAVSAVRSVALTLYDPLSNNGNSLALVPEHSITRNVHWTHTSQIVELSNA

SEQ ID NO: 90104 - protein, 45 aa, Gossypium hirsutum
  Clone ID: LIB3048-023-Q1-L1-A5.pep
YSNTLHIYPNLKLYALTNLYHYKPFSITPLSTNFRYSKTSYSTPK

SEQ ID NO: 90105 - protein, 32 aa, Gossypium hirsutum
  Clone ID: LIB3048-023-Q1-L1-A8.pep
TYISLSQKHYYNSYLLFTAFTLLTLSPYFRFS

SEQ ID NO: 90106 - protein, 51 aa, Gossypium hirsutum
  Clone ID: LIB3048-023-Q1-L1-C3.pep
FSFSFAISHLYYWYVQNDGHARYQYLNTLLCLTLCLPTSPFTLNFNLPILL

SEQ ID NO: 90107 - protein, 101 aa, Gossypium hirsutum
  Clone ID: LIB3048-023-Q1-L1-C7.pep
AAYCFSAPRPGCSNNTCGVTPDNSVTHVATSGEVAQDVVSIQSTDGKNPGRVVSVPRFLFACAPSFLLQGLATGVVGMAGLGRTRIALPSQFAAAFIFHRK

SEQ ID NO: 90108 - protein, 48 aa, Gossypium hirsutum
  unsure (1)..(48): unsure at all Xaa locations
  Clone ID: LIB3048-023-Q1-L1-D1.pep
WGMGTGIQRILTTEIVKSNLPTQTVISTSRXTFNYLIMITATCSTVIM

SEQ ID NO: 90109 - protein, 44 aa, Gossypium hirsutum
  Clone ID: LIB3048-023-Q1-L1-D2.pep
ASADERLTCVQVYRSSHVRASNLYSSNHDTTTSLTNTRITCAIQ

SEQ ID NO: 90110 - protein, 144 aa, Gossypium hirsutum
  Clone ID: LIB3048-023-Q1-L1-D6.pep
LKHHSFKDAAEHEKASKPAWLLALEIATGIMAGSLFLVAILTAFQRCRSKPAIIIPWKKSGSEKEHLMVYVDSELLKDVTKFGRQELEVSCEDFSNIIGSSPDSIVYKGTMRGGPEIAVISLCIKEQHWTGYLELYFQREGADL

SEQ ID NO: 90111 - protein, 55 aa, Gossypium hirsutum
  Clone ID: LIB3048-023-Q1-L1-F1.pep
SPFKINSNIHISTHLCTLYLNLITTLTTTSSLQHMTTIPSPTPQIFQLYTIIQKF

SEQ ID NO: 90112 - protein, 50 aa, Gossypium hirsutum
  Clone ID: LIB3048-023-Q1-L1-F4.pep
LNHLFTNLLHTTNCTLKIYTVLLFIAIPLMLHTTILTITYMHLLIVRIYI

SEQ ID NO: 90113 - protein, 108 aa, Gossypium hirsutum
  unsure (1)..(108): unsure at all Xaa locations
  Clone ID: LIB3048-023-Q1-L1-H4.pep
EWKDMVAIKIEGXVQKYREADMIEIETLHQLIHHDKGGNRCVQILYWYDYRNHICIVFEKLAPHLYYSLRINNYRSFTIEFVREIGRQLLKCVTFMLDLNLIHTDLKP

SEQ ID NO: 90114 - protein, 58 aa, Gossypium hirsutum
  Clone ID: LIB3048-023-Q1-L1-H5.pep
NAINYDRILIQRPLKFLNFFKLKLLLWVSGLCIFRVYEFSLSRNGGRLSVSSISTHSL

SEQ ID NO: 90115 - protein, 145 aa, Gossypium hirsutum
  Clone ID: LIB3048-024-Q1-L1-A4.pep
ESVVPSIYIGQFARLLEQGDDPAMQSITDDEYTRYAIAEGKRFQDSFEIIALLKKSNEIYSNLKVQRMGSLCAFQIAREYFSLGDFNNAKQQFDGVANLYRQEGWVTLLWEVLGYLRECSRKQGAVKEFVELSLEMAALPVSIVD

SEQ ID NO: 90116 - protein, 138 aa, Gossypium hirsutum
  unsure (1)..(138): unsure at all Xaa locations
  Clone ID: LIB3048-024-Q1-L1-A7.pep
HLTNELSYIIEKLPYDVLDMDLVAEQRVHLFLAWSLLLSHLSSLPSLSNPRXRLVQYIQNSGNPLILDCLFQHLLSDLSLMHVLKKKDGEPPNIISXAXTASKCSITSGSVLISAESLWPIDPVKMAAFAGAIYGLML

SEQ ID NO: 90117 - protein, 147 aa, Gossypium hirsutum
  Clone ID: LIB3048-024-Q1-L1-B4.pep
FVQEICASYLARNFMWAMSNKIFKDTPYELLLLCIKHPHLTIDGEKHLSDALLIWLHSNTEQLERSSKTECEFFDILKQIRISLLPLWFAAGKRSSISFSELANESVDSIFKLMKVTPKGSMNVLSDGDLSHLRIRLTKYSKVFPYL

SEQ ID NO: 90118 - protein, 77 aa, Gossypium hirsutum
  Clone ID: LIB3048-024-Q1-L1-C1.pep
EHTLQSLTNKTAPRGLQFHTHYHNRNQSTMIYILIHHTTLPNSLTLHIMQANIYSLFLYNRRFQHSIYTKFLLLVLT

SEQ ID NO: 90119 - protein, 52 aa, Gossypium hirsutum
  unsure (1)..(52): unsure at all Xaa locations
  Clone ID: LIB3048-024-Q1-L1-C4.pep
KTGGISCYPCTXSIRGKDDPMCHMIVRGISMARRAEDLFNPMNRSLQEVQLT

SEQ ID NO: 90120 - protein, 42 aa, Gossypium hirsutum
  Clone ID: LIB3048-024-Q1-L1-D5.pep
PLNIHAVQNLKWSNHIRLSLFDAVYMVHASLLKHYILSHQVY

SEQ ID NO: 90121 - protein, 90 aa, Gossypium hirsutum
  unsure (1)..(90): unsure at all Xaa locations
  Clone ID: LIB3048-024-Q1-L1-D7.pep
GGTSPFRHFPVVHGTQITMINSTARLDTASPISCGIXTDFNATENVAKPKRVQTDALLALGAVGLAYFEGPWICGASRFIPVDVNPIRFE

SEQ ID NO: 90122 - protein, 46 aa, Gossypium hirsutum
  Clone ID: LIB3048-024-Q1-L1-E4.pep
PQCSHLCLILRRSRSMRSPAFTTHAVLPTEWSLLHPGLISMTQLLT

SEQ ID NO: 90123 - protein, 90 aa, Gossypium hirsutum
  Clone ID: LIB3048-024-Q1-L1-F5.pep
SLAFSTTSGYHVHDSFSHIDRSLEDTILVHTAAYYIYPTPLELKSLNKSSSESVSSPEGNHHDAPAPEENHDHTLTPVSFLAEKITHDEV

SEQ ID NO: 90124 - protein, 42 aa, Gossypium hirsutum
  Clone ID: LIB3048-024-Q1-L1-G1.pep
ISCLTIPLTTTFNPFLESCNINVILQSTYPYNYNVPTNKTNP

SEQ ID NO: 90125 - protein, 136 aa, Gossypium hirsutum
  Clone ID: LIB3048-025-Q1-L1-B2.pep
MRMDGNGDAVDDQHPNPSLFPLFPAAASTVTSTSGIYQWLSNPSFTTDLSLINDAVSSLPRSLDDVQEEEDAQEEEENEAKQQQQEKLPHSYELLEEDEEEQEEEEDSDGDKYGKRKRKKRSMRRNTKKKISKEIG

SEQ ID NO: 90126 - protein, 124 aa, Gossypium hirsutum
  Clone ID: LIB3048-025-Q1-L1-C10.pep
KIQRDETRNEERMGKQKQYGYHCHKREKEKCKSPELEKQKRVVINTQPSERVPSSHSLHFFQPSSSANVQIENSCSRVNDLGPFVKIAQSRCRESSSTANTEGGSCSTSLFGSVLRGSMDFLDP

SEQ ID NO: 90127 - protein, 71 aa, Gossypium hirsutum
  Clone ID: LIB3048-025-Q1-L1-C7.pep
NAVKRHASFLFFLILNFVHLFCQLEHIKQYIYMHICVCVPSVKFFVMYLIKSTLCLAAGISDLRLYFSFIF

SEQ ID NO: 90128 - protein, 50 aa, Gossypium hirsutum
  Clone ID: LIB3048-025-Q1-L1-C9.pep
TNYFLLRLMGFCHVRDSLAILIAEFYNHNKREDDFITRAVWATSNRRRTQ

SEQ ID NO: 90129 - protein, 48 aa, Gossypium hirsutum
  Clone ID: LIB3048-025-Q1-L1-D9.pep
KQTILRTECMKLWGYRTCACTKAHVQVNGLIGSCVRNCDDLAEPYVCL

SEQ ID NO: 90130 - protein, 64 aa, Gossypium hirsutum
  Clone ID: LIB3048-025-Q1-L1-E4.pep
PVFPMKILNLIYIVKKKNQKVCSIEDSCLWILQVSLIALTCPLKREKDLDPLQTTTIYNIVSLC

SEQ ID NO: 90131 - protein, 41 aa, Gossypium hirsutum
  unsure (1)..(41): unsure at all Xaa locations
  Clone ID: LIB3048-025-Q1-L1-E6.pep
EXQGFTQRPIDFTPLXSTTNTAMNIIAGCPFTSPTLDAEXS

SEQ ID NO: 90132 - protein, 54 aa, Gossypium hirsutum
  Clone ID: LIB3048-025-Q1-L1-F9.pep
QPCTLCRDIHEIIHVGLQFDVHVETACKLVHRDCIKPAITRDLLCVYVIADVQR

SEQ ID NO: 90133 - protein, 42 aa, Gossypium hirsutum
  Clone ID: LIB3048-025-Q1-L1-G4.pep
DPALPVWMQDCRFCRISDLQSRLIRHHFVRSLILYKKKLLER

SEQ ID NO: 90134 - protein, 34 aa, Gossypium hirsutum
  Clone ID: LIB3048-025-Q1-L1-G9.pep
LTRTTRFFILYPRGGTVLWLALDDASVFNGCLWA

SEQ ID NO: 90135 - protein, 63 aa, Gossypium hirsutum
  Clone ID: LIB3048-025-Q1-L1-H2.pep
KLHLRMLIIFWVILNHSYNEKSVPVNIIHFMLQFSCSKQCMQASDHAYVDTVDISIWRVVEVH

SEQ ID NO: 90136 - protein, 59 aa, Gossypium hirsutum
  Clone ID: LIB3048-025-Q1-L1-H5.pep
LASYFILYHNLRLGFLIIACTLLYRLKNTLIISISTIIFKLIHQKIFDHYITSILSTYH

SEQ ID NO: 90137 - protein, 116 aa, Gossypium hirsutum
  unsure (1)..(116): unsure at all Xaa locations
  Clone ID: LIB3048-026-Q1-L1-A4.pep
MPTITYHIFPRFIHYHSQFIQYSFFGNLXFEITYQYRPTITPIVPETYCIAXSMLNSETNELVTVKKIPNAFHNHMDAXRTLREIKLLRHLDNQTVIDIKNVIPPPLRIDFNDDYI

SEQ ID NO: 90138 - protein, 76 aa, Gossypium hirsutum
  unsure (1)..(76): unsure at all Xaa locations
  Clone ID: LIB3048-026-Q1-L1-A9.pep
MTKNVGILAMEIYFPSTCLYQEAFAANDVPSKVKYTIGLXHDCIAFCTDTEDVIXSMSLTAVTILLAEYDIDPKQI

SEQ ID NO: 90139 - protein, 67 aa, Gossypium hirsutum
  Clone ID: LIB3048-026-Q1-L1-B9.pep
MATNRLATMHHKNTNRITLIPVYGLLKSILIILLLQNPLSSYLTMKTTDYLALKRPCLWCSMLDHIF

SEQ ID NO: 90140 - protein, 57 aa, Gossypium hirsutum
  Clone ID: LIB3048-026-Q1-L1-C8.pep
SKKRKIGRKRVKNDICRLVFYFKIMNSTSNQTLANFAIIIIGIYTSLLVPAGTSLHC

SEQ ID NO: 90141 - protein, 22 aa, Gossypium hirsutum
  Clone ID: LIB3048-026-Q1-L1-D3.pep
VLDISYDKIANGSEIRYQLNEQ

SEQ ID NO: 90142 - protein, 89 aa, Gossypium hirsutum
  Clone ID: LIB3048-026-Q1-L1-F4.pep
MVLLKLILMVTYFIDSVYFCQNSSTIFIGIYTLTNSLYSSIMIPDTDYTTVVKPITGTPYAIITPLKSLHALSTIGSFTLHSIQLMILT

SEQ ID NO: 90143 - protein, 59 aa, Gossypium hirsutum
  Clone ID: LIB3048-026-Q1-L1-F9.pep
INYELARIMTILILRTLKLDIIHRSRHQTHYNSQDTTCPNLVHEDVIKAYITILLTLCV

SEQ ID NO: 90144 - protein, 144 aa, Gossypium hirsutum
  unsure (1)..(144): unsure at all Xaa locations
  Clone ID: LIB3048-026-Q1-L1-G3.pep
TTCLIGHPVEVHVRSGSIYTGIFHATDAXNDFGIILKMARLIKDGSLCGYKSTTEFVSKAPSKILIIPDKELVQIIAKDVAVTRDGFASDPQNEKYHEILIDSAISQSRHVEVDRELEPCVPDEDDLQCPELENIFDGPWNMNW

SEQ ID NO: 90145 - protein, 86 aa, Gossypium hirsutum
  Clone ID: LIB3048-026-Q1-L1-G9.pep
HLDHDSNFNISYLLISYYYLHCLTIRTISSNPEQHTTAALTAYDLQDYLANKENLEQLSMMPMTPFITGSTIMELTHGLHTTLMPL

SEQ ID NO: 90146 - protein, 51 aa, Gossypium hirsutum
  Clone ID: LIB3048-026-Q1-L1-H12.pep
HLLTSRDSLYITRINATVHRKHAGSAIHHASTTLTILYFHVMITFINLLLP

SEQ ID NO: 90147 - protein, 48 aa, Gossypium hirsutum
  Clone ID: LIB3048-026-Q1-L1-H3.pep
NPYCIKAHKFTSLAVFTIIENLPVTLVDAIPTMTGLCEISKSGLNRYN

SEQ ID NO: 90148 - protein, 53 aa, Gossypium hirsutum
  Clone ID: LIB3048-026-Q1-L1-H6.pep
PQHHNFQNSVSIQTVLVSIIEVFIRVLNQNHYWISLNVKFDSFYLETIEAINN

SEQ ID NO: 90149 - protein, 147 aa, Gossypium hirsutum
  Clone ID: LIB3048-026-Q1-L1-H7.pep
FTRVFASLPDDVKLDEQLSEKMALVQQFVRPENLDIKPAFQNETSWLLAQKELQKINMYKAPRDKLVCILNCCKVINNLLLNASIASNENPPGADDFLPVLIYVTIKANPPQLHSNLLYIQRYRRQSRLVSEAAYFFTNMLSAEAFI

SEQ ID NO: 90150 - protein, 77 aa, Gossypium hirsutum
  Clone ID: LIB3048-026-Q1-L1-H9.pep
TLPLHAGLQQICVLNVLHKLLHTIYYSYPITTSITTFLITSSTYNIDDPLHHILSNHCVYYITLACLLYSIALYLFY

SEQ ID NO: 90151 - protein, 69 aa, Gossypium hirsutum
  Clone ID: LIB3048-027-Q1-L1-A9.pep
QIQERKPQAKGCAGITLKRGVTLEPSSNNKPYWHDNSLNLTLTNQFHIMCSLPPHIATLHIISFPNEKP

SEQ ID NO: 90152 - protein, 31 aa, Gossypium hirsutum
  Clone ID: LIB3048-027-Q1-L1-B10.pep
NWMVKFGFKDGIHEDWSMLLYWVGLTEPRDK

SEQ ID NO: 90153 - protein, 144 aa, Gossypium hirsutum
  Clone ID: LIB3048-027-Q1-L1-B5.pep
SSRSKMAAAEHMGYNYAMFGFSPYGQYWREMRKITMLEVLSNHRIDQLKKVFVSEIEGSIKDLYKFWVKEKDGESGLAAVEMKKRFLDLTLNVILKTVAGKRYSGVGKEEQQVVSRYRKALRDFFYLSGIFVISDAIPFLRKLD

SEQ ID NO: 90154 - protein, 51 aa, Gossypium hirsutum
  Clone ID: LIB3048-027-Q1-L1-C8.pep
VHPKVEGERERESHRISSGDHLFSISTFFASIISCISLCSRSLSALTFMYR

SEQ ID NO: 90155 - protein, 62 aa, Gossypium hirsutum
  Clone ID: LIB3048-027-Q1-L1-E3.pep
ELAGGDADISILLFPDSNSVECICSYFRLLCYIIIRCLILAILRLSNQQSISSSNGRISAIT

SEQ ID NO: 90156 - protein, 60 aa, Gossypium hirsutum
  Clone ID: LIB3048-027-Q1-L1-F2.pep
KCDMLVSLLYQNYELNYESDACQFCYYYYWYLYLTASACCYILPLLKNCFNLGVKLNSCL

SEQ ID NO: 90157 - protein, 141 aa, Gossypium hirsutum
  Clone ID: LIB3048-027-Q1-L1-F6.pep
LEDHSQLESGPWSLYESGPHGTFVGIYDGHGGPATARFINEHLFGYIKKFTTENGGMSADVINKAFLATEEDFLALVRKQWLNDPHMASVGSCLLVGIVCSGMLYIANAGDSRVVLRRLDNTYKEVKAVPLSSEHNASVES

SEQ ID NO: 90158 - protein, 106 aa, Gossypium hirsutum
  Clone ID: LIB3048-027-Q1-L1-F9.pep
QLRGLQMLHLVLENQSYGLILSALQFQMHPLLSVMHLHIFSILPCYCITPCNYCTSTSLLNICIVNDDLNHPLNITTLMFNQTNHLMLNHKHNTGCSTSLLYTYHS

SEQ ID NO: 90159 - protein, 72 aa, Gossypium hirsutum
  Clone ID: LIB3048-027-Q1-L1-H4.pep
PHLREAEAPIKLGCPRPAYLPHYIYDESPKAKVLTLIRHSKKGSSKPRSMTKGPENDFFTLLHESLFSPTDQ

SEQ ID NO: 90160 - protein, 68 aa, Gossypium hirsutum
  unsure (1)..(68): unsure at all Xaa locations
  Clone ID: LIB3048-028-Q1-L1-A6.pep
CFCFPGAPSLLVFFVSCCCFVSLAPCCSGALWAXPCPLXCGSGLRVVLLALXLRAPPPCCSPCLLPFP

SEQ ID NO: 90161 - protein, 92 aa, Gossypium hirsutum
  unsure (1)..(92): unsure at all Xaa locations
  Clone ID: LIB3048-028-Q1-L1-A8.pep
QGEKLIQLERGKGIVIRFMIGHSATSNSILDRAIDSEEAQHKDFFRLEHVERYHELSAKTKIFFSTAXAKWDAEFYVKVDDDVHVNLGMLAT

SEQ ID NO: 90162 - protein, 98 aa, Gossypium hirsutum
  Clone ID: LIB3048-028-Q1-L1-B4.pep
RSYFNNLFTTGDSGNYDHVLSSIDHCVSKEDNVKFTAVYTNEEIRAVVFEMGATKAPKEDGLLTLFYQKYWHIIGDEVTSFRLQILNGDMEVSSMNST

SEQ ID NO: 90163 - protein, 65 aa, Gossypium hirsutum
  unsure (1)..(65): unsure at all Xaa locations
  Clone ID: LIB3048-028-Q1-L1-B9.pep
RVIGLSEVSDAWVLXISGFXDVLHQXVGNEEEKGIYLCEALVKRLXAIXLMXXFKRPEKHQLPQL

SEQ ID NO: 90164 - protein, 44 aa, Gossypium hirsutum
  unsure (1)..(44): unsure at all Xaa locations
  Clone ID: LIB3048-028-Q1-L1-C7.pep
VSARLWQETNSRXWRMQDPGSPLSSSPGSTIGSPANFSQPKRVS

SEQ ID NO: 90165 - protein, 42 aa, Gossypium hirsutum
  Clone ID: LIB3048-028-Q1-L1-C8.pep
CLQGSNRRLVTAAGEDRAQAQHSHQAPLLQKEHNLTLNAQTA

SEQ ID NO: 90166 - protein, 95 aa, Gossypium hirsutum
  Clone ID: LIB3048-028-Q1-L1-E9.pep
QGKCIQSDIFTVVRYYRAIYPYPDRQNPQDSAMYVYVFIALATYGTDAPALFELTLADQSSKRTHNVHSHFDRPLDSPPYTSNYRASIWRYKPFF

SEQ ID NO: 90167 - protein, 63 aa, Gossypium hirsutum
  Clone ID: LIB3048-028-Q1-L1-G12.pep
KHVSFLRKYRADIERMGVGHQSREVVEENSPRKKKDGGLDETGCCVNSRLMVRSMSAISTLDN

SEQ ID NO: 90168 - protein, 106 aa, Gossypium hirsutum
  Clone ID: LIB3048-028-Q1-L1-G5.pep
NVSSIMKFRTLRMHYNLQVLPSLDVSFELSPCPSRLEEFLLRMDVVNKTSSECFQIHQLSSVGQQWDVSLLQPVDSILPSQSLFAGQVLSCFFMLKYHRKSSTSED

SEQ ID NO: 90169 - protein, 113 aa, Gossypium hirsutum
  Clone ID: LIB3048-028-Q1-L1-H1.pep
VESAFKAIHDFSKPLINMMKAAGWDLDAAADSIEPNVVYAKRAHKKYAFESHICQRMFSGFQEENFSINLDNLTVNKESFFHQYLALREMDPLDMLSQNPDSVFGKFCRSKYP

SEQ ID NO: 90170 - protein, 61 aa, Gossypium hirsutum
  unsure (1)..(61): unsure at all Xaa locations
  Clone ID: LIB3048-028-Q1-L1-H5.pep
VWXLAXXVXVSSPWPGSRSRPGFPFSFSFSXFACCAVPWLAVPRAVFRPARALCGCCLSPS

SEQ ID NO: 90171 - protein, 99 aa, Gossypium hirsutum
  unsure (1)..(99): unsure at all Xaa locations
  Clone ID: LIB3048-028-Q1-L1-H6.pep
KRKEXAQELQERREQGQARXRRXQTQQRPDXRENXETTSGYCYRRMDGHTPVKQRMALIDEFNNSDDIFIVILTTKVGGLGTNLTGANRVIIFDPDWNP

SEQ ID NO: 90172 - protein, 89 aa, Gossypium hirsutum
  Clone ID: LIB3048-029-Q1-L1-C2.pep
NRYGANIIAVVINITHTLKTFMSILLSAQSHLITHAINNNTPYKMHLPILSLRNTLHEIKILFLHYNHVNLKKTLGALQLYETDEISAT

SEQ ID NO: 90173 - protein, 75 aa, Gossypium hirsutum
  unsure (1)..(75): unsure at all Xaa locations
  Clone ID: LIB3048-029-Q1-L1-C4.pep
FTRKKEQLNTCIVEFKLIGSKMKNSVSDHSFYIESDEEDEEKVFIPDENGEEVDGNESDDSDSXAENQQQNKPRN

SEQ ID NO: 90174 - protein, 55 aa, Gossypium hirsutum
  unsure (1)..(55): unsure at all Xaa locations
  Clone ID: LIB3048-029-Q1-L1-D12.pep
STVTCPVXFXIIPFTILIQTIDLYSLHRIGVPLRFLLSAHRSFSLSYFRTLRIPE

SEQ ID NO: 90175 - protein, 129 aa, Gossypium hirsutum
  Clone ID: LIB3048-029-Q1-L1-D3.pep
TALTCLQLAFAVYATILLYYMSPSVELRTKPEFTWATRIARNMKQFIIPPHVHGRYQEAASLITAEIFSPITPSQVCEHERIDFVQKKSSDVQMIKLKRELYDEILDFQSKTIGTETLSELMAMKSQWD

SEQ ID NO: 90176 - protein, 127 aa, Gossypium hirsutum
  unsure (1)..(127): unsure at all Xaa locations
  Clone ID: LIB3048-029-Q1-L1-D6.pep
YYPAYSKVKQWAGHVHATAPKMTVDHQNRPRGLHHRRAGPHRSIXYDYDDVHSCIVSCDGHXCNLSNQLSEIVCNLCHMYSVKSDAGIDVLHRSHDARYSVHLDPDDCNDIHIRRSTILGTSSGMHD

SEQ ID NO: 90177 - protein, 53 aa, Gossypium hirsutum
  Clone ID: LIB3048-029-Q1-L1-E12.pep
TRFKFHLLHNLNLHIYARSPQILYNCHLTTLITHLLPTSNILTLPIPFFYQTK

SEQ ID NO: 90178 - protein, 73 aa, Gossypium hirsutum
  Clone ID: LIB3048-029-Q1-L1-F8.pep
IQHLLPMGGLSSILALIIIPTQIFRNTLSNLINIQLYFITLYHLHLLKNFIIKTLANINHIISLFPRTKYTRI

SEQ ID NO: 90179 - protein, 70 aa, Gossypium hirsutum
  Clone ID: LIB3048-029-Q1-L1-G3.pep
MVLFDSSISPLTHSAKLSSPLLLSSLSHRPLRYAVLGAGFAGLFVAWHLLKESPKDLNLHIDLYDEMGIG

SEQ ID NO: 90180 - protein, 143 aa, Gossypium hirsutum
  Clone ID: LIB3048-029-Q1-L1-G7.pep
QMGAMGQTGWHHDSHGETNGNLEISPNGIYANGSWKGAEPGFHQNHDGMHWGNKRNELQDNSVYGNGNFRGYEADAQSTSNMQNQVWSYWQGPKEIRQNQYDLNLPRFTESQGSHLNSQGPNFSQYRQKPQDVYNFSSFGQVT

SEQ ID NO: 90181 - protein, 133 aa, Gossypium hirsutum
  Clone ID: LIB3048-030-Q1-L1-A12.pep
MEPQNPQTSENLDSNPTSPSPANLVHKVKSNLVFQSKWAELNGAMGDLGTYIPIVLALTLAKDLDLGTTLIFTGVYNMVTGVIYGVPMPVQPMKSIAAVAISDGPDFNIPEIMAAGICTGAIFLVGLGCYRVD

SEQ ID NO: 90182 - protein, 107 aa, Gossypium hirsutum
  unsure (1)..(107): unsure at all Xaa locations
  Clone ID: LIB3048-030-Q1-L1-A9.pep
DFVGSNGCLEKARXEENEEARDRDKTIKMLKEEIDSLKAKIAELESNNSEDIENKEMLMQKPPMLQKFDQKLPLKLDDATKSYTPYIRYTKLEFKVDTFFAVGSPLG

SEQ ID NO: 90183 - protein, 136 aa, Gossypium hirsutum
  unsure (1)..(136): unsure at all Xaa locations
  Clone ID: LIB3048-030-Q1-L1-D12.pep
TSSTLASLSKGCAELSTDGQFLQMRSKXRRITGVGDGIIQGAEALAQGVAFGVVGVVRKPVENARQYGLLGLAQGIGRAFLGIFVQPVSGVLDFFSLTVDGIGASCSKCLEVLNNKSTFQRIRNPXPELFVLMVYL

SEQ ID NO: 90184 - protein, 46 aa, Gossypium hirsutum
  Clone ID: LIB3048-030-Q1-L1-D5.pep
SSVWVRLSHCYSYDISLQNFFNSLSLLNVLNCLYTFKNNLSFIFPL

SEQ ID NO: 90185 - protein, 50 aa, Gossypium hirsutum
  Clone ID: LIB3048-030-Q1-L1-E10.pep
CKSIVVNIHLLTMVINSMLFTEIIKCECYNNRMRTHRLADGIRSHNHSLD

SEQ ID NO: 90186 - protein, 60 aa, Gossypium hirsutum
  Clone ID: LIB3048-030-Q1-L1-F7.pep
LNLHPICHQYGLRIIATIFYNSFPKTLIKLNPLTFKNPSYIIKHLNFYIQHISFNNIILI

SEQ ID NO: 90187 - protein, 134 aa, Gossypium hirsutum
  unsure (1)..(134): unsure at all Xaa locations
  Clone ID: LIB3048-030-Q1-L1-F8.pep
FNSFTSLNSAKAEQKEKRKKMSSERKKNPEHFQLNPNWAQLQQKLKSSAKPSRHSKNPQSETPNSILGKRKERPNSETDDAKPNPLMPTNDDSSVTDVLAMDCEMVGVGQGNKSALGRVTVVNKWRNVXYDEFV

SEQ ID NO: 90188 - protein, 132 aa, Gossypium hirsutum
  Clone ID: LIB3048-030-Q1-L1-H1.pep
GSLLREKMVEGACKKFVCIVDESKLVKHLGGSGLALPVEIVPFCWKFTANKLQKLFQGSDCVAKLRNDGEGKPFVTDNGNYIVDLYLKKEMGDLQVASDAILRIAGVVEHGMFLDMATTVIVADLPFGIYID

SEQ ID NO: 90189 - protein, 61 aa, Gossypium hirsutum
  unsure (1)..(61): unsure at all Xaa locations
  Clone ID: LIB3048-030-Q1-L1-H3.pep
GSRLALPVEIAPFCWKFTANNLHKLFPGSHCLANLRNDGXWKPYVTDYRNYIVHLYIKNDM

SEQ ID NO: 90190 - protein, 50 aa, Gossypium hirsutum
  Clone ID: LIB3048-031-Q1-L1-A2.pep
INSTPDILLLYTVIHILLQGRLKGTYLYTTISTFIEYTYNSIFNINYISK

SEQ ID NO: 90191 - protein, 108 aa, Gossypium hirsutum
  unsure (1)..(108): unsure at all Xaa locations
  Clone ID: LIB3048-031-Q1-L1-A5.pep
HMGSSPPVNTTWWDNLDPYIXESPETSYFPLESLTSVCFTNYSISHPLKYSFHNILSHVGRNCILFDXTDRVRSTQQIRHLLPRMNPIIPTYHDSPNDQIIHFSYRRN

SEQ ID NO: 90192 - protein, 94 aa, Gossypium hirsutum
  unsure (1)..(94): unsure at all Xaa locations
  Clone ID: LIB3048-031-Q1-L1-B4.pep
TQPFPKLNSYIQFLNXSNLHILFFYLIYYKYLFXPNLIHFIFXNFLTIIYNNNFLLSLKLLIPIITYLFILNSHLYFYFLFILLKISXIITTKL

SEQ ID NO: 90193 - protein, 59 aa, Gossypium hirsutum
  Clone ID: LIB3048-031-Q1-L1-D3.pep
LNCGSRVYMNSARWHLLEFNCSVSSSLCRIFPSEASFSSLPSLISSSGIITIILQLLFN

SEQ ID NO: 90194 - protein, 73 aa, Gossypium hirsutum
  unsure (1)..(73): unsure at all Xaa locations
  Clone ID: LIB3048-031-Q1-L1-D4.pep
EXYKNSTLSNSLRFIYLSPALSYRSFSHDVNLYNNSFPLTLPTXLYYSSILKSFLFPTLFFILTFIFPILLPY

SEQ ID NO: 90195 - protein, 77 aa, Gossypium hirsutum
  Clone ID: LIB3048-031-Q1-L1-D8.pep
EGTHINIVVIGHVYSLKSTTTFHLIYKLGGIYNLVIERFYKEASYMNNMSFKYSLFLDKLNAYLYLYITIYFAFWNI

SEQ ID NO: 90196 - protein, 40 aa, Gossypium hirsutum
  unsure (1)..(40): unsure at all Xaa locations
  Clone ID: LIB3048-031-Q1-L1-F9.pep
VSYNMKSLHRSMPLLFDGGCSLXWVNVSANNHDYFLDRLL

SEQ ID NO: 90197 - protein, 78 aa, Gossypium hirsutum
  Clone ID: LIB3048-031-Q1-L1-H4.pep
LISLVMLNKIGGLPFNLYCIHHYSISSLMKTSTTSEYIDSQTYGELSRSKYQLMNDDQNLLILTRNTNSDSVPNLQHH

SEQ ID NO: 90198 - protein, 36 aa, Gossypium hirsutum
  Clone ID: LIB3048-032-Q1-L1-C3.pep
ALTLSHYITLINLHIFSATKAQKLRINNNNRDQRRN

SEQ ID NO: 90199 - protein, 61 aa, Gossypium hirsutum
  Clone ID: LIB3048-032-Q1-L1-D11.pep
TYFKLNKLFLILNLNVPLYHNFNITYHTKIHPAFPTINYFNHHCFKLILSNHFLLPKLLTP

SEQ ID NO: 90200 - protein, 56 aa, Gossypium hirsutum
  unsure (1)..(56): unsure at all Xaa locations
  Clone ID: LIB3048-032-Q1-L1-D5.pep
XXKGSRPHXKQGEGAGQGGQSRADXEAQGGPKAPPPENSIHGESSSTVLTSIGACA

SEQ ID NO: 90201 - protein, 53 aa, Gossypium hirsutum
  Clone ID: LIB3048-032-Q1-L1-E11.pep
LNIVQIHIQFLGTKLIEFLRDSFVGNSGPVMISCIFPNAGSCEHTQNSEICSY

SEQ ID NO: 90202 - protein, 105 aa, Gossypium hirsutum
  unsure (1)..(105): unsure at all Xaa locations
  Clone ID: LIB3048-032-Q1-L1-E8.pep
VLLSLRFIQRICLGNRSNKHAVRNADLIPMIGDMLKSSSRKVRCKALETLLAVFEEDEYNKAILAEGDTVRTRVKYLSHEQSKEREEADILLYELSKTESXCEKI

SEQ ID NO: 90203 - protein, 97 aa, Gossypium hirsutum
  unsure (1)..(97): unsure at all Xaa locations
  Clone ID: LIB3048-032-Q1-L1-H3.pep
ARKRERSCAGPXAGAEKRGIAVFGVLVAVWMTRSITEDIPGWGTLFNGRAGDGTGSVLVADFLFVIPNKXRMGLKLIDWNECNKLPWNIILLLGAGF

SEQ ID NO: 90204 - protein, 58 aa, Gossypium hirsutum
  Clone ID: LIB3048-033-Q1-L1-B3.pep
HFALSTHCKNLRLRTYTLQCNPCITPFLITSLMSIISTTLDHYYVQATLTDTLSAHPL

SEQ ID NO: 90205 - protein, 55 aa, Gossypium hirsutum
  Clone ID: LIB3048-033-Q1-L1-C3.pep
NTYDYSITLHNQGEGPELVALTIYLSDLLHCHIYLILQNTTTIYLSQPHRFKTEH

SEQ ID NO: 90206 - protein, 95 aa, Gossypium hirsutum
  Clone ID: LIB3048-033-Q1-L1-C7.pep
SVLENDKLNGLNFLEWFFNLRIVLKQEQKLYVIQQPVPNEPPANASRADRDAYKKHLDDMVDVGCLMLATMNPELQKQHEDMVAYEMIEHLKELY

SEQ ID NO: 90207 - protein, 42 aa, Gossypium hirsutum
  Clone ID: LIB3048-033-Q1-L1-C8.pep
NLNSHSIPYFLFNLLFISSFSFASIFYPNSLLLTILASYATL

SEQ ID NO: 90208 - protein, 26 aa, Gossypium hirsutum
  Clone ID: LIB3048-033-Q1-L1-D11.pep
PPFNLPDTIHNFKSIVSIIKGTSQLC

SEQ ID NO: 90209 - protein, 77 aa, Gossypium hirsutum
  unsure (1)..(77): unsure at all Xaa locations
  Clone ID: LIB3048-033-Q1-L1-D3.pep
QHCFYQSPASKYNVPGINISVGRPEQATHPDALKAAFAXFISTLIIIFAGSVSGMALNKLTDNXATTPAGLVAVALA

SEQ ID NO: 90210 - protein, 40 aa, Gossypium hirsutum
  Clone ID: LIB3048-033-Q1-L1-D4.pep
PIEFQQLNISSCNCLRNLVDDNSSFKKVIVLRVWVCEGIE

SEQ ID NO: 90211 - protein, 54 aa, Gossypium hirsutum
  Clone ID: LIB3048-033-Q1-L1-F6.pep
IDIVTDIIRNYVKNHCYTKSRVRYNEWLMHWRFLFLMGCCTQGTMQMVVEALPW

SEQ ID NO: 90212 - protein, 147 aa, Gossypium hirsutum
  Clone ID: LIB3048-033-Q1-L1-G3.pep
GFTSTTYDPCVDISLDLEPNQGGSGKSSSAKSLNSFNVEADCMRPNQNCGISTLKGCLERFTRAEKLGSDQKLFCQKCQVRQESLKQMSIRKLPLVSCFHVKRFEHSSIRKMSRKVDRYLQFPFSLDMAPYLSSSILRSRFGNRIFP

SEQ ID NO: 90213 - protein, 107 aa, Gossypium hirsutum
  Clone ID: LIB3048-034-Q1-L1-A3.pep
RVYIQNLCYYDNDEMENTDSSARGSENILDRVDGLESIEETVTSLSQPVETKFNELSNLSMNRSNSLQTNEDYSRPLCGGEELANLTEPSLVGKPHRFCAEVSDGII

SEQ ID NO: 90214 - protein, 48 aa, Gossypium hirsutum
  Clone ID: LIB3048-034-Q1-L1-C2.pep
ISHNYISKPSILSNYTDLIFPEKLSLCDLLKGKTFNWFKLLKYLLNQD

SEQ ID NO: 90215 - protein, 58 aa, Gossypium hirsutum
  Clone ID: LIB3048-034-Q1-L1-D10.pep
RSSLVWFMVPSPTCSTVFTCQSCARICELISIPLHQSFLQNLLVINHLRSSSTQYPRC

SEQ ID NO: 90216 - protein, 139 aa, Gossypium hirsutum
  Clone ID: LIB3048-034-Q1-L1-D5.pep
KIPLKEQRGPQERLHLKSLHVRVDGEEGSRDVSFLQSFLSPIQKWADKQLGDYHLIFAEGSMVMEDIVTVAMIVRRLLLEESDIPVQSSTVSDRDQIELYISSSVKNSFARILQAVDKSDTMGEHPLALLAKEVKKLLK

SEQ ID NO: 90217 - protein, 132 aa, Gossypium hirsutum
  unsure (1)..(132): unsure at all Xaa locations
  Clone ID: LIB3048-034-Q1-L1-D7.pep
IRNYYSMAYLGKLPSVTPKYWLAFSASAPPLGLNTYFISSGXHIAIAAPSKNQVVYSSKEKHTDVIXVGPGDLKLVFSAXHRKLIGYINSRTNVKETVRQSYSFYTGATDIKQALGAYIFRPYGTNSLKLDH

SEQ ID NO: 90218 - protein, 41 aa, Gossypium hirsutum
  Clone ID: LIB3048-034-Q1-L1-E10.pep
HFKGHWEWSFMVACLYMGLGGSFFFIEYYKSINILNGRFNL

SEQ ID NO: 90219 - protein, 116 aa, Gossypium hirsutum
  unsure (1)..(116): unsure at all Xaa locations
  Clone ID: LIB3048-034-Q1-L1-F2.pep
MEVEIEASEMEVEEQPPIPSSTKKFGLKDYIQTNYGDDYVFQIVPRDDWTSMAVSLSTNAVKLYSPMTGQYFGECKGHSSTINHISFSGGSNLHVLHSCSSDGTIXAXDTRTFQQV

SEQ ID NO: 90220 - protein, 38 aa, Gossypium hirsutum
  Clone ID: LIB3048-034-Q1-L1-F4.pep
SRITTPYEHYNLNTPHRIHHPHDQTLYYISSILYNYYQ

SEQ ID NO: 90221 - protein, 57 aa, Gossypium hirsutum
  Clone ID: LIB3048-034-Q1-L1-H3.pep
STCSLILATHPDQLFNLPTLPCFCTRPPRLRLNRYTRLSRPLHLLSHGVRPHHASRH

SEQ ID NO: 90222 - protein, 61 aa, Gossypium hirsutum
  Clone ID: LIB3048-034-Q1-L1-H9.pep
LSSVILKQRFSGKEMKLKKFLSLSIFSGVFGMGFVYYITGFILIEDWVGLQTSAGSLNSMI

SEQ ID NO: 90223 - protein, 105 aa, Gossypium hirsutum
  Clone ID: LIB3048-035-Q1-L1-A5.pep
PLKAYTALYREAYLPRLHKSPKKMSLLSDEYLQHIPILLNSTVAGTLTIIMAPNSITGIRMHVDNIDCIIALKNINNMAHEPTAQDLVKPMTIVANTIQKPIPAL

SEQ ID NO: 90224 - protein, 57 aa, Gossypium hirsutum
  Clone ID: LIB3048-035-Q1-L1-C12.pep
HLMTYTLMILISLSKTKNILKNQILYIRNLFTILLTFKITSLKIKCILIETHIDSEN

SEQ ID NO: 90225 - protein, 37 aa, Gossypium hirsutum
  Clone ID: LIB3048-035-Q1-L1-C4.pep
RRKGCLIQTCTTELCHYDALHRTHLYRLVSQRNDVTA

SEQ ID NO: 90226 - protein, 66 aa, Gossypium hirsutum
  Clone ID: LIB3048-035-Q1-L1-D1.pep
WRAVARAWPLLRSFMMWSIGDGMTVRCWEDSWVPNKEPLKNFVLGYCSFHPRTTLVRWFCLMGIGI

SEQ ID NO: 90227 - protein, 36 aa, Gossypium hirsutum
  Clone ID: LIB3048-035-Q1-L1-D11.pep
RWHQHEMRNWKWTALTFGENSRIIGVKSDHCLTNKA

SEQ ID NO: 90228 - protein, 40 aa, Gossypium hirsutum
  Clone ID: LIB3048-035-Q1-L1-D4.pep
ITSILIVKSNDSTILDRLNALQPSYHRQLFLTRSICMNTA

SEQ ID NO: 90229 - protein, 92 aa, Gossypium hirsutum
  Clone ID: LIB3048-035-Q1-L1-G3.pep
GIHQEVRSIIPTFITVSLSLPTSLIQPSFLSPAAAPSPATPSHCHAKCGYTYSTAAINDSCLIYNDISPQDLFHLTSRTYGNKSQCPCSRYN

SEQ ID NO: 90230 - protein, 77 aa, Gossypium hirsutum
  Clone ID: LIB3048-035-Q1-L1-H11.pep
LSCQKCNLKNNLFMFVFLCQFGGSTASTRKGIDTHHNIHHPQHMIIDPTLLHSLALSHSANIYIFFLMFKDDCYSGM

SEQ ID NO: 90231 - protein, 39 aa, Gossypium hirsutum
  Clone ID: LIB3048-035-Q1-L1-H5.pep
YPLYTAVYLILLKTCMTVTRHCNELISSCLKHLLCIWTF

SEQ ID NO: 90232 - protein, 49 aa, Gossypium hirsutum
  Clone ID: LIB3048-035-Q1-L1-H8.pep
ESILSTLMILELCDARLLLQGKLICKISSPTISKKHNIPTTHIYTCKEN

SEQ ID NO: 90233 - protein, 40 aa, Gossypium hirsutum
  Clone ID: LIB3048-036-Q1-L1-A10.pep
GTAPNHIFTSYMLTLLYTPYSHKLINDTTLILNPRSTPSL

SEQ ID NO: 90234 - protein, 148 aa, Gossypium hirsutum
  Clone ID: LIB3048-036-Q1-L1-A11.pep
TGFGIPGGISCGYEDKTEWGTEIGWIYGSVTEDILTGFKMHARGWRSIYCMPKRPAFKGSAPINLSDRLNQVLRWALGSVEILFSRHCPLWYGYGGRLKFLERFAYINTTIYPLTSLPLLIYCILPAICLLTGKFIIPEISNFASIWF

SEQ ID NO: 90235 - protein, 144 aa, Gossypium hirsutum
  Clone ID: LIB3048-036-Q1-L1-A9.pep
IPGEELQKMVEVASSLNSTSSAGPNLGANMPEMSPDMLKMASDMIASMPPDDVQKMMSFASQMGGPGGAPRSSENINFGPSVRATTSNSARGSSSQPVLENPDELSDDQRMSQSSSSLPPSTADMQETMRNSMKDPAMRQMLTS

SEQ ID NO: 90236 - protein, 136 aa, Gossypium hirsutum
  Clone ID: LIB3048-036-Q1-L1-B11.pep
LPETLYQMFIVNAGPGFRLLGNTVKSFLDPKTTAKIHVLGNKYQSKLLEIIDASELPEFLGGTCTCPEYGGCLKAEKGPWKDPNILKIVQSGEVHCARQIVTISNGEEKFITYAKPKHHSMRGSDTSTAESGSEAD

SEQ ID NO: 90237 - protein, 68 aa, Gossypium hirsutum
  Clone ID: LIB3048-036-Q1-L1-B12.pep
PHNPPNSIHQILFSLYTLSFLRQAFYKGGDLLHNSLDFIHLLNILIHHTIFPITIPFYSHTSLFPTPP

SEQ ID NO: 90238 - protein, 134 aa, Gossypium hirsutum
  Clone ID: LIB3048-036-Q1-L1-B6.pep
PMLSLTVMSPQVTHFQWPSFFTIQSPSFHYSNSKNESRPRITKNPPQFSCFSSKDSCFLPEFDDLTSISTYHEDPDAGFRDRTPPSVSRNVGSDELAALLQSCSNGRQVRRVHAVVLKRLGNPVTYVENNLVSS

SEQ ID NO: 90239 - protein, 122 aa, Gossypium hirsutum
  Clone ID: LIB3048-036-Q1-L1-B9.pep
VSEFPGRPTRPCACCRPCQRPTPRTLTFRGANPVTVKTFSVDRMASVGGDSGGGGKTPPVAVATGNGRSNKSLYRLTRVSPQQPWAPLVSDVPQHSGHARHFGNDTLGGPVCQTAHPGALRS

SEQ ID NO: 90240 - protein, 86 aa, Gossypium hirsutum
  Clone ID: LIB3048-036-Q1-L1-C11.pep
AIFLIPFTIHNLLHHQYSIFLTSINTPCILKQYSIHPKSFHYLITLTTLFTLTFTTLLISLISSLNYLLHFITYHFINSMTYTVSS

SEQ ID NO: 90241 - protein, 119 aa, Gossypium hirsutum
  Clone ID: LIB3048-036-Q1-L1-C12.pep
MAAGGARTVKDVNPHEFVKAYSAHLKRSGKMELPEWVDIVKTARFKELPPYDPDWYYIRAASVARKIYLRQGIGVGGFQKIYGGRQRNGSRPPHFCKSSGAISRNILQQLQEMGIIDVD

SEQ ID NO: 90242 - protein, 90 aa, Gossypium hirsutum
  Clone ID: LIB3048-036-Q1-L1-D10.pep
PVRNSRVDPRVRSHWSKISQGGLQRIEEKYRGKLYSERLMTLTGVYGFWKYVSNLERRETRRYLEMLYALKYRTMASTVPLAVEGEPSSK

SEQ ID NO: 90243 - protein, 62 aa, Gossypium hirsutum
  Clone ID: LIB3048-036-Q1-L1-D12.pep
IPGGTHSSFVSPSKPTSSFSTISIPLAGFLKTRGLPIIKPPQLLSTHNILLPSSYQSTIPCL

SEQ ID NO: 90244 - protein, 71 aa, Gossypium hirsutum
  Clone ID: LIB3048-036-Q1-L1-D6.pep
KPTRNTWQPCNINLLTMHFQSSKSTIHYLQPYITHHIMHLNKPIILLHNNTIEDLIPYHIHRNLTLTTLHT

SEQ ID NO: 90245 - protein, 142 aa, Gossypium hirsutum
  Clone ID: LIB3048-036-Q1-L1-E10.pep
IPGGTHSSVLDRELPPFFFFFCFVVFGASITPRGGTGNIHNHLWSHNHNVRHPAVSTTIESQSSICAAAAASPTSATNLYLKESQALGGTSGSDSDSDSLLDIEGGPCEQSTNPQDVKRMRRMVSNRESARRSRKRKQAHLA

SEQ ID NO: 90246 - protein, 149 aa, Gossypium hirsutum
  Clone ID: LIB3048-036-Q1-L1-E11.pep
AVPVSEFPGGPTRPVKFNGVYHEIYINSQASFGELKKMLSARTGLHPEDQKLVYKDKERDSKAFLDMAGVKDRSKMVLLEDPAAQAKRLLEQRRTDKAERAAKSISRIGLDVDKLATKVSALEAIVSKGGKVVDADVVALTEALMNELV

SEQ ID NO: 90247 - protein, 147 aa, Gossypium hirsutum
  Clone ID: LIB3048-036-Q1-L1-E12.pep
ALPVRNSRVDPLVRSKKAVENSPFLEKLKKRGWEVLYMGDAIDEYAVGQLKEFEGKKLVSATKEGLKLDETEDEKKRKEELKEKFEGLCKVIKEVLGDKVEKVVVSDRVVDSPCCLVTGEYGWTVNMERIMKAQALRDSSMAGYMSS

SEQ ID NO: 90248 - protein, 124 aa, Gossypium hirsutum
  unsure (1)..(124): unsure at all Xaa locations
  Clone ID: LIB3048-036-Q1-L1-E5.pep
SRLYEPSKSSSKIXEIRTEAITCSSKVMVPLQPPATHQHGQHHCTNNNEXMGGDISTIEAHNGIQMLXSLYSDCFSNLLSFQINELFKSHDGGEFEQNPIHHHFPLGEAMLKDWSTCHCLDYNF

SEQ ID NO: 90249 - protein, 122 aa, Gossypium hirsutum
  unsure (1)..(122): unsure at all Xaa locations
  Clone ID: LIB3048-036-Q1-L1-E9.pep
EGEEGTVVSLQRGAHNKKLFNPMLHTKVHKLSLNISETDSRXRLTLAVKVLQQLXSSTTRIFCKAMYTVPTVIIPRNEMIDCYVTVMDDKATLLLESLLQVXDHELVMRNFDDTGCSGSQYT

SEQ ID NO: 90250 - protein, 147 aa, Gossypium hirsutum
  Clone ID: LIB3048-036-Q1-L1-F10.pep
ALPVSEFPGGPTRPLAFLALSCVGYAIPFIMCAAICCCCPCLISVLRLQEDLGQNRGATQELIDALPTYKFKPKRVKNWGIDHASSSEHLDEGGILGPGTKKERVVSAEDAVCCICLTKYGDDDELRELPCTHFFHVQCVDKWLKIN

SEQ ID NO: 90251 - protein, 74 aa, Gossypium hirsutum
  Clone ID: LIB3048-036-Q1-L1-F11.pep
TGSEFPAGPTRPQGLVRTARSYSADDPSVLEVLFQPRQPVDLVHPLLQLPIQHVTAGGQLVLQAPRSHAVHRRG

SEQ ID NO: 90252 - protein, 50 aa, Gossypium hirsutum
  Clone ID: LIB3048-036-Q1-L1-F6.pep
CDIRAVLNPILDGRISGRDPCVVSYVEVIIQWYVQMNSRSHILHLPSRFS

SEQ ID NO: 90253 - protein, 61 aa, Gossypium hirsutum
  Clone ID: LIB3048-036-Q1-L1-F8.pep
SNSLCPVLTNVRAGQYLRPAYMQNDRLQTIPDLHAFQAKDKYHLYNLLQYAPYTEMECDTH

SEQ ID NO: 90254 - protein, 147 aa, Gossypium hirsutum
  Clone ID: LIB3048-036-Q1-L1-F9.pep
PVSEFPGSAPASAAPLVPLVATRRYVRGCRGAALVASPDHAPNPRLRFASAAEGMAAEASTAGAASAAEAKPFAVLFVCLGNICRSPAAEAVFRTLVSKRGLDSKFLIDSAGTIGYHEGNKADSRMRAASKKRGIEVTSISRPIKPS

SEQ ID NO: 90255 - protein, 48 aa, Gossypium hirsutum
  Clone ID: LIB3048-036-Q1-L1-G1.pep
GAFENSSQYRWTSSYLHEVFLAYSIIPSLINYGYFNQLYALICLSKAF

SEQ ID NO: 90256 - protein, 148 aa, Gossypium hirsutum
  Clone ID: LIB3048-036-Q1-L1-G11.pep
ALPVRNSRGEFFRDAQEKVLPYADYIFGNETEAKIFAKVRGWETENIEEIALKISQLPLASGKQKRIAVITQGADPVVVAEDGKVKTFPVILLPKEKLVDTNGSCDAFVGGFLSQLVLGKGIEDCVRAGCYAANVIIQRPGCTYPEKP

SEQ ID NO: 90257 - protein, 117 aa, Gossypium hirsutum
  unsure (1)..(117): unsure at all Xaa locations
  Clone ID: LIB3048-036-Q1-L1-G2.pep
APALIEPISLIILMSNVACQILXLYSLPSLRLFFWHQIYHMTTAMQLARMVGIRKAPIIHQLSXSITGATTIRRFGQEDMFMENYLRLIDDYPRVAFHNFSTMDWFCVQIKRLFNFE

SEQ ID NO: 90258 - protein, 79 aa, Gossypium hirsutum
  Clone ID: LIB3048-036-Q1-L1-G4.pep
STFTSSSTTSNDDSYQGSSGKKKKWKEFFKRLTKEVIEKQEELQNKFLQTIERCEQQKLAREEAWKVQEMARINKEHEL

SEQ ID NO: 90259 - protein, 146 aa, Gossypium hirsutum
  Clone ID: LIB3048-036-Q1-L1-H11.pep
RSRNSRVDPRVRVDYEKIVRDTCREIGFTWEDVGLDADRCKVLVNIEQQSPDIAQGVHGHFTKRPEEIGAGDQGHMFGYATDETPELMPLSHVLATKLGARLTEVRKNGTCAWLRPDGKTQVTVEYVNEGGAMVPVRVHTVLISTQ

SEQ ID NO: 90260 - protein, 146 aa, Gossypium hirsutum
  Clone ID: LIB3048-036-Q1-L1-H9.pep
RSRNSRVDPRVREKSSSSTDAQTRATFSLIMGYLADHCNLPTRELLSRRFCQNIKKHRLRQLIDDTIGSVPADSSLINSVLEVCFGPSLLPKSISDVKYLVDFVETVMEALPANYRLGLAVGGFVAKHFTGYGAASTGTRFWASSV

SEQ ID NO: 90261 - protein, 120 aa, Gossypium hirsutum
  unsure (1)..(120): unsure at all Xaa locations
  Clone ID: LIB3048-037-Q1-L1-A10.pep
KKSFNHSDSLSYLLYNSKGNFLIRTINSLLTTNRNFKLXSNLLAXHSKLENSLLIPFNKINLESTIPKYNATLATFNDFTIQHYNPTLPIKGEIKYHPNLHPYQINSFTQLITCKTAFPN

SEQ ID NO: 90262 - protein, 61 aa, Gossypium hirsutum
  unsure (1)..(61): unsure at all Xaa locations
  Clone ID: LIB3048-037-Q1-L1-A2.pep
FCTILIVYFDGALNVDIVXFQTNLGPYPIIHFILSSYSPVISSYKSYHDQLSFFYITNITI

SEQ ID NO: 90263 - protein, 59 aa, Gossypium hirsutum
  unsure (1)..(59): unsure at all Xaa locations
  Clone ID: LIB3048-037-Q1-L1-A6.pep
STLLKPVISTGSHSKKSQNLNPTIALQTXIIYIYIYPHLTKHHKFPILSSQILFLISLS

SEQ ID NO: 90264 - protein, 69 aa, Gossypium hirsutum
  unsure (1)..(69): unsure at all Xaa locations
  Clone ID: LIB3048-037-Q1-L1-A8.pep
TIFHQTLTNLLIPTFHLIHLHPSIFSFYQXNKKPTFYTLLSYIFITTSSPPTYLPSHYFKIQTYNYYLI

SEQ ID NO: 90265 - protein, 71 aa, Gossypium hirsutum
  Clone ID: LIB3048-037-Q1-L1-B12.pep
PHFTNSARTLTVFSPGFIQQLLVTSIRTHAFNSTYSYFKSLHTHPLFIPKNLTLLSNLHLYIQSNHPYSIL

SEQ ID NO: 90266 - protein, 97 aa, Gossypium hirsutum
  Clone ID: LIB3048-037-Q1-L1-C12.pep
VTQTLVGIQCPENRTVPPQGSYTDGDSRPKIIPKCVVYRQQVNIPVLPLVDTDGRMTLSYTIDGYMFNDSRYFCFHMVTTGIENTLSQCSSITRYIA

SEQ ID NO: 90267 - protein, 126 aa, Gossypium hirsutum
  unsure (1)..(126): unsure at all Xaa locations
  Clone ID: LIB3048-037-Q1-L1-D3.pep
VFTSCSQNIKNVIFSKGTLPHNYHNSLXILIQIHYPFILILTRFIHNYYTFKFPYYFPSXNFPTQFYNIFIYTNIIXLNINLIIYTQLXINSKDSDDPPLSVFHIQYPELPDHVIPTDTLSVRQIF

SEQ ID NO: 90268 - protein, 30 aa, Gossypium hirsutum
  Clone ID: LIB3048-037-Q1-L1-E2.pep
FGICIKYQIHSICRALISEVHKYHPKLTIG

SEQ ID NO: 90269 - protein, 44 aa, Gossypium hirsutum
  Clone ID: LIB3048-037-Q1-L1-E6.pep
IFKRNTPQHISSLYKLHIFYITQNPTLITNITTIHIIPLYINSP

SEQ ID NO: 90270 - protein, 92 aa, Gossypium hirsutum
  unsure (1)..(92): unsure at all Xaa locations
  Clone ID: LIB3048-037-Q1-L1-F12.pep
FLSQLIHTHLIKFIRYCFQQQHLLLHYXYIPTCRLXNQLFQKYSDYLPLSTKIKIALIAYKALTYIHESXKSIIYPHFKTSNIFLYSYYTSK

SEQ ID NO: 90271 - protein, 95 aa, Gossypium hirsutum
  unsure (1)..(95): unsure at all Xaa locations
  Clone ID: LIB3048-037-Q1-L1-G4.pep
QAPRDLQKGNLKYSSVLFYGEKAFTIFHIQNPSQIPFXNLXLNILVXSTSFFTYQXKETPHFNSFPNKLIISAPNNDPPIFNVYFNDNQYNPYLN

SEQ ID NO: 90272 - protein, 44 aa, Gossypium hirsutum
  Clone ID: LIB3048-037-Q1-L1-H3.pep
RFIGQFGVNIMKGVLRMGILIKWQTSKKIGSINVKGCLDVLDRG

SEQ ID NO: 90273 - protein, 143 aa, Gossypium hirsutum
  unsure (1)..(143): unsure at all Xaa locations
  Clone ID: LIB3048-037-Q1-L1-H5.pep
HQWFKGYADGRFDRKSWPGILKLKDWPPSNEFKNLLPRHHAEFLCCLPFKEYTHPQSGLLNIATKLPKKSLKPDMGPKSYIAYGVAQELGRGDSVTRLHCDMSDAVNVLTHIAEVNLTRKQLDAISKLKRKHNLQDQXELFGR

SEQ ID NO: 90274 - protein, 99 aa, Gossypium hirsutum
  Clone ID: LIB3048-038-Q1-L1-B1.pep
YVHLVSQSLAVRTQLASIASCWLVAATSYDVACRVHLRDLRAVARNGIDDDQKHNAVAHTLSTDHTACAEAFRNEDQAIHTDDSECPRTYTLILQWSIN

SEQ ID NO: 90275 - protein, 73 aa, Gossypium hirsutum
  Clone ID: LIB3048-038-Q1-L1-B11.pep
SLLDNHTEYHGIRWHNLYEGRNIPIHIKLTYANQWTCLLMTYSISLNLVSKKYTFTDHQSVHAELMQKQNQNA

SEQ ID NO: 90276 - protein, 136 aa, Gossypium hirsutum
  unsure (1)..(136): unsure at all Xaa locations
  Clone ID: LIB3048-038-Q1-L1-B2.pep
TQLVSEMGIHAFSEPIRDLKTHQPLTGNEINDCGHKIGLNGVDNGSLTFQSVLIPQDNILNRFGDVTRDCKYTSRLPTMNKRTDATLGELVXGRVGLXHSSLGILTIAATIAIRYSLLRQQFSPTKQTEVSILDYQ

SEQ ID NO: 90277 - protein, 80 aa, Gossypium hirsutum
  unsure (1)..(80): unsure at all Xaa locations
  Clone ID: LIB3048-038-Q1-L1-B4.pep
MLSHGLGSGEDVLRITFMPRSVAXYPHAEPLVLLPKRMLATRKTEFHTWXARIFXLLDYHTEKADNRSNQLDLQKQRVQR

SEQ ID NO: 90278 - protein, 96 aa, Gossypium hirsutum
  Clone ID: LIB3048-038-Q1-L1-B5.pep
LLEPHHFYPCLRGQTLYMVPSLSLIFYDHMTSSMNLSRLLWLCIILMPSSIYRLWPITTLCDPINRPTLSINCRAWILHQCTRWHTHNHLLLILHH

SEQ ID NO: 90279 - protein, 60 aa, Gossypium hirsutum
  Clone ID: LIB3048-038-Q1-L1-B9.pep
KFMTFPHPQKYSIVSQCKSLTSLYLPIIVTELQGTGLERIYIMSAYPGQVICGFHKSLLG

SEQ ID NO: 90280 - protein, 105 aa, Gossypium hirsutum
  Clone ID: LIB3048-038-Q1-L1-C4.pep
DVSNNSSHRKKITSVSNDSEANRGQASFHYLNARLKQAIPDTNEALQLEPLHTHTYHTLPLSYKTLDDNKTAFHFYIIAGLIKPKDPDLRQLSHDLGKKKMTMLF

SEQ ID NO: 90281 - protein, 78 aa, Gossypium hirsutum
  Clone ID: LIB3048-038-Q1-L1-C7.pep
MATKKSVGDLKEADLKGKKVFGRDDLNFTLDDYFIISDDTRIRAAVTTIKNLMGHGYKVILSSHLGRPKGDSYQVSVL

SEQ ID NO: 90282 - protein, 72 aa, Gossypium hirsutum
  unsure (1)..(72): unsure at all Xaa locations
  Clone ID: LIB3048-038-Q1-L1-D11.pep
LQFSADHDDTMTAEAIVLLDDLHQKVNTYAMMVREWYRXDLSYVTKIIRDNVMYPKVSKLNGDRTNAHKFEF

SEQ ID NO: 90283 - protein, 37 aa, Gossypium hirsutum
  Clone ID: LIB3048-038-Q1-L1-D7.pep
CYELIFRYYCESTVGVRMIYHCSVKTLGIVGFGEIVI

SEQ ID NO: 90284 - protein, 57 aa, Gossypium hirsutum
  Clone ID: LIB3048-038-Q1-L1-E7.pep
TQVGHKLIVGVNRGAYVKPLSAASTYRIGFDDEEGICETSISWLSCLAGNRDKPLIH

SEQ ID NO: 90285 - protein, 111 aa, Gossypium hirsutum
  unsure (1)..(111): unsure at all Xaa locations
  Clone ID: LIB3048-038-Q1-L1-F1.pep
EFTLLKTECQKXLGDRFTTFSDLGLFDGHNGSAADIYTNENVLNNALSATSADLDRDEWVADLTRALDAGFVKTXDNRFFXXRAXTSGTTVTYVILEXSVVTVASVADSCW

SEQ ID NO: 90286 - protein, 43 aa, Gossypium hirsutum
  Clone ID: LIB3048-038-Q1-L1-F2.pep
LFFPMLQNCLTSGGKNSNWSATIQSSLYSTLLHVYITLLTFLP

SEQ ID NO: 90287 - protein, 78 aa, Gossypium hirsutum
  Clone ID: LIB3048-038-Q1-L1-F6.pep
NILSTTPIIINGVPITNLGAQPLKVTKHIFTYIITTLHQHSIPYENTLTFFKHPDYIAYTLILSTQLYALRSHYFITA

SEQ ID NO: 90288 - protein, 77 aa, Gossypium hirsutum
  unsure (1)..(77): unsure at all Xaa locations
  Clone ID: LIB3048-038-Q1-L1-G1.pep
TRSGQGGGEDIAPKTFHVSDHRHSQPITCLDRHLIYHTRSKLDLTVMEHYXRHVPTTERTYNSLTPSPPXYQVPTKW

SEQ ID NO: 90289 - protein, 67 aa, Gossypium hirsutum
  unsure (1)..(67): unsure at all Xaa locations
  Clone ID: LIB3048-038-Q1-L1-G10.pep
NPDTIDYVKTKIQDXEWIPPDQHRLIFANKQLENSHTLADYIIQKESTLHLVLRLTGGMQINVKTIT

SEQ ID NO: 90290 - protein, 65 aa, Gossypium hirsutum
  Clone ID: LIB3048-038-Q1-L1-G4.pep
LWNHLYRTRSMVRQKAHRMSHKRPYHYQGPSKGLEIKGKLVKGRRAKTPHNVRSKPPKLKLLKFF

SEQ ID NO: 90291 - protein, 52 aa, Gossypium hirsutum
  Clone ID: LIB3048-038-Q1-L1-G5.pep
KLFIGRIKPKTPGGRAQLSQWISFRVYHVSKFSGQQPVILTSSFVLSPTKSY

SEQ ID NO: 90292 - protein, 107 aa, Gossypium hirsutum
  unsure (1)..(107): unsure at all Xaa locations
  Clone ID: LIB3048-038-Q1-L1-H11.pep
GTFLTGANRVIIWDPEWNPXTYMQASERAWRIGQNKMXLILXITRGTIQXNVYHPQIYXHFFTNEILKNPXXRKFFKARDMKDLFGLNDERQNGSTGTSNIFSQLAK

SEQ ID NO: 90293 - protein, 101 aa, Gossypium hirsutum
  unsure (1)..(101): unsure at all Xaa locations
  Clone ID: LIB3048-038-Q1-L1-H4.pep
KVAEMVTQTFGDMLFSPGSECLKEFPSPESLKGRIIISTKPPKEYLEAKEVKENENDPERVKASDEEAWGKEVPDLLXDDYKNDLGEEDEEDLRFWRLVTT

SEQ ID NO: 90294 - protein, 51 aa, Gossypium hirsutum
  Clone ID: LIB3048-038-Q1-L1-H5.pep
QYWQQSATEHRIIGRNSSCNSIDIRRHNIMEIGQSACHALSMSRTPIGGYA

SEQ ID NO: 90295 - protein, 61 aa, Gossypium hirsutum
  Clone ID: LIB3048-038-Q1-L1-H6.pep
PFLTPQTWRLKGSLHTPSSKVSCLAHRDNTVPNNAATVCATIANQPNISLHNLNKAATRCL

SEQ ID NO: 90296 - protein, 46 aa, Gossypium hirsutum
  Clone ID: LIB3048-039-Q1-L1-A1.pep
HYPISFHYHDQIYLEFILQRNSYMQILKTLLIVITNMVTTYQLMSI

SEQ ID NO: 90297 - protein, 55 aa, Gossypium hirsutum
  Clone ID: LIB3048-039-Q1-L1-B11.pep
MGHEKNYLSQITTLKLKKFFPPFYTSFLIPKSYLNIKLSIFNLNPINNSYPKFNK

SEQ ID NO: 90298 - protein, 47 aa, Gossypium hirsutum
  Clone ID: LIB3048-039-Q1-L1-B3.pep
FILTTHRTHNEDGSNYPTDIHAYLQYHLNLYCHVPSLLLLISYINSN

SEQ ID NO: 90299 - protein, 35 aa, Gossypium hirsutum
  Clone ID: LIB3048-039-Q1-L1-C11.pep
GISIRLIRIHQKVVTQKWVITHNLFSGKKWESVFT

SEQ ID NO: 90300 - protein, 126 aa, Gossypium hirsutum
  Clone ID: LIB3048-039-Q1-L1-D10.pep
PRQPWHDLHSKVEGPAAYDVLINFEQRWRKSTKWKEFSLLFKGKSHWSDDAMIRIERISWIQSPPLAVTDDGTTIVPDDDPKVHVLSKDNRENWNVQIFRSIDSGSLKGFPKYIKKAENQNLFCAK

SEQ ID NO: 90301 - protein, 121 aa, Gossypium hirsutum
  unsure (1)..(121): unsure at all Xaa locations
  Clone ID: LIB3048-039-Q1-L1-D5.pep
MDESSSSSSSSSDKTANLDSALHLLGFQLQDLSPTKVNGHLHVTHKCCQPFKVLHGGVSALIAEALASIGAHMASGFQRVAGIHLSINHLKRAELGDXIFAEATPVSPGKTIQVWEVRLWK

SEQ ID NO: 90302 - protein, 64 aa, Gossypium hirsutum
  Clone ID: LIB3048-039-Q1-L1-D9.pep
SGGCRIRTRFVFWFSPVFVWHALVLYFACESSSSRNGDVLYSVTARAFGFNLPPQTDFGLSKMK

SEQ ID NO: 90303 - protein, 52 aa, Gossypium hirsutum
  Clone ID: LIB3048-039-Q1-L1-E12.pep
IPIFCTCWYLLSEKVYLNWNLVKRQIQDPNLTQKSTGGKRTFLFLSFSFSFL

SEQ ID NO: 90304 - protein, 68 aa, Gossypium hirsutum
  Clone ID: LIB3048-039-Q1-L1-F4.pep
MILLLEFTVSPFAREYCKDMKLADQITHEQISESNEAFHLFDKDANTRITTMELGTHMRSLGQDPTDA

SEQ ID NO: 90305 - protein, 139 aa, Gossypium hirsutum
  unsure (1)..(139): unsure at all Xaa locations
  Clone ID: LIB3048-039-Q1-L1-F8.pep
KVSEKPSSSGKLSEGPASSKATDEMHSASSHGPPDSSTSSNSDCVGTVSASGGFGLSPSSSMGSLSSEKSTLNPHAKEFKLNPNAKRFTPSQTPVRPLIPMSDGSXYYQTQMSXLPHMHMPCKFWVKLLKSKYHFYEHY

SEQ ID NO: 90306 - protein, 85 aa, Gossypium hirsutum
  unsure (1)..(85): unsure at all Xaa locations
  Clone ID: LIB3048-039-Q1-L1-G10.pep
MSTTMAGHRPFPKVLALILLSLVAIVSAEVFFENASKMDGESRWXNLAGKKDENMAGDWNXTSGKWNGDPNAKGFQPSEDYRFNA

SEQ ID NO: 90307 - protein, 146 aa, Gossypium hirsutum
  Clone ID: LIB3048-039-Q1-L1-G5.pep
QAVVMQGYGMTETCAIISMENLAFGVRHTGSAGLLASCIEAQIVSTENPEPLPPKQLGEIWVRGHNMMQGYFNNPEATKQTIDEKGWVHTGDLGYFDENGYLYVVDRIKELIKYKGFQIAPAELEGLLVSHPEILDAVTIPYPDDE

SEQ ID NO: 90308 - protein, 74 aa, Gossypium hirsutum
  Clone ID: LIB3048-039-Q1-L1-G7.pep
NKAVIRQPSLSLASPDIMTSKISALIFLHYQPTILLIRLPRYQINLSTFHSQSHDSMTVIIIEHLNLDNSTISL

SEQ ID NO: 90309 - protein, 63 aa, Gossypium hirsutum
  Clone ID: LIB3048-039-Q1-L1-H12.pep
ATSNLSTDAYENVDDVKTGWENARPTIHSCADVMALAAHISASCGGSPTCQTPLWRMDIFTAH

SEQ ID NO: 90310 - protein, 49 aa, Gossypium hirsutum
  Clone ID: LIB3048-039-Q1-L1-H5.pep
VIRFAIPNILMEIGFETITGRPQRLNWKRSLIGSLNAFKYQCFKTPLKG

SEQ ID NO: 90311 - protein, 61 aa, Gossypium hirsutum
  Clone ID: LIB3048-039-Q1-L1-H7.pep
HYINTTQEIYFHIIKLYPKERAHSNRDLGQPFTNTHILVTTYYVSFTLITNTDQKNTKPTT

SEQ ID NO: 90312 - protein, 48 aa, Gossypium hirsutum
  Clone ID: LIB3048-040-Q1-L1-A11.pep
KKIRHFNSLPYLLIKFPQTQIYHYEPLTAYLIITLTMSKLNPLNNSSP

SEQ ID NO: 90313 - protein, 41 aa, Gossypium hirsutum
  Clone ID: LIB3048-040-Q1-L1-B11.pep
KNKNDRSHHISLTGLVFMVGQSRSYQPHLSHLSQTITLNCG

SEQ ID NO: 90314 - protein, 68 aa, Gossypium hirsutum
  Clone ID: LIB3048-040-Q1-L1-C10.pep
SMSYFYQAIQYCYNSNCSYFTYFMIIYHIHCNYSLLWSSIPVHGKILELNLLLLSSTFHNLPTILIVM

SEQ ID NO: 90315 - protein, 67 aa, Gossypium hirsutum
  Clone ID: LIB3048-040-Q1-L1-D10.pep
PSFFGPSGPPRVSPGIFTCGPWIRPFGLILGLDSPSVVEPWVVTLGFSGHWILTNVCVTQADILASL

SEQ ID NO: 90316 - protein, 70 aa, Gossypium hirsutum
  Clone ID: LIB3048-040-Q1-L1-F10.pep
MDEEYDVIVLGTGLKECILSGLLSVDGLKVLHMDRNDYYGGESTSLNLVQVIVLRLVEPFFFFIYSLAIF

SEQ ID NO: 90317 - protein, 50 aa, Gossypium hirsutum
  Clone ID: LIB3048-040-Q1-L1-G10.pep
RKKLIPILNLISMTLEKNCHIFTCLPLDDMLNVYLDKYYNELITFVSILQ

SEQ ID NO: 90318 - protein, 100 aa, Gossypium hirsutum
  Clone ID: LIB3048-041-Q1-L1-A10.pep
IQLLTTALHRKSLGRMSSYIHYTIIRFIRNYNESIFTPHLLGPDMITPLHWASCTSLSDEMVEVPTEDTHEIALTWWRSTLDANGDAPYAYAMTRHNHSH

SEQ ID NO: 90319 - protein, 90 aa, Gossypium hirsutum
  unsure (1)..(90): unsure at all Xaa locations
  Clone ID: LIB3048-041-Q1-L1-A12.pep
TRVIHGARLLDKLAADHDQAINIVIAQWKSYTAIHYCTEIEATGHSDFLMMMTTGTSHAYCSEPTLIPTILIASATMSXDGQTREHSMLA

SEQ ID NO: 90320 - protein, 57 aa, Gossypium hirsutum
  Clone ID: LIB3048-041-Q1-L1-A9.pep
GWFRRQLFLRQPCDPQLMMFPMVVRRRSIVKENKLEVVINMYKVKNFITKIDPNSCQ

SEQ ID NO: 90321 - protein, 99 aa, Gossypium hirsutum
  Clone ID: LIB3048-041-Q1-L1-B12.pep
AKQINLLDMSFYKFTEQIQKRQPYLYSDSPSNIQKSETANQTGTTYKTTDLNTDIAENEDSNMLCKIPDVNDNSINDSKELPYLEHGSLILISAKYSGT

SEQ ID NO: 90322 - protein, 34 aa, Gossypium hirsutum
  Clone ID: LIB3048-041-Q1-L1-B2.pep
PVKEIPTYQLINMILIIFGQLINPLYGQIKTPYI

SEQ ID NO: 90323 - protein, 57 aa, Gossypium hirsutum
  Clone ID: LIB3048-041-Q1-L1-D2.pep
WPRANPCPYPHTGGIARNFKGLQNKIKLGPLNLQKKPPWSQGKGYPENKGAPLEPNG

SEQ ID NO: 90324 - protein, 43 aa, Gossypium hirsutum
  Clone ID: LIB3048-041-Q1-L1-D3.pep
EKRDHGVLTETSVLPRVRYGANTCRGLLLGLFCQGQSNLLWQT

SEQ ID NO: 90325 - protein, 46 aa, Gossypium hirsutum
  Clone ID: LIB3048-041-Q1-L1-D9.pep
HNLRSTRFQKHSRVTSSNLAITSRQGLGYNNLVSETLFNLKWPKNH

SEQ ID NO: 90326 - protein, 92 aa, Gossypium hirsutum
  Clone ID: LIB3048-041-Q1-L1-E9.pep
SRSKSDISVSNCIKSAQLDLSHPISSSTSTSWHQIAYVILHSQIRQHESFHVKKHLIAFESYLLKIPTCAIMCFLMHDKKTCCLELNSCRKS

SEQ ID NO: 90327 - protein, 68 aa, Gossypium hirsutum
  Clone ID: LIB3048-041-Q1-L1-F6.pep
WTFGITKTHYSTMCYTHMIVLLRDHTVPMLSLPTRRTSTSRTSDAMTSMIKGRQILRLVHDNCHKLLH

SEQ ID NO: 90328 - protein, 73 aa, Gossypium hirsutum
  Clone ID: LIB3048-041-Q1-L1-F8.pep
KHGVITETTVLPSSAIGLLPAERYYHDYFVMSIAPYYGIPDCLSTTSGACGCPECRISVNDANVDRLYTLYKN

SEQ ID NO: 90329 - protein, 65 aa, Gossypium hirsutum
  Clone ID: LIB3048-041-Q1-L1-G11.pep
RFDAGIARFKCIHKDKTMQNVQHTCPIRRLRLYSAEITTTNSAQCSIPVLLNHRSGYMLRRHCAG

SEQ ID NO: 90330 - protein, 69 aa, Gossypium hirsutum
  Clone ID: LIB3048-041-Q1-L1-G3.pep
IAGLDLQLLGINTIIAKYYRSGVGGNKNNNYNWCGNILEHRESAYMCACAYMCLAAYIFSIEYYISIYI

SEQ ID NO: 90331 - protein, 57 aa, Gossypium hirsutum
  Clone ID: LIB3048-041-Q1-L1-G7.pep
TPFPLCFGIHFSARSSFSQFYTLKDLFVVQKLLLFSYGGYSKNWGSFWVTKGLFWVG

SEQ ID NO: 90332 - protein, 108 aa, Gossypium hirsutum
  Clone ID: LIB3048-041-Q1-L1-G9.pep
EWCNNHPHEADAIWKAGSKFIEEALTMRNVYDYMFHLLNEYFKLLKVKPTIPPNAQKLCFETTEQGLWKEFMVQSIVKSPSDKPPCALPSPFEPHAIQASLDVKENNT

SEQ ID NO: 90333 - protein, 133 aa, Gossypium hirsutum
  unsure (1)..(133): unsure at all Xaa locations
  Clone ID: LIB3048-041-Q1-L1-H10.pep
NLNFLLVANGFPETTMLSPIADHHPEKKRRGRSSLSRKSLSLDPIVGPDTVFALSDQPFXSLQGHSHDVLDLSWSKSQHLLSSSMDKTMRLRDLISKTCLRIFSHSDYVTCIQFNPLDDEHFISGSLDAKVRI

SEQ ID NO: 90334 - protein, 71 aa, Gossypium hirsutum
  Clone ID: LIB3048-041-Q1-L1-H11.pep
FDDDEPRATYLQTGSMISHLFIYDTVAIVETLSSVFMNHRYYDKFKLSCDIIPTSMKHATDLTEILTYETY

SEQ ID NO: 90335 - protein, 46 aa, Gossypium hirsutum
  Clone ID: LIB3048-041-Q1-L1-H12.pep
VVVTASSSCSRQKPFRFSDRRICNPCFSSSLTPPQIDSPVNGCSSR

SEQ ID NO: 90336 - protein, 60 aa, Gossypium hirsutum
  Clone ID: LIB3048-041-Q1-L1-H6.pep
LLVPNLKCLHLKLLRMSTTYNLCQTLLNMMHKTESYAYLMPPYNSRYITPPLMPSTYRYA

SEQ ID NO: 90337 - protein, 53 aa, Gossypium hirsutum
  Clone ID: LIB3048-042-Q1-L1-A5.pep
GWFGGVKLPTEKKVLYESECRGNNQELKRADDEACSKERGFGTFRLDTLACEN

SEQ ID NO: 90338 - protein, 105 aa, Gossypium hirsutum
  Clone ID: LIB3048-042-Q1-L1-A6.pep
DPTAAQQGGGYGMLGSNLPPSWEGIQLYYSYNIRRLMLYYPTQQALLAVIGCYIEVMLGGATDQLLNLADPSIARSWVQSTDVAYWPSDRFRYIAVRNERPHSSW

SEQ ID NO: 90339 - protein, 68 aa, Gossypium hirsutum
  Clone ID: LIB3048-042-Q1-L1-A7.pep
KRRSEELTSGQTTMDIESLFTKRLEGKEALVTGIANGLQESSTRPISQTWRQRSDCRNSTRIGALPLQ

SEQ ID NO: 90340 - protein, 104 aa, Gossypium hirsutum
  unsure (1)..(104): unsure at all Xaa locations
  Clone ID: LIB3048-042-Q1-L1-C11.pep
YAAKLGRFNHQASKSGGSPQNDPTPGSNTLKTPKSPWMPLPMVTDGISNQIPRSDMDQGTNQYEQFKAKEINRDEFXQKLKLIVGDSLLRSTITSLQSKFPSRH

SEQ ID NO: 90341 - protein, 79 aa, Gossypium hirsutum
  unsure (1)..(79): unsure at all Xaa locations
  Clone ID: LIB3048-042-Q1-L1-C6.pep
RGFYAGRPFLGFPSLISDATLAGALSPKNGKPAGIXAPAMRRLAKGWFFASPNFLPXSFSMDAMSLSSRVFLLEKPAWA

SEQ ID NO: 90342 - protein, 98 aa, Gossypium hirsutum
  unsure (1)..(98): unsure at all Xaa locations
  Clone ID: LIB3048-042-Q1-L1-C8.pep
APNNVRRHLFATYANAETQDDIKLLRSQSXDDLKQGVIGAVPIPSEDAEKEEVIAALVANVEAMIKADRKITALKQLQGHIWRTGFETNELKGIVFDD

SEQ ID NO: 90343 - protein, 66 aa, Gossypium hirsutum
  Clone ID: LIB3048-042-Q1-L1-D8.pep
GGHLPMHSQPKYLTLWVTGQSLHNCNSSKQYWVYSSYKFNQTSRMIALPRFFISLTTLSDIYTGDL

SEQ ID NO: 90344 - protein, 67 aa, Gossypium hirsutum
  Clone ID: LIB3048-042-Q1-L1-E10.pep
YILHSVNVTRTCIKTNLVRISDGNEWTIPLFCAYLDLSSMLYVRDVIQFRLNRSIIHLMQNNPLTHI

SEQ ID NO: 90345 - protein, 46 aa, Gossypium hirsutum
  Clone ID: LIB3048-042-Q1-L1-F5.pep
KGRCGSIFVLDVWSWVDLLMIYSRKVGDMQVYWLLLALAPVRFAQC

SEQ ID NO: 90346 - protein, 49 aa, Gossypium hirsutum
  Clone ID: LIB3048-042-Q1-L1-F7.pep
LIMKSYNQQYILAKDWFIKQNLEITELPLPIAPSLTHITNHLIQSIYTI

SEQ ID NO: 90347 - protein, 67 aa, Gossypium hirsutum
  Clone ID: LIB3048-042-Q1-L1-F9.pep
VLESKEIRMTETHYKNPFSSSKAIDQSRCLSTIKSDGGPTKLFLKTNLTMLIILMANTMLYTLSNQT

SEQ ID NO: 90348 - protein, 117 aa, Gossypium hirsutum
  unsure (1)..(117): unsure at all Xaa locations
  Clone ID: LIB3048-042-Q1-L1-G10.pep
RIEEEFGPIVRRIVEXETKVSKLGKLKYKNENDSVQDVKADDLQQMFLAMTEDVRVIIVKLADRLHNMRTLSHMPXCXQSSIAMETLQVFAPLAKLMRMYHIKSELENXSFMYTNPE

SEQ ID NO: 90349 - protein, 77 aa, Gossypium hirsutum
  Clone ID: LIB3048-042-Q1-L1-H11.pep
PPSFWAQFLVNPCFSWETNCQCPRVKVPLLFTAFPRPKFKPDETDPPPSSLDKFLGLPSFPLARYPTSRGNPSSRTA

SEQ ID NO: 90350 - protein, 75 aa, Gossypium hirsutum
  unsure (1)..(75): unsure at all Xaa locations
  Clone ID: LIB3048-042-Q1-L1-H3.pep
VYSFGVVLLELLTGRRSVNKNRFPKEQNLVEWARPMLNDSRKLGPIMEPRLESPYSXTAARLAAXLAYQCVSPSP

SEQ ID NO: 90351 - protein, 61 aa, Gossypium hirsutum
  unsure (1)..(61): unsure at all Xaa locations
  Clone ID: LIB3048-042-Q1-L1-H4.pep
CPCNSSPFDKGEVSDPQDEVSVGKAIPAISAAAIMQSGGLSDANDHTFNPQRXSXRFNALG

SEQ ID NO: 90352 - protein, 35 aa, Gossypium hirsutum
  Clone ID: LIB3048-043-Q1-L1-A12.pep
KILWTSLTPKYFIFTDAFTMIKHTVIYRKDFQVYH

SEQ ID NO: 90353 - protein, 48 aa, Gossypium hirsutum
  Clone ID: LIB3048-043-Q1-L1-A5.pep
IILTRHFFYINSISFGADILNYPAHLLNNYLFQIQPLIHHHQKHSYLI

SEQ ID NO: 90354 - protein, 56 aa, Gossypium hirsutum
  unsure (1)..(56): unsure at all Xaa locations
  Clone ID: LIB3048-043-Q1-L1-B12.pep
ANLDTTSSSENISMFIFKHCSSPHTYXHFFNILIQYHFPIILILTHFLHIYNTLKS

SEQ ID NO: 90355 - protein, 49 aa, Gossypium hirsutum
  Clone ID: LIB3048-043-Q1-L1-B4.pep
FHFTVCELSTIFRPLISFSTLHIISFYNLNPHMITNFLFFPSNSLNILL

SEQ ID NO: 90356 - protein, 47 aa, Gossypium hirsutum
  Clone ID: LIB3048-043-Q1-L1-D5.pep
FINSRFSSISLFLIFFTSFMIYFIDIIYILFNLNIQHPLLDNKTNSL

SEQ ID NO: 90357 - protein, 41 aa, Gossypium hirsutum
  Clone ID: LIB3048-043-Q1-L1-D8.pep
TTAQFTLTKSYQPIYLLTYRSFLKYINPSQYTKILSTSFIH

SEQ ID NO: 90358 - protein, 60 aa, Gossypium hirsutum
  Clone ID: LIB3048-043-Q1-L1-F5.pep
KTLERPTTHFIHIKFYYNHIFLIIHIFSLITTLFFISNTTHIYKLLQTFYNHHHSYIHLQ

SEQ ID NO: 90359 - protein, 97 aa, Gossypium hirsutum
  Clone ID: LIB3048-043-Q1-L1-F6.pep
FLFVVSFLGLFGRTPLRKVMVLDYKLTYPSGTATAMLINSFHTHSGAELAGKQVKCLGKYLSISFIWSCFKWFFSGIGDSCGFDNFPSFGLMLFRNT

SEQ ID NO: 90360 - protein, 72 aa, Gossypium hirsutum
  unsure (1)..(72): unsure at all Xaa locations
  Clone ID: LIB3048-043-Q1-L1-G5.pep
IMLRHITTLLLDPKAFKDTLYLFVERYKXNNILFITCIXSYGFIFCTTIVFEILSNFVSLIKPNKLTVKVIL

SEQ ID NO: 90361 - protein, 54 aa, Gossypium hirsutum
  Clone ID: LIB3048-043-Q1-L1-H5.pep
IFDQKSSKTFFSDPYIISLKYHKQTKRCRQQYLDFSKHLMIHSYLVYKGTHRNL

SEQ ID NO: 90362 - protein, 48 aa, Gossypium hirsutum
  Clone ID: LIB3048-043-Q1-L1-H6.pep
MILTTRIHRKKNVASTKVNAAQTNDYNYEQLYIKYYIIMNCTLNNKYY

SEQ ID NO: 90363 - protein, 72 aa, Gossypium hirsutum
  unsure (1)..(72): unsure at all Xaa locations
  Clone ID: LIB3048-043-Q1-L2-A9.pep
MGATDSTLTTKGCIIGSGPADHDRXIYGARGALQPMLFEGWLGNDIEAGGQITTSCADQNCPLFPDELHGSE

SEQ ID NO: 90364 - protein, 85 aa, Gossypium hirsutum
  Clone ID: LIB3048-043-Q1-L2-F10.pep
EMPGLTCNACNKEFLDDADQKLHYKSDWHRYNLKRKVAGVPGVTEALFLARQLALAQEKEKQNETPMLYRCGGCGKGYRRFKAYS

SEQ ID NO: 90365 - protein, 113 aa, Gossypium hirsutum
  Clone ID: LIB3048-043-Q1-L2-G9.pep
FRGCWCCRLRSPAAVGLVPGFLSVRLCAVLLAVLLPSGVLVVGFGLAVVVGAVLARVVGGVVLLAVVLLSLSCWPLGRAGAPVVLGLLECCSVPLSARSCGRARPLVLESGRV

SEQ ID NO: 90366 - protein, 99 aa, Gossypium hirsutum
  Clone ID: LIB3048-043-Q1-L2-H9.pep
SSVSDSNVSSHALQGTKRKWVSEDDVASVPSMVDLHTGGTFNAHTGFNARYLNESEHMLAQALPNTTVKGRPNIASRMMLLQRDCYIRHDMLHGPNNIG

SEQ ID NO: 90367 - protein, 55 aa, Gossypium hirsutum
  Clone ID: LIB3048-044-Q1-L1-C11.pep
KRTSYSLSLRFLDLVLFNILLSSFYYLSLHFKPFASPLMIILSFMTHLISLLTDH

SEQ ID NO: 90368 - protein, 48 aa, Gossypium hirsutum
  Clone ID: LIB3048-044-Q1-L1-E12.pep
KLTNPLNTNLSLITPPSTSLLHSSSILFLKHFFQILIANIQHQFFHSP

SEQ ID NO: 90369 - protein, 39 aa, Gossypium hirsutum
  Clone ID: LIB3048-044-Q1-L1-F10.pep
RLKMVYGNFILINKNYIKKWSLGFEKYRGGLRVFKYIHT

SEQ ID NO: 90370 - protein, 81 aa, Gossypium hirsutum
  Clone ID: LIB3048-044-Q1-L2-D3.pep
LLGLLSPASRLRAAWCLVRRLCLSLARLPPALGPGRCPAGLLCGGLSGSLWGLAPCARVGRRPSRPAPAVVGSCPVARGRR

SEQ ID NO: 90371 - protein, 84 aa, Gossypium hirsutum
  Clone ID: LIB3048-044-Q1-L2-E3.pep
HRSPANEATPRTHRQPDQATRADDPRERRTPEGETRARNKNHTEGGGETDNNTESSRRTQEHEEQTRTDRKNEPEASKGTKKGT

SEQ ID NO: 90372 - protein, 43 aa, Gossypium hirsutum
  Clone ID: LIB3048-045-Q1-L1-A10.pep
DENAFDVKGWGLLLGPPLMLEGLVNQTWLMMLHILHNHRMGHF

SEQ ID NO: 90373 - protein, 37 aa, Gossypium hirsutum
  Clone ID: LIB3048-045-Q1-L1-A11.pep
DSLSLASSAIALACQEEALGRCFRSRSKQFRSGETEL

SEQ ID NO: 90374 - protein, 36 aa, Gossypium hirsutum
  Clone ID: LIB3048-045-Q1-L1-A8.pep
KQNPFSNTFIITSKDSTIIKLIIIITLPTYLIINLS

SEQ ID NO: 90375 - protein, 65 aa, Gossypium hirsutum
  Clone ID: LIB3048-045-Q1-L1-B8.pep
ELSYILSQTYTTSDVHIYKSDGFLITTLHYLLNLYYILKNILFFNKLQYHLLKSQHILLYVTLTN

SEQ ID NO: 90376 - protein, 44 aa, Gossypium hirsutum
  Clone ID: LIB3048-045-Q1-L1-C12.pep
LLCFNFQSVDCNKRLILESRGSDFIKMSSDCIVKSFGSLKFGLN

SEQ ID NO: 90377 - protein, 37 aa, Gossypium hirsutum
  Clone ID: LIB3048-045-Q1-L1-C5.pep
MILAVLFANSECNILVERYNGIPADELLHWKSLLAKL

SEQ ID NO: 90378 - protein, 58 aa, Gossypium hirsutum
  Clone ID: LIB3048-045-Q1-L1-D2.pep
PTFICYFFLLALFSIEIHGPDFFSKIPIVNTTDKEVTNREEQTTFGKKEPDPMFDPKT

SEQ ID NO: 90379 - protein, 66 aa, Gossypium hirsutum
  Clone ID: LIB3048-045-Q1-L1-E10.pep
MAILNSYRLRLKESTPHFTGTNLSDNYRSRYVKWRHPHAAEIPKFHLPMRQCEVKNRQDIYDVLTA

SEQ ID NO: 90380 - protein, 64 aa, Gossypium hirsutum
  Clone ID: LIB3048-045-Q1-L1-E2.pep
YFLLRAGLLYNLTGHFQSIHIYLFQLDPVMLNLSRYYFDFTQYLLMNIHIAHRIQFFSYYLNLF

SEQ ID NO: 90381 - protein, 73 aa, Gossypium hirsutum
  Clone ID: LIB3048-045-Q1-L1-E4.pep
MGCFTLNCASYYTVFTETILSFHSMKAFWLMTLCTSLDFKACSSSNKLPDLTSDCRGKPLVVPDQNGLRNCTT

SEQ ID NO: 90382 - protein, 59 aa, Gossypium hirsutum
  Clone ID: LIB3048-045-Q1-L1-E5.pep
ILDLYTLGRKLGRVQFGVTYLCTEIPTAIEYACKSISKRTLICTDDVQDVRMEIHITHH

SEQ ID NO: 90383 - protein, 71 aa, Gossypium hirsutum
  Clone ID: LIB3048-045-Q1-L1-F1.pep
VREGFFCNSRFLLRHVVCELIASFGFSPEIGDSSFEVWFNVRVVGVVIGWGRQEGCLGALPLRVNYLYGRL

SEQ ID NO: 90384 - protein, 81 aa, Gossypium hirsutum
  Clone ID: LIB3048-045-Q1-L1-F7.pep
KDMKIDMVSVLGEQWPVRPDLQGIKEKFRAIAKANLATKEAKKRLLAAGREFETLENQRKTPSTTAGNSDLHMVCVIFCLI

SEQ ID NO: 90385 - protein, 98 aa, Gossypium hirsutum
  unsure (1)..(98): unsure at all Xaa locations
  Clone ID: LIB3048-045-Q1-L1-F8.pep
YNRESNPSSSYCASDPNDPCAPGEQYFDRCTMQLSWNYNYGQRGRSIRVDFLNNPDLLLCDPTITFKPTLRFWMTAQSPNPSXHIAIILAWIPFNSDP

SEQ ID NO: 90386 - protein, 84 aa, Gossypium hirsutum
  unsure (1)..(84): unsure at all Xaa locations
  Clone ID: LIB3048-045-Q1-L1-G4.pep
RSKIIRSDQYKASGPLIRHLYDSNLPXLSCNHRLEILIDAARGLHKYHTGPTQTIIHLDDNTTHILLDYNSVYKVTDFRLSKTH

SEQ ID NO: 90387 - protein, 79 aa, Gossypium hirsutum
  unsure (1)..(79): unsure at all Xaa locations
  Clone ID: LIB3048-045-Q1-L1-H1.pep
PSRTRGCHTLTIHTRQDSFLSNNITVIMARVNTADVNAIKTLNTSKYANPSRNIQNKPVANPYPMSNKMLXMRQQLQYL

SEQ ID NO: 90388 - protein, 72 aa, Gossypium hirsutum
  unsure (1)..(72): unsure at all Xaa locations
  Clone ID: LIB3048-045-Q1-L1-H10.pep
MICLDLSQRRYGRRDDDGTXYDMLYHXPFDMNCPPDRSYVQACPKSEGPVIYPVSEGIQASVDHMLAVDCKF

SEQ ID NO: 90389 - protein, 46 aa, Gossypium hirsutum
  unsure (1)..(46): unsure at all Xaa locations
  Clone ID: LIB3048-046-Q1-L1-B2.pep
XVSCSFMVLVNHRLCVKKKCDSRYRLLVVPLRLVSNIVRSPLASPR

SEQ ID NO: 90390 - protein, 45 aa, Gossypium hirsutum
  Clone ID: LIB3048-046-Q1-L1-B5.pep
VSAWFWQETNIRLVRLQDPGSPLSSSPGSRIGSPAKFSQPKTVFL

SEQ ID NO: 90391 - protein, 102 aa, Gossypium hirsutum
  unsure (1)..(102): unsure at all Xaa locations
  Clone ID: LIB3048-046-Q1-L1-C1.pep
EYVVPSMYSGQLGGVHDQGDDPSMQDITDDEYTSYAIAEGKRVXDSFGILIXIKPNELYSNVKVQKMTTLCAFQIAREYLYVSDLNDAQQMFEGAADLYTQE

SEQ ID NO: 90392 - protein, 52 aa, Gossypium hirsutum
  Clone ID: LIB3048-046-Q1-L1-C4.pep
PFSHQMVYYQCLIPPRKLFHVYMIPPIHHPSPREISEKPRVRIYIAFVKPMT

SEQ ID NO: 90393 - protein, 57 aa, Gossypium hirsutum
  Clone ID: LIB3048-046-Q1-L1-D11.pep
VDPQTTSIHTRTNLFLNPLENNSKDAFYIMSNTQSLQNIDSITNTSYHTVTYDNIKT

SEQ ID NO: 90394 - protein, 50 aa, Gossypium hirsutum
  Clone ID: LIB3048-046-Q1-L1-E12.pep
ISFSLKVVPIVRRIILYAGANSNKPNFSTELQSVIIIIPHHVKSILINVI

SEQ ID NO: 90395 - protein, 71 aa, Gossypium hirsutum
  unsure (1)..(71): unsure at all Xaa locations
  Clone ID: LIB3048-046-Q1-L1-E2.pep
NYSGAILESVVKRAASTGLNXHVTMDDLSKLVDEXNINVTLDDSTNALMEICYWVLRXTDDLERCRLNGTV

SEQ ID NO: 90396 - protein, 26 aa, Gossypium hirsutum
  Clone ID: LIB3048-046-Q1-L1-E4.pep
PNDFLTSKLLNHRGCSIGQLGRLTNT

SEQ ID NO: 90397 - protein, 38 aa, Gossypium hirsutum
  Clone ID: LIB3048-046-Q1-L1-E6.pep
EGTSDSFNVVTIFLTSSVVPLHLPVAKEQDFTSHEIYV

SEQ ID NO: 90398 - protein, 60 aa, Gossypium hirsutum
  unsure (1)..(60): unsure at all Xaa locations
  Clone ID: LIB3048-046-Q1-L1-E9.pep
TSNPNWPRSPGKQDCGLHTIQLSXNYIYNHDEMAIIAYLFNNPYLILNDPTISFNSAFKF

SEQ ID NO: 90399 - protein, 73 aa, Gossypium hirsutum
  Clone ID: LIB3048-046-Q1-L1-F2.pep
NDALTTIGSRLGIHTIPRQSYRSAMGASLMMTVIEYVTVSALMTSPLQYTILVHIAIRILMNLLSTRINAIQA

SEQ ID NO: 90400 - protein, 86 aa, Gossypium hirsutum
  unsure (1)..(86): unsure at all Xaa locations
  Clone ID: LIB3048-046-Q1-L1-G11.pep
AHLKSAKGRKFVANGNFFAKLNXVLTNELAEDXYSGVEIRVTTMRTXIIIIATRTQNFLLXNGMMIKELTSMVHKLFKFPKNSVEL

SEQ ID NO: 90401 - protein, 48 aa, Gossypium hirsutum
  Clone ID: LIB3048-046-Q1-L1-G4.pep
PNNLQTPCLPILSGSGFNYGRSTHYQASHTHRITMSKRYSSLSSLTYS

SEQ ID NO: 90402 - protein, 38 aa, Gossypium hirsutum
  Clone ID: LIB3048-046-Q1-L1-H12.pep
LHLYCITLFKKSTKHKATISYLLAFQYEKRRMLSNPAN

SEQ ID NO: 90403 - protein, 57 aa, Gossypium hirsutum
  Clone ID: LIB3048-046-Q1-L1-H4.pep
LVFSKRSYIRRGESIMNTTQSCTCPLGDWSNMIADWAYSLFSYGPYMGVLIIVCRLC

SEQ ID NO: 90404 - protein, 39 aa, Gossypium hirsutum
  Clone ID: LIB3048-046-Q1-L1-H8.pep
LSSLSVVPLVCLVGFDLYECSLLEISQMSLDMYRTIYDS

SEQ ID NO: 90405 - protein, 65 aa, Gossypium hirsutum
  Clone ID: LIB3048-047-Q1-L1-A11.pep
THLLHLTQPYRDRHAYNDGGQDGAAHCKNTIQLWYAIMIAADMRVILTVRASLQLSIHYTYRTDV

SEQ ID NO: 90406 - protein, 70 aa, Gossypium hirsutum
  Clone ID: LIB3048-047-Q1-L1-A4.pep
NGASPLQMIYILVLNLIAHLLLQGHDPMVHNQMPAGRGDTRGGVGGGRGAVRRTRTTYTLTWLDHLAPDV

SEQ ID NO: 90407 - protein, 103 aa, Gossypium hirsutum
  Clone ID: LIB3048-047-Q1-L1-A8.pep
FFSKYYILSDRVVLSYTNSSKGDAEQLRRGTWSAEEDSLLIHYIARHGEGHWNLLAKRAGLKRTGKSCRLRWLNYLKPDVKHGNLTPQEECLILQLHSKWGNR

SEQ ID NO: 90408 - protein, 56 aa, Gossypium hirsutum
  Clone ID: LIB3048-047-Q1-L1-A9.pep
QIESGSPTRLLVKALLTISNNELSLMTSTMVYKMISILTAKASVMLSLCYNSSLEL

SEQ ID NO: 90409 - protein, 87 aa, Gossypium hirsutum
  Clone ID: LIB3048-047-Q1-L1-B12.pep
IPAAKNRSLITPLSHLMNIPTLSINSRTWNLQRPPRRHPHQHLRRLLLHLLRNSLRNGGLISWEHQLFPHVIQTTRKQPCRVLVTKL

SEQ ID NO: 90410 - protein, 135 aa, Gossypium hirsutum
  unsure (1)..(135): unsure at all Xaa locations
  Clone ID: LIB3048-047-Q1-L1-B8.pep
GHPNFMYLKKLFGLLLLNEKISSLNCEVCQLSKHTWVPYPLKPYVQSQPFSLTHSDLWGASXVKNITGARWLITFIDDHTRVRWVYLLKEKSEVSRVFRNSHSMIRTQVNSNIHTLRTDNGREYFNSILSSYLSE

SEQ ID NO: 90411 - protein, 134 aa, Gossypium hirsutum
  Clone ID: LIB3048-047-Q1-L1-C9.pep
AVHSLVKLIKEMAKVIETERPLVGQCLPLWDDLRTKVKDWCSRFHIAEGPVEKVIEKRFKKNYHPAWAAAYVLDPLYLIKDMSGRYLPPFKCLTLEQEKDVDKLITRLVSREEAHIALMELMKWRTEGLDEVYA

SEQ ID NO: 90412 - protein, 47 aa, Gossypium hirsutum
  Clone ID: LIB3048-047-Q1-L1-D1.pep
KTHKNFTLSTLTQVLSPSSVSILSSFRDFAPTGQFGGKAKSFLETLD

SEQ ID NO: 90413 - protein, 112 aa, Gossypium hirsutum
  Clone ID: LIB3048-047-Q1-L1-E8.pep
ISLLSSLNHGPRRNFSNWDQYLTSLFIVYHHQHIYNFCVTQFLKFSLQYSKSYWRHSTQSQSCTTSHQMFDLTWRIALWKLAHFLKMLFKLITHMLIKTPIIPCFSTLLLPR

SEQ ID NO: 90414 - protein, 42 aa, Gossypium hirsutum
  Clone ID: LIB3048-047-Q1-L1-F3.pep
AVSQAVLDLLNALRFPLISGPFIVLDPRSLWLNILLSRSSQL

SEQ ID NO: 90415 - protein, 58 aa, Gossypium hirsutum
  Clone ID: LIB3048-047-Q1-L1-F7.pep
SFSSIVELVYEMNRASFAYLDASIIYSAFSSFSKLHIVLFYHLLFQSQRHLFTLYLVS

SEQ ID NO: 90416 - protein, 98 aa, Gossypium hirsutum
  unsure (1)..(98): unsure at all Xaa locations
  Clone ID: LIB3048-047-Q1-L1-G3.pep
PSGMMVKCEATHVKYMGCCLMYRGDVVPNDVNAADTTINTKRTVQAADWCPAGSKCRINYNSPTVAPTGEHANEQXACCMSSNKTAVADDDSRNDHRF

SEQ ID NO: 90417 - protein, 69 aa, Gossypium hirsutum
  unsure (1)..(69): unsure at all Xaa locations
  Clone ID: LIB3048-047-Q1-L1-G8.pep
LTRRAGANTAELXRTANALGSPDPGILATDEPIATCGKRVSSMGLETTEPKRQAYRRITLTTPGLLTIY

SEQ ID NO: 90418 - protein, 96 aa, Gossypium hirsutum
  Clone ID: LIB3048-047-Q1-L1-H10.pep
GSCHHHSFCNIVKVLNTVHTEYDELGFSKSWIDRAVLIVSCQYSRGLDKSSWYGNVQIDVNHQIWLNTVPSHRRYCLLNFEARDLRSTHAISAWIA

SEQ ID NO: 90419 - protein, 27 aa, Gossypium hirsutum
  Clone ID: LIB3048-047-Q1-L1-H2.pep
PKVQEIVSEIFGESPSKGVNPDEAVAL

SEQ ID NO: 90420 - protein, 55 aa, Gossypium hirsutum
  Clone ID: LIB3048-047-Q1-L1-H9.pep
VMQGYKYCPCRCKRVSSLQVSNYSSESIYSLSLFTQYSLPRFPQALKARQVKMRE

SEQ ID NO: 90421 - protein, 61 aa, Gossypium hirsutum
  Clone ID: LIB3048-048-Q1-L1-A11.pep
TDFINKSITILYNTTKSIIHHLMHHKFTPKIHNTAITLYIPDVRYFNSIHPIYTIFSKINL

SEQ ID NO: 90422 - protein, 89 aa, Gossypium hirsutum
  Clone ID: LIB3048-048-Q1-L1-A6.pep
ASCRFAGAMIVDGTEYQTNLNPYTKIHVMLNCHAHSIVADMAYHEHGSVADITDRALEPSTMTARCDPPHGKNMACCLMYRRNVVPKDV

SEQ ID NO: 90423 - protein, 68 aa, Gossypium hirsutum
  Clone ID: LIB3048-048-Q1-L1-A7.pep
EIDADIYFCLIDEIRPCIKKRRASLLFFSSERKLRVFAEILFSYLLAASEKDKVTRKRIIVETVRDDS

SEQ ID NO: 90424 - protein, 72 aa, Gossypium hirsutum
  unsure (1)..(72): unsure at all Xaa locations
  Clone ID: LIB3048-048-Q1-L1-A8.pep
KFNEFNCPVEYYRSPFLAEQSRPTARSPYIIKTALKLDRMDWNAFMWKDXPIVGFNSGHWWNYEKTVRGGWY

SEQ ID NO: 90425 - protein, 46 aa, Gossypium hirsutum
  Clone ID: LIB3048-048-Q1-L1-B5.pep
MCTYHPCRPCCLAHRVLHKQEHNTPSIYYALLPRSLSGSRGIACSP

SEQ ID NO: 90426 - protein, 56 aa, Gossypium hirsutum
  Clone ID: LIB3048-048-Q1-L1-C10.pep
LMESTFSNNGCELLPVVVILYRYQFVYEFFTVSRVKCIFSPAVGMLSLNTWRHFLI

SEQ ID NO: 90427 - protein, 40 aa, Gossypium hirsutum
  Clone ID: LIB3048-048-Q1-L1-C2.pep
WFRPLHLALGRRVSTRVSWVQQDFYQSPRCCPTASAFHQN

SEQ ID NO: 90428 - protein, 55 aa, Gossypium hirsutum
  Clone ID: LIB3048-048-Q1-L1-C4.pep
LRLTRMQRQSFPTVQVNHPVQDSVSCRHSYHSYKRQESKCQSPSCHGLPHPANVI

SEQ ID NO: 90429 - protein, 54 aa, Gossypium hirsutum
  Clone ID: LIB3048-048-Q1-L1-D4.pep
TSSHPLNLRKDDIQLRLECPVSTTALALYRTGLDIYCTGSEDARISRPSEGTIS

SEQ ID NO: 90430 - protein, 66 aa, Gossypium hirsutum
  unsure (1)..(66): unsure at all Xaa locations
  Clone ID: LIB3048-048-Q1-L1-D7.pep
RDFDHGWNGKWVGYNEHFCYDALXIVTVVSYAATFGSSGLLLHWLTPSGQDCRLNTLLNVMTLILA

SEQ ID NO: 90431 - protein, 73 aa, Gossypium hirsutum
  Clone ID: LIB3048-048-Q1-L1-E1.pep
SRAKTTAAKLGKGLSKDENAQKLALQHWLEAIDPRHRYVHNLHFYYDVWSASKSSQPFFYWLCTFVKLNSKVT

SEQ ID NO: 90432 - protein, 116 aa, Gossypium hirsutum
  Clone ID: LIB3048-048-Q1-L1-F1.pep
AASASVHGRSAAAGKAASSDKTAARIAMHMAGERAPVNAKMVKSRFTTGAASRSFTSTSYDPVTKNEFEYVKVEKNPKKKGYVQLHTTHGDLNIELHCDITPRTCENFLTLCDQGY

SEQ ID NO: 90433 - protein, 59 aa, Gossypium hirsutum
  Clone ID: LIB3048-048-Q1-L1-F5.pep
LINENRPCIKKPKASLLFFSSERKLRVFEEILFSYLLAASEKEKVTRKRIIVETVRDDS

SEQ ID NO: 90434 - protein, 77 aa, Gossypium hirsutum
  Clone ID: LIB3048-048-Q1-L1-F7.pep
LTVYRLPNHRPRSRSVAASIRSRTPWRFTCVPSFPIESSVGEFRVFIHAFVSSELLKAPGGIPSKNVVIFVRVKVAI

SEQ ID NO: 90435 - protein, 60 aa, Gossypium hirsutum
  Clone ID: LIB3048-048-Q1-L1-G11.pep
HLSRHARLLRQGLQLGIRWGGITFISFLIYNHPTTISTIVSHITQLFNFRMNRLLCRRLS

SEQ ID NO: 90436 - protein, 59 aa, Gossypium hirsutum
  Clone ID: LIB3048-048-Q1-L1-G12.pep
PLGSGANVSRSFAMSAQARYISNEGLRPKLTYSELFRSAILRSYGLEGTCSPNPFLLPH

SEQ ID NO: 90437 - protein, 98 aa, Gossypium hirsutum
  Clone ID: LIB3048-048-Q1-L1-G4.pep
TKCNQERESIIGTKYSQILRVPFRTETGILRRWVSRFDIYPYLETFAQDVTSKILDAMEGKPDLIIGNYTDGNLVSSLVASKLGITQATIAHALEKTK

SEQ ID NO: 90438 - protein, 93 aa, Gossypium hirsutum
  Clone ID: LIB3048-048-Q1-L1-G7.pep
VLPNPLRGFYDLRQWLPKLILANNHLSLACYTRLRRTNSHWIGILNANSTALSASSLTIPEAPADYFSTLIKARTFMIPFHKEPGTKIETYIP

SEQ ID NO: 90439 - protein, 99 aa, Gossypium hirsutum
  unsure (1)..(99): unsure at all Xaa locations
  Clone ID: LIB3048-048-Q1-L1-G8.pep
LHVPVHAMESSMAGSDLEQSRQRXTGVSSCEGTGATMSDDHNXVLDSDTSLSDGSLHGIDSMRFGPVAPFKTARSLMERVTQXLKHKLKQCFIEKIEDI

SEQ ID NO: 90440 - protein, 107 aa, Gossypium hirsutum
  Clone ID: LIB3048-048-Q1-L1-H1.pep
PVPSIQEIMRSDSESVPQRYIHENKDRPIISEDLADSPEIPVIDFSFLAKGNEDEVQKLHLACKDWGFFQVINHGVKEEILEKMKAAVAAFFELPFQEKKKYAKGRK

SEQ ID NO: 90441 - protein, 31 aa, Gossypium hirsutum
  Clone ID: LIB3048-048-Q1-L1-H12.pep
ISPHQGNMIQLKQFKPLRAMIASPNVKLFLQ

SEQ ID NO: 90442 - protein, 92 aa, Gossypium hirsutum
  Clone ID: LIB3048-048-Q1-L1-H6.pep
AEELRTELDASKLLADKRKQELDMEKKCAEELKEAMQMAMAGHARMLEQYADLEEKHMQLLARHRNIQEGIDDVKKAAAMARVKGAESKFIN

SEQ ID NO: 90443 - protein, 29 aa, Gossypium hirsutum
  Clone ID: LIB3048-049-Q1-L1-A1.pep
RHGSWYGLCLIKGRIVSQVHVYSQSVKCV

SEQ ID NO: 90444 - protein, 40 aa, Gossypium hirsutum
  Clone ID: LIB3048-049-Q1-L1-A11.pep
WYTMRLNLQRHVFCQFIDIAFTIFPFKMPFSRYISFLGFN

SEQ ID NO: 90445 - protein, 66 aa, Gossypium hirsutum
  Clone ID: LIB3048-049-Q1-L1-A7.pep
NVSLLPTIYRSLSHLCPLMPHLPIPCYDSSSLFTIDISLLFTSKESSPLYHLQDHHQSYPSDSNPL

SEQ ID NO: 90446 - protein, 102 aa, Gossypium hirsutum
  Clone ID: LIB3048-049-Q1-L1-B3.pep
DGLNPFKIMSTSDSTWPVVLVPYNQSPWLCMKQSSLILSMIIPGEKGPVNDIDIYLQPLIEELKQLWAGIETYDVLRKDNFYLRAALLWTINDFPTYANLSG

SEQ ID NO: 90447 - protein, 99 aa, Gossypium hirsutum
  Clone ID: LIB3048-049-Q1-L1-B4.pep
IGLKLLAKARYSVARFKEEQIVILSQVLANEVNIGYEDMSNQQVLKFNGTRIKNIRHLAHLVACCQDKYLVFEFEDNYLAVLEREAAMATSSSILKDYG

SEQ ID NO: 90448 - protein, 73 aa, Gossypium hirsutum
  Clone ID: LIB3048-049-Q1-L1-C3.pep
PQIGQKLNEEGNKEADVKPLIRLSTERLGFDDEKGICETSISLLSSLACNRAKRFIHSWISLHLMFYYGILSF

SEQ ID NO: 90449 - protein, 75 aa, Gossypium hirsutum
  unsure (1)..(75): unsure at all Xaa locations
  Clone ID: LIB3048-049-Q1-L1-C5.pep
GVLYTWVNYGKGGKPRWFVLHDXITSYYTIHSPDKIVVSQDTERRSNVIGEKSLPLISDIAIPYLVISKTVWNPL

SEQ ID NO: 90450 - protein, 55 aa, Gossypium hirsutum
  Clone ID: LIB3048-049-Q1-L1-D11.pep
QSTQGSLLYGWFTRKIICGILATSRDEVKYPIKVPCHKFKVDNKLPKILNGGNSN

SEQ ID NO: 90451 - protein, 46 aa, Gossypium hirsutum
  Clone ID: LIB3048-049-Q1-L1-E2.pep
GTQSFGLKVSCLNLLIHIMSPYYISTITLLSKWKTQRTGEAMNNVL

SEQ ID NO: 90452 - protein, 37 aa, Gossypium hirsutum
  Clone ID: LIB3048-049-Q1-L1-E4.pep
NPCLFSKSYQLIFLSCYLIILIKRSWQYKLGHLSIPY

SEQ ID NO: 90453 - protein, 74 aa, Gossypium hirsutum
  unsure (1)..(74): unsure at all Xaa locations
  Clone ID: LIB3048-049-Q1-L1-F10.pep
EGHKFLHIQPIIYFXKSGFFLHSCTLQMVQDKLQGTPLPTIGQHXHNFIFFYXLAPNMQXXSDQHTPIQIDSXT

SEQ ID NO: 90454 - protein, 54 aa, Gossypium hirsutum
  Clone ID: LIB3048-049-Q1-L1-F4.pep
SIMIGYPSTPRVRAYCVIQLESSISYCHGRYTYHNAFCLNTSSSEPKRTIVFLE

SEQ ID NO: 90455 - protein, 45 aa, Gossypium hirsutum
  Clone ID: LIB3048-049-Q1-L1-G1.pep
SKRLSSTSSSLSADIRESYQMPQSLHEPLKSYKHNRVIRNSMDSS

SEQ ID NO: 90456 - protein, 80 aa, Gossypium hirsutum
  unsure (1)..(80): unsure at all Xaa locations
  Clone ID: LIB3048-049-Q1-L1-G12.pep
GLKCXXFWMGNHYDFSGPXVFWAWMAXXEKGSKWWXFKRKWXXRKKFPNXXLGHLRVLXEKXXGPXDLXXFLLSKGTFFS

SEQ ID NO: 90457 - protein, 72 aa, Gossypium hirsutum
  Clone ID: LIB3048-049-Q1-L1-G4.pep
QILHLLKPSNFAKEAMERLLYSSSTTSFENLSKSFSFTVSTRQIHSSNLGLSPSLNYSQTNPMNFNFMQGQI

SEQ ID NO: 90458 - protein, 73 aa, Gossypium hirsutum
  Clone ID: LIB3048-049-Q1-L1-G5.pep
ILKTLDCEWDINGIRRHLVSSNDYRSIADRLVLLVDSLSGKNMLVLNFAKRQTAKSNVSAIRATLLLTNIGCE

SEQ ID NO: 90459 - protein, 47 aa, Gossypium hirsutum
  Clone ID: LIB3048-049-Q1-L1-H11.pep
QITFFLFLIHTLSRQITKIIRIHYKIIHLIQYSNNTLLIKIKLPLTK

SEQ ID NO: 90460 - protein, 57 aa, Gossypium hirsutum
  Clone ID: LIB3048-049-Q1-L1-H12.pep
SFLSFLFQISRGRQPYLRSLLLSVIFQRFLRAFFIGEQKSHLDRYNSNRGRKASFFF

SEQ ID NO: 90461 - protein, 88 aa, Gossypium hirsutum
  unsure (1)..(88): unsure at all Xaa locations
  Clone ID: LIB3048-049-Q1-L1-H2.pep
LFLLIAKKLNKGMNVMDRYSSSVXGNELIDNDFFIACTLGSCIKWFQTYSLDRYDIMDDSDTRIGHACXVTLPYFGMIAITDALRLRI

SEQ ID NO: 90462 - protein, 46 aa, Gossypium hirsutum
  Clone ID: LIB3048-049-Q1-L1-H4.pep
KSSQVFSNFTSKPYTYTLTSPELILREIKRKDLHQSTKTMITIPYL

SEQ ID NO: 90463 - protein, 74 aa, Gossypium hirsutum
  Clone ID: LIB3048-049-Q1-L1-H8.pep
HLGHHLFIQSRGDEFINWQLLACPADNTYATTVLIPDRASVKIHHIPILSDHPAVSEREHRPFISTGYHVTEDA

SEQ ID NO: 90464 - protein, 67 aa, Gossypium hirsutum
  Clone ID: LIB3048-050-Q1-L1-A3.pep
LIMITSDLQRTWHRYQGRFYTYYVYHDVSYRTRHDAIATTAILPWKTGSAVNPLSPATYLSKTAQQK

SEQ ID NO: 90465 - protein, 131 aa, Gossypium hirsutum
  Clone ID: LIB3048-050-Q1-L1-A8.pep
WNVVEYVDFSGRDFSSAIPDKVCDRNNDLRYLAFSGNLLAGILPRSLINCGELVVFNVVDNKLSDTFPHWLSMLPKLRVLILRSNRFHGSIQSSIPTSFFSKLQIIDLSHNHFTCLLPTQFFQNLKASEKS

SEQ ID NO: 90466 - protein, 126 aa, Gossypium hirsutum
  Clone ID: LIB3048-050-Q1-L1-B10.pep
TTLAVLPTVWLRDLSVLSYISAGGVVASFLVVLCLFWVGLVDQVGFQNKGTVLNLSTLPVAVGLYGFCYSGHAVFPNIYTSMAEPRKFSSVLLSCFGICSLLYAGTAVMGYKMFGEATESQFTLNM

SEQ ID NO: 90467 - protein, 125 aa, Gossypium hirsutum
  Clone ID: LIB3048-050-Q1-L1-B12.pep
VVYKGTLADGTLVAVKQILDLDLESHEDFSNEVQIISKIRHRNLLSLRSCCVTSDIMKGRRRYLVYDFMSNGSLGDHLFNDFTRQKLSWPQRKNIILDVAQGLAYLHYGIKPSIYHRDIKATNIL

SEQ ID NO: 90468 - protein, 67 aa, Gossypium hirsutum
  unsure (1)..(67): unsure at all Xaa locations
  Clone ID: LIB3048-050-Q1-L1-B7.pep
KRKSXLDLRSTNLHIHINLLKIVLFFTSCTSNGSGSYSTLADIVNTIIHFFLIWPNMQNSDHHHHTN

SEQ ID NO: 90469 - protein, 71 aa, Gossypium hirsutum
  unsure (1)..(71): unsure at all Xaa locations
  Clone ID: LIB3048-050-Q1-L1-C5.pep
KRVVGDPFKTGIGQRPQIGNEPFKKNLKYLKAGLEXGPTLESXSEQFGSQSYYIPPTVFSNGQDDLLIAKD

SEQ ID NO: 90470 - protein, 80 aa, Gossypium hirsutum
  Clone ID: LIB3048-050-Q1-L1-E1.pep
SLVINDCYEYYIGGVVDEPIFYVHKCKTGNLNKVIQQPFFPGKMDFLPKRKPSDDINIEHQIYTCEVLQWPYRGLQIGFY

SEQ ID NO: 90471 - protein, 45 aa, Gossypium hirsutum
  Clone ID: LIB3048-050-Q1-L1-E7.pep
PAKISTYTNGPFGTLKKGKPKFEGQSPFEFPWNGAWGLSSPFGKG

SEQ ID NO: 90472 - protein, 27 aa, Gossypium hirsutum
  Clone ID: LIB3048-050-Q1-L1-E9.pep
LHFSSLYQKMAIAQVFKLTEDHKIHWA

SEQ ID NO: 90473 - protein, 133 aa, Gossypium hirsutum
  Clone ID: LIB3048-050-Q1-L1-F3.pep
DSSLFIRRSGGHLVYVLVYVDDIIITGTDSVAIDRFVKDLDIHFSLKDLGRLNYFLGIEVTSTLHGVSLSQKKYILELLQKASMDKSKASPTPMMTTCRISAHEGTPMEDEHLFRSIVGALQYVVITRPDIAF

SEQ ID NO: 90474 - protein, 66 aa, Gossypium hirsutum
  unsure (1)..(66): unsure at all Xaa locations
  Clone ID: LIB3048-050-Q1-L1-G7.pep
ISXQSEGMTSLMRYILVSKVEKLIHERTLASCDIEAWLFLTDPFIVSNSHEQRSVGSRRWADGSRY

SEQ ID NO: 90475 - protein, 64 aa, Gossypium hirsutum
  Clone ID: LIB3048-050-Q1-L1-G8.pep
KKWDSINMIQFLINKNIVCMFNNKKNEQIIIIKSRNNIGSFHFLIHELNDVFEFRNPTNPCSLL

SEQ ID NO: 90476 - protein, 74 aa, Gossypium hirsutum
  unsure (1)..(74): unsure at all Xaa locations
  Clone ID: LIB3048-050-Q1-L1-H3.pep
RICSAYINQRFLGGTLSTKRLGYDRNRFEHLAXINFALKVDCLAWSYIAIKLXSSISIGGAPLWTYRTVGITNT

SEQ ID NO: 90477 - protein, 28 aa, Gossypium hirsutum
  Clone ID: LIB3048-050-Q1-L1-H6.pep
PDGPYAWGYCYGQEQSDPGEKYFGRGPI

SEQ ID NO: 90478 - protein, 53 aa, Gossypium hirsutum
  Clone ID: LIB3048-050-Q1-L1-H7.pep
LSRDRIQELSGCDSASKLAIIPAAILNDEFLVTEESTVFFKELFLFWITSHSP

SEQ ID NO: 90479 - protein, 44 aa, Gossypium hirsutum
  Clone ID: LIB3048-051-Q1-L1-A10.pep
LDDHSQLESGPVSLYESGPHGTYVGIYDGHGGPATVRFISEHLF

SEQ ID NO: 90480 - protein, 87 aa, Gossypium hirsutum
  Clone ID: LIB3048-051-Q1-L1-A3.pep
VGQFRLYGRASLVLRWCSSRICCAALWLFCPLAFGLRLHSHELVAIRPGCGHVSVAWFFGSLLGLVFYQARCCRLARAAFRPPGGFA

SEQ ID NO: 90481 - protein, 47 aa, Gossypium hirsutum
  Clone ID: LIB3048-051-Q1-L1-A7.pep
TDRSQRSNTKDAEATYSETSYIIILLQFRLFTCSFPCEHNLHVSRQL

SEQ ID NO: 90482 - protein, 36 aa, Gossypium hirsutum
  Clone ID: LIB3048-051-Q1-L1-A9.pep
LNNFSDRHPMGTASQTGMDYKEPPASLFFEPGLLKS

SEQ ID NO: 90483 - protein, 73 aa, Gossypium hirsutum
  Clone ID: LIB3048-051-Q1-L1-B1.pep
RTQTLGQDLKKQRQYSPVNSKNNYITRSQYIATLRLMKTIAGLFTRRATHSPVLVFASSNHRHNQSTTHRRAY

SEQ ID NO: 90484 - protein, 41 aa, Gossypium hirsutum
  Clone ID: LIB3048-051-Q1-L1-B10.pep
PISCGFKPTNWSYYLNLLLNYLLHIYPSPHLTPLTSLLSTL

SEQ ID NO: 90485 - protein, 97 aa, Gossypium hirsutum
  unsure (1)..(97): unsure at all Xaa locations
  Clone ID: LIB3048-051-Q1-L1-B3.pep
PSTGSLANDTWVVQADAAARKARSSSPTNSNKETAYVXLRNKVATGYLNSXVSQALYHILNSRTADYHMPTTANAMPTLGITWALHSLCYKPKYSVT

SEQ ID NO: 90486 - protein, 70 aa, Gossypium hirsutum
  Clone ID: LIB3048-051-Q1-L1-B5.pep
EESDARARQEDTGKYRPMNCNNKYIMRAQYTATRRLMKYILRTLQPEEDTYPSPYTSESNAQRIDRLTSH

SEQ ID NO: 90487 - protein, 61 aa, Gossypium hirsutum
  Clone ID: LIB3048-051-Q1-L1-C10.pep
TMKSSILIKSVNTRVINWTKNVHAIPLLNYKNPLKRQYISLTTAQQLYPPEGFSTDKSQLI

SEQ ID NO: 90488 - protein, 82 aa, Gossypium hirsutum
  unsure (1)..(82): unsure at all Xaa locations
  Clone ID: LIB3048-051-Q1-L1-D3.pep
ARAASFRLDGSLYVEVTEYQTNQFPYPKIHLMLTSYAHAILADMAYHEQLSVADITNSAFEPXSMMSKCDPRHVLYMTCCLM

SEQ ID NO: 90489 - protein, 135 aa, Gossypium hirsutum
  unsure (1)..(135): unsure at all Xaa locations
  Clone ID: LIB3048-051-Q1-L1-D6.pep
LFRVNKNDGEMVTSAEEAIVLQKKKSALNRFYWNLSQPTKNSTSSDVDNKELKRGVQETIVVSKSPSQLEVALGVIKSYCKAHLRKEGMLAATKQLQFLESMRKEYRHXARLLCIAQAQVLNAHDEIKMATTRLH

SEQ ID NO: 90490 - protein, 77 aa, Gossypium hirsutum
  Clone ID: LIB3048-051-Q1-L1-E11.pep
IQLHIQNNKLIKNTIDTDLYHKSLNAERSISSNLTISMIVKKQQLISYLNLLISYSTTVQYILCVPDLKMMTTFNFR

SEQ ID NO: 90491 - protein, 61 aa, Gossypium hirsutum
  unsure (1)..(61): unsure at all Xaa locations
  Clone ID: LIB3048-051-Q1-L1-F12.pep
PRXWVGSSQCESLEIPLLGTKGRVLAHFRLMDAWILMVERMGLQLVRASCDSCLLVPCVQP

SEQ ID NO: 90492 - protein, 38 aa, Gossypium hirsutum
  unsure (1)..(38): unsure at all Xaa locations
  Clone ID: LIB3048-051-Q1-L1-F7.pep
LTIMPITRSSSLAINASCQHHHSFXQVMYRSREXIHVS

SEQ ID NO: 90493 - protein, 59 aa, Gossypium hirsutum
  Clone ID: LIB3048-051-Q1-L1-G11.pep
PKMCIQSTIATSMDYPDNPSAITQSTGGLLFINISLNLCLIFILMASSYVSRNQFPDLG

SEQ ID NO: 90494 - protein, 44 aa, Gossypium hirsutum
  Clone ID: LIB3048-051-Q1-L1-G9.pep
SCLSMLYSLYHSLSDCPTFYCLMLKSGTKKARMIQRLVLPMLSI

SEQ ID NO: 90495 - protein, 123 aa, Gossypium hirsutum
  unsure (1)..(123): unsure at all Xaa locations
  Clone ID: LIB3048-051-Q1-L1-H4.pep
KVVGWALSHQFMHSSGVLLKDAKLVVSTESIKYGLDILQGIQNESKTLKKSLKDVVTENEFEKKLLADVIPPSXDIEVSFDDIGALENVKDTLKELVMLPLQRPXLFCKVQFDNPFKGILLFG

SEQ ID NO: 90496 - protein, 96 aa, Gossypium hirsutum
  unsure (1)..(96): unsure at all Xaa locations
  Clone ID: LIB3048-051-Q1-L1-H8.pep
MSTQLVKIMMDSRTIIKKCQKSSXNTSMIEAIIRDIQNKKSCFQEIIFQYIHRSGNAQAHRIAENTLDRGEISYLMGEELNCHSFGLEGRWARSLD

SEQ ID NO: 90497 - protein, 138 aa, Gossypium hirsutum
  Clone ID: LIB3048-052-Q1-L1-A10.pep
RTWDPSKANLLYGPFYGGLHVSSNFREPNHAIRDALAVKLVDYLQAQPTWRKNNGKDHFLALGRTSWDFMRTDSGPDFGASCLLNLPCVKNMSVLTVERNPWKGSNQHGIPYPSYFHPFTSDQMMTWQNMMRQSNRPY

SEQ ID NO: 90498 - protein, 44 aa, Gossypium hirsutum
  Clone ID: LIB3048-052-Q1-L1-B6.pep
QHSHASRFEAEKWNPPSYLAQFLVFTCFSYGSYSLCQMVLVWLL

SEQ ID NO: 90499 - protein, 110 aa, Gossypium hirsutum
  Clone ID: LIB3048-052-Q1-L1-B7.pep
AIWVDTCLVSLLLIIVAVEARIPGVYSDGAWQSAHATFYGGSDASGTMGGACGYGNLYSQGYGVNTAALSTALFNIGFSCGACFEIKCVNQPQWCHSGSPSIFITATIFC

SEQ ID NO: 90500 - protein, 87 aa, Gossypium hirsutum
  Clone ID: LIB3048-052-Q1-L1-C10.pep
ETSLQVLRGFDADVSIEVNEIKRSVASTTRRTTIRFADLKERRYWFPLMVGIGLLMLQQLCGINGVLFYSSTIFEAAGVKISNAATL

SEQ ID NO: 90501 - protein, 78 aa, Gossypium hirsutum
  Clone ID: LIB3048-052-Q1-L1-D5.pep
MVTRKLGIPLRSEFHPLLRKRIEQIARRDCRLAGTIIRRLMKKGPRSNNSDGGKFRSELEQILEATDCAEFQRCMVPW

SEQ ID NO: 90502 - protein, 28 aa, Gossypium hirsutum
  Clone ID: LIB3048-052-Q1-L1-E7.pep
KQVIRLLMEPAQKFICKAYGFEFITRYP

SEQ ID NO: 90503 - protein, 34 aa, Gossypium hirsutum
  Clone ID: LIB3048-052-Q1-L1-F5.pep
LGGSSGRYPQYCAAYNELQAAGVEFPPREENPEP

SEQ ID NO: 90504 - protein, 69 aa, Gossypium hirsutum
  Clone ID: LIB3048-052-Q1-L1-F6.pep
EIIRIGWHKARHSGNGSSSLCWLSRLSGRSFVLGGGCFWVRSFALRCQSRFLIERTAFILHIGSHKEIG

SEQ ID NO: 90505 - protein, 51 aa, Gossypium hirsutum
  Clone ID: LIB3048-052-Q1-L1-G12.pep
EIHVCKLVKCIFRQGVWRYTSTFALKEYTTVIGLAMIDYQWNRNCNWFESK

SEQ ID NO: 90506 - protein, 46 aa, Gossypium hirsutum
  Clone ID: LIB3048-052-Q1-L1-G8.pep
TLGIACNVFMNQNVRLHDRISCDFGWGRLLREQTHYYKNKGWNVSW

SEQ ID NO: 90507 - protein, 55 aa, Gossypium hirsutum
  Clone ID: LIB3048-052-Q1-L1-G9.pep
LSILDWPEYHLKQKRYTRYTLLSPANTKNNSATNHAHQGLNQMCILNTKHSLQQT

SEQ ID NO: 90508 - protein, 36 aa, Gossypium hirsutum
  Clone ID: LIB3048-052-Q1-L1-H5.pep
NSAGSFLIHIIPPIRTHVCLYDSVPVIVVSYIKNRV

SEQ ID NO: 90509 - protein, 87 aa, Gossypium hirsutum
  unsure (1)..(87): unsure at all Xaa locations
  Clone ID: LIB3048-052-Q1-L1-H8.pep
MLIVYKMKCIFFIFFIFFIYVIHYFLIFVFXFFIIFLFIFLFSFFIFFFYYFFYFFFFFYFFLFMCFFNFFFIFLLYIFFLTLFIFF

SEQ ID NO: 90510 - protein, 85 aa, Gossypium hirsutum
  Clone ID: LIB3048-053-Q1-L1-B12.pep
KAIENLNGSEFKGKKIKCSTSQAKNKLFIGNVPRNWGEEDVKKVVKDVGPGVNSIELLKDPMNPIRNRGFVFIEYYNHACAEYSR

SEQ ID NO: 90511 - protein, 36 aa, Gossypium hirsutum
  Clone ID: LIB3048-053-Q1-L1-B5.pep
MEYINTLIPGVRQVLGLSNDIPTHLCIVPRPFYVFI

SEQ ID NO: 90512 - protein, 81 aa, Gossypium hirsutum
  Clone ID: LIB3048-053-Q1-L1-B6.pep
MTTKNTVFKAWGYLKLNGDSENPAILAVNRHLGTYYIEDGPLLATDFDSLPKGAFEFPILKAVTEPAHVGDHPQQSRAPHI

SEQ ID NO: 90513 - protein, 141 aa, Gossypium hirsutum
  unsure (1)..(141): unsure at all Xaa locations
  Clone ID: LIB3048-053-Q1-L1-C7.pep
QNQAELIDNFVKQASAQKGTALGSVILEATSHPSLFAFSEILAVPTVAELEGTENSVYLKVLQLFAHGTWSDYRSNCSSLPQLVPDQVLKLKQLTVLTLAETNKVLPYDELMMELDVMNVRELEDFXINECMYAXIVRGKL

SEQ ID NO: 90514 - protein, 130 aa, Gossypium hirsutum
  Clone ID: LIB3048-053-Q1-L1-C9.pep
RSPLAVFVQIQGCVICLTLAIGWAFAAYVRNREINRMKDAMKCGNSFAFLCHDINELEHSNQVNLPRVTVVMPLKGFGEHNLHNWKSQITSLYGGPLEFLFVVESTEDPAYHAVSRLIRDFKGASFECLL

SEQ ID NO: 90515 - protein, 63 aa, Gossypium hirsutum
  Clone ID: LIB3048-053-Q1-L1-D4.pep
IIKYRIKYINLKNLIINNSFSNIYFKKHLLLQKEIPSPLKRFTHLRNFYIFCPLFSFKNHPFQ

SEQ ID NO: 90516 - protein, 143 aa, Gossypium hirsutum
  Clone ID: LIB3048-053-Q1-L1-F9.pep
TNPNPNPNPVKGSGHFETDTCINPYKNHIYRISHFILRYLLQERVVDDDEVSNVTDGGSICGPGDDCGGGGSWLFGTDSTDVYYQKMIEANPDNPLFLGNYAKFLKEIRGDFGRAEEYCERTILANTIDGNVLSLYAHLIWEN

SEQ ID NO: 90517 - protein, 75 aa, Gossypium hirsutum
  Clone ID: LIB3048-053-Q1-L1-G11.pep
QTKNQTPETVSFKARLANSSPMKFLLITTPALSPAPTLDTAPIFIGFRILNMTSKGMQTTSLWIYILQFPYFMLK

SEQ ID NO: 90518 - protein, 64 aa, Gossypium hirsutum
  Clone ID: LIB3048-053-Q1-L1-G9.pep
DLSFSFDYSQNAEGYCRDLYDGARHRTMYKGKESPLLERFNDKDLPIDKIGSGWRHCQTLSDKY

SEQ ID NO: 90519 - protein, 130 aa, Gossypium hirsutum
  Clone ID: LIB3048-054-Q1-L1-B12.pep
WDGPRVLGVLAMCIAIGDNYLKPFVISEPEVTITKRKGEEECLILASDGLWDVVPNDTACGVARMCLRAEKPLSPPVSPSSEAAVKGGTAESSDKACWDASILLTKLALARHSTDNVSVVVVDLKKNQPL

SEQ ID NO: 90520 - protein, 57 aa, Gossypium hirsutum
  Clone ID: LIB3048-054-Q1-L1-B5.pep
MLWISTGRVMSESLLKRGGSLIHSSVAFWGLDKVIMVRHQVKLITFGSFKFVTCRTW

SEQ ID NO: 90521 - protein, 72 aa, Gossypium hirsutum
  Clone ID: LIB3048-054-Q1-L1-C9.pep
YRNVYYFKFFHVFRELCTPNIYQTQEWYMRTLEKMKNPGNISHHYLLSMTALEYFQVFHPNEHYIISHLFPI

SEQ ID NO: 90522 - protein, 60 aa, Gossypium hirsutum
  Clone ID: LIB3048-054-Q1-L1-D11.pep
LYAISGDPKFIREGLKVLAHLKSFPNDKDDYSHIHHEFLLSSIITSLLRYCYFKQLYPPL

SEQ ID NO: 90523 - protein, 87 aa, Gossypium hirsutum
  Clone ID: LIB3048-054-Q1-L1-D7.pep
KDKALKEKETGKDAYKKKDLETAIQHYTKAMEIDDEDISYITNRAAIYLEMAKYGDCINDWEKACERSIELIAHDETIALSMTSNGT

SEQ ID NO: 90524 - protein, 75 aa, Gossypium hirsutum
  unsure (1)..(75): unsure at all Xaa locations
  Clone ID: LIB3048-054-Q1-L1-D9.pep
SILSLLRNSSFKSLIFVMSLTVKTITLDVXRSDTFYNVKTNIQDKXGLPPDQLKLICAFKLLEDGHTHSDYSIHT

SEQ ID NO: 90525 - protein, 107 aa, Gossypium hirsutum
  unsure (1)..(107): unsure at all Xaa locations
  Clone ID: LIB3048-054-Q1-L1-E12.pep
AQLYLSIRFMTSVLGCLNWKTIESXTPNLTLTLHLIFHKTNGXTNTNCISSMLDWTLILTHISKSYINPKLLNFTEKLYASCIASDKSTKTTNHLALITYNSNHAMD

SEQ ID NO: 90526 - protein, 85 aa, Gossypium hirsutum
  unsure (1)..(85): unsure at all Xaa locations
  Clone ID: LIB3048-054-Q1-L1-F8.pep
MSQYANAYLQHILRXVLYTNLDPKQMIMFAXTDSNDIGMRLANIACSNADIYMNLKAREQSAPDFYNPLTIVANLRQTKIPNWFV

SEQ ID NO: 90527 - protein, 133 aa, Gossypium hirsutum
  unsure (1)..(133): unsure at all Xaa locations
  Clone ID: LIB3048-054-Q1-L1-G6.pep
KSLKKFHDTVCSXCKDIKLTYFIMIFASVHFVLSHLPNFNSISGVSLAAAVMSLSYSTIAWGASVDKGVQQDVQYGYKAKTTAGTVFNFFSALGDVAFAYAGHNVXLEIQATIPSTPEKPSKEPMWRGVIVAY

SEQ ID NO: 90528 - protein, 104 aa, Gossypium hirsutum
  unsure (1)..(104): unsure at all Xaa locations
  Clone ID: LIB3048-054-Q1-L1-H11.pep
DDARALSSLSVXRSLLQTNELDELMLDGLAILTQXKQHNKLLLQALVRDGSGEEQLYSFESGFSRDSISSELDGYSKKLKEQYGVSIDGSAPSPRIRRNQVLDA

SEQ ID NO: 90529 - protein, 108 aa, Gossypium hirsutum
  unsure (1)..(108): unsure at all Xaa locations
  Clone ID: LIB3048-054-Q1-L1-H9.pep
VLLLITCSAKADGPSSDTFMTVNDVEFAPFVVEYDAHLRVICIADARFQLALHNTTPNALTLAGRMATTXSESLFRXVWEANMMNPARESSTYYLWSVRSLDLADADC

SEQ ID NO: 90530 - protein, 129 aa, Gossypium hirsutum
  unsure (1)..(129): unsure at all Xaa locations
  Clone ID: LIB3048-055-Q1-L1-A12.pep
MKSLHRSLPLLFVVVCSLSWVNVSANSHDDSLDCLSSYHPDESSSISKVTYTETNSSYSAVLESSIRNHRFSTPNTPXKPLVIATPLNISHVQATIRCSKKHGLQIRTRSGGHDYEGLSYVSHVPFVVI

SEQ ID NO: 90531 - protein, 29 aa, Gossypium hirsutum
  Clone ID: LIB3048-055-Q1-L1-A4.pep
SGYYSWWTITKHNSQYLLIKYYSPNLQII

SEQ ID NO: 90532 - protein, 35 aa, Gossypium hirsutum
  Clone ID: LIB3048-055-Q1-L1-B2.pep
HVKDVADQPFWGIKPWRGEHAPSYKIYRVKHHCIS

SEQ ID NO: 90533 - protein, 133 aa, Gossypium hirsutum
  unsure (1)..(133): unsure at all Xaa locations
  Clone ID: LIB3048-055-Q1-L1-B7.pep
LSFNNLVIQCIKGLYDLMGPYWMTTXLTINCTLLVFXSDIHLISCANNMYYINDTHDKQTWTYIFXACFASTLLIPYFHNYRINDFIVLGMTTYTAWYMDIAAVLYGQTVGXTHSDPTQLVLYFTDATSIVYT

SEQ ID NO: 90534 - protein, 72 aa, Gossypium hirsutum
  Clone ID: LIB3048-055-Q1-L1-C1.pep
LKFIADKVDTMIAKDTGLVDDLDKELSTSATRAHERCAMALSYVTRSIQDNTIYAKGLKLMGDQANAGTDHL

SEQ ID NO: 90535 - protein, 117 aa, Gossypium hirsutum
  unsure (1)..(117): unsure at all Xaa locations
  Clone ID: LIB3048-055-Q1-L1-C10.pep
LYSHGTLADSTVVALKHTRDLDLEGNQDFSTEVYIISKIRHRNLLSLPGCXSVTNDILTRRRRSLAYDLISNGSLGHHLFTDLTRQKLIRPHRTNILLDAPHSLAYLHYGIKPSIYH

SEQ ID NO: 90536 - protein, 117 aa, Gossypium hirsutum
  unsure (1)..(117): unsure at all Xaa locations
  Clone ID: LIB3048-055-Q1-L1-C2.pep
RVYIWRIPLLAGXRCYVSLWKFSTARDIKVKDSFTMIKNTVIWRKEFGVDGXLYEDLVNELYKVAFMHGSDKKCHTVCYNFYVEYHINDLHDNTFAYQVNLSKFLRWMIQFLYISIF

SEQ ID NO: 90537 - protein, 83 aa, Gossypium hirsutum
  Clone ID: LIB3048-055-Q1-L1-C7.pep
ILMFAKTGISVRQIMRLMELEKCVEPGYLPFTEKDVRNLLQSFRKSDQEDESIDLLRMCRNNKDKDPNFKFEYTLDSNNRLGN

SEQ ID NO: 90538 - protein, 95 aa, Gossypium hirsutum
  Clone ID: LIB3048-055-Q1-L1-C9.pep
LNTNFTFTNKKKQKENVNFKKKDTKKTNLEGTSFPTFTFLTLPFLLTAHLFTTFLMEKPSFYPLYILSTNSLFPHLGLYKIGTFKSPLKTVAIPD

SEQ ID NO: 90539 - protein, 77 aa, Gossypium hirsutum
  Clone ID: LIB3048-055-Q1-L1-D10.pep
LYFCTLQLLVKHAYYLTISIPSLSPNTFCTLPILTTRSTPSILTTSTIPADTISICSYFLDSNLLTYFSATNSSRFI

SEQ ID NO: 90540 - protein, 94 aa, Gossypium hirsutum
  unsure (1)..(94): unsure at all Xaa locations
  Clone ID: LIB3048-055-Q1-L1-D11.pep
MLALFHTASATPPQEPNSTTYHKSTKTPKHSXETLTDYLSNHPHNTLSMTYPNHSVLAYVPHERATSVHQTFTREFDDISWLFIKTSPNLFMLN

SEQ ID NO: 90541 - protein, 125 aa, Gossypium hirsutum
  Clone ID: LIB3048-055-Q1-L1-D12.pep
ISHVSRQQSRGGQYRNSFSKAHLSGNRFLSGQNRFRSSYAVNLGRRLRDADEASEAASLREIYHRNDPEAVIRLFETQPSLHSNRSALSEYAKALVKVDRLDESELLKTLHRGISSSSVDEESKS

SEQ ID NO: 90542 - protein, 67 aa, Gossypium hirsutum
  Clone ID: LIB3048-055-Q1-L1-D2.pep
LSNDSAIHHIDSGSPGLYIKDMMSNGHYISIMGISCMNKGEPLKCPTQFGLSKTQHDEPIYCIFNKA

SEQ ID NO: 90543 - protein, 33 aa, Gossypium hirsutum
  Clone ID: LIB3048-055-Q1-L1-D7.pep
LVVLAIILVWHQYGHVGQVAVSDGFILWLYCSY

SEQ ID NO: 90544 - protein, 83 aa, Gossypium hirsutum
  Clone ID: LIB3048-055-Q1-L1-D8.pep
LFYDRIYSLREGKLTIMAGVNSEIEFSSTEILPLDIHHVTALSYRPCNTVQEARETICCYASAYDKDLLPQLDFAYIQLKYIL

SEQ ID NO: 90545 - protein, 25 aa, Gossypium hirsutum
  Clone ID: LIB3048-055-Q1-L1-D9.pep
TSLSNTILLDPIFIMYFNTIHSFYH

SEQ ID NO: 90546 - protein, 69 aa, Gossypium hirsutum
  unsure (1)..(69): unsure at all Xaa locations
  Clone ID: LIB3048-055-Q1-L1-E5.pep
CSTYMEQHIPFTGILSXLADYYSHFLNCNRLKFHYYYCAYLTGDSENNGSQFLFTGQPILIAPMVDLML

SEQ ID NO: 90547 - protein, 78 aa, Gossypium hirsutum
  Clone ID: LIB3048-055-Q1-L1-F1.pep
TLKTCLGFQIADEPLIESDTLDPFNPIMKNTRARTSVALAAVDVWEQEVGERFTANMAHPIVDSADLEIRLELYTILK

SEQ ID NO: 90548 - protein, 44 aa, Gossypium hirsutum
  Clone ID: LIB3048-055-Q1-L1-F2.pep
YGTSVKSSLAIVVMHIAFLVIRLDVICMAPSRRHSLGHRIYVHI

SEQ ID NO: 90549 - protein, 41 aa, Gossypium hirsutum
  Clone ID: LIB3048-055-Q1-L1-F5.pep
TAVIHLGFINQISKYLMLTLSSHHLTSNFHHYILDLPKPII

SEQ ID NO: 90550 - protein, 68 aa, Gossypium hirsutum
  Clone ID: LIB3048-055-Q1-L1-F7.pep
LKSYALANDRLDDYRVTDYHLAIIKDYSKPVTNVMLNDLQNRKPYRILHDGIYSNYANRHSLSQTIFA

SEQ ID NO: 90551 - protein, 114 aa, Gossypium hirsutum
  Clone ID: LIB3048-055-Q1-L1-F8.pep
MVVSSTMHLLSMCVLSLVLSCCQGRVDPNFRIRAVNLGGWLVTEGWIKPSLFDGIVNKDFLDGTALQFKSVTTGKYLSAEQGGGSIIVANRTTASGWETFMLWRINETAFNFKG

SEQ ID NO: 90552 - protein, 89 aa, Gossypium hirsutum
  Clone ID: LIB3048-055-Q1-L1-G1.pep
LSKILQLLTVESATLVIIKIKNSLDGPLSTTLDRTFAVIQPNSDVTESMTGNYAREACDYTSPLKGISRYIRTVHQACSSNIASQANTL

SEQ ID NO: 90553 - protein, 62 aa, Gossypium hirsutum
  Clone ID: LIB3048-055-Q1-L1-G10.pep
GWLPPKLFLIDSQPITLQDPDALQSHMGTTIGRTASTLAMAKANQTRALLLNALTNSTHWTA

SEQ ID NO: 90554 - protein, 38 aa, Gossypium hirsutum
  Clone ID: LIB3048-055-Q1-L1-G2.pep
TGAAVSYLLILWGQYEPRVCLPRFFIYFLLSRIINAIY

SEQ ID NO: 90555 - protein, 38 aa, Gossypium hirsutum
  Clone ID: LIB3048-055-Q1-L1-G4.pep
PTLDLCILFFITMLKEHTVCDSIGTRFAIRSPRQVLNI

SEQ ID NO: 90556 - protein, 92 aa, Gossypium hirsutum
  Clone ID: LIB3048-055-Q1-L1-G5.pep
IFTINFSLRFTMKPTHLVTDHYSNYYLDLIASLPTIMATNYILPHLDTLKVNFIPTLIIPAIPTSTTMDTCLISLHLYKTLYRRHKLYDYLH

SEQ ID NO: 90557 - protein, 72 aa, Gossypium hirsutum
  Clone ID: LIB3048-055-Q1-L1-G7.pep
EFLRRLTNEVIEKQEELLNMFLLTIERCQQHGLAREEACMVHEMARIYIEHELLVQDRSMAVVKYDAVLAFL

SEQ ID NO: 90558 - protein, 49 aa, Gossypium hirsutum
  Clone ID: LIB3048-055-Q1-L1-H2.pep
STCTIVFVPVSQRFGCQWSARSYRTACRKWTDIVIIARVWVVVAIDALS

SEQ ID NO: 90559 - protein, 48 aa, Gossypium hirsutum
  Clone ID: LIB3048-055-Q1-L1-H6.pep
HLLSEANELWKLSRCEGLDGIMLVIAKCDRATPVLTSPLKSGFIYARS

SEQ ID NO: 90560 - protein, 96 aa, Gossypium hirsutum
  Clone ID: LIB3120-001-Q1-K1-A1.pep
INYCVNFMHLTSISMADITRASPYHSHILQLPDTTLIRSIWLNLTCFSASSIIITATYASYYCSFQWPLVGSLLWALLLSVYRLLAAALTTLLSQH

SEQ ID NO: 90561 - protein, 60 aa, Gossypium hirsutum
  Clone ID: LIB3120-001-Q1-K1-A3.pep
SRVRPRVRSKVRPPKIEIESVQVVQQCVMLIIPLHFLQFTACLNPFLSSAVFQAEMICVA

SEQ ID NO: 90562 - protein, 128 aa, Gossypium hirsutum
  unsure (1)..(128): unsure at all Xaa locations
  Clone ID: LIB3120-001-Q1-K1-A8.pep
GALDRDDEDVYFDDESAEVVISSLRLGDEQGSLFTNSNWSAFQDDRTGNAPAATSPPEVMTDMNLXATANGGNSTSDDEVVVGEDDELNDNSQSVNSTSTLDVMNEFNSVMSRGDLSPQGEKSNATQD

SEQ ID NO: 90563 - protein, 39 aa, Gossypium hirsutum
  Clone ID: LIB3120-001-Q1-K1-A9.pep
QPSDQNDRLIIYRIMSELALDTVNILKLDEGTMGLFSQD

SEQ ID NO: 90564 - protein, 89 aa, Gossypium hirsutum
  Clone ID: LIB3120-001-Q1-K1-B11.pep
MSDGEYKPDWPTEYRLLQPDLGKDDGARRRLAPFQLCLLCKCCSATAGYTCTSMPCCFGIDCQLPNKPFGISAFDPKTCNCNSSLANAY

SEQ ID NO: 90565 - protein, 108 aa, Gossypium hirsutum
  Clone ID: LIB3120-001-Q1-K1-C10.pep
IETSVTCYARRIVLSGVSSKRSGALFSGPSTSPYFSSNSLKTSSLFEESLTVVPTSLFNVSKANHTTSLLTNCYNRYYFDEFLTKASTHKALIRFIICMGEALTTIAF

SEQ ID NO: 90566 - protein, 111 aa, Gossypium hirsutum
  unsure (1)..(111): unsure at all Xaa locations
  Clone ID: LIB3120-001-Q1-K1-C7.pep
PKNPVPKPTPCALSDKGRPLGPDQRICXYYSRYCICKFGPSCKFDHSIQATPPTVSGLDQSIPFRHSTATEQAGIARSNRADTAVQQSVSNKDSSIKGPYHLYLSHYYQGF

SEQ ID NO: 90567 - protein, 73 aa, Gossypium hirsutum
  unsure (1)..(73): unsure at all Xaa locations
  Clone ID: LIB3120-001-Q1-K1-C8.pep
VYYLLGSESLPCGQWQLKDGFVHRKYSILPTYYYXRYWTMWKLPIFRCTDSDHVLNELEECKMEYHNAYIRII

SEQ ID NO: 90568 - protein, 96 aa, Gossypium hirsutum
  unsure (1)..(96): unsure at all Xaa locations
  Clone ID: LIB3120-001-Q1-K1-D10.pep
GGLLERLALTGVDVYSLYWTXDSGMKARKRXGHYIAEQGIVDPVVVCASKDFMTNRIHDTGTKAGKGKHILNLGDGIKVASPEQNVDHLYDVAPAV

SEQ ID NO: 90569 - protein, 139 aa, Gossypium hirsutum
  Clone ID: LIB3120-001-Q1-K1-D12.pep
PIVSATGEHTSWPSFSCSCCSCTPLAPPNEPKLSFNSKPVAKQCVFNVGVGLLAASLVACSPLDADATRIEYFATGGEPPCELNYAKTGLGYCDVIARSSVEAPPWELGNIHYTGRFACWDSPLKVAINGATTSYHANW

SEQ ID NO: 90570 - protein, 91 aa, Gossypium hirsutum
  Clone ID: LIB3120-001-Q1-K1-D2.pep
VRLGDLHPLRQYRRQREGFVAKVIKPWSRVERRLHRRILSINSRGGLKVERRLNEGKYLGFRLPLSALLKSSDVWADFPGRVGGRVGGRVG

SEQ ID NO: 90571 - protein, 109 aa, Gossypium hirsutum
  Clone ID: LIB3120-001-Q1-K1-D5.pep
ASHSSEGILAHVNLDTGITIYDAAPCLLYCMLDTLLGAIGALIDRSKIADKPSTGIEGAVIPPGKGITGALCLKDRGPLAGFTKANELLVGRMAYLGIALLLIGEIITG

SEQ ID NO: 90572 - protein, 72 aa, Gossypium hirsutum
  Clone ID: LIB3120-001-Q1-K1-D7.pep
IADLSVEHSLTSVELVIHKDHTAIAYPPREVVIWAFLSSQITVCVHLNMSGARSIRDLWYGNDNVIVRSTGS

SEQ ID NO: 90573 - protein, 143 aa, Gossypium hirsutum
  unsure (1)..(143): unsure at all Xaa locations
  Clone ID: LIB3120-001-Q1-K1-E2.pep
STDFTGVSLFKSKGSTRLITATRCCDYKQQLSLSSVKRCSRSTAATTDDATGRLVTVNYGNDSLEICRVLNGMCQTSGSRRRIYRDSCLXAMLCYADTXLCDYDMDDHYWPAXDLYGICMNRVRVERPTXYLGIVISLTKWVP

SEQ ID NO: 90574 - protein, 76 aa, Gossypium hirsutum
  Clone ID: LIB3120-001-Q1-K1-E5.pep
VIKPVGTTVFSLVTYVKLARAVISSCLGMYQSQVVSTMFVAMGLPESQVSSSVIHHEVQGITSCANCPFYQMDSAC

SEQ ID NO: 90575 - protein, 138 aa, Gossypium hirsutum
  unsure (1)..(138): unsure at all Xaa locations
  Clone ID: LIB3120-001-Q1-K1-E6.pep
HASEGSINRWSLTCYFTCTSTCSECARRPPTLRPSVMASHNSCYSTPTVIHDRPVFADPVPVLNPRGDMXNKSYDEAIEALKKLVTEKGELKADAAARVDHITTELNTTXVDGKPSDSSDERLKEGLVYFKKEKSEKN

SEQ ID NO: 90576 - protein, 56 aa, Gossypium hirsutum
  Clone ID: LIB3120-001-Q1-K1-E8.pep
PRVLPRVFSINLSKIFFGPLQIVISSYITIYTTYLLHAHIYAIRNSPQNRYSTYLI

SEQ ID NO: 90577 - protein, 125 aa, Gossypium hirsutum
  Clone ID: LIB3120-001-Q1-K1-F12.pep
FHCFSKLLTVEDDSNHFSKPETPNTMKAEAEAEERDPESNSSLSEPLLKRNRTLSSNPLALVGATVSHIESLDYEINENDLFKHDWRSRSKVQVLQYIFLKWTLAFLDGLLTGLIATLINLAIEN

SEQ ID NO: 90578 - protein, 51 aa, Gossypium hirsutum
  Clone ID: LIB3120-001-Q1-K1-F4.pep
SSQHQHLQHWYMPLTYNVSNPIFDAVSRLYLKAPSYIIKPSVRQSSVQRIV

SEQ ID NO: 90579 - protein, 98 aa, Gossypium hirsutum
  Clone ID: LIB3120-001-Q1-K1-G4.pep
MSGKGAKGLTTAGKSTKDKDKDKKKPVSRSSRAGLQFPVGRVHRLLKTRVSANGRVGATAAVYTAAILEYLTAEVLETAGNASKDLKVKRITPRHLQL

SEQ ID NO: 90580 - protein, 139 aa, Gossypium hirsutum
  Clone ID: LIB3120-001-Q1-K1-G8.pep
MAVSSSTVSAAVPPFLCSNTTKIPSFKVPHHTPLRLYNAKRTQIWVKRSCFKSTITAKVAQQSDLQYRKLGDSDLQINEITLGTMTFGEQNTEKEAHEMLSYAFEHGINALDPSEAYPIPMRKETSGRTDLYIASWLKS

SEQ ID NO: 90581 - protein, 85 aa, Gossypium hirsutum
  Clone ID: LIB3120-001-Q1-K1-G9.pep
VNFLYRVSVLLFVLQFSYTIDNCGFVRGSPIFVFHQESVQGIISGKISLPFLDSSFLYIHVCILGSKKLKIVAITTSVQIAVIHP

SEQ ID NO: 90582 - protein, 134 aa, Gossypium hirsutum
  unsure (1)..(134): unsure at all Xaa locations
  Clone ID: LIB3120-001-Q1-K1-H3.pep
LNIQNWLSWGALIFLISQGQSHSTQKHPILDDNLTIESFIHKTLQWRKNTLHQLKLQGNRLELSTXTVVAAVLSFVAASISSAGGIVGGGLFIPILTLVGSLDLTTASSFSAFMVTGGSVANLMFNLSAQSAMF

SEQ ID NO: 90583 - protein, 57 aa, Gossypium hirsutum
  Clone ID: LIB3120-001-Q1-K1-H7.pep
ILFLYLLSLIFEPFTIGWILVIEILGVIFGIVIYYHQPGSASIVIETSFSILSNEDK

SEQ ID NO: 90584 - protein, 72 aa, Gossypium hirsutum
  unsure (1)..(72): unsure at all Xaa locations
  Clone ID: LIB3120-002-Q1-K1-A8.pep
GKPGPTDAYXHSSXXLYFTFQGFLSSKKPCRNLCAGRSLFDSFXDFFSFSSSCCFIDGFDICFFGYFKETHN

SEQ ID NO: 90585 - protein, 50 aa, Gossypium hirsutum
  Clone ID: LIB3120-002-Q1-K1-B12.pep
PSSLSKSSVFIGSCGSRTESLNVSPVSRRCLASHHVMRQRYRYTETVFIE

SEQ ID NO: 90586 - protein, 82 aa, Gossypium hirsutum
  Clone ID: LIB3120-002-Q1-K1-B3.pep
YSTFCSFCFRSFLVILFIYFFICENKNKKRREKERNWSPCEPGVGDLLAVIRFGLKGGQRPFFSFSFFSRLPVSKTRPLSGV

SEQ ID NO: 90587 - protein, 120 aa, Gossypium hirsutum
  Clone ID: LIB3120-002-Q1-K1-C3.pep
PTRPRTRGGNWSVANGINEGFSDDSFRTVANEIKVQKNKRPALRCSEQRDRISSADKYSPELGSGHCCVVPQSSLRPLVGKVSQVLQQLKINLLDMDAALSEEALRPSKACMERRWALRS

SEQ ID NO: 90588 - protein, 126 aa, Gossypium hirsutum
  unsure (1)..(126): unsure at all Xaa locations
  Clone ID: LIB3120-002-Q1-K1-C7.pep
PRMSKVSRKWTWGQPSMGMQPXXFASFHXSHXTGSLPFQXHDPXXIEXXRFLXRMKLRFLCHADXSQXIAASGLTDLLXISLPLKPXXFSWANNITMIQYTFRTFXCGRTWDGRRADRARVIPRTG

SEQ ID NO: 90589 - protein, 67 aa, Gossypium hirsutum
  Clone ID: LIB3120-002-Q1-K1-C8.pep
PRVRPRVRLLGHANDFPSAIIGVLVNENTFYPVFTISCETPLTFYGLQHAHSLAPGYTEPVTVHYNP

SEQ ID NO: 90590 - protein, 41 aa, Gossypium hirsutum
  unsure (1)..(41): unsure at all Xaa locations
  Clone ID: LIB3120-002-Q1-K1-D5.pep
MSTTXLLRYHSTKSGDELTNLNDYVTRMKEASNDIYYINGE

SEQ ID NO: 90591 - protein, 36 aa, Gossypium hirsutum
  Clone ID: LIB3120-002-Q1-K1-D6.pep
KPAWSFSFITHCKTFSGVCFWLLPFWFCKIVCYINT

SEQ ID NO: 90592 - protein, 150 aa, Gossypium hirsutum
  Clone ID: LIB3120-002-Q1-K1-E12.pep
PRVRVLIVNLEVGIIQVLIVISKWQENGGFVAKGIKKFKSDGRIGDGYGSMVDFDHSFGQHVDGLGEFPLKTLCDRSFLNVGFKSKNYGCPNLNYDYDNDSKEYSIDEEMGFRARDSRAWDSVPQGIHQKKRGRVDMNFEPGGDCRGLNG

SEQ ID NO: 90593 - protein, 148 aa, Gossypium hirsutum
  Clone ID: LIB3120-002-Q1-K1-E7.pep
GDDIHFWIGKDTSQDEAGTAAVKAVELDAVLGGRAVQHRELQGHESDKFLSYFKPCIIPLEGGVASGFKTAEEEEFETRLYVCRGKRVVRLKQVPFARSSLNHDDVFILDTQNKIYQFNGANSNIQERAKALEVIQFLKEKYHEGTCN

SEQ ID NO: 90594 - protein, 145 aa, Gossypium hirsutum
  Clone ID: LIB3120-002-Q1-K1-E8.pep
GLVVFNLITDVDFRQLVNQLPRGASFTILSDSCHSGGLIDKEKEQIGPSTYRAASSLSYKAKNIPFESILEHLTTLTGINTSDIGTHLLESFGANASLKFLTPQLESELFDFLKADEGILLSGCQADETSADMNPMESGGKAYGA

SEQ ID NO: 90595 - protein, 46 aa, Gossypium hirsutum
  Clone ID: LIB3120-002-Q1-K1-E9.pep
SFTSTSRTPPSFMTSFASFHSYQLNPDMQQSIKYYFFVANAKFILD

SEQ ID NO: 90596 - protein, 88 aa, Gossypium hirsutum
  unsure (1)..(88): unsure at all Xaa locations
  Clone ID: LIB3120-002-Q1-K1-F5.pep
MVLVKRGILVAMVCGVLVFGCKRVFTVDGVANAGYGVIGXCILLLRNAWPKASMILKVFKEQGLVLTALLGLPAFFSMVETTITTLWP

SEQ ID NO: 90597 - protein, 99 aa, Gossypium hirsutum
  unsure (1)..(99): unsure at all Xaa locations
  Clone ID: LIB3120-002-Q1-K1-G10.pep
HASGESGLKPTTSTYNTLIEGDGIAGKPEESVKLVDLMLQEGNVKPNLRTYNVLVRAWCKKNNMTEAWNAVNKKNGXGMQPDAVTYNTIATAYSQNQET

SEQ ID NO: 90598 - protein, 149 aa, Gossypium hirsutum
  Clone ID: LIB3120-002-Q1-K1-H7.pep
FSGTGVPVKESTKCGGSSQPYDLCRYFSLSEIKQATNNFDNVFIIGVGGFGNVYKGFIDGGETQVAIKRLNHESQQGAHEFRTEIEMLSQLRHLHLVSLIGYCNDDGEMILVYDYMANGTLRDHLYNPNNPALPWKQRIEICVGADQGL

SEQ ID NO: 90599 - protein, 137 aa, Gossypium hirsutum
  unsure (1)..(137): unsure at all Xaa locations
  Clone ID: LIB3120-003-Q1-K1-A10.pep
RTRGRTRGLDRKHILHLRIDDQVKREIGTLKLLKHPNVVRLHEVSASKTKIYMVLEYVNGGELFERVESKGRLLECEGRKFFQQLIDAISYCHEKGVYHRDLKPENVLIDANGNLKIXDFGLSALPSHFGNDGLLHT

SEQ ID NO: 90600 - protein, 89 aa, Gossypium hirsutum
  Clone ID: LIB3120-003-Q1-K1-A12.pep
HASADAWDPHHHHSNHAMSGRGKGGKGLGKGGAKRHRMVLRDNIHGITKPAIRRLARRGGVNRISGLIYEETRGVLKIFLENVIRDAVT

SEQ ID NO: 90601 - protein, 141 aa, Gossypium hirsutum
  unsure (1)..(141): unsure at all Xaa locations
  Clone ID: LIB3120-003-Q1-K1-A3.pep
QSNLGFLNHVNRSLPCPNLRLQHRARKGKNHRWKPHFCSSRTHVPGSEGLRISKVKVTVVSTMAATSSAGEIAMSSEENVYNVVLKQASLVNKRLTSPRVDDVVPGDLSLINEAYDRCSEIXAASAKTFYLGTLLTTPERR

SEQ ID NO: 90602 - protein, 130 aa, Gossypium hirsutum
  Clone ID: LIB3120-003-Q1-K1-A7.pep
QSFACFLTPGMNIRLIGEANDYVGKGMAGGELVVTPVENPGFCPEDATIVRNTCLYGATGGQIFVRGMAGQRFAARNSLAQAVVEGTDDHCCEYMTDGCVVVLVKVAINVAAGMTVGLAYMLDEDDTLMP

SEQ ID NO: 90603 - protein, 91 aa, Gossypium hirsutum
  Clone ID: LIB3120-003-Q1-K1-A9.pep
SPCSMQPINSGLRTLTHCTYGGSIPIDTWPGASNGADSGDGGGSGGGSDLGGVEEGGRKNASAGGVCESTVASRCPMTSASDRLYTRGTGP

SEQ ID NO: 90604 - protein, 157 aa, Gossypium hirsutum
  Clone ID: LIB3120-003-Q1-K1-B10.pep
LAEEKRKVALEAEKMASKEAAEKEAARIREAANAAAEVAFKEAQQKKTAGREMLSQKMGTSSAKDGQLQGIHVMATDAALKAETSRLKTYDEVATMYHSVAKDLSRHARKIQTLVAQISGSLENVRAKATALMNIFKNPECPQPISILIFAKKVVCL

SEQ ID NO: 90605 - protein, 46 aa, Gossypium hirsutum
  Clone ID: LIB3120-003-Q1-K1-B11.pep
LKTWIYKDSYSQLMIDIELALSQEIIRLTISNWKAQTESLKRFSQH

SEQ ID NO: 90606 - protein, 82 aa, Gossypium hirsutum
  Clone ID: LIB3120-003-Q1-K1-B12.pep
IKLRPVCVEKKKKKKKKKKKKKKKKKKKKKKKKKKKKKKKKKKKKKKKKKKKKKKKKKKKKKKKKKKIGGGLIYKQNYITGY

SEQ ID NO: 90607 - protein, 49 aa, Gossypium hirsutum
  Clone ID: LIB3120-003-Q1-K1-B3.pep
KRTPLILAMGAREHVARQSATKLTARQPIGTAVNTQDDRKDYTEPPAGT

SEQ ID NO: 90608 - protein, 30 aa, Gossypium hirsutum
  Clone ID: LIB3120-003-Q1-K1-B7.pep
CVAPNALLIVSSLSTSSHRLSTLAYTLSWK

SEQ ID NO: 90609 - protein, 92 aa, Gossypium hirsutum
  Clone ID: LIB3120-003-Q1-K1-C11.pep
ILGDRSERRGSSNPTAAPIAEHVEEPEVVVQDRESLLGKISEKIHGHDSSSSSSSDSEDEKKPEVSAAAGIKSKIFRIFGREKAIHHVLGGG

SEQ ID NO: 90610 - protein, 128 aa, Gossypium hirsutum
  unsure (1)..(128): unsure at all Xaa locations
  Clone ID: LIB3120-003-Q1-K1-C12.pep
IKEKGVGGFIKEFKDEGYTKCFFDGNLLQTKLHNVSATVVGVDKYGNKYYEKLKDTQYGRHRWVEYADKGRYNASQVPPEWHGWLHFITDHTGDELLMLRPKRYGLEHKXNFSGEGDAYIYHSKGHTL

SEQ ID NO: 90611 - protein, 61 aa, Gossypium hirsutum
  Clone ID: LIB3120-003-Q1-K1-C2.pep
CTSAISRCQCKRQKTLVVMCQTLYGDAQVTCFPSPFSQFLNEQMANGMRSSKSNMDVYTVL

SEQ ID NO: 90612 - protein, 129 aa, Gossypium hirsutum
  unsure (1)..(129): unsure at all Xaa locations
  Clone ID: LIB3120-003-Q1-K1-C5.pep
DTLLALACSMISSGTIATGCSAHALMVAPFTGLTSASALPVTNTANNDITVLACXAGRVQCMQVWPPTGKKKLETLSYLPDLTPVQLAKEVDYLVCSKXVPCLEFELXEGFVHTIYSSLPTYYDGRYWT

SEQ ID NO: 90613 - protein, 78 aa, Gossypium hirsutum
  Clone ID: LIB3120-003-Q1-K1-D1.pep
STTASWLFGSSATYGHPLTLGLQHDSAFPCHYEGADILTLSCITSNGSAVAIAIAVCALLLERLRTRLYHTWLILHAC

SEQ ID NO: 90614 - protein, 63 aa, Gossypium hirsutum
  Clone ID: LIB3120-003-Q1-K1-D11.pep
APRKHLLGFESVYLEGKGERDMVFRVDVCNDLSVVDEVGERKLGLGEHVLHVGSLMHSLTIRV

SEQ ID NO: 90615 - protein, 141 aa, Gossypium hirsutum
  Clone ID: LIB3120-003-Q1-K1-D3.pep
DGEDENPPLIDSENNSKPRRIALFVEPSPFSYVSGYKNRFQNFIKYLREMGDEVMVVTTHEGVPTEFYGAKLIGSRSFPCPWYQKVPLSLALSPRIISEVARFKPDIIHASSPGIMVFGALIIAKLLCVPIVMSYHTHVSV

SEQ ID NO: 90616 - protein, 46 aa, Gossypium hirsutum
  Clone ID: LIB3120-003-Q1-K1-E10.pep
KVLGVILSQAEFNKVNKIWQAVLLVPPFRSRACDVIPLLLLHQHAI

SEQ ID NO: 90617 - protein, 160 aa, Gossypium hirsutum
  Clone ID: LIB3120-003-Q1-K1-E11.pep
ENAVLLWTLDPAERDAQLASEAAKKSNHLALIEIGCGRSAAELLAARAEYHQRFKRSLEEDVAAHTKGDFRKLLVPLVTVYRYEGEEINTTLAKSEAKLLHEKISKKAYNDEELIRILTTRSKAQLRATFNDYNNAFGNTISKDLHADPNDEFLSALRAV

SEQ ID NO: 90618 - protein, 91 aa, Gossypium hirsutum
  Clone ID: LIB3120-003-Q1-K1-E12.pep
SRSTAINADHQKKSTNHPNQLGEQQHPEKAPPELIVLFSYSLSPQYRTSSVPLRSEIWNPHLSPAFCFHPIFLFCFSLYCWDQGPQQHCVL

SEQ ID NO: 90619 - protein, 132 aa, Gossypium hirsutum
  Clone ID: LIB3120-003-Q1-K1-E2.pep
MYGGDEVSAIVIDLGSHTCKAGYAGEDAPKAVFPSVVGCIDQMDADDDKENNDSETNNNNVDSNKPKGKRRLYVGSQALGFRRDHMEVVSPLKDGVVVDWDIVDSIWDHALKDCLLVDPKEHPMLLAEPSSN

SEQ ID NO: 90620 - protein, 76 aa, Gossypium hirsutum
  Clone ID: LIB3120-003-Q1-K1-F10.pep
GGERGGGAGSPRHQRTGDKAPLQPGRRAGCGGRSWHGAADWGWIWWRQAAGDERFVPEGHVLELLGAKLINMIELS

SEQ ID NO: 90621 - protein, 109 aa, Gossypium hirsutum
  unsure (1)..(109): unsure at all Xaa locations
  Clone ID: LIB3120-003-Q1-K1-F11.pep
VPAVNIFESRLRRGKFDEPRVWPIGSRMEITKXYPLSAKSDXPDDVPGDVKAFKRFTSCSCRTVKDVAETVXNDFGSIDILLHCVAYGPDVTKXLVGTSIIGFLAALNA

SEQ ID NO: 90622 - protein, 108 aa, Gossypium hirsutum
  unsure (1)..(108): unsure at all Xaa locations
  Clone ID: LIB3120-003-Q1-K1-F12.pep
VPAWNIFESSLRRGTFDQPRSGPNGSLLEITHGHPLYAGTDSPDDTPGDVXSYKCYTGAPYRTVIEAAKPVXNDFARIDIVVHSVGSXPYTTKPTVETSKIGHLAAIF

SEQ ID NO: 90623 - protein, 42 aa, Gossypium hirsutum
  Clone ID: LIB3120-003-Q1-K1-F2.pep
VSSTETLDTKRPFLVSCDYCINVHQCSLLCYMLLFKDLMDIT

SEQ ID NO: 90624 - protein, 52 aa, Gossypium hirsutum
  Clone ID: LIB3120-003-Q1-K1-F3.pep
RTPALSDEMQKTYMIVRENHDASVKPYSYGCIASCFVVYQRSLVYDVSLRRP

SEQ ID NO: 90625 - protein, 149 aa, Gossypium hirsutum
  unsure (1)..(149): unsure at all Xaa locations
  Clone ID: LIB3120-003-Q1-K1-F6.pep
PTRPPTRPVSSISKSFPLPRSLPFNPLTTQSSSTLKKVNFSSLPSITSILTKEDIVKEEEQYPQKSSFDFNSYMLQKASSVNQALESAVSLRDPVKIHEAMRYSLLAGGKRVRPVLCLAACALVGGRESMAMPAACAXEMIHTMSLIHD

SEQ ID NO: 90626 - protein, 159 aa, Gossypium hirsutum
  Clone ID: LIB3120-003-Q1-K1-F9.pep
RPVISKVTGGNPGGRSTAQSPHSERDPNPINKLPPPPLRQEHSVRTATPSSEDPPHQRAASGYHQGETSRAPHHRSHQEDALRPDETSRHLSPQAKVAILDNQIQYIHYMAVINQQLVAMGRPAMPLDPLLITHVRNEPGQLAPRTPAIPPPARSHQER

SEQ ID NO: 90627 - protein, 136 aa, Gossypium hirsutum
  Clone ID: LIB3120-003-Q1-K1-G10.pep
GDIDPYVLIEYRAQERKSSVIRAGGGSNPVWNETFKFLVNYSGGNDSQQKLVLRIMDRDTFTADDFIGQASINVADLISLGSENGKVIDLHTKKYSVVLANRTYCGEIRVGVKFIPKVEENETGEELGGWKHSFHH

SEQ ID NO: 90628 - protein, 129 aa, Gossypium hirsutum
  Clone ID: LIB3120-003-Q1-K1-H9.pep
IPVPVDLSRQSWPDQVRQCCGSTLMYLRTGTCSGIKVGRATQARDEIVDNVLAAVEGVVGNVPRKWANVRSFHIKAAESLALPIYQALPEQGLKIEGVQKKGETGGGSKKRKSKAYKSEDMGVKGTKRF

SEQ ID NO: 90629 - protein, 111 aa, Gossypium hirsutum
  unsure (1)..(111): unsure at all Xaa locations
  Clone ID: LIB3120-004-Q1-K1-A3.pep
HFWPIHNENKCKHLMPACEWGRLDAQQGEAIWKAGSKFIVEALTMQNVNDYMFHLLNKYSKPXMYKPTIPPNVTKLCFETTEHGLLKECMQNMVKCPSDKLPCTLPSPFKP

SEQ ID NO: 90630 - protein, 51 aa, Gossypium hirsutum
  Clone ID: LIB3120-004-Q1-K1-A5.pep
RAFNVAFEIINCIPYNRQTRCVPVTIVCHIASSRVDVLCLATFEAFSASAV

SEQ ID NO: 90631 - protein, 50 aa, Gossypium hirsutum
  Clone ID: LIB3120-004-Q1-K1-A7.pep
PSGFFLVSLYKSLFSSSISRLSSPISFFFSTLFQCLFLSFQGDISYFLKK

SEQ ID NO: 90632 - protein, 94 aa, Gossypium hirsutum
  Clone ID: LIB3120-004-Q1-K1-B5.pep
LEICIYLNDKYEIDGRDPNGHVGCMWARCGVHDQGWRERPVFGKIRYMNYAGCKRKFNVDGYTAYVKRLVGEIKKRKAESPVGQKIKQPRNEQH

SEQ ID NO: 90633 - protein, 64 aa, Gossypium hirsutum
  unsure (1)..(64): unsure at all Xaa locations
  Clone ID: LIB3120-004-Q1-K1-B6.pep
LEICIYLNDLDXNERRHHNGGPDHMRGGFGLHAHGCEQRPXIGKIRYMNYAGSRRKINVDGFTR

SEQ ID NO: 90634 - protein, 72 aa, Gossypium hirsutum
  Clone ID: LIB3120-004-Q1-K1-B7.pep
FQALVSSMKVCSRLHSFLSASSIVHVSDFHKSWSVWRSPFVCSVCSAQFIPAPSLMRPVHLVRVNSIYGCCE

SEQ ID NO: 90635 - protein, 59 aa, Gossypium hirsutum
  Clone ID: LIB3120-004-Q1-K1-C1.pep
TACINPVLTLCKAEDVACYTYARVDLRAGADGVLKLLTYSGIHGLAYIEFGGTITDHDC

SEQ ID NO: 90636 - protein, 54 aa, Gossypium hirsutum
  Clone ID: LIB3120-004-Q1-K1-C7.pep
LFHMSTHYSCMFPEWIRTKVEIINNELPNPFLVWVPTRSSKARSPFQSPTHLEG

SEQ ID NO: 90637 - protein, 46 aa, Gossypium hirsutum
  Clone ID: LIB3120-004-Q1-K1-D4.pep
GGHTSSSSSVSIFALFKSVTSYVMQSCVTLHFQLRRPENFQVQSMA

SEQ ID NO: 90638 - protein, 118 aa, Gossypium hirsutum
  unsure (1)..(118): unsure at all Xaa locations
  Clone ID: LIB3120-004-Q1-K1-E2.pep
VGLAEAMFLGVAVYFTLWAIHYSISYDDAELLRRQFDLANKEAMDESAEWRLRFDEEANKACKCAKELDXSKESIGKNGDCTGCDEKLMLTEKENAALLKQVETLKNELEAEKQMCHT

SEQ ID NO: 90639 - protein, 75 aa, Gossypium hirsutum
  Clone ID: LIB3120-004-Q1-K1-E5.pep
VQCYALAWRPTDQVYGRAARVVRPLAVVATISTSSVPVRASSGRGSQLGVPVVPELCPPFVGDVATLQRLHAKRE

SEQ ID NO: 90640 - protein, 112 aa, Gossypium hirsutum
  Clone ID: LIB3120-004-Q1-K1-E6.pep
MHNRVSYESSNVCQKGRTRYALRSSRATHVNVKHIQLSSMSIHELGEYQSKTMPFSSECVCASLRVVMHQYSPHSVTLRESSGLPPTPRSVYRACPLFVGTSDGTRHAAHDA

SEQ ID NO: 90641 - protein, 81 aa, Gossypium hirsutum
  unsure (1)..(81): unsure at all Xaa locations
  Clone ID: LIB3120-004-Q1-K1-F2.pep
LNMVPKDAINAGDNAPAVETSKIVEKQFTFLSAWGTXGLPFRSLSHHAGYYKLTHAVSARMFYLFFEXRNSKKDPVVISVT

SEQ ID NO: 90642 - protein, 145 aa, Gossypium hirsutum
  Clone ID: LIB3120-004-Q1-K1-F3.pep
ALSVTVPTLALFSFPRALNRHLYYNNCSLIARCIRSRLFPQGRGDTLLASRSYSSTLKSLCAAPVPQRLHRRLECVASSAAYFGAAGGGGVYGGGDGSGSGSGGGSGDCGEGTGDGDLKAKLGAGAVDEPSAVSPDIIILDVGGM

SEQ ID NO: 90643 - protein, 78 aa, Gossypium hirsutum
  unsure (1)..(78): unsure at all Xaa locations
  Clone ID: LIB3120-004-Q1-K1-F5.pep
RIWIGEVVVYGVGRKLVNSRXGPPSCEPPKMTIEKLLEYVYMLVAEPQHVHMVXLAVKYLMQAALVLANAYAIQTDAF

SEQ ID NO: 90644 - protein, 98 aa, Gossypium hirsutum
  Clone ID: LIB3120-004-Q1-K1-F6.pep
PSSKLSTGVNLWNCVDICVSERYLATICSIGELDRGLFHVNVHHPNVCGGYRDQVSLIDRCLSNGIIDRKCVSVNDYPAQLPLAVIAPLVCSAVTVNV

SEQ ID NO: 90645 - protein, 81 aa, Gossypium hirsutum
  Clone ID: LIB3120-004-Q1-K1-F7.pep
LIYVTPIGISPQYVQFSSLSLVVFYVSVHYPSVCVSYREQVIHIDRFLSNAINDRKCVTAHHSQPHVSLNDISPLVCSPVS

SEQ ID NO: 90646 - protein, 64 aa, Gossypium hirsutum
  Clone ID: LIB3120-004-Q1-K1-G2.pep
LSDLSLTSHGLNFYGLLQHQKLQEKGTLLNLSSARNPTIATLFKRANLMPLWLAYSSVSKPYTH

SEQ ID NO: 90647 - protein, 57 aa, Gossypium hirsutum
  Clone ID: LIB3120-004-Q1-K1-G7.pep
LVMSDIVIYRLWHIFLLITITPILNMVVMTCILVTLMYWPYVYSHKYFFNLIISLSL

SEQ ID NO: 90648 - protein, 55 aa, Gossypium hirsutum
  Clone ID: LIB3120-004-Q1-K1-G8.pep
GGEREREKERDYKSKKLYINICLGELQSCSWETYMRRIYIIGAGILRRIIVQTPL

SEQ ID NO: 90649 - protein, 132 aa, Gossypium hirsutum
  Clone ID: LIB3120-004-Q1-K1-H2.pep
MERGFEYVIVGGGVAGGYAALEFTKRGVSHAQLCIISEEPVAPYERPTLSKKFLHPESPARLPSFHTCVGANEELLTPTWYEEHGIELVLGTRVESVDVGQKTLLTASGETMRYETLIIATGAKALKLEEFE

SEQ ID NO: 90650 - protein, 47 aa, Gossypium hirsutum
  Clone ID: LIB3120-004-Q1-K1-H3.pep
DLTLIKKFLHLEFLVRLSSFYTFVGANEELLTLIWYEEHGIYLVLGT

SEQ ID NO: 90651 - protein, 48 aa, Gossypium hirsutum
  Clone ID: LIB3120-004-Q1-K1-H5.pep
FASFHDKQGTIVDICGVRQSLRRPDHVSMFHLFDSTDHLYHRMHVSDM

SEQ ID NO: 90652 - protein, 59 aa, Gossypium hirsutum
  Clone ID: LIB3120-004-Q1-K1-H6.pep
LVIPLAPIRSRPFTQASSMRICVGFANSSCIQPPSVCCICLTVPIPYFTACPCLRCRMH

SEQ ID NO: 90653 - protein, 68 aa, Gossypium hirsutum
  Clone ID: LIB3120-005-Q1-K1-A1.pep
LTPRKSSPKDAAPIFLPTLNFPPTTRSIINLLDYSENINKKAEIIFLESFITKSARNERNKKRKLLGQ

SEQ ID NO: 90654 - protein, 107 aa, Gossypium hirsutum
  unsure (1)..(107): unsure at all Xaa locations
  Clone ID: LIB3120-005-Q1-K1-A10.pep
FTGLRPNAATAPARSLPTVQPVKGTGKAALHARXDSIESTTETTTATTTTLMLFAVTPGLATSANRKATAGLKLVGRDSGLHTGDTVGFTLADTLACHIVGHIIGVG

SEQ ID NO: 90655 - protein, 142 aa, Gossypium hirsutum
  Clone ID: LIB3120-005-Q1-K1-B12.pep
PRVRPVTRTGLSGIRILEDEDAAPSRRPLKRMSSPERWEAKQLIASGVLRLDEYPMYDEDGDGMLYQEEGAEEELEIEMNEDEPAFLQGQTRYSVDMSPVKIFKNPEGSLSRAAALQSALIKERREVREHQQRTMLDSNPKD

SEQ ID NO: 90656 - protein, 106 aa, Gossypium hirsutum
  Clone ID: LIB3120-005-Q1-K1-C3.pep
LQEQPLIPGLPDHVAELCLSRVHPSLLYSVCRSWRRLIYCPFFPPFPSLYALFFSSSDNEIQLLSFDPMSSRWETVPSPPNPLRLLVHHPSFLCRNLPVQYTFCIG

SEQ ID NO: 90657 - protein, 148 aa, Gossypium hirsutum
  Clone ID: LIB3120-005-Q1-K1-D11.pep
ISLHGYQKFDYVEGFVIVDEVLINNWRSSFFSPRNPVKISSLGSNNNGGVLYCLEITKNYHESTAETIDQEIEALLKKLNFIPTSVFTTDLPYVDFLDRVHKAELKLRSKGMWEVPHPWLNLFVPKSKIADFDRGVFKGILGNKTSGP

SEQ ID NO: 90658 - protein, 88 aa, Gossypium hirsutum
  unsure (1)..(88): unsure at all Xaa locations
  Clone ID: LIB3120-005-Q1-K1-D12.pep
ISQRLTNLLLNVNIXSSLAPVHVIMPSDNTVNDLIKAAIEIYVKENRMPLLEETDPKFFQIHYSQICLESLRTGEELINLGSRNFLLG

SEQ ID NO: 90659 - protein, 101 aa, Gossypium hirsutum
  unsure (1)..(101): unsure at all Xaa locations
  Clone ID: LIB3120-005-Q1-K1-E10.pep
QAIIIAAEDTTSVTLTWALSXLLNNRDTLCKVQQELDVKVGKDRLVVTESDTKSLVYLQSIINETLRLYSAFSLSLIHEAIEDCTDNGYHVSTCTWLIIKL

SEQ ID NO: 90660 - protein, 97 aa, Gossypium hirsutum
  Clone ID: LIB3120-005-Q1-K1-E9.pep
ELLDEAREATKSGGRMSREQYGALRRKIGGTYKDFFKSYVEVNGEYVEEGWVDKTCKVCKKDTRGEARQVDNFGRYVHVACLEKSNSGNFFTKLFSR

SEQ ID NO: 90661 - protein, 115 aa, Gossypium hirsutum
  unsure (1)..(115): unsure at all Xaa locations
  Clone ID: LIB3120-005-Q1-K1-G2.pep
PRVRSNVGSRIRPRFRVEWLTGVTWHDAGKVELVEGSSDLGXQPLSFSMASLIGIEILVIGFIEFQXRNAHLDPDKRLYPGRKFFDPLDLADDPEKDSTLSXADINHAHPTMGAF

SEQ ID NO: 90662 - protein, 59 aa, Gossypium hirsutum
  Clone ID: LIB3120-005-Q1-K1-G9.pep
IPTAHSYFQHPKYHNSKRAGDNREVEHGSSAKLQGQKLIIQATTHEKLCPNYVGGRPFR

SEQ ID NO: 90663 - protein, 106 aa, Gossypium hirsutum
  unsure (1)..(106): unsure at all Xaa locations
  Clone ID: LIB3120-006-Q1-K1-A1.pep
TXXXSTLYLSMPPNGFCHHFHRFLPSKDRRLHHLFLGLAVFCIRNPPCLHLTAPQRLVFHPQPTLLLRCLRGHSTLPACLLQRYIFQRKRVKRGCFNGQKERWGLD

SEQ ID NO: 90664 - protein, 46 aa, Gossypium hirsutum
  unsure (1)..(46): unsure at all Xaa locations
  Clone ID: LIB3120-006-Q1-K1-A4.pep
KSSALYDKDXPLDEWMNVASMIPGKTHGDVIKQYREFGEDASDIYA

SEQ ID NO: 90665 - protein, 74 aa, Gossypium hirsutum
  Clone ID: LIB3120-006-Q1-K1-A6.pep
GQGTLGIQVNVNSLGKRFARLSIHATITICYTTSFNMRSKFINNFTSPSFLPSMQYAIKRDVRYSLPKQRLCCS

SEQ ID NO: 90666 - protein, 56 aa, Gossypium hirsutum
  Clone ID: LIB3120-006-Q1-K1-B12.pep
IVTMSVSLQAAATWMQPIKGAAPLRTNVLLRSFQSVFMAFCLEPVGARLTGCYYQF

SEQ ID NO: 90667 - protein, 103 aa, Gossypium hirsutum
  Clone ID: LIB3120-006-Q1-K1-B4.pep
EISSLDERFVFGAGLDLDLLGIEVDDNTLIPGLAVASSRAKPLAAWMNGLEVCSVEADTSRGCLILSVGISTRYVYATYKKTPTTTSEAEAWEAAKKACGGLH

SEQ ID NO: 90668 - protein, 33 aa, Gossypium hirsutum
  Clone ID: LIB3120-006-Q1-K1-B5.pep
NIPNIIQKIIPTSLNHTPTNNHKISLLSKVQSP

SEQ ID NO: 90669 - protein, 51 aa, Gossypium hirsutum
  Clone ID: LIB3120-006-Q1-K1-B9.pep
AYLCLSFFDAPPTLQCGMGLLFLSSSITPFFPSLHLKPKHNLFFTLPKLLF

SEQ ID NO: 90670 - protein, 51 aa, Gossypium hirsutum
  Clone ID: LIB3120-006-Q1-K1-C11.pep
MFADLLSERPLFGGSILTTFPFRFHDVSNIRLVSDHHEVFVDPARDESLIF

SEQ ID NO: 90671 - protein, 113 aa, Gossypium hirsutum
  Clone ID: LIB3120-006-Q1-K1-C12.pep
SPTRSDDLKSGQTKMKSVLVDCLVGAGIKPTSIVSYNHLGNNDGMNLSAPQTFRSKEISKSNVVDDMVSSNGILYEPGEHTDHVGVIKDVPYVGDSKKTMDEYTSKIFIGGKN

SEQ ID NO: 90672 - protein, 81 aa, Gossypium hirsutum
  unsure (1)..(81): unsure at all Xaa locations
  Clone ID: LIB3120-006-Q1-K1-C2.pep
VQTPYNSSTHTTAGFFYKTMAGPPKTRAAAVAPADEXLAKWYGPDRRSLLPERLLDRSERPHYYXGDFTGHYRYYADELSK

SEQ ID NO: 90673 - protein, 61 aa, Gossypium hirsutum
  Clone ID: LIB3120-006-Q1-K1-C7.pep
HACHNTSDHAFAHAYEETDWSFDSCASKSLNSPVWVRAVAEMDSVDFLLIMRIHMVQSLRY

SEQ ID NO: 90674 - protein, 61 aa, Gossypium hirsutum
  Clone ID: LIB3120-006-Q1-K1-C8.pep
AFVHAFDHTFAHSFVHSYEETEVFLHSVGKSLNFPFLSIVVGMNGQVHYHLIIGVQVLQSL

SEQ ID NO: 90675 - protein, 63 aa, Gossypium hirsutum
  unsure (1)..(63): unsure at all Xaa locations
  Clone ID: LIB3120-006-Q1-K1-D3.pep
EHSQRKLFGPHMPEHAILGGGKVADXLLSRNPKVSTALITAVTTIWILFEVVEYNYHTLLCYI

SEQ ID NO: 90676 - protein, 60 aa, Gossypium hirsutum
  Clone ID: LIB3120-006-Q1-K1-D4.pep
MSADLLSERPLFGGAISTTFPLRFQDVSNIRQVPDHQEVFVDPARDESLIFEVLYFKHDV

SEQ ID NO: 90677 - protein, 96 aa, Gossypium hirsutum
  unsure (1)..(96): unsure at all Xaa locations
  Clone ID: LIB3120-006-Q1-K1-D6.pep
KEPTFVEXFCLATPGLEHGRMHTASQPSKRMPSGGIXSLLAIPRIFACAQTRFHLPVWVLFGTAFKHVIQKDIKNLPMLQEMINERAFFKMTIDFG

SEQ ID NO: 90678 - protein, 60 aa, Gossypium hirsutum
  Clone ID: LIB3120-006-Q1-K1-D7.pep
ATRLSMTVTFESIKADQACASVPLFYPMLCCLRAMVHLADSSSLRGLPSVFLRQYIKLNR

SEQ ID NO: 90679 - protein, 120 aa, Gossypium hirsutum
  Clone ID: LIB3120-006-Q1-K1-E4.pep
MARHSDCFIALPGGYGTLEELLEVITWAQLGIHDKPVGLLNVDGYYNYLLTFIDKAVDDGFIKPSQRHIIVSAPNAKELVQKLEEYVPVHDGIIAKASWEVEQQQQQVPQQVGFNATTFQ

SEQ ID NO: 90680 - protein, 42 aa, Gossypium hirsutum
  Clone ID: LIB3120-006-Q1-K1-E5.pep
NILLPIRNLIFIVGLGDVCDKTSLLAEYNYLCNESLVYFPTA

SEQ ID NO: 90681 - protein, 40 aa, Gossypium hirsutum
  Clone ID: LIB3120-006-Q1-K1-E6.pep
QTNFVIYEVKVSKAVNSHTSIENPCFLIWEEVVITHSQLR

SEQ ID NO: 90682 - protein, 120 aa, Gossypium hirsutum
  Clone ID: LIB3120-006-Q1-K1-F11.pep
LEQLIVFTLFLSSPPNGFCQHLHHFFPRLKPPPSPPLTSPPALMHTSYAFSFTRRHLKSFSLIHSLGFFSAASGDSLLSLHCLLQRSIFSREKGQEWVALMAKKSVGDLTCRLFQREESV

SEQ ID NO: 90683 - protein, 117 aa, Gossypium hirsutum
  Clone ID: LIB3120-006-Q1-K1-F3.pep
MKMAHLASLNGITETLPAIPKLPTIRRTRKTSKIIGFLGKNTSNFHGQPPLQTTRRMALAFASIALIGTSTNGISLAEDNGYWITDLLPRPSVENKITNADTGTRSFVKKGLYVANL

SEQ ID NO: 90684 - protein, 119 aa, Gossypium hirsutum
  Clone ID: LIB3120-006-Q1-K1-F5.pep
MTVLSSDQFPSCHVFKSCLPFLFVALLFQFQTGFSALIMSLKNHPGHPQHRRPMFQTNQSTCALFVGTWVRDDSYPLYQYFNCPIIDAEFNCQLYGRPDSDYLKYRWKPLNCVLSRFDG

SEQ ID NO: 90685 - protein, 68 aa, Gossypium hirsutum
  Clone ID: LIB3120-006-Q1-K1-F7.pep
FIFFFRRIIRQIKSPNFKSICNMCRPPTQNPNDPNNRTQTSPSLNPFQTHNPRNRKAHKAHSKANSST

SEQ ID NO: 90686 - protein, 37 aa, Gossypium hirsutum
  Clone ID: LIB3120-006-Q1-K1-F8.pep
ATTGKKKFETLSYLPELTPRHVAKEVDYLLRSKWVPC

SEQ ID NO: 90687 - protein, 36 aa, Gossypium hirsutum
  Clone ID: LIB3120-006-Q1-K1-F9.pep
EQMLESGGAKVCFILQTIMGSPQVEGGLMRLCQVYN

SEQ ID NO: 90688 - protein, 78 aa, Gossypium hirsutum
  Clone ID: LIB3120-006-Q1-K1-H3.pep
SAYWRLHAKGYPGLASVLFVRYLSYYKWQNTLIECTEMRRSYMATTELVYHQEHYIGGRNSHRKHMEDRRVSMEAVSF

SEQ ID NO: 90689 - protein, 91 aa, Gossypium hirsutum
  Clone ID: LIB3120-006-Q1-K1-H6.pep
GLFYIRTREIIFWFEGDLPWIVRCTIYYESHPHSPSRMPKLFVINRRCLTACHSFDAAVVLGYVAMPAEVPQDLVTLSNIPQTSLGEGLFP

SEQ ID NO: 90690 - protein, 78 aa, Gossypium hirsutum
  unsure (1)..(78): unsure at all Xaa locations
  Clone ID: LIB3120-007-Q1-K1-A2.pep
HNITFCFLCYRSGGGHCIKLVMDGSGAFVDREGAGQHIESXPEKVLITAPGNGDIPTYVVGVNADTYDPSESIITYAY

SEQ ID NO: 90691 - protein, 120 aa, Gossypium hirsutum
  unsure (1)..(120): unsure at all Xaa locations
  Clone ID: LIB3120-007-Q1-K1-A8.pep
MVGDVGLISLSVSLLSMPCLPRIGFTKRRPFPMAALSDDPVQEWILTEGKATRITGIRPVGGGCINLANRYDTDAGSFFVKTNRSIGPPMFEAEAIGXDALFEXRTIRVPKPFKVGPLRN

SEQ ID NO: 90692 - protein, 55 aa, Gossypium hirsutum
  unsure (1)..(55): unsure at all Xaa locations
  Clone ID: LIB3120-007-Q1-K1-B1.pep
ESLATELAPRMSAXSNATDNAHELKKTLSIIYNLQRHAKITAEILEIVAGANALA

SEQ ID NO: 90693 - protein, 126 aa, Gossypium hirsutum
  Clone ID: LIB3120-007-Q1-K1-B11.pep
GGGGGEKRPNVELSYYSVLGISEQASPSEIREAYRKQALKWHADRWMKNPTVSREAKKRFQQIQEAYSVLSDKGKRKIYDAGLLGLLTDDDDESFLNFMQEMAMMMQNVNSKEGNSLEDLQGSLMD

SEQ ID NO: 90694 - protein, 45 aa, Gossypium hirsutum
  Clone ID: LIB3120-007-Q1-K1-B2.pep
RQINCLQWPPLHFSFFPITRRLGIEYRPLHPLNPVNPPFLYNQYS

SEQ ID NO: 90695 - protein, 46 aa, Gossypium hirsutum
  Clone ID: LIB3120-007-Q1-K1-B7.pep
FITNCIWTLINTLYISTLKIPSEMYVSPIIRKCFRSGANISTTHIR

SEQ ID NO: 90696 - protein, 90 aa, Gossypium hirsutum
  Clone ID: LIB3120-007-Q1-K1-C12.pep
SVLCCAHGAPSLCWSLSALFVSVAFFLCLSRVSCVVLASSAVASSLFLMLWRGVFPFSLMLAAPPPLGLFGFGGDKVCFSFRLFVRVRRP

SEQ ID NO: 90697 - protein, 142 aa, Gossypium hirsutum
  Clone ID: LIB3120-007-Q1-K1-C3.pep
DEEEAKQRQLKSILNKLTPQNFEKLFEQVKAVNIDNAVTLTGVISQIFDKALMEPTFCEMYANFCQCLAGELPDFIKNNEKITFKRLLLNKCQEEFERGEREQEEANKIEEEGEAKLSEEEREEKRIKARRRMLSNIRLIGE

SEQ ID NO: 90698 - protein, 94 aa, Gossypium hirsutum
  unsure (1)..(94): unsure at all Xaa locations
  Clone ID: LIB3120-007-Q1-K1-C7.pep
MSRRKTSEPKEENVTLGPTVRERDFVFGVAHIFASFNDTFIHVTDLSGRETLVWITGGMKVKADRDESSPYVDMLACQDVAHSCXSLGLTLLYI

SEQ ID NO: 90699 - protein, 62 aa, Gossypium hirsutum
  unsure (1)..(62): unsure at all Xaa locations
  Clone ID: LIB3120-007-Q1-K1-D2.pep
PRVRPRVRPRVRAAAKIGKILAERLLLKEIPAVSVSLKREQKYHGKVKAVMDSXRKAGVKLL

SEQ ID NO: 90700 - protein, 80 aa, Gossypium hirsutum
  unsure (1)..(80): unsure at all Xaa locations
  Clone ID: LIB3120-007-Q1-K1-D7.pep
DAWGIAAGAVXAVLCTPXELFKLRNQLISVIPXKAMGPGYVAQESYPLLSKLLPGYDPDIRVWNNTMSLLCEFSSKHAWH

SEQ ID NO: 90701 - protein, 62 aa, Gossypium hirsutum
  Clone ID: LIB3120-007-Q1-K1-D8.pep
KVHIRAKDIDLESTCTPWVGETLITVLCRAPLCLTSGLYLDKMPLPERDLWTTILWEPHLIR

SEQ ID NO: 90702 - protein, 66 aa, Gossypium hirsutum
  Clone ID: LIB3120-007-Q1-K1-F2.pep
GVVLDILVAMGFIKSHHHWLDVEHIEEALQNTLVCIEMVVFTVVQRRAYSAARYSGESEAKIKKNE

SEQ ID NO: 90703 - protein, 48 aa, Gossypium hirsutum
  Clone ID: LIB3120-007-Q1-K1-F7.pep
INPLRQVRLDVLAIISFYLSRLLGRRSPRTPWFSGRAPPLIKRILGLH

SEQ ID NO: 90704 - protein, 67 aa, Gossypium hirsutum
  unsure (1)..(67): unsure at all Xaa locations
  Clone ID: LIB3120-007-Q1-K1-H1.pep
NNAGFPHNVVFDEDEVPSGVDATKISQEXYLNAPGETYSVTLTVPGTYGFYCEPHQGAGMVGKITVN

SEQ ID NO: 90705 - protein, 59 aa, Gossypium hirsutum
  Clone ID: LIB3120-007-Q1-K1-H2.pep
REMEGYCVDEAVIALKLKDASNWWHDINEITLWQDRIFHILAALYGLVAAVALVQLIPI

SEQ ID NO: 90706 - protein, 66 aa, Gossypium hirsutum
  Clone ID: LIB3120-008-Q1-K1-A1.pep
EAPTHAKWTTTLINLSSVIVMVPTKQKNDSQKCCTSNFNSSWQEGIPPSKFIFWIGCHPVFWLLKL

SEQ ID NO: 90707 - protein, 74 aa, Gossypium hirsutum
  Clone ID: LIB3120-008-Q1-K1-A8.pep
HGSSLNAYDSECDSCSVAGCSALSHHNARSSINAHDGSYAFTPFFDKSIESESPLRCGASSMCLLVFVTFGSGW

SEQ ID NO: 90708 - protein, 119 aa, Gossypium hirsutum
  unsure (1)..(119): unsure at all Xaa locations
  Clone ID: LIB3120-008-Q1-K1-B4.pep
MSLVLEPPPPPLCKSKTGAPLKRCFTSIRTALSPPNHRFRASRFPLHPTSSSRPTVTVVLKTEKEKNAVTEQKDPPVRIVAVVGQGSVSPLKCTPWEEVMMHTAXRLKWVDEGYEMVVF

SEQ ID NO: 90709 - protein, 123 aa, Gossypium hirsutum
  unsure (1)..(123): unsure at all Xaa locations
  Clone ID: LIB3120-008-Q1-K1-C2.pep
SATIATASAAHANMDAPFTGLKSGSAFPVTRKANNDITYLASNGGRMQCMQVWPPTGKKKVETMSYLLDLTPVQMAKEVDYLLRSKWVSCLEFGLEDGFVHRXYSSLPTYYDGRYWTMWKLTM

SEQ ID NO: 90710 - protein, 127 aa, Gossypium hirsutum
  Clone ID: LIB3120-008-Q1-K1-D12.pep
AKGYVRAQEPDKAEELLTIMIESEASPNVVIFTTVISGWCSAGRMDQAIKIFYQMCEYGVSPNLKTFETLICGYREAKQPWKAEELLQVMKEFEVRPKKSTIFLIAEAWRASGLSKEATEFWVLVIA

SEQ ID NO: 90711 - protein, 102 aa, Gossypium hirsutum
  unsure (1)..(102): unsure at all Xaa locations
  Clone ID: LIB3120-008-Q1-K1-D4.pep
MAEVTKRYAVVTGANKGIGLEICKQMASKGTMVVLTARDEKRGLEAVDKLKDLGLSDNVVFHQLDVADPASVASLVDFIKTQFGKLDILVNNAXIGGVKSDL

SEQ ID NO: 90712 - protein, 101 aa, Gossypium hirsutum
  Clone ID: LIB3120-008-Q1-K1-D7.pep
VGPRVRSVLPFPFSFVTQKKRTLTLVFQRSHAHFSPIFFSSKMECQHSFFAKLEYLSPCCWGKRSTSSRSSSPDFNFWMVRNPPFPEPDLIFADELFNSQL

SEQ ID NO: 90713 - protein, 138 aa, Gossypium hirsutum
  unsure (1)..(138): unsure at all Xaa locations
  Clone ID: LIB3120-008-Q1-K1-E3.pep
NFVKDACISFARDRFDLFKLLSTDDIETVVGSGCPNVLRKSVNSAKRLRAYVHLDEXDVCGACNLRGSCDRAYVILKESEAAARTVDIXRILLSYALDPLGISEREKPTGREHIDASARNLLSDLTKLSETSCDAEIP

SEQ ID NO: 90714 - protein, 96 aa, Gossypium hirsutum
  Clone ID: LIB3120-008-Q1-K1-F5.pep
TSPGCSSSQTAGSLGTNVTTTTALTGRERESNAQDIPLFGFRKKLKSAEEETVEIVKEGLETAEKGLETADRGIFTVEKGLKTAEKKIETAEKEIE

SEQ ID NO: 90715 - protein, 144 aa, Gossypium hirsutum
  Clone ID: LIB3120-008-Q1-K1-F6.pep
GVSGTVKDQVAAKLSDLAELVSNCLSIFAASGGDDFGGVPVQNKRLLASGDDLSGENVDEDKFPKWLGRKERVLLNTPVSAIQADIIVSKNGTVKTISEAIKKAQENSTRRIIIYVRAGRYEEKDLKVGRKKINLMFIGDGKGK

SEQ ID NO: 90716 - protein, 60 aa, Gossypium hirsutum
  Clone ID: LIB3120-008-Q1-K1-G1.pep
QVSICHPSMAILARQFHYRPPPSKVCNMKIVVPQAMGCQYHTGPIVENQYVSLSQAVRVV

SEQ ID NO: 90717 - protein, 80 aa, Gossypium hirsutum
  Clone ID: LIB3120-008-Q1-K1-G7.pep
MNEEMNGVEVENHQEHAPEKIDYVFKVVVIGDSAVGKTQILSRFTKNEFCFDSKSTIGVEFQTRTVTIKSKVIKAQIWDT

SEQ ID NO: 90718 - protein, 47 aa, Gossypium hirsutum
  Clone ID: LIB3120-008-Q1-K1-G8.pep
GNTHLREKSVSDAYRQRYLTFEAQTLTMGGGDRIRCRTNIVSVCLGR

SEQ ID NO: 90719 - protein, 59 aa, Gossypium hirsutum
  Clone ID: LIB3120-008-Q1-K1-H6.pep
LLSSTHHMLWKYINVFLLLKYNSWVMLNIISRSRYFLTVLMNLIPLPLKDDMTNTGVID

SEQ ID NO: 90720 - protein, 84 aa, Gossypium hirsutum
  unsure (1)..(84): unsure at all Xaa locations
  Clone ID: LIB3120-008-Q1-K1-H8.pep
MMATAAIIGLTVGKRFLSSSFSYSDIIEKHSYAGDYGGAPHYQTAPTKSLIVAKKSSNCSQSVPSYDRRSRSIKALXEHVDAAF

SEQ ID NO: 90721 - protein, 71 aa, Gossypium hirsutum
  Clone ID: LIB3120-009-Q1-K1-A1.pep
FIRHTHTKRELFKFLTYVGRRFQMLRKSNSSLEILTFWIFDSLFCLASFSVAQRQQEQLAESDRFDDDDDG

SEQ ID NO: 90722 - protein, 49 aa, Gossypium hirsutum
  Clone ID: LIB3120-009-Q1-K1-A6.pep
LTRTVLYGISALNWRVLAWDGFSQFSHLRPGRLFTCYARSKGRGTTSMT

SEQ ID NO: 90723 - protein, 64 aa, Gossypium hirsutum
  Clone ID: LIB3120-009-Q1-K1-A7.pep
RVLSLEELNFPKICFESAPQKAVHTLASCSLLQFPRYADRRCTPHFGIAHSPRPVQWQTPSISV

SEQ ID NO: 90724 - protein, 42 aa, Gossypium hirsutum
  Clone ID: LIB3120-009-Q1-K1-A8.pep
RFKRKKMVAAINPKNGSASDMCEICKRHTLQHPLTCSTRCHP

SEQ ID NO: 90725 - protein, 134 aa, Gossypium hirsutum
  Clone ID: LIB3120-009-Q1-K1-B2.pep
LVDFACYKPEDDREMSVDSFLKMTEDSGAFTEETLQFQRRISTRSGLGDETYFPRGITSTPTNLCMEEARAEAETVMFGADDELFAKTGVDPKEIGILIANCSFGNPTPSLSSMIGNHYELRTNINSFNLGGMG

SEQ ID NO: 90726 - protein, 62 aa, Gossypium hirsutum
  Clone ID: LIB3120-009-Q1-K1-B4.pep
IGAYKTRSLLIDALMRSRGFSVEIGDTNADSQIQMVSKVLISTQIKAVSILLTNFNGAPLLT

SEQ ID NO: 90727 - protein, 94 aa, Gossypium hirsutum
  unsure (1)..(94): unsure at all Xaa locations
  Clone ID: LIB3120-009-Q1-K1-B6.pep
SATNATGNCYYMVQGNMVAPCNGLTAAFGXSVTWKANHVIDYRASNGRRVQCMQDLPTTGPKNHETLVFRTRRTPVQMNKALYYQVHSKWVPCL

SEQ ID NO: 90728 - protein, 69 aa, Gossypium hirsutum
  Clone ID: LIB3120-009-Q1-K1-B7.pep
SALDWDCIRDQNLDCKVIFCSHYQWQPLGRCLIQSLRHWYYLWINSLMLSFWMRNKTHSDHKYNVMTTF

SEQ ID NO: 90729 - protein, 59 aa, Gossypium hirsutum
  Clone ID: LIB3120-009-Q1-K1-B9.pep
RLQSCQTGLVIAVHRTDRAQAMADLDAQMPTTFDAFIKGGGSDGTGTNEDADIRVQHTD

SEQ ID NO: 90730 - protein, 72 aa, Gossypium hirsutum
  Clone ID: LIB3120-009-Q1-K1-C1.pep
SDVIVLPRAYVVEVMTVGKYARYIEPDSGYVLQLCRRDSSAKASRSSIACPCRSSHIPESLSGACIVVSVRV

SEQ ID NO: 90731 - protein, 130 aa, Gossypium hirsutum
  unsure (1)..(130): unsure at all Xaa locations
  Clone ID: LIB3120-009-Q1-K1-C11.pep
ATRTQTTKSLLPWSENLKIVGRCIDSIASKTSVDPANVTWSYTYNRKLLAPEIIVKGGMKYQEKIESVPKDWWVEDVCELEIFLYKRVMTAVKSKGRMDGAXICEALKTYADRWLPDSVDAXISDVHSWR

SEQ ID NO: 90732 - protein, 77 aa, Gossypium hirsutum
  Clone ID: LIB3120-009-Q1-K1-C4.pep
SKILCLSPARTSPYMVSDFYIDHINRNPNSIIHKCMHVSIYIQHITIRNTVPSLYDRPCGACEDLQRFEGKCRICSL

SEQ ID NO: 90733 - protein, 76 aa, Gossypium hirsutum
  Clone ID: LIB3120-009-Q1-K1-C5.pep
MAAATMALTSTSVAGKADKLCTCVPKIQCNGRVSIRETATNGSSSGSPWYRTDRILYLYTLSGETSSYLSGEFPGD

SEQ ID NO: 90734 - protein, 48 aa, Gossypium hirsutum
  Clone ID: LIB3120-009-Q1-K1-C7.pep
CLLFHMENADAGHLNQHEECLYDRHCLRRVTVTSLSHPEYRDILASKP

SEQ ID NO: 90735 - protein, 100 aa, Gossypium hirsutum
  Clone ID: LIB3120-009-Q1-K1-D12.pep
DLYMSGEIHKNSQVESVISDPFESSASSNIISSNGISTSLPDPVSSQNFASEHMLQISGKSSDTDNLPCTDLYMSDEIHKNSQVESVSNDPFESVASSNI

SEQ ID NO: 90736 - protein, 71 aa, Gossypium hirsutum
  unsure (1)..(71): unsure at all Xaa locations
  Clone ID: LIB3120-009-Q1-K1-D2.pep
HLSRPRVYIDRVKSDPVLVHXGHXYHEPVYCKFTADVYKYLPDAAEQMYASYIYCTSYISIHLHVLHKNAD

SEQ ID NO: 90737 - protein, 68 aa, Gossypium hirsutum
  Clone ID: LIB3120-009-Q1-K1-D3.pep
SGLASPVIDPLQDDCIADTMCPSYLSGAQCMNPAVTDWSYSTISDLAKAGNSKDNQCRFRAILNNLAY

SEQ ID NO: 90738 - protein, 84 aa, Gossypium hirsutum
  Clone ID: LIB3120-009-Q1-K1-D7.pep
MSSYGKGQALPKFGEWDVNDPASAEGYTGIFNIARDEKRTGGNVTVGATEGIKSQQKQGTRKEKSRHKYCIKRKWFCFCLKSGN

SEQ ID NO: 90739 - protein, 62 aa, Gossypium hirsutum
  Clone ID: LIB3120-009-Q1-K1-E2.pep
NHHDYKSEDKVMRSRVSDQVVFLVIDSLLLSLSALCTAIPAISITFTPIPSSSGRLASSCRT

SEQ ID NO: 90740 - protein, 61 aa, Gossypium hirsutum
  Clone ID: LIB3120-009-Q1-K1-E4.pep
YQWMALLRIMRSWSVHWLLLILVLCQTADLKTEFPLIPMHVFHVISLIHLSRTSKASHGPC

SEQ ID NO: 90741 - protein, 66 aa, Gossypium hirsutum
  Clone ID: LIB3120-009-Q1-K1-E5.pep
AEMALTLPNALSRIKPYAARSLRLKKVVTAKGGGYRPQVNCRKKDIHSGIHEDARGYCRGELGMTT

SEQ ID NO: 90742 - protein, 69 aa, Gossypium hirsutum
  Clone ID: LIB3120-009-Q1-K1-E7.pep
PCCCLGVGHDIRRCALHCRRNHQTTRVTPLCLPYHSHGNQHSVLSVARPLPSKPDGTPTRNAIRTGTCR

SEQ ID NO: 90743 - protein, 119 aa, Gossypium hirsutum
  Clone ID: LIB3120-009-Q1-K1-E8.pep
ACVEDTSHALGTTWPPRSYTCTFCRREFRSAQALGGHMNVHRRDRARLYQTQPLPHGGDATTVPLINHTLLYQFPSPNGLFFTSSPTNNACSIDSPYHSSMPSQNFTATPTGLNSSCSL

SEQ ID NO: 90744 - protein, 84 aa, Gossypium hirsutum
  unsure (1)..(84): unsure at all Xaa locations
  Clone ID: LIB3120-009-Q1-K1-E9.pep
MSNECHYSRSSFLLIGDSSVAKSGXLLRLAHESYADSYINTIGVDFXIRSVEFDGKTVMLQIWDTVVHERCRTITSRYYRIAHG

SEQ ID NO: 90745 - protein, 123 aa, Gossypium hirsutum
  Clone ID: LIB3120-009-Q1-K1-F10.pep
HPLLALASSMISSATIATASAAQANMAAPFTGLKSVSAFPATIKANIDITSIARNGRRAQCMQVWPATEQMNSETLSYLPDLTPVHLAKEVDYLISSEWSPRSEFELDEGFLHRKYSSLPTYY

SEQ ID NO: 90746 - protein, 73 aa, Gossypium hirsutum
  unsure (1)..(73): unsure at all Xaa locations
  Clone ID: LIB3120-009-Q1-K1-F4.pep
YHVGWQPGSHGFHESLTKAMTVWKYKRNXGLLDCTDCSICLREFLEDDSSRSLPTCNHALHVPCMDAWFRCHS

SEQ ID NO: 90747 - protein, 112 aa, Gossypium hirsutum
  Clone ID: LIB3120-009-Q1-K1-F5.pep
MEQAKPEAPNVLIVPIPAQGHLIPMSKLAELLSNASFQITFLNTGYFHNTLLSSIDIHASSRQFAKFQFVTIADGLPPDYPHDIKGIDHYVVSLTDASKPDGAEELVTRTSK

SEQ ID NO: 90748 - protein, 81 aa, Gossypium hirsutum
  Clone ID: LIB3120-009-Q1-K1-F8.pep
KSLRRGQQILWLGRIIGRGCMPLPVPFPSHTLSCSVKRCLRLWSSVRLSAWIILSSPPCSSSQCETRPSGIARVMRYPTRM

SEQ ID NO: 90749 - protein, 62 aa, Gossypium hirsutum
  Clone ID: LIB3120-009-Q1-K1-G1.pep
KTPTLLTSLSTQYATFTKVVNYIKVSFVGDLNASICKQVTNWKGILEEDRSTKLNPREPDRT

SEQ ID NO: 90750 - protein, 138 aa, Gossypium hirsutum
  Clone ID: LIB3120-009-Q1-K1-G10.pep
TQLEETWKALFSSLRYAKNFSGPVCFRHAVLSPLGYETALFKGLSEDIDCQGASAHDLWQSPDDKKTARLSEFGEMIRDAFGFPVNRHHSDKTVSGHYNILFVRREDYLAHPRHRGKVESRLSNEQEVFDSLQKWASD

SEQ ID NO: 90751 - protein, 57 aa, Gossypium hirsutum
  Clone ID: LIB3120-009-Q1-K1-G5.pep
DDDCLSKPVKHVRLLHSLLHVILNQFHTSGIQVRCANACGHPLSDLRHSLKDSFISW

SEQ ID NO: 90752 - protein, 68 aa, Gossypium hirsutum
  unsure (1)..(68): unsure at all Xaa locations
  Clone ID: LIB3120-009-Q1-K1-H11.pep
MDYFNGPGRNHLFVPDAXNIPEPAIQAMNRINEDYRTAAIPAMTKYPIEDVKKIFKTTTGTXFMIPTT

SEQ ID NO: 90753 - protein, 105 aa, Gossypium hirsutum
  Clone ID: LIB3120-009-Q1-K1-H2.pep
AHCMQVWTDTGEANIETVSYLRDLTRVQLADGVYNLVRSKWSPCLESEPVDGYTHLECFSLPTYYNGRYWTMWNLPKLRRTDTDDVLEELEECKIAYLNASIRVI

SEQ ID NO: 90754 - protein, 85 aa, Gossypium hirsutum
  unsure (1)..(85): unsure at all Xaa locations
  Clone ID: LIB3120-009-Q1-K1-H5.pep
ATRSQGRKDYVDPSTAPLIDMAXLTSWSFYRARIAEGIATVLFLCVTGAADIGHKEQPGACDGVGLLGIAWAFGCSIAFLDDCTG

SEQ ID NO: 90755 - protein, 65 aa, Gossypium hirsutum
  Clone ID: LIB3120-009-Q1-K1-H6.pep
IINVHYALSMYVAWVTPVVKTLFMVCLRHDRQLYSSQVHMPLFLPTRSAYPMPELPTWAIASAYV

SEQ ID NO: 90756 - protein, 43 aa, Gossypium hirsutum
  Clone ID: LIB3120-009-Q1-K1-H7.pep
SPLLSSLMSMLTLHPYLHVQWLLSQISGRLIEGICQGPSNASC

SEQ ID NO: 90757 - protein, 114 aa, Gossypium hirsutum
  Clone ID: LIB3120-010-Q1-K1-B1.pep
MAHILAPSTQWPMRVPKSWTFGSPIATKMWRSLILKQTMKGAAKSAGKFRVLALHSENSTVNMTDMLLNMDITPYTDKIIAEYISIGGTGIDMRSMSRTISKPVEHPYELSKWN

SEQ ID NO: 90758 - protein, 60 aa, Gossypium hirsutum
  Clone ID: LIB3120-010-Q1-K1-B2.pep
SCRRIWCGILLICWAFSSVDLYDTSMDRSRLSSYTIDCIWSSIGPSLVSSDRDSLTEREE

SEQ ID NO: 90759 - protein, 76 aa, Gossypium hirsutum
  Clone ID: LIB3120-010-Q1-K1-B3.pep
NLSCNIGTNTETGAKKGEMGMAMTKLFTQLFSQMDMHIVMLSLDAAGETTILYTLILRLILTNILTIVFNVETNEY

SEQ ID NO: 90760 - protein, 85 aa, Gossypium hirsutum
  unsure (1)..(85): unsure at all Xaa locations
  Clone ID: LIB3120-010-Q1-K1-B5.pep
RVRLLEALGSRGILPCVGAYGAGRVDXKRPXDATKTWKYFNWYYFHMGVSILSAITTLVYIQHNIEWGLIRGVRTIGIFIAIITY

SEQ ID NO: 90761 - protein, 144 aa, Gossypium hirsutum
  unsure (1)..(144): unsure at all Xaa locations
  Clone ID: LIB3120-010-Q1-K1-B7.pep
FFSPLHSPKLMAAVTAAVSFPSTNSTSFTTRTSIISPERITFKKVSFYYPDVSSGGRVVSVRAQVTTEAPAKVVKESKKNDEGVVVNKFKPKEPYIGRCLLNTKITGDDAPGETWHMVFSTXGEVPYREGQSIGVIPDGVDQNG

SEQ ID NO: 90762 - protein, 106 aa, Gossypium hirsutum
  unsure (1)..(106): unsure at all Xaa locations
  Clone ID: LIB3120-010-Q1-K1-C3.pep
LPEKLQSAQTDQDRGKGLAYNIFNDQQXDITRMKGVINSLSQAXINDGTHYAIMSSYYYINQRLETYDXLDNNMARLYIAPAVIDKLGSHMTNNYMTLSNIKVPLI

SEQ ID NO: 90763 - protein, 57 aa, Gossypium hirsutum
  Clone ID: LIB3120-010-Q1-K1-C7.pep
FKNTIGFDQPNKMKFTKTQICRGTLALWRKKGMKSVNRQRKGMPAKILKFELNRRDI

SEQ ID NO: 90764 - protein, 44 aa, Gossypium hirsutum
  Clone ID: LIB3120-010-Q1-K1-E4.pep
FSLMTSLMESLLLKKRKERSADHLSTSYIRVRAHSYLSCTVHIA

SEQ ID NO: 90765 - protein, 68 aa, Gossypium hirsutum
  Clone ID: LIB3120-010-Q1-K1-F2.pep
QFALLLNHGKSLIFISASQCSCKKPPWKTTSISQQPTTWRKKRWASQKMTQSTHFSKSARRKRLGKTG

SEQ ID NO: 90766 - protein, 139 aa, Gossypium hirsutum
  Clone ID: LIB3120-010-Q1-K1-F3.pep
KFLFVFLLHLHPQSHSPNQRPTFTRYSNPTVKVTSIQRCKSLIRNSQRLTTKVAANIHDVSVVADPARVDITWQIVVGALAGVTPFFVAGIEFSKRIIAQRRCGECRGSRLVFRGNDYFKCPECGGFLPWQSWKKFFTG

SEQ ID NO: 90767 - protein, 34 aa, Gossypium hirsutum
  Clone ID: LIB3120-010-Q1-K1-F6.pep
IRRYFCTVQSIVRVTHSHNPFSLRGIPFSYSCHI

SEQ ID NO: 90768 - protein, 65 aa, Gossypium hirsutum
  Clone ID: LIB3120-010-Q1-K1-G6.pep
MSHLDDIPSTPGKFKMEKSPFIQSRMRWHWQSSLAKLTFWSIIFFCLILIFFFRSPSSNPLLQDP

SEQ ID NO: 90769 - protein, 57 aa, Gossypium hirsutum
  Clone ID: LIB3120-010-Q1-K1-H2.pep
YKRIYGGSTLKGLNIAFKITHRSSQTIVCRRECKEESMVSTRMQRRIYGRSAHTLIR

SEQ ID NO: 90770 - protein, 104 aa, Gossypium hirsutum
  unsure (1)..(104): unsure at all Xaa locations
  Clone ID: LIB3120-011-Q1-K1-A10.pep
MEKSSNSTTLGGTKSDQVGETLAAVFKSPTSQSDLAPGTSDSGGTLSRKSSRRFVVGASPARSSGGGCRNAHIRKARSAXMKLDLEELSSGAALIPASSASLGF

SEQ ID NO: 90771 - protein, 47 aa, Gossypium hirsutum
  Clone ID: LIB3120-011-Q1-K1-A2.pep
DRRSTARAQRRTASRALQWLSSSLMLMSKNISITQLILSSRSKFSDA

SEQ ID NO: 90772 - protein, 131 aa, Gossypium hirsutum
  Clone ID: LIB3120-011-Q1-K1-A8.pep
RKIKCVCSPTGFLIIRPLQPIPCCLKQATIVIPTIFMVHARGFFIMTIHRYIILNTSFLPHCVFIFLIILLQLFNLRSRFLPTLAILGKMFMRCFTNFFYDTMNSSFILYSSRILTSIVLPAHPACPVHLR

SEQ ID NO: 90773 - protein, 85 aa, Gossypium hirsutum
  Clone ID: LIB3120-011-Q1-K1-B1.pep
TQTRSQTHVQRFEPATSATTKRDHPVIHFEAQGFKPRPLSHSLFNLRLLHCCCFIIQSFNHPCTRQTIDQSCSEKGCTYTIAKGR

SEQ ID NO: 90774 - protein, 54 aa, Gossypium hirsutum
  unsure (1)..(54): unsure at all Xaa locations
  Clone ID: LIB3120-011-Q1-K1-B11.pep
LLRILTNNATIAKGPSAAXVVERLFQMMSRSEVGPDGQHIALQALVNILEHPQC

SEQ ID NO: 90775 - protein, 118 aa, Gossypium hirsutum
  Clone ID: LIB3120-011-Q1-K1-B6.pep
SHSFAHSFYHTYRMLQTINILYGYTTIRRAQPDYHQLAANSHKFASDNDHHKATMNFIHRHKDIKLFPKTDNTSYHALKHPIASNCNTIIRNNYIILKYNNFYPSLERYLTFIEDNTS

SEQ ID NO: 90776 - protein, 54 aa, Gossypium hirsutum
  Clone ID: LIB3120-011-Q1-K1-C10.pep
TGFTIEIRICVTGKGYEIGEVLIMHPGVKSITFNGGDNGIEISKKAGMVPIPFE

SEQ ID NO: 90777 - protein, 67 aa, Gossypium hirsutum
  Clone ID: LIB3120-011-Q1-K1-C5.pep
LSRFQGGKAVKQKRSVFRRLRPRSRDYLKWPTAAALRYRSFNPITLRSSRRRRCRTGLTGLLGSTNP

SEQ ID NO: 90778 - protein, 75 aa, Gossypium hirsutum
  Clone ID: LIB3120-011-Q1-K1-D6.pep
WGPTSAYAPCGRGSGALTSKTSSALVYVFASGLSPVQTHETSSAGCSIMRIRSNLLHLAVKDQLIAYDTTVFFQV

SEQ ID NO: 90779 - protein, 122 aa, Gossypium hirsutum
  unsure (1)..(122): unsure at all Xaa locations
  Clone ID: LIB3120-011-Q1-K1-E1.pep
YIIAKAGSNYDFHPLTNDSCISDAVYTVLLEAXHRIVYAIATQDIPSLKDLSPRQIKVMAALISINDVLDDLIESCSMSGEEEQLLLCNEYVNEQHPSLLEFLLMLWDDASSKLLRDDSMTM

SEQ ID NO: 90780 - protein, 83 aa, Gossypium hirsutum
  Clone ID: LIB3120-011-Q1-K1-E2.pep
EIKNSSIITMWIAASSTSSSTLSFFQIQCSDSNRKRGFGPRKSNQKATSKEEKGFNLQHRKLASKQSGPYLLRTCLSVHLMEI

SEQ ID NO: 90781 - protein, 153 aa, Gossypium hirsutum
  Clone ID: LIB3120-011-Q1-K1-E3.pep
ENEDPTVTKMFHYKMLSDLLGSKEAAKSSMLYSYKHGFSGFAARLTDSQAKEIEAFPGVVQVIPNQVHKFHTTRSWDFMGLNDHSTTNLLTKSNMGEGIIIGVIDSGVWPESESFNDRGMNPIPPHWKGICQEGQLFNSSNCNKKLIGARWFV

SEQ ID NO: 90782 - protein, 113 aa, Gossypium hirsutum
  unsure (1)..(113): unsure at all Xaa locations
  Clone ID: LIB3120-011-Q1-K1-E5.pep
SSTRSLDFDLSSLLDPFRLDQRPDTVVIVYITEGLGDDVRLGSYKFRERQPIGTAAQTQDTMDYKDPTADTLFDPDXLCLWDYYRAGIAAFVATCXCIYITVITAIVVAKSST

SEQ ID NO: 90783 - protein, 37 aa, Gossypium hirsutum
  Clone ID: LIB3120-011-Q1-K1-E6.pep
HEIKLQVIILRDVLIVDVKKSRSDLLRLFQRVDAVTG

SEQ ID NO: 90784 - protein, 121 aa, Gossypium hirsutum
  unsure (1)..(121): unsure at all Xaa locations
  Clone ID: LIB3120-011-Q1-K1-F1.pep
MAAATMGISSPSFARXAAKLSPSAPNIQSPGRVYMRKTVTNAAHCGSAWYGPDRVXHLGPLSGEPSSHSSEEYRGDYSWDTAELYTDPXTYAKDRELXVIHCTWTMLGAITCVFHEILARH

SEQ ID NO: 90785 - protein, 147 aa, Gossypium hirsutum
  unsure (1)..(147): unsure at all Xaa locations
  Clone ID: LIB3120-011-Q1-K1-F5.pep
RSHQMCLKGSSSSGNVLIQDDMSGELEENGIMSRIPLLLASSETSXIALERIMSXSQEASTRTSGRXSKSIGPLTDSPTDTTSEIDDDXKFTIASNSLNMLYRANTGTGAATNATSTVTLGMNTXGRWLKDTREYDMGDTRSHNANL

SEQ ID NO: 90786 - protein, 34 aa, Gossypium hirsutum
  Clone ID: LIB3120-011-Q1-K1-F7.pep
HSGSMVLTEEHLTFNTSMAISHGLTSLIFTHIIR

SEQ ID NO: 90787 - protein, 45 aa, Gossypium hirsutum
  Clone ID: LIB3120-011-Q1-K1-G8.pep
LCRHNLLADTLAMRSPTLAPNLRPLLNLVSSKLLLKNTITYQDSI

SEQ ID NO: 90788 - protein, 91 aa, Gossypium hirsutum
  Clone ID: LIB3120-011-Q1-K1-H3.pep
REEKNAVTPLTEMKPERIFRKMGLLHRRVDRILSSKPTDLAKSRKMIWIACDPVEQQSVQLYALTYKVWAWLLDRFLDIEFPYCEQALDAY

SEQ ID NO: 90789 - protein, 87 aa, Gossypium hirsutum
  unsure (1)..(87): unsure at all Xaa locations
  Clone ID: LIB3120-011-Q1-K1-H9.pep
GIECYMXEYGVMEQEAYNVFNKHIESACKNVNKGFLKPTEMPIEVMNRILNLARVMNVIYNEGDGYTYVGKATKVIISILLIKPVTL

SEQ ID NO: 90790 - protein, 67 aa, Gossypium hirsutum
  Clone ID: LIB3120-012-P1-K1-A1.pep
RKDKQTCYWSSSHLRKKKKMSGGVGPTCNDISLPNEGIQGHEKSFHPNPLKTDSISHPQGNSIVLPL

SEQ ID NO: 90791 - protein, 119 aa, Gossypium hirsutum
  unsure (1)..(119): unsure at all Xaa locations
  Clone ID: LIB3120-012-P1-K1-A2.pep
PESSSQLAMGATFGVEPPKEKGDVDIATHIRVDDDGPDRSLLYVETADRPGLLVDLVKIITDINITVESGEFDTEGLLAKAKFHVSSKGKAIIRPLQQVXLANSLRYFLRRSTTEEASF

SEQ ID NO: 90792 - protein, 49 aa, Gossypium hirsutum
  Clone ID: LIB3120-012-P1-K1-A4.pep
FPVLSMVYTVPWYLVNACSNLNLAQDTDWFGGSFPLNKPHAYVYAWSNA

SEQ ID NO: 90793 - protein, 42 aa, Gossypium hirsutum
  Clone ID: LIB3120-012-P1-K1-A9.pep
IQIHCPSTLECFHLIIPKIQSPFISSELNLKKVKIQKDFWFY

SEQ ID NO: 90794 - protein, 87 aa, Gossypium hirsutum
  Clone ID: LIB3120-012-P1-K1-B11.pep
SFQVNWATRCPSKIKIALWKFVHGFVATRSCLYNRRVANNPSFPRCNVDYETVNHVLRFCATARDVWVMMGYLLLWVSAQLEFHDWL

SEQ ID NO: 90795 - protein, 88 aa, Gossypium hirsutum
  Clone ID: LIB3120-012-P1-K1-B6.pep
MASSRLPRFIMEVAPPQFVTVMRQRTRTMLDTINEEDNLDGSKSLSSTTIPAGATMVTAAAASSSSATTVTAHSKYFSQRSVQLFNFQ

SEQ ID NO: 90796 - protein, 40 aa, Gossypium hirsutum
  Clone ID: LIB3120-012-P1-K1-B7.pep
MSAALDPVDWLLFSLSRAFRSPLAVFVQIQGCVICLSLAI

SEQ ID NO: 90797 - protein, 48 aa, Gossypium hirsutum
  Clone ID: LIB3120-012-P1-K1-B8.pep
TQNHIFSKPNFHFNGPLFSFPPASWQGLPFFLSLKVHAFNKKGFFFSF

SEQ ID NO: 90798 - protein, 51 aa, Gossypium hirsutum
  Clone ID: LIB3120-012-P1-K1-C1.pep
LPGPAEPKTANCRALKPNRLGLKTARDWPVNVEAFTGSPVTPLGTQVFVCP

SEQ ID NO: 90799 - protein, 66 aa, Gossypium hirsutum
  Clone ID: LIB3120-012-P1-K1-C2.pep
ADIAHLCSSASASPPQLWSWASPHQLCPSSLSVDHRPYSSLYFEKNPKNLAATIMYNLILLFIKTF

SEQ ID NO: 90800 - protein, 51 aa, Gossypium hirsutum
  Clone ID: LIB3120-012-P1-K1-C3.pep
LSVGKHQVQVYSQVETGTHNQVVGKSHRLKSKNQILKELITDLTKQKLTKP

SEQ ID NO: 90801 - protein, 114 aa, Gossypium hirsutum
  Clone ID: LIB3120-012-P1-K1-C4.pep
MGDLYALDFDGVLCDSCGESSISAVKAAKVRWPALFDGVDSVLEDWIVDQMHMVRPVVETGYENLLLVRLLVESRLPSIRKTSVAEGLTVEDILENWSKIKPVIMEEWVENRDA

SEQ ID NO: 90802 - protein, 61 aa, Gossypium hirsutum
  Clone ID: LIB3120-012-P1-K1-C7.pep
DFYFSWLELSSMDFLTYPNPHILLSNPLFNQLLFPHNTSLSILYIPYPFISNIIHSIPLPT

SEQ ID NO: 90803 - protein, 27 aa, Gossypium hirsutum
  Clone ID: LIB3120-012-P1-K1-D10.pep
LPIFLLPHPTSDNYNNNSLATWIIQSS

SEQ ID NO: 90804 - protein, 106 aa, Gossypium hirsutum
  unsure (1)..(106): unsure at all Xaa locations
  Clone ID: LIB3120-012-P1-K1-E9.pep
FLLPYFIEFGLIEKKNILHSFTFLSFLFSFCIFLGMLLLYFFLTCFPIIFLFKLKKSLPPWATEVKLLSLWFGKDVSFSSVTKLIKTXSSPLYFTSKMPLKKMSLT

SEQ ID NO: 90805 - protein, 138 aa, Gossypium hirsutum
  Clone ID: LIB3120-012-P1-K1-F12.pep
HAFAHACDFVPEPTQVSEASGPDPATALVEENQNVAEKVYEPSDQEKQLVDEDEAVVKPQSNSNGDDITVVVEPASSSAQEDSAKKSYASIVKVPKESPGPTTVYVPSNTTKVTPKKTEKQAPISAAPATPEASAPSS

SEQ ID NO: 90806 - protein, 84 aa, Gossypium hirsutum
  Clone ID: LIB3120-012-P1-K1-F8.pep
TNFKLHFYFPLLTLSSSIRSWGSINTVCAPHSFIVFSFTGLKSSSPFPVTTLVINHFTFFSSTCSRVSFIHVLPPTDKKNSYTS

SEQ ID NO: 90807 - protein, 104 aa, Gossypium hirsutum
  unsure (1)..(104): unsure at all Xaa locations
  Clone ID: LIB3120-012-P1-K1-H1.pep
RPEFRVGHACAQFSLTFKPSPSPLFSNFPRTRFGPFTTAGAIASRFKVLASQTGFFTRLGRLIKEKAKSDVXKIFSGFSKTRDNLAVIDELLLYWNLADTDRVL

SEQ ID NO: 90808 - protein, 54 aa, Gossypium hirsutum
  Clone ID: LIB3120-012-P1-K1-H5.pep
METKGYTQDGTVDLRGRPVLASKTGKWKACAFLVGYEAFERMAFYGIASNLVNY

SEQ ID NO: 90809 - protein, 77 aa, Gossypium hirsutum
  unsure (1)..(77): unsure at all Xaa locations
  Clone ID: LIB3120-012-P1-K1-H6.pep
PRVRALNVTVEEVSEALLQGNAGALGTELLXESLLKMAPTKEEERRLKDSKXDSPVKLGPAEKFLKTILYIPFAFKK

SEQ ID NO: 90810 - protein, 44 aa, Gossypium hirsutum
  Clone ID: LIB3120-012-P1-K1-H9.pep
ADIHAEIIRSKVACSVHTLLCSSHSFLRLDGSRCSTYQFNRKSD

SEQ ID NO: 90811 - protein, 98 aa, Gossypium hirsutum
  Clone ID: LIB3120-013-Q1-K1-A2.pep
IDRSTHACVHASLRTLFSVAHAIAAQSISYWKPNFFLQSKLAEKDQQIADLYAQIEALDASLSQTSDKLPKADEEKGSLLKDNASLTSTLKKPQRDVS

SEQ ID NO: 90812 - protein, 81 aa, Gossypium hirsutum
  unsure (1)..(81): unsure at all Xaa locations
  Clone ID: LIB3120-013-Q1-K1-A8.pep
MASSMVSGATIGTAFPAQANMVPPLTGLKYASALPVTRKDNNDITSLASKGGXVQCMQVWPPTGKKKIETLSYHPDLTHVQ

SEQ ID NO: 90813 - protein, 80 aa, Gossypium hirsutum
  unsure (1)..(80): unsure at all Xaa locations
  Clone ID: LIB3120-013-Q1-K1-A9.pep
NILDKPVILGXQDDNSCALTFWSSEQDEYNQTRFDNIAXLNRTLEDAGYADRTRVLELLCHTDKGNSTETRSTGTSSFDH

SEQ ID NO: 90814 - protein, 44 aa, Gossypium hirsutum
  Clone ID: LIB3120-013-Q1-K1-B1.pep
SEFEFGILVKTRVYSCMHFPVGIYFLPKKSCILISTLVINYDPL

SEQ ID NO: 90815 - protein, 58 aa, Gossypium hirsutum
  unsure (1)..(58): unsure at all Xaa locations
  Clone ID: LIB3120-013-Q1-K1-B12.pep
LQELNHRASRNIDESFVNPGIAVKQPLHVVMVDPKVANKSRFTEELIXTILLTVAVGL

SEQ ID NO: 90816 - protein, 100 aa, Gossypium hirsutum
  unsure (1)..(100): unsure at all Xaa locations
  Clone ID: LIB3120-013-Q1-K1-C11.pep
KNTLAQQLFLSIASMAALRGWSQAELDGTFQLSGQTRFNIPSNNRVPVRRSSITVTAHQTPSVPETARIALXAPVADVMANDSFDHAVLANARRIKVVPP

SEQ ID NO: 90817 - protein, 50 aa, Gossypium hirsutum
  Clone ID: LIB3120-013-Q1-K1-C6.pep
AMTGGFAVSVELLSFIITESSVTVSFDERLSFELAVAENPGFPLFLVVSH

SEQ ID NO: 90818 - protein, 54 aa, Gossypium hirsutum
  Clone ID: LIB3120-013-Q1-K1-C9.pep
PHALGPAPMKPKRPCRCEFIHMIGQLALDATILYADRDKPPAYVIQSTFDRRRM

SEQ ID NO: 90819 - protein, 135 aa, Gossypium hirsutum
  unsure (1)..(135): unsure at all Xaa locations
  Clone ID: LIB3120-013-Q1-K1-D11.pep
MSDSLRDVEDISLRFSIEGDIKLNGEIDASARQKKIVEAFTRMASLNSNTGIVYSPGRRQMLFVIAADCYDSNGETRDLSXMIMNVMKDAGLCFGLRKIGFVLLTGSSFIETMQALSCCPVNIEDFDALVCNSGS

SEQ ID NO: 90820 - protein, 51 aa, Gossypium hirsutum
  Clone ID: LIB3120-013-Q1-K1-D7.pep
PFFSEGERRQQAALVVSERITTGRRSPVAEFHEDSFHTVTVPSLSTDVHVS

SEQ ID NO: 90821 - protein, 57 aa, Gossypium hirsutum
  Clone ID: LIB3120-013-Q1-K1-E12.pep
DKLSSQFRKILSIMVRPEFTSHFTTTFQSANHFTSPHQPSWLPPSPAVSILFQQLKT

SEQ ID NO: 90822 - protein, 42 aa, Gossypium hirsutum
  Clone ID: LIB3120-013-Q1-K1-E2.pep
DHASADACAQPYAKMWYSLRQAHQPAAASVAPRPLYHPRRRK

SEQ ID NO: 90823 - protein, 81 aa, Gossypium hirsutum
  Clone ID: LIB3120-013-Q1-K1-E3.pep
INLTKKIFSLTYDITSRAAFGNTCKDRDSFIIVIDEIIKLSSGFGLADLYPSFGLLELISGVRQKAEALREKSDEILQGHR

SEQ ID NO: 90824 - protein, 65 aa, Gossypium hirsutum
  Clone ID: LIB3120-013-Q1-K1-E8.pep
SLRDIICWLDTDSCLSVAFTRRCSFDEHLDWLQPGGFSAASIYGPFQPVGVQVKKKKCNLHWSTG

SEQ ID NO: 90825 - protein, 89 aa, Gossypium hirsutum
  unsure (1)..(89): unsure at all Xaa locations
  Clone ID: LIB3120-013-Q1-K1-F4.pep
RFNKKLLSNGKHIXELXKEIEVANEEHVLVELAKMEASKEAADIEAQKEKEVGELSCMMAGTKKKMEDMINEIDQTGELEQRLTVTLSD

SEQ ID NO: 90826 - protein, 79 aa, Gossypium hirsutum
  unsure (1)..(79): unsure at all Xaa locations
  Clone ID: LIB3120-013-Q1-K1-F6.pep
MFSSATXATGAPAQANMDAPFTCLNSASAFPVTMKANNDISSLACYDCRVQCTHVWPPTVKKKFETLSYLPDITPVQLA

SEQ ID NO: 90827 - protein, 50 aa, Gossypium hirsutum
  unsure (1)..(50): unsure at all Xaa locations
  Clone ID: LIB3120-013-Q1-K1-G1.pep
XVSPXATPKGAVTLCIAVVDLGHRLQHHPTHPLSRPVLSSPRRKPVLQSP

SEQ ID NO: 90828 - protein, 50 aa, Gossypium hirsutum
  Clone ID: LIB3120-013-Q1-K1-G11.pep
QHGSPPRSLVHNIRSHEKHRLINAVQNACNDQTVAYIQEPPLTNPVTLHD

SEQ ID NO: 90829 - protein, 76 aa, Gossypium hirsutum
  Clone ID: LIB3120-013-Q1-K1-G12.pep
LLGNKLSIFFTLILKSLMVVTKAIHLSTTLLLDRTLVVRSDFIHGALCEEHIMLIIKTLCDPDSTVIEPELTRSPP

SEQ ID NO: 90830 - protein, 103 aa, Gossypium hirsutum
  unsure (1)..(103): unsure at all Xaa locations
  Clone ID: LIB3120-013-Q1-K1-G6.pep
SFSDLTNLQHMDLARNNLEGPIPSRLFSLKNLTHVYLFKNNLSGEIPKPVVALNLKEIDLSMNTLTGTIKEDFGKXQHLDFLSLFSNKLKKELPTSIGLSART

SEQ ID NO: 90831 - protein, 63 aa, Gossypium hirsutum
  Clone ID: LIB3120-013-Q1-K1-G7.pep
ILLSSAGVLATSTEIDAKGNNVLKVVDWDTFVILPPYIAFKGNNDMFLRTAEIDGYPYLQLLR

SEQ ID NO: 90832 - protein, 44 aa, Gossypium hirsutum
  Clone ID: LIB3120-013-Q1-K1-H1.pep
DGVSAGCGPKYIPWSGPYLVLQVGTGVGGFRYENAVSSLDLRGG

SEQ ID NO: 90833 - protein, 60 aa, Gossypium hirsutum
  Clone ID: LIB3120-013-Q1-K1-H10.pep
AQKLTGAIFVLIKTMIDPSLVAGFTIRYGSSGSKLIDMRVKKQLEEIAAQLDLGDIQLAV

SEQ ID NO: 90834 - protein, 57 aa, Gossypium hirsutum
  unsure (1)..(57): unsure at all Xaa locations
  Clone ID: LIB3120-013-Q1-K1-H12.pep
NGPFGCQGGIPRLVEFRQRRRRRRRRRGLPLKPELPMLCSQGRGPKXRLKEAKNKRT

SEQ ID NO: 90835 - protein, 52 aa, Gossypium hirsutum
  Clone ID: LIB3120-013-Q1-K1-H4.pep
KLIIIILSTSIHPITMTATAFVIINETILFYYLKVLVKINLPPTACNSSASA

SEQ ID NO: 90836 - protein, 62 aa, Gossypium hirsutum
  unsure (1)..(62): unsure at all Xaa locations
  Clone ID: LIB3120-013-Q1-K1-H5.pep
VSHIVSRSIRGIVCSILSFRMSHILIDSWGNNSRLCSLSTHRSRGFVAQDHIKXXXXXXPRS

SEQ ID NO: 90837 - protein, 55 aa, Gossypium hirsutum
  unsure (1)..(55): unsure at all Xaa locations
  Clone ID: LIB3120-013-Q1-K1-H6.pep
LFFLAQTSFCCHTTNNTLQKRSFNFSDSCYPMLNSLVAFGGGRQISLQYCXXXEX

SEQ ID NO: 90838 - protein, 40 aa, Gossypium hirsutum
  Clone ID: LIB3120-013-Q1-K1-H8.pep
PFQVMLRASSSFFFVLGSPLQKLPLFIIYLSVLGISKSMN

SEQ ID NO: 90839 - protein, 57 aa, Gossypium hirsutum
  Clone ID: LIB3120-014-Q1-K1-A12.pep
SNRASAIATRLNAGGLSCTVLDKETSQKQILEKLIWICAFMLVGACHSCGNYRRCIE

SEQ ID NO: 90840 - protein, 31 aa, Gossypium hirsutum
  Clone ID: LIB3120-014-Q1-K1-A7.pep
RLRPVKGVPMLACAEEAVPMVANEIFEESHC

SEQ ID NO: 90841 - protein, 69 aa, Gossypium hirsutum
  unsure (1)..(69): unsure at all Xaa locations
  Clone ID: LIB3120-014-Q1-K1-B1.pep
WQRSSSSQTYFNIEFSKEIWIELKVLLVFLIGLFLKHKVFIYELLPIFNIQEIKDQISSIKSLYLTFLX

SEQ ID NO: 90842 - protein, 85 aa, Gossypium hirsutum
  Clone ID: LIB3120-014-Q1-K1-B8.pep
AVDISLKEKTLAAAKSYGASGIFYTLPGAKQIEMYTKHCVTELPMGMAKTYYLFSHNAVEKGAPSGFMLPIMDVRANIGARFIYA

SEQ ID NO: 90843 - protein, 81 aa, Gossypium hirsutum
  unsure (1)..(81): unsure at all Xaa locations
  Clone ID: LIB3120-014-Q1-K1-C1.pep
PRVRHAXAHHHRFSLIVWPLHRSSETLYALRCTIPFLPSLKISFPSFSYFIKSRPLTSSIMRGSVLTKEVFETKEAVIVDA

SEQ ID NO: 90844 - protein, 36 aa, Gossypium hirsutum
  Clone ID: LIB3120-014-Q1-K1-C10.pep
QQTCKKYSFIFFSSKYNASLKLLISSDKLLPLSMCC

SEQ ID NO: 90845 - protein, 79 aa, Gossypium hirsutum
  unsure (1)..(79): unsure at all Xaa locations
  Clone ID: LIB3120-014-Q1-K1-C11.pep
MVTRRGADNTTKHLRAGAIAVIVLTTFVDSVERCKLEIIHRGEQRKIFLLVKKNCLTQRFLGLLKGNLIXVFCTATFKA

SEQ ID NO: 90846 - protein, 44 aa, Gossypium hirsutum
  unsure (1)..(44): unsure at all Xaa locations
  Clone ID: LIB3120-014-Q1-K1-C8.pep
LPAVYTKIGLINAPQWYDAGRFXYFVSCSTLFVIECILFHYVEI

SEQ ID NO: 90847 - protein, 78 aa, Gossypium hirsutum
  unsure (1)..(78): unsure at all Xaa locations
  Clone ID: LIB3120-014-Q1-K1-E1.pep
HAXVHAFVKLHFSATKSSSAPTPLGSTAQFLTQKHKIMAARVATMGYAQLQNCAKHLVLTIYGQAYKVNPQSPFSLFF

SEQ ID NO: 90848 - protein, 49 aa, Gossypium hirsutum
  Clone ID: LIB3120-014-Q1-K1-E11.pep
PILTITCILSIGSFCSNNDSWAIYSVKTHSFYCSSLDPVSTSSNDAQGE

SEQ ID NO: 90849 - protein, 32 aa, Gossypium hirsutum
  Clone ID: LIB3120-014-Q1-K1-F12.pep
TSTLTPCSNKKLSLNDGFLEFLLPKPIHIKII

SEQ ID NO: 90850 - protein, 36 aa, Gossypium hirsutum
  Clone ID: LIB3120-014-Q1-K1-G10.pep
VRLAIEYIDISGGEPMELVPRCAEIIARQLELDKIL

SEQ ID NO: 90851 - protein, 86 aa, Gossypium hirsutum
  unsure (1)..(86): unsure at all Xaa locations
  Clone ID: LIB3120-014-Q1-K1-G6.pep
PXTTRPIPRSLFYPHFLSHQRHPFFLKVKRWQMGGYSATCCDNGTGMVKAGLPVTMLEAASLHCGRLVTPGDGGWPKRCICGDRLI

SEQ ID NO: 90852 - protein, 98 aa, Gossypium hirsutum
  unsure (1)..(98): unsure at all Xaa locations
  Clone ID: LIB3120-015-Q1-K1-A3.pep
RVPRVPRVQPRVRSSVYINRRCLTCCYITTTTXSFFARRRPTLWPSLVARLNSSTSTTTLIQNTPAFAAPIPLLTPREEMGNMSYDEDIEALYKLLND

SEQ ID NO: 90853 - protein, 49 aa, Gossypium hirsutum
  Clone ID: LIB3120-015-Q1-K1-A4.pep
LVFIVGWHSKVSIVQSVVLDELFRKIVRRRCNGECRDDYLCVNYWYSLG

SEQ ID NO: 90854 - protein, 66 aa, Gossypium hirsutum
  Clone ID: LIB3120-015-Q1-K1-A5.pep
RIQVYLILGFHFFGFQVLLHYSFPPLSCFNYNNCIFFPFMYFYSTFYFLGLFFRLLLSIIGLPCYA

SEQ ID NO: 90855 - protein, 62 aa, Gossypium hirsutum
  Clone ID: LIB3120-015-Q1-K1-B11.pep
QNYIYRWLIIICYISSLHQPYPIHKIFHQYSSNIHFFVSFVHLFWDRFEVSLGARPCKAHIS

SEQ ID NO: 90856 - protein, 32 aa, Gossypium hirsutum
  Clone ID: LIB3120-015-Q1-K1-B12.pep
CKNWCYIRIDGCHDIVLISFNAQSSIRITTIQ

SEQ ID NO: 90857 - protein, 124 aa, Gossypium hirsutum
  unsure (1)..(124): unsure at all Xaa locations
  Clone ID: LIB3120-015-Q1-K1-B3.pep
AXGEIDTKDKTDIDASYRTVQRAPAVLVEHDINDILLFSPDDVGLKAGLPLLFSSMRTPKNQHHISLGAISNHGLASECLSGNACIIVSSPTLKIKKSEDPSIADTTVQFFKSSTTLKNSVDNT

SEQ ID NO: 90858 - protein, 119 aa, Gossypium hirsutum
  Clone ID: LIB3120-015-Q1-K1-B4.pep
VSGKKSRKKSGSLIIFSIKEDNTTVEFFWSPFLVESNSDNPWRHSIKDRIIKPESIKNNGDDWKGVDYLIFNTYIWWMNSGYMKVLRRSLDAEPVEYDEIERPIAYGKVVKRRAKWVDE

SEQ ID NO: 90859 - protein, 28 aa, Gossypium hirsutum
  Clone ID: LIB3120-015-Q1-K1-B6.pep
LTRTLTLKYILTVFTSILNLGTNLILYL

SEQ ID NO: 90860 - protein, 86 aa, Gossypium hirsutum
  Clone ID: LIB3120-015-Q1-K1-B8.pep
GRVGGRVGSSSNFGKQRNLGLVQFHHSLRTLGNGIKRCGFRSISFCSTDRTNLTKRSCLLSCKCQRADRVSGLTADDGRPASLSIN

SEQ ID NO: 90861 - protein, 72 aa, Gossypium hirsutum
  Clone ID: LIB3120-015-Q1-K1-C2.pep
RPITTLSSGPISTTESIEPPMREVEADVGIKRFDRCSQGYTGMPVCDLDKRVPHGKKVLGLDLVVRRDKNEN

SEQ ID NO: 90862 - protein, 59 aa, Gossypium hirsutum
  Clone ID: LIB3120-015-Q1-K1-D10.pep
TWNGPFTGLKYASDFPATTKANNNITFFASNVGRLLCMQVWSPTDKKKVETLSYLPDLT

SEQ ID NO: 90863 - protein, 104 aa, Gossypium hirsutum
  unsure (1)..(104): unsure at all Xaa locations
  Clone ID: LIB3120-015-Q1-K1-D3.pep
ARIAFFRFHDSFSLGCVKAYLASLISTLEIVFASLGSAISYNTLTTDADLDPDGLVTIAVCHRFSLFVALDIGANISCGHVYPALTIXSSSWWQITILTGIFYW

SEQ ID NO: 90864 - protein, 77 aa, Gossypium hirsutum
  Clone ID: LIB3120-015-Q1-K1-E2.pep
AKTMKAYPSLGKIAPALYNPMHPYRAIYMHIITNRTLLLIIDDKELNVLNGSHSGRILTGTDGHDVTITTYNPFKPI

SEQ ID NO: 90865 - protein, 97 aa, Gossypium hirsutum
  unsure (1)..(97): unsure at all Xaa locations
  Clone ID: LIB3120-015-Q1-K1-E4.pep
PTRXIPSQLHIWCKPSLHSTGLCKSITSKQQTPSFRLMEFKYRAVDERPPKDFPPPSSTFNPLPPQGFLPHPVNLELGKVQLREAIIASDIARRRAL

SEQ ID NO: 90866 - protein, 89 aa, Gossypium hirsutum
  Clone ID: LIB3120-015-Q1-K1-E9.pep
FLQPPPEKGTAMAYDRLRPSEPGSSGVTQQQNHEEPKAKNNKRKIVILSVIALTMIVASAVCAGLVIGLREAGADPVGTQVRRKPTQAI

SEQ ID NO: 90867 - protein, 118 aa, Gossypium hirsutum
  unsure (1)..(118): unsure at all Xaa locations
  Clone ID: LIB3120-015-Q1-K1-F11.pep
SLCDADVALIIFSATGKLFEFASXSMKDILGRYNLHSNNINKLDQPSLDLQLENNNNIRLNKEIVDKTRQLRQMRGEDLQGLNVEELQQLEGMLESGLKCVLETKSNRIMNDISSLEN

SEQ ID NO: 90868 - protein, 90 aa, Gossypium hirsutum
  Clone ID: LIB3120-015-Q1-K1-F12.pep
HPNRVGSIVLPGINPYCHWCLRITSFFAAMRHSLASNTTLRWFLRTWVDLALSLAAFVVHRDYCCVKDNRLRLLSVRPLFWKKKLSAFLA

SEQ ID NO: 90869 - protein, 96 aa, Gossypium hirsutum
  Clone ID: LIB3120-015-Q1-K1-F2.pep
HAGDTYLAWSLKRSKAVNRRKTGVGVIGKGHMNGVIYALVSDQGNLRFIDLARKTPSEAESNGWVQRLLKSLARDTLIGILLWALYEQIKSAGILL

SEQ ID NO: 90870 - protein, 87 aa, Gossypium hirsutum
  Clone ID: LIB3120-015-Q1-K1-F6.pep
MASFASQTFLIRFTLFSPFFITINGEFSIQSIVTSTKRMEKMTHLHFYFHDTISGKHPTAMQIIKPHNTSARALFGITFMADDPLTE

SEQ ID NO: 90871 - protein, 73 aa, Gossypium hirsutum
  Clone ID: LIB3120-015-Q1-K1-G4.pep
IWDALGVMSRSQRIIAQLEHLLVELTILKNKKFATTITHQICKPWNVNHFPWSKKDIKIPQKKIWRSFLIPEK

SEQ ID NO: 90872 - protein, 81 aa, Gossypium hirsutum
  Clone ID: LIB3120-015-Q1-K1-G5.pep
SKYPILSAYIHDTNKCTASRLTYAIAKAGISKVEHSWCGSVPCPSSRSVFYFIIDKVSINVRSSAPNKTCPLSLTHRFDPA

SEQ ID NO: 90873 - protein, 62 aa, Gossypium hirsutum
  Clone ID: LIB3120-015-Q1-K1-G6.pep
PTRPASYPHVQGTLSGLLNAIDGLLSCCGDERIIVFTTNYKDKIDPALLRAGRMDKHICLSY

SEQ ID NO: 90874 - protein, 45 aa, Gossypium hirsutum
  Clone ID: LIB3120-016-Q1-K1-B1.pep
DTLTISTARTTESSVTSAAVGANLSFPICLSYTLHANVIVDHLAP

SEQ ID NO: 90875 - protein, 59 aa, Gossypium hirsutum
  Clone ID: LIB3120-016-Q1-K1-B10.pep
NNISTRLCLYLTFLLSHFWTDDSISTYSFTTYLNKTNYMHTHYFKHSFLNTKPHYLTLI

SEQ ID NO: 90876 - protein, 61 aa, Gossypium hirsutum
  Clone ID: LIB3120-016-Q1-K1-B11.pep
TLFIRGSTYSKATHSCHLKVPFMQWPLRTITNTKLTHRSIVLLATDTHLIMVKLRTLMFNL

SEQ ID NO: 90877 - protein, 62 aa, Gossypium hirsutum
  Clone ID: LIB3120-016-Q1-K1-B5.pep
PTRPGNSCFLGILVTISLCLELFGVGVHGLGVNWGTMAYINFPQKPGVKMLKNIGLKKVNLF

SEQ ID NO: 90878 - protein, 35 aa, Gossypium hirsutum
  Clone ID: LIB3120-016-Q1-K1-C3.pep
ATRPKCYACFREASFFGVCIRKVIVPFTSSLNSGT

SEQ ID NO: 90879 - protein, 53 aa, Gossypium hirsutum
  Clone ID: LIB3120-016-Q1-K1-D1.pep
ERSDDLLEQNIESLGHNQPIEQCFVYTPKTHFQIGFYGLLYPHLLLIPNFFQQ

SEQ ID NO: 90880 - protein, 62 aa, Gossypium hirsutum
  Clone ID: LIB3120-016-Q1-K1-D11.pep
PTRSRGMAISDYIYHITPITWGYLLLLLLLCYTITTTTTTTTYAINITYMLSFFQNHTFLSS

SEQ ID NO: 90881 - protein, 66 aa, Gossypium hirsutum
  Clone ID: LIB3120-016-Q1-K1-D3.pep
CTCIYSFLPTNYNVRWGTMWKLPMFWCTDSAHVLKELEECKKEYPNAFIKIIGFDNGPQRQCISFI

SEQ ID NO: 90882 - protein, 72 aa, Gossypium hirsutum
  Clone ID: LIB3120-016-Q1-K1-E10.pep
FSLFFFKPSAKFYFPDQGLKEMDKRDRKQAKTGSCCSEGMLCPEFLFVSSLVALEFSSCFSNFHFWTFWFGF

SEQ ID NO: 90883 - protein, 91 aa, Gossypium hirsutum
  unsure (1)..(91): unsure at all Xaa locations
  Clone ID: LIB3120-016-Q1-K1-E5.pep
HSRIVRPFRRLYPRRRLTISGGRLSIPPVTIRCLXXWREPLHLLPWYPFIRIGSNSLAQPVALRCYLKVRQLVGLGSTKAFGTNHPAGGAL

SEQ ID NO: 90884 - protein, 96 aa, Gossypium hirsutum
  Clone ID: LIB3120-016-Q1-K1-E9.pep
MTPSIISSATITTASPSHTNIFAPFIHLKSSFSFSLTMNAFNHITSFLNYIRLFQCMPLFPSTFKKNFDTLSYLPHLTPIHFSIYIYTFFSSKFIS

SEQ ID NO: 90885 - protein, 65 aa, Gossypium hirsutum
  Clone ID: LIB3120-016-Q1-K1-G10.pep
RRKNMEEDEDKASQRVILKGSHLKLHMKYSSSLSKHSSLTSYHTCLLKGPSFISYDRMLVMFIHG

SEQ ID NO: 90886 - protein, 60 aa, Gossypium hirsutum
  Clone ID: LIB3120-016-Q1-K1-G12.pep
MAANTLLFCGITTTFGWVLCSSKSKFSGAAASLPIAVGTNVGHRVSMSYVWMPGQPRPPY

SEQ ID NO: 90887 - protein, 94 aa, Gossypium hirsutum
  Clone ID: LIB3120-016-Q1-K1-H9.pep
ALFSNPRLQALTFFHSFALFPNFCFSCYIKGFGTCIPCLLYKAYPYPPYCCSCISLSHDYLYWHAHHSVDFSIASKKKNKRYVHTMVCCKKRAY

SEQ ID NO: 90888 - protein, 99 aa, Gossypium hirsutum
  Clone ID: LIB3120-017-Q1-K1-A3.pep
FYHGCQLGMLQILSIATIFQPKTLNEGNNFLQALHVSFMYKFISREPDHPDSSNNYPFLFLSEFSNSQLSHSLEFIIDLGRWTSNLDQACASNNQSRTA

SEQ ID NO: 90889 - protein, 60 aa, Gossypium hirsutum
  Clone ID: LIB3120-017-Q1-K1-B10.pep
MSELESMTSLGRTKQTARKWTGGKAPRKQLGTNAARMNAPVIGGVIKTHTIHVTNLAFER

SEQ ID NO: 90890 - protein, 130 aa, Gossypium hirsutum
  unsure (1)..(130): unsure at all Xaa locations
  Clone ID: LIB3120-017-Q1-K1-B11.pep
GRFKATDASRLRAEYNRLVEGLALRGNLPITDNWLSNPALPDDILKEAVPGNIRRAEHFLHVLRRLVQYLRGRLDTENVEKESPVSFVASINSHAGIDQKTLKXXYDRLHSLMLTLEITDTDEVLHXQTI

SEQ ID NO: 90891 - protein, 143 aa, Gossypium hirsutum
  Clone ID: LIB3120-017-Q1-K1-B4.pep
PRVRSAINNQVVPKNQFSGFGPQRIQGAQHTGMHPQQMPANQMASMHPQQMYGNQMGAYGYGELQHIHQKMDGLSIRDDNSLRNSYYQVPTVSYVPPGKASKAEDKLLGDLLDMARIKSINTTPKTWVACGTWGWFFFFPLSF

SEQ ID NO: 90892 - protein, 65 aa, Gossypium hirsutum
  unsure (1)..(65): unsure at all Xaa locations
  Clone ID: LIB3120-017-Q1-K1-C10.pep
HSYTHTCYLIIYGSILNGLKPSLEELMQLSVXSVYCSARNTNRQINEHQRLGMTTTETRRLCVSA

SEQ ID NO: 90893 - protein, 81 aa, Gossypium hirsutum
  unsure (1)..(81): unsure at all Xaa locations
  Clone ID: LIB3120-017-Q1-K1-D11.pep
AKICYFLSQQAMEAFFESSSTTNWTYHTLKNFRYTSSVNQSHLKRAHTTLCXALGAYAFGAYLHILWNIGGYLTSLACFRT

SEQ ID NO: 90894 - protein, 111 aa, Gossypium hirsutum
  Clone ID: LIB3120-017-Q1-K1-D12.pep
PTRAAQAQLNGTVHCDYPRWIEVLCHDINVHIPHHVSSRIPSYNLRAAHKSIQENWGPYLNEATWNWRLMKTIMTVCHVYDREQNYIGFDELAPNEASPITFLKRVMPDYA

SEQ ID NO: 90895 - protein, 49 aa, Gossypium hirsutum
  Clone ID: LIB3120-017-Q1-K1-D3.pep
QSIFSELRIGRTGPQIRGTKAYFTISINSYGILVSAYNNVNKKFYRLHA

SEQ ID NO: 90896 - protein, 53 aa, Gossypium hirsutum
  Clone ID: LIB3120-017-Q1-K1-D4.pep
FNKKIQIQQQKQNSNLLSKKKTDIILFALFLFLDFSVYSQLEKKELGHLSLFS

SEQ ID NO: 90897 - protein, 49 aa, Gossypium hirsutum
  Clone ID: LIB3120-017-Q1-K1-D8.pep
AWVLIKAVEERWMYEVEGEECSVGNVIVYLGCVMCLECKNFSAQESYML

SEQ ID NO: 90898 - protein, 50 aa, Gossypium hirsutum
  unsure (1)..(50): unsure at all Xaa locations
  Clone ID: LIB3120-017-Q1-K1-E11.pep
FLLVLRDIRSVMMDTSSILSFPLDKLYPSSIIPCFXRRNLEVLFLQRIGF

SEQ ID NO: 90899 - protein, 78 aa, Gossypium hirsutum
  unsure (1)..(78): unsure at all Xaa locations
  Clone ID: LIB3120-017-Q1-K1-E4.pep
SFRRGILMVKLLTIAHHPNQFFSTLNPSSLSFMQGSFIYFPXKAITTIVPHHQFHSHLCSSKKKAKFPAPHNFDKLKS

SEQ ID NO: 90900 - protein, 68 aa, Gossypium hirsutum
  Clone ID: LIB3120-017-Q1-K1-F7.pep
TLGRLINQFILVHSCIIYSLKEFNIRNYGNRIIDQLILVHIPINLATQIQYTLSKLEQVNERVGGRVG

SEQ ID NO: 90901 - protein, 123 aa, Gossypium hirsutum
  Clone ID: LIB3120-017-Q1-K1-H7.pep
RFKVSLQNRNRFISDSITFRVRNVLVLRNHERFNLYGGGRLRFKESKILANCTDNNDSNDSSSDKNESEGGQGVKQKQNTTNSGSSTNQRREKSGKSELWWSKGKKWQWQPIIQAQEIGVLLL

SEQ ID NO: 90902 - protein, 76 aa, Gossypium hirsutum
  Clone ID: LIB3120-018-Q1-K1-A10.pep
PTRPPTRPLTKVVVKDSLILKGPCPNCGTENVSFFGTILSISSGGTTNTLKCSNCETTLEYNAKTRLITLPEGSQA

SEQ ID NO: 90903 - protein, 53 aa, Gossypium hirsutum
  Clone ID: LIB3120-018-Q1-K1-A4.pep
KTAYLHWVSRRFNFKSSKHWGPNEKTPGVSYQQFLTIKAFFANAIAKNSKITF

SEQ ID NO: 90904 - protein, 86 aa, Gossypium hirsutum
  Clone ID: LIB3120-018-Q1-K1-A6.pep
FRLTHFSNIFTSLLQALKTCSQKSKINLGVELISEKAELRPIRVKKHQPTVKNPISFVRKCTSFEANSITALQTRKYRILSSIYSN

SEQ ID NO: 90905 - protein, 50 aa, Gossypium hirsutum
  Clone ID: LIB3120-018-Q1-K1-B7.pep
SNKDVTKALPRAGQIKNAKRRYDGNTLDYWEKNNTLNRSGWHESWSTLGD

SEQ ID NO: 90906 - protein, 79 aa, Gossypium hirsutum
  Clone ID: LIB3120-018-Q1-K1-B9.pep
MAIRLPRMVSSKKVPKGYFAVYVGESQKRFVIPVSFLNHPSFQDLLGKSEEEFGYSHPTGGLTIPCNEDTFLEVTSRMY

SEQ ID NO: 90907 - protein, 52 aa, Gossypium hirsutum
  Clone ID: LIB3120-018-Q1-K1-C10.pep
MDTKGRLVAGSHNRNEFVLINADEVARMTSCKKLNGQICQIRGDEIEISCDG

SEQ ID NO: 90908 - protein, 82 aa, Gossypium hirsutum
  Clone ID: LIB3120-018-Q1-K1-D10.pep
GKVHNSCELLLDIFSNGTAGVGVYNIYFQCLCQENKSPEALSHLKRTMKVCFKPNNVSYNTILSDFCKEKNINEAMELSDHF

SEQ ID NO: 90909 - protein, 133 aa, Gossypium hirsutum
  unsure (1)..(133): unsure at all Xaa locations
  Clone ID: LIB3120-018-Q1-K1-D12.pep
RKPINESSDSKHNEEEEDEDDDDVDADGDDDVNGKNKKTPSKIKKKRGEKPPKQPKWSCMDTCCWFIGCICIIWWLLLFLYNAMPASFPXYVTEAITGSLTEPACGKLKKERVETKHPMVVGPWIVTCGLELL

SEQ ID NO: 90910 - protein, 92 aa, Gossypium hirsutum
  unsure (1)..(92): unsure at all Xaa locations
  Clone ID: LIB3120-018-Q1-K1-E2.pep
MGKSTSCFKLITCGSDSAEKDDAIDAPENKRSSDKKGWSFRKRSERHRVLSNSVIQVTTTTGLKESQDSVGFEFQQQDVSVASEKTXTVQYT

SEQ ID NO: 90911 - protein, 62 aa, Gossypium hirsutum
  unsure (1)..(62): unsure at all Xaa locations
  Clone ID: LIB3120-018-Q1-K1-E7.pep
FRLLPACVPCAPRVGSASCFXPGAASAVLLLFGLWWCVRGGPRFLGRVPWLLLVXVXXXXLS

SEQ ID NO: 90912 - protein, 137 aa, Gossypium hirsutum
  Clone ID: LIB3120-018-Q1-K1-F10.pep
MGASNSKKKRKPLHGRRNVKVLMTDKMRLLQEGRVGRYYEKEVMVNACKEAEWLKERKKLKEEVKVLRKLVDEKEEKIKKMEEGGSSMVMVQKCDKGWPLLGTRYLLEQMKDERARRDEVVEKWKQLYLAIKTELDD

SEQ ID NO: 90913 - protein, 90 aa, Gossypium hirsutum
  Clone ID: LIB3120-018-Q1-K1-F12.pep
PRVRRKVKFLAEGNYGIRKVRGAVPHDLGTHDPWNEMNAYNIHDTSKWKDLNSKFVLQVYRDFAATGDMAFGIEVCPAVRTAMEYMEHID

SEQ ID NO: 90914 - protein, 60 aa, Gossypium hirsutum
  Clone ID: LIB3120-018-Q1-K1-F8.pep
REPNIDAGNAFSTTHAPRTREGHMDNCYWSPTTANGHECCAEVVTTASVAPDDHEHVDYT

SEQ ID NO: 90915 - protein, 81 aa, Gossypium hirsutum
  Clone ID: LIB3120-018-Q1-K1-G8.pep
ENRGAKRLTRDQSPDPAGAMGPIHVNSTIMSLDGRQPLKTEPEIKDDGKLHVTVRKSNASRSDIFSRRPQGLSSTTPRPSN

SEQ ID NO: 90916 - protein, 139 aa, Gossypium hirsutum
  unsure (1)..(139): unsure at all Xaa locations
  Clone ID: LIB3120-018-Q1-K2-A3.pep
RVRVDLINFPYMLLYILLHIHLQYLYDIVYSFSIPPHPFDTGVLNPRMFFTFLPSTLPTYFTSFYMHHESLFHALPAYNTXFIANNVARNDLKDAYATSNSXDDPANEAASLTSHVIIINHPSHIVYLYSPALDCHTSH

SEQ ID NO: 90917 - protein, 51 aa, Gossypium hirsutum
  Clone ID: LIB3120-018-Q1-K2-A6.pep
YIFTALLQGFITCFQSSKVNMLVEFISERAELWHIRVKKHHATVGNAISIV

SEQ ID NO: 90918 - protein, 62 aa, Gossypium hirsutum
  Clone ID: LIB3120-018-Q1-K2-A8.pep
RSKQISYRHSTGFHGLLSGARSYAISGTGSYELTAKLASTQLAASPLMSRGHKHPVIRKQQA

SEQ ID NO: 90919 - protein, 67 aa, Gossypium hirsutum
  Clone ID: LIB3120-018-Q1-K2-B6.pep
MAFPAIKPTNPDLEEYHEHPHKIWISLSSNNVKNLLKTCADLPRNAKDNRLKLYVPLRMPTIGLYIN

SEQ ID NO: 90920 - protein, 34 aa, Gossypium hirsutum
  Clone ID: LIB3120-018-Q1-K2-B7.pep
VQCDFIVQYPRSPVITLLRPLSVGQRREIVNLCS

SEQ ID NO: 90921 - protein, 63 aa, Gossypium hirsutum
  Clone ID: LIB3120-018-Q1-K2-E1.pep
TACAAQQSTGIRGTTLFLCRLYAKPNPTHTVGPLACSISSDLTVLNAHTKHSLVLTMIFIYSH

SEQ ID NO: 90922 - protein, 42 aa, Gossypium hirsutum
  Clone ID: LIB3120-018-Q1-K2-E2.pep
RKALGFRETSYDFKWIDDGVWSSYMDSDEWYKSVMIKFSKDV

SEQ ID NO: 90923 - protein, 108 aa, Gossypium hirsutum
  unsure (1)..(108): unsure at all Xaa locations
  Clone ID: LIB3120-018-Q1-K2-E7.pep
MASSGCFWHHHSLTTNGTSSSLPPSLRQFXNMNPNQLVVSKAHNQEYDGSLVSLRLTLTILIDAADVGSNVSPADTAYCEATNVFGKPISDTDFLPYNGNGFKLSIPS

SEQ ID NO: 90924 - protein, 63 aa, Gossypium hirsutum
  Clone ID: LIB3120-018-Q1-K2-F4.pep
IMFSESRKCLDLLLCMSELLSSSSLFERALFSVVSPILSEEVVVFSLYHFVSIKQLSFFFIVR

SEQ ID NO: 90925 - protein, 113 aa, Gossypium hirsutum
  unsure (1)..(113): unsure at all Xaa locations
  Clone ID: LIB3120-018-Q1-K2-G6.pep
IGINGFXGLDVQVARVGLQRDDIELVSSNHPFITTYYMTYMFKYDSVHGQCXHHELKAKDSNTLLFCXRPVTGFGIRNPXEIPWGENGAYYIVESTDVFTDKDKAFAHLKGGA

SEQ ID NO: 90926 - protein, 111 aa, Gossypium hirsutum
  unsure (1)..(111): unsure at all Xaa locations
  Clone ID: LIB3120-018-Q1-K2-G8.pep
YHLFKILISEQFPGTTGSIVSIHVHSNIMFLDRCKPLXTEATIKYYRLLHVTVRKCNTSTSYIFFRTSQSLFFTTPRPSNLTNAKIYSLLSSTNPTPRSSSLIHTDFYFMM

SEQ ID NO: 90927 - protein, 68 aa, Gossypium hirsutum
  unsure (1)..(68): unsure at all Xaa locations
  Clone ID: LIB3120-018-Q1-K2-H5.pep
KRLFIFNVTSTPPVKQGADKPLSLASKQILSYLNGILPGDYGFDPLXLSNPERPLRFIEPKWLSYCEI

SEQ ID NO: 90928 - protein, 146 aa, Gossypium hirsutum
  unsure (1)..(146): unsure at all Xaa locations
  Clone ID: LIB3120-019-Q1-K1-A11.pep
DEGFKVRVVSPDKDFFQILCPSLRLLRIAPRGYEMVSFGMEDFSKRYGDLKPSQFGDVVSLVGDRCDNIPGVDGIGNVHAVQLITKFGTLENLLKCVDEVEVDHIRKAXIAXADQAVLXAKLGMLRCDLSFYMVPFXTRDLTFNKP

SEQ ID NO: 90929 - protein, 76 aa, Gossypium hirsutum
  Clone ID: LIB3120-019-Q1-K1-A12.pep
VFNHRRLHQLLHRISLSNTFYRKKQEEGKEGYMAFHPNHLSQDLPLHHFTFQQQQTNQLPETTAPNWLNTALLRSQ

SEQ ID NO: 90930 - protein, 106 aa, Gossypium hirsutum
  unsure (1)..(106): unsure at all Xaa locations
  Clone ID: LIB3120-019-Q1-K1-A3.pep
AKRPVSVFVDGSVRHETNFFRAWAMXDGGIFIVRPLVVLLATKSLANRGXVLSTLSQECKLTITMSRWRSIKEMTLDHIATKMDSGYSHTVPTLKSPIYYGPATLS

SEQ ID NO: 90931 - protein, 117 aa, Gossypium hirsutum
  Clone ID: LIB3120-019-Q1-K1-A4.pep
PTRPHGAVLRLQFLKNHFLLASINKFGQLHYQDVTMGEMVGNFRTGLGRTDVMQVNPFNGVVALGHSSGTVTMWKPTSSVPLVKMLCHPGPVSSLAFHPNGHLMATSGKENKIKIWD

SEQ ID NO: 90932 - protein, 43 aa, Gossypium hirsutum
  Clone ID: LIB3120-019-Q1-K1-A6.pep
CAYDLDFCYCALIDAVRWTWDNFSMTRVSIWKVVGILCYSEVK

SEQ ID NO: 90933 - protein, 144 aa, Gossypium hirsutum
  unsure (1)..(144): unsure at all Xaa locations
  Clone ID: LIB3120-019-Q1-K1-C3.pep
ATXEYINALPTYKFKVKKNRDGDGREINLGASEGGVVTAGTEKERVISGEDAICCICLAKYANNDELRELPCSHFMHKECVDKWLKINASCPLCKSEVGENLLDAISGTSATILSSLSGPNDNHRRGEMRTGNSYTRCSFSYMF

SEQ ID NO: 90934 - protein, 95 aa, Gossypium hirsutum
  Clone ID: LIB3120-019-Q1-K1-D1.pep
MQHQQEVPAMEVNMNLLGKLESLGFPRARAVRGLHHTGNTTVEDAVNWLIDHENDADIDQMPLVVINLDLETPQPNDITEAIKLKEQELRDRVRM

SEQ ID NO: 90935 - protein, 79 aa, Gossypium hirsutum
  unsure (1)..(79): unsure at all Xaa locations
  Clone ID: LIB3120-019-Q1-K1-E4.pep
PRANGYHGSREFLPHLWGGPFXSHYPSYDKEQLDAHLTIIRNYTLPCTMELSWVQSALSLILNAPSDHLTLDENNPLPI

SEQ ID NO: 90936 - protein, 132 aa, Gossypium hirsutum
  Clone ID: LIB3120-019-Q1-K1-F2.pep
HASAKFHGQDGIVANFFSLRAWMGLSCVSLFGAQRVVGFLSFWHRREVRTTRAYVLPGHIFLGLYTYGLSKATAETGLVEKLTFLQSTRTAFKHCPETMIVNSLCLGLDLLCGIVILTADAPKYHALQTKLM

SEQ ID NO: 90937 - protein, 45 aa, Gossypium hirsutum
  Clone ID: LIB3120-019-Q1-K1-F7.pep
IDELLLLQKNHEIPLMVSFWLSLIPQRSFDALTSQRRFVLSSFLS

SEQ ID NO: 90938 - protein, 98 aa, Gossypium hirsutum
  Clone ID: LIB3120-019-Q1-K1-G7.pep
MNPGHWRNSGSSAMTRDVKWEMISYSKMHLSSKLINGKSICLDVNFSNAIVTNSCKCISKDNTCDPASHVFKLADSTRSRHEEQFFLHSDCIFDLPGK

SEQ ID NO: 90939 - protein, 123 aa, Gossypium hirsutum
  unsure (1)..(123): unsure at all Xaa locations
  Clone ID: LIB3120-019-Q1-K1-G9.pep
MSAFSITRKKTPFQKHREEEEAKKKREEDETARLYEQFVASFQGDNAPGSKAFVRGGTINPNEKFKPDSEGEKAKDGVSVPKKGSRYVPSFIPPPLSAKGKESEKKKEEERPXEKEKGKSRNI

SEQ ID NO: 90940 - protein, 120 aa, Gossypium hirsutum
  unsure (1)..(120): unsure at all Xaa locations
  Clone ID: LIB3120-019-Q1-K1-H11.pep
PRVRPRVRQALGVSNSSAASVPLSQQTSSALQSAQSKYVKVWEGNLSGQRXGQPVFITRLEGYRSASASETLAAHWPQTMQIVRLISQDHMNNKQYVGKADFLVFRAMNQHGFLGQLQEK

SEQ ID NO: 90941 - protein, 54 aa, Gossypium hirsutum
  Clone ID: LIB3120-019-Q1-K1-H3.pep
PRVRPRVRPRVRPRVRISLLAFNKLRACSRSLRLPCLVLFLSHSNIINISYGSS

SEQ ID NO: 90942 - protein, 87 aa, Gossypium hirsutum
  Clone ID: LIB3120-020-Q1-K1-A12.pep
MALSMTSSDTIATANATQANMDANMNGLKTGLDFAVARKANNDITNLASNGARLQCIQVWPPTWQNTGETNLYILDLTPEQTSKELD

SEQ ID NO: 90943 - protein, 144 aa, Gossypium hirsutum
  Clone ID: LIB3120-020-Q1-K1-A7.pep
EYMEKHEFVFDAVLNEEVSNDEVYRETVEPIVPIIFQRTKATCFAYGQTGSGKTYTMKPLPLKASRDILRLMHHTYRNQGFHLLVSFFEIYGGKLYDLLSDRKKLCMREDGKQQVCIVGLKEFRVLDVETIKELIEKGNATRST

SEQ ID NO: 90944 - protein, 77 aa, Gossypium hirsutum
  Clone ID: LIB3120-020-Q1-K1-B1.pep
IQLLAPVLSMTSSMTIATAIATDSNMHANMTGLKTGLEFAVAMTVNNNVTIDISYVGSNDCIQQWTHTGTNTVKTML

SEQ ID NO: 90945 - protein, 86 aa, Gossypium hirsutum
  Clone ID: LIB3120-020-Q1-K1-C3.pep
GHSYFNLVLLTNVVGAADAHAESIKGSKTGWLSTSRNWGQNWQSNSYLNGQSLTLQVTTSDGRTVSTYNVAPADCQFGQTFQGGQV

SEQ ID NO: 90946 - protein, 56 aa, Gossypium hirsutum
  Clone ID: LIB3120-020-Q1-K1-C5.pep
SVSILVNIVGGLNAVLYGSPRDDFSNHGHERSNCKHNDIFNMTLSKKVDHQVQRNV

SEQ ID NO: 90947 - protein, 100 aa, Gossypium hirsutum
  Clone ID: LIB3120-020-Q1-K1-D11.pep
TTCNRCNTNALICMKNAPKIPAKNFHALTRLDENRAKCQLALKAGVFYDQVSNMTIWGNHSTTQVPDFLNARIKGLPVKEVIKDHKWLEEEFTEKVQKRG

SEQ ID NO: 90948 - protein, 142 aa, Gossypium hirsutum
  unsure (1)..(142): unsure at all Xaa locations
  Clone ID: LIB3120-020-Q1-K1-E12.pep
DSFVHASAMIGDRVFDPFGFAKPGGYLQYDVDSLDQNLAKNVAGDIIGVISETAELKPTPFQPYTEVFGIQRCIECELIHGRWAMLGTLGAIAVEALTCVAWQDSWNVYLVEXASYLGLPLSFSLTTLILIEVLVIGYIEFQ

SEQ ID NO: 90949 - protein, 148 aa, Gossypium hirsutum
  Clone ID: LIB3120-020-Q1-K1-E4.pep
TDTDQMYTLISAVHALCNETILANDMYVGECQDSSNFNEELIQGNLLICSYSIRFVLGLSTIKQALETAKNLSAAGVVFYMDPYVIGFQLNPTPLEIPGIIIPSPDDSKILLQYYNSSLERDGLSRKIVRFGALASILRGLKANYSIT

SEQ ID NO: 90950 - protein, 135 aa, Gossypium hirsutum
  Clone ID: LIB3120-020-Q1-K1-E7.pep
PIRLPEPPSPTIGVPEIFEGGAYSVIRRAVIIGNGYPGSENQSIGLVRALGLYDKHVIYRVTRPRGGINEWLLWLPVSLHQKLDYLIQFIQIYSRGRNYVPLPLEHGGGSVGLASALEADVKQIVTMACQTFEKD

SEQ ID NO: 90951 - protein, 27 aa, Gossypium hirsutum
  Clone ID: LIB3120-020-Q1-K1-F12.pep
RVPLNNGWFKGTLQNLMPFPFTLGDGA

SEQ ID NO: 90952 - protein, 58 aa, Gossypium hirsutum
  Clone ID: LIB3120-020-Q1-K1-F2.pep
FNRREKKREVPAYAMAGTAKITGALLGGQGHHRLSGMTRCRRTRLKAHQNIMSPMDTL

SEQ ID NO: 90953 - protein, 142 aa, Gossypium hirsutum
  Clone ID: LIB3120-020-Q1-K1-F4.pep
MSFSSLTSACSSLGVKSSSLIVQLGFQTTENNKFPGAFVSSPKRTKIKKFSIACSSTDPLLVKAARGDPVSRPPAWMMRQAGRYMAVYRKLAEKHPSFRERSETTDLIVEISLQPWEAFRPDGVIIFSDILTSLPAFGVPFD

SEQ ID NO: 90954 - protein, 135 aa, Gossypium hirsutum
  Clone ID: LIB3120-020-Q1-K1-F5.pep
HASAHASASIRLRTACEKLKRVLSANPEAPLNIECLMDEKDVRGFIKREEFEQISAPILRRVKRPLEKALADTGLAVENVHMVEVVGSTSRVPAMLKILTEFFGKEPRRTMNASECVARGCALKCAILKSTFKVR

SEQ ID NO: 90955 - protein, 142 aa, Gossypium hirsutum
  Clone ID: LIB3120-020-Q1-K1-F7.pep
GRLGDCWFLSAVAVLTEGLQISEVMITPEYNEEGIYTVRFCIQGEWVPVVVDDWIPCESPGKPAFATSRKGNELWVSILEKAYAKLHGSYEALEGGLVQDALVDLTGGAGEEIDMRSPQAQIDLASGRLWSQLVRVKQEGFL

SEQ ID NO: 90956 - protein, 78 aa, Gossypium hirsutum
  Clone ID: LIB3120-020-Q1-K1-G3.pep
NTVQHSPDVQKRLNELAHICMGLVCMLSWPIYNGEHLRAIAAALTHSVHIIRMTLIRPGLSYDEPTAKATDYYDAYKE

SEQ ID NO: 90957 - protein, 114 aa, Gossypium hirsutum
  unsure (1)..(114): unsure at all Xaa locations
  Clone ID: LIB3120-020-Q1-K1-G5.pep
AQGRVPVSXDCGVPRVTGVSKASSVGASGILIVRPVVFSLSVEGESCFRKVLSMLRYEFMLTMALRLCRSLHEMTRYHIPTVWVSPHPRPAPILCMPLSYGPATLAYPYSIITY

SEQ ID NO: 90958 - protein, 52 aa, Gossypium hirsutum
  Clone ID: LIB3120-020-Q1-K1-G6.pep
ACMYSVRDYACGPKPTHISIVSLHWHETRPAHSPILRRDYFYIHVDYTLQTC

SEQ ID NO: 90959 - protein, 143 aa, Gossypium hirsutum
  Clone ID: LIB3120-021-Q1-K1-A12.pep
LESQNLEADLVLWTVGSKPLRPALEPCDKPHELPLNARGQAETDETLRVKGHPRIFALGDSASLRDSTGKLLPATAQVAFQQADFAGWNLWAAINHRPLLPFRFQNLGEMMTLRRNDAAISPSFADGLTLEGPIGHAARKLAY

SEQ ID NO: 90960 - protein, 40 aa, Gossypium hirsutum
  Clone ID: LIB3120-021-Q1-K1-A5.pep
MPPTYMPIMLRDPCPSFTSYNKAFLSATVAYLHKTTSGTA

SEQ ID NO: 90961 - protein, 134 aa, Gossypium hirsutum
  Clone ID: LIB3120-021-Q1-K1-B4.pep
FIGQAWSGVPWFEAGADPGAIAPFSFGSLLGTQLLLMGWVESKRWVDFFNPKSQSVEWATPWSKTAENFANATGQQGYPGGKFFDPLGLAGTIRNGVYIPDYAKLETLQPAEITHARIAMLAMLIFYFEAGQGK

SEQ ID NO: 90962 - protein, 145 aa, Gossypium hirsutum
  unsure (1)..(145): unsure at all Xaa locations
  Clone ID: LIB3120-021-Q1-K1-B6.pep
MDRNEGQGNVKVGTLAVPSRRMTCIQPLWDHDSYHYTWGPHDVHNQFGIEWDIINDLRIDMARLEQRMNGLQKMLGACMEMQLDLQXSIQQERSGGLNRSAGSRGMIDDSSFKDAHNWDNVKKGLXCICSKGNIASLLYTCGHMC

SEQ ID NO: 90963 - protein, 118 aa, Gossypium hirsutum
  unsure (1)..(118): unsure at all Xaa locations
  Clone ID: LIB3120-021-Q1-K1-B7.pep
MARYHRTITVFSPDGRLFQGEYAXLQAAPKGNAADSVHCTDINQLGVEIKSERKLQDSLSVYKMANLEHHSALACAGLKDDSLVLINRAQIECLSHSLTAEDSSSGDCITKYSSGLQY

SEQ ID NO: 90964 - protein, 91 aa, Gossypium hirsutum
  unsure (1)..(91): unsure at all Xaa locations
  Clone ID: LIB3120-021-Q1-K1-B9.pep
MGYSVISSATIGTAYPAHANMVDPITGLKSASAFPVTRKANNDITSLASNGRRLQCLLVWSSTGXNKFXTLSYLPDLTPVHLSKEVDYLFR

SEQ ID NO: 90965 - protein, 70 aa, Gossypium hirsutum
  Clone ID: LIB3120-021-Q1-K1-C4.pep
PCISINGMSFFMVFRFKKCGEMLNHYVHHPDILPNLEVVLSSPVWCKITIQDLVFSLIIHPVYQIPFSLY

SEQ ID NO: 90966 - protein, 79 aa, Gossypium hirsutum
  Clone ID: LIB3120-021-Q1-K1-C5.pep
YAACRLHYQGSIPPTAWFQTTILTQLPAPKLKCIWDTTCIKCALSKQQAGGVRKTPHESHYITNSGILANGLITDEDSS

SEQ ID NO: 90967 - protein, 89 aa, Gossypium hirsutum
  unsure (1)..(89): unsure at all Xaa locations
  Clone ID: LIB3120-021-Q1-K1-C6.pep
MALGLVFNTLQELIQLHFIALFKKGDVSKDLTSGTVGGAIQFIVGHPCDTIKVKLHKXPCSLTGQPPKYAGAMDAVKHTLTAEGPMRLY

SEQ ID NO: 90968 - protein, 98 aa, Gossypium hirsutum
  unsure (1)..(98): unsure at all Xaa locations
  Clone ID: LIB3120-021-Q1-K1-D1.pep
TEYMATRWYRSHKLRGSFYFNYTPAVDIWSTRYIYAYTITGKPLFPVKNVEEQLEHGNHIVGYSFGGTIARDYNEKPXNYFDNLRKKKPIPFLKKFPN

SEQ ID NO: 90969 - protein, 41 aa, Gossypium hirsutum
  Clone ID: LIB3120-021-Q1-K1-D10.pep
PYKPSLRVSKVLALNPLGLVDQRSTCHISTGNRSQLSIWLC

SEQ ID NO: 90970 - protein, 43 aa, Gossypium hirsutum
  Clone ID: LIB3120-021-Q1-K1-E1.pep
NDSYEIDRASNISSPALKMWLTILYSYSHKCPEGSRFHSYEWP

SEQ ID NO: 90971 - protein, 141 aa, Gossypium hirsutum
  unsure (1)..(141): unsure at all Xaa locations
  Clone ID: LIB3120-021-Q1-K1-E12.pep
STRPAGLAVAQQVSQAGLXVWSIDPSPKLIWPNNYGVWVDEFEAMDLLDCLDTTWSGAVVYIDDGKKKDLDRPYGRVNRKQLKSKMLLKCISNGVKFHQAKVIKVIHEESKSLLVCNDGVTVQATVVLDATGFLRCLAQYD

SEQ ID NO: 90972 - protein, 118 aa, Gossypium hirsutum
  unsure (1)..(118): unsure at all Xaa locations
  Clone ID: LIB3120-021-Q1-K1-E2.pep
RPRVRPNRWYKLVTADPNLVGPSRTIRVTVWPTNLEAPAWSSISXLLCXPRGSFLLEDYHLVENLAXYHLTAHTLTTLSYKXDKARGFFTVTHDISQLTSSAMSRATGKHTPLIVRFS

SEQ ID NO: 90973 - protein, 144 aa, Gossypium hirsutum
  unsure (1)..(144): unsure at all Xaa locations
  Clone ID: LIB3120-021-Q1-K1-E3.pep
ALLLSQAFISGVHGTGCTIEDRSHDVLWAVVVYNAGVFTHITTRLTLRRGESISIIAPSSWGGRFWGRTHCSQESAGKFSCXTVDCCSRKLECTGNSAASPATLAEFTLDGAGGLDFFDESLVDGYNDPILVVSHGGTGQNCTY

SEQ ID NO: 90974 - protein, 129 aa, Gossypium hirsutum
  Clone ID: LIB3120-021-Q1-K1-E5.pep
NHDDFQVWREEHSGKFSVRSVYKLLQDANMDPSAYLIQFETKNFYRKLWNLHLLSKITITFWHISWNFIPTLKNLRLKRVASDISCPRCRNVEKDSNHVFKQCPEGSRFHSSSMRTRGDIHIEEHLEKI

SEQ ID NO: 90975 - protein, 62 aa, Gossypium hirsutum
  Clone ID: LIB3120-021-Q1-K1-F2.pep
RPLQMVSLSRNPRPFLRKRNQTQLSFCFNRLFCMVNARLTYFVFYMISLLFFGTYKLILSFF

SEQ ID NO: 90976 - protein, 55 aa, Gossypium hirsutum
  Clone ID: LIB3120-021-Q1-K1-F7.pep
TSRVNAPLPHNLQFHYVGRIIVQPCSKKIKYDVMTASQFWHVMTMFACLPHFYLG

SEQ ID NO: 90977 - protein, 58 aa, Gossypium hirsutum
  Clone ID: LIB3120-021-Q1-K1-G12.pep
RLISISGSLLLFVLIFVEKRACIFICLVVSIYFMINSYLILNFLIIYFFSFLLLAFYS

SEQ ID NO: 90978 - protein, 47 aa, Gossypium hirsutum
  Clone ID: LIB3120-021-Q1-K1-G3.pep
AGQCTPCKFPEIHHRYLGLVCSPSILKQTTHIKFPEKRQAFERRSVI

SEQ ID NO: 90979 - protein, 107 aa, Gossypium hirsutum
  unsure (1)..(107): unsure at all Xaa locations
  Clone ID: LIB3120-021-Q1-K1-H12.pep
QAHGANVNFLSEPIRDGTSGAVIGLTTRDAHRTMLAYQGTSSAIHYDSCLTGIVSKTDICGVDGYXFELPDTIKTIIRACEQARMSAALIAATAXDVYCIVRHYEDY

SEQ ID NO: 90980 - protein, 121 aa, Gossypium hirsutum
  unsure (1)..(121): unsure at all Xaa locations
  Clone ID: LIB3120-021-Q1-K1-H3.pep
MAVNTLMSCGIGTTFPSLHSSSKSKLSGAAVSLPTAVGTNVGHRASMXADWMPGQPTPPYLDASPPADFGTDPLRLGEGPENLETFKESELIHCIWAMLAGSGILVPEALGLGNWVKAHEW

SEQ ID NO: 90981 - protein, 122 aa, Gossypium hirsutum
  Clone ID: LIB3120-021-Q1-K1-H5.pep
MELLALHISPTLARECFLTASNNNSCVFPRYVRNRHGKSRFRFQARKGGSRSWNPNKISRLDLIQQVLERNNLIEDSQEEDEDEISGDDSSFLSLSEKPDRNMALLDEYELEELDFTSPTNH

SEQ ID NO: 90982 - protein, 76 aa, Gossypium hirsutum
  Clone ID: LIB3120-022-Q1-K1-A10.pep
LGFFSSLLLFFNIIITLFVLQTHSHCVPILLLRKKIMDCFDLENPFTSLDNQESDIISALFSSESDHMPFHNYCLS

SEQ ID NO: 90983 - protein, 50 aa, Gossypium hirsutum
  unsure (1)..(50): unsure at all Xaa locations
  Clone ID: LIB3120-022-Q1-K1-A12.pep
HTRXTLCHTLAIETSHTLCTMSSLIPAWALHMNPNIRLLPSNQHECGGSL

SEQ ID NO: 90984 - protein, 129 aa, Gossypium hirsutum
  Clone ID: LIB3120-022-Q1-K1-A2.pep
SVSLNWVRPSFTKKANYVTHSTELAPPSAFSSQNSLTYTKETISNEENNCKRRLLLLGVGAITANLLPANSLLAEEIPQNYRAFVDIPDGYSYYYPSDWREFDFRGHDSAFKDRFLQLQNVRVRFIPTD

SEQ ID NO: 90985 - protein, 49 aa, Gossypium hirsutum
  Clone ID: LIB3120-022-Q1-K1-A4.pep
SRAWESLVGSICCCSSVFQKLLGFLVLSHYWAPLGRLGIGSGIKLGVWV

SEQ ID NO: 90986 - protein, 44 aa, Gossypium hirsutum
  Clone ID: LIB3120-022-Q1-K1-A7.pep
AATPVSKNRTRQAALSVKRKRYRRMTLTETRREYAYYQHDIYSS

SEQ ID NO: 90987 - protein, 39 aa, Gossypium hirsutum
  Clone ID: LIB3120-022-Q1-K1-B12.pep
NDAVSEHGRGHTIGTRFNSRLNRSTFSIIFSRHFFHPIH

SEQ ID NO: 90988 - protein, 116 aa, Gossypium hirsutum
  Clone ID: LIB3120-022-Q1-K1-B7.pep
DTLDAFLFYWIDKGETDPIILPKIGGSGAALFDYARGGPQFGADGLLIGPPLAPVMGGFAGPDTNSGIGDLRQAKSRLGLSYAKRKDGKESLFGDDSKVTLEEVQVFCSPHIASLY

SEQ ID NO: 90989 - protein, 75 aa, Gossypium hirsutum
  unsure (1)..(75): unsure at all Xaa locations
  Clone ID: LIB3120-022-Q1-K1-C10.pep
TRTERGIELPAGDWLPSRARDVLSRRWTRNGLIPLPTYVTXYKIGDYVDVQVNGADHKGMPHKLYHGRTGRAWNI

SEQ ID NO: 90990 - protein, 43 aa, Gossypium hirsutum
  Clone ID: LIB3120-022-Q1-K1-C4.pep
GIPPLPLLASRLKRSCKLNFNVRLHKTTNVNQWDHIDARIIQG

SEQ ID NO: 90991 - protein, 93 aa, Gossypium hirsutum
  Clone ID: LIB3120-022-Q1-K1-C5.pep
MSQCVPSWDLDDNHVTARHSLRSNSNSTAPDVHMSDYEVAELTWENGQLAMHGLGPARVPAKPLVSNPPSKYTWDKPRANGTLESIVNQATRV

SEQ ID NO: 90992 - protein, 75 aa, Gossypium hirsutum
  Clone ID: LIB3120-022-Q1-K1-C7.pep
RSWHHHGPGRYARSSKAWLMPSACILMLLGSAALSILTSRTRLRPVPMHPNSLLTLMRHLLLTSRVHAPEEPQSG

SEQ ID NO: 90993 - protein, 124 aa, Gossypium hirsutum
  Clone ID: LIB3120-022-Q1-K1-C8.pep
RASVYAKRAVQAAVSQQKRATSSVEADITGASSLHVLPKQEVSTAISKNYTFKKGDRVKFVGTTSPSTLSSLQPALREPTIGVRGKVVLAFEENGSSKIGVRFDRSIPEGNDLGGLCEEDHGFF

SEQ ID NO: 90994 - protein, 36 aa, Gossypium hirsutum
  Clone ID: LIB3120-022-Q1-K1-C9.pep
DTTESNTPKHGDNHTRTWRADTYYWLLTTQCNTHIL

SEQ ID NO: 90995 - protein, 49 aa, Gossypium hirsutum
  unsure (1)..(49): unsure at all Xaa locations
  Clone ID: LIB3120-022-Q1-K1-D1.pep
XHXTVQRKYSVRIRNLQNTVLYSLPFSNYIYKYMKHMNKTHQTPDLGNL

SEQ ID NO: 90996 - protein, 110 aa, Gossypium hirsutum
  Clone ID: LIB3120-022-Q1-K1-D10.pep
PTRPLQQLFQQSKVVDEETMNVGIDFPRDFANSRLKETMILTHRFSKNIFRTKELFACRTIQMLISGLVLGSIFHNAKDDLSGAEEKVGLFAFILTFLLSCTTEALPIFL

SEQ ID NO: 90997 - protein, 47 aa, Gossypium hirsutum
  Clone ID: LIB3120-022-Q1-K1-D11.pep
PKPNTNHKIHQYQKMAGISPKIEGCNIKTKASKDSNHLKFKKTSDLL

SEQ ID NO: 90998 - protein, 68 aa, Gossypium hirsutum
  Clone ID: LIB3120-022-Q1-K1-D2.pep
HVISQLLKVCRFHMFMMIECSLRLERLDLCHHEWSDMLSSWLWCIKLRYTHACRQCHGIDSAALIYGW

SEQ ID NO: 90999 - protein, 91 aa, Gossypium hirsutum
  unsure (1)..(91): unsure at all Xaa locations
  Clone ID: LIB3120-022-Q1-K1-E1.pep
SSSLFWPIESPHVDPFPMRHRTLQQACRDPSQSPLSSKEKPRLRLTQQSLRCRRVMSRRMRHQSEREXEDQLVQPLCFKEVLTGVSRAKSP

SEQ ID NO: 91000 - protein, 47 aa, Gossypium hirsutum
  Clone ID: LIB3120-022-Q1-K1-E10.pep
CKRGPSYASTASVTPLIGCCRDKNRDQISTIDTHCLTTQTTQLPGFY

SEQ ID NO: 91001 - protein, 86 aa, Gossypium hirsutum
  Clone ID: LIB3120-022-Q1-K1-E8.pep
DPCREANNVVTMYHAYTPGVKPIITNKTFTAVEIFNHPELDAAEPRDGNEHDYTLIQKDTMWPDRWPDGRLLGTHGADYSSAGADK

SEQ ID NO: 91002 - protein, 129 aa, Gossypium hirsutum
  Clone ID: LIB3120-022-Q1-K1-F10.pep
MKMSWFSLIPLLLSVPINNLSEAIHGHKLPSAVASGTVYWDICFQQDFSKAHHFISSASAARECEDGDSRPSLRQDAKTNAQGEIIARLPFSVTKHVKKVKGCSLKLVRSSEPYCAVASSSTLSSLHLK

SEQ ID NO: 91003 - protein, 84 aa, Gossypium hirsutum
  Clone ID: LIB3120-022-Q1-K1-F4.pep
LRSDFNVIGFGLIGWIAPSSIPAINGKSLTGLLFESIGTELAHFPTPPPPTSQFWLWLVLWHLGLFITLTFGQIGFKGRTEDYF

SEQ ID NO: 91004 - protein, 111 aa, Gossypium hirsutum
  Clone ID: LIB3120-022-Q1-K1-F5.pep
MGVPAFYRWLAEKYPLIVVDVIEEEPVVIEGVSIPVDTSKPNPNKLEYDNLYLDMNGIIHPCFHPEDRPSPTTFDEVFQCIFDYIDRLFVMVRPRKLLYMAIDGVAPRAKM

SEQ ID NO: 91005 - protein, 82 aa, Gossypium hirsutum
  Clone ID: LIB3120-022-Q1-K1-F6.pep
YGLTLNIYPQKLSLPYHNLFFFSFKTFLIRKRNEKKLYIVSKPTIDKYSCLYPPQRPFPSPPLSYNLCVCLLSFLLSSAFSY

SEQ ID NO: 91006 - protein, 113 aa, Gossypium hirsutum
  Clone ID: LIB3120-022-Q1-K1-F9.pep
FYRWVGPSILIHYFQLLLAPNKFLKSWTFKFIFLSRVTFHHQLVHLDFKPLMTYCVFGGTLKTKTFFPSVIISVWDRGLTKTFSCALVLKYPVPVDTLLVVCNRFKVGNKDLV

SEQ ID NO: 91007 - protein, 61 aa, Gossypium hirsutum
  Clone ID: LIB3120-022-Q1-K1-G10.pep
YTSLLLVACGHTLHRSGIPCVLVDMPLSLIRPGKLMPSLGGGCSPWLDHRLHGGCSLPAIG

SEQ ID NO: 91008 - protein, 118 aa, Gossypium hirsutum
  Clone ID: LIB3120-022-Q1-K1-G7.pep
TQLLISSRNLEFFTNGYRYLIQIVPAAVVAPMYFSGKIEFGVINQSVSAFSHILGDVSLVVYQFQAISAFSAIIDRLGEFDDILDSSRSKSLSDPMEYINLTYSHVRGSQVLDSNGST

SEQ ID NO: 91009 - protein, 44 aa, Gossypium hirsutum
  unsure (1)..(44): unsure at all Xaa locations
  Clone ID: LIB3120-022-Q1-K1-H10.pep
KTNVPLMSSQSVSXAFRLEPVGSRLSCSLLTDLKDLTLKCFVAS

SEQ ID NO: 91010 - protein, 51 aa, Gossypium hirsutum
  Clone ID: LIB3120-022-Q1-K1-H11.pep
NFYLSAPRFLNGKKHPFLEVCFQKSTCIYLIYVLSTYDVFIPYKIREKKNC

SEQ ID NO: 91011 - protein, 94 aa, Gossypium hirsutum
  unsure (1)..(94): unsure at all Xaa locations
  Clone ID: LIB3120-022-Q1-K1-H4.pep
AQLPGDMVYIKATSEKSAEMVTDQGAIYVTSNRGYNWRAAVQETVSATLNRTVSRGINGGRYYTGTFXTVNRSXDGRYVAVSSRGNXYLTWEPG

SEQ ID NO: 91012 - protein, 83 aa, Gossypium hirsutum
  Clone ID: LIB3120-022-Q1-K1-H6.pep
SGPASSGGGAAYIICSNLMVMPVYICVHNTTAPERLHITSVPHNILIKSLMLANNPAGYSSDDVKADDEGASRGLLTKTWIGA

SEQ ID NO: 91013 - protein, 61 aa, Gossypium hirsutum
  unsure (1)..(61): unsure at all Xaa locations
  Clone ID: LIB3120-022-Q1-K1-H7.pep
PASALTICTLSPPNXGDQSTYPDYYTQITTSEHTYEMIDKMLRMYDKAMINTRSMHVTEYI

SEQ ID NO: 91014 - protein, 68 aa, Gossypium hirsutum
  Clone ID: LIB3120-022-Q1-K1-H9.pep
RITFVIGTHKPSVEILSFAPEGLRVLGAGTISLTTIMETAISGCIPQDVRLALVDHSYVLARLTNGML

SEQ ID NO: 91015 - protein, 104 aa, Gossypium hirsutum
  Clone ID: LIB3120-023-Q1-K1-A1.pep
PTRPGTFNDLDKLSMANIEERSPRLWACLIAVYWVSLVTYVLSWKAYKHVSALRANALMSPEVKPEQFAVLVRDLPDVTPGQTSKEQVDSYFKSIYPDTFYRSL

SEQ ID NO: 91016 - protein, 75 aa, Gossypium hirsutum
  Clone ID: LIB3120-023-Q1-K1-A3.pep
NATGRLWWWSDHHRWSLYKVGKFPRANSLRVPNVIVVVVMIVESRSCGILLNFTHFSGRKIEVYIYEYFRRTSLP

SEQ ID NO: 91017 - protein, 47 aa, Gossypium hirsutum
  Clone ID: LIB3120-023-Q1-K1-A4.pep
YASIIANLVLNFCSTDLDLTARAGIFFVARFRDVHPFIWDHIRFDVY

SEQ ID NO: 91018 - protein, 71 aa, Gossypium hirsutum
  Clone ID: LIB3120-023-Q1-K1-A6.pep
SFPYLSINGIDIGRQHLIKSQSISSRASWRSRWRLEGKLRSGHTPFLFFPPICCTVRYDLLFLANSKIRLN

SEQ ID NO: 91019 - protein, 50 aa, Gossypium hirsutum
  Clone ID: LIB3120-023-Q1-K1-B8.pep
GHWTNCDGRFCNWKKVNWCIHRSPKSLLGLQWVALPLKEAHLVASQQERK

SEQ ID NO: 91020 - protein, 65 aa, Gossypium hirsutum
  Clone ID: LIB3120-023-Q1-K1-C12.pep
SLGTFLRQTKLRSILMAASSCDSLSSSSSLICSASSSLRFCFVDRSLISKLSSHLQILSQPFTCY

SEQ ID NO: 91021 - protein, 99 aa, Gossypium hirsutum
  Clone ID: LIB3120-023-Q1-K1-C3.pep
PRIRNFRTTLLLIKNACFKHGDKDALRACVKAIKYCSTERGGYLQDFAHDKLNELGDELLDKLKSATKEVIDGEDDDSLLGNFKRLYELPLSRPISLDE

SEQ ID NO: 91022 - protein, 82 aa, Gossypium hirsutum
  Clone ID: LIB3120-023-Q1-K1-C7.pep
LKKSFKYIFWWDSWHGDGELDKTQTDENILDHHSCTEHIYMRLPGSNTSPNQLTTIWRPLSLSFTLTLLHIPFPISNNGYYI

SEQ ID NO: 91023 - protein, 75 aa, Gossypium hirsutum
  unsure (1)..(75): unsure at all Xaa locations
  Clone ID: LIB3120-023-Q1-K1-C8.pep
PNPTFFKHLPHNISILYINTPVISPHVGXATAPSTSLVNITRLLHKTTCKTFPNILTRSGVLKTYEATLLKRLTI

SEQ ID NO: 91024 - protein, 94 aa, Gossypium hirsutum
  Clone ID: LIB3120-023-Q1-K1-C9.pep
VDHTSYSSRRKTWCSRLTRWDINPYTYTLSTRLAISTSCPSTFIDAKKCLAQKGIGVSKTVALLIPPEWGLAPFNYCVALLTHHRDSLFTILMD

SEQ ID NO: 91025 - protein, 49 aa, Gossypium hirsutum
  Clone ID: LIB3120-023-Q1-K1-D11.pep
LLLAARRMILIYTPTVKSAGASACWYTTQISMRLSTDYLSAGFLSERSS

SEQ ID NO: 91026 - protein, 64 aa, Gossypium hirsutum
  Clone ID: LIB3120-023-Q1-K1-D3.pep
LLESPIASPVSGLLYVMLKMFFLYKYSGLVLSMLEDSNRFPIVPVGCSNVKAQRIEPRLWRMNG

SEQ ID NO: 91027 - protein, 73 aa, Gossypium hirsutum
  unsure (1)..(73): unsure at all Xaa locations
  Clone ID: LIB3120-023-Q1-K1-D5.pep
LLKKVFSLFKLFPMKAELVAEVRVVDPLKLKGVWLRARMVDRLNAXAXWRVKLVKCYESIGSDWIGCVGRPGP

SEQ ID NO: 91028 - protein, 73 aa, Gossypium hirsutum
  Clone ID: LIB3120-023-Q1-K1-D7.pep
IVKEVSAYLSKLGCDPQNIPFTPISGFEGYNIIDRSTNLDWYNGPTLLEALYHITDPKMPSDKPLLLPLQDFY

SEQ ID NO: 91029 - protein, 48 aa, Gossypium hirsutum
  Clone ID: LIB3120-023-Q1-K1-D8.pep
QCALRCSLLALPIHSKTLVSPNLMLSFLSHSIHAFPLISIPSSLLIHM

SEQ ID NO: 91030 - protein, 46 aa, Gossypium hirsutum
  Clone ID: LIB3120-023-Q1-K1-D9.pep
VIHLFAGVGYCMLSIAVCLPYRTAIDSNLLVDLIYCSSMSCTCSCN

SEQ ID NO: 91031 - protein, 104 aa, Gossypium hirsutum
  unsure (1)..(104): unsure at all Xaa locations
  Clone ID: LIB3120-023-Q1-K1-E2.pep
RFCKTCSCCICYKVDDNKDPSRWLICSSEPTFLGNSCGMSRHLECALKHEKSGIGXDKQHAVLDGSFYXVACGKANDLLGCWRKQLMAAXDTRRGDILCYRVSL

SEQ ID NO: 91032 - protein, 31 aa, Gossypium hirsutum
  Clone ID: LIB3120-023-Q1-K1-E7.pep
CQIQVLPSFHFFQRFNRFHLSVDLRVEFICL

SEQ ID NO: 91033 - protein, 86 aa, Gossypium hirsutum
  Clone ID: LIB3120-023-Q1-K1-E8.pep
TQTITSSNSKRSGGNQSSFSSHYVENNDKQWTLLLIPMFAGANIAVYVEIMYVNNLPNNTHRFECLLSGSEPLILSFYHEKENPLF

SEQ ID NO: 91034 - protein, 135 aa, Gossypium hirsutum
  Clone ID: LIB3120-023-Q1-K1-F2.pep
MASGDLERGGGSSVKNRGNSYNQSSSSSYYVENNEKQWTSWLVPMFVVANIAVFVVVMYVNNCPKNNQGFEGGCVARFLGRLSFEPLKENPLFGPSSNPLEKWGALNWEKVVLGNQPWRLITGIGLNAGVINLLA

SEQ ID NO: 91035 - protein, 94 aa, Gossypium hirsutum
  Clone ID: LIB3120-023-Q1-K1-F3.pep
AGKTISCSVLLTLISCFSLQFCAALDTITPSKPIKDPESIISHSGVFRLGFFTFANSSNRYVGILYHQIPLQTVVWVANRNKPLKDSSGILNIS

SEQ ID NO: 91036 - protein, 53 aa, Gossypium hirsutum
  Clone ID: LIB3120-023-Q1-K1-F5.pep
VLEVTSLASSGMSLLVLNEIHVKFCLMLALTSYNSVTKSGLTGLLSFIAILFC

SEQ ID NO: 91037 - protein, 30 aa, Gossypium hirsutum
  Clone ID: LIB3120-023-Q1-K1-F7.pep
HTLLHTHVQQSLTNRDKWITKAGPGLDMQT

SEQ ID NO: 91038 - protein, 43 aa, Gossypium hirsutum
  Clone ID: LIB3120-023-Q1-K1-G5.pep
GIHLIHSNNPCFCSIFPVLGDTRRGFKQDCYFIRYAWVGVALP

SEQ ID NO: 91039 - protein, 45 aa, Gossypium hirsutum
  Clone ID: LIB3120-023-Q1-K1-G8.pep
RLWLMLPYYFLWKTAYVSLYNICINTYSREPETNFCFLWAHCMKG

SEQ ID NO: 91040 - protein, 46 aa, Gossypium hirsutum
  Clone ID: LIB3120-023-Q1-K1-G9.pep
PPTSAAPLPQLHSTCFPILKQFKIFRRELTICSNSSLLLSLRFLSP

SEQ ID NO: 91041 - protein, 96 aa, Gossypium hirsutum
  Clone ID: LIB3120-023-Q1-K1-H12.pep
FLGQETPLTSLKAIDQIDLLREQQKILSGEVALHSSALKRLSEEAIRNPQNEQQIQVEMNKLSDEIRGKNEQIALLEKQIAESILALPNKMEKSEI

SEQ ID NO: 91042 - protein, 85 aa, Gossypium hirsutum
  unsure (1)..(85): unsure at all Xaa locations
  Clone ID: LIB3120-023-Q1-K1-H8.pep
SATFFCGDVSEEARNLVKVTKESLDKAISICAQGVEFKKIGKTIHDHADNFGYGVVRQFVGHGVGRVFHADPVALHFXNNDGGRM

SEQ ID NO: 91043 - protein, 134 aa, Gossypium hirsutum
  unsure (1)..(134): unsure at all Xaa locations
  Clone ID: LIB3120-024-Q1-K1-A8.pep
KKEAANGKEGSKPPASEEAPSKVTKQRVEAAKQYIENHYKKQMKSLQERKERRDILEKKLADAEVSEEEQNNLLKCFEKKETEYMRLQRHKMGADDFEPLTMIGKGXAFGEVRICKEKATGHVYAMKKAKKSEM

SEQ ID NO: 91044 - protein, 140 aa, Gossypium hirsutum
  unsure (1)..(140): unsure at all Xaa locations
  Clone ID: LIB3120-024-Q1-K1-A9.pep
AETTKDGIKVRVIAGEALGTKSPIYTRTPTMYLDFTLDPGTHLQQPIPKPWNAFIYILEGEGIFGQSKSSATAHHLLLLGHGDGLEAWNKSTKLLRFILVGGEPLDEPLVQFGPFVMNTQEEIDQTIXDFENYIHGFEKA

SEQ ID NO: 91045 - protein, 95 aa, Gossypium hirsutum
  Clone ID: LIB3120-024-Q1-K1-B11.pep
MEDYTLSIPLLAAPGGALTTTGAATSCATKKDDENGVFSSGSSIIYRLLLVILIGTISIWANHEASKGFKVTIINAAAKESPAGRRFDLFYVSND

SEQ ID NO: 91046 - protein, 53 aa, Gossypium hirsutum
  unsure (1)..(53): unsure at all Xaa locations
  Clone ID: LIB3120-024-Q1-K1-B9.pep
DSPRVDYFLFMISQSNLELPEMLXAQTIHSCVPRNVFLMEDLIFFRTRVRTCV

SEQ ID NO: 91047 - protein, 71 aa, Gossypium hirsutum
  Clone ID: LIB3120-024-Q1-K1-C2.pep
CCLNIPLYLKMKQSISTKVHVSKKKKRGGVYTACKRVKSCNRSTQEAVPPCNIHSIHCIMYQRHPGNILEH

SEQ ID NO: 91048 - protein, 67 aa, Gossypium hirsutum
  unsure (1)..(67): unsure at all Xaa locations
  Clone ID: LIB3120-024-Q1-K1-C9.pep
MKRLFHLDSVRRIISGFVENEKSMAVFNGGDFREVSSSAMQRVAKTVDAYLAEIATVVELXIXKFNG

SEQ ID NO: 91049 - protein, 81 aa, Gossypium hirsutum
  Clone ID: LIB3120-024-Q1-K1-D6.pep
MKMCRLFLQLFLGLVLLPGRAEPDPDPLQDYCIADTKSPLYLNGAPCLNPTLALSSHFTTSALAKPGDTKANQFGFSVTLT

SEQ ID NO: 91050 - protein, 75 aa, Gossypium hirsutum
  Clone ID: LIB3120-024-Q1-K1-D8.pep
GSLKGIDSPFGFFYSFLKLLGLNITDFYYCLFFCFANTARFSFTNDRLVLGSSQIIKYREGLMGHTPHTTFFTKG

SEQ ID NO: 91051 - protein, 82 aa, Gossypium hirsutum
  Clone ID: LIB3120-024-Q1-K1-E4.pep
MKHGVNRPPTPDGAEDQGNEPILQEIINIKLIESGEKERLMEMLRERLIECGWKDEMKALCRAYVKKKGRNNVTVDDLCHLI

SEQ ID NO: 91052 - protein, 107 aa, Gossypium hirsutum
  Clone ID: LIB3120-024-Q1-K1-E5.pep
DHEEFVFIEEDYDVDDNLSHGEFIDSSVTDSDDADDDVSFHRGELSRRNVESVIPFTFPFPPITEVKKSIPIPAPIQDTDDHDPSHDGSDDQDDDVDASFHRDELSR

SEQ ID NO: 91053 - protein, 115 aa, Gossypium hirsutum
  unsure (1)..(115): unsure at all Xaa locations
  Clone ID: LIB3120-024-Q1-K1-F1.pep
GRVGGHVGGRLGGRVGGLCGRVGDITCVASNGXRMQCMQVWPPTGKKKFETLSYLPDLTPVQLAKEVDYLLRSKWVPCLEFELEEGFVHRKYSSLPTYYDGRYWTMWKXLPMFGC

SEQ ID NO: 91054 - protein, 100 aa, Gossypium hirsutum
  Clone ID: LIB3120-024-Q1-K1-F2.pep
MEHKQFKGHVILVPCPSQGHIDPLLQFAKRLASKGVKATLATTHYTFNSICAAHIGVEPISDGFDEGGFSQAGNVDFYLKSFKEEGSRSLSQTNPKFKRL

SEQ ID NO: 91055 - protein, 110 aa, Gossypium hirsutum
  unsure (1)..(110): unsure at all Xaa locations
  Clone ID: LIB3120-024-Q1-K1-F9.pep
HASAHASEQNQISVAALLLAVLRKSMVGCXVDGEDEAMHSAVNNMEIGWPTNVRHVSHVTFDRFNGFLGLPLEFQVEVPGRVPSASASVFGVSAESMQCSLDPKGTASHY

SEQ ID NO: 91056 - protein, 71 aa, Gossypium hirsutum
  Clone ID: LIB3120-024-Q1-K1-G2.pep
TQRKSSKLLPEKNKKAKKMGSLQLFHSFSHSVSAATNLHRPLNKGRVNASLNMDVEAPNPLKLKSNGSNEV

SEQ ID NO: 91057 - protein, 93 aa, Gossypium hirsutum
  unsure (1)..(93): unsure at all Xaa locations
  Clone ID: LIB3120-024-Q1-K1-H8.pep
MASSMISSATGATAGGAQANIVSPFTGLKSASAFPVTRKANNYITSLSSNCFIVQFMHVWPSTXNNKFDTSLYLPHLTPVHLAKESDYPFFLK

SEQ ID NO: 91058 - protein, 52 aa, Gossypium hirsutum
  Clone ID: LIB3120-025-Q1-K1-A1.pep
SGTKLQLVIIGRFICVCSKTCADHVPFMDRQSPHFCTQAIVTNGKFLRLPSF

SEQ ID NO: 91059 - protein, 59 aa, Gossypium hirsutum
  Clone ID: LIB3120-025-Q1-K1-A4.pep
IKYGCVRASILYTPIYLHAYRISDQVDLVTASHIPALTSIVSSRRSIYRQCPMVCSLEV

SEQ ID NO: 91060 - protein, 87 aa, Gossypium hirsutum
  Clone ID: LIB3120-025-Q1-K1-A5.pep
FSSPSGKGPSQPAPRFIGNVIAFVLNLVRTLPYIQCLCYGKGNYANYSYSLHFLKIGPKGPEFARYSLDYHTIRNYLYVNRTWGKQR

SEQ ID NO: 91061 - protein, 68 aa, Gossypium hirsutum
  Clone ID: LIB3120-025-Q1-K1-A9.pep
PELPRIHPHLTTTRSNTRTASLTNWSYMGQGATLWGAAYHTVPHAISCLLHCDIKRNHTLFRSCIGTQ

SEQ ID NO: 91062 - protein, 144 aa, Gossypium hirsutum
  Clone ID: LIB3120-025-Q1-K1-B9.pep
ESLCALLESSGTTISLAKRAAVLLAGLLSEFEGVVSSASLSSTRLPIQRLVEALIECENRHVQTNQEVVYTANLVEDAPLSPTDGSTRGGRSELRGRGRNFRQRLQCQICFRFGHVAQRCYYRYHRDDSSPMQIQLPNPRDYGD

SEQ ID NO: 91063 - protein, 58 aa, Gossypium hirsutum
  Clone ID: LIB3120-025-Q1-K1-C1.pep
ISDDPMVLTQRIFGLSLKVLLNHRGSGMNLKFQLIHRVLTREFLFKRKKTRMKPHFIQ

SEQ ID NO: 91064 - protein, 56 aa, Gossypium hirsutum
  Clone ID: LIB3120-025-Q1-K1-C12.pep
GVQAANAAKMRCIAVTTTLTEETLKPAGPSIIRNDIGSVSLDDILSGGSGGYSLLS

SEQ ID NO: 91065 - protein, 94 aa, Gossypium hirsutum
  Clone ID: LIB3120-025-Q1-K1-C7.pep
SNLRCWNSLLAKAVSMMGTVSNNTGYQSQNLICARYTDHNYFYDLTCVKNGNTYISYIQSYDKTLHSMRGRSHYCKEEVRDYIIHNRSYTTTVL

SEQ ID NO: 91066 - protein, 41 aa, Gossypium hirsutum
  Clone ID: LIB3120-025-Q1-K1-C9.pep
ANITAHYYVCDLTGIHNSNYYLTFVPCYDMTVQSMLLKSPT

SEQ ID NO: 91067 - protein, 81 aa, Gossypium hirsutum
  Clone ID: LIB3120-025-Q1-K1-D2.pep
GETGFPEVAFVMQLLIFNLSSVALANANPTPSSSISFLSSLSPLFFSHPVFLLLVVLKCVEFKSQIKGKRKKTERKMGFGC

SEQ ID NO: 91068 - protein, 131 aa, Gossypium hirsutum
  unsure (1)..(131): unsure at all Xaa locations
  Clone ID: LIB3120-025-Q1-K1-E10.pep
MVRWGVGSLTHCVIYPPKSSIVAEELERRNNDWFVRTKVASDLMVQVGDFSFYLHKLAMVSKSGYLNRLVFAKRSEGHGQNGGNLKIVLDDLPGGTNTFESIVNFCYGFNVDVTTTTIAPLYCAAXFLEMS

SEQ ID NO: 91069 - protein, 70 aa, Gossypium hirsutum
  Clone ID: LIB3120-025-Q1-K1-E11.pep
SHLRPFFLFLNIILLINAPFLQKPRHRIIYPPYSTIFSSPFQITNYLSFFTTKFPPHLIPHLLYFTFYLH

SEQ ID NO: 91070 - protein, 53 aa, Gossypium hirsutum
  Clone ID: LIB3120-025-Q1-K1-E2.pep
GISLNLSLPIRLRSKNSITRAREKKFKVATFYETLLLTHFSCQIRSLSPYHLE

SEQ ID NO: 91071 - protein, 90 aa, Gossypium hirsutum
  Clone ID: LIB3120-025-Q1-K1-E6.pep
NTTEILTLVPPPTPHARTMCAACHVPSSALCSTYSLPPPINYRTPRDRLRRADLRRRDRIPRGRVWASVSVLVGLESPTPQPTWNRALKT

SEQ ID NO: 91072 - protein, 60 aa, Gossypium hirsutum
  unsure (1)..(60): unsure at all Xaa locations
  Clone ID: LIB3120-025-Q1-K1-E7.pep
MGDPLNWPESAXSKKGSHLDEVKRMDDEYKKPVVLLGGDTLTIAEVTAICNSDVTFKVEL

SEQ ID NO: 91073 - protein, 39 aa, Gossypium hirsutum
  Clone ID: LIB3120-025-Q1-K1-F7.pep
LTRHKNALGPHCWVEGLNTPIKASLKLIKISAITGLLYN

SEQ ID NO: 91074 - protein, 55 aa, Gossypium hirsutum
  Clone ID: LIB3120-025-Q1-K1-F9.pep
PTRAEIHWFLQIKEIQMGVGIPLRRGWREITLKEKLQNNTIISITGFLYNESMLP

SEQ ID NO: 91075 - protein, 132 aa, Gossypium hirsutum
  unsure (1)..(132): unsure at all Xaa locations
  Clone ID: LIB3120-025-Q1-K1-G10.pep
PTRPGLGVNWGTMASHKRPAKTVVEMGKDNGIKKVNLFDADSTTMNALAGSDIEVMVAIPNDQLLAMNSYKRAKXWVRRNVTRYNFDGGVNIKYVAVGNEPFLTTYNGSFINITFPALENIQNALNEAGVGD

SEQ ID NO: 91076 - protein, 56 aa, Gossypium hirsutum
  Clone ID: LIB3120-025-Q1-K1-G9.pep
KMIRKKKKLLFGRREKKQKDSNSITFLSFVYSAAYKEHPFESQLSKAFQEGPRNEV

SEQ ID NO: 91077 - protein, 67 aa, Gossypium hirsutum
  Clone ID: LIB3120-025-Q1-K1-H6.pep
RAADTLIVVSQGLIVTLVGAPTVAMTTKKATEGVPGVGKVVQKLPNSIYASLVTLAIVLFQTSREEV

SEQ ID NO: 91078 - protein, 94 aa, Gossypium hirsutum
  Clone ID: LIB3120-025-Q1-K1-H7.pep
SPYLQFIFICYTYLFITWWGNHNRWWVNDHRCSQVPHLEFYYFMGELKPTQLQTTKPYTMQHHLQHYHITTTLLSGGAPPRYPLTATLFENTHL

SEQ ID NO: 91079 - protein, 52 aa, Gossypium hirsutum
  Clone ID: LIB3120-025-Q1-K1-H9.pep
FISLKLWRFQFTHSMVQLKMRHLRTALVVASTSIVVTRQADAKISGANENEL

SEQ ID NO: 91080 - protein, 62 aa, Gossypium hirsutum
  Clone ID: LIB3120-026-Q1-K1-A12.pep
KIKTPNIVLNTNAQHLNFYHCLPIKRIYLICSNKPKKIAKNKNYPTNCSNAICTQKNAKRRL

SEQ ID NO: 91081 - protein, 59 aa, Gossypium hirsutum
  Clone ID: LIB3120-026-Q1-K1-A2.pep
RVNQNTIMATTAASMATQILNGYTSGVAGGLGLPNGIWRSSVKVSSGNTKTPCFTETAG

SEQ ID NO: 91082 - protein, 109 aa, Gossypium hirsutum
  unsure (1)..(109): unsure at all Xaa locations
  Clone ID: LIB3120-026-Q1-K1-A4.pep
LTSGDEEEVLQCLXQLKDLWGRRDMHREGVILENYISVLIQLLGGKNRDIRNRVLVILHILTKDSDDAKDRVAKVDGAIELVVRSLGRRTDERRLAVALLLDLSKYNVL

SEQ ID NO: 91083 - protein, 50 aa, Gossypium hirsutum
  Clone ID: LIB3120-026-Q1-K1-A7.pep
SFPAQTNIVAPFTSLKSASSFPLTMKANNDITSLASNCRKVQFMQVLFFY

SEQ ID NO: 91084 - protein, 104 aa, Gossypium hirsutum
  Clone ID: LIB3120-026-Q1-K1-A8.pep
ETYAGGRERTIITSSLSKTFSVTGWRIGWAIAPASAASAIQNIHIRITDSAPAPFQEAALTALRSPIEYFETLGGEYELKRDFCMKLLGSIGFRIQVKPQGSLF

SEQ ID NO: 91085 - protein, 31 aa, Gossypium hirsutum
  Clone ID: LIB3120-026-Q1-K1-B1.pep
AFHQPMAFFDALFSPLLHAELLASLMYKLRN

SEQ ID NO: 91086 - protein, 81 aa, Gossypium hirsutum
  unsure (1)..(81): unsure at all Xaa locations
  Clone ID: LIB3120-026-Q1-K1-B3.pep
TXQKFVNLHLNNCTSIFNICLEIKWLQGLKLPHMNDMKICPNPNQLQNNKAVNFAEQENFQDNDYYDDYFDDHCHLHHYDY

SEQ ID NO: 91087 - protein, 80 aa, Gossypium hirsutum
  Clone ID: LIB3120-026-Q1-K1-B6.pep
FVCPIKKNLLPLQPPIKFVPLKGPPPLFLIFLPLIFILFFFMYPFSFCFYFFFNFFPFFFFFFFFFFFFFFFFFFFFFPT

SEQ ID NO: 91088 - protein, 49 aa, Gossypium hirsutum
  Clone ID: LIB3120-026-Q1-K1-C1.pep
MDSSLESDSISDLNLFWRLSWCLPYSVQNFVKIIIDFVCTVACNVRFYR

SEQ ID NO: 91089 - protein, 81 aa, Gossypium hirsutum
  Clone ID: LIB3120-026-Q1-K1-C7.pep
KKKRLIGLCLNRIVFIYFILIRFLKKKKGKNNPKNFFHVLPLLFSFGFPNFQIFLFIFYLFLPVLNSPLLLFTFYIFGIFW

SEQ ID NO: 91090 - protein, 88 aa, Gossypium hirsutum
  Clone ID: LIB3120-026-Q1-K1-C8.pep
QDQPIVKRNHPLFFGASHARSSTASGSRKHPLAKKECLLQSRSNARGLLNYILSPLVALVGSCTRFRNRKCNCMRLQGLSVSDESVAQ

SEQ ID NO: 91091 - protein, 81 aa, Gossypium hirsutum
  Clone ID: LIB3120-026-Q1-K1-D10.pep
AKPLNRSLWCLPDAFLVFGVAGGALILVALLWSFFTPTPNFGPTVTHPPSKLSMNTVNSSERGFGVNLKCYPKDSTFYDYA

SEQ ID NO: 91092 - protein, 68 aa, Gossypium hirsutum
  Clone ID: LIB3120-026-Q1-K1-D12.pep
HTDVDTHLGTLKRFSLTFAFTYTSYYTHDYISLDDKDLHDVLTDVIHTLVNDVKTNVCSCPCCCARVA

SEQ ID NO: 91093 - protein, 46 aa, Gossypium hirsutum
  Clone ID: LIB3120-026-Q1-K1-D2.pep
ETFSCYYYSVPSFVYELTFMLKTYSQTTCLSLETKHMCFLLIFCYF

SEQ ID NO: 91094 - protein, 127 aa, Gossypium hirsutum
  unsure (1)..(127): unsure at all Xaa locations
  Clone ID: LIB3120-026-Q1-K1-D6.pep
MGATQLKPCLVLMMTLSVLAFASAVSRNRIKSLNQIREGNRKGPYIGRITGIATEEGAFFASWSYKPDPKLPFIHLLRRRFRFGTGHGTKRLYVRCGEGMTHAQXGTQQMVDLFDIDRIIHFGIGGN

SEQ ID NO: 91095 - protein, 47 aa, Gossypium hirsutum
  Clone ID: LIB3120-026-Q1-K1-D9.pep
HKLCRKLCQTINGTINVSLVFRQVLPQVLKHVWNHRCNFSFKSLCTK

SEQ ID NO: 91096 - protein, 154 aa, Gossypium hirsutum
  Clone ID: LIB3120-026-Q1-K1-E10.pep
PRVRPRVRPRVRTSVCFLNGRSCPRLRLSTFRILSSSEIGVSRRQVLEQVDKELSKGDERAALSLVKDLQGKPGGLRCFAAARQVPQRLYTLDELRLNGIETASLLSPVDSTLGSIERNLQLAAILRGVATWNAFTFNPQQILFISLGFLVLWT

SEQ ID NO: 91097 - protein, 124 aa, Gossypium hirsutum
  unsure (1)..(124): unsure at all Xaa locations
  Clone ID: LIB3120-026-Q1-K1-E3.pep
MAATTTAIALTLSSLSGRSTIPCKTFFFPKPSKPISLRRTFRPLSLTPQAKSFDIDTYFFDDVNPEKNIVFDPPTPPESFTPPQSFDEGPEETEDEIAAAYEELYXPAYTGVSXLGNDVYFMDS

SEQ ID NO: 91098 - protein, 149 aa, Gossypium hirsutum
  Clone ID: LIB3120-026-Q1-K1-E6.pep
LSSYPKEVLDIPKSSDIKFQGGSKKLGNQNDLIDIDSINTSLKFSAGCELFEALGPAFLRNGFYADSQVDNAEAGANIEMQEGMSCSQLTFESGSENLLEAVVANVCHNGSDMRSYSINKSSLVEDSKQHCLNSSELCGSMSSKAYSST

SEQ ID NO: 91099 - protein, 56 aa, Gossypium hirsutum
  Clone ID: LIB3120-026-Q1-K1-E7.pep
GTRSSDLNGQLAASPLPASTNMNSDHTFLVIKGHQAQCFDVKGSSGKKRRKTVILY

SEQ ID NO: 91100 - protein, 48 aa, Gossypium hirsutum
  Clone ID: LIB3120-026-Q1-K1-F3.pep
LFFIGNQHFPPLSCILKDDGVPSQTSHDLLQPHVESLEDNQTIDQDFW

SEQ ID NO: 91101 - protein, 98 aa, Gossypium hirsutum
  Clone ID: LIB3120-026-Q1-K1-F5.pep
VVSTHPRRWASESHLPKKVISPSNVCIPSSTQRFSPNSLLRLHCPTLPLIFRFPLSNFYLTSYLHPLCLLTPRFFFFFFFFSGRIASTVSFGKSMALS

SEQ ID NO: 91102 - protein, 66 aa, Gossypium hirsutum
  Clone ID: LIB3120-026-Q1-K1-F9.pep
QPLLTKDYPIFHVSHSKKVTKTRTKGCFLLIMLESQNMEHSESIAHMWEAFQSERQCYLIRFCKLC

SEQ ID NO: 91103 - protein, 84 aa, Gossypium hirsutum
  Clone ID: LIB3120-026-Q1-K1-G1.pep
KKHYLMVENHGITRPLKRGRRSNKITAGADLSDFLAFPSPSIAASASGKPFRDAVRSFLSANARLTTAFAPPVLPCLMTWQNPV

SEQ ID NO: 91104 - protein, 71 aa, Gossypium hirsutum
  unsure (1)..(71): unsure at all Xaa locations
  Clone ID: LIB3120-026-Q1-K1-G10.pep
GLRNDPPTGNVVMEPEDTLXYEGSISRGQVXXVAVESLVHPESCFKXVEIVSRTDAPKRSYKDLFGSIKLT

SEQ ID NO: 91105 - protein, 50 aa, Gossypium hirsutum
  Clone ID: LIB3120-026-Q1-K1-H1.pep
TALTDFCSSFHLSANHHQLGGELLGGAQTLLDSKIIPIPAVRTASFTSFT

SEQ ID NO: 91106 - protein, 31 aa, Gossypium hirsutum
  Clone ID: LIB3120-026-Q1-K1-H3.pep
GCQCRPMRSCSRQLLLLLTSSIWYSYSIESV

SEQ ID NO: 91107 - protein, 114 aa, Gossypium hirsutum
  unsure (1)..(114): unsure at all Xaa locations
  Clone ID: LIB3120-026-Q1-K1-H7.pep
KHRNQLIYERKSSTGRDISKQVINYISELNGVEQKKLPLNVNKGHKQTARSTRVTVFFDAAFDKRSFRSASGPPVRDKPPGILVSKTVIHSDISSPFVVEAXRVLDRNSGRSAA

SEQ ID NO: 91108 - protein, 144 aa, Gossypium hirsutum
  Clone ID: LIB3120-027-Q1-K1-A3.pep
ATSWFSVLLLVSIVFSCFLAASGGDFYQEFDLTWGDKRAEILNSGRLLTLSLDKASGSGFRSKREYVFGRIDMHIKLVSGNSAGTVTAFYLSSEGPNHDEIDFVFLGNLSGDPYIVHTNVYCQSQRDRGQQFYLWVDPTKNFHT

SEQ ID NO: 91109 - protein, 125 aa, Gossypium hirsutum
  Clone ID: LIB3120-027-Q1-K1-A5.pep
MTCFMDHRDLSRATATGYLFLLLLFSSFINIWSSCSNGSCQVVDSCSHSTDCGPGLFCGNCPALGKTQPFCIRGQATIPTSVIGGLPFNKYSWLVTHNSFSIVGAPALPGVQRFTFYNQEDTVTN

SEQ ID NO: 91110 - protein, 132 aa, Gossypium hirsutum
  unsure (1)..(132): unsure at all Xaa locations
  Clone ID: LIB3120-027-Q1-K1-A6.pep
ATRPELLHMAATADGIDDRASXLRYPRGNEIRPQIPPVKIGVPLDVGLSRGLIEGLRVSLLGYGSSFQSCLASASLLXSHGLTLTVAYAPFYQPLHHALIQKLCSLHAVLITAVEGSIADFGYHVAHDLALD

SEQ ID NO: 91111 - protein, 142 aa, Gossypium hirsutum
  Clone ID: LIB3120-027-Q1-K1-A7.pep
MKSTLSLETQHFYLPKLSSWEAISPTILATIIKTQKQNQPLSTWKLQANAKGFSSTPQATVKENTAKKSSNNNNKKNEDEKIPQVVFERMIARILVSVGGPMAAGLALLHLFGVTKEQNLWDAPLWLPFLTTLITFGASTLG

SEQ ID NO: 91112 - protein, 90 aa, Gossypium hirsutum
  unsure (1)..(90): unsure at all Xaa locations
  Clone ID: LIB3120-027-Q1-K1-B1.pep
PTRXVDLKPNLPAEAERIRKWEGGVFALHEEPEGTRIWLPNNDSPGLAMAWAFGDFCLKDFGLILVPEITYRDLTENDEFVGLATDGIWD

SEQ ID NO: 91113 - protein, 57 aa, Gossypium hirsutum
  Clone ID: LIB3120-027-Q1-K1-B4.pep
VQHIHHTTTTTYTDMLKVVQCRPHFPFFLSFFFFFLLYTSGPLGNLITRNHMNVKFF

SEQ ID NO: 91114 - protein, 73 aa, Gossypium hirsutum
  Clone ID: LIB3120-027-Q1-K1-D1.pep
RECTGSALTWSLIVFPTRGDLKSDGLWYTVGDLALMVGSACLDHPVDSLGLQSYIPISSARLLNLLLLLSAEF

SEQ ID NO: 91115 - protein, 52 aa, Gossypium hirsutum
  Clone ID: LIB3120-027-Q1-K1-D12.pep
TGTLFGVHGVYSPRNKAPLAHSLCMSQSTSNVPPVVLKFVHIFNNIDAPLEH

SEQ ID NO: 91116 - protein, 84 aa, Gossypium hirsutum
  unsure (1)..(84): unsure at all Xaa locations
  Clone ID: LIB3120-027-Q1-K1-E1.pep
HAYIQQLCRIGSNEPIXSYYQWDRHNKYPRCTLTNTATTIWIIKATETDKTIYSRLNPIAIMQTLIFYIGLTHNGHKSDRIIHK

SEQ ID NO: 91117 - protein, 35 aa, Gossypium hirsutum
  Clone ID: LIB3120-027-Q1-K1-E3.pep
LKSTTKGLLHWCIHKIYKDCCHCNCGVGVFKLANR

SEQ ID NO: 91118 - protein, 111 aa, Gossypium hirsutum
  Clone ID: LIB3120-027-Q1-K1-F7.pep
SHIPSFSCWGRPNYMMFSQEGHHLLLLVGCRLAALFPLLLLLMIFCCCYNQFIIVSSLQNNYFCCQKILLCCALIISSLSSSIVVGCSSIRTTLAAIIPSFTAVSYTTLHH

SEQ ID NO: 91119 - protein, 87 aa, Gossypium hirsutum
  Clone ID: LIB3120-027-Q1-K1-F8.pep
GWTIYEIVRYAPQHNWSAYEEALRTNPVLAKMVISGIVYSIGDWIAQCFEGKPLFEFDRIRMFRSGLVGFTLHGSLSHYYYQFCEVT

SEQ ID NO: 91120 - protein, 145 aa, Gossypium hirsutum
  Clone ID: LIB3120-027-Q1-K1-G1.pep
HASVQELCRIGSEEQNEWYFVRDKDKKYPTGTRTNRATKAGFWKATGRDKPIYSRLNLIGMRKTLVFYKGRAPNGQKSDWIMHEYRLETNENGTPQEEGWVVCIVFKKRMTTVRKMGEYESSCWYDDQVSFIQELESPKRITQPY

SEQ ID NO: 91121 - protein, 61 aa, Gossypium hirsutum
  Clone ID: LIB3120-027-Q1-K1-G7.pep
KVYTSYQTFCTSGKEGTQRSGQVHKRMKSRPYASMSNPDIRDISNLKNFLKGNKLDIGRQK

SEQ ID NO: 91122 - protein, 101 aa, Gossypium hirsutum
  unsure (1)..(101): unsure at all Xaa locations
  Clone ID: LIB3120-027-Q1-K1-H1.pep
PTRPLILFEATYLIALPVAHTDESIESMESRLMHLGMKIISIEDDXHCLIPKGGPLNILPQRVVANGGTALMVHPITGYMAARTLSGDSINADAIDQCLDA

SEQ ID NO: 91123 - protein, 87 aa, Gossypium hirsutum
  Clone ID: LIB3120-027-Q1-K1-H4.pep
PRVRYNSPLGLQRHAFAEAGSGVKKIELEGLSEHEHAGAKIEAAPIGYESSSLDCICNLKLLISIVNFLVFGCLLYQPLFSAYNLII

SEQ ID NO: 91124 - protein, 78 aa, Gossypium hirsutum
  unsure (1)..(78): unsure at all Xaa locations
  Clone ID: LIB3120-028-Q1-K1-A11.pep
LNLFDELNLTPMKFKHYQYSDEIXHFETLNESQTPKIMVIASAYSIVGPYIILGFXPEEAFMIRNVSNLVPSLENGPL

SEQ ID NO: 91125 - protein, 64 aa, Gossypium hirsutum
  unsure (1)..(64): unsure at all Xaa locations
  Clone ID: LIB3120-028-Q1-K1-A8.pep
SDDYHPATWDYDSLQSLGLHHVEDELCKDRASYLXEEVKMMFDNVMHPLQKLELIDALHRLGSS

SEQ ID NO: 91126 - protein, 45 aa, Gossypium hirsutum
  Clone ID: LIB3120-028-Q1-K1-B10.pep
KLLYHTRRNVKVNIFSRFRRVRRNYLRLLVGVKIPRTSPSKDHVP

SEQ ID NO: 91127 - protein, 65 aa, Gossypium hirsutum
  Clone ID: LIB3120-028-Q1-K1-B12.pep
PTENVYFEIHSGVVENLLANPFAESGTLHPDFHLINVNEVCGLFKLRCLRLLEILIRHAYGIPKL

SEQ ID NO: 91128 - protein, 105 aa, Gossypium hirsutum
  Clone ID: LIB3120-028-Q1-K1-B3.pep
PTRPLIPLYLTDNLLNTPCFWVLFQGILQALPSCEKGKMAQLLTPSTKRQMTLPRTSSYGSPIAAKMWRSLVLKHNIIGPGKCSGTGKAVALCENSTVNRLENSL

SEQ ID NO: 91129 - protein, 146 aa, Gossypium hirsutum
  Clone ID: LIB3120-028-Q1-K1-B7.pep
MAVSPPFSLAAIGILVLFTTNPNYCQAYRRILSSDTNTEFIKTSCAATTYPDLCFAAFSSYATEIQADPKILATKSLNLTLNTTFSASKNLTELCKTQGIKPTEAAPLHDCVEEISDSVDELTKSIPEMEEIECKSLAFKMRDIPN

SEQ ID NO: 91130 - protein, 67 aa, Gossypium hirsutum
  Clone ID: LIB3120-028-Q1-K1-B9.pep
SIFSSGEFDRIIILVRMDLMVTTGNMNINAKLVLLVDVGSGMTRSWFDFFKGQFDEIQESSIRAAFI

SEQ ID NO: 91131 - protein, 83 aa, Gossypium hirsutum
  Clone ID: LIB3120-028-Q1-K1-C2.pep
MILLQSHSRFLLQTLLNRIQNLEKCIELDHHWVEFDDVRYHVQVSMKNPHILLLSLSLPTPPLETVFVGGLPFGAIEAIKASY

SEQ ID NO: 91132 - protein, 55 aa, Gossypium hirsutum
  Clone ID: LIB3120-028-Q1-K1-C3.pep
RRFTLVDAAEAASGSSQLQQSSVPILRHTLHHFRHAEKIPSPSNNALPMRLPLTP

SEQ ID NO: 91133 - protein, 89 aa, Gossypium hirsutum
  unsure (1)..(89): unsure at all Xaa locations
  Clone ID: LIB3120-028-Q1-K1-C9.pep
AGNDYEATAVRITGGSHVKPGEEIRIKECQMVTXDLPYLAFYYNQKLMFYKNDRSVDFEDKVXEKLKGRLMVVLEELYQLXCKLWKDDD

SEQ ID NO: 91134 - protein, 47 aa, Gossypium hirsutum
  Clone ID: LIB3120-028-Q1-K1-D3.pep
RQSEETSTDESVIGVIRQDIRTRSPYFKIITFKHINRSAAAHAHGLA

SEQ ID NO: 91135 - protein, 46 aa, Gossypium hirsutum
  Clone ID: LIB3120-028-Q1-K1-E1.pep
HIPTHLPYLVRTPALSPLVPRLGPVGSLIIVCPPTPLEADIARYWA

SEQ ID NO: 91136 - protein, 56 aa, Gossypium hirsutum
  Clone ID: LIB3120-028-Q1-K1-E2.pep
SSIHHHNSTSYKLSFHTTKPHMSSLAGPFLCSTTNCSSVHNFIFQAQFTGHNTSYD

SEQ ID NO: 91137 - protein, 115 aa, Gossypium hirsutum
  unsure (1)..(115): unsure at all Xaa locations
  Clone ID: LIB3120-028-Q1-K1-F3.pep
MASSMATSATIATDSTTQANMAGPLTGLKSASAMTVTSNATNDITYVASNGGRLQCTHTGTTTGKTMSDTLXHIPDLTPEQVDNEVHYLRGSXWEPCLEFELEDRFFHRMHSSLP

SEQ ID NO: 91138 - protein, 46 aa, Gossypium hirsutum
  Clone ID: LIB3120-028-Q1-K1-F4.pep
GTTLTLLLSTMSIINPIIQIPLYNIAAQPPISSSTYLPNHRLPSII

SEQ ID NO: 91139 - protein, 57 aa, Gossypium hirsutum
  Clone ID: LIB3120-028-Q1-K1-F7.pep
TPLLNIVDHDVHFSGPVGLHLRTHTYHIIMLLLSDHFSFNSWILTNHCLYMPKLLVL

SEQ ID NO: 91140 - protein, 58 aa, Gossypium hirsutum
  Clone ID: LIB3120-028-Q1-K1-F9.pep
QSIIHDLAFIFYFLRVHMCLTYIASRSHQPDVQSSHTSVVIASIFPDARSYNNIVRTV

SEQ ID NO: 91141 - protein, 43 aa, Gossypium hirsutum
  Clone ID: LIB3120-028-Q1-K1-G3.pep
LLTRKGIFGSDTFCRKACFPSRIRYRILKRYGRERHEYLRAAL

SEQ ID NO: 91142 - protein, 61 aa, Gossypium hirsutum
  Clone ID: LIB3120-028-Q1-K1-G8.pep
FQIKTMKTKLRTDETNISTKQGQTTFTLGSCSALHQLLLYKLSPFTSSKALLQTLCSTFIL

SEQ ID NO: 91143 - protein, 85 aa, Gossypium hirsutum
  unsure (1)..(85): unsure at all Xaa locations
  Clone ID: LIB3120-029-Q1-K1-C9.pep
EKWLLLTLLFLSMTPIIDKAEGKDDQNLGHTLVSIERSHPTXPPKASVQXSYAEELEKTAKTGASTSRGNXAMDESNATSRKRLA

SEQ ID NO: 91144 - protein, 73 aa, Gossypium hirsutum
  Clone ID: LIB3120-030-Q1-K1-A10.pep
DLAVCVPKSCQSYQEQLQVDEDNSRILYREILNDNSATFFKQPVNLGSKSKTRTPTLRVETRTMIHQYIPSLS

SEQ ID NO: 91145 - protein, 47 aa, Gossypium hirsutum
  unsure (1)..(47): unsure at all Xaa locations
  Clone ID: LIB3120-030-Q1-K1-A11.pep
MFCPLEPFPVGLVHRLLNTRVSAYGRVXSTAVVYTAAILEYLTAEFL

SEQ ID NO: 91146 - protein, 36 aa, Gossypium hirsutum
  Clone ID: LIB3120-030-Q1-K1-B4.pep
ISCSLLLITPNRTYKLTINPYIGQIILTHPYIMIPK

SEQ ID NO: 91147 - protein, 72 aa, Gossypium hirsutum
  Clone ID: LIB3120-030-Q1-K1-B5.pep
AYTSPKFPSGHTRAYTLNHLTKLSFFIHLSHIILGVNLTMRGVLNHINFNLIKRFITCYTYLFNLSHLSKPH

SEQ ID NO: 91148 - protein, 111 aa, Gossypium hirsutum
  Clone ID: LIB3120-030-Q1-K1-C1.pep
MASATARLIFPLHHLTQPCPKPKKPNLFPPHKLLSRIPPNIIQTHRNQSHFTVRSIDVSKEDSQETPTSDPENKQSPSVEETSGGEETIDKRTLEEKFAVLNTRIYECRSC

SEQ ID NO: 91149 - protein, 97 aa, Gossypium hirsutum
  Clone ID: LIB3120-030-Q1-K1-C3.pep
MALYLLYESSSGYALFQAQGLDEIGQNTEAVRNSVADLNRFGKVVQLTAFQPFESAIDGLNQCNSVSEGLMTDELRSFLELNLPKVKEGNKSKFSLG

SEQ ID NO: 91150 - protein, 30 aa, Gossypium hirsutum
  Clone ID: LIB3120-030-Q1-K1-C5.pep
GSTYEIVFSSHLGTDDGLVVMSNMSVYVIV

SEQ ID NO: 91151 - protein, 132 aa, Gossypium hirsutum
  Clone ID: LIB3120-030-Q1-K1-C6.pep
MDTFYSFFDSQSRIQRNYNSLKNFRHISPIVQTHLKKVYMTLSRALDASAIGAYLHIIWNIVGYLTTFACLGSIICIHYTHSCQEQNRDSLLMASRVSERASIRPLNDLGIQIDPTVLVTAFLGTAFAFACF

SEQ ID NO: 91152 - protein, 76 aa, Gossypium hirsutum
  Clone ID: LIB3120-030-Q1-K1-E5.pep
PRVRSVSLQAAATLMQPIKTGAPSTTNVLLRSSQSAYNASHLHPVLARRTCCMHTDLKDSTQTHVYATKLYGLALA

SEQ ID NO: 91153 - protein, 83 aa, Gossypium hirsutum
  Clone ID: LIB3120-030-Q1-K1-F10.pep
ESKMAYTILSPVLHSLSVRGVRDALPGRSIKAHVSKPAPTVSLPNRMQLLFFLTATTALTVKDPSSKAEDNSLFGLRNKLKKA

SEQ ID NO: 91154 - protein, 73 aa, Gossypium hirsutum
  Clone ID: LIB3120-030-Q1-K1-F12.pep
IQEDYCHTCERMCIRKKLRSMYQLSSTLHLLLIMDGTGWEECNICQSLQLSIATGKVSNIDNKCKPVLSGNIC

SEQ ID NO: 91155 - protein, 106 aa, Gossypium hirsutum
  Clone ID: LIB3120-030-Q1-K1-G12.pep
RPTRSPSLPTTRPYCLYVDEASPMVREPSPPRYGSFLLCYYTFLVFPLTLSFPSLVLNRLTSFPYLLPMVLAPFQFPPPLAALLLPHYFSSQKTMIFLMVNVANPI

SEQ ID NO: 91156 - protein, 46 aa, Gossypium hirsutum
  Clone ID: LIB3120-030-Q1-K1-G6.pep
APTRTTTRTITLSVKIRCFTVAGTTMALSWPSFYSLAVNFSPFTHE

SEQ ID NO: 91157 - protein, 61 aa, Gossypium hirsutum
  Clone ID: LIB3120-030-Q1-K1-H5.pep
MHWGMHYWISQAPTTDEHRWRTRAWIVCTWYSSVYSSSAVAIVSRVHEFMLLLVMQARNPF

SEQ ID NO: 91158 - protein, 86 aa, Gossypium hirsutum
  Clone ID: LIB3120-031-Q1-K1-A12.pep
PALTDIFGDDSVLQFGGRTLGDSWGNAPGAVTNRVALEACVQARNEGRDLVREGNEIIREASKWSPELAAACEVWKGIKLEFYAVD

SEQ ID NO: 91159 - protein, 82 aa, Gossypium hirsutum
  Clone ID: LIB3120-031-Q1-K1-A3.pep
YPLLALASSPISSATSATDWPAEANMAAPFTGQNWVFAFIVTRKASNDITSLACNGWRVQCMQVWACTRNMNLETLLYLLDG

SEQ ID NO: 91160 - protein, 67 aa, Gossypium hirsutum
  unsure (1)..(67): unsure at all Xaa locations
  Clone ID: LIB3120-031-Q1-K1-A7.pep
MRDFPSCFGXNGVQVADSSSSSSNSSKNAQNLVTCVYQCRIRRRPRLITVTWTKNLMGQGLSVXIDD

SEQ ID NO: 91161 - protein, 122 aa, Gossypium hirsutum
  Clone ID: LIB3120-031-Q1-K1-B11.pep
APLFFFNNKSPFNPPQSQLKMDPNLMQKFQAIKQSKKCKKQQLLDKLLLYTCIAVTCCVFCSTPFWLPYLKNFLFISLPKMGSIMYNPKLLFFVRNLIGVVLIGRFKIFAYFSSSWGVYYVD

SEQ ID NO: 91162 - protein, 95 aa, Gossypium hirsutum
  Clone ID: LIB3120-031-Q1-K1-B3.pep
YPDPHSGWFYHPVCSIGACASTLVGFVSNPLTYPRCISCSMYASRDKIAPLVFVPVSRIRCTPLIWSHCCAKTPKMLLVSSMDNRSYLLSSPRAV

SEQ ID NO: 91163 - protein, 76 aa, Gossypium hirsutum
  Clone ID: LIB3120-031-Q1-K1-B4.pep
ETGDLTLISPMRACMNSLTKRFRIALLTTFLARSIKEFYCFVLLQGLVMKMQPIKILPWAVKAYHGEAKGEVFFLC

SEQ ID NO: 91164 - protein, 80 aa, Gossypium hirsutum
  Clone ID: LIB3120-031-Q1-K1-B5.pep
SPALYDSCNGEIEMAMAASSGFTDMPALRGKDYGKTKMRYPDYTETVSGLQYKDLRVGDGPTPKMGDTVVVDWDGYTIWY

SEQ ID NO: 91165 - protein, 111 aa, Gossypium hirsutum
  Clone ID: LIB3120-031-Q1-K1-C11.pep
LKRTPKTFSSICSKADDDSDKSPNGSSRGKPKLVTKEKSSAPTTSAFKEKTSQRACKGYDKAKKQKLNSRDHELKDTLWKSLNEVDFNTGTFTDIVKLLAQHLNTDLSPRE

SEQ ID NO: 91166 - protein, 128 aa, Gossypium hirsutum
  unsure (1)..(128): unsure at all Xaa locations
  Clone ID: LIB3120-031-Q1-K1-C8.pep
LKPASALPVTMKANNDITWLAGNGGRGQCMHILPTLGKKKCETLLYLADLTPVQAXKEVYYLHRSKWITCXEFELEEEIVHRKYSSLPTYYXGRYWTMYELPMFECTDSAHVFKDLEECRKEYRIAFI

SEQ ID NO: 91167 - protein, 127 aa, Gossypium hirsutum
  Clone ID: LIB3120-031-Q1-K1-D10.pep
FSHLGWGFWFTLRDLKLATNRFSKENVLGEGGYGVVYRGHLINGTPVAVKKILNNLGQAEKEFRVEVEAIGHVRHKNLVRLLGYCIEGTHKMLVYEYVNNGNLEQWLHGAMRQHGYLTWEARIKVLL

SEQ ID NO: 91168 - protein, 41 aa, Gossypium hirsutum
  Clone ID: LIB3120-031-Q1-K1-D6.pep
MPHRRVMAVEQDAKYINIRQGAALQHTYVDGVNPCPLSSMA

SEQ ID NO: 91169 - protein, 41 aa, Gossypium hirsutum
  Clone ID: LIB3120-031-Q1-K1-E12.pep
AQSYAHTFFHAFGQKTYWRALEEGCGEPGAKLTNTWTIHIG

SEQ ID NO: 91170 - protein, 85 aa, Gossypium hirsutum
  Clone ID: LIB3120-031-Q1-K1-E6.pep
TGTRWLTATHREDRKLSAAALGKRDVFCLTGTAHPGNVLNRSVRCSGWMSTARHVVFRAPPADLDNSDDRVPYALGRTHNRIMSS

SEQ ID NO: 91171 - protein, 110 aa, Gossypium hirsutum
  Clone ID: LIB3120-031-Q1-K1-F6.pep
DAWAFIDEAPSPAPALVPSTWADPTSIRADPYPTDPGDTSDCIFDVTAYGAVGDGSLYDTAAFRETWKAVCTGESATILVPSDNIFTITSTIFSGPCKPGLVLQVNGGLN

SEQ ID NO: 91172 - protein, 44 aa, Gossypium hirsutum
  Clone ID: LIB3120-031-Q1-K1-F7.pep
IQSSFFVRRFDSKRVGSLLRYGNVGRFVNGITLSFHKGVSRDGC

SEQ ID NO: 91173 - protein, 61 aa, Gossypium hirsutum
  unsure (1)..(61): unsure at all Xaa locations
  Clone ID: LIB3120-031-Q1-K1-F9.pep
SYAFDAQDILFLNDSXTAGGNATHAARRIHQMFKMQSFHCKQLKEFIVSLSDEHFISLLTS

SEQ ID NO: 91174 - protein, 55 aa, Gossypium hirsutum
  unsure (1)..(55): unsure at all Xaa locations
  Clone ID: LIB3120-031-Q1-K1-G4.pep
MAGAAGIIGVNHGARRLDYVPATIMALEEDVKAAQGRVLDYXDGGVRRETDVLKL

SEQ ID NO: 91175 - protein, 50 aa, Gossypium hirsutum
  Clone ID: LIB3120-031-Q1-K1-G9.pep
HASGGFSFSRLLSGISFCASGIDRGGTFSLPHYKFSSYSFARDGYVGTLV

SEQ ID NO: 91176 - protein, 49 aa, Gossypium hirsutum
  unsure (1)..(49): unsure at all Xaa locations
  Clone ID: LIB3120-031-Q1-K1-H12.pep
KNGVKFGVAVLFKAGSHIVIXGGLDHLGNPSLIHSQSIMAIWAFQVILM

SEQ ID NO: 91177 - protein, 79 aa, Gossypium hirsutum
  Clone ID: LIB3120-031-Q1-K1-H6.pep
FENQNPKKPLKNLPKTPDFIPKIQLKPQKEIHKQKVHLQVPDSKSESKKYPSTDQFKAPRSDQPNYPLALQKESTSIIH

SEQ ID NO: 91178 - protein, 58 aa, Gossypium hirsutum
  Clone ID: LIB3120-032-Q1-K1-A4.pep
IKKKKEVFLPVHKNYKSGYTADEDFLNADAVFDCIGDPPEERFDLAFCGSLLEKQYVS

SEQ ID NO: 91179 - protein, 136 aa, Gossypium hirsutum
  unsure (1)..(136): unsure at all Xaa locations
  Clone ID: LIB3120-032-Q1-K1-A7.pep
MIASGKNTNFLTRQDEDDDKRNETNKGLSSSSSSSQWLRLKDPRIVRVSRAFGGKDRHSKVYTIRGLRDXRVRLSVPTAIQLYDLXDRLGLNQPIKDADWVLNAAKHEIDELQPLPMPSPPANFPIFDAFWRTKSK

SEQ ID NO: 91180 - protein, 103 aa, Gossypium hirsutum
  unsure (1)..(103): unsure at all Xaa locations
  Clone ID: LIB3120-032-Q1-K1-B3.pep
GWCLTXRASYIFTSSLYARQRGGFRTWGGANLNSNPYPTTLNQDRPDLAAPVPLLTQREEMGNKSYYXSLEALKKLLNEKGELKTVASARVDQITDEFNTTSG

SEQ ID NO: 91181 - protein, 65 aa, Gossypium hirsutum
  Clone ID: LIB3120-032-Q1-K1-B4.pep
SMAADLQTFSCFHGTFQLLGVPRLYGVFPFLARALPSNRRFLFAHVKGAGLSLFTTTFQEGIVEF

SEQ ID NO: 91182 - protein, 71 aa, Gossypium hirsutum
  Clone ID: LIB3120-032-Q1-K1-C3.pep
TKENKQMKEGGKEGERGKEGHPNEILISRHKRGYGEIGRRYGLNWIEPWYGNLLSDNCQIQRNPGMKKGQF

SEQ ID NO: 91183 - protein, 133 aa, Gossypium hirsutum
  unsure (1)..(133): unsure at all Xaa locations
  Clone ID: LIB3120-032-Q1-K1-D3.pep
CTGGKMNHATCFYEKMCEIGIAPILTTYETLIWGYGEAKHSWEAEKLLLIMEEKGISAERSTIQLVADAXRAIGLLHEARKTIKNVDLGIGLTTNNDIPADGMVKTYKTQSLSASYCNDLHMPVVSMKEQNGS

SEQ ID NO: 91184 - protein, 96 aa, Gossypium hirsutum
  Clone ID: LIB3120-032-Q1-K1-D8.pep
LIWGGSSTVPGDHAIPHGNAVISSKKEQIFHQEAALGRANLQETVVNAKSSNGRVMLIDGSSVIYRAYYILLAKLHHGYLSHADGNCDWAVTIFTA

SEQ ID NO: 91185 - protein, 116 aa, Gossypium hirsutum
  unsure (1)..(116): unsure at all Xaa locations
  Clone ID: LIB3120-032-Q1-K1-E3.pep
MDFDEHDDQEEEMGMAVPPGYDSLGTLSETWSKPGPTTTGGGDGLARKVGFTTVRYRECLKNHAVSIVCHTVDGCCEFITAGDEGTVEAXLKCAAFNCHRNFHRKETQGEKNVYML

SEQ ID NO: 91186 - protein, 91 aa, Gossypium hirsutum
  Clone ID: LIB3120-032-Q1-K1-E4.pep
KTVLFPWFLVFSLVKFKIIMGMRRREMGFYFLAFLWFWVPINGLLSPKGVNYEVQALMAIKDALHDPHGVLDNWDADAGDPCTWAMGTWSP

SEQ ID NO: 91187 - protein, 72 aa, Gossypium hirsutum
  Clone ID: LIB3120-032-Q1-K1-F8.pep
RAGVRIPALTDGEKCLLARLCRYTRGDRQKTCGGQSNKIMNYTNAMTQNGCNKMCDYRRVWVRWEIDKSSTL

SEQ ID NO: 91188 - protein, 47 aa, Gossypium hirsutum
  Clone ID: LIB3120-032-Q1-K1-H3.pep
RIEISKCNVFTAKPNYFLRFKFIIEYRAAVDRFAIRSGGIQRGHKGA

SEQ ID NO: 91189 - protein, 45 aa, Gossypium hirsutum
  Clone ID: LIB3120-033-P1-K1-A7.pep
SLYSVLITLIFTALSLLVLTAPLKGTLVHHIKTNHIFLHPLLLLF

SEQ ID NO: 91190 - protein, 76 aa, Gossypium hirsutum
  unsure (1)..(76): unsure at all Xaa locations
  Clone ID: LIB3120-033-P1-K1-A8.pep
RSFLAQAIMVGLKTGLKXANAYPFTNEANNDITSXLSSNTKRVQCMHEMPTIVKNKYETLXYIPYLTLEQLSKEVY

SEQ ID NO: 91191 - protein, 84 aa, Gossypium hirsutum
  unsure (1)..(84): unsure at all Xaa locations
  Clone ID: LIB3120-033-P1-K1-B12.pep
DVVQQLGNVEQHVLHLGYHXNSGLCHLQGDEVXLIHACNGGMNVMGLIENVGYHVVXVVXVYFVSRPLYFDVARYKLVATESVM

SEQ ID NO: 91192 - protein, 73 aa, Gossypium hirsutum
  Clone ID: LIB3120-033-P1-K1-B3.pep
MGFFMSLLAAIASVNRSYPAHAYMVAPFTGLKSACAFPGTTMANKDITFFASNRVRVQSMHVWPTLVKKKFQT

SEQ ID NO: 91193 - protein, 156 aa, Gossypium hirsutum
  unsure (1)..(156): unsure at all Xaa locations
  Clone ID: LIB3120-033-P1-K1-B4.pep
VNRGLLWFPAPSFPWFLRLLGRPLNVWCRFFFFCCPLLACPPFVSLWLCLFFIPSFGGGAASVFAPALFRCAPSPPVLSCCFAARCCFRGPCLWCPCLFAFLPGCFPFWGCGALPCSRSWCQPFSGFXPPPFPRLPPLRGXXRLCRSCSPFAWASA

SEQ ID NO: 91194 - protein, 81 aa, Gossypium hirsutum
  unsure (1)..(81): unsure at all Xaa locations
  Clone ID: LIB3120-033-P1-K1-B6.pep
MGSFMSSSAAIVTPNRSSPAQANMGAPFTGPKSSSAFPVTRKAYNYITFLASNSGRVHCTHVWPPLVNNKYXTLSYLPHLT

SEQ ID NO: 91195 - protein, 45 aa, Gossypium hirsutum
  Clone ID: LIB3120-033-P1-K1-B7.pep
ISTDQRLSLCFGKPLSSNYVSCQSLTCKLLLALTPLQMQMLRTQV

SEQ ID NO: 91196 - protein, 91 aa, Gossypium hirsutum
  Clone ID: LIB3120-033-P1-K1-B8.pep
HIFIVISNSKWPSASSDWQPGVTVNRSFPAQANMEDPFTGLKSDSAFPVTRKANNDITSFASNGGRVQCMHVWASLVKKKIETFLYLSDLT

SEQ ID NO: 91197 - protein, 68 aa, Gossypium hirsutum
  unsure (1)..(68): unsure at all Xaa locations
  Clone ID: LIB3120-033-P1-K1-C6.pep
ATGATKNLSSHTQNNKVGPFTGLKXVFAFPVTRKANNNITFLLSNSGRKQSMSMWSPLWKKKKETFLY

SEQ ID NO: 91198 - protein, 48 aa, Gossypium hirsutum
  unsure (1)..(48): unsure at all Xaa locations
  Clone ID: LIB3120-033-P1-K1-D10.pep
XXSFFFSLLTILALGHKIRSGCSKLIFLSRLSRQSHDAKTLSSLPCQI

SEQ ID NO: 91199 - protein, 62 aa, Gossypium hirsutum
  Clone ID: LIB3120-033-P1-K1-D4.pep
SMILFRNGSNILCAITDATYVALSHVIIFMISSHPKPLSPQILHIICRRFFTAIKSFSTCFA

SEQ ID NO: 91200 - protein, 90 aa, Gossypium hirsutum
  unsure (1)..(90): unsure at all Xaa locations
  Clone ID: LIB3120-033-P1-K1-D5.pep
LRPRVRDLLLELSMWRFKGDLAVRAERTYTSLMRDAKHYIEVWKKDPSNEPYRVILVIGRDKQYYTRERXAKCMTQGNFDIPEEETFTNI

SEQ ID NO: 91201 - protein, 111 aa, Gossypium hirsutum
  unsure (1)..(111): unsure at all Xaa locations
  Clone ID: LIB3120-033-P1-K1-E1.pep
NTNCRTLACTTMAFLSPSFARAAGKFCPXSTPEIHGTGRVYMRQTTKPDPLARPCNGTDRNTTIGPLTQKTPSYFDAGASCCSWLAKPLSLMSAHALSLERLATLTVLGLG

SEQ ID NO: 91202 - protein, 47 aa, Gossypium hirsutum
  Clone ID: LIB3120-033-P1-K1-F10.pep
CARRLAGVYAGLHRPFPAFHPEEGKLLVGPALARLPISTSNGRQCDG

SEQ ID NO: 91203 - protein, 49 aa, Gossypium hirsutum
  unsure (1)..(49): unsure at all Xaa locations
  Clone ID: LIB3120-033-P1-K1-G3.pep
ANPXLCRLLFIYFFLLIVINGNYRYFVCSLFATSAVEFVHLNFGILVLK

SEQ ID NO: 91204 - protein, 58 aa, Gossypium hirsutum
  unsure (1)..(58): unsure at all Xaa locations
  Clone ID: LIB3120-033-P1-K1-H9.pep
NLTPTQSTKSPLTNALTNLPSARFSTLVNALXPFYFTNTTDVFYIVSSFIPDIVVHIT

SEQ ID NO: 91205 - protein, 51 aa, Gossypium hirsutum
  Clone ID: LIB3120-034-Q1-K1-A10.pep
MPKMLNNKKSKIPLLFNPSIPVKFPIHSPKKKVLNVKAKHKRIKTKSRNIK

SEQ ID NO: 91206 - protein, 71 aa, Gossypium hirsutum
  Clone ID: LIB3120-034-Q1-K1-A2.pep
MEAAQVVNSNGNADGDYQYEIISWFDSVSKNAAMVQTETLGQILHLNYGVEYLKKWFGDMKIQDMDACALE

SEQ ID NO: 91207 - protein, 98 aa, Gossypium hirsutum
  unsure (1)..(98): unsure at all Xaa locations
  Clone ID: LIB3120-034-Q1-K1-B11.pep
MENMKVFSVKVEDGREGRDGKPSVGPVYRNLLAKQGYPPPDPEMSTTWTLFXGCRVGIYGANCPQWIMAMEACGAHSLVCVPLYDTLGSGAVNXIIDH

SEQ ID NO: 91208 - protein, 37 aa, Gossypium hirsutum
  Clone ID: LIB3120-034-Q1-K1-B4.pep
LLKLKNIELVIININAFFSTFFFIFLRTTDNTRKFNN

SEQ ID NO: 91209 - protein, 39 aa, Gossypium hirsutum
  unsure (1)..(39): unsure at all Xaa locations
  Clone ID: LIB3120-034-Q1-K1-C12.pep
QVWFQSVIHTKLRADVFLSLGXVDDVLGSEYTQTCQFHV

SEQ ID NO: 91210 - protein, 101 aa, Gossypium hirsutum
  Clone ID: LIB3120-034-Q1-K1-C3.pep
TNISQFSTKIHFKQAARPIKFNESLPIAKLREAPTPPKNTKLTRIKVLRIPSKISSRKKKSIRNRTRSVKGETPIRKFKFCLKFEQILRFNAFKERFGHEN

SEQ ID NO: 91211 - protein, 35 aa, Gossypium hirsutum
  Clone ID: LIB3120-034-Q1-K1-C8.pep
MEALVYTFLLVSTLGIIFFAIFFRDPPKILTKKMK

SEQ ID NO: 91212 - protein, 42 aa, Gossypium hirsutum
  Clone ID: LIB3120-034-Q1-K1-D1.pep
QESRHAGLQAYKLFIPSVSPSVCLCPQKNDGETKFIKSLEAW

SEQ ID NO: 91213 - protein, 147 aa, Gossypium hirsutum
  Clone ID: LIB3120-034-Q1-K1-D10.pep
RSPAQSASGGSLEDHPGMNSRASCPVLSEKHEQLHRNMKEKSESYRANVATDVNTESWQSNDFKDVLTGSDEGDGSPAAVHDEENCRTGEDARKTTEVTKTASSSSGNELKSGKLQDASFSSINALIDSCAKYAEANECLPVGDDAG

SEQ ID NO: 91214 - protein, 96 aa, Gossypium hirsutum
  Clone ID: LIB3120-034-Q1-K1-D4.pep
ALGHGLVNLLYANRSVGLLPHHRSRITGLVRVIYHSYRPMTHIDLYLKKRNSFDSILSCLLTFYIFVSDEANPTIFAVFSFLLCDSAYINRFHRSM

SEQ ID NO: 91215 - protein, 42 aa, Gossypium hirsutum
  Clone ID: LIB3120-034-Q1-K1-D6.pep
NSEFPHITLSSNSFTIRSQTFTFYSILSIKSAYEQFKALISC

SEQ ID NO: 91216 - protein, 126 aa, Gossypium hirsutum
  unsure (1)..(126): unsure at all Xaa locations
  Clone ID: LIB3120-034-Q1-K1-E4.pep
PTRPRTFHYVDEILPFSFGGADLPIDDIAAVFLLVYFGVSTLLDAASSDNQKAEDEQKEAELAVSEFSGNGAGILAAANTVISTFFLVFVAEWGDKSFFSTIALAAASSPLGVIAXALAGHGCATL

SEQ ID NO: 91217 - protein, 77 aa, Gossypium hirsutum
  Clone ID: LIB3120-034-Q1-K1-F1.pep
FPFFEQPYHAEMYYYLIYNGNQPSSTRSCISRWDMKCFSVVEYPRSRRIPIPDSETQTPLWGSDEEFKACKHILLHS

SEQ ID NO: 91218 - protein, 87 aa, Gossypium hirsutum
  Clone ID: LIB3120-034-Q1-K1-F2.pep
YKDDEGDKVLLTNDTDLVAAVNSARSIGKKVLRLHLDFSESAEQLQSEPIASAKRSSAGVPLHLGLLAGTVVLTSIGVLVYLKRSEL

SEQ ID NO: 91219 - protein, 120 aa, Gossypium hirsutum
  Clone ID: LIB3120-034-Q1-K1-F6.pep
PTRPVLKHFDWPEGKADALREAAFEYQDLMKLEKLVSSFVDDPNLPCEAALKKMYKLLEKVEQSVYALLRTRDMAISRYREFGIPVNWLLDSGIVGKIKLSSVQLARKYMKRVASELDAL

SEQ ID NO: 91220 - protein, 82 aa, Gossypium hirsutum
  unsure (1)..(82): unsure at all Xaa locations
  Clone ID: LIB3120-034-Q1-K1-G10.pep
YPQKPITYCIPTSVQHEAGHFLIAYLVGILPRGYTLTSLEAXKKEGSLNIQAGTAFVDFEFLEEVNAGKVSATTLNRFLCIA

SEQ ID NO: 91221 - protein, 63 aa, Gossypium hirsutum
  Clone ID: LIB3120-034-Q1-K1-H3.pep
ISFTSSLFFLHLLYSVLRECLWVLFPLRTASLSSFKNFSFLLGLYFFFDFLLFFPLIMSLEKV

SEQ ID NO: 91222 - protein, 130 aa, Gossypium hirsutum
  unsure (1)..(130): unsure at all Xaa locations
  Clone ID: LIB3120-034-Q1-K1-H5.pep
MGSGARSGKRGHSSDLALPLNRTHNGFASGLMVLFEQLHHASRSQDAPLLSLRIVGPTSLTVPSSATPNNKXLKLKRLAPGFVELSXMSKTKAMNGLSTIIPQEETATVLTPKHFATMWPLASINGSNAN

SEQ ID NO: 91223 - protein, 69 aa, Gossypium hirsutum
  Clone ID: LIB3120-034-Q1-K1-H7.pep
LLFKNIFGKKKTMLSKAFLEKKAMQNNKLLLAEIFSFSSTFEKEKLNFLTFSLQKAFLVLNYFFTPPIT

SEQ ID NO: 91224 - protein, 106 aa, Gossypium hirsutum
  Clone ID: LIB3120-034-Q1-K1-H8.pep
PTRPSFFFLFMAFSSPSAVHSATPDMVSNVADGFDTQFFSIKKISVLLDDDNYLLWRQPVLLVIKTYKLSAFWTPALFLLLKCFQKLMGFLKKILSSLALSNKIVR

SEQ ID NO: 91225 - protein, 44 aa, Gossypium hirsutum
  Clone ID: LIB3120-036-Q1-K1-A1.pep
YHNGPVLTSNIFVDFIWYGNFKPSQRAICSHCINSLASSKLVST

SEQ ID NO: 91226 - protein, 149 aa, Gossypium hirsutum
  Clone ID: LIB3120-036-Q1-K1-B4.pep
KGLAFLHSAETRVIYRDFKTSNILLDTNYNAKLSDFGLAKDGPTGDKSHVSTRVMGTYGYAAPEYLATGHLSARSDVYSFGVVLLEMLSGRRVVDKNRPSGEHKLVEWAKPYLANKRKIFRVLNNRLEGQYTIEGAFKAATLALRCLSI

SEQ ID NO: 91227 - protein, 121 aa, Gossypium hirsutum
  Clone ID: LIB3120-036-Q1-K1-C1.pep
MATISTTTFTSSITPALKPSARVASPVAIGFPAIAKKGKVMCSMEKKGSGEENGLTMGMRASLLAAAAACAATVSSPSSMGLVDERMSTEGTGLPFGLSNNLLVWILLGVFGLIWALYFVT

SEQ ID NO: 91228 - protein, 66 aa, Gossypium hirsutum
  Clone ID: LIB3120-036-Q1-K1-C10.pep
LLRIGVGYYLFLNSLVSLIFVDIKFKLWKRKVVHTVVSRTEIELIGFGCLSHAIYIYLFLDRSNVI

SEQ ID NO: 91229 - protein, 60 aa, Gossypium hirsutum
  Clone ID: LIB3120-036-Q1-K1-C12.pep
MKAMPVSFEEFQGKGALDFSSITSSCSDSSLLLQHQRLLSQKKGKWENKGGDCCYVGSEP

SEQ ID NO: 91230 - protein, 42 aa, Gossypium hirsutum
  Clone ID: LIB3120-036-Q1-K1-C5.pep
KGSHLCSRGCLQYMYQCLCLIITSYGLKDHRYHSVIICSWSK

SEQ ID NO: 91231 - protein, 69 aa, Gossypium hirsutum
  Clone ID: LIB3120-036-Q1-K1-D1.pep
GISVGVAFNIRFSQSHCNGVCSFHSIREIKLIEHFTQSSFYKLENSVPRSSKSHSIGLQPSFSDLANSG

SEQ ID NO: 91232 - protein, 48 aa, Gossypium hirsutum
  Clone ID: LIB3120-036-Q1-K1-D10.pep
SVIDQAYESRGFAFALEHTNVLVIMVQSLRKYFGRVPNGFPDVSLQDL

SEQ ID NO: 91233 - protein, 78 aa, Gossypium hirsutum
  unsure (1)..(78): unsure at all Xaa locations
  Clone ID: LIB3120-036-Q1-K1-D11.pep
NVKLAPGSTRGPYVGETVELYSEDPYIFFLSRPKRHGEIFTTHIPGXARVTTDNPFAGMFELGTHAHFFIPTYLKSKY

SEQ ID NO: 91234 - protein, 136 aa, Gossypium hirsutum
  Clone ID: LIB3120-036-Q1-K1-D9.pep
EQARAERFGEMTEREKPVNLPPKLAQIKEKTGVSGNSNEQSNDDKAVDSQTISKMKLAHIEKRPPMVARPPPKPSSGISADANTTVVGQPPSPGAPPPSPSPSGGRPPSPSSSGKLPRGAGSGNKVHRASELVEFY

SEQ ID NO: 91235 - protein, 40 aa, Gossypium hirsutum
  Clone ID: LIB3120-036-Q1-K1-E2.pep
VGVRSCSSGYSFLAHSPDDVWLMVSAPAYFLGTIAIVFTH

SEQ ID NO: 91236 - protein, 91 aa, Gossypium hirsutum
  unsure (1)..(91): unsure at all Xaa locations
  Clone ID: LIB3120-036-Q1-K1-E7.pep
FHKCSSPICKXTLKLSLXTLRFSACISLSHXNWGVPTSPRMFXRHRLTXTPTLLLTQVCLLKQNSCPCFLNLTSPRLIINYTPCSENENKT

SEQ ID NO: 91237 - protein, 106 aa, Gossypium hirsutum
  Clone ID: LIB3120-036-Q1-K1-E9.pep
VRLSVTTAVQFYDLQDRLGYDQPSKAVEWLIKAAFDAIAELSSLNTSFPDTPKQLIDEKRGSGGIEQGFDSAEVVLDGDPSNYQQHLFLSKLAFSNTSETRKNSSL

SEQ ID NO: 91238 - protein, 132 aa, Gossypium hirsutum
  unsure (1)..(132): unsure at all Xaa locations
  Clone ID: LIB3120-036-Q1-K1-F3.pep
MVKSDMASXWRVLSGENDWDGLLQPLNXHLRHYIIHYXQRAGSXGDRYNHNKHGGCLKDKFLAEAGLDKXNECKFSVTHYMHAESDICEPSWXGFVAVTTDEGKAVLXRKDIVIAWRGTIHYTEWINDLYAN

SEQ ID NO: 91239 - protein, 133 aa, Gossypium hirsutum
  unsure (1)..(133): unsure at all Xaa locations
  Clone ID: LIB3120-036-Q1-K1-G10.pep
DVAHESLRESVIKGDFGPASDSLNRVMYMDPCTPKGYLFPSSNLSLGYMAEKSKYSSELQATGNFSECTSAALMLLQNGKEKCSNYRCYLGSVFMPKLXGKFLATENFFHTSKFFRLHQRASLSDVMMAGQHF

SEQ ID NO: 91240 - protein, 47 aa, Gossypium hirsutum
  unsure (1)..(47): unsure at all Xaa locations
  Clone ID: LIB3120-036-Q1-K1-G2.pep
XQXFRECELIHXRWAMLXTLGALTVPWLTGVTWQDAGNVVIEKGRGW

SEQ ID NO: 91241 - protein, 36 aa, Gossypium hirsutum
  unsure (1)..(36): unsure at all Xaa locations
  Clone ID: LIB3120-036-Q1-K1-G3.pep
TLLITNXXLPLKRTQAQPDAYPLAKTRFVLCSPLKD

SEQ ID NO: 91242 - protein, 56 aa, Gossypium hirsutum
  unsure (1)..(56): unsure at all Xaa locations
  Clone ID: LIB3120-036-Q1-K1-G5.pep
NDPAFVKNLANLANLHVNDALGTAHGSHAFTXXVANYLKPSXAGFCMQKEIDYVDG

SEQ ID NO: 91243 - protein, 125 aa, Gossypium hirsutum
  unsure (1)..(125): unsure at all Xaa locations
  Clone ID: LIB3120-036-Q1-K1-G8.pep
MARAKHTAHQSTGXYAPRKHLATQAASKAAPTTGGAKKRDRYRPGSVPVAEILKYLISSELLIRKLTLQMLFQEIVQDFNTDLKIQIHAEMASQXGVEAYLDAXFEDTNLYAIHATLVTIIPTVI

SEQ ID NO: 91244 - protein, 72 aa, Gossypium hirsutum
  Clone ID: LIB3120-036-Q1-K1-G9.pep
IVQKVSGIRERLLQMHDVNHVAIGIVKNQKTPLNTTFCNDPGHVRDKHRYKLLHVVAHVGAMNVYMVVCGID

SEQ ID NO: 91245 - protein, 144 aa, Gossypium hirsutum
  Clone ID: LIB3120-036-Q1-K1-H2.pep
MSTIIFFNCCSSLTASKLINPRIPTKGSSFLRTHKSFSWWNRHFLPKCTSQKHVQCQLQNGQKMRSFSLKECAISVALAAGLIIGMPSLDSSPMAYAANPSLPDLSVLISGPPIKDPGALLRYALPIDNKAIREVQKPLEDITE

SEQ ID NO: 91246 - protein, 35 aa, Gossypium hirsutum
  unsure (1)..(35): unsure at all Xaa locations
  Clone ID: LIB3120-036-Q1-K1-H3.pep
LINGDFWINFYWVLXGLLIVWIRXNEIIVHLPDPK

SEQ ID NO: 91247 - protein, 87 aa, Gossypium hirsutum
  unsure (1)..(87): unsure at all Xaa locations
  Clone ID: LIB3120-037-P1-K1-A6.pep
PIVHPRHCSHVRSITPGGKGYLRGEKAKNHWLQSSTRDVLSLPFIKNGYIRLSTYLRTYNIGYYVDTKGYGAFHKGMPHXFYHGRTG

SEQ ID NO: 91248 - protein, 37 aa, Gossypium hirsutum
  Clone ID: LIB3120-037-P1-K1-A7.pep
LCYAIRSLKFSFYYNSERIGELRMVKIHIFYLHKLYA

SEQ ID NO: 91249 - protein, 76 aa, Gossypium hirsutum
  unsure (1)..(76): unsure at all Xaa locations
  Clone ID: LIB3120-037-P1-K1-B6.pep
ARVRHIDSSLTIVIXEDMVKVGAWYDNEWGYRQMLVDLAHLVASKWHGMPVNGSGDPLKDYCMANPAYEECKVYEA

SEQ ID NO: 91250 - protein, 107 aa, Gossypium hirsutum
  Clone ID: LIB3120-037-P1-K1-C3.pep
PTRPDKQDIHELGPIEEVVYNLVNHVYAAPNQMVNILDMQERTSEGKNYYTFEYELTSPNYASAFFATIAIGNGRYYTLVVGALERRWRRLRNKLKGVADSFKVLDI

SEQ ID NO: 91251 - protein, 78 aa, Gossypium hirsutum
  Clone ID: LIB3120-037-P1-K1-D1.pep
AFIRVFHCMDIFRSSIYLIDLWPRPINTCISSFKVFLSIDVLSVPHLLITTKTLLVFTTRISRYNFHLISLLFSGRVG

SEQ ID NO: 91252 - protein, 85 aa, Gossypium hirsutum
  Clone ID: LIB3120-037-P1-K1-D6.pep
KPPFLPFFLLYKENTIRGEGAITVGLFNLIYPLPFSLLTNSLTTTLFFFSSIPSKLTSTHHSSFFLPSFLTTLATTYIFPFLLHS

SEQ ID NO: 91253 - protein, 58 aa, Gossypium hirsutum
  Clone ID: LIB3120-037-P1-K1-E5.pep
WNCLSFAHRALQTCVRSDFFRYVEDDMLCSVMTCMLALIVPLVPFFPNHGSCRNAIPL

SEQ ID NO: 91254 - protein, 90 aa, Gossypium hirsutum
  Clone ID: LIB3120-037-P1-K1-F3.pep
KKGDEHGVWVDFWPPPFGMRVRIVLVEIEIKYAFKEEDFRNKSDVLLKMNPVHKKILVLIYNGKTVCEFLNHVQYIDEILTDKTSLLPTH

SEQ ID NO: 91255 - protein, 92 aa, Gossypium hirsutum
  unsure (1)..(92): unsure at all Xaa locations
  Clone ID: LIB3120-037-P1-K1-H12.pep
DRATGQRQGQAEYTPLATTFCPGEFTGAELRRGYEIVWGTTLDRRNFHCKVTGADXFLVPTGRTTGRDGGRPAQLYRRGDLQLLHPPMMLAR

SEQ ID NO: 91256 - protein, 50 aa, Gossypium hirsutum
  unsure (1)..(50): unsure at all Xaa locations
  Clone ID: LIB3120-037-P1-K1-H4.pep
IISXFHWPVHYMVLCSPSFLGQGVKFFSPTPEIPGTGRVSITKTTKTVPS

SEQ ID NO: 91257 - protein, 96 aa, Gossypium hirsutum
  Clone ID: LIB3120-037-P1-K1-H7.pep
PLRTASGPQSSARKEPNGGYGGSYTKKKIPSMEDFPGYHEPVFDMPSMSTNFHSFVGRATSPPAYSNVGSNDTSCQVNSTSRSEKLDSFDDVWLTG

SEQ ID NO: 91258 - protein, 70 aa, Gossypium hirsutum
  Clone ID: LIB3120-038-P1-K1-B5.pep
SAITYSTRTYYYAWLCQSYKGIPLSLTVHLTLTWSLLLAASSLYVLFQSTGRPTSSLLLSQAKSAVCNAC

SEQ ID NO: 91259 - protein, 45 aa, Gossypium hirsutum
  Clone ID: LIB3120-038-P1-K1-E5.pep
RLEPKKGLLTCISELKEDYGLNLKKNVVTELKEIYRLKLRKNMVS

SEQ ID NO: 91260 - protein, 77 aa, Gossypium hirsutum
  Clone ID: LIB3120-038-P1-K1-E6.pep
VVTAASFGMAATVILVPRVHTAVRISLCSFLPSLPSCVFSSALSSIVKLSPDSRRISQLLTIALYESAVYAVEFLTD

SEQ ID NO: 91261 - protein, 52 aa, Gossypium hirsutum
  Clone ID: LIB3120-039-P1-K1-A1.pep
GTHVKSTHTICTGYPYDTLTQGPRNENEHFTFSTGMQLGLAREPATLRNGQS

SEQ ID NO: 91262 - protein, 88 aa, Gossypium hirsutum
  Clone ID: LIB3120-039-P1-K1-A2.pep
DRRSIINLRGLPVSKSFTSFLVGLLIPCINAAPLGPESDRVIKLPNQPATPSISQFSGYVTVNEEHGRALFYWFFEAQSEASKKPLLL

SEQ ID NO: 91263 - protein, 93 aa, Gossypium hirsutum
  Clone ID: LIB3120-039-P1-K1-A3.pep
GTSGRQMEVARILKSPMMKLGLAGVLKNLLTFEMSKLTNDRIPERYPVLDVILRALEALWVIDVCSQEICSNKEIFQLVCDLIKFPDKVEGST

SEQ ID NO: 91264 - protein, 63 aa, Gossypium hirsutum
  unsure (1)..(63): unsure at all Xaa locations
  Clone ID: LIB3120-039-P1-K1-A5.pep
ENTLNPQLIEKSVGLLLSMIESQKEVEHILLSPLMKLGXASVLGNLLTLEMSKLTNDRLPDRY

SEQ ID NO: 91265 - protein, 50 aa, Gossypium hirsutum
  Clone ID: LIB3120-039-P1-K1-B1.pep
PKSDIKSNQAFVVQNSIRIDLMSTSYALALKASNPRMDWPGKVSTSLTMS

SEQ ID NO: 91266 - protein, 49 aa, Gossypium hirsutum
  Clone ID: LIB3120-039-P1-K1-B6.pep
SDSRSPTRPKTYLYVGGGVASIHSSLQYKNRPKLEYEPLPSITCRPTPM

SEQ ID NO: 91267 - protein, 51 aa, Gossypium hirsutum
  Clone ID: LIB3120-039-P1-K1-C2.pep
HAPADASHATPNHLHGKHDNGGSQRELHYWHADTPPPIEPALGTSMMTELY

SEQ ID NO: 91268 - protein, 40 aa, Gossypium hirsutum
  Clone ID: LIB3120-039-P1-K1-C5.pep
MRAGMASRCRTTGLRTSTGGDFVEETGKKRHERAQSNFGR

SEQ ID NO: 91269 - protein, 55 aa, Gossypium hirsutum
  Clone ID: LIB3120-039-P1-K1-C8.pep
SLTIHTYHHCLRVAKPCCYVESAMAFDVHEETWSTLRVQALVCAFSTQTILYNSF

SEQ ID NO: 91270 - protein, 86 aa, Gossypium hirsutum
  Clone ID: LIB3120-039-P1-K1-D1.pep
RQLVGQLLTLVKWWGSGLEKQLQHILSFTTHMPCFTAIHLNILTDLLFFCCWPPIARSLPDNWGSIRLPSDGFTNAVENEGVSARF

SEQ ID NO: 91271 - protein, 72 aa, Gossypium hirsutum
  unsure (1)..(72): unsure at all Xaa locations
  Clone ID: LIB3120-039-P1-K1-D5.pep
GIATIATAYPHRLTWAAPYTDLKSASAFPVTRKANNDITSLECNGXRVQCMQVXPPTGKKKFETLLYLPDLT

SEQ ID NO: 91272 - protein, 28 aa, Gossypium hirsutum
  Clone ID: LIB3120-039-P1-K1-D7.pep
VALLECLYSVVVIVTVLMFMVATPSIGY

SEQ ID NO: 91273 - protein, 67 aa, Gossypium hirsutum
  Clone ID: LIB3120-039-P1-K1-D8.pep
PTRPSTLSNSVNNFTVDFFSVSFSHGCSHLHRRCRCRLQPISGSVSPNLTFNGEESELRIQQHQAGS

SEQ ID NO: 91274 - protein, 46 aa, Gossypium hirsutum
  Clone ID: LIB3120-039-P1-K1-E3.pep
WFHPVKDVVKLEGIIVTTRDTLDVAGLTLPVSQSANPHDKDAIHDG

SEQ ID NO: 91275 - protein, 96 aa, Gossypium hirsutum
  Clone ID: LIB3120-039-P1-K1-E4.pep
CFTEQMLTYNYKPNRATLSILLNGLCKNGKTEDALKMFDEMTLRGIEPNRCIYTIIISGLCRADRADDACRLLGRMKDSGCSPDFGAYKALLNGVL

SEQ ID NO: 91276 - protein, 41 aa, Gossypium hirsutum
  Clone ID: LIB3120-039-P1-K1-E5.pep
NPAMRMVLVCLCAIPLSTEIIGPFSTAKMWIERGVLRVADA

SEQ ID NO: 91277 - protein, 58 aa, Gossypium hirsutum
  Clone ID: LIB3120-039-P1-K1-E6.pep
AISWQSTFIGFLNGNATTTFGTDLVSELIQVLQIGLEIEFRMWEYTGSDRVDGRVGGR

SEQ ID NO: 91278 - protein, 67 aa, Gossypium hirsutum
  Clone ID: LIB3120-039-P1-K1-F2.pep
NTNTHSQSNAYHNYWGRRSSSSGYSNPAYGYSGSDSISDPDGTGKTLLTDGSWLAGLAMGDSPRTTS

SEQ ID NO: 91279 - protein, 75 aa, Gossypium hirsutum
  Clone ID: LIB3120-039-P1-K1-F4.pep
WRQMRSNMIRYHDRSNAWFSNAVCYVEGYVAIKVANIGCNCKRACGIHVSMNDGKWISKVGFFIMYDVRVVGRVG

SEQ ID NO: 91280 - protein, 56 aa, Gossypium hirsutum
  Clone ID: LIB3120-039-P1-K1-F5.pep
FFHSIKLVRAFHIIIIGVLVDIIAPPMCLFVIVWLYIMVDESIEFIPYLYKLCSVL

SEQ ID NO: 91281 - protein, 54 aa, Gossypium hirsutum
  Clone ID: LIB3120-039-P1-K1-G3.pep
PTRPLENSNQNSLSLCVFFDPDNFPSWRGFLLLTLTPSLTVFNISSLGLYTLGL

SEQ ID NO: 91282 - protein, 30 aa, Gossypium hirsutum
  Clone ID: LIB3120-039-P1-K1-G4.pep
NTKNTTKTQACAAVFTAMYMRNTVPYWFLP

SEQ ID NO: 91283 - protein, 72 aa, Gossypium hirsutum
  Clone ID: LIB3120-039-P1-K1-G5.pep
KKRRKNARVLYSNGREYCYYSKSLGCCWWWCCCHRHSDRLCTYPALLSVFKLKVEALNLKFAETKTKRKCYY

SEQ ID NO: 91284 - protein, 53 aa, Gossypium hirsutum
  Clone ID: LIB3120-039-P1-K1-G7.pep
ILALFFKFAKIKTKSLMLFLEASLMNKIPPVQNIRKVKGKFGWSFQEEAWADA

SEQ ID NO: 91285 - protein, 38 aa, Gossypium hirsutum
  Clone ID: LIB3120-039-P1-K1-H6.pep
CLFILHADRTHVLVGSPRYDFRTEILKTKSQREGAAIY

SEQ ID NO: 91286 - protein, 42 aa, Gossypium hirsutum
  Clone ID: LIB3120-039-P1-K1-H7.pep
MAPRSPPKRVFISHSFTSFFVGYKLLALMLHTTVLVSIPGLG

SEQ ID NO: 91287 - protein, 45 aa, Gossypium hirsutum
  Clone ID: LIB3120-039-P1-K1-H8.pep
STITLTVVVFQFRPRAPTYPTPLKSLSHSRTRVKHDRDIIYSMLQ

SEQ ID NO: 91288 - protein, 51 aa, Gossypium hirsutum
  Clone ID: LIB3120-043-P1-K1-A5.pep
HTLHLPEDLASIVTSCWQEDPNARPNFSQIIQMLLHYLSTISPPEPVMPPK

SEQ ID NO: 91289 - protein, 49 aa, Gossypium hirsutum
  Clone ID: LIB3120-043-P1-K1-A8.pep
SLVLSVLATLQPINGIHIPKRTRLKASFCESKKSRWEEALARAKSKSIG

SEQ ID NO: 91290 - protein, 120 aa, Gossypium hirsutum
  Clone ID: LIB3120-043-P1-K1-B10.pep
PTRPQHSWLSSLKTTALFSSTNQHKSSLFKVPFSQNWSRSSDEASNPESPNSEEAAPVDPVKLAFEKAKSYKKTKVNPDGDSSPASVKVAKEKTSENKENGSESIIASVKKTGSEGTSQQ

SEQ ID NO: 91291 - protein, 49 aa, Gossypium hirsutum
  Clone ID: LIB3120-043-P1-K1-B2.pep
ASLSVLPPAQRLRDFIFQMGPHSRLSFATTKNLSGRYPQPTRMCPTKYY

SEQ ID NO: 91292 - protein, 101 aa, Gossypium hirsutum
  Clone ID: LIB3120-043-P1-K1-C1.pep
PWVPSEFPVATRRHHCDHAPEKVLVSKEAPHRPILLDFGLTKKLSSSLKHALAKMFLASAEGDHVALLSAFSEMGLRLRLDMPEQVMEITSVFFRSSTPAT

SEQ ID NO: 91293 - protein, 45 aa, Gossypium hirsutum
  Clone ID: LIB3120-043-P1-K1-C5.pep
HDFNQQPCSAVSKPPQLGPLEDNMLYLKQQFFESACKGSPFVAKR

SEQ ID NO: 91294 - protein, 50 aa, Gossypium hirsutum
  Clone ID: LIB3120-043-P1-K1-C6.pep
PRVRKDASSLHLLQYSLYYYGNLKSYITPKNNISIYQPTLFLSLYKTPTI

SEQ ID NO: 91295 - protein, 66 aa, Gossypium hirsutum
  unsure (1)..(66): unsure at all Xaa locations
  Clone ID: LIB3120-043-P1-K1-C7.pep
FMRYGEERPFYSLGLIRSIGNPRSKHRETASLISVLREEQKKGGSPPXRQFQLCKKTMICSFRTRG

SEQ ID NO: 91296 - protein, 40 aa, Gossypium hirsutum
  Clone ID: LIB3120-043-P1-K1-D2.pep
HNHIMCTHYWPVQPWIFVHQGSTERGWTSSILYLNFGEMV

SEQ ID NO: 91297 - protein, 38 aa, Gossypium hirsutum
  Clone ID: LIB3120-043-P1-K1-D4.pep
KPSFNLIFLSSFQGSETLALNFLDSVLFQLINRIGRVG

SEQ ID NO: 91298 - protein, 41 aa, Gossypium hirsutum
  Clone ID: LIB3120-043-P1-K1-E1.pep
FAIITVHIPFTQWTRTMSKQPLIYARLVEYETALCLSSKQF

SEQ ID NO: 91299 - protein, 54 aa, Gossypium hirsutum
  Clone ID: LIB3120-043-P1-K1-E3.pep
LKAMAVDTTVLGLSKEEAEKKPYIASMGVYVFKKEILLNLLRWRFPTSNDFGSK

SEQ ID NO: 91300 - protein, 48 aa, Gossypium hirsutum
  Clone ID: LIB3120-043-P1-K1-E8.pep
TSKLVTVDYENGPVTSVNWAPDGRHIAIGLNNSEVLLWDSTANRQVPY

SEQ ID NO: 91301 - protein, 54 aa, Gossypium hirsutum
  Clone ID: LIB3120-043-P1-K1-F1.pep
KTDPGAKTSRRSKLKPGTIVGIIVGDIAGVGLVIMVFLFVYKIKRKNRVLETTL

SEQ ID NO: 91302 - protein, 35 aa, Gossypium hirsutum
  Clone ID: LIB3120-043-P1-K1-F3.pep
KFIAEANAKEGHSTLAVVRESTESNTVKEKLVDTF

SEQ ID NO: 91303 - protein, 46 aa, Gossypium hirsutum
  Clone ID: LIB3120-043-P1-K1-F7.pep
ASSSPAVIHICMTAALDRPTLGGYHLVNELGCGARDATGLPATMRT

SEQ ID NO: 91304 - protein, 103 aa, Gossypium hirsutum
  unsure (1)..(103): unsure at all Xaa locations
  Clone ID: LIB3120-043-P1-K1-F9.pep
HASADAWADAWAGSRDNVQWQLWLQDERXLKRQRRKQSNRESARRSRLRKQAECDELAQRAEALKEENANLISEVSRLMSEYEQLHAENASLKERLGEIPGHE

SEQ ID NO: 91305 - protein, 120 aa, Gossypium hirsutum
  Clone ID: LIB3120-043-P1-K1-G10.pep
SPRLLSTHLPYSLFPTRMTDDTSVCRFVYICRDPKDVFVSKWHFANKLRPKELPPLSLEEAFDLFCKGVSEYGPFWDHVLGYWEASVESPKKVLFLKYEDVKKEPLWCVRKLAEFLGVPF

SEQ ID NO: 91306 - protein, 92 aa, Gossypium hirsutum
  Clone ID: LIB3120-043-P1-K1-G5.pep
CIGQAQAVDLDEVDAKVSKLMPELGFSPEDSDRLVASFSSGWQMRMSLGKILLQEPDLLLLDEPTNHLDLDTIEWLEGYLNKHDVPMVIISH

SEQ ID NO: 91307 - protein, 77 aa, Gossypium hirsutum
  Clone ID: LIB3120-043-P1-K1-H10.pep
FIGNLPQVLWSIPGLNLLDISDNNFTGELPTALDNNAIAAVLDMSRNKFYGGLTTVLRRFSSINLSGNYFEGRVPDY

SEQ ID NO: 91308 - protein, 65 aa, Gossypium hirsutum
  Clone ID: LIB3120-043-P1-K1-H2.pep
MNLGISKAVFFNRWQVVLTAGATPAIEILSFCLADVGNAFLVPTPCYPGYDRDVKWRTAVEKIHV

SEQ ID NO: 91309 - protein, 49 aa, Gossypium hirsutum
  Clone ID: LIB3120-043-P1-K1-H5.pep
QLDTDWDRYINEKLSLWLCISWVLHLLQNPVQILMSLQMTHCFTQNLNT

SEQ ID NO: 91310 - protein, 48 aa, Gossypium hirsutum
  Clone ID: LIB3120-043-P1-K1-H6.pep
LFSSSSLFNDHLIPKRKRNTAKKTFRLRMKKTAFPGRTRVPMCDRTRE

SEQ ID NO: 91311 - protein, 52 aa, Gossypium hirsutum
  Clone ID: LIB3120-043-P1-K1-H9.pep
SKEFTYYSLLVSMRYTACNRLSKMSKSSPHVKGPFFALLFFKTQERAIHIAR

SEQ ID NO: 91312 - protein, 68 aa, Gossypium hirsutum
  Clone ID: LIB3120-044-P1-K1-A2.pep
HASVAISKKAGMIPLQMELGGKDACIVLEDADLDLVAANIIKGGFSYSGQRCTAVKVVLVMESVADVL

SEQ ID NO: 91313 - protein, 47 aa, Gossypium hirsutum
  Clone ID: LIB3120-044-P1-K1-A5.pep
YRPYSRSSTRPTFLSFLFYLFLFCLFYHCYFVRMIPRYGSESLPFNP

SEQ ID NO: 91314 - protein, 48 aa, Gossypium hirsutum
  Clone ID: LIB3120-044-P1-K1-A7.pep
ERVSTSDWGETSWAQSSLFRSIIPVETDIGVWLDLSHPTWVNLTGKST

SEQ ID NO: 91315 - protein, 77 aa, Gossypium hirsutum
  Clone ID: LIB3120-044-P1-K1-B2.pep
SPTWTSYSHPIIFHPYTRPALIKRGLCFTSNNSLSCFFSWGLGIPSAINKFLISAHFFNYFMLIILIFKHRDAEQRT

SEQ ID NO: 91316 - protein, 72 aa, Gossypium hirsutum
  Clone ID: LIB3120-044-P1-K1-B3.pep
KWLRNLQNRKKTGRPVRAPATACAAHTNMACSFYRPQVWLCFHSDQDGQHRLCYSPRQCRQMHCLAAVASYC

SEQ ID NO: 91317 - protein, 87 aa, Gossypium hirsutum
  Clone ID: LIB3120-044-P1-K1-B4.pep
CISISTVVIFLHTDLVTFIPGIVPHVEGLPLGAETTNDVPFPLHPLIMTAMDCTEPDIEAYLRELKPHFVFFDFACWLPTLTNELGI

SEQ ID NO: 91318 - protein, 46 aa, Gossypium hirsutum
  Clone ID: LIB3120-044-P1-K1-B5.pep
MATESSESEEEGKITGGNQHLIVEDDLREMGKKAAWSVSSCKTGNG

SEQ ID NO: 91319 - protein, 66 aa, Gossypium hirsutum
  Clone ID: LIB3120-044-P1-K1-B6.pep
EYLFFPLPYSRSTRSFQGYRARGLLYAPFYPLFRYILYPFSLKAEADRSGGDDYQCEVQIILEDLL

SEQ ID NO: 91320 - protein, 134 aa, Gossypium hirsutum
  unsure (1)..(134): unsure at all Xaa locations
  Clone ID: LIB3120-044-P1-K1-C10.pep
MEACFLSXNSFTKSHEIVPSIKARSLTFTKKNPNLFHSRKVSFPSFITCCHLDSSSPSDDDKKPTLDSDWRSFRARLVALEKVSKPENSSSSTNPDTVVDHPSSVAINDKWVHTIHEPEKGCLLIATEKLDGVH

SEQ ID NO: 91321 - protein, 47 aa, Gossypium hirsutum
  Clone ID: LIB3120-044-P1-K1-C11.pep
YRAMIPPIISIPSKVVYFISKGSILPKPTDRVLDRAGIRESLSSTFP

SEQ ID NO: 91322 - protein, 54 aa, Gossypium hirsutum
  Clone ID: LIB3120-044-P1-K1-C12.pep
GVGANGLAPPMKFRGLPSISETPREKATAEAANEPILAAGSSLVYNNLGTVVSE

SEQ ID NO: 91323 - protein, 34 aa, Gossypium hirsutum
  Clone ID: LIB3120-044-P1-K1-C5.pep
MSLHIMVTATPKARPVSQTTSNRSFTQTDAKEAP

SEQ ID NO: 91324 - protein, 47 aa, Gossypium hirsutum
  Clone ID: LIB3120-044-P1-K1-C7.pep
HHNYTCLTEHEDVANTLSARPSMDVTDSTCYLSLWIVPLQIPLFLVR

SEQ ID NO: 91325 - protein, 46 aa, Gossypium hirsutum
  Clone ID: LIB3120-044-P1-K1-C9.pep
GCLQPRLTDRVDDRAGIRAGQHYALPRCQFLVDENENPPTIFRTRG

SEQ ID NO: 91326 - protein, 37 aa, Gossypium hirsutum
  Clone ID: LIB3120-044-P1-K1-D1.pep
LHASASPSRRKLLMRSLGRLSALTTYIMICHKSMRMI

SEQ ID NO: 91327 - protein, 74 aa, Gossypium hirsutum
  Clone ID: LIB3120-044-P1-K1-D10.pep
HLVPHTNYISFTTYLVSWFGTHRTKTHPHNFHIVLQLKSNQNFSSSSVSSSSSVMEEQRELVVLPAQAQEAYAR

SEQ ID NO: 91328 - protein, 88 aa, Gossypium hirsutum
  Clone ID: LIB3120-044-P1-K1-D2.pep
LIFKYFKVPPMYQNRVLSYGGAGAVFFRLSLILLGTATLQRFEAVNLLLAAVLLFSSFKLFSNDEDDTDLSDNFIVKTCQRFIPVTSN

SEQ ID NO: 91329 - protein, 42 aa, Gossypium hirsutum
  Clone ID: LIB3120-044-P1-K1-D3.pep
LCPSCNKIMAAFTDMPPFIPESILNTHSGSSVITSCRPPERP

SEQ ID NO: 91330 - protein, 45 aa, Gossypium hirsutum
  Clone ID: LIB3120-044-P1-K1-D6.pep
AWYVYLFATYVDLIGGYIHIRDIILKGGFSSYVHTTQERSVLVRQ

SEQ ID NO: 91331 - protein, 43 aa, Gossypium hirsutum
  Clone ID: LIB3120-044-P1-K1-E1.pep
VLKNHLGKRSKIVATQFGRLMPNLDQQSTKLLILTAVRRMDPF

SEQ ID NO: 91332 - protein, 94 aa, Gossypium hirsutum
  Clone ID: LIB3120-044-P1-K1-E10.pep
RIAELEPLALVPTLAYAACLGQHHALTTNGRSSSLPPSLRQASNMKPNQRAVCKAHKLEDDGSLVTRRSALTVLIGADAAGSKVCTADAAYGEA

SEQ ID NO: 91333 - protein, 34 aa, Gossypium hirsutum
  Clone ID: LIB3120-044-P1-K1-E5.pep
VFNQNGALGLVLNTLLDLIQLHFIALFKMGDVAK

SEQ ID NO: 91334 - protein, 53 aa, Gossypium hirsutum
  Clone ID: LIB3120-044-P1-K1-E7.pep
KSVEILKVENLFSVPKETKVLIKGVPMHKGLILNITLRIFNLNMPASVSKGAR

SEQ ID NO: 91335 - protein, 43 aa, Gossypium hirsutum
  unsure (1)..(43): unsure at all Xaa locations
  Clone ID: LIB3120-044-P1-K1-F1.pep
SPKETQKGKIKIKIHNVMFQIKPLCIGFSFIFFLXSFWTGNRF

SEQ ID NO: 91336 - protein, 53 aa, Gossypium hirsutum
  Clone ID: LIB3120-044-P1-K1-F3.pep
KRVTHRLLLALLHGRRQARGPVQEVIIANTIAVAEQNYFHQLTVLAAANPVGE

SEQ ID NO: 91337 - protein, 57 aa, Gossypium hirsutum
  Clone ID: LIB3120-044-P1-K1-F7.pep
HAFVDLKFVLFHITVFYPSPIRSQSRTWMTTAYCRKIARNVMAMATGETLATREAPT

SEQ ID NO: 91338 - protein, 72 aa, Gossypium hirsutum
  Clone ID: LIB3120-044-P1-K1-G3.pep
ATLSQIRCCLSFTPCLYPPCLRAFRLLFLPSVFLLLKITIESTLGLLNLLFSEFTATGKVSLHFIAIPNQTN

SEQ ID NO: 91339 - protein, 83 aa, Gossypium hirsutum
  unsure (1)..(83): unsure at all Xaa locations
  Clone ID: LIB3120-044-P1-K1-G4.pep
MASSMGRSATIGSVNCSFPXHANMVAPFTGLKSDCAFPVTRKANNDIAILACNGGRVRCMQVGPPLGEKMFVTRLDLPRSYTR

SEQ ID NO: 91340 - protein, 43 aa, Gossypium hirsutum
  Clone ID: LIB3120-044-P1-K1-G7.pep
IFNIRFLFNFPLRRSVNQGVKIKQDVCEKEEPNEWVERELGRY

SEQ ID NO: 91341 - protein, 25 aa, Gossypium hirsutum
  Clone ID: LIB3120-044-P1-K1-H5.pep
DFNECSGVFRLAPLKLFQYISLESA

SEQ ID NO: 91342 - protein, 34 aa, Gossypium hirsutum
  Clone ID: LIB3120-045-P1-K1-A3.pep
PTRPILSLYYLCLFNGYYRVVSHILSYLLSLLKG

SEQ ID NO: 91343 - protein, 76 aa, Gossypium hirsutum
  Clone ID: LIB3120-045-P1-K1-B11.pep
VKRPSFKFTTFKEGWCSCFLPKPILAWILPNIGVTGRYTGTENNVSRSTLWWLPWLRSRHVLVVEFGRVGVRVGDR

SEQ ID NO: 91344 - protein, 58 aa, Gossypium hirsutum
  unsure (1)..(58): unsure at all Xaa locations
  Clone ID: LIB3120-045-P1-K1-B9.pep
AWDKQLLKVDILWGLHAQTTKDYNVPPXEPLFDPGELKSWTLYRAGFAAYEATFLFLY

SEQ ID NO: 91345 - protein, 86 aa, Gossypium hirsutum
  Clone ID: LIB3120-045-P1-K1-C5.pep
FSHLKHQLRSHKHHFATQNLHFFCYCYRHFCFYFQPYLSLLTFKIWICFLLLFFIHLLMVEAIFLISTLFLLLLTPLLPIWKPKVT

SEQ ID NO: 91346 - protein, 44 aa, Gossypium hirsutum
  unsure (1)..(44): unsure at all Xaa locations
  Clone ID: LIB3120-045-P1-K1-D10.pep
YRPNSXWTTRPAEHRAGIVPVFYRRVPCLQKRRDNGHTQWISIL

SEQ ID NO: 91347 - protein, 78 aa, Gossypium hirsutum
  Clone ID: LIB3120-045-P1-K1-D8.pep
IAAPHFGIKANGEHMNLYIEGDMLIFLWRVMRRLTNNFFREMQEQIIDGGLPKVIACVENLINESQKEPVFPQTLPKL

SEQ ID NO: 91348 - protein, 67 aa, Gossypium hirsutum
  Clone ID: LIB3120-045-P1-K1-D9.pep
PGHEYIVAGHSDSSSDVKRTGRAMNEVPTFTAANMRKNMRAVYYRRTCMLIMGGAIDGILGFTGDMG

SEQ ID NO: 91349 - protein, 65 aa, Gossypium hirsutum
  Clone ID: LIB3120-045-P1-K1-E5.pep
GSIGKGKRKEHLVGNKGFSEEMEGLKEGKEKDLKETLGIRFPVANFPRMQTTEKNELCWRVRPSA

SEQ ID NO: 91350 - protein, 58 aa, Gossypium hirsutum
  Clone ID: LIB3120-045-P1-K1-E9.pep
SAMFSLLFQGLAKFPEQPFLPGLKYFNNKGNIKGWVQGSTIPMCVAWARNKWICQLRA

SEQ ID NO: 91351 - protein, 61 aa, Gossypium hirsutum
  Clone ID: LIB3120-045-P1-K1-F5.pep
RKRAKDKHMISSSQNSFAKMGVLSFKAFFFDKSPTTQLVFFFPLKAWVFFFLKEKERGIEN

SEQ ID NO: 91352 - protein, 83 aa, Gossypium hirsutum
  Clone ID: LIB3120-045-P1-K1-G2.pep
MEAAAATATLVGSSLHVHPPPSSSVTRSTVYAARPRLSFPIKHYSSLACSGSWNKRMVLESRRGIFERASSFPNSTDPFDPIA

SEQ ID NO: 91353 - protein, 63 aa, Gossypium hirsutum
  Clone ID: LIB3120-045-P1-K1-G9.pep
PEKGSRGLTFNMGVEKGFMKERKRSEEVSKREGFEDTHIVRFEHHMVTMDPEALQRIAKGSLL

SEQ ID NO: 91354 - protein, 80 aa, Gossypium hirsutum
  Clone ID: LIB3120-045-P1-K1-H5.pep
MTSKKQWVTPSPSPGIDGSSPIVREKASEDGYNWRKYGQKLVKGNEFVRSYYRCTHSNCQVKKAIGFFTMMVKWADTVYF

SEQ ID NO: 91355 - protein, 55 aa, Gossypium hirsutum
  Clone ID: LIB3120-045-P1-K1-H7.pep
SLNIPTFQSPSFKVNMPIRNGAVGRPVEATHLDALKAAMAEFILTLIFVFCWIGS

SEQ ID NO: 91356 - protein, 44 aa, Gossypium hirsutum
  Clone ID: LIB3120-046-P1-K1-A1.pep
RTHAANEHGSVLAVKEKAACEANGQSYAKTNLWNVDIVPSKSLT

SEQ ID NO: 91357 - protein, 64 aa, Gossypium hirsutum
  unsure (1)..(64): unsure at all Xaa locations
  Clone ID: LIB3120-046-P1-K1-A12.pep
MRTVTTCAIQQSAFVGQTAGMRGIELLRKFXASHGRSLPMRRPVKRAPTSACSGQDRPKDLGPF

SEQ ID NO: 91358 - protein, 46 aa, Gossypium hirsutum
  Clone ID: LIB3120-046-P1-K1-A2.pep
DSPAHSRCDFGWKITQLKGGRSFLSSHGSQLPCGIDPHRSLEGTHS

SEQ ID NO: 91359 - protein, 42 aa, Gossypium hirsutum
  Clone ID: LIB3120-046-P1-K1-A3.pep
KRRIIKTLFVRLRTSPLRFCTFVMFVLYLVDHLPNYSPILML

SEQ ID NO: 91360 - protein, 65 aa, Gossypium hirsutum
  Clone ID: LIB3120-046-P1-K1-A4.pep
PTTLPLTRAVISEGGLINAWGVLSVSIDFFISTLANFSYAKMRECLSVHIGQAGIQVGNACWKLY

SEQ ID NO: 91361 - protein, 67 aa, Gossypium hirsutum
  Clone ID: LIB3120-046-P1-K1-A5.pep
SEHKDLRGSALMPTSTGRGEKKFHYNKMKITSVLHSRHNPRTSQLSTPIENPKAKILAFKQQGSLRE

SEQ ID NO: 91362 - protein, 42 aa, Gossypium hirsutum
  Clone ID: LIB3120-046-P1-K1-A6.pep
SCRHLRAVNTRFDGGIIMTHGNEAGLMLSTRISPLQLVIVPI

SEQ ID NO: 91363 - protein, 77 aa, Gossypium hirsutum
  unsure (1)..(77): unsure at all Xaa locations
  Clone ID: LIB3120-046-P1-K1-A7.pep
RVRHSSEHASVRTKVKGGNAKNGGGPTVKYVEKCXFPKVGSFPKCLTYIVSMAADVHRTLLYGGIFLYLSDKKSPTE

SEQ ID NO: 91364 - protein, 71 aa, Gossypium hirsutum
  unsure (1)..(71): unsure at all Xaa locations
  Clone ID: LIB3120-046-P1-K1-B1.pep
PLFQFVXXELRIKEPHQPWVQHLPHVLFSHRSNPKFYLYPTKLPFHFFSAPFLQPPMQSLSSVLLFQVSGF

SEQ ID NO: 91365 - protein, 101 aa, Gossypium hirsutum
  Clone ID: LIB3120-046-P1-K1-B10.pep
PRRTRTRPKKKKNQCALTPPSPPYRDMGSVKSSSSPCLSPAVHYLLFGSPCSIANPFLLQKSGLPLLSGAVEPYFFGAEDQALHYRIVHEKTTAWSSRKHF

SEQ ID NO: 91366 - protein, 47 aa, Gossypium hirsutum
  Clone ID: LIB3120-046-P1-K1-B12.pep
FSLLHHLKNSLIRTHSIQIDPKSIFWKNYSFDRKLSHIYTFAPKLVN

SEQ ID NO: 91367 - protein, 70 aa, Gossypium hirsutum
  Clone ID: LIB3120-046-P1-K1-B5.pep
MVLSKTASQSDVSVHSTFASRYVRDQLPRLRMPENSIPKDAAYQIINDELMLDGNPRWNLASFVTTWMEP

SEQ ID NO: 91368 - protein, 100 aa, Gossypium hirsutum
  Clone ID: LIB3120-046-P1-K1-B8.pep
TVLIPGRPHPSATTPRADLLLQAAIILVTIFMFLAMHDIPKKIFTKIRYRNRADFQAKRHFVLGAQLLAQARSSKSRSSTGSLAKQAEAEADKAISLDRK

SEQ ID NO: 91369 - protein, 76 aa, Gossypium hirsutum
  Clone ID: LIB3120-046-P1-K1-C5.pep
PTRPGTTARTCLPFLLASTVLGYMVGSGLPSAVKKVLHPIICCALSADLAAVAFGYISQSGVDAVLGDYLTKVSSN

SEQ ID NO: 91370 - protein, 46 aa, Gossypium hirsutum
  Clone ID: LIB3120-046-P1-K1-C6.pep
ANLQSGIEKKELELKTQVDIGYDAPFIVFTTIDLISLTGESGTCYF

SEQ ID NO: 91371 - protein, 25 aa, Gossypium hirsutum
  Clone ID: LIB3120-046-P1-K1-C7.pep
MIKGTYDTCYYGARLHGWSDVAICF

SEQ ID NO: 91372 - protein, 67 aa, Gossypium hirsutum
  Clone ID: LIB3120-046-P1-K1-C8.pep
MCKGLQQGSTSSSCLKQGVSLSPNANPRVSTRLVKCELCNSRATLYCQADDAYLCRKCDKWVHEANF

SEQ ID NO: 91373 - protein, 39 aa, Gossypium hirsutum
  Clone ID: LIB3120-046-P1-K1-D10.pep
GSPTFHIGNICHFLRYGGRKRSVMDISNYTRILFPGKLL

SEQ ID NO: 91374 - protein, 47 aa, Gossypium hirsutum
  Clone ID: LIB3120-046-P1-K1-D11.pep
HFFYERQVSLHLSLPTRLALLSLPKRVMLALSLYAWPDAWARPGCGR

SEQ ID NO: 91375 - protein, 111 aa, Gossypium hirsutum
  unsure (1)..(111): unsure at all Xaa locations
  Clone ID: LIB3120-046-P1-K1-D12.pep
EGNPPRSAGSLLFFXLPHKGERLMKWYTICICILELLLTTYAFCYHFRLDDPLIQLAEDDKWMNFFDCYWGLGIDGLCIGPILLTGFITTLATLAAGPVTRDSRLFIFLML

SEQ ID NO: 91376 - protein, 40 aa, Gossypium hirsutum
  Clone ID: LIB3120-046-P1-K1-D3.pep
MGSQPYTLFFMFLEGTRFSGAIKAVASSPHGIVEGNLFCY

SEQ ID NO: 91377 - protein, 78 aa, Gossypium hirsutum
  Clone ID: LIB3120-046-P1-K1-D8.pep
SYIQSHAPVWYSLPRLSLPVRVKEKHVRNTDTCGNQEESFKFTVAFAKNDEACISMSPSSKNEPCDRPCFRLSPVGHT

SEQ ID NO: 91378 - protein, 73 aa, Gossypium hirsutum
  Clone ID: LIB3120-046-P1-K1-E11.pep
SHDSLVSLSLFFSFLYFKFFVEISPKSLPYFSEKPSFIPLRLECNLFLFHNLPCAFLSFFCWVCTHSFNSFLG

SEQ ID NO: 91379 - protein, 45 aa, Gossypium hirsutum
  Clone ID: LIB3120-046-P1-K1-E3.pep
KSPPLKPSPSSKPGSLSLWFPLKRKARKYVKEKPCFERNLETQLY

SEQ ID NO: 91380 - protein, 43 aa, Gossypium hirsutum
  Clone ID: LIB3120-046-P1-K1-F10.pep
FSTCLAMSGVITTIIKYVRINLPVQHPLNELCDIRTRGVKSVC

SEQ ID NO: 91381 - protein, 74 aa, Gossypium hirsutum
  unsure (1)..(74): unsure at all Xaa locations
  Clone ID: LIB3120-046-P1-K1-F12.pep
KDICYKEEERNVPERAXKLASKADLLGTGAYGTEHLAHASSEGGQKLCSHHMLDSFXQKELFYLVEACLSPKRL

SEQ ID NO: 91382 - protein, 79 aa, Gossypium hirsutum
  Clone ID: LIB3120-046-P1-K1-F5.pep
VGNLETKTNVGEDKSVLPLGSRTLESDDKASGVPESLIDMPIADLWTDPCIAFAIQTLTGIPCDTPTISKSNRGKNPGI

SEQ ID NO: 91383 - protein, 83 aa, Gossypium hirsutum
  Clone ID: LIB3120-046-P1-K1-H10.pep
AVILFQRVSLLPYCNDRLCIVLTSTPVIWAYDEALLPKYFQLIRIICLNLQGAFFRYTICLTGPVIIMLYRIKSSRRCIECSA

SEQ ID NO: 91384 - protein, 83 aa, Gossypium hirsutum
  unsure (1)..(83): unsure at all Xaa locations
  Clone ID: LIB3120-046-P1-K1-H2.pep
LPRXHTPTRPLLHKLTPFFPLQVFSLYRFYSPLFSSLYHHKRSYGSGRIIRELGFLGDFRGKGRVTSGSMGKQKGGFFWRSFP

SEQ ID NO: 91385 - protein, 73 aa, Gossypium hirsutum
  unsure (1)..(73): unsure at all Xaa locations
  Clone ID: LIB3120-046-P1-K1-H4.pep
XLXFSESYIAAASLDDPEMVGYHFAYSLSLSRPSGTKHQSNFILVSRRGPYISMGMANSKKTTAPSASLSRKE

SEQ ID NO: 91386 - protein, 100 aa, Gossypium hirsutum
  unsure (1)..(100): unsure at all Xaa locations
  Clone ID: LIB3120-046-P1-K1-H9.pep
HSKYFQQYQTRLGXLVGSHXGQGVVNDALVLITADGNACLNTSYXGPLLLRARQFSIPDDGQLLRCADRKLLLRLMDQGPRTVRLTGTDPMGWVPAELAM

SEQ ID NO: 91387 - protein, 74 aa, Gossypium hirsutum
  unsure (1)..(74): unsure at all Xaa locations
  Clone ID: LIB3120-048-P1-K1-A2.pep
AYVHACDESWHYRGVRRRPWGKWAAEIRDPTRKGRRVWLGTFDTDVDAVKAYDCAAXFKMRGQKALLNFPLEAG

SEQ ID NO: 91388 - protein, 80 aa, Gossypium hirsutum
  Clone ID: LIB3120-048-P1-K1-A4.pep
PRVRFDMVVSMAVRSIFTILARIKLIFGIGPSILPRSLSASATVHPTENPNGFMSGSIKKSLPKRKTKIRGSGFSSRTQS

SEQ ID NO: 91389 - protein, 83 aa, Gossypium hirsutum
  Clone ID: LIB3120-048-P1-K1-A7.pep
ASATITTIMATSTVPVAKPNLERQAKGKGDDFADLSSLHNSFTSLPFARINALMTAIHSLLYRHMLYEAVMAHSRKGMAHAQL

SEQ ID NO: 91390 - protein, 79 aa, Gossypium hirsutum
  unsure (1)..(79): unsure at all Xaa locations
  Clone ID: LIB3120-048-P1-K1-A8.pep
RVRPRDAITYVASHARRVHCMHQHRXTGKKKLDTISYLPDLTPVQYANVVAYLLFSKWVACLEYKLEDVFVHRKYSSLP

SEQ ID NO: 91391 - protein, 80 aa, Gossypium hirsutum
  unsure (1)..(80): unsure at all Xaa locations
  Clone ID: LIB3120-048-P1-K1-B2.pep
HAFAHASGHPHSYIRMVQHRIDRCMLLYMNRQQCVKALAQYASVGPCITITVWRELXKENMDFFEAYFKAFFSYRPFMGT

SEQ ID NO: 91392 - protein, 51 aa, Gossypium hirsutum
  Clone ID: LIB3120-048-P1-K1-B4.pep
LGLFRTPSALATITVDAADMASLTGHNDGATGYEGSATGNVAVLSLPRGSL

SEQ ID NO: 91393 - protein, 42 aa, Gossypium hirsutum
  Clone ID: LIB3120-048-P1-K1-B5.pep
MRAVHGQDYTLPKGPIGSEVAQGLETPDRRKKTTTCAKIADT

SEQ ID NO: 91394 - protein, 39 aa, Gossypium hirsutum
  Clone ID: LIB3120-048-P1-K1-B7.pep
KSLDGIGFTNRKLFLDTGGLCLPSGYLTLHYLSTIRTVK

SEQ ID NO: 91395 - protein, 37 aa, Gossypium hirsutum
  Clone ID: LIB3120-048-P1-K1-C4.pep
SRSRTRPAIAYTTRPTTSLASSMIIIWGGCHCLCGTG

SEQ ID NO: 91396 - protein, 50 aa, Gossypium hirsutum
  Clone ID: LIB3120-048-P1-K1-C7.pep
TEGAHHETGDNKDLALMEHILHGSFHVNAPMKVLETRPPQKPKHDRLPLR

SEQ ID NO: 91397 - protein, 49 aa, Gossypium hirsutum
  Clone ID: LIB3120-048-P1-K1-C8.pep
ISRLPRVCGNNFDRQFSAYGGKIGQALPTMYVSSLCSPQWDFDTCIVIK

SEQ ID NO: 91398 - protein, 59 aa, Gossypium hirsutum
  Clone ID: LIB3120-048-P1-K1-D3.pep
CILAIRYGSHVISHSITQCHSKHAWNRIWVCLPTFSSGALEMRAVLRTSMMLWEENQEI

SEQ ID NO: 91399 - protein, 57 aa, Gossypium hirsutum
  Clone ID: LIB3120-048-P1-K1-D4.pep
GHLFLQFPILGRIFILFLSMELILSLRVSIRMLIHGPCSFDAPEDTDRRPLERVWAS

SEQ ID NO: 91400 - protein, 110 aa, Gossypium hirsutum
  unsure (1)..(110): unsure at all Xaa locations
  Clone ID: LIB3120-048-P1-K1-D8.pep
RSEFPVGPTSAHAPDPLYGAPLLVLCASVLXKTLTLCAGPSPFGDTTSWLIALAFFFARGFIKTGLGNRIAYQFVSLFGSSSLGLGYSLVFSEALLAPAISIRFRRAGGI

SEQ ID NO: 91401 - protein, 35 aa, Gossypium hirsutum
  Clone ID: LIB3120-048-P1-K1-E1.pep
VSFPSLVVNLKNSSSAASTQTTIYITDFTLWRTRG

SEQ ID NO: 91402 - protein, 91 aa, Gossypium hirsutum
  Clone ID: LIB3120-048-P1-K1-E5.pep
MNSPTTVRDSSSPTRIGARSSMMDWIRACGLSGLAGMKIDKEELRRRLSMPQYLRLAMLDSIKKKDVDGGDEHFRSRSFDYDGTCSQSPIG

SEQ ID NO: 91403 - protein, 79 aa, Gossypium hirsutum
  Clone ID: LIB3120-048-P1-K1-F6.pep
DRYKWIGLVRISIAKNGCSPLWRGISRVRDEVKQGLCWNLGKAKRWIFSLIGGFRMAILSLMMFGQGRWPRLALHPSYP

SEQ ID NO: 91404 - protein, 76 aa, Gossypium hirsutum
  Clone ID: LIB3120-048-P1-K1-F7.pep
SILEWLIHPPLRVPTFSLRSQSKETLSYSRGRLHLRASESRLLYSNSVTKHAHEFPLFLNPSLKSLPLVLDMQMQA

SEQ ID NO: 91405 - protein, 92 aa, Gossypium hirsutum
  unsure (1)..(92): unsure at all Xaa locations
  Clone ID: LIB3120-048-P1-K1-G1.pep
PFNHIALNSYMTLASAYRIRSSDFLSFHSKTDESQLKAFEMSRISAGYSLLLAGATHHLFCSESSLIVSAVNFWKQAXEYLLTIAGCSVWNL

SEQ ID NO: 91406 - protein, 34 aa, Gossypium hirsutum
  Clone ID: LIB3120-048-P1-K1-G5.pep
ARERCKAMSFLDVSCAVFLQCNYVIEGECLRCNI

SEQ ID NO: 91407 - protein, 91 aa, Gossypium hirsutum
  unsure (1)..(91): unsure at all Xaa locations
  Clone ID: LIB3120-048-P1-K1-G7.pep
PRVRVASLNSFLSPPTLIQDGPDFAAAIPSLTPTEGVTNMLYHXAADALIKTDRENRELEAXSPARVDQITAELNTASADGIPSDSSVRDL

SEQ ID NO: 91408 - protein, 53 aa, Gossypium hirsutum
  Clone ID: LIB3120-048-P1-K1-H1.pep
LYIGCLCLIAVNCDAEGIHARSSTTYLLMGLELNTVIHVCRLTSSGRPILFQV

SEQ ID NO: 91409 - protein, 55 aa, Gossypium hirsutum
  Clone ID: LIB3120-048-P1-K1-H8.pep
SLGPAGFLFGRGDAHAHAFASKLLLSWTSHLFQAREGGLDCEELNFKLSRTLYIF

SEQ ID NO: 91410 - protein, 43 aa, Gossypium hirsutum
  Clone ID: LIB3120-053-P1-K1-A1.pep
MAEEGHVIACHTVDSWNQQLEMRNQSKKLAGTDFTASLWGPCR

SEQ ID NO: 91411 - protein, 50 aa, Gossypium hirsutum
  Clone ID: LIB3120-053-P1-K1-A8.pep
SHPCDPHVRPRQRMNTDRVAYQKICGASSFISLMDYVVLSDPTLSYFPSS

SEQ ID NO: 91412 - protein, 66 aa, Gossypium hirsutum
  unsure (1)..(66): unsure at all Xaa locations
  Clone ID: LIB3120-053-P1-K1-A9.pep
MAAGVCTVGVINRAXVKLXNGPGAGACVASSIYMANIXKNVSARFNNNGRGPLGPFMMAVAKKPHK

SEQ ID NO: 91413 - protein, 63 aa, Gossypium hirsutum
  Clone ID: LIB3120-053-P1-K1-B12.pep
ARACRAHSYNNSSAFYSMTVFVDKGAEDMIKSAHFLTTNGGASVWNNNSSLTVGAGGPFFLED

SEQ ID NO: 91414 - protein, 49 aa, Gossypium hirsutum
  Clone ID: LIB3120-053-P1-K1-B6.pep
GRLCMETRKKGLRVGFVGLLILAELKLRQFALSIANDATLAAIFLCIWV

SEQ ID NO: 91415 - protein, 78 aa, Gossypium hirsutum
  Clone ID: LIB3120-053-P1-K1-B8.pep
GMNLITTVIGFGMSATFIVFVCTKMICRRIRGSQTRLLFQTESRIDLEQAEAEFRGVEPVVVAAIPTIKFNREAFKSM

SEQ ID NO: 91416 - protein, 68 aa, Gossypium hirsutum
  Clone ID: LIB3120-053-P1-K1-B9.pep
AKGTFPNPAPKACSSINKFRQVCYMKSCLTRVHREGVSTIYHIPYISSIYDLIIPSFIRKEFLDFRRS

SEQ ID NO: 91417 - protein, 46 aa, Gossypium hirsutum
  Clone ID: LIB3120-053-P1-K1-C2.pep
HAFDHPFRYTGINTYREIKDRIWGRFGNAGTMDIPFGTDERLLDVL

SEQ ID NO: 91418 - protein, 83 aa, Gossypium hirsutum
  unsure (1)..(83): unsure at all Xaa locations
  Clone ID: LIB3120-053-P1-K1-D12.pep
MDEDPPCTNWLRRCPTPALSCKNRKPGRRANRLTSAYIIVLSSYSSFVKHTPKYLGAREKLKNGDNPEDSXLIVLTHMPLYNS

SEQ ID NO: 91419 - protein, 62 aa, Gossypium hirsutum
  Clone ID: LIB3120-053-P1-K1-D5.pep
KCVFFKDSLKKEPTNLQKKSLLPPKVQKSLSSRSERKSQVPPHDAFPSVLVFYDGFGLLIQS

SEQ ID NO: 91420 - protein, 74 aa, Gossypium hirsutum
  Clone ID: LIB3120-053-P1-K1-D8.pep
PPFLSYPLTRTPRFSASSQTPPPNSQPPNPPPSPKLTTTSSEQQPPVTVREPKPPKPTTTVETTDWIASSLTRR

SEQ ID NO: 91421 - protein, 41 aa, Gossypium hirsutum
  Clone ID: LIB3120-053-P1-K1-E11.pep
KTWLTMFGRLGQIPKPFDSSFSTTIYSSCLVMGDTCTARKG

SEQ ID NO: 91422 - protein, 53 aa, Gossypium hirsutum
  Clone ID: LIB3120-053-P1-K1-E3.pep
TLEVPCFTWNMRWEKDSLKALQNLGTLSYISSKLQTHLLVTSDCVDDGVVPWI

SEQ ID NO: 91423 - protein, 34 aa, Gossypium hirsutum
  Clone ID: LIB3120-053-P1-K1-E4.pep
YGVNCQVSNFIGRSINSINISEFTDRNFLRNSLK

SEQ ID NO: 91424 - protein, 79 aa, Gossypium hirsutum
  Clone ID: LIB3120-053-P1-K1-E7.pep
LLAIFLDKDYYKIKYKKILIFTNCVLFKELFLFFPSFSFLLNPYHLSFSFFLSFLFYLFPWFFKFSFRIHGILFPLLIL

SEQ ID NO: 91425 - protein, 99 aa, Gossypium hirsutum
  Clone ID: LIB3120-053-P1-K1-E9.pep
PGVRLVGERGLQLSGGHKQMIAIARAMLKNPAILLLDEATSALDSESEKLVQEALDRFIIGRTTLVIAHRLSTIRRVDLVPCLHQGSVFEFGPHDDLFA

SEQ ID NO: 91426 - protein, 88 aa, Gossypium hirsutum
  Clone ID: LIB3120-053-P1-K1-F2.pep
FSTHSSALRFTSSSGNSKSADVKEHIPVLYPETILCVEVYHNIRKWSKVQEFLVLGRQTLTEIKDKICCLTDQVMHKAGRYDPSGYFL

SEQ ID NO: 91427 - protein, 36 aa, Gossypium hirsutum
  Clone ID: LIB3120-053-P1-K1-F4.pep
LVVALTLGAVAPALRPLKVSLSTVAEMMVGTVQSLA

SEQ ID NO: 91428 - protein, 63 aa, Gossypium hirsutum
  Clone ID: LIB3120-053-P1-K1-F5.pep
TPLITSRKKWTHFAQVHRLRVVRSPLPPVRTIASPSKVYSAAARFPCTPSGSGFRLNHVQFLR

SEQ ID NO: 91429 - protein, 62 aa, Gossypium hirsutum
  Clone ID: LIB3120-053-P1-K1-F7.pep
MPYAPRLPMVYSDLLAVASRGVNQITAQLNTASADGKPSDSSVERLKEGFVYFRKENYERNP

SEQ ID NO: 91430 - protein, 51 aa, Gossypium hirsutum
  Clone ID: LIB3120-053-P1-K1-G1.pep
YLKEIKERNGDQDLIKEKIEKAKKRLCWGLFKNGEVIQANKRRVFVSRENE

SEQ ID NO: 91431 - protein, 68 aa, Gossypium hirsutum
  unsure (1)..(68): unsure at all Xaa locations
  Clone ID: LIB3120-053-P1-K1-G11.pep
IPLVRTSSXSTVSCPGNAPEGSVPSTSPGRHAEFRSGRGNSSSSAPTAVGFGSGTTVPSPQSQSISLR

SEQ ID NO: 91432 - protein, 55 aa, Gossypium hirsutum
  Clone ID: LIB3120-053-P1-K1-G8.pep
GRRRRCKDVDRSRFSGCRIREHYRLAPLKSHDKTCASNTAHDRQCRSIWFTGNGF

SEQ ID NO: 91433 - protein, 44 aa, Gossypium hirsutum
  unsure (1)..(44): unsure at all Xaa locations
  Clone ID: LIB3120-053-P1-K1-G9.pep
MNQIMCILDRFYGILASLGXWQKEANNLFLGLDNACKTTLFYML

SEQ ID NO: 91434 - protein, 78 aa, Gossypium hirsutum
  Clone ID: LIB3120-053-P1-K1-H1.pep
KNLHKKKMTPFTVMLMVLFLVFTLSQARFLTVEPELRRSVRQVQARFLTVEPELGATAQDTISNVPDSDPRTTTITIL

SEQ ID NO: 91435 - protein, 66 aa, Gossypium hirsutum
  unsure (1)..(66): unsure at all Xaa locations
  Clone ID: LIB3120-053-P1-K1-H11.pep
GAFVHAXFILYQIIFIILFSYMGRGLIRRGTPKPIYPNASVHRVLPHSRTLHSYGCPELKILPTHH

SEQ ID NO: 91436 - protein, 44 aa, Gossypium hirsutum
  Clone ID: LIB3120-053-P1-K1-H2.pep
AGLQVKQHGNEEEKPEAKWEQRQCRCSVTAVEAAQAKELQQRPR

SEQ ID NO: 91437 - protein, 52 aa, Gossypium hirsutum
  Clone ID: LIB3120-053-P1-K1-H9.pep
FLQLSAFGDSGTPEVVADPQGEVAQTFHNLGVCVVQQRAKIRQQVSTAVTYD

SEQ ID NO: 91438 - protein, 74 aa, Gossypium hirsutum
  Clone ID: LIB3120-054-P1-K1-A11.pep
VRFLLKYQKLLTGRIWHIYIIDSLGVFPSQTLRTGLKTLGMTCRTRLLFSLRERKGHFWRWALSLPAALHAWGK

SEQ ID NO: 91439 - protein, 66 aa, Gossypium hirsutum
  Clone ID: LIB3120-054-P1-K1-A5.pep
GGHRVGLNWFPKGRKSMRFRSRNYINSWGKFFWFVAFIVSTFVLFNGFSYSNFRFLFGERFEPVLK

SEQ ID NO: 91440 - protein, 62 aa, Gossypium hirsutum
  Clone ID: LIB3120-054-P1-K1-B11.pep
ESSLGTPSAAASNADDLGLTQFQGFWIPSRSVPTSSIIAFQKNFQALDDDIIVVSKPKSGTT

SEQ ID NO: 91441 - protein, 128 aa, Gossypium hirsutum
  unsure (1)..(128): unsure at all Xaa locations
  Clone ID: LIB3120-054-P1-K1-B4.pep
PDEITLNTLLYEFFKNGRFDDGEKIWGKTVEKNVEPDIRSYNAKLLGFSTEKKLKEAVNWVEKMRCKGLKLDVFTFNYMIRACVNEEKLEHPKEWFNQLGKNDCAPXNLTFTTLVPXFCEKGDLEFCP

SEQ ID NO: 91442 - protein, 77 aa, Gossypium hirsutum
  Clone ID: LIB3120-054-P1-K1-B6.pep
MGAPFNGPKAGFAFPSTRKGHDHLSFFARHGGRMQCMQVWPPTGKKKFETSLYLPDLTPLQLAKKGNHFLLACLCQK

SEQ ID NO: 91443 - protein, 57 aa, Gossypium hirsutum
  unsure (1)..(57): unsure at all Xaa locations
  Clone ID: LIB3120-054-P1-K1-B8.pep
HASGQLKDGRIVAVKRLKVQGGPDADSIISTEVELLSRVHHCHVVPXLGYCLEFRGK

SEQ ID NO: 91444 - protein, 44 aa, Gossypium hirsutum
  Clone ID: LIB3120-054-P1-K1-C10.pep
TTNKWATRLLDNCTYTDGEGMRVTHAWRKTPGGEKAKFTVKIDT

SEQ ID NO: 91445 - protein, 61 aa, Gossypium hirsutum
  Clone ID: LIB3120-054-P1-K1-C11.pep
SRSTTRPHILPYFFINQHSQIFVCPSWRRDSLGSLFLSIIHGFIASRKKSESEIRLDWIAI

SEQ ID NO: 91446 - protein, 65 aa, Gossypium hirsutum
  Clone ID: LIB3120-054-P1-K1-C6.pep
MSGVTCCLRFPGQVNSDLPKLAENLIPFLKLHLLRAGFSPLTFRGSQLYIVLTFPHLTHQMWDLN

SEQ ID NO: 91447 - protein, 47 aa, Gossypium hirsutum
  Clone ID: LIB3120-054-P1-K1-C7.pep
DLHTEFGLKSLNDFLTGKSNINGYKLTNDDIKVDSAVFKNPGDSFSN

SEQ ID NO: 91448 - protein, 49 aa, Gossypium hirsutum
  Clone ID: LIB3120-054-P1-K1-C8.pep
SPKPASQKKVLASIDDIFKSFSPESDHSRNGGFNSLFMSCDWYRRTRRS

SEQ ID NO: 91449 - protein, 51 aa, Gossypium hirsutum
  Clone ID: LIB3120-054-P1-K1-D11.pep
TSIFFHLYIHFSHRRSLITRDYITLRERHTQREREREKKNPFGGGNPFLLN

SEQ ID NO: 91450 - protein, 135 aa, Gossypium hirsutum
  unsure (1)..(135): unsure at all Xaa locations
  Clone ID: LIB3120-054-P1-K1-D4.pep
HTEHELLPYIHRLQSKDLSLCHSMIPLGSCTMKLIATVKRIPVQGLWLRAINPLXPLRARSGVLRNVPLFKGTVLCLTGVSHSLLXPNAGAAVENARLMAFRAYYMSRGDHHRNVCIIPXSAHGTNSARAAIFGM

SEQ ID NO: 91451 - protein, 144 aa, Gossypium hirsutum
  Clone ID: LIB3120-054-P1-K1-D6.pep
MSGVTCCLRFPGQLNSDLRKLAVNLIPFPRLHFFMVGFSPLTSRGSQQYRALTVPELTQQMWDAKNMMCAADPRHGRYLTASAVFRGKMSTKEVDEQMINVQNKNSSYFVEWIPNNVKSTVCDIPPSGLKMASTFIGNSTSIQE

SEQ ID NO: 91452 - protein, 65 aa, Gossypium hirsutum
  Clone ID: LIB3120-054-P1-K1-D8.pep
PRVRINVDELVGMSKLSLGESIGDGGSSSLSLKLDGSSRQSAFHANPASSGNSNMDSSGNPIHAV

SEQ ID NO: 91453 - protein, 55 aa, Gossypium hirsutum
  Clone ID: LIB3120-054-P1-K1-E1.pep
NGQEGVVLDPPLNPTQPIKPACINGFGSEFIHVVEASAQLHFHSKPQPFFHPRVR

SEQ ID NO: 91454 - protein, 57 aa, Gossypium hirsutum
  Clone ID: LIB3120-054-P1-K1-E2.pep
QKKKMATNRVLTPQPLAFSKFSVSTKKVAINSQRATRFVVKASGGEEKNDQKGFTPF

SEQ ID NO: 91455 - protein, 50 aa, Gossypium hirsutum
  Clone ID: LIB3120-054-P1-K1-E6.pep
LKTHQKLVLKYDLVLPSMNFCGLSNFINNSSKPKMFLYIYNAHVKHSVLE

SEQ ID NO: 91456 - protein, 109 aa, Gossypium hirsutum
  unsure (1)..(109): unsure at all Xaa locations
  Clone ID: LIB3120-054-P1-K1-E7.pep
HFQRAAGGFGSFIINKGPIIPIPFDTPDGDIAILMGDWYTRNHTALRKALVAGKGLGMPYGVLIIGKGTHRYKDTLVAWVFYYXTINVHSGKTYGLXVHNVGISISLNF

SEQ ID NO: 91457 - protein, 123 aa, Gossypium hirsutum
  Clone ID: LIB3120-054-P1-K1-F10.pep
HSYLLPSFIHTQKPPPLSVPVTSMQMPFHHQPQVSIQYGGPNPQIQSQSVTASSMQMPIHIPLPMGNGPQVQQQVFVEGFKALPLPPHGMTHKGGGLILPPPIGGQFTPNLATWGMGIAPQFF

SEQ ID NO: 91458 - protein, 55 aa, Gossypium hirsutum
  unsure (1)..(55): unsure at all Xaa locations
  Clone ID: LIB3120-054-P1-K1-F12.pep
MGVDEQFNEINVLKTDAVFSIDDDVIFPCTSVEFAFTVWQMAXNPMGGYVLRLHW

SEQ ID NO: 91459 - protein, 53 aa, Gossypium hirsutum
  unsure (1)..(53): unsure at all Xaa locations
  Clone ID: LIB3120-054-P1-K1-F2.pep
PRDGGGXTXPSSTTTTSSFSARGGPTLRPSGVASLNSSPSPPTLIQDRPVFAA

SEQ ID NO: 91460 - protein, 54 aa, Gossypium hirsutum
  Clone ID: LIB3120-054-P1-K1-F8.pep
CEPQRAEPMGGRLAYTTQSLIGTCPVTTPAKPCFCFDKKEVFFYTRISRLVARP

SEQ ID NO: 91461 - protein, 45 aa, Gossypium hirsutum
  Clone ID: LIB3120-054-P1-K1-G1.pep
TNFTPGLYLGGTFKKTKLVKGSTFGLGRHSHLKATNHPWVTFEAF

SEQ ID NO: 91462 - protein, 66 aa, Gossypium hirsutum
  unsure (1)..(66): unsure at all Xaa locations
  Clone ID: LIB3120-054-P1-K1-G8.pep
LAYDISDDQHDITIGKGMVEXLFQAPMNDGPHYAVMSSYDYITQGLLTYDWNSTLDGFFFAPAFHG

SEQ ID NO: 91463 - protein, 35 aa, Gossypium hirsutum
  Clone ID: LIB3120-054-P1-K1-H4.pep
MASTTMALSSPSVAGKAGKFFPFTPEIQGTGRVSM

SEQ ID NO: 91464 - protein, 61 aa, Gossypium hirsutum
  Clone ID: LIB3120-054-P1-K1-H6.pep
VLSPCAFRNISLTKIESRPHGERPIRLIDDTNGGTGDHMKYMFYVDSLSVHDGTDSPKRCT

SEQ ID NO: 91465 - protein, 61 aa, Gossypium hirsutum
  Clone ID: LIB3120-054-P1-K1-H8.pep
DSVCCCSNWSCKRSFLTLGSSIMVAFASVGTGTSVRDNEGSALPKRGLPFHPVRVAVKAVP

SEQ ID NO: 91466 - protein, 93 aa, Gossypium hirsutum
  Clone ID: LIB3120-055-Q1-K1-A3.pep
SSDYYPALQADNCKLVTWPIARLSPRGIRTVEGIEHQFDAIVFATGFDVSKAGTPFPVIGSGGRELAAEWSSGAYAYRSVTVSGYPNLYFTFG

SEQ ID NO: 91467 - protein, 50 aa, Gossypium hirsutum
  Clone ID: LIB3120-055-Q1-K1-G3.pep
STPLPAVTIGSEPSPRSSRGTPTAATNCTASGSTASETLTPGWPTSPVSE

SEQ ID NO: 91468 - protein, 119 aa, Gossypium hirsutum
  unsure (1)..(119): unsure at all Xaa locations
  Clone ID: LIB3120-056-Q1-K1-C4.pep
MWNPDTYLAFADHGGRPFFDVVNRVAADAPRRVVDLGCGPENLTETLSRRWPAASVSGVDSSPEMVAAAGERGLDVRLGSIXDWSPEPETDVVISNAALQWVPEHRDLLVSSVQQLAPG

SEQ ID NO: 91469 - protein, 75 aa, Gossypium hirsutum
  Clone ID: LIB3120-057-Q1-K1-A12.pep
PQGSAQSAPRLFTPQLGDSRPNAVSSTSTLGHNQTGPRSTRDIPEDGALTEGNRRYTRVPRVSCRLTTHSDVRRG

SEQ ID NO: 91470 - protein, 78 aa, Gossypium hirsutum
  Clone ID: LIB3120-057-Q1-K1-B12.pep
QLSTTYLNIATRRRLNCTVSRSFILGVNNRPFQIHRGIYALCRSRLTRSKARLVDGIPTDVLRFFCVSVSLTTTQTYV

SEQ ID NO: 91471 - protein, 83 aa, Gossypium hirsutum
  Clone ID: LIB3120-057-Q1-K1-B9.pep
TDARRTLVYRWLPSADSACVTREVNVDYPVIGSDWVTEPSIDVCDYSSIYIPAVVSAELRYVAWACHESPCRFDTSKALTTLV

SEQ ID NO: 91472 - protein, 76 aa, Gossypium hirsutum
  Clone ID: LIB3120-057-Q1-K1-D12.pep
VRHRQVNNRVNSHHITNSNKRRRNVTIIRLNRFSTNRFSRPRPIPRRRNNQRDSHRLRSPVMPPTDILRFYECPSR

SEQ ID NO: 91473 - protein, 123 aa, Gossypium hirsutum
  Clone ID: LIB3120-057-Q1-K1-E12.pep
QRRRMIVRTPNSRHTSSSPSNTQRVARLRNRRQASRQANTNSTNRIITRRRPPINKRMINTILRRLNKNNIVITQCSSLRLSRANMRTMASSVNTRHYSSRPSHIPYFTARRNSSPLMAPRDI

SEQ ID NO: 91474 - protein, 87 aa, Gossypium hirsutum
  Clone ID: LIB3120-057-Q1-K1-G11.pep
NLSISVVVISGLYIDTLFVDLLVTAIPLGLLLNVATPLRIYCSVVRRLVRLHPLMLIGSFNVGPVRNFKVHSWLHGAIIMTLLWVMS

SEQ ID NO: 91475 - protein, 44 aa, Gossypium hirsutum
  Clone ID: LIB3120-057-Q1-K1-H9.pep
RKRRHLSLMHSRSTRDLTPGIMTMISILLMTPSDILRFYECPSR

SEQ ID NO: 91476 - protein, 136 aa, Gossypium hirsutum
  Clone ID: LIB3120-058-Q1-K1-E5.pep
LQHGPAVARATDTFRLPAHRPSLLFEPERATVRRADHAGDEGGCQHADRTGVAGRVRALHRRHRVDHHHAAASVYHHDQDRSSGDRRSDHIHCLPHIIIQVFPTRGSNVLDVWLTPDALTITCAYYNQLDEVTQKV

SEQ ID NO: 91477 - protein, 120 aa, Gossypium hirsutum
  Clone ID: LIB3120-058-Q1-K1-G2.pep
QGRDESGAGVGTRMNHCAHRPVSRSTDSWPKRTLLSEWTSTIRRMRNPTYIAIASVAVLTAACGATPEAAKTSTSTVTNTVTVAAPQATSGPAPEVVSATWTMPNLIGTNLHHAQNEIQR

SEQ ID NO: 91478 - protein, 149 aa, Gossypium hirsutum
  Clone ID: LIB3120-060-Q1-K1-A2.pep
HASEEIGPFRINKTGSSLYLNKYSWNMEANILFLESPAGVGFSYTNTSSDLKDSGDDRTAQDALIFLTRWMSRFPAYKHREFYIAGESYAGHYVPQLAKKIHDYNKAHSNPIINLKGFMVGNAVTDNYYDSIGTCTFWWSHSMISDRTY

SEQ ID NO: 91479 - protein, 55 aa, Gossypium hirsutum
  Clone ID: LIB3120-060-Q1-K1-A6.pep
TKQYQDKDNIDRIILIEGKYDINISNKKNGPTLNFRKKIFSIRSLSFFYYNSLIS

SEQ ID NO: 91480 - protein, 67 aa, Gossypium hirsutum
  Clone ID: LIB3120-060-Q1-K1-B1.pep
PTRPVPFVVQGRPHRLYLLPHISLVFVKAPSMSPIPPNFLSISQLHFHVLVSFFSFSLHYFFNAYKC

SEQ ID NO: 91481 - protein, 115 aa, Gossypium hirsutum
  unsure (1)..(115): unsure at all Xaa locations
  Clone ID: LIB3120-060-Q1-K1-B9.pep
MVIDTTNVKGLTGRWGMAAKTCDTCXSAAAAIFCRSDSAFMCLSCDSRIHSANDRLVSCRHKRVWMCEVCEQAPAAVTCKADAAALCVACDSDIHSANPLARRHERVPVQPFFDS

SEQ ID NO: 91482 - protein, 77 aa, Gossypium hirsutum
  Clone ID: LIB3120-060-Q1-K1-C10.pep
MLSLPSTSSYISRKKYDVFLSFIGEDTRKNFTDHLYAALKRNGIVTFRDDPNLEAGEEISLKLLKAIQQSWCSESVF

SEQ ID NO: 91483 - protein, 64 aa, Gossypium hirsutum
  Clone ID: LIB3120-060-Q1-K1-C11.pep
MSMITACRCSKVVSCSPMLAVAQWLPCIRVRIVYCIECDHAFLLGSRLLLQINVLNLGLSPRFR

SEQ ID NO: 91484 - protein, 98 aa, Gossypium hirsutum
  unsure (1)..(98): unsure at all Xaa locations
  Clone ID: LIB3120-060-Q1-K1-C9.pep
MGAMIFNFWSLSSNIFADPIGDFGKENIKLVQDDAAINCPKALIXGNHDSWSTQTDFXQKKDLHQLQLECLAQEHVSYKLLDSPLLKMSLDGGLSFSC

SEQ ID NO: 91485 - protein, 135 aa, Gossypium hirsutum
  Clone ID: LIB3120-060-Q1-K1-D11.pep
MCETKSFYLWLLQVIGLLGILALCLWLAMRPKSPNYTIVNFSIPGANTSNESDHGSIQYELDIQNPNQDSGIYYEDIFLMFYHGEDKVGRKTIPSFYQGKDKTRQVIDQVDVETRFWTVLRKAIMNATAELKVDL

SEQ ID NO: 91486 - protein, 147 aa, Gossypium hirsutum
  Clone ID: LIB3120-060-Q1-K1-D12.pep
PTRPVQKATCSSTLKDSKFPGYLMLNPGGTEYEGTSIVKVCSYTYCSLNGHHHAPLPPLKCFLKARRRSMKVQRSMKVEALSPRKACGDGTEELNSSMDFFVEIYGKNKGEDSSECGNETAPEPETESRGSLNAEIDGENVEHGSEV

SEQ ID NO: 91487 - protein, 81 aa, Gossypium hirsutum
  Clone ID: LIB3120-060-Q1-K1-D8.pep
VRVQHFLLTVMGGKGDSTLSWYFLSGFLSLDMAWKFMVGFLCWHIKQSAFAIQRLVQFFHRHHRHVRSKFSSFLAPRVEGT

SEQ ID NO: 91488 - protein, 76 aa, Gossypium hirsutum
  Clone ID: LIB3120-060-Q1-K1-E5.pep
TRCGTTPNTHLDPIYGLTELLKHYTFTVQSNFSKESDGGRVRSNIDETPAETTKETRTIIIDKTACYQSRTTPDSS

SEQ ID NO: 91489 - protein, 70 aa, Gossypium hirsutum
  Clone ID: LIB3120-060-Q1-K1-E6.pep
ASSPPRIFFTSTFCQNILHLDIWSLLFLLRFHLKASRKKNRFLVVLSKPIDSFLGPQNFEGVRVFALMAL

SEQ ID NO: 91490 - protein, 112 aa, Gossypium hirsutum
  Clone ID: LIB3120-060-Q1-K1-F1.pep
PKLSHHDGVRGFGFDPTTKKYKVVEISYKRTTPFTFSHRVVRFGMRRSHQTETSSSSLIESEVHILTVGSPTWRNLGCFPFRFMWQKSQVLVNKKLHWRTTTNLIMSFDLAT

SEQ ID NO: 91491 - protein, 40 aa, Gossypium hirsutum
  Clone ID: LIB3120-060-Q1-K1-F5.pep
CLAFSPICCKHPILNLILFLLFSFCTYTESILPSFHVKSV

SEQ ID NO: 91492 - protein, 63 aa, Gossypium hirsutum
  Clone ID: LIB3120-060-Q1-K1-F8.pep
SPQTKTHFSPIVFTNTLINFGGATPFPSGVSSSKSKVFTATPLPNFGANFCHPVNMSADLMPC

SEQ ID NO: 91493 - protein, 69 aa, Gossypium hirsutum
  Clone ID: LIB3120-060-Q1-K1-G12.pep
FSTQRCTFRRPCIMAFKADKFNNTALVTLRDHNLLPVETAKEHPKRRGKAKKASKTCNRDFTDEKSPFT

SEQ ID NO: 91494 - protein, 38 aa, Gossypium hirsutum
  Clone ID: LIB3120-060-Q1-K1-G4.pep
FQMRFCSSFKLFLCIGKNVPKLKMIFQCLTSDVIFLCF

SEQ ID NO: 91495 - protein, 104 aa, Gossypium hirsutum
  unsure (1)..(104): unsure at all Xaa locations
  Clone ID: LIB3120-060-Q1-K1-G8.pep
HAYGERAKTTFSSAAQTAIVIDSLYXGIDSYTTVTLARLAELNMDLPRKRMGPRQKCLCDAYRDKSAVHDVVLCLXGKTKIPNVXYLLRDSFNRKEFCESIHPD

SEQ ID NO: 91496 - protein, 63 aa, Gossypium hirsutum
  Clone ID: LIB3120-060-Q1-K1-H12.pep
CVPQKKGRYKIKEEAYVTPNKDYKEKNKERKRRVFLCGNQNTQQSVRLSELKPVFHSFLGRVG

SEQ ID NO: 91497 - protein, 91 aa, Gossypium hirsutum
  unsure (1)..(91): unsure at all Xaa locations
  Clone ID: LIB3120-060-Q1-K1-H3.pep
GKVKFGDRASYLWQPLPLSLTTLIWTEALVSGYXSSQRNAELDPEKRLYPAGYNDPLGLAYRPXEKTDHLKLAEIKHSXLAKTAILNFGIQ

SEQ ID NO: 91498 - protein, 60 aa, Gossypium hirsutum
  Clone ID: LIB3120-060-Q1-K1-H5.pep
GAFTGEVSAGMLVNLSGLCIIIGLSERILILIESNEFFVDKGAYALSQGLKVISWICGNT

SEQ ID NO: 91499 - protein, 63 aa, Gossypium hirsutum
  Clone ID: LIB3135-002-Q1-K1-A3.pep
TNTTNIYHRKVPKGKPPTRMKTGRTLRVGQKLGTKIPMASFSCLIWLPPLFNGNPSDQSRTRG

SEQ ID NO: 91500 - protein, 42 aa, Gossypium hirsutum
  Clone ID: LIB3135-002-Q1-K1-A5.pep
TTEDLKEKNNDVVEYHKVYQLRHQKVTSIYFIDVINNKVFKK

SEQ ID NO: 91501 - protein, 42 aa, Gossypium hirsutum
  Clone ID: LIB3135-002-Q1-K1-A8.pep
KMVKIEVNHFFSTSRMTVTRCYCKILSSSFLFSFFSLSGSYL

SEQ ID NO: 91502 - protein, 127 aa, Gossypium hirsutum
  Clone ID: LIB3135-002-Q1-K1-B1.pep
PTRPPTRPHLFKGQGIVGRALTTDKQCFATDITAFSKTNYPLSHHARMFKLRGALAIPLQSIFTGLVEFVLELFFPKDCHESEAQQQMLNSLSSFMQQACQSFACMDELEEEVILARKESGKCLLMG

SEQ ID NO: 91503 - protein, 55 aa, Gossypium hirsutum
  Clone ID: LIB3135-002-Q1-K1-B2.pep
SRLKRFVKSFRISRIFRTYPLFLAVFDFFLYFSLLILVPISHLIFCCSCLVFSID

SEQ ID NO: 91504 - protein, 66 aa, Gossypium hirsutum
  Clone ID: LIB3135-002-Q1-K1-B3.pep
MGIGGDKQQHVSFHLHMPNLHLHGFHHHENKDLKDIPKGCLAVLVGQGQEQQRFVIPLIYITHPLF

SEQ ID NO: 91505 - protein, 73 aa, Gossypium hirsutum
  Clone ID: LIB3135-002-Q1-K1-B6.pep
RWKEKEPRSSQQDDLNLVKFLFSFSWNMQWQQQCFFLICLSHPIPILSSPFHHGYKFLIIDSPILYHIYTHAS

SEQ ID NO: 91506 - protein, 100 aa, Gossypium hirsutum
  unsure (1)..(100): unsure at all Xaa locations
  Clone ID: LIB3135-002-Q1-K1-C10.pep
RETRERKTXXTKXKADREERPPEADMXAAQEGTQRRKEXGRTAPQTKXRATGGNKTKTPGPGAQAARRAHARAGTKKGRXEXXTPKPTESTRRKGGRRGR

SEQ ID NO: 91507 - protein, 62 aa, Gossypium hirsutum
  Clone ID: LIB3135-002-Q1-K1-C11.pep
LLCTRLWTDNSTKTFVQRFLGVRGLLGLTFNVEFGKSMVKMSNIGVKTGTAGEIRKVCSKVN

SEQ ID NO: 91508 - protein, 86 aa, Gossypium hirsutum
  Clone ID: LIB3135-002-Q1-K1-C12.pep
HASAHTCEPACARLRPVKISTLEMPSSRGDNVAMNVRRTGAEGIDVKRAGELWKASGTVPNDDPRRATMHSMYDCGYQLKQWTNMS

SEQ ID NO: 91509 - protein, 44 aa, Gossypium hirsutum
  Clone ID: LIB3135-002-Q1-K1-C2.pep
LTHPPTHPSKRTNFFLHKHTLSLYQKNLWEGLSSNPVIAYSTHK

SEQ ID NO: 91510 - protein, 59 aa, Gossypium hirsutum
  Clone ID: LIB3135-002-Q1-K1-C5.pep
SPKWICISVICIFTNSRHDSSLTSILKMSQNEVLCKKKKKKKKKKKKKKKKKKKKKKGK

SEQ ID NO: 91511 - protein, 50 aa, Gossypium hirsutum
  Clone ID: LIB3135-002-Q1-K1-C7.pep
TNFIFLERLHMILLSATFLYDVVYTFFPSLSILTLSILVLVTAINSHQLQ

SEQ ID NO: 91512 - protein, 127 aa, Gossypium hirsutum
  unsure (1)..(127): unsure at all Xaa locations
  Clone ID: LIB3135-002-Q1-K1-D1.pep
SESRSLGKLEEVTREMAERKEALKIAMEKAEKAKEGKLGIEQELRRWRAEHEQRRKATELNHGENPPRAISEGKKETKNFEPVPAAPTLADTLASPKAYDHGSTTETESXPEPKVCKEKEKSLVPKI

SEQ ID NO: 91513 - protein, 152 aa, Gossypium hirsutum
  Clone ID: LIB3135-002-Q1-K1-D11.pep
LVPCFELTLEALNLYHEELGVIRDNMIDLIDRLCKLLMLTKDRILPLQTIDQLKWDLGLPYFYIDNLIPNYADLFSLFRLPDDRIGLKLLSWDDTLAVSQLEKNVARQTEEDLKNNCLAFPIGFTRGFGLKRKCMGWLEEWQKLPYTSPYAD

SEQ ID NO: 91514 - protein, 124 aa, Gossypium hirsutum
  unsure (1)..(124): unsure at all Xaa locations
  Clone ID: LIB3135-002-Q1-K1-D2.pep
LVYKVYTDGRSNISRRGRKATIREFYGVILPSLQRLHGNLGELDDDKEAGGSSAKKRVDLDNRHGNIDFEREDECGICLEPCTKMVLPNCCHAMCIKCYWKWDPKXSESCPSCRVSWKGANLEN

SEQ ID NO: 91515 - protein, 68 aa, Gossypium hirsutum
  Clone ID: LIB3135-002-Q1-K1-D8.pep
PRASKISPKTFFFNIHTICIWEALSHVRDLLLSSEIYLQSTFTATNPHLIYSAFQGLLTHHCRRHNPL

SEQ ID NO: 91516 - protein, 37 aa, Gossypium hirsutum
  Clone ID: LIB3135-002-Q1-K1-E9.pep
NEKFGHLVDRANLIEFRVPAIFISNYGSLIMLKPHAS

SEQ ID NO: 91517 - protein, 125 aa, Gossypium hirsutum
  Clone ID: LIB3135-002-Q1-K1-F1.pep
GMVTQLPSSDETSTSKKQLLARLDVCMGGRVAEELIFGQDHITTGASSDLHTATELAQYMVSNCGMSDTIGPVHIKERPSSEMQSRIDAEVVKLLREAYDRVKALLKKQEKALHALANALLEYET

SEQ ID NO: 91518 - protein, 76 aa, Gossypium hirsutum
  Clone ID: LIB3135-002-Q1-K1-F2.pep
LDLLIPLSKFLQDRMMKELHSQGIRIEDIATVLKRSPIHPRIIEAIKSAHALGCDLKIVSDAYTFFIETIFGAFTA

SEQ ID NO: 91519 - protein, 144 aa, Gossypium hirsutum
  unsure (1)..(144): unsure at all Xaa locations
  Clone ID: LIB3135-002-Q1-K1-F5.pep
GEHPRGTPNNLMPYMQQVAVGKRPALTIFGNDYSTKDGTCVRDYIHVVDLAQGHIAALRKLSDPKLACEVYNLGSGKGTSVLEMVAAFEKACGKKIPLGMAARRPGDAEILYASTEKAKRELNWKXKYSIEDMCRDQWNWANNN

SEQ ID NO: 91520 - protein, 54 aa, Gossypium hirsutum
  Clone ID: LIB3135-002-Q1-K1-G10.pep
QFGLKFKFLGVISGNAPNIVRLDYFEFVSIGLGSTNLRLSQLNFPVQKKKLLEI

SEQ ID NO: 91521 - protein, 56 aa, Gossypium hirsutum
  Clone ID: LIB3135-002-Q1-K1-G6.pep
ALRPLHVQATYGWRTSYGLLSQRKQQKKKDAWFGTFSPILDKEKGGYEALLGRPWS

SEQ ID NO: 91522 - protein, 85 aa, Gossypium hirsutum
  Clone ID: LIB3135-002-Q1-K1-G9.pep
DAYMWHLFQSALPPILVNRDSANDIIILIRRYHAPPCFQDFPHCKDLLHSFRPCQLCRWTAFLGPHKAPHLMLLSYSAYTSSDEC

SEQ ID NO: 91523 - protein, 64 aa, Gossypium hirsutum
  Clone ID: LIB3135-002-Q1-K1-H2.pep
RRYWTNTTSHCYITSPPSHVFLQAKNNKEDSKKAIKFKTDMGFALLPFLICLIDLSNDKETPEI

SEQ ID NO: 91524 - protein, 94 aa, Gossypium hirsutum
  unsure (1)..(94): unsure at all Xaa locations
  Clone ID: LIB3135-002-Q1-K1-H8.pep
FHSTFASTSIGASSIQNLGEACLLLSSTRMCAVSFAFLGTYLKSIKANPLTRSLISLIKILMVDLSSSGDFSLLIIVRASPXTKIFQNPSSSIK

SEQ ID NO: 91525 - protein, 63 aa, Gossypium hirsutum
  Clone ID: LIB3135-003-Q1-K1-A12.pep
LWKNVSLLIVFILYFKTQNLNLFKTIFFKYKFLFSSILYKKNIFIYHLYTFLTTFKYLDSFFF

SEQ ID NO: 91526 - protein, 71 aa, Gossypium hirsutum
  Clone ID: LIB3135-003-Q1-K1-A2.pep
FWATLLAALCPDDLYAYASLIKENIIGFIFQLQIDFKSRATLLPKKDVIENASISRCLHTLGFTYEEKGFL

SEQ ID NO: 91527 - protein, 42 aa, Gossypium hirsutum
  Clone ID: LIB3135-003-Q1-K1-A6.pep
KTPTNKIKLQSNTLKWSPLTYISKQTSPPNKQNTPFLYSPQK

SEQ ID NO: 91528 - protein, 48 aa, Gossypium hirsutum
  Clone ID: LIB3135-003-Q1-K1-A8.pep
STNTTHASFYMITTISYRGGEILEAQHAQPKAPPKTNPDLMCILFLFL

SEQ ID NO: 91529 - protein, 42 aa, Gossypium hirsutum
  Clone ID: LIB3135-003-Q1-K1-B2.pep
SFTQLKLYLWCLVLYMVIGQGWLLYQSCGINLFNNTYSYIYN

SEQ ID NO: 91530 - protein, 77 aa, Gossypium hirsutum
  Clone ID: LIB3135-003-Q1-K1-B7.pep
RKYPYPRERGWLLELATRSPSPYSMTCTSLLELTPLRTLVSSCTSFAHTYERLTWRAYPMRPTSRLSTLTTKANPNE

SEQ ID NO: 91531 - protein, 58 aa, Gossypium hirsutum
  Clone ID: LIB3135-003-Q1-K1-C11.pep
RFLVSHHSRAPAALFSATAPVSGMRSVSFSICMWRSYHPIVVPIIFVIIALVIFGRVG

SEQ ID NO: 91532 - protein, 73 aa, Gossypium hirsutum
  Clone ID: LIB3135-003-Q1-K1-D12.pep
YLKYYMHILTREYAQKKAPFFTLSLDCELTYPFDENATTLTYYLQTRLLACLDQVNRLARYLLKRDIVNSLVP

SEQ ID NO: 91533 - protein, 69 aa, Gossypium hirsutum
  Clone ID: LIB3135-003-Q1-K1-D3.pep
TYIHTLLKNLYYLYHLNKLAPPFKISNLSFPYLPTLNSPLLTPNSHSMPFLLQPLALKTPALSPLIPLP

SEQ ID NO: 91534 - protein, 56 aa, Gossypium hirsutum
  Clone ID: LIB3135-003-Q1-K1-D5.pep
YNKQLPYTPNGLPPSLLVAMRLDQGQARQITLTFVTTQARILVSTKCNSNAYVKVS

SEQ ID NO: 91535 - protein, 60 aa, Gossypium hirsutum
  Clone ID: LIB3135-003-Q1-K1-D9.pep
EIIVLSNNTPFLKLVIMGMARLQRTLASSVSYTAALTVPEYMVSNEYSMTETHKRSYSKH

SEQ ID NO: 91536 - protein, 128 aa, Gossypium hirsutum
  Clone ID: LIB3135-003-Q1-K1-E1.pep
LIVQFRVSSVISKLFLALTCAPSRSSSCMISTVDLSVVSTASPSVFSTMKFIIRMHYTTRHGRMSLAGSPIPNLITKSLCVGQCLCLQRGLQLARLAACLTSRYTTIQLSRSPSRSSLYSFPSFLSFS

SEQ ID NO: 91537 - protein, 67 aa, Gossypium hirsutum
  Clone ID: LIB3135-003-Q1-K1-E10.pep
ENQHPPHGGVEAEAVGGGAGNLIGLRHHNFFNSVFMFVRPSKLIHFHIPIFTTPLLICFRLMLPLGI

SEQ ID NO: 91538 - protein, 83 aa, Gossypium hirsutum
  unsure (1)..(83): unsure at all Xaa locations
  Clone ID: LIB3135-003-Q1-K1-E9.pep
SLSSEGEKLNSMNLLLYMAGRGGVFLLPATLIMEEKVVGITLALAREDVKNLLELLFNXTTSILWKFTNFLVTKHTNALTLQV

SEQ ID NO: 91539 - protein, 110 aa, Gossypium hirsutum
  Clone ID: LIB3135-003-Q1-K1-F1.pep
MGDILSEEQIVEFKEAFCLFDKDGDGCITVEELATVIRSLDQNPTEEELQDMITEVDADGNGTIEFAEFLNLMAKKMKETDAEEELKEAFKVFDKDQNGYISTNELKHVM

SEQ ID NO: 91540 - protein, 113 aa, Gossypium hirsutum
  Clone ID: LIB3135-003-Q1-K1-G1.pep
LDLHDIALYFFPVDMERSQRNYNKLLQLMGMENSVMISYIDDLELLIFTSEQLHADSWGVFTGSNKEFFGGVFRRVKEHQKLPSLVSCTQDAGEADDMVSGKMVGISNMALSK

SEQ ID NO: 91541 - protein, 57 aa, Gossypium hirsutum
  Clone ID: LIB3135-003-Q1-K1-G4.pep
SSVHNSHSVSISRDHSNAVFYVNRRISFVGTSSEIIVRSLGKATEVNVSSPSAGRHR

SEQ ID NO: 91542 - protein, 49 aa, Gossypium hirsutum
  Clone ID: LIB3135-003-Q1-K1-G5.pep
MNLNSFKCLYLKIFYLIKNNIFIGNINCRVKAPLGGLNLCALKNNNLNN

SEQ ID NO: 91543 - protein, 51 aa, Gossypium hirsutum
  Clone ID: LIB3135-003-Q1-K1-G8.pep
SIKCLVVTPLFFFFFFFLFLFFFFFFFFFFFIFFFFFFFSLIEMGYINHLI

SEQ ID NO: 91544 - protein, 61 aa, Gossypium hirsutum
  Clone ID: LIB3135-003-Q1-K1-H10.pep
IDHLSSSGSAMGGADPAGPLVHSFCKIQEDHKSPLKSSRVSVSEKSSLVISDGSSDRSFSP

SEQ ID NO: 91545 - protein, 95 aa, Gossypium hirsutum
  Clone ID: LIB3135-004-Q1-K1-A6.pep
SHIKEEVLVPGPLCSAGTTLENGTDHVVKTEEAPIGAFHFVGALPEENKESKNYTSKKVLDAVAAAEARKRRKELTKLKNLHGRHRSPLSLSAKI

SEQ ID NO: 91546 - protein, 118 aa, Gossypium hirsutum
  Clone ID: LIB3135-004-Q1-K1-B1.pep
RPKSPNVNISETLGLSSTLRRSRAPKRFRTLQPPVTTPSLQHRTASAQPSYAMAAPPYDANAFRTCTPNTKRQQTQENSRKIVYFYYFLLSTIKHCIFFPLWGFVFTNTSTFLHTEYK

SEQ ID NO: 91547 - protein, 74 aa, Gossypium hirsutum
  Clone ID: LIB3135-004-Q1-K1-B10.pep
NQSHGLKRLITNYQKKIQKQKKREKKPKKKKKEEKPKYGFYSGFVLCEVIGGPLNLMSICGLHLISKTLSKCPI

SEQ ID NO: 91548 - protein, 56 aa, Gossypium hirsutum
  Clone ID: LIB3135-004-Q1-K1-B5.pep
SVCCGCSMAFTSRTLCVHVGQQHIWVKAREFYRPVISATRTRAFWLSKLQLISRCL

SEQ ID NO: 91549 - protein, 118 aa, Gossypium hirsutum
  Clone ID: LIB3135-004-Q1-K1-C10.pep
FHASSTSLAVPTKPGMSMDSVLHVKGKKPKKNFIWVQILCTINFYFYFYDLALKLRYNNNNNNNNNKETRNFDLGYSCLSLMGKNSERVPLIKHTMVDKRDFSFQCNSLYISSEEKKY

SEQ ID NO: 91550 - protein, 63 aa, Gossypium hirsutum
  Clone ID: LIB3135-004-Q1-K1-C11.pep
KAPTPSTFFFVNKQSLPTSFNSLYQPSLPHFHLSHIIHIQKVIIFSVYRIPFLHHTPSFIIDC

SEQ ID NO: 91551 - protein, 81 aa, Gossypium hirsutum
  Clone ID: LIB3135-004-Q1-K1-C2.pep
KNRRMGFDQLEDIPEEREGGGERDGGFCCTCGETDSGGEEVDIEAAGVSWAFDVGIWIICFGVGYFVSKATAKSLRRMRLL

SEQ ID NO: 91552 - protein, 63 aa, Gossypium hirsutum
  Clone ID: LIB3135-004-Q1-K1-C6.pep
HPTPYSTRVLDAIASANITHLLFQQTTKTATTHYHKQCTFYINTRFTEIPYQLPYCHFHCTCI

SEQ ID NO: 91553 - protein, 67 aa, Gossypium hirsutum
  Clone ID: LIB3135-004-Q1-K1-D1.pep
WKNLIMQHVDHSAGDLIHLLQGLLRYDPIDRLTAREALRHPFFSRDQFRRLSLAGIGWPGMNEYLRK

SEQ ID NO: 91554 - protein, 43 aa, Gossypium hirsutum
  Clone ID: LIB3135-004-Q1-K1-D10.pep
YFLILLLSLGFFTTPSLGCYFSTYYGKPPTPIYKPPNVKPPPY

SEQ ID NO: 91555 - protein, 55 aa, Gossypium hirsutum
  Clone ID: LIB3135-004-Q1-K1-D4.pep
SYIRNDLFYPSRRIPRIYISIPNIDSVGSSLTLFNLLPFVFLLSISALFFIFILK

SEQ ID NO: 91556 - protein, 70 aa, Gossypium hirsutum
  Clone ID: LIB3135-004-Q1-K1-D5.pep
VVITKHYLKNQSLKNMQNQPFASSLYFLRPHPQSFHMIINKITIYKVLHSVILLNSQSYLLLSETAPFSS

SEQ ID NO: 91557 - protein, 144 aa, Gossypium hirsutum
  Clone ID: LIB3135-004-Q1-K1-E1.pep
PSANSMALQLVSSDPDLSQRGFLHTSDIMDITNDLKDYDVVFLAALVGMDKETKVRVIDHVAEYMTPGALLMLRSAHGARAFLYPVVDPCDLRGFEVLSIFHPTDEVINSVVIARKIPITKQCSVEYPLAPTKASNTCFDNEMF

SEQ ID NO: 91558 - protein, 74 aa, Gossypium hirsutum
  unsure (1)..(74): unsure at all Xaa locations
  Clone ID: LIB3135-004-Q1-K1-E11.pep
HASAHSYSHAYVNTPPTRGRVIVYMDHIXYTYYNTTTTILSKESFPRHVQKAHNLQQPTLQHIHLYDSHSPSPY

SEQ ID NO: 91559 - protein, 64 aa, Gossypium hirsutum
  Clone ID: LIB3135-004-Q1-K1-E12.pep
KKLILPFPFFIEYLNPNIDKGLIQSRQILITTINTANNIPSHNTTKSPTFCLTLNIDGIYGKTS

SEQ ID NO: 91560 - protein, 48 aa, Gossypium hirsutum
  Clone ID: LIB3135-004-Q1-K1-E4.pep
NIMELFLLSLICKIYQARQMWSFHWVLAFIFLYVCALNNRKSHGVNLL

SEQ ID NO: 91561 - protein, 43 aa, Gossypium hirsutum
  Clone ID: LIB3135-004-Q1-K1-F11.pep
HARILQNIFDNQNSTLDNFKVSFYNPPNSSTTLNATKDAPTKN

SEQ ID NO: 91562 - protein, 40 aa, Gossypium hirsutum
  Clone ID: LIB3135-004-Q1-K1-F4.pep
IQMFLTGLSCITISANISLIEIPASSSSLTPLLARLNCRL

SEQ ID NO: 91563 - protein, 125 aa, Gossypium hirsutum
  unsure (1)..(125): unsure at all Xaa locations
  Clone ID: LIB3135-004-Q1-K1-F6.pep
NLRFTMVSSSTATLEXGIGVVMILQSYKGSPIXIATKEENVLSSTLHLMAVRLFVTHTRLFFTGDLYSWRNCSDLIDKGNTKDIXIFGLSHXPQHIXGRMALLHTNMWKSQTTVAPREFWHNRGV

SEQ ID NO: 91564 - protein, 64 aa, Gossypium hirsutum
  Clone ID: LIB3135-004-Q1-K1-F7.pep
TFKDKRIQNAQLNYKQVLMSNITTNICHPFEFIHNSISFLTIFNLYMLSYSIYLTNIPIHTLTI

SEQ ID NO: 91565 - protein, 55 aa, Gossypium hirsutum
  unsure (1)..(55): unsure at all Xaa locations
  Clone ID: LIB3135-004-Q1-K1-F8.pep
RHYLTFTKLDIGFEEESSXDRRRLRCRIPSAENVPVDAVSIDDXAGRVGGRVGRP

SEQ ID NO: 91566 - protein, 59 aa, Gossypium hirsutum
  unsure (1)..(59): unsure at all Xaa locations
  Clone ID: LIB3135-004-Q1-K1-G11.pep
GGLSEFLGWTDQQRAQAAGECWGYRLLYXIRLVGVFVVADALFIGAQQVGRYLQDIRSH

SEQ ID NO: 91567 - protein, 77 aa, Gossypium hirsutum
  unsure (1)..(77): unsure at all Xaa locations
  Clone ID: LIB3135-004-Q1-K1-G6.pep
EVLKPSKKGQEKFLCLARGALNVEHFTCPSQFPXRKPNKNKNNKGCFFDCSSKCEVTCIWRKPNCNGYWSLFYYPRF

SEQ ID NO: 91568 - protein, 54 aa, Gossypium hirsutum
  unsure (1)..(54): unsure at all Xaa locations
  Clone ID: LIB3135-004-Q1-K1-H11.pep
TKPILLKFFXLGTIXNHPLVVLYIKSPSYXHQQHLPSHKQYSQPLKEHVMNPIP

SEQ ID NO: 91569 - protein, 78 aa, Gossypium hirsutum
  Clone ID: LIB3135-004-Q1-K1-H3.pep
KSLICFLITELFRLPDIYIHSGSINAPVTPPLSSPTALTPRTNTDWEDLTAPPGWSAQQHSFLPSSTPPIPGRHIVPD

SEQ ID NO: 91570 - protein, 102 aa, Gossypium hirsutum
  unsure (1)..(102): unsure at all Xaa locations
  Clone ID: LIB3135-004-Q1-K1-H5.pep
RVREITRTSLTYSAWDLSASKDRERGXWHPVTYKFSDATPVLIKSIKDIDNINYETENRREWCSSKGKPAPCFLFARKFTRPAALHLLNLSVLGARRGASET

SEQ ID NO: 91571 - protein, 85 aa, Gossypium hirsutum
  unsure (1)..(85): unsure at all Xaa locations
  Clone ID: LIB3135-004-Q1-K1-H8.pep
FVYSECRMHLLYTRIRFVHNVRCSFNYYCYYYYLGSCIYMLMVFLYLFLSKFNHNLIFLPFXKKRREEKKKKKKKKNKKKKKKGG

SEQ ID NO: 91572 - protein, 100 aa, Gossypium hirsutum
  Clone ID: LIB3135-005-Q1-K1-A10.pep
DRKKKSKSARKVGNPFSAAALDEVESDSELKEDEEDDVASFSFSDKKKKSKSMSSKKSGNSFSAALLDDEDERDASVSESTGAAAIDDYDDDTSMGAFSR

SEQ ID NO: 91573 - protein, 127 aa, Gossypium hirsutum
  Clone ID: LIB3135-005-Q1-K1-A2.pep
PRVRLAPYPVIRDFTQCLQDVGADVEIVKWNGSPHLEHYKHYPIQYKAAVASFLEKTTLVYSRRIRNLREMNGMHDEISELIYGLQKAAVDSNQSFRRVALGPSDHFFLPSSAKYHNSRESGSLQDE

SEQ ID NO: 91574 - protein, 61 aa, Gossypium hirsutum
  Clone ID: LIB3135-005-Q1-K1-A3.pep
VFTIILYRTQITSSIEDSILLHKSKTHYVELLMSMLAISYIPPLWFLTYIKLMHSYILLML

SEQ ID NO: 91575 - protein, 78 aa, Gossypium hirsutum
  Clone ID: LIB3135-005-Q1-K1-A4.pep
LSNSIPKQSQILEAVTVEYAAGPNIASFRLVASKTTTDALEELRGYKVMKNLLLSEGGKAYTSNVASAAEHSSTSKGT

SEQ ID NO: 91576 - protein, 46 aa, Gossypium hirsutum
  Clone ID: LIB3135-005-Q1-K1-A5.pep
HTALVYTPIVQLSKTILKVWRLNLQNRPSLYTEKDYPKNNVPPLRT

SEQ ID NO: 91577 - protein, 23 aa, Gossypium hirsutum
  Clone ID: LIB3135-005-Q1-K1-A6.pep
VLSPTVYNVVLSWARCGYLKEVW

SEQ ID NO: 91578 - protein, 56 aa, Gossypium hirsutum
  Clone ID: LIB3135-005-Q1-K1-A8.pep
SQTVQYAASPNITSFRLLSSKTTTDPLDELLGHKVIKNFLLIERRKAYTPKVASSS

SEQ ID NO: 91579 - protein, 110 aa, Gossypium hirsutum
  unsure (1)..(110): unsure at all Xaa locations
  Clone ID: LIB3135-005-Q1-K1-B10.pep
ESPESDGWGPNKAQKLNPAKPIEQSTEATMRKARVSVRARSEAPMISDGCQWRKYGQKMAKGNPCPRAYYRCTMARWCPVRKQVQRCAXNRTILVTTYEGNHNHPQLQQP

SEQ ID NO: 91580 - protein, 72 aa, Gossypium hirsutum
  Clone ID: LIB3135-005-Q1-K1-B11.pep
NVLSTHARIVFSSSDTTSDKGPMCNGHRRHEHNSGIMDVERGSCFTLVVHTCHVECMVVDNVGSGSMEALGG

SEQ ID NO: 91581 - protein, 128 aa, Gossypium hirsutum
  Clone ID: LIB3135-005-Q1-K1-B3.pep
GFHPRCDSYILQWQHFVRNRQRDTLFCFVGAPSVAMKNDFRGLLLNQCMNASGLCRSCDCASTRCSNGTSCILETFLNSDFCLQPRGDSFTRRSIFYCMVAGSILVLLWHRTGYLQYQWFLPNDPKSY

SEQ ID NO: 91582 - protein, 128 aa, Gossypium hirsutum
  unsure (1)..(128): unsure at all Xaa locations
  Clone ID: LIB3135-005-Q1-K1-B9.pep
DHVXVIKSKCLASLQDLESLPLNGCQKISDKXIEAITTCCLKLKVFSIYWNVRATDEGVKHLVKNCKCIVDLNFSGCKHLSDKSLQLVADNYPELESLNLTRCVKMTDSGLQQVFXKCSFFQSLNLYA

SEQ ID NO: 91583 - protein, 115 aa, Gossypium hirsutum
  unsure (1)..(115): unsure at all Xaa locations
  Clone ID: LIB3135-005-Q1-K1-C1.pep
AHVLTEWHPQPGDKKPRVGLLTDAVASERTTAELLNFAIAYGKTPVGPANDCNVAVQYARLTSVLWSIEGQDELXWQKQRLLEPQKLERAKTLLGRALRSPSIAHCTRAQKGHIE

SEQ ID NO: 91584 - protein, 80 aa, Gossypium hirsutum
  unsure (1)..(80): unsure at all Xaa locations
  Clone ID: LIB3135-005-Q1-K1-C12.pep
MDRRYSFFLVALALLFISMEASNVQGSNSKKAPYDAASTHYTVLXPSTGQERVYCLSRGACNGKVLTCPSQCAQRKPKKE

SEQ ID NO: 91585 - protein, 74 aa, Gossypium hirsutum
  Clone ID: LIB3135-005-Q1-K1-C5.pep
KKNILKNTIKISPNYLKNTRKTYSYMPPLNLLFILHIPTTLPTHLHLLHLNILPFPQLHPFYQNTPFSLLNNNE

SEQ ID NO: 91586 - protein, 64 aa, Gossypium hirsutum
  Clone ID: LIB3135-005-Q1-K1-C7.pep
SKFRLIIHQGSLSKIMYKQNIYQSVVVCTKVYVSKSVFFLSIENYSGYGVALLSSNTHFRIKMV

SEQ ID NO: 91587 - protein, 47 aa, Gossypium hirsutum
  Clone ID: LIB3135-005-Q1-K1-C9.pep
LLLPSPTLFLQLLKYQKRSITKNTTLRFLTKKPLFTQDYKETINTMT

SEQ ID NO: 91588 - protein, 76 aa, Gossypium hirsutum
  Clone ID: LIB3135-005-Q1-K1-D1.pep
CLVETQNSLSQTNYRTLRKKEESFLDSGVSHAEFSTCWVILNFLNSPSATWLGHCLTLWMGYLHSLVKTNLLLGLV

SEQ ID NO: 91589 - protein, 42 aa, Gossypium hirsutum
  Clone ID: LIB3135-005-Q1-K1-D2.pep
HSSSHASVCLFLEPKAVFRKPWTKTLLTNKCAVLFPSRICRI

SEQ ID NO: 91590 - protein, 55 aa, Gossypium hirsutum
  Clone ID: LIB3135-005-Q1-K1-D3.pep
KTCSISYPTLFQMLKPSLKQLGDLLTTHIPHPQYLAMTQPISRIAVQKVNNHTTC

SEQ ID NO: 91591 - protein, 69 aa, Gossypium hirsutum
  unsure (1)..(69): unsure at all Xaa locations
  Clone ID: LIB3135-005-Q1-K1-D5.pep
VCTTINVAKTLFTLTLHTNIASXLLKLRVFQVSLSDLTQSDDHHSYTMISLPTLTSLRQKCSNQLGLNE

SEQ ID NO: 91592 - protein, 90 aa, Gossypium hirsutum
  Clone ID: LIB3135-005-Q1-K1-D8.pep
HIVKELLSKTKYILDQRLSFGFRLRVLTSYNYTTSLAPTMIRVAFCPLLKLFFKQTTVIMLNRGKQDFSWRQTPDSIVQLPPTCFCLNWA

SEQ ID NO: 91593 - protein, 104 aa, Gossypium hirsutum
  Clone ID: LIB3135-005-Q1-K1-E11.pep
INCIEYFMAGDKPFLISGSGGYTAKLWDYETKCCVQKLEGHTRNVTATSVHPQLPIIITCSEDGTVRVWDKTSYRLDNTLAYGLERVWTVAYMKDSSKDDCGQN

SEQ ID NO: 91594 - protein, 36 aa, Gossypium hirsutum
  Clone ID: LIB3135-005-Q1-K1-E2.pep
FFFLCYHIVYCNHCINASILGGPQIDSRTMPNKIRA

SEQ ID NO: 91595 - protein, 95 aa, Gossypium hirsutum
  Clone ID: LIB3135-005-Q1-K1-E3.pep
MLQLYKACVIGQNQSLLMVRHEGGRCFDYGAGEAKVFVAILRDKKGREKKGQGERKLHVQFVFAHFERCFKQSSSLLIHSFYIYLNEEDALTAVN

SEQ ID NO: 91596 - protein, 42 aa, Gossypium hirsutum
  Clone ID: LIB3135-005-Q1-K1-E6.pep
PFQVIAALSGFYAMRHPRCRYRLPAVPINFFRRLPARTDSML

SEQ ID NO: 91597 - protein, 82 aa, Gossypium hirsutum
  Clone ID: LIB3135-005-Q1-K1-F10.pep
SSTMCQTFANMRTIIRGSATHNISLIKPSNLKHQSSVPASGNQRSHMKKARAFSVNLPNTESKILWTYLTDIGYNFFCLQIK

SEQ ID NO: 91598 - protein, 41 aa, Gossypium hirsutum
  Clone ID: LIB3135-005-Q1-K1-F3.pep
HTSNEYNNYCSMLIYWLYSGVACIIEQVPNTILYLTRSGTV

SEQ ID NO: 91599 - protein, 49 aa, Gossypium hirsutum
  Clone ID: LIB3135-005-Q1-K1-F7.pep
SGLQKGSLWWFHVDMKMLLFKNLVGDHQDKFSTPVKVLDMKHIKMRFAK

SEQ ID NO: 91600 - protein, 96 aa, Gossypium hirsutum
  unsure (1)..(96): unsure at all Xaa locations
  Clone ID: LIB3135-005-Q1-K1-F8.pep
PTRANTLTXTLSFYFQPTKPTPKPSFSQPLIHPINLLFTSQITNSHITLDIIHPSTSTHNHSHHILYNSLTKSTPLYPTILHPSHPILNFLQKIYS

SEQ ID NO: 91601 - protein, 106 aa, Gossypium hirsutum
  Clone ID: LIB3135-005-Q1-K1-G10.pep
VSMRYRESISKSTRGWKERLFSRNTSMAGLGFEIRREVNDGSNATVLRTIEPAETRDNIASPTVSSSLEDGSNPESNNHQIVDAGVETPLTETSAQASCAASSASK

SEQ ID NO: 91602 - protein, 52 aa, Gossypium hirsutum
  Clone ID: LIB3135-005-Q1-K1-G12.pep
QNAYHLKALSLQFLLLILKLINLTSINNNNMLLLLFYTYILALNPSNFFLLN

SEQ ID NO: 91603 - protein, 69 aa, Gossypium hirsutum
  Clone ID: LIB3135-005-Q1-K1-G3.pep
INEGEICLIVWLKLKKSNLYEGCDSILYREKISRMGELLSYRNEFCIIWMGIMRIDLRMSPPSMVFGFE

SEQ ID NO: 91604 - protein, 34 aa, Gossypium hirsutum
  Clone ID: LIB3135-005-Q1-K1-G6.pep
SQRLALLQVRWYLMLHSMVLYLNRNLNFCSYLRY

SEQ ID NO: 91605 - protein, 64 aa, Gossypium hirsutum
  Clone ID: LIB3135-005-Q1-K1-H12.pep
KCNNFLLTSSRYYQSLTLTKLLIMFLTTPMLRSSRLTLSILTTKSNYCRSSFLTLILFQTSFST

SEQ ID NO: 91606 - protein, 25 aa, Gossypium hirsutum
  Clone ID: LIB3135-005-Q1-K1-H3.pep
IYRYAWLCDKLISLAIFLVCIREYY

SEQ ID NO: 91607 - protein, 74 aa, Gossypium hirsutum
  Clone ID: LIB3135-005-Q1-K1-H5.pep
LYLILLTIYTVIILLYYLLKYTISFYANEFLYNNTSTLTYLLNIILPNGTYSTYNPTNQISSSPPYFYTSPPII

SEQ ID NO: 91608 - protein, 136 aa, Gossypium hirsutum
  unsure (1)..(136): unsure at all Xaa locations
  Clone ID: LIB3135-006-Q1-K1-A3.pep
PRVPRFRHFIHIDFGFMLCESPCGVNCENSPFKLTPEPLEVIDSDAXDCQVKFFTSFKDFAIQGFSTCRNLPKALIFFXEMLQDFCFPFLKGGPRPFQILKKRFLLNFTKKQCVPLLLSLISNFFKCHGEPRRFIF

SEQ ID NO: 91609 - protein, 34 aa, Gossypium hirsutum
  Clone ID: LIB3135-006-Q1-K1-A4.pep
VKGENVFGPFTPTLKNIGKYALKLVQENFFKIRI

SEQ ID NO: 91610 - protein, 71 aa, Gossypium hirsutum
  Clone ID: LIB3135-006-Q1-K1-B1.pep
KQLYIDWKARTGLGSVLENRVQMVRLFGVNIFKMPGSENVGLAGGCNGKRTREMELLELECSKKQRVIDAL

SEQ ID NO: 91611 - protein, 52 aa, Gossypium hirsutum
  Clone ID: LIB3135-006-Q1-K1-B4.pep
IYTRIQKMFLKRKIVCFGMAYIAVTIRTMKFMTNKLLSSKQFVIDVLPPGRP

SEQ ID NO: 91612 - protein, 144 aa, Gossypium hirsutum
  unsure (1)..(144): unsure at all Xaa locations
  Clone ID: LIB3135-006-Q1-K1-B8.pep
VRSENSSPNYVKVDRETDNDGKMKVVGACSTHLDGIQMSEDDSDNIEEAGPSELKEIQSPTIKPRKRVRFIVPESPKIESESMEELRELTEAREAGVAYILXHTCLRAKQGSSLIKKLVIDFGYEFLRKNRRTSTLALTVPHVS

SEQ ID NO: 91613 - protein, 32 aa, Gossypium hirsutum
  Clone ID: LIB3135-006-Q1-K1-B9.pep
ILFAVMKWKFLIKSCFKSGCMVIGLGCFGDIF

SEQ ID NO: 91614 - protein, 76 aa, Gossypium hirsutum
  unsure (1)..(76): unsure at all Xaa locations
  Clone ID: LIB3135-006-Q1-K1-C12.pep
KXGTTDASRMHNSASNFIIFFIPKLYLSVFNLNEVNQKDYFFSTFLHLPVTIDAGAHSHRHNTPKEPLVSAAMYII

SEQ ID NO: 91615 - protein, 52 aa, Gossypium hirsutum
  Clone ID: LIB3135-006-Q1-K1-C5.pep
LSQLPSSRKYRLFLFLETIIDASFIFLFLTCILYLPISLKFSTFISPNDHTY

SEQ ID NO: 91616 - protein, 115 aa, Gossypium hirsutum
  Clone ID: LIB3135-006-Q1-K1-C9.pep
THLPTKKTNKSSLQIITKTPSRLLKTFFPPSNTTKIIAKNFNQIPFNNISILLNSIKISSLFLISYKLILIYLKNNLNSFFLHLFSIILKIFISNLNFLYLFISLSILFISTTIF

SEQ ID NO: 91617 - protein, 47 aa, Gossypium hirsutum
  Clone ID: LIB3135-006-Q1-K1-D11.pep
KKPPRPTRPIKFNNFLQLFISKQTRYLARNLNILEHQISAYIYTSLT

SEQ ID NO: 91618 - protein, 40 aa, Gossypium hirsutum
  Clone ID: LIB3135-006-Q1-K1-D2.pep
YQMCFAYSMRYNDILITHRNAQNNYNIITCLFHRNFFLLI

SEQ ID NO: 91619 - protein, 50 aa, Gossypium hirsutum
  Clone ID: LIB3135-006-Q1-K1-D5.pep
IDEKIEIRMKIKRGIKYKKNIIDNKDKFNQVLIYKKECKSSLEIVIKSKI

SEQ ID NO: 91620 - protein, 52 aa, Gossypium hirsutum
  Clone ID: LIB3135-006-Q1-K1-D6.pep
QYQFKSPSGRCTLKPSSMHHNTYGITALTSLGKSSNSTNCSSCIWMVSAICA

SEQ ID NO: 91621 - protein, 73 aa, Gossypium hirsutum
  Clone ID: LIB3135-006-Q1-K1-D9.pep
NLACLYLSLLPLSVLRTLYSRDKTQPLSSLSPNYLSYYKTLNLESHSLISNVSQECIFIKITILSQYVIESIL

SEQ ID NO: 91622 - protein, 42 aa, Gossypium hirsutum
  Clone ID: LIB3135-006-Q1-K1-E12.pep
TYHFFCGIKNDSRFILRVHVKEVPAQRRIMLHLKEDREKFIF

SEQ ID NO: 91623 - protein, 81 aa, Gossypium hirsutum
  Clone ID: LIB3135-006-Q1-K1-E3.pep
RSLFWSYCLKNLCLSQGTKWKGGCFSARPHKMFSCLKYTFGALKKLKHNFFDWEMFSRWGVFLHIKCPNFFSHNIPDWAIF

SEQ ID NO: 91624 - protein, 38 aa, Gossypium hirsutum
  Clone ID: LIB3135-006-Q1-K1-E9.pep
PLIQKQYDNVRLVKSTHCLCLISHKCFPLSPLHIITEM

SEQ ID NO: 91625 - protein, 51 aa, Gossypium hirsutum
  Clone ID: LIB3135-006-Q1-K1-F1.pep
TRVPRDKQDRWPSRGMQNCQLWGAAYRRLISDPFNHYHKSPILSFTFSASR

SEQ ID NO: 91626 - protein, 38 aa, Gossypium hirsutum
  unsure (1)..(38): unsure at all Xaa locations
  Clone ID: LIB3135-006-Q1-K1-F3.pep
TPRRLVPRRXXGISNQXISTRLPNXXMMSPITRLYPYI

SEQ ID NO: 91627 - protein, 65 aa, Gossypium hirsutum
  Clone ID: LIB3135-006-Q1-K1-F8.pep
FSKIRQLGMMIGGLKILVRAARNHFQHSPRVKRAVTKERDLLKQTHRCLIKYKMGLHWGNIGKKI

SEQ ID NO: 91628 - protein, 73 aa, Gossypium hirsutum
  Clone ID: LIB3135-006-Q1-K1-G1.pep
PRAFFFNPRLKLERSALSNSVVIVGTMGVSGKWIKALVGLKRTDKSQSSEKKENRAATSKFRHRRKHSIEFYT

SEQ ID NO: 91629 - protein, 92 aa, Gossypium hirsutum
  Clone ID: LIB3135-006-Q1-K1-G10.pep
KKPAPPTRSYTRTNTFFFLITPYSNNILSFFKTFMPRYTTFKNIYHHFFSFTIPFLTIYPSNTLDYISSTTIITTSYNISIIHPKSHINPNH

SEQ ID NO: 91630 - protein, 41 aa, Gossypium hirsutum
  Clone ID: LIB3135-006-Q1-K1-G9.pep
RNQNFPQTLTLKPSLLNPRLVFNWSKPPPTSIKTTEHQTKA

SEQ ID NO: 91631 - protein, 119 aa, Gossypium hirsutum
  Clone ID: LIB3135-006-Q1-K1-H1.pep
MGNCLRHQSSTQWAGDDWGTTVADYGEDDGFSDIKTKEKGIVGDHHQKDGFITTSSTPTVHEVKVKITKKQLEELLGRVDVKELSVQQVLAQLINVSNQFDETNQRSWRPALQSIPEVN

SEQ ID NO: 91632 - protein, 73 aa, Gossypium hirsutum
  Clone ID: LIB3135-006-Q1-K1-H4.pep
HRSIQTLFSESMPWLYLLGGMVLTLMIALPTYILALLTSIRGVFLAIKSQRMSVLNLYDYIHIVCLLTPSLPP

SEQ ID NO: 91633 - protein, 89 aa, Gossypium hirsutum
  Clone ID: LIB3135-006-Q1-K1-H9.pep
KNRPDPPVRKKTKLLLNIFLHHNYNQPCPFKKVLAPNTPHVTSHNNSLSFTETKFLLTKYKIPILPTPRLLLSILTIPRKPYLQNNLTF

SEQ ID NO: 91634 - protein, 77 aa, Gossypium hirsutum
  unsure (1)..(77): unsure at all Xaa locations
  Clone ID: LIB3135-007-Q1-K1-A10.pep
AYAPXSYADMSNLLLSCPILXALHGFHTPGAPLHKKNSILFSKPPLIVLPTLAKFTKPCASQRPSIHVHIYMQETPQ

SEQ ID NO: 91635 - protein, 73 aa, Gossypium hirsutum
  Clone ID: LIB3135-007-Q1-K1-A11.pep
ITKTQLHHYLSHLNVVTAHHHDDDNTFDNDEVSIYYDYPIHYITYKLFILSDHKLYPAPLDSLTLYTILSYTM

SEQ ID NO: 91636 - protein, 116 aa, Gossypium hirsutum
  unsure (1)..(116): unsure at all Xaa locations
  Clone ID: LIB3135-007-Q1-K1-A2.pep
PRVRLKSGGHNVTALDLSGSGVDPQQVNTLRSISDYIKPLREFMASLPDEXKVVLVVHSLCGLAISQAMEMFAEKISVAVFVTALMPVPTLNASILTQKVLRDLHPHMENHYTYDD

SEQ ID NO: 91637 - protein, 43 aa, Gossypium hirsutum
  unsure (1)..(43): unsure at all Xaa locations
  Clone ID: LIB3135-007-Q1-K1-A3.pep
LXIMYGLNIDTFFSNTSTCLIWLNCELSHHHPFVTKIQNTYNL

SEQ ID NO: 91638 - protein, 32 aa, Gossypium hirsutum
  Clone ID: LIB3135-007-Q1-K1-A7.pep
ADPRVLPHVRPINFKVFSKHKYLVHCERLETV

SEQ ID NO: 91639 - protein, 123 aa, Gossypium hirsutum
  unsure (1)..(123): unsure at all Xaa locations
  Clone ID: LIB3135-007-Q1-K1-B1.pep
EVNLILPGQRIVERWSPLEPDEIIMYFDGAFDKQIFKYGIGIVCRDSEGKILCFRLEVNNRIHTTFAAKDLACVQAVRMGLDVSYQRVVVEGDALSPIKQIQRNENNKSMLSPYIXDNKTARV

SEQ ID NO: 91640 - protein, 40 aa, Gossypium hirsutum
  Clone ID: LIB3135-007-Q1-K1-B10.pep
LLFLISRIIQMLSYIDYYTSHFLLLKLFWNNSNTTLLNSS

SEQ ID NO: 91641 - protein, 39 aa, Gossypium hirsutum
  Clone ID: LIB3135-007-Q1-K1-B12.pep
VTLLQSHIHNYHIFIHLVLNTQIYLNHIPYKFTISLPHT

SEQ ID NO: 91642 - protein, 57 aa, Gossypium hirsutum
  unsure (1)..(57): unsure at all Xaa locations
  Clone ID: LIB3135-007-Q1-K1-C10.pep
GLMFLNRSKELMKLGNCCWNFGILVENQIRRNVWGELWIMNVYHAYXXIGKFKLEIR

SEQ ID NO: 91643 - protein, 125 aa, Gossypium hirsutum
  unsure (1)..(125): unsure at all Xaa locations
  Clone ID: LIB3135-007-Q1-K1-C12.pep
RTKPENVLVIQNIHIMLSHTHPCLGCTVSPTLLKTTSLESHPLKKNPVHSLHPARIQPSCIQPSCLVPTTCFSPPLFSNLSSKDLMLQNELXNQLSPLPELIPQPTNARSMTFIRTHHYSAPDII

SEQ ID NO: 91644 - protein, 59 aa, Gossypium hirsutum
  Clone ID: LIB3135-007-Q1-K1-C3.pep
KLTKAYTPILEIFKQLYYGHTAHYVLKLETTLLNHFFIRPSATIVFFMSFRASSKSSHN

SEQ ID NO: 91645 - protein, 126 aa, Gossypium hirsutum
  unsure (1)..(126): unsure at all Xaa locations
  Clone ID: LIB3135-007-Q1-K1-C6.pep
FTLTHRHYQGSIGYVFTLFKLNKYEFYVLTEHKAKTYINLKKSTTPKYILQPLFHLNYXNTTIDQNIHXNINQTDTSNHYTQGGRLQISLYYLQIEFNHFKIYSELILLTTYTHITTPLPNTIRPI

SEQ ID NO: 91646 - protein, 91 aa, Gossypium hirsutum
  Clone ID: LIB3135-007-Q1-K1-D10.pep
RTGSECIQRIQSVAYHFIDVSCSSVYMIAEMINKDGIHILINLNGYTKGARNEIFAMQPAPIQVSYMGFPGTTGADYIDYLVTDEFVSVNL

SEQ ID NO: 91647 - protein, 83 aa, Gossypium hirsutum
  unsure (1)..(83): unsure at all Xaa locations
  Clone ID: LIB3135-007-Q1-K1-D11.pep
FTKQLLFYIIFSSPHNXSHHNIFFFTTITITTTTTTTTTTTIFFHLSYMTHYNIKIIPNFSSKLYNHSSTPSFFTTQKFYYSL

SEQ ID NO: 91648 - protein, 61 aa, Gossypium hirsutum
  Clone ID: LIB3135-007-Q1-K1-D4.pep
DQSVLLATTKTNKHNKPSTLRHKCAMKKDFPNMANAVKNHLTHNYYRPYLTKATLAKLSAL

SEQ ID NO: 91649 - protein, 53 aa, Gossypium hirsutum
  unsure (1)..(53): unsure at all Xaa locations
  Clone ID: LIB3135-007-Q1-K1-D5.pep
KHITPHSPTPIKIIPKSNDGLTNLSNPDQTTIXILFYLLYTTKLVAKHKSLKN

SEQ ID NO: 91650 - protein, 66 aa, Gossypium hirsutum
  Clone ID: LIB3135-007-Q1-K1-D9.pep
SSGLIPSCNQDYSFPAPTCHQTIILGELLMQELTEPNQTIAPRSTYSYTIKIQSPETYCFINNSTY

SEQ ID NO: 91651 - protein, 77 aa, Gossypium hirsutum
  unsure (1)..(77): unsure at all Xaa locations
  Clone ID: LIB3135-007-Q1-K1-E10.pep
PPNPFQKINISLFSXKRLTFLHGCPKPVIHNDFKTSNVLLYFYYNSKLSYFCLTKTVPQRDKTHVSTLPIFTYCYAS

SEQ ID NO: 91652 - protein, 66 aa, Gossypium hirsutum
  Clone ID: LIB3135-007-Q1-K1-E12.pep
IHPPTHPILFLFRHYENQPMTSLNITIPHPPNQISHLQPSVKQKILTHIFTIQIPIQSYYTHSLHS

SEQ ID NO: 91653 - protein, 40 aa, Gossypium hirsutum
  Clone ID: LIB3135-007-Q1-K1-E3.pep
YRVYRLYKKLNFKYIQLQINIYILITPHYYFLFFHLNILF

SEQ ID NO: 91654 - protein, 33 aa, Gossypium hirsutum
  unsure (1)..(33): unsure at all Xaa locations
  Clone ID: LIB3135-007-Q1-K1-E5.pep
HASXERNAXXXEQHTKWVIWPLLHINETSMIKP

SEQ ID NO: 91655 - protein, 61 aa, Gossypium hirsutum
  Clone ID: LIB3135-007-Q1-K1-E7.pep
CALNIIPEMANMLMYTITTFLPYNKHHKLLSFSVKILNYCFPVQSKRCKNDLHLTISDRIN

SEQ ID NO: 91656 - protein, 117 aa, Gossypium hirsutum
  unsure (1)..(117): unsure at all Xaa locations
  Clone ID: LIB3135-007-Q1-K1-F10.pep
LYIAGLQHXYSQSGGXRPVGVSTLIVGFDPYTDKPALYQTDPSGTFSAWKANATGRNSNSMREFLEKNYKETSGKETIKLAIRALLXVVESGGKNIXVAVMTKKDCLRXLEESEIDE

SEQ ID NO: 91657 - protein, 72 aa, Gossypium hirsutum
  unsure (1)..(72): unsure at all Xaa locations
  Clone ID: LIB3135-007-Q1-K1-F12.pep
LNFPFHPYTYNPPLYHTHPSPTLFSXKANSTIKNSNSIRQLLQNNYNYTSLKYTIKLSILPLLKFLKKLAKN

SEQ ID NO: 91658 - protein, 89 aa, Gossypium hirsutum
  Clone ID: LIB3135-007-Q1-K1-F3.pep
TLNAQMITEMSRTYLSENLKQPTTDKLKKHNSKTIIESPNGFYSNPREEKAKIMNNYSSIEAYKKCRRNIDSTAIQKYIHNTESSYILA

SEQ ID NO: 91659 - protein, 67 aa, Gossypium hirsutum
  Clone ID: LIB3135-007-Q1-K1-F4.pep
RIVPFRRHKAGKSSVLKIWPLIKGIYIVTPKRKRGPLWRIVFSVPVRPVGPLASESAVRGISATRQS

SEQ ID NO: 91660 - protein, 48 aa, Gossypium hirsutum
  Clone ID: LIB3135-007-Q1-K1-F6.pep
SQSKIPTSTPITITHSTYPPYTSQKALSSTIHYPYTSPTTHLPKHTHL

SEQ ID NO: 91661 - protein, 92 aa, Gossypium hirsutum
  unsure (1)..(92): unsure at all Xaa locations
  Clone ID: LIB3135-007-Q1-K1-F8.pep
TLFLISDLLITSDQGLFVSFIQLSEFQLPILIHPFYCHXRNVRTXTTTFALSSITYYKIRRTFTFKPLHFYCSESLPCICVTLSCIELKPNP

SEQ ID NO: 91662 - protein, 76 aa, Gossypium hirsutum
  unsure (1)..(76): unsure at all Xaa locations
  Clone ID: LIB3135-007-Q1-K1-F9.pep
GATHTCDRFPTTTSFYFPPFTFXTAMCSIFFLNTXXNIPSFYLHTFHSYPLFIFNPFYTSINTSYPHIYYSTFYFN

SEQ ID NO: 91663 - protein, 57 aa, Gossypium hirsutum
  unsure (1)..(57): unsure at all Xaa locations
  Clone ID: LIB3135-007-Q1-K1-G10.pep
IHHQALSHALPGHNFXFNFNNVPFYDLKLRFLSSNSYYYPSNEAANFTYQVIIINYP

SEQ ID NO: 91664 - protein, 56 aa, Gossypium hirsutum
  Clone ID: LIB3135-007-Q1-K1-G2.pep
LILNIQNIIRKKKIQVPTPSESINWLQMVIETTTETVTSFYYSFYFSFQTLPLWKK

SEQ ID NO: 91665 - protein, 56 aa, Gossypium hirsutum
  Clone ID: LIB3135-007-Q1-K1-G4.pep
MFSLWGLVIQTVIYFVCKSYHHENIDKSALSDHLEVYLGEYVPLTVKDVQLEQYHV

SEQ ID NO: 91666 - protein, 121 aa, Gossypium hirsutum
  unsure (1)..(121): unsure at all Xaa locations
  Clone ID: LIB3135-007-Q1-K1-H1.pep
TICTKCDGKGKIPCATCGSRGLLKCKTCNGSGSLLTRKIAVVKWKTLSTRKVSATSGAASVPDEIFHRAKGVQLCNTQAYQCTPAYFADSFFLNTXSSDVIADRASVPPTAQVICERHTIS

SEQ ID NO: 91667 - protein, 129 aa, Gossypium hirsutum
  unsure (1)..(129): unsure at all Xaa locations
  Clone ID: LIB3135-007-Q1-K1-H11.pep
VTPDVAAPLLPNNRTFKKFTFRGVDLYALFHISTDELFNLFTARPRPMFXTSLKMKPMALIKKLHKAKLDAPPDXKPEPIRTHLRNMIIIPEMIDSIICAYNTKTFNQVAINPQMINHFFAEFSISYIP

SEQ ID NO: 91668 - protein, 61 aa, Gossypium hirsutum
  Clone ID: LIB3135-007-Q1-K1-H3.pep
IVKFKESCNVSVDDIVVTRVNTDRVLNGVKMDRVGYLSGILVRLKKRGKLMFKVLWNHMCK

SEQ ID NO: 91669 - protein, 56 aa, Gossypium hirsutum
  unsure (1)..(56): unsure at all Xaa locations
  Clone ID: LIB3135-007-Q1-K1-H9.pep
KNAQLEYKRVQENSEQIYKALVFFIKKLLXIQDWLEKINEQSSQKVLAVKHKYNHL

SEQ ID NO: 91670 - protein, 63 aa, Gossypium hirsutum
  Clone ID: LIB3135-008-Q1-K1-A1.pep
EEPRVTDNCEARKSLILFDYTRTRTHSLPRFWGSLTQLLIYEMYMLTILAGINLTMIKDRGST

SEQ ID NO: 91671 - protein, 44 aa, Gossypium hirsutum
  Clone ID: LIB3135-008-Q1-K1-A11.pep
LGVLLSGGGFRRPMHVSIKQTRPTFRAGEKENPPLGSLDTRPNQ

SEQ ID NO: 91672 - protein, 43 aa, Gossypium hirsutum
  Clone ID: LIB3135-008-Q1-K1-A12.pep
HASGFFDAHAIWHATTIAVTCLWWSFITNHANFQTSILLKKAK

SEQ ID NO: 91673 - protein, 87 aa, Gossypium hirsutum
  Clone ID: LIB3135-008-Q1-K1-A4.pep
TVPWVFTIGNSHLSAFLLCCINDMELQNTFLVIAYVRYSPHHVRQHLYMLTQPLTSNINVRFRRARSSLRAPMGFSIESLEAFLVSG

SEQ ID NO: 91674 - protein, 107 aa, Gossypium hirsutum
  Clone ID: LIB3135-008-Q1-K1-B1.pep
TGKVLLQLAHLFETWEEKEYSVMAGVELKKLFPNKKIKKVTEMSLSANQERGEMEKRTLAWKVECGGGGSKMVRGGAVDPAKLLVELASMEIRTFLIDVDYIQLVGG

SEQ ID NO: 91675 - protein, 49 aa, Gossypium hirsutum
  Clone ID: LIB3135-008-Q1-K1-B3.pep
YLKGNLIEQHIFLINMNLSLQQTRMENTLTIHHHALITRFCTIRNYFFG

SEQ ID NO: 91676 - protein, 63 aa, Gossypium hirsutum
  Clone ID: LIB3135-008-Q1-K1-C1.pep
HASVKSEICTHFVNCELRSGVIGDRSMMGSDPATTNYPGKIPSGLDLPSDVADEKLSNDGEGK

SEQ ID NO: 91677 - protein, 56 aa, Gossypium hirsutum
  Clone ID: LIB3135-008-Q1-K1-C12.pep
MCVKILTTRTWTERPYEASLFPGIGFGLFLPSLHGMQTKPASTGARTINEIPLWKS

SEQ ID NO: 91678 - protein, 60 aa, Gossypium hirsutum
  Clone ID: LIB3135-008-Q1-K1-C2.pep
SADITNELQKTVIGSALTSNPALPLQDSLVPPPQADTPVILLLLSLMLSPFHVYNFMLFY

SEQ ID NO: 91679 - protein, 107 aa, Gossypium hirsutum
  Clone ID: LIB3135-008-Q1-K1-C5.pep
KKKKKKKKTKIYKKKKNWETRGKKTATQKSSPLTNTFMQNDTLATTYPQLEYPGRPLTPLTLQNHCLFLTKMTCPNYPFSKPFYLKPDLTKIHAHPLITPTNECNST

SEQ ID NO: 91680 - protein, 100 aa, Gossypium hirsutum
  unsure (1)..(100): unsure at all Xaa locations
  Clone ID: LIB3135-008-Q1-K1-C6.pep
NLEPNTMNSVRTEPYGQXYGPDNYQLSQSAACNNLANGHYTERAELIDSDLDVGRKEAQNXHXLQGIKECHSLGGGTASSIXTMVLSKIRKVNTDTIMLT

SEQ ID NO: 91681 - protein, 80 aa, Gossypium hirsutum
  Clone ID: LIB3135-008-Q1-K1-C7.pep
HYTLSIFSPKFTLMAGVLQRSHPINLNVTHLIGITEHASFTGFFYHEEDRTTTATEHLRSLNPELHAFHVHALSATTKVC

SEQ ID NO: 91682 - protein, 55 aa, Gossypium hirsutum
  Clone ID: LIB3135-008-Q1-K1-D3.pep
ELSTSMIGADATLFCMDLLPFLVESLMLLKVVEVPDSEPVSDEAMSLSSNSCSVT

SEQ ID NO: 91683 - protein, 67 aa, Gossypium hirsutum
  Clone ID: LIB3135-008-Q1-K1-D4.pep
ASKGESKGCKLALIYILGAYVPKITTCLPGKKAYGIEKENKEYDRGPANPESSLRERNFYFLLAALA

SEQ ID NO: 91684 - protein, 137 aa, Gossypium hirsutum
  Clone ID: LIB3135-008-Q1-K1-D5.pep
FKLMQQLEKTKPHFICCIKPNRKQLPGMYEEDLVSQQLRCSGVLEAGRMSRSGYPTRMTHQEFADRYGFLLLETNESPDPLSISVAVLKQSNILPVMYQIGYTKLYLRIGLIGVLEDRRKQVLQTGCTKTIACVLTF

SEQ ID NO: 91685 - protein, 75 aa, Gossypium hirsutum
  Clone ID: LIB3135-008-Q1-K1-D6.pep
LWLLMGIIGVHASTSVVAHEASRVKTRLDPFTSFGPISKPKNSLRRLKPQVNHRTEKRTWQWCWRPLLRMLWRWP

SEQ ID NO: 91686 - protein, 78 aa, Gossypium hirsutum
  unsure (1)..(78): unsure at all Xaa locations
  Clone ID: LIB3135-008-Q1-K1-E11.pep
MIMINFNTYYYXNTFPFSPSILFKSLTFXSPKIFPTFSPNSFNSILIXTNPISLNILKINFFYILPFQNINHLILLHH

SEQ ID NO: 91687 - protein, 96 aa, Gossypium hirsutum
  unsure (1)..(96): unsure at all Xaa locations
  Clone ID: LIB3135-008-Q1-K1-E4.pep
PTXCEEALPEIHIKWSLIRFQDIHTSSWIFAGLHQQQPPYNKRSTDPINLHFVYWCLSHQTSPMPYIKFCLTIGANSSLLSCYLQRKSYYYIYARI

SEQ ID NO: 91688 - protein, 40 aa, Gossypium hirsutum
  Clone ID: LIB3135-008-Q1-K1-E5.pep
TTLLYIVALQSIIRHSNQIIILCDYTLTICLRYTFNGMEV

SEQ ID NO: 91689 - protein, 70 aa, Gossypium hirsutum
  Clone ID: LIB3135-008-Q1-K1-E6.pep
KKKNLFIRLNTGNEDPNSKRVTVSPAQAGKANALANAEDLTHHVWFEGTDTLNQPFPDDQFDLVWAIESG

SEQ ID NO: 91690 - protein, 96 aa, Gossypium hirsutum
  unsure (1)..(96): unsure at all Xaa locations
  Clone ID: LIB3135-008-Q1-K1-E9.pep
MIMYYFFTYYYNNTSPITPSKLFKTFTLXTPKIFPTSSPNSFKIINIXPNPIFLNILKINFXKNLSFQYIKHHILIHYKIYFLYTYYLNYNVSLFF

SEQ ID NO: 91691 - protein, 121 aa, Gossypium hirsutum
  unsure (1)..(121): unsure at all Xaa locations
  Clone ID: LIB3135-008-Q1-K1-F1.pep
LSTTAQSNTQRSEVGADGEGNTILNTKSESSVKTGAHVIYSKYTCIEVKFNGANHILLKQDDIVXLLETDDIKDLKPLNDRYLIKVLEADEKTTRXFLLAEASXQKPSIGTVIAVGPVSLH

SEQ ID NO: 91692 - protein, 55 aa, Gossypium hirsutum
  Clone ID: LIB3135-008-Q1-K1-F10.pep
SSNGKSETISRTPIFCFFFKVMLYPGARLVCSSVYDCNSFGSSGMISFEHKKNFF

SEQ ID NO: 91693 - protein, 105 aa, Gossypium hirsutum
  unsure (1)..(105): unsure at all Xaa locations
  Clone ID: LIB3135-008-Q1-K1-F7.pep
NILLANTAKIVEKNNICNSKDHLCTKMDTNRLLTLXYDASICKSXXEKSSSCPSAFEYXYIYLILEGERLLIDTDFTSQFELFRSTNTYKSILQMLPFIFHGKSH

SEQ ID NO: 91694 - protein, 136 aa, Gossypium hirsutum
  unsure (1)..(136): unsure at all Xaa locations
  Clone ID: LIB3135-008-Q1-K1-G10.pep
GRPTRASISSLSHSLHSSLQFLLSGFGEIILEILHIQRSQCGNQIRTTFCELVFSEHSINATWRYQRDLNLQLARINVYYNEATFGRFLPRANLMHLEPRTMDSITSFPVGQIFRPDNFLFCQSGAXNNCTNGHYT

SEQ ID NO: 91695 - protein, 146 aa, Gossypium hirsutum
  unsure (1)..(146): unsure at all Xaa locations
  Clone ID: LIB3135-008-Q1-K1-G11.pep
HASGDIQDKLGHSLCQELGRENISYVHXVTCESDVENAVKLAVSKHGKLDIMFNNAAIMGENEVKVSETSLKDFKTVLDVNVLGAFLGAKHAARVMVPAKKGCILFTASLASKICXENSHSYKSSKVAVVGLXKSLSVELGEHGIR

SEQ ID NO: 91696 - protein, 89 aa, Gossypium hirsutum
  Clone ID: LIB3135-008-Q1-K1-G2.pep
YVCCCLLLYSKPPLYFPNFLTTISVQECLPLPSNTVLKLSLWKGNSGGLHRSLPTYFAGTFLNFDAGFGTPEVSKVPILNNWSKHCFEN

SEQ ID NO: 91697 - protein, 101 aa, Gossypium hirsutum
  unsure (1)..(101): unsure at all Xaa locations
  Clone ID: LIB3135-008-Q1-K1-G5.pep
PTRPPTRPAKLLVLNVLRKARLVHDNHLPTMKKXLTILVLANFNKLSAKLIFGYDSSAIIDNIVSTAXNLCGTGSFWVEPFFLSXYYHQRTIYIPQSSSRN

SEQ ID NO: 91698 - protein, 75 aa, Gossypium hirsutum
  Clone ID: LIB3135-008-Q1-K1-G6.pep
KSFYFLYVYPYFTWIMGPKLINLHYTLSKSQTIKYTDPLSNLTYTNLFDQIVDSHVFSQKRLNYPHIIILMAETA

SEQ ID NO: 91699 - protein, 120 aa, Gossypium hirsutum
  Clone ID: LIB3135-008-Q1-K1-G9.pep
MPNKFLGLLYSTFKRYSTNDAHAAFYHSLTSLAKYNIPSLLCNSFTLSDIAFIPFFLYFHTFLSYTINHYTTTSKPKFSFLIDASDNINSYKLSSKSYPKQLPANFIKLYSQSYNSNFYF

SEQ ID NO: 91700 - protein, 33 aa, Gossypium hirsutum
  unsure (1)..(33): unsure at all Xaa locations
  Clone ID: LIB3135-008-Q1-K1-H3.pep
VLRTSQNIDQNRLRGMVITLLGVSGXRVAXRVR

SEQ ID NO: 91701 - protein, 132 aa, Gossypium hirsutum
  unsure (1)..(132): unsure at all Xaa locations
  Clone ID: LIB3135-008-Q1-K1-H6.pep
DSPPNSPNTSLTNTTPPRGPCEALLDPLNNLTAITQTXADLKHFTVPNPMPRGDNXSVNINWHLYSHFYPGLRTKITILNWDETVFHDXLDAVQXNNATPRFQNIYFLHXTCLDLNGVHNTIFMPGLSQSTI

SEQ ID NO: 91702 - protein, 89 aa, Gossypium hirsutum
  unsure (1)..(89): unsure at all Xaa locations
  Clone ID: LIB3135-008-Q1-K1-H7.pep
YLFFLDHLNFYLHKLAVDLLPVSNRHFFIPNFSPLTXPGSQXYTTITISELSQXILYTINIIYASEHRHRRYFTESTILRFNNNTTEVY

SEQ ID NO: 91703 - protein, 94 aa, Gossypium hirsutum
  unsure (1)..(94): unsure at all Xaa locations
  Clone ID: LIB3135-009-Q1-K1-A11.pep
PPIYTPPNNYNPDPKPPVXXPPNKENPQPKPPFFSPPKKEKPQPQPPFYCPPNKFKPPSYYPSKKPPSFXPYPPKPTSYNPTKKKKTQPKPPFH

SEQ ID NO: 91704 - protein, 75 aa, Gossypium hirsutum
  Clone ID: LIB3135-009-Q1-K1-A5.pep
QFNIVPNGLMLQTEETISILNYGSFILGIEFKCQYGGCLETILKLLLKSKYKGLLGIISGFYKNGMKKIVGRSFD

SEQ ID NO: 91705 - protein, 33 aa, Gossypium hirsutum
  Clone ID: LIB3135-009-Q1-K1-A6.pep
ASGLLLLNHMISDATTEYPHLGMGFSSRDPYIL

SEQ ID NO: 91706 - protein, 104 aa, Gossypium hirsutum
  unsure (1)..(104): unsure at all Xaa locations
  Clone ID: LIB3135-009-Q1-K1-B10.pep
AYVRVKLHMTYDILLYLHVYGPRIKPPIICSICLESWGLARSRAYSIFTSLQPKHAFYPNTFKFIDCNTLYSFYFSSXLYPFNKSPIINPKFPYIVHLIIHIYD

SEQ ID NO: 91707 - protein, 48 aa, Gossypium hirsutum
  Clone ID: LIB3135-009-Q1-K1-B11.pep
KTSNLRNRVTYYLLFLSFFNITLTSYLYIHKDHSTPILQPSSIYYIPR

SEQ ID NO: 91708 - protein, 83 aa, Gossypium hirsutum
  Clone ID: LIB3135-009-Q1-K1-B5.pep
KPYVIGNRGTRKHPHTNKKNQFKISIEKIKSPQGDFNPVFLSIKLLFYVIYIMHKIKRVKGNNSHLFNEIERVELYLAELSRL

SEQ ID NO: 91709 - protein, 44 aa, Gossypium hirsutum
  Clone ID: LIB3135-009-Q1-K1-B7.pep
LNLQNLLNDPLFSSYYPLHALTYPFPKTIIKSQPFFVIIPSSNR

SEQ ID NO: 91710 - protein, 57 aa, Gossypium hirsutum
  Clone ID: LIB3135-009-Q1-K1-C1.pep
SLQSEPLTLLQKIEFSFKRSTSIFLLFSLNILFLFFNNSLESCSSPIHKPISNPNPN

SEQ ID NO: 91711 - protein, 49 aa, Gossypium hirsutum
  Clone ID: LIB3135-009-Q1-K1-C11.pep
RSIRRINPNKTVRGSIYLALFTPYENTSSPYDNTNMKVIALTIKILMLL

SEQ ID NO: 91712 - protein, 44 aa, Gossypium hirsutum
  Clone ID: LIB3135-009-Q1-K1-C12.pep
NYKRVMMWNEGVFKFGSLKGTVFFFFFDAKNFKKVFINLFSNGF

SEQ ID NO: 91713 - protein, 63 aa, Gossypium hirsutum
  unsure (1)..(63): unsure at all Xaa locations
  Clone ID: LIB3135-009-Q1-K1-C2.pep
XKKKKKKNKKLKKKKKQLKQKKGKKGTLSKKPXLTLSDITIFTSLITSSTFITLTYLLQHLHR

SEQ ID NO: 91714 - protein, 62 aa, Gossypium hirsutum
  Clone ID: LIB3135-009-Q1-K1-C4.pep
LCLLTLFALITHYLDFTDCLPTLNTNIFTTKSFYIPPFAQISYFLSHIIYGLIPKCPITTAI

SEQ ID NO: 91715 - protein, 48 aa, Gossypium hirsutum
  Clone ID: LIB3135-009-Q1-K1-C5.pep
TLLLAHTAMTVFSQVGVDLTSGPAIDINDIPFFTMTFLSASSYVYEIL

SEQ ID NO: 91716 - protein, 104 aa, Gossypium hirsutum
  Clone ID: LIB3135-009-Q1-K1-C8.pep
QDYCCCAACATYESPLQPPFSMGGTLFICNFSCPTNEYNILKILCMQVFVSIPERVFRTYTINKHTTCIIHANERMGFIFASLWQMWCSPIRFVLLGKISAIIL

SEQ ID NO: 91717 - protein, 65 aa, Gossypium hirsutum
  Clone ID: LIB3135-009-Q1-K1-C9.pep
IDPRVRRPSSSNILSPTILSTNPHNTERAAHSLAQFKAYKLIPTPYHITKNMVIPYALTALRLQK

SEQ ID NO: 91718 - protein, 111 aa, Gossypium hirsutum
  Clone ID: LIB3135-009-Q1-K1-D1.pep
RILKHWLKAGNPHPFYNPINGYVILPTAFEMESLHEKGMQVTSLKEEWEIITEDQGNQDANKNSLVSSISVSQGPSKQSSRSEAHATVIVHPQNEGKQHVELNAISVSIDT

SEQ ID NO: 91719 - protein, 74 aa, Gossypium hirsutum
  Clone ID: LIB3135-009-Q1-K1-D10.pep
FSLFLLHINSHFLKLSLPFFFFLDLNCGLHFTFPTPLPFTSSSYNYSYASSFCIHFIFESFPTTQSEIPSLTLS

SEQ ID NO: 91720 - protein, 55 aa, Gossypium hirsutum
  Clone ID: LIB3135-009-Q1-K1-D11.pep
YLTNQFILHHTNKIHSPYHRCRAHPRSSIHRLITLISIHPPIILFHHTQLFTLHH

SEQ ID NO: 91721 - protein, 76 aa, Gossypium hirsutum
  Clone ID: LIB3135-009-Q1-K1-D12.pep
SIFFIDLAFILPSFLSKIISLLLELPWFFSFLSTSIGVDIFLFPIPALSLQQTPIILMLILSALILYWKIGQQPKA

SEQ ID NO: 91722 - protein, 65 aa, Gossypium hirsutum
  Clone ID: LIB3135-009-Q1-K1-D2.pep
DAWVYSYYCTVESQQQKASGVAPHLPQVKESESHPLISVDNGSGMLSDGVGPKAPVWNTNKDLHA

SEQ ID NO: 91723 - protein, 94 aa, Gossypium hirsutum
  Clone ID: LIB3135-009-Q1-K1-D6.pep
KEVKGSCLPKAKQGPQCSRAGKFSPDIAINIDSNPFFMTRVKKVELADNRITNDTNLLQPRGHYSGIGVGASAAATGPAQRKAGTVQYGMTRMY

SEQ ID NO: 91724 - protein, 65 aa, Gossypium hirsutum
  Clone ID: LIB3135-009-Q1-K1-D7.pep
LFYITNGPFLYKPQQGLSLNNSLSYTTSQQFFQIPQVNRYIDINLTPISIWEDHLQITIQMMFMT

SEQ ID NO: 91725 - protein, 59 aa, Gossypium hirsutum
  Clone ID: LIB3135-009-Q1-K1-D9.pep
CLQYCNQRIGKLKTSKPDFYDFLTKYRAYLILSPSSSSSVFSVITQVINNDTDNHNESI

SEQ ID NO: 91726 - protein, 42 aa, Gossypium hirsutum
  Clone ID: LIB3135-009-Q1-K1-E10.pep
THTLILTDSFTLLTLSSFFFNGPLSIYLIDSMSLSNHNKNHL

SEQ ID NO: 91727 - protein, 38 aa, Gossypium hirsutum
  Clone ID: LIB3135-009-Q1-K1-E11.pep
YYPYKSFKHYGPIDSIPFPSKPFFNPGNHFKVFLILIK

SEQ ID NO: 91728 - protein, 77 aa, Gossypium hirsutum
  unsure (1)..(77): unsure at all Xaa locations
  Clone ID: LIB3135-009-Q1-K1-E5.pep
EQDDYEDEDHDHAYHHYSHGRYDDSSGEQREERDPXDDPEANGDGGSDQQDDDDDDDDGDEDDDDHHDXDDEEEDDE

SEQ ID NO: 91729 - protein, 61 aa, Gossypium hirsutum
  Clone ID: LIB3135-009-Q1-K1-E6.pep
MESKVKTKEHFNFSSLLKKLMYIRLSICIYFYSQSPSFTSKNQSLYSQNNSSFLLFLLLIL

SEQ ID NO: 91730 - protein, 63 aa, Gossypium hirsutum
  Clone ID: LIB3135-009-Q1-K1-E9.pep
SHQRLVFWHLKVEGQLMVLMINEGTQTKYNIQEIVQSHVSLCKTSSQLPVNKTKALVLPVKGN

SEQ ID NO: 91731 - protein, 101 aa, Gossypium hirsutum
  Clone ID: LIB3135-009-Q1-K1-F12.pep
PDILKPWLSYTDPGVPNNMLTATDVVYPRSLWFDPFWWRNCSAEKNKGPNSQKIHNCPFAIFAINGALFQHNYNLTWPIDNLFSHLTHSCHSNIFSSFNPN

SEQ ID NO: 91732 - protein, 59 aa, Gossypium hirsutum
  unsure (1)..(59): unsure at all Xaa locations
  Clone ID: LIB3135-009-Q1-K1-F5.pep
SAPNSKSCWGDCDRTLLGLYAQLILLVYSKYVQHLXGLKFAYLFLSDFFTSCSVLLLLL

SEQ ID NO: 91733 - protein, 78 aa, Gossypium hirsutum
  unsure (1)..(78): unsure at all Xaa locations
  Clone ID: LIB3135-009-Q1-K1-F8.pep
FYNLSXSHQLTSQFKPIWVRLVYIYPHTLPLITYLSHTKHLTIHLNANLITIQTTILHTNIIYNYEQYLYPTINLSHI

SEQ ID NO: 91734 - protein, 43 aa, Gossypium hirsutum
  Clone ID: LIB3135-009-Q1-K1-G2.pep
PSKTQLNNRSPHPYHLNLYESCTATNQSQLLYKFSPNNMLSPS

SEQ ID NO: 91735 - protein, 98 aa, Gossypium hirsutum
  Clone ID: LIB3135-009-Q1-K1-G3.pep
LTLSKKTNTIYYIHSFSFSSRVVFFGEKKTLLLFNIAILSPPDNLLAAAYRTPSPNITADPMVKQLLDTNSYDMSIPFEDHVQFAYSHHNDKKLTPYI

SEQ ID NO: 91736 - protein, 54 aa, Gossypium hirsutum
  Clone ID: LIB3135-009-Q1-K1-G5.pep
TMYNGELASSNIFAFLSCRGVDNYNVPQSSFIDPYSWHQISRLENLCCHPFPFT

SEQ ID NO: 91737 - protein, 60 aa, Gossypium hirsutum
  Clone ID: LIB3135-009-Q1-K1-G6.pep
RTRPVDLIQPPSPLSTKALLPLRPAPTVFALVQSLLPTLSSLAFRLKKVKRSPASSGSGS

SEQ ID NO: 91738 - protein, 68 aa, Gossypium hirsutum
  Clone ID: LIB3135-009-Q1-K1-G7.pep
AYAHPILPLIRFEFFQSKTSNRGDYILTTFSILLSNPAILSPSLHFHENTLKKYDTLYHFITLCYTSH

SEQ ID NO: 91739 - protein, 68 aa, Gossypium hirsutum
  unsure (1)..(68): unsure at all Xaa locations
  Clone ID: LIB3135-009-Q1-K1-G8.pep
RTITXSTTHFLILLLSILTLGTPSFFTSYSPLSSNPPTLFYKPPNTKPPPYXHTPPVYKPPNKHKPLP

SEQ ID NO: 91740 - protein, 56 aa, Gossypium hirsutum
  Clone ID: LIB3135-009-Q1-K1-G9.pep
MVYNNTRMRRFICQQFYLISCYEKITFPTIFSDYCPFFSLTTLSTFLVHSKVPTLS

SEQ ID NO: 91741 - protein, 53 aa, Gossypium hirsutum
  Clone ID: LIB3135-009-Q1-K1-H11.pep
TISQRPLISHSPYLCKHLPTLKLKIMFYIIPVHYYYPFRFIPHKTYLFSFNNH

SEQ ID NO: 91742 - protein, 52 aa, Gossypium hirsutum
  Clone ID: LIB3135-009-Q1-K1-H5.pep
ACRVHRYIDVTYILSAVNGTCPIRSSIYRVPRRRMGPKCRNYSTPQGARYQR

SEQ ID NO: 91743 - protein, 49 aa, Gossypium hirsutum
  Clone ID: LIB3135-009-Q1-K1-H7.pep
STSNFQLLRHSFSLRLLPSPFPFTYNPFPINLSNLNHLHLHLQPLLKNK

SEQ ID NO: 91744 - protein, 97 aa, Gossypium hirsutum
  Clone ID: LIB3135-009-Q1-K1-H9.pep
CPNLSILAYGHNAYTFCLRTLTTHHLSIKSKKKTITHIYILNLNPQISSNTFKTISASFHLYTAFGFLQDHLFILSLTLTIPKPPKIQFIIYMTKMN

SEQ ID NO: 91745 - protein, 105 aa, Gossypium hirsutum
  Clone ID: LIB3135-010-Q1-K1-A1.pep
VDDACAHAFADAWDETFARLIKEKEQSGSLLRSALSRKMVSENKSKTNELFQTAENGLREAGIDFKFSNLIGDGNKAEDPGSYQDEIYTLAGALENIDKTSQLEI

SEQ ID NO: 91746 - protein, 63 aa, Gossypium hirsutum
  Clone ID: LIB3135-010-Q1-K1-A11.pep
YSPLHTMMSSLGSFAINIHKIFSYIFSVKVAFINSFFHSMFLSSITSATLYSCKCDNLIYFLK

SEQ ID NO: 91747 - protein, 42 aa, Gossypium hirsutum
  Clone ID: LIB3135-010-Q1-K1-A5.pep
SFGPISRYHPPGQCTLKYTTTLFFLINQSSNCFVPRVSERVG

SEQ ID NO: 91748 - protein, 57 aa, Gossypium hirsutum
  Clone ID: LIB3135-010-Q1-K1-A8.pep
LDTITNQPQLIHNTCYLTPSKKAMTLPSLIHPLLTTNVYTLHEPIYTLSLFIRHHHL

SEQ ID NO: 91749 - protein, 125 aa, Gossypium hirsutum
  Clone ID: LIB3135-010-Q1-K1-B1.pep
RHRNSLHYTRLFVSYNTSSASEVSDEFNHVSLIQQWKDLVNYALINAMAIRQILKKYHKVHFFKQGHAFKSQAQSLHIEILQSPWLSELMAFHINLTETKEKSTLTLASFEGCYLTFNDGKPFLF

SEQ ID NO: 91750 - protein, 128 aa, Gossypium hirsutum
  unsure (1)..(128): unsure at all Xaa locations
  Clone ID: LIB3135-010-Q1-K1-B12.pep
QXXIKHHSEFILRKNNRGMSFYFENSTFTPTISSTTSFISSFSIDGNVANLHSGVASFHFTLRSPSFHQSPRHKNKFSHKRXNWNVKYGNTRKFHFSKKRKHIVNTSINVPPINNKLSHIPPYYYSLM

SEQ ID NO: 91751 - protein, 87 aa, Gossypium hirsutum
  unsure (1)..(87): unsure at all Xaa locations
  Clone ID: LIB3135-010-Q1-K1-B4.pep
LSHIRVSLISKNTKIYNFHILKTPNCSNYGHLFLAHNHKPLKKLHIHGWRTNTNDDYAYDCCTQALXNLQELVLIDANATHMTLSPI

SEQ ID NO: 91752 - protein, 62 aa, Gossypium hirsutum
  unsure (1)..(62): unsure at all Xaa locations
  Clone ID: LIB3135-010-Q1-K1-B5.pep
PSRRNGKPIHHFLSTSSFNQYTCXDVGALAKINPEAPFDKVCVLICGMPTGFGASVNVSKPK

SEQ ID NO: 91753 - protein, 42 aa, Gossypium hirsutum
  Clone ID: LIB3135-010-Q1-K1-B7.pep
VCINRPVKTVTIKLSFSFLSVQHQPCLEPILTLPNESVHPLH

SEQ ID NO: 91754 - protein, 43 aa, Gossypium hirsutum
  Clone ID: LIB3135-010-Q1-K1-C10.pep
LPAILLDIDIFPSNLLSLVSFFHCNLILYLYLLSLSCITYIYG

SEQ ID NO: 91755 - protein, 51 aa, Gossypium hirsutum
  Clone ID: LIB3135-010-Q1-K1-C4.pep
VYIIRQARYYSNSFLLRFNHYRCHEVFALHEMSAKRMGSRYRQHQDSQWLF

SEQ ID NO: 91756 - protein, 80 aa, Gossypium hirsutum
  Clone ID: LIB3135-010-Q1-K1-D12.pep
SGFTIYIIKLYLLMPHLGTGFYQQNQQSSFISFSTIQFINDNHHKTSIFILSITHHINISLIKTLNVSSLTFTKTTTSNH

SEQ ID NO: 91757 - protein, 61 aa, Gossypium hirsutum
  Clone ID: LIB3135-010-Q1-K1-D4.pep
KLPHIVNTAATNCLYASCTLHENTQIYPMHVGHKFTMALAHTFNLDGTPDTGYINTTRKSI

SEQ ID NO: 91758 - protein, 48 aa, Gossypium hirsutum
  Clone ID: LIB3135-010-Q1-K1-D5.pep
IIVNRTFSIAESMLRLISSKIGETTALTWYLWYVKIIVSYGSLSTCNL

SEQ ID NO: 91759 - protein, 85 aa, Gossypium hirsutum
  unsure (1)..(85): unsure at all Xaa locations
  Clone ID: LIB3135-010-Q1-K1-D7.pep
EQADGRVLPDNYTTYSLFIPHDDXREPLPTLKDRLTQIPPDQAKIIRKAPIHLIPRLIYAHPRSKFETLRHTFNIPVYAQINKFS

SEQ ID NO: 91760 - protein, 60 aa, Gossypium hirsutum
  Clone ID: LIB3135-010-Q1-K1-E10.pep
KITFLIFIQPSHPQKKFIYTMTPHLSPNLFQNHFFHPSIPTKHHLQYTSIHSSKTQKFTF

SEQ ID NO: 91761 - protein, 62 aa, Gossypium hirsutum
  unsure (1)..(62): unsure at all Xaa locations
  Clone ID: LIB3135-010-Q1-K1-E2.pep
KGAAGILVTFVSCLGSWTISWALSLLMRWSSTXTFFIFATICGLTVXSVAKLLPETIGLTLE

SEQ ID NO: 91762 - protein, 95 aa, Gossypium hirsutum
  unsure (1)..(95): unsure at all Xaa locations
  Clone ID: LIB3135-010-Q1-K1-E3.pep
WSLSKNYTTFSLLMPEDDIRERXLTLKDRLNQISPEQVKIMRQALINLISRLIYAHSRSQXETLPHAFHIAGDADINHVTNLTTNIIHRRTEYNN

SEQ ID NO: 91763 - protein, 76 aa, Gossypium hirsutum
  unsure (1)..(76): unsure at all Xaa locations
  Clone ID: LIB3135-010-Q1-K1-E5.pep
DPRILXPIYSEIFLIYEQYLFRGSIDSTYVPHRTISPPLFPSALNSTYTLCSRSLITKIYSQIIYNYQYLGLTRRD

SEQ ID NO: 91764 - protein, 41 aa, Gossypium hirsutum
  Clone ID: LIB3135-010-Q1-K1-E6.pep
NHYCPILQFLASNKKSILIIIIFLITINPNSFKSTNYFVLL

SEQ ID NO: 91765 - protein, 125 aa, Gossypium hirsutum
  unsure (1)..(125): unsure at all Xaa locations
  Clone ID: LIB3135-010-Q1-K1-E7.pep
RTQAKGQVLCLKDHPIIYATKKLPYAYLTHIQPTIRDAQKRKHPKTPKNTYPKLAQPLLTYIQXNPTLIPDFSEIIYNLRQRPKKEGDHIKQPQKYLPPLTKNKNFFLKNKSSPKKIHSTQRHIL

SEQ ID NO: 91766 - protein, 44 aa, Gossypium hirsutum
  Clone ID: LIB3135-010-Q1-K1-F1.pep
MCNKLCVNVNGSIGGYWFPNINPSSVIRLSMKITGRWSWKLYRA

SEQ ID NO: 91767 - protein, 79 aa, Gossypium hirsutum
  Clone ID: LIB3135-010-Q1-K1-F5.pep
FLQFGRYSKRLVKSITYVEGWDGSSISYINVNGIFGFSQRKYGEYVEVVGKVFHGLVEEKRNCINVPEDPDSVLKKVIV

SEQ ID NO: 91768 - protein, 91 aa, Gossypium hirsutum
  unsure (1)..(91): unsure at all Xaa locations
  Clone ID: LIB3135-010-Q1-K1-F7.pep
NKSLPYLTFFIKQXPLQLIRVFLTHXYTSTLLLIKSMKCLPTNHTMCTILSITRFNDSIYIKLNCRKICPFSIACICIIETLKIHFTLLKQ

SEQ ID NO: 91769 - protein, 46 aa, Gossypium hirsutum
  Clone ID: LIB3135-010-Q1-K1-F8.pep
SNFCILLSLSSIVNSQINFCILQLVHVIQSDKTMLYCKNKNQGKFC

SEQ ID NO: 91770 - protein, 47 aa, Gossypium hirsutum
  Clone ID: LIB3135-010-Q1-K1-F9.pep
LFITPTIRTSFYKLTKFYTIILSIFFIYYLNSLLHFLNHFASFLRNI

SEQ ID NO: 91771 - protein, 96 aa, Gossypium hirsutum
  unsure (1)..(96): unsure at all Xaa locations
  Clone ID: LIB3135-010-Q1-K1-G12.pep
MASTLLLSLLFMIHLIAFSLAVAADQRRSTASFGNNVKXSYCVYDEDIATGLDANSXLFLLLNHILIMVTSRCLCFXKAMIPISSRALSLVLFITC

SEQ ID NO: 91772 - protein, 56 aa, Gossypium hirsutum
  Clone ID: LIB3135-010-Q1-K1-G6.pep
PNSIHLLLHINKLVLVETLINLTNSIFLEIYYTIYNDNAIYSKLVRHFKHPTTPYL

SEQ ID NO: 91773 - protein, 64 aa, Gossypium hirsutum
  unsure (1)..(64): unsure at all Xaa locations
  Clone ID: LIB3135-010-Q1-K1-G8.pep
THTXXQRLNKELKHFSCHITNKSDCIIYLPSTIYIPIEIQVFFGRSRHANGAFATYRHLIMCLR

SEQ ID NO: 91774 - protein, 45 aa, Gossypium hirsutum
  Clone ID: LIB3135-010-Q1-K1-H1.pep
FGSRFHFFCNLSLEGSRKESALSWLLFEAKDQPVVLLKQKLWEVL

SEQ ID NO: 91775 - protein, 73 aa, Gossypium hirsutum
  unsure (1)..(73): unsure at all Xaa locations
  Clone ID: LIB3135-010-Q1-K1-H12.pep
FLIKGHPPIIYFXLFQTFKPYYFYFIIYDNKTIFILFTKHNQIYSFKLFIKKYPQIYTQKFLPYNNKLYILHP

SEQ ID NO: 91776 - protein, 61 aa, Gossypium hirsutum
  Clone ID: LIB3135-010-Q1-K1-H3.pep
SRDIIEFICFFFLGLFIFFYIFFFFFFFFFFFFGCNSSPNYHIANLSIYKAVPPPVPITIK

SEQ ID NO: 91777 - protein, 39 aa, Gossypium hirsutum
  Clone ID: LIB3135-010-Q1-K1-H4.pep
TKNSFSLVNTYSSIHIYLFNQLYNEIYTLFTLSISSIDF

SEQ ID NO: 91778 - protein, 65 aa, Gossypium hirsutum
  Clone ID: LIB3135-010-Q1-K1-H5.pep
GPTARVRPSVRPHVPDFFSCKTNNGPVETFTRYMLITNTPYTSHNTHYLNTHASFHTYLSNQLHI

SEQ ID NO: 91779 - protein, 132 aa, Gossypium hirsutum
  Clone ID: LIB3135-011-Q1-K1-A4.pep
ILIITVTVFYYLKAGWIGNDAISPIIGDHDPYMHVFGRELNHLRAAAILMTFVMVLSILTSIAIVRRILMGTSVLKVAAKVIGEVQALIIFPVIPYSILAIFYMVWISAALHLFSSGQVVQNNCNTNCCAYD

SEQ ID NO: 91780 - protein, 67 aa, Gossypium hirsutum
  Clone ID: LIB3135-011-Q1-K1-A5.pep
HASVFYFISVNFEAERAPAVSEGLSPLQEWLKIGSRFKAFFVEGLPRLARTRKIRVFQSLLHPRFYL

SEQ ID NO: 91781 - protein, 63 aa, Gossypium hirsutum
  Clone ID: LIB3135-011-Q1-K1-A7.pep
PTRAYMFTEHTANIYALRHERMELHSTDQKIVKLKHRLWRETGLIYVSRSKRDDYMTHTQSPI

SEQ ID NO: 91782 - protein, 87 aa, Gossypium hirsutum
  unsure (1)..(87): unsure at all Xaa locations
  Clone ID: LIB3135-011-Q1-K1-A8.pep
IGNDAXCTIIGAHDPYMHVFRRGLKHVTGXAMLITLKMVLFILTYIATVRRILLETCVLNVAAKAIGEVQALIILIVLPHSILAIFY

SEQ ID NO: 91783 - protein, 35 aa, Gossypium hirsutum
  Clone ID: LIB3135-011-Q1-K1-B12.pep
PTLFFIKGNQSQFIKDPSKVKFPNPNIIYKPLIRT

SEQ ID NO: 91784 - protein, 88 aa, Gossypium hirsutum
  Clone ID: LIB3135-011-Q1-K1-B5.pep
LSKSASPLSSQSPIVGLVPRGLHFLNPIFPHPPPIILTIFHSTLQGYLSEAYPPLSEFVSVLFTNQSPPFPPLFGLPQSPHNASQDVW

SEQ ID NO: 91785 - protein, 59 aa, Gossypium hirsutum
  unsure (1)..(59): unsure at all Xaa locations
  Clone ID: LIB3135-011-Q1-K1-B6.pep
NVVTKDVVXMLYGLGVKTNVDLAQLMLAGEFISNLLGRPSGSKTPVARSRVPGHASKMR

SEQ ID NO: 91786 - protein, 75 aa, Gossypium hirsutum
  Clone ID: LIB3135-011-Q1-K1-B9.pep
SPFFVDSVYNLLGTDKTECEHGELPTCIITGLLHIKCCVWACTYAQDKEEVLRQIPHLMFIYLCLTCFLGFGWRR

SEQ ID NO: 91787 - protein, 143 aa, Gossypium hirsutum
  Clone ID: LIB3135-011-Q1-K1-C1.pep
PRVLPRVRPRVRPRVRVGGITFFLLCILGLTLALYRVKKNQLKEEMREKYVESLPTSGSSFWKLSSVPEPLSINIATFEKPLRKLTFGHLLEATNGFSAESLIGSGGFGEVYKAQLRDGCVVAIKKLIHITGQGDRKFMAEME

SEQ ID NO: 91788 - protein, 125 aa, Gossypium hirsutum
  unsure (1)..(125): unsure at all Xaa locations
  Clone ID: LIB3135-011-Q1-K1-C10.pep
MTKKKHEPGNQMDATNDHRFNIKNIMKDIQFLGSSHMTWKERKEMENRKVVSLGGKPPKRQRLPLSVAKAVMKNQKKREEKMLQENMILGRFRRKLGGGSGTXGSTNKRMPEDRVLKSSERHFKN

SEQ ID NO: 91789 - protein, 73 aa, Gossypium hirsutum
  Clone ID: LIB3135-011-Q1-K1-C11.pep
HKTWKERKEMENTKVGEKNGKPPKRQRLPLNGAKAEMKNKKKREEKMLEEKKMLGRDKGKQKGGRGTQGKTDK

SEQ ID NO: 91790 - protein, 54 aa, Gossypium hirsutum
  Clone ID: LIB3135-011-Q1-K1-C3.pep
MFMTVFASIAVTSMLEMHRGGVGIHVWWRNKQLWVIGGVSSHLVALLAWSAECF

SEQ ID NO: 91791 - protein, 83 aa, Gossypium hirsutum
  Clone ID: LIB3135-011-Q1-K1-C6.pep
AHPRFTVHPKYNKLSAFYGLELPDFHAPPLRKTLTTSARTRPVLTSFERTKEHYSTGSSFFNRSIVADTIILCIVSLTPQRHT

SEQ ID NO: 91792 - protein, 83 aa, Gossypium hirsutum
  Clone ID: LIB3135-011-Q1-K1-C7.pep
RGSHAPCIHTKIHNKQQAKPRFLFLQHMITRVPSRRINHQISSSNAAQAIHNINKTKTCLNILRKIQRAFFNSKLFLHQINRP

SEQ ID NO: 91793 - protein, 64 aa, Gossypium hirsutum
  Clone ID: LIB3135-011-Q1-K1-D10.pep
VQPSPTTPLRIGLEMAPPDPRLRKYVRYYRDFAMELNMALGVDPSVVICMLPVGDGTTLCRLTQ

SEQ ID NO: 91794 - protein, 60 aa, Gossypium hirsutum
  Clone ID: LIB3135-011-Q1-K1-D3.pep
QYPCVRPSLSPALSQGSYQQSLSFLFSISCDVSSVVHRGIHPPVTFAVAHRLRKSHRCSL

SEQ ID NO: 91795 - protein, 58 aa, Gossypium hirsutum
  Clone ID: LIB3135-011-Q1-K1-D6.pep
PTRTAIQWLDVNQLAPADELQDHIKELESIYDRIIAPMYQCAGADINHSLDEYTPPTG

SEQ ID NO: 91796 - protein, 46 aa, Gossypium hirsutum
  Clone ID: LIB3135-011-Q1-K1-E11.pep
LLKQQTQSVADAVQTFLSPVSGCSSHAQSRHRSYDHLPRGTSFMFK

SEQ ID NO: 91797 - protein, 53 aa, Gossypium hirsutum
  unsure (1)..(53): unsure at all Xaa locations
  Clone ID: LIB3135-011-Q1-K1-E12.pep
IDEARIPWDMTXETGTLGYMAPGGRCGSPYLRTRDCYSLSICLWEIYXCDRPY

SEQ ID NO: 91798 - protein, 75 aa, Gossypium hirsutum
  Clone ID: LIB3135-011-Q1-K1-E3.pep
MDMTIAAGAITCAVFLHENGTVGTNHTFITYRSLILFWFALHFLHLIISWWCVLPMCIHIHTYIRTWLGCRLCVI

SEQ ID NO: 91799 - protein, 114 aa, Gossypium hirsutum
  Clone ID: LIB3135-011-Q1-K1-E7.pep
LLPFPLFGFRRSPPCLSLSPLHLPQGPLRLGSLPWFLGSVAPSLSSWPGPCPDVRVWVARLSALHFLRWLLRPLCCPPLVRGFLFPCPPSWCFPRPPPFVGFRLARSWSPYPGF

SEQ ID NO: 91800 - protein, 73 aa, Gossypium hirsutum
  Clone ID: LIB3135-011-Q1-K1-F11.pep
KMGLSRVSLFYSCLPHRVLGRIGFLRYPPRWWSLLLMSGGSPAIRGGSPPVAGVGCFLSYVTQPMRGRCGLRP

SEQ ID NO: 91801 - protein, 103 aa, Gossypium hirsutum
  Clone ID: LIB3135-011-Q1-K1-F3.pep
GDVRGGQGKSCPLSITGCPRWERIRPRSWFNRADRAPDTWDWDSAPPRVAGNSEDRSAYTHLRTHNRMRWPRRTASGQWNNGGNGRQLKGFSTWGKGLPMMAG

SEQ ID NO: 91802 - protein, 56 aa, Gossypium hirsutum
  Clone ID: LIB3135-011-Q1-K1-F4.pep
RSVCRISEDTYGRTLPVPSMEAWIMLGHDHEILPSNRGQLVVVTEQNFPLQPQRCR

SEQ ID NO: 91803 - protein, 37 aa, Gossypium hirsutum
  Clone ID: LIB3135-011-Q1-K1-G2.pep
SIAFVNVSGANGYIPNLHRVNLSVALIILQTRPPTRP

SEQ ID NO: 91804 - protein, 71 aa, Gossypium hirsutum
  unsure (1)..(71): unsure at all Xaa locations
  Clone ID: LIB3135-011-Q1-K1-G4.pep
MTILTTEHLPPKKVGRDTILTAYVDVGKITIGINGFGMIGRKDAXIALHRDELKLVAMNDTYITTDYMTYM

SEQ ID NO: 91805 - protein, 97 aa, Gossypium hirsutum
  Clone ID: LIB3135-011-Q1-K1-G7.pep
CEQLENGRTLADYNIQKEYTLHLVLRLRGGMQIFVKTLTGKTITLEVESSHTIDNGKADIQDKEGIATDHQRVILAGKELKDGRTLADYNIQKEWTL

SEQ ID NO: 91806 - protein, 56 aa, Gossypium hirsutum
  Clone ID: LIB3135-011-Q1-K1-H10.pep
SASSYDTILAIILGLPLHTCVRDKCGSTLVHDIPHTFGLPPKVVPHRTLCGHRTRG

SEQ ID NO: 91807 - protein, 81 aa, Gossypium hirsutum
  Clone ID: LIB3135-011-Q1-K1-H5.pep
MTERPTRTERIPPDQQRLIIAGKQHRDGRTLAEYNNQKEWTRHLDRRLKGGTKKRKKKTDTKPKKIKHKKKKDKLAGLQKY

SEQ ID NO: 91808 - protein, 71 aa, Gossypium hirsutum
  Clone ID: LIB3135-011-Q1-K1-H9.pep
LSRVTTFPATDRFATISTSLVNFLMRCVMIILRALILSMGIHMLTSMTGIWPCSWNAWLTVIVPTVAARQA

SEQ ID NO: 91809 - protein, 52 aa, Gossypium hirsutum
  Clone ID: LIB3135-012-Q1-K1-A11.pep
CIYRKCTRQLWRRHRLSYRCKSLPVEKTMQPILKHIENGRSTENLVYPEPIN

SEQ ID NO: 91810 - protein, 72 aa, Gossypium hirsutum
  Clone ID: LIB3135-012-Q1-K1-A2.pep
FAALIIELLIDPALSGALWLTVSVIWFKARASGHNMLWFMFNMRGVASSPISQYTSRATKLVPLVSIEYNIS

SEQ ID NO: 91811 - protein, 78 aa, Gossypium hirsutum
  Clone ID: LIB3135-012-Q1-K1-A3.pep
RWCWALRSTPLFSSLSLSLSLFVSSLFDSCLSVSFPLCRFFVLVVFFSRFVFLCVPPFCLFPFCSIFSARTRGSSRFS

SEQ ID NO: 91812 - protein, 85 aa, Gossypium hirsutum
  Clone ID: LIB3135-012-Q1-K1-B12.pep
RVRADAAEFCKSLSALTAHEGATVVSTINRSMRSYATAIVAAEYLLQWLPKGTHQWSSFLTPEELTKILKCAGVDVSKPSNPVDI

SEQ ID NO: 91813 - protein, 42 aa, Gossypium hirsutum
  Clone ID: LIB3135-012-Q1-K1-B2.pep
HAYGKTLLKNTHFLERYERGGFICLKRGRKDDVKAASDSSDT

SEQ ID NO: 91814 - protein, 75 aa, Gossypium hirsutum
  Clone ID: LIB3135-012-Q1-K1-B3.pep
PTRPLMVDSFAMSVYKKRCGKALMADANNGGGLENTNVVPIDNFEHGHSHSLEMNDDVSSQLLRHRVIAQEYIHV

SEQ ID NO: 91815 - protein, 57 aa, Gossypium hirsutum
  Clone ID: LIB3135-012-Q1-K1-B6.pep
ERTYNRGWLFSTQEEIKLIKLERKLSDRQLRIVYRTIFIVFKKRGMEASLPRGLCYK

SEQ ID NO: 91816 - protein, 49 aa, Gossypium hirsutum
  Clone ID: LIB3135-012-Q1-K1-B9.pep
FIFFKKFWNFHPIMQSFRTNLQYSYIRIYVCKQYNAKELQILTKTYNST

SEQ ID NO: 91817 - protein, 32 aa, Gossypium hirsutum
  Clone ID: LIB3135-012-Q1-K1-C1.pep
LWYLSSVYTSVRQRSFTLALSPGAYRLLLVRQ

SEQ ID NO: 91818 - protein, 73 aa, Gossypium hirsutum
  Clone ID: LIB3135-012-Q1-K1-C10.pep
APSVRERDGAYGVTASVGVHQQHSPIGLITRTTLCFKACTTSRTRALAFPEQRLITLSCLTELMHVHRIIKGQ

SEQ ID NO: 91819 - protein, 92 aa, Gossypium hirsutum
  Clone ID: LIB3135-012-Q1-K1-C12.pep
CYLPSVMATATMLHVVDCVEPNLRVEYENQLLGILGIDKEKVDECCKLITDLVTTIVQGNLSKKRRFSSSIPRSPNGVMDVWFSSDSSNDSW

SEQ ID NO: 91820 - protein, 55 aa, Gossypium hirsutum
  Clone ID: LIB3135-012-Q1-K1-C4.pep
ANLLVRYVDQRTLFTQLLTMLQLVIRYTLASYIYMLHLSRQNALALLANHLLKLH

SEQ ID NO: 91821 - protein, 61 aa, Gossypium hirsutum
  Clone ID: LIB3135-012-Q1-K1-C7.pep
HSINHMTDIVHLLIMQIGGEDLANPSLGTYESPTYGKPMACRIKQPKGKPAPYQHPGYKPC

SEQ ID NO: 91822 - protein, 53 aa, Gossypium hirsutum
  Clone ID: LIB3135-012-Q1-K1-C8.pep
ANAVLADYMSCDKWQEEGDGDDHLDDIKKDWLNPELFKKDPMIGSLKQTMHTT

SEQ ID NO: 91823 - protein, 71 aa, Gossypium hirsutum
  Clone ID: LIB3135-012-Q1-K1-D10.pep
VFQLVLWLLDVKVCGFFGDNRVVVARPVCRRNLMSLEQSMVLYLFLDVLIHFLVLSNSLASLTIDLFCHRQ

SEQ ID NO: 91824 - protein, 99 aa, Gossypium hirsutum
  Clone ID: LIB3135-012-Q1-K1-D6.pep
GTDFKYQYAHTWFRQMDKFIHYVNQDGRVNALYSTPSIYTDAKYATNEAWPLKTDDYFPYADRINAYWTGYFTSRPALKGYVRTMSGYYLVRCILYKPN

SEQ ID NO: 91825 - protein, 48 aa, Gossypium hirsutum
  Clone ID: LIB3135-012-Q1-K1-E10.pep
FSRFWPCKKKTNLIEFWSLINVISLSLHAEVKMGPFKCPPIYFLIFFK

SEQ ID NO: 91826 - protein, 52 aa, Gossypium hirsutum
  unsure (1)..(52): unsure at all Xaa locations
  Clone ID: LIB3135-012-Q1-K1-E3.pep
HALTINRIPYLIFKLYSDNTKTLYKGQLTSSSSSXCWIFSVPKATPFLPVLL

SEQ ID NO: 91827 - protein, 40 aa, Gossypium hirsutum
  Clone ID: LIB3135-012-Q1-K1-E9.pep
GQRKSQTYPIFRAPEIEAAAGIKWRISIHLLFPSIPLTQD

SEQ ID NO: 91828 - protein, 65 aa, Gossypium hirsutum
  unsure (1)..(65): unsure at all Xaa locations
  Clone ID: LIB3135-012-Q1-K1-F11.pep
PEANYSVIMCGEDYIDAXFEKLXRMDMPGKHDRDIMRVLVECCLQEKVYNKFFTXVLAAKLCEHE

SEQ ID NO: 91829 - protein, 50 aa, Gossypium hirsutum
  Clone ID: LIB3135-012-Q1-K1-G10.pep
KILFFEKKFYHLISNSSILLTKPFFFEMSPQKNHLFYVLPKSCRDSLLRL

SEQ ID NO: 91830 - protein, 120 aa, Gossypium hirsutum
  unsure (1)..(120): unsure at all Xaa locations
  Clone ID: LIB3135-012-Q1-K1-G2.pep
MQILVQTLTGKTITLEVEYCDTMDYVKATMQDKEGIPTNQQRLIFARKXIEDGRTLSDYYIQKECTLHLVLRLHSGAKKRKKKTYTKPKKIKHIKKKVKLAALQLYKVDESGKVHRLRKE

SEQ ID NO: 91831 - protein, 42 aa, Gossypium hirsutum
  unsure (1)..(42): unsure at all Xaa locations
  Clone ID: LIB3135-012-Q1-K1-G5.pep
PRRRDPNTSPDHSIGRSGGRCEQRAGTXSTRADDSRLLGIPR

SEQ ID NO: 91832 - protein, 112 aa, Gossypium hirsutum
  Clone ID: LIB3135-012-Q1-K1-G9.pep
KPLQLCSGMKTKVDNMHIENDNIIANIIKEHRERRAREKSGHAEAEQEDLGAVLLKIHEENELYLADKNMKSIIVDAFGAGSETSYTTEERALFEMINNSWVMNDAQAELRR

SEQ ID NO: 91833 - protein, 127 aa, Gossypium hirsutum
  unsure (1)..(127): unsure at all Xaa locations
  Clone ID: LIB3135-012-Q1-K1-H2.pep
PTRPTGHTLRXLQFPSTLEKGLAKMMSLKSKFGGLLSQMTRLFGMDDEFGEDAILGRLEGMKDVIEQVNKQFKDPDMTTFICVCIPEFLSLYETERLVQELAKFEIDTHNIIINQVIFDDEDVESKL

SEQ ID NO: 91834 - protein, 67 aa, Gossypium hirsutum
  unsure (1)..(67): unsure at all Xaa locations
  Clone ID: LIB3135-012-Q1-K1-H3.pep
TGKEVPGYHKPKLSMGXTKKSVPRGMDNYHAKYNETDPIEPLYQVRIGGKISTYHGALANERHHHEH

SEQ ID NO: 91835 - protein, 90 aa, Gossypium hirsutum
  unsure (1)..(90): unsure at all Xaa locations
  Clone ID: LIB3135-012-Q1-K1-H5.pep
GYELSGTHVHLLGLTSNAPMDVIWDIMRCWVKNHPVXAQPYEQSGRVILAKEPVLQANFARADAFLITAQAKKDARFLPNPERHWGPKLM

SEQ ID NO: 91836 - protein, 108 aa, Gossypium hirsutum
  Clone ID: LIB3135-012-Q1-K1-H6.pep
ICLSSTPYANSEEHTQSSFDRAVADLSHHTKSKPLFLRASDYGINHSFTSSSFRTEDSGRYSSPVCSLVETPTHALLPSKLRTDNPLPWTNYLLVMKDFPGFRLLRIP

SEQ ID NO: 91837 - protein, 56 aa, Gossypium hirsutum
  Clone ID: LIB3135-012-Q1-K1-H7.pep
FCVSVLSETIQISPWLSAFSYSGCFSYEVWWVSTCPSLGLSVGATKPSSFLTFRSP

SEQ ID NO: 91838 - protein, 105 aa, Gossypium hirsutum
  Clone ID: LIB3135-012-Q1-K1-H9.pep
VPISGRNEDANPSSYVTDSRTHFLNFVDQNRCFNKIKLFIKSNLFQGDPITPQKELVATPFFIFKTQVDPVFHKKNGVNSLATPLGTPIRGSSHVVITFCLLSKI

SEQ ID NO: 91839 - protein, 65 aa, Gossypium hirsutum
  Clone ID: LIB3135-013-Q1-K1-A10.pep
TKTIPTASFWQDKRGFYTTMRLLHNNGKDSKCNQLDTYSTFKLSAYNVINLLSVFLPPFFLFVFG

SEQ ID NO: 91840 - protein, 66 aa, Gossypium hirsutum
  Clone ID: LIB3135-013-Q1-K1-A12.pep
ASDLRRKEVSRYASDIQNFYSFGRPHWIVPASMPLAIRSLNPTLLFKPACQSAFLSCKGTRSCGQQ

SEQ ID NO: 91841 - protein, 42 aa, Gossypium hirsutum
  Clone ID: LIB3135-013-Q1-K1-A8.pep
NYSFCAKSSRVYCNNRISIFSHEITSTQILYCIPSAILANKT

SEQ ID NO: 91842 - protein, 61 aa, Gossypium hirsutum
  Clone ID: LIB3135-013-Q1-K1-B12.pep
VVRFHDFEVRFRSSLTLSRNSSRSFFFFPIGDVSRTVIGDPSTVTLLTLGDVPKCSFVRVG

SEQ ID NO: 91843 - protein, 136 aa, Gossypium hirsutum
  Clone ID: LIB3135-013-Q1-K1-B2.pep
GRFNLMTEFPYYREVYYKPDFRNKKGKPVVFDMDMSAGDFLALFYLLKVPVEVLDLKAILVTPTGWANAATIDIVYDLLHMMGRDDIPVGLGDVFAMNQSDIVFPPVGDCKYAKAIPHGSGGFLDSDTLYGLAREL

SEQ ID NO: 91844 - protein, 97 aa, Gossypium hirsutum
  Clone ID: LIB3135-013-Q1-K1-B3.pep
VRINLTPERASDPDAHNIPHLVTKLGTRAEAAQDAAADALLVLRQARTARPDELYRAETLAAANAMPKVEYMNQSDPPLHKEKAEYLLQCLTDTLAV

SEQ ID NO: 91845 - protein, 96 aa, Gossypium hirsutum
  unsure (1)..(96): unsure at all Xaa locations
  Clone ID: LIB3135-013-Q1-K1-B4.pep
AFPLVRVSFVSFTFSSCCFPWPCSLSSVFVLVLSSVVLLGSFSASGSFSSLWRASLASLRPILPLPLVPFLLFPXLXGLLAVLFXSSAAVFFVVGG

SEQ ID NO: 91846 - protein, 113 aa, Gossypium hirsutum
  unsure (1)..(113): unsure at all Xaa locations
  Clone ID: LIB3135-013-Q1-K1-B6.pep
RGMVKVLSGGYKIKYHSXGRESDPIEIDSSPSSPWLDMVWEXQKIGYLSIHKDFCXDETSQYLMDAXPKFGIKCTLPDTTARLLEKLGGYFLEEDSVDSTLIMNPFCNKEGFL

SEQ ID NO: 91847 - protein, 95 aa, Gossypium hirsutum
  Clone ID: LIB3135-013-Q1-K1-C11.pep
YNLKRRTFLSLTINGHVAEYAILRTCATCSSTTSPGERTWPITSACTRGPIFVSRKSNYKGGFDPIDRTAPCGAQTHTLGPRAIHGSYSIRLSFS

SEQ ID NO: 91848 - protein, 76 aa, Gossypium hirsutum
  Clone ID: LIB3135-013-Q1-K1-C12.pep
KRRKTASKISRKGDIRMGSHGRKTRTEEQTSGGFDSRTQNKMNYGLKTGTETSWGVYQNKKSEEGRIQSKTRQKET

SEQ ID NO: 91849 - protein, 60 aa, Gossypium hirsutum
  Clone ID: LIB3135-013-Q1-K1-C3.pep
AFWPSCRHQSSYSPLRPCFLFMIWWTQSSVGAHANNVEILLLLSYIKLRHDWNGRLRTHL

SEQ ID NO: 91850 - protein, 87 aa, Gossypium hirsutum
  unsure (1)..(87): unsure at all Xaa locations
  Clone ID: LIB3135-013-Q1-K1-C9.pep
RGHEETATFCGQEALARAGDRGTGRSKPPFEGHVKPRRGASQPPNGQHKTTGGEDSTRRTRDXRNKKTKNIRPAHAKHISQAKAEPQ

SEQ ID NO: 91851 - protein, 62 aa, Gossypium hirsutum
  Clone ID: LIB3135-013-Q1-K1-D12.pep
AQHKNATPRYFVGNTTNNMGGEPDMTDELWFNLDHLEEGSQCVIYHHLKLLLDASMCLVYGC

SEQ ID NO: 91852 - protein, 148 aa, Gossypium hirsutum
  Clone ID: LIB3135-013-Q1-K1-D3.pep
QKSEDVAQKILYSIECEMRRCPYTLGLGEPNLSGKPNLDYDAVCKPNELHALKSSPYDHIENHENSTLYTTNHILESWIQTAKQLLKRIASGIDAGSFEAAAGDCYILEKIWKLLEEIEDLHLLMDPNDFLHLKSQLQIKSGNENGAF

SEQ ID NO: 91853 - protein, 88 aa, Gossypium hirsutum
  Clone ID: LIB3135-013-Q1-K1-D5.pep
KLSALVQNRYHSSRLLFLTMFHVQLPQADPCMGPSFICASCIRYHLCRIDLNRPPLLNQCSARVIPLVHAVLPPGIFIVFCDRGLFLE

SEQ ID NO: 91854 - protein, 137 aa, Gossypium hirsutum
  unsure (1)..(137): unsure at all Xaa locations
  Clone ID: LIB3135-013-Q1-K1-D6.pep
HGRETLEACCLSDAEQASVPRTGHEDHGTSKHEQLESLELGYAAVKEEGTHRSLXKNITTHTKDIXRLGPXKHTQEEAEPGRLSXGTEEAGTVKENEAKLTEMNEARKIIVETGIDASTKRHVKGHGKYRGRGPKFK

SEQ ID NO: 91855 - protein, 44 aa, Gossypium hirsutum
  Clone ID: LIB3135-013-Q1-K1-E5.pep
TTRNCMVSFYRRKKREGAETHYKGECALRTKLEMVNQTCMLIKQ

SEQ ID NO: 91856 - protein, 87 aa, Gossypium hirsutum
  unsure (1)..(87): unsure at all Xaa locations
  Clone ID: LIB3135-013-Q1-K1-F2.pep
LAAHMETLRVLYRRALNDTINWVGHXHLLYQDASDLLERRVADLHGQDRGTHDKMLDARAATYTKWPHPHPYIVPCAPAGSKVTPNP

SEQ ID NO: 91857 - protein, 68 aa, Gossypium hirsutum
  Clone ID: LIB3135-013-Q1-K1-F3.pep
RIEQVLWHRFVSFVAYSKGWAYTRCRQRLYLDSGPISENQVGATHAGYRMLLAALRIPLEDGSARSPF

SEQ ID NO: 91858 - protein, 58 aa, Gossypium hirsutum
  Clone ID: LIB3135-013-Q1-K1-F5.pep
RAKWQYLEESNNFVCIRIYSSTEKISRPYKKEPLWPYMNCKRNISGTINTLNVVTIII

SEQ ID NO: 91859 - protein, 83 aa, Gossypium hirsutum
  Clone ID: LIB3135-013-Q1-K1-F8.pep
TVPQSHPNSFKPFKNPSTSPLLVKTMAAYTSPPFSSPFFTTAIAQSGPNHLVSYASIRTGNHPPLFKSSRKFGPTGGSFRPTT

SEQ ID NO: 91860 - protein, 79 aa, Gossypium hirsutum
  Clone ID: LIB3135-013-Q1-K1-F9.pep
MEGIRGDGASSASPLSQWGHDGWRIYQYYLDKTTPHTAYRWIGTLVITAIYCLRVYHVQGFYVIAYGPGIYLLNLLIGF

SEQ ID NO: 91861 - protein, 71 aa, Gossypium hirsutum
  Clone ID: LIB3135-013-Q1-K1-G1.pep
STIFMGLISSETQNFLAYMDLTPRTEGRPNGPKEDIPEAIGSSSMPVISASSFIQAALSYLPVSQEDTLFT

SEQ ID NO: 91862 - protein, 78 aa, Gossypium hirsutum
  unsure (1)..(78): unsure at all Xaa locations
  Clone ID: LIB3135-013-Q1-K1-G11.pep
PHVRTDRFMTNIEATPEGGNMLRRMYXNVQEPSLNATTMGGNNGKSSDTNPXAASLGNQGASEARRTPINTTTTECET

SEQ ID NO: 91863 - protein, 56 aa, Gossypium hirsutum
  Clone ID: LIB3135-013-Q1-K1-G3.pep
LGRYSLTDCICTCGCLCLIHDFNSLISLLCLTAKLSPCIIFLKCILLELMTYLRSD

SEQ ID NO: 91864 - protein, 56 aa, Gossypium hirsutum
  Clone ID: LIB3135-013-Q1-K1-G9.pep
FHAEPSTITLLSNKKTASDVLFNTVKKKGKSYIEKTNSEHNMVLSSNNGQSVNAIK

SEQ ID NO: 91865 - protein, 93 aa, Gossypium hirsutum
  unsure (1)..(93): unsure at all Xaa locations
  Clone ID: LIB3135-013-Q1-K1-H1.pep
PRVRFDQIGPALLFSDSQATLQIAANPVFHERTKHIEIDCHFVREXIRERLIRTQHVQTTSXLADVMTKALGVQQHAYLVTKLEDKDLYHPPT

SEQ ID NO: 91866 - protein, 135 aa, Gossypium hirsutum
  Clone ID: LIB3135-013-Q1-K1-H11.pep
ELTSGFYNPAHRDGYAPIAAIALNFTCVELRTLNQHEGFPEAMADPEGLVWQVLNAAWDVSIPVASENALPCYDREGYNKILENAKPRNDPDGRHLSAFTYLRLNPALIERRNFVEFERFVKGMHGEAISDLPLN

SEQ ID NO: 91867 - protein, 106 aa, Gossypium hirsutum
  unsure (1)..(106): unsure at all Xaa locations
  Clone ID: LIB3135-013-Q1-K1-H2.pep
PLVGGWSCSFSSALVTTFACCWPPSAFVFPSARSSSFARVAFAFAFLVFFSLPGWLSLSLCLVRSWCPGFAALSPVACLSXRTGAGPFCSLRXRGRSRPSSRXFRA

SEQ ID NO: 91868 - protein, 53 aa, Gossypium hirsutum
  Clone ID: LIB3135-013-Q1-K1-H3.pep
KISDIPIPIYKNINYRCAHILHSNLTPEPVFVYVSSCICRVQLNSNQNQHLHL

SEQ ID NO: 91869 - protein, 95 aa, Gossypium hirsutum
  Clone ID: LIB3135-013-Q1-K1-H5.pep
SWRKKAGVITHPLHHLLLIQVKLFWGQTKASAQPPLSHLQVHLLPRMMIQLQEQSLPLRLPKMLEIQPRKQRTNVLSEEMVWVSYYYSFRGMTLI

SEQ ID NO: 91870 - protein, 73 aa, Gossypium hirsutum
  Clone ID: LIB3135-013-Q1-K1-H7.pep
KQLQMVTFRPHILKGGLLSNHELKKIFQHFMEPWGGKQNKNCCLANNTQLYFYFKQSPIYKAASGGHLPIFQI

SEQ ID NO: 91871 - protein, 71 aa, Gossypium hirsutum
  Clone ID: LIB3135-013-Q1-K1-H9.pep
YFVFPFEAKTASLWVSLTLWPPFSPRLDSDGGDTSSKTSAKGKSPFSPFILLFSQNKYIMNKKLIYLSFYH

SEQ ID NO: 91872 - protein, 66 aa, Gossypium hirsutum
  Clone ID: LIB3135-014-Q1-K1-A11.pep
VRPRVRPRVWKDVMKRCVAAEPKHGEKWQAISKAVENSHQPTEAILKKVVVVLGKEESAAENNSKH

SEQ ID NO: 91873 - protein, 73 aa, Gossypium hirsutum
  Clone ID: LIB3135-014-Q1-K1-A6.pep
GKILITNSVRWRRLHSLRTNSELAVDHYISEQRHSCYIGAAWRDLHRGRHHAIRQHNRHEIYETYQLNDTDGS

SEQ ID NO: 91874 - protein, 46 aa, Gossypium hirsutum
  Clone ID: LIB3135-014-Q1-K1-B1.pep
VQQPSQCRFPHYLPLAMSRNQCVCQHLYRLVKWFGYKKQVHFCNRG

SEQ ID NO: 91875 - protein, 40 aa, Gossypium hirsutum
  Clone ID: LIB3135-014-Q1-K1-B11.pep
SSIRKEITEYKAKYLVCQQFKVEHQVPSGLLQLMMIPEWK

SEQ ID NO: 91876 - protein, 50 aa, Gossypium hirsutum
  Clone ID: LIB3135-014-Q1-K1-B3.pep
RTNVGWLQNNIAHETGSDRWWLSSDSTVLCVLCSLGDTQSYISFVVLCPA

SEQ ID NO: 91877 - protein, 94 aa, Gossypium hirsutum
  Clone ID: LIB3135-014-Q1-K1-B5.pep
LFLFLFIFFFFWVSSSAPASFAPSPPAIASIASSFFLFFFFFFFFFSISSLPASIALSTPASAIASIASSFSLFLFFFFFFFFFCFSISSPPTA

SEQ ID NO: 91878 - protein, 84 aa, Gossypium hirsutum
  unsure (1)..(84): unsure at all Xaa locations
  Clone ID: LIB3135-014-Q1-K1-B9.pep
EIENGMLWEVEGKWVVHGALDVDIGANPSAGDADEDEXVDDQSERVDDIVDTFRLEELPSLDKTLXVVLMKKLIKNLTTKLDAV

SEQ ID NO: 91879 - protein, 71 aa, Gossypium hirsutum
  Clone ID: LIB3135-014-Q1-K1-C1.pep
IAQGKVGRGFDVSSAVYGSQRYVRFSPEVLSAAQAAVKGMPLEEVIGNILNGKWNHERTEFSLPPLMTLLL

SEQ ID NO: 91880 - protein, 37 aa, Gossypium hirsutum
  Clone ID: LIB3135-014-Q1-K1-C3.pep
EVLRASKSIDKLIYGPKTSTKYKTRPSQVKQTILSLP

SEQ ID NO: 91881 - protein, 65 aa, Gossypium hirsutum
  Clone ID: LIB3135-014-Q1-K1-D1.pep
RMINPVGSILGMPDENIFDKQVLFGRSGEVSGFDSNDPASRSGGKAVAVQQITNVQGLAGFVMIG

SEQ ID NO: 91882 - protein, 52 aa, Gossypium hirsutum
  Clone ID: LIB3135-014-Q1-K1-D7.pep
GSQLRRRLSIKEGHMLRAVFLVDWFISPRDLPFSLSLSLFTYAFPDAWADAW

SEQ ID NO: 91883 - protein, 79 aa, Gossypium hirsutum
  unsure (1)..(79): unsure at all Xaa locations
  Clone ID: LIB3135-014-Q1-K1-E5.pep
DPRVRPRVRGRVLKKAQAEAXAKPLESRQTRLVRRIXLNHVTYLVEQNRAHLDVIDHHVDPIELACXLTASCKRCEVPY

SEQ ID NO: 91884 - protein, 125 aa, Gossypium hirsutum
  unsure (1)..(125): unsure at all Xaa locations
  Clone ID: LIB3135-014-Q1-K1-F3.pep
PRVRPRVRYNVADGRLAQHIEKGNEDGLFISSVASCQNLWALIMDAGTGFSAQVYELSPYFLHKEWIMEQWEKNYYISAISGATNGGSLFVMXKGTSFLQQSYKGRESFPLKXITKKWEKVFILT

SEQ ID NO: 91885 - protein, 29 aa, Gossypium hirsutum
  Clone ID: LIB3135-014-Q1-K1-F5.pep
PRVLNPVQVPVLVRSIQLSVDVRSAHYNL

SEQ ID NO: 91886 - protein, 52 aa, Gossypium hirsutum
  Clone ID: LIB3135-014-Q1-K1-F7.pep
AHSKTRKGAILALKGIESCECMSLNKETERGCITRRDHSSDENLDYDRPTTP

SEQ ID NO: 91887 - protein, 50 aa, Gossypium hirsutum
  Clone ID: LIB3135-014-Q1-K1-F8.pep
DLCRLITQARTLPLLIVQAQIKTSGQTDPCKVTRRKLKNPYWIVTQQVAH

SEQ ID NO: 91888 - protein, 57 aa, Gossypium hirsutum
  Clone ID: LIB3135-014-Q1-K1-G1.pep
GRDVPIDHRVIEVHEQRDSKEADILTKGDANPHDDRMLYTSSNRWMQRKYIMGRAVG

SEQ ID NO: 91889 - protein, 71 aa, Gossypium hirsutum
  Clone ID: LIB3135-014-Q1-K1-G12.pep
MVGQTLGHTYGDYGICPYGPYFHEIHKITASEHMSNQTLELLKHIRSFDMESSVNELYELWAKNKVSTTPV

SEQ ID NO: 91890 - protein, 121 aa, Gossypium hirsutum
  unsure (1)..(121): unsure at all Xaa locations
  Clone ID: LIB3135-014-Q1-K1-G4.pep
HASEQNKLLGTIPDIFKSFTDLRILRLSHNEFSGKIPESILSLAPKMAYLELGHNXWSGQIPSFLGKSKALDTLNLSWNSFTGVVPKTFSNLTKILNLNLSNNFLNNPFSQLNLKGFEQLI

SEQ ID NO: 91891 - protein, 25 aa, Gossypium hirsutum
  Clone ID: LIB3135-014-Q1-K1-G5.pep
FELNVMFLLVDGVHVDEFDHPLYAV

SEQ ID NO: 91892 - protein, 52 aa, Gossypium hirsutum
  Clone ID: LIB3135-014-Q1-K1-G8.pep
NTNRITQIYRNKITSYGIIQDFVKELFKGQGSTRIQGKKNQNTFARWKFNLN

SEQ ID NO: 91893 - protein, 92 aa, Gossypium hirsutum
  unsure (1)..(92): unsure at all Xaa locations
  Clone ID: LIB3135-014-Q1-K1-G9.pep
IIPVQEVIAEMTGGGHHRHVXCSVSTHPTTSAFQCIHYGWXDVSLLVGVTNKDDAFKSHPVYLLYETTLTGSFFGHYEPPTDIPDALDRNMN

SEQ ID NO: 91894 - protein, 123 aa, Gossypium hirsutum
  Clone ID: LIB3135-014-Q1-K1-H11.pep
RYFKRAHDIKAVGGFLGAKHAARVMVPAKKGCIPFTSCLATKISFCGPHAYKASEHARAGMTKSTAVEIGCASQFREQHTIIHSSLQISDLQCLQRIKLGYLDKKNVRGDECCFCSVERHLIG

SEQ ID NO: 91895 - protein, 90 aa, Gossypium hirsutum
  Clone ID: LIB3135-014-Q1-K1-H5.pep
MVGSGSDRVQVKTLRRHLEEASQMVQMLKAEKAKIESEALMYQQLARQLDADLKSLSDAYNTLEQTNMQLEKEAKTLKSGGTSTSPVIEA

SEQ ID NO: 91896 - protein, 63 aa, Gossypium hirsutum
  Clone ID: LIB3135-014-Q1-K1-H6.pep
YVKRYKFILERTYAGFGTSTLLIYYDIASRAKKRALTLQTHTLRLWSQHPVMEHLYRVHPPLY

SEQ ID NO: 91897 - protein, 63 aa, Gossypium hirsutum
  Clone ID: LIB3135-014-Q1-K1-H8.pep
MTTLRRRAERKVGKFRMNITKRGAVPETTTKKGTDYPEGPVLLGFFIYDVIGAYSLSEYQGQR

SEQ ID NO: 91898 - protein, 70 aa, Gossypium hirsutum
  Clone ID: LIB3135-017-Q1-K1-E12.pep
YTVQPFFNFIAYPSPLLHAYPYFISLDFIHLFVVQKFLNHSFPLKYATYIFYFKILIIYSLQNYILKQYF

SEQ ID NO: 91899 - protein, 64 aa, Gossypium hirsutum
  Clone ID: LIB3135-018-Q1-K1-A4.pep
SHAFAEAVLMFYGHSRLVGTGSSGLSSYLQQKPNERGLFGPFTYPTQSSKPNTNLKRSCGPWLL

SEQ ID NO: 91900 - protein, 89 aa, Gossypium hirsutum
  Clone ID: LIB3135-018-Q1-K1-A6.pep
TPSRYNRNRAPDPISWSSSYIPDCYCRTRHCCVPATIAPRWELLVMASSSSSPRVRPRVRFSRLLFICVNHFSKIRCVTKQRKMIYTNK

SEQ ID NO: 91901 - protein, 56 aa, Gossypium hirsutum
  Clone ID: LIB3135-018-Q1-K1-B10.pep
DLQIYRGGSKNELMVEQTEYQDRIPLAIKLTLTKSAIPYYPYRAGRIQNAWTDAWA

SEQ ID NO: 91902 - protein, 62 aa, Gossypium hirsutum
  Clone ID: LIB3135-018-Q1-K1-C3.pep
QNRHRLRQMFKVIEHNSLSFNSKQIPSIEERKYFSTVFLSSGLFMDHYPTRCCQHDVHNLSS

SEQ ID NO: 91903 - protein, 60 aa, Gossypium hirsutum
  Clone ID: LIB3135-018-Q1-K1-C7.pep
AKNPGLCCSGCFGRCSEPALGKMTPLPLAHTRKGRICYSLCEIGVIVLLPCPVSSSYFND

SEQ ID NO: 91904 - protein, 48 aa, Gossypium hirsutum
  Clone ID: LIB3135-018-Q1-K1-D2.pep
LVFSRVRDTSVLIDQFYSDKGHCSNQSLDGEVSEINYVDLRGTYSSKP

SEQ ID NO: 91905 - protein, 63 aa, Gossypium hirsutum
  Clone ID: LIB3135-018-Q1-K1-D7.pep
KVHQEDLLFFLHEPPLGVGGKLLGPFTPNLQQFTFFTDTAFSLDHKSCHRPLSDPRKLVPSVQ

SEQ ID NO: 91906 - protein, 43 aa, Gossypium hirsutum
  Clone ID: LIB3135-018-Q1-K1-D8.pep
RVDRHTHLSRYICLIMTEDHYITGQCLWELETVCEGLHDHSAR

SEQ ID NO: 91907 - protein, 83 aa, Gossypium hirsutum
  Clone ID: LIB3135-018-Q1-K1-E10.pep
KAATKRTRKCKTNRRPGRKQNNTEAPQPGRPNATKAEKKEKRARKKEEKDPNKNLVSKARTQIGGGKTTGNRAEKRKTTRTQK

SEQ ID NO: 91908 - protein, 60 aa, Gossypium hirsutum
  Clone ID: LIB3135-018-Q1-K1-E3.pep
CYVLFWKPLVWIKLKKMKVKAKASFEMDFFFFEMLVCLYMNNSFEKLLVLLFFFHADYQN

SEQ ID NO: 91909 - protein, 91 aa, Gossypium hirsutum
  unsure (1)..(91): unsure at all Xaa locations
  Clone ID: LIB3135-018-Q1-K1-E5.pep
GRQFGGQKLPYNKNKSIAGSVAMAIAGFFXSVGYMYYFSYFGYIKESTEIVFGFLIVSLASALVESLPVSTELDDNLTVTLTSILVGSLVF

SEQ ID NO: 91910 - protein, 97 aa, Gossypium hirsutum
  Clone ID: LIB3135-018-Q1-K1-E7.pep
LFFSFFLFVSRVKMGNCCTSNKILSENDDLQGCSCNQPNQLIKDMGDVTVSKSEGAADGVKTNNNNMEKKTIKKKKKKVVRFNLNEENSGDDRSGKQ

SEQ ID NO: 91911 - protein, 76 aa, Gossypium hirsutum
  unsure (1)..(76): unsure at all Xaa locations
  Clone ID: LIB3135-018-Q1-K1-F2.pep
MEEPKIGDCEECKKKASKYKCPGCXLRTCRLPCVNAHKQRTGCTGKRNITSFVPLSRFDDNLLCGFTSTSFYYLFT

SEQ ID NO: 91912 - protein, 75 aa, Gossypium hirsutum
  Clone ID: LIB3135-018-Q1-K1-F4.pep
IWLGTFDDKNVNMSVVTYKIYIFNVLKQVHSDMGISIKAMWILNRFMNYIFQKLAHEASILALYNKKPTITSRVI

SEQ ID NO: 91913 - protein, 55 aa, Gossypium hirsutum
  Clone ID: LIB3135-018-Q1-K1-G11.pep
LGIELPNPQMSRMIQFGCSPQKPLCNYSMIVPNRDVTVFHASPPSPQCSHLGQNE

SEQ ID NO: 91914 - protein, 93 aa, Gossypium hirsutum
  Clone ID: LIB3135-018-Q1-K1-G6.pep
HAFAPFRKELLTPWMTATLIDFYINVVALSVWVAYKESNWTTAFFWIVLLISFGSISTCAYIVKELFKLAWQDPLYLILIRKGNRAEHMYENI

SEQ ID NO: 91915 - protein, 91 aa, Gossypium hirsutum
  unsure (1)..(91): unsure at all Xaa locations
  Clone ID: LIB3135-018-Q1-K1-G7.pep
RQIVAYAAIFPIQNLLQSQGIGIPSAYILLATLVLVLLLCWVAPYKKGXGSIGASLXLTPSNRIIVGAQKEYISVSDKXSLTWTGLISHAY

SEQ ID NO: 91916 - protein, 61 aa, Gossypium hirsutum
  unsure (1)..(61): unsure at all Xaa locations
  Clone ID: LIB3135-018-Q1-K1-H12.pep
SNNFFFIKVTRFLSFSLYXKGYFWSLPSHFPGTCQRSVTRTNKRWSSILKLKITTNRHNRI

SEQ ID NO: 91917 - protein, 50 aa, Gossypium hirsutum
  unsure (1)..(50): unsure at all Xaa locations
  Clone ID: LIB3135-018-Q1-K1-H4.pep
KWKESHFIWNEYGVRGDVLVXFFGGGLFIRLNFSSGVARNGNRVFFVGAP

SEQ ID NO: 91918 - protein, 83 aa, Gossypium hirsutum
  Clone ID: LIB3135-018-Q1-K1-H5.pep
STRPDGINKKIEEAILKADRMGVKVISLAALNKNEALNGGGTLFVNKHPQLKVRVCHGNTLSAAVIVKEIPKDVKKSVLNKAS

SEQ ID NO: 91919 - protein, 65 aa, Gossypium hirsutum
  Clone ID: LIB3135-018-Q1-K1-H7.pep
TSAWTKKSPWFCSIRIPIIARKLGCALVECTGEVEPRTAVTMRRFYLTSDASKLQHRSCHTVGAC

SEQ ID NO: 91920 - protein, 50 aa, Gossypium hirsutum
  Clone ID: LIB3135-019-Q1-K1-A10.pep
PRVLTWQPGMMFFRTTFYRSGAWNLYGAGGIHRGHHQDWIPPDMSHLVRN

SEQ ID NO: 91921 - protein, 43 aa, Gossypium hirsutum
  Clone ID: LIB3135-019-Q1-K1-A2.pep
LLTPFYFPSFILIRELTWLGVVRNCLTLSNTYFGTWDYNILVK

SEQ ID NO: 91922 - protein, 45 aa, Gossypium hirsutum
  Clone ID: LIB3135-019-Q1-K1-A4.pep
PVERLPVFFFIKRRKPQRSPPYPKGLASYYIDRNLVDVLVSFLPP

SEQ ID NO: 91923 - protein, 46 aa, Gossypium hirsutum
  Clone ID: LIB3135-019-Q1-K1-A7.pep
AFFLYCMVMICRLLLKTNYHVGIKKLLEAVFIVNWGQKGFGQLSIQ

SEQ ID NO: 91924 - protein, 130 aa, Gossypium hirsutum
  unsure (1)..(130): unsure at all Xaa locations
  Clone ID: LIB3135-019-Q1-K1-B10.pep
RELKHEPVKTIYCEQRYHNRAETDPEVKKQTGADYQEEQDARLPKXDSIGINMPLTEKTRRMNDKDESAKMKNGVRIGNKARGATMDTQAAADACSNEHIASYTRHIGYTQPDTKDHGWQNMKNQAMTGH

SEQ ID NO: 91925 - protein, 94 aa, Gossypium hirsutum
  Clone ID: LIB3135-019-Q1-K1-B12.pep
IFARPRVPVFACVLVPAHPMLGCFSNLAPAPAVLAASQLAQILIERDNVYNRGVPHRTKIVECYESLRGIRSRPDRPFFPCEGKKSTPFQLSAR

SEQ ID NO: 91926 - protein, 63 aa, Gossypium hirsutum
  Clone ID: LIB3135-019-Q1-K1-B2.pep
VDYLALEINRYPDVSCLDLPWLFFFENDGIFPRKTPLKYLINIPPQLIRLPSLPSKEGRVASV

SEQ ID NO: 91927 - protein, 44 aa, Gossypium hirsutum
  Clone ID: LIB3135-019-Q1-K1-B6.pep
CRTHSKMLLKTNYISFNPGTYARESSQVSSHFQEEFYVTRIISR

SEQ ID NO: 91928 - protein, 68 aa, Gossypium hirsutum
  unsure (1)..(68): unsure at all Xaa locations
  Clone ID: LIB3135-019-Q1-K1-C12.pep
GFIDILRDVHASYEQRKPYVVCFVGRSGVVKSTNLGKGVLXVLQNTPNVMMAAGDTIPSGTGEQWTTH

SEQ ID NO: 91929 - protein, 89 aa, Gossypium hirsutum
  Clone ID: LIB3135-019-Q1-K1-D12.pep
KKNIYILAPTAMATPGYQIAEIYVMRKLHKEKMKNEEEERAKSEDVGFAGKKSKGWCFSSMFKKVHSGHASTIGHVRNELKDDDKNKAC

SEQ ID NO: 91930 - protein, 125 aa, Gossypium hirsutum
  unsure (1)..(125): unsure at all Xaa locations
  Clone ID: LIB3135-019-Q1-K1-E6.pep
VRIKTWQGGSGSVKQVTFSDIQLSEVETPIMIDQFYCDKSHCSNQSSAVEVSEINYVNIRGTYTVQPVHFACSDSLPCSGVSLSTIELQSVXENHPLSGPFCWETYGELKTSTEPPISLLESGKP

SEQ ID NO: 91931 - protein, 70 aa, Gossypium hirsutum
  Clone ID: LIB3135-019-Q1-K1-E8.pep
RILSEACYISKRCDFHRSACSFPSNGKLAHRAFQVLCEKCVNWPFPFHQYARVAGLQAALTYRVQYVLLS

SEQ ID NO: 91932 - protein, 52 aa, Gossypium hirsutum
  unsure (1)..(52): unsure at all Xaa locations
  Clone ID: LIB3135-019-Q1-K1-F2.pep
GFRNYSWAWGLIFGPFVIVFWFGFWVWAIYATXNLSPFRPWQNLLLQLYLPQ

SEQ ID NO: 91933 - protein, 66 aa, Gossypium hirsutum
  Clone ID: LIB3135-019-Q1-K1-F4.pep
DLSNSKNRKRKLKKVDCNFFFFFDFLFLYFFIYFESISKKDRIKERGKKGLTRTLACVIRALPPRR

SEQ ID NO: 91934 - protein, 35 aa, Gossypium hirsutum
  Clone ID: LIB3135-019-Q1-K1-G1.pep
QNISPLIAFEIQANSVHKIAPLCSFGLLEHNGAIL

SEQ ID NO: 91935 - protein, 120 aa, Gossypium hirsutum
  unsure (1)..(120): unsure at all Xaa locations
  Clone ID: LIB3135-019-Q1-K1-G10.pep
DVRAGTAWPAQSLRAAEWRTAXSYATYVHRVHGRTENKQCSSGLETGADVTATIKAEHHESDIGAGLECMTTNPMAWEGSVNPWVKPMEQAPKGLLAIGITTHNVAHRFGGTRQDPDLAA

SEQ ID NO: 91936 - protein, 87 aa, Gossypium hirsutum
  Clone ID: LIB3135-019-Q1-K1-G11.pep
LLLSCFRFCCLCLPPLLHVFLSYSVALEHVGPPPAVLQVYELHTTHFWSYQIFPSCHRQINDALQVRIWQMRHQIRTRGRTRGRTRG

SEQ ID NO: 91937 - protein, 67 aa, Gossypium hirsutum
  Clone ID: LIB3135-019-Q1-K1-G9.pep
RACPMPTRRCIKAESSHSMMYRSVSRPARSSWVRPGYGQWTSAGNETPPVGMWYMLSQKRTIGRTRG

SEQ ID NO: 91938 - protein, 59 aa, Gossypium hirsutum
  Clone ID: LIB3135-019-Q1-K1-H2.pep
TRSGGADATERVLGAPALAGLLQTLVFTGTKRAKKKAASLARVFQRCEKAYLHFGGLGV

SEQ ID NO: 91939 - protein, 79 aa, Gossypium hirsutum
  Clone ID: LIB3135-019-Q1-K1-H4.pep
AYTPAKREEPVPVRPGSEHSEKEEAAPNAPVYTTPKKEMAEPEPPVFEPAKKEKPCPKPPAGTPPKKEKPEPKPPVYGP

SEQ ID NO: 91940 - protein, 27 aa, Gossypium hirsutum
  Clone ID: LIB3135-019-Q1-K1-H6.pep
APLPSRVGLKSHQLIEDLFPSFHLPSL

SEQ ID NO: 91941 - protein, 40 aa, Gossypium hirsutum
  unsure (1)..(40): unsure at all Xaa locations
  Clone ID: LIB3135-019-Q1-K1-H7.pep
PKKMQIFVKTLTGXTITLEVESSDTIDNVKTKNQEKVGIP

SEQ ID NO: 91942 - protein, 122 aa, Gossypium hirsutum
  Clone ID: LIB3135-019-Q1-K1-H9.pep
VYGFSDKGGLLSFPQRDDAFEMTKPYSSKTGAIIDSEVREWVGKAYNRTVQLIEEHKEHVAQIAELLLEKEVLHQKDLVRVLGERPFKSSEPTNYDRLKKGLQEEDKSCKDTSTESKTVDDN

SEQ ID NO: 91943 - protein, 71 aa, Gossypium hirsutum
  Clone ID: LIB3135-020-Q1-K1-A1.pep
ILRSPESLTGRCEGLRIRKSLAFTQRDMGHPNYNSSTYISNLRGHVRGGTPLWPGLAIETYCGALYVMKTL

SEQ ID NO: 91944 - protein, 51 aa, Gossypium hirsutum
  Clone ID: LIB3135-020-Q1-K1-A11.pep
KETKKKKNKLGSHLKSWRLRNPGMPQTYIYYCFTLIHFTNLPITPTQLGKP

SEQ ID NO: 91945 - protein, 56 aa, Gossypium hirsutum
  Clone ID: LIB3135-020-Q1-K1-A3.pep
WAVQLNLWTLVYVLIPLAALDLQDAYVVFLANDQLTKLDLLMGLFQIPKVLILSDG

SEQ ID NO: 91946 - protein, 74 aa, Gossypium hirsutum
  unsure (1)..(74): unsure at all Xaa locations
  Clone ID: LIB3135-020-Q1-K1-A7.pep
MWPWHEQELHTAITXSSVDKTYEXTDGQVLTIGADRLRXPEGLLHAAIIGMEAVGIHDTTYSFIMTCDVDIRKD

SEQ ID NO: 91947 - protein, 103 aa, Gossypium hirsutum
  Clone ID: LIB3135-020-Q1-K1-B11.pep
RVRPRRRKATTDNPWKNGQLGPLYLRNNHQTAQPASSGPYHMLQQQQQFKQRLQLHQQQMKHHAEMTFRKSNSGISLNFENSSCTPTMSSTKSFISSLSIDGS

SEQ ID NO: 91948 - protein, 50 aa, Gossypium hirsutum
  Clone ID: LIB3135-020-Q1-K1-B8.pep
LNHHLINSRLLEDIKWLSIDVSKARNLQGSFKGRSRKLHEIFNSFVLKIS

SEQ ID NO: 91949 - protein, 44 aa, Gossypium hirsutum
  Clone ID: LIB3135-020-Q1-K1-D11.pep
SHVRSTSNQKSVSSCRVPHAYVAQSTVVMVGRCKSGRRSGRWCV

SEQ ID NO: 91950 - protein, 71 aa, Gossypium hirsutum
  unsure (1)..(71): unsure at all Xaa locations
  Clone ID: LIB3135-020-Q1-K1-D2.pep
LNQSWXLEPLKRSKNLVHGLKRIAFSMLLFYGFFSGILIWVSAADWGYAAADKWKSWAFVIHIGSTSTLFM

SEQ ID NO: 91951 - protein, 65 aa, Gossypium hirsutum
  unsure (1)..(65): unsure at all Xaa locations
  Clone ID: LIB3135-020-Q1-K1-D4.pep
MTELIMNLKVLXAAQAEMRKVVGYRIVFLETDLPHLDYMKAVIIETWRLHPPAPVLLGRGSMEDL

SEQ ID NO: 91952 - protein, 101 aa, Gossypium hirsutum
  Clone ID: LIB3135-020-Q1-K1-D9.pep
PRVRPRVRVAATNEAKDDANVDESDVVVVQTAIRGFLARKELGKLKNLVKLQAALRGHLVRRHAVGTLRCIQAIVKMQMLVRAHHARLSQELSYSEKDAAS

SEQ ID NO: 91953 - protein, 54 aa, Gossypium hirsutum
  Clone ID: LIB3135-020-Q1-K1-E2.pep
WFITEKRRCLDTPCMYLLSRKEWSELFASFSKLNEKPIKFIDLGQSCSIEDKYF

SEQ ID NO: 91954 - protein, 50 aa, Gossypium hirsutum
  Clone ID: LIB3135-020-Q1-K1-E3.pep
ERRLCSNQVSTLKGSFESGQECSISNYTFDSQLILKKKMPSLRCRCLTAY

SEQ ID NO: 91955 - protein, 86 aa, Gossypium hirsutum
  unsure (1)..(86): unsure at all Xaa locations
  Clone ID: LIB3135-020-Q1-K1-E7.pep
ILPQTKNNLFVRRVQKKKNIYTPQWETSVTLHFHPTTNCQKEEYQNSTSNNLKNHIIKQVTVIIIITLRPHNESYPTLCFLLQXTV

SEQ ID NO: 91956 - protein, 59 aa, Gossypium hirsutum
  unsure (1)..(59): unsure at all Xaa locations
  Clone ID: LIB3135-020-Q1-K1-E8.pep
PTGSPVDHAYRPRNPPHLISDYRXPPFTSVDFVPFKPLSTPSPSIPSFTFHIKAHYSYI

SEQ ID NO: 91957 - protein, 64 aa, Gossypium hirsutum
  Clone ID: LIB3135-020-Q1-K1-F11.pep
KRESKNYEVFIWTSIYQTMTLFKRRKTKMGTIKATLVDTLQHLSEAPQNLAYKGRLLTFTLCQK

SEQ ID NO: 91958 - protein, 103 aa, Gossypium hirsutum
  unsure (1)..(103): unsure at all Xaa locations
  Clone ID: LIB3135-020-Q1-K1-F7.pep
RAPCCERMXVKKGPWTPXEDQILINYINLYGHGNWRALPKQAGLLRCGKSCRLRWTNYLRPDIKRGNFSREEEDTIINLHEMLGNRWSAIAARLPGRTEQQIK

SEQ ID NO: 91959 - protein, 36 aa, Gossypium hirsutum
  Clone ID: LIB3135-020-Q1-K1-F9.pep
PENMILFECYLERIKSSVFFQYLWRVVECRMPSDAW

SEQ ID NO: 91960 - protein, 139 aa, Gossypium hirsutum
  unsure (1)..(139): unsure at all Xaa locations
  Clone ID: LIB3135-020-Q1-K1-H5.pep
ATTRXAFGLNTQDLVALVGGHTVXSSACQLFSYRLYNFTNGGPDPTVNSAFVPQLQALCPQNGDGSRLIDLDTGSGNRFDTSFFANLRNVRGILESDQKLWTDPSTRTFVQRFLGERGSRPLNFNVEFARSMVKMSNIG

SEQ ID NO: 91961 - protein, 97 aa, Gossypium hirsutum
  Clone ID: LIB3135-020-Q1-K1-H6.pep
MMGAMLGDLPSFDPHNFSQLRPSDPSNPSKVVPTTYRPTHRRTSSPPDQVITTAAKNILIRNFYQRAEEKLRPKRAATEHPTPEHGCKQPMASTTWS

SEQ ID NO: 91962 - protein, 49 aa, Gossypium hirsutum
  Clone ID: LIB3135-021-Q1-K1-A12.pep
LAPLLSGRWSLNLKFVALILIYAIVESILVAKLGSPFIWGFQNLWVQQL

SEQ ID NO: 91963 - protein, 94 aa, Gossypium hirsutum
  unsure (1)..(94): unsure at all Xaa locations
  Clone ID: LIB3135-021-Q1-K1-A6.pep
PPVHLHVRAHNSCVSKASAFTGGGIAXTLATLSIPWVIIGHPGRRLMLKASNLCVTAQDAYTLPXRLKVIALITETLGHEKHDYWAVECKTLIE

SEQ ID NO: 91964 - protein, 78 aa, Gossypium hirsutum
  Clone ID: LIB3135-021-Q1-K1-A7.pep
PQTVSCILDIHTVYCSGTCYTACFSYIWLVIDVGFFLVMILCGNAVNGLTDLFSYFVVFIIEKSPLIVLHLQCSEEVK

SEQ ID NO: 91965 - protein, 87 aa, Gossypium hirsutum
  Clone ID: LIB3135-021-Q1-K1-A8.pep
MANNRSQLLSSELIDRCIGSKIWVIMKGDKELAGTLRGFDVYVNMVLEDVTEYDITTEGRRITKLDQILLNGNNIVILVPGGSPDPE

SEQ ID NO: 91966 - protein, 92 aa, Gossypium hirsutum
  Clone ID: LIB3135-021-Q1-K1-B4.pep
SESIIPKINIYNSPSLSNYHSLASIGFRDINVITHLNQSSKYRSDPMSYFPGYGRKYPMYASLEFRDLPLRRPRLSSLVSSSPWTRLTSLVI

SEQ ID NO: 91967 - protein, 43 aa, Gossypium hirsutum
  Clone ID: LIB3135-021-Q1-K1-B5.pep
ELSAHRYRIESVNMSDSVKYSPIHTRISRLSTMILESNNVGFF

SEQ ID NO: 91968 - protein, 66 aa, Gossypium hirsutum
  Clone ID: LIB3135-021-Q1-K1-B7.pep
NKNLHNLSLRKLVQRFFQASLLGSTSSNFAFNSSPYQSCICFHIKCQSNHYTIINRRSTGRFELLT

SEQ ID NO: 91969 - protein, 96 aa, Gossypium hirsutum
  unsure (1)..(96): unsure at all Xaa locations
  Clone ID: LIB3135-021-Q1-K1-B8.pep
QADLESESSDSDVDSDLERMIADRSGMNASWKGQKSLITIRERXKMIALDPHYGERKIKRGRPKQRSSSKRGISDSDDEDEGWGGAEGKKKRKMRG

SEQ ID NO: 91970 - protein, 103 aa, Gossypium hirsutum
  Clone ID: LIB3135-021-Q1-K1-C1.pep
GFGFGFGFGFGIGNGSRGGGGGGGGGGDVGADHSGARHGSGHSSGQLSGASPRPPPIMMSIVSLFVSMLVSMPGSSLSLSSSLAPQQPQLALKTTIETKIERV

SEQ ID NO: 91971 - protein, 104 aa, Gossypium hirsutum
  unsure (1)..(104): unsure at all Xaa locations
  Clone ID: LIB3135-021-Q1-K1-C2.pep
VLNSRDAPGVPNNLFMLNRQSGLCDGSNEGEVEIEAYRTLRDKGTYPAHQVVKDLEXSLALVIYDIKTGTVFSALRADRMVKLHRRIAPDRCVVISDDSHVIKE

SEQ ID NO: 91972 - protein, 78 aa, Gossypium hirsutum
  Clone ID: LIB3135-021-Q1-K1-C4.pep
ENEEYRCQVRLLSERFRNLEDRQRRVMVSLARIIDKPHVLSQFHGKKRKLLNSNHFNDECNIQDLHRLASLNQTWDWI

SEQ ID NO: 91973 - protein, 50 aa, Gossypium hirsutum
  Clone ID: LIB3135-021-Q1-K1-C8.pep
RHASRPTHEWPCISGFTSRTVGSLAKNAASSDLRYACEHLHPQYCDDRQC

SEQ ID NO: 91974 - protein, 111 aa, Gossypium hirsutum
  unsure (1)..(111): unsure at all Xaa locations
  Clone ID: LIB3135-021-Q1-K1-D10.pep
AEHGGVKCGTSGLCHCSXKTNHTMKRSIKVPALSIKLADIPTEDYSWRKYRQKPIKGSPHPMGYYKSSHMRQLPCLEACLEALXKPSMLIVTYEGDHYHPRLPLAVYNVWK

SEQ ID NO: 91975 - protein, 62 aa, Gossypium hirsutum
  Clone ID: LIB3135-021-Q1-K1-D3.pep
DHLCLYIRVYLLGGGDGKVRGGTRAPSGINGALTGQHTCGNCRHCYLGVTGITPSLKDLNVW

SEQ ID NO: 91976 - protein, 66 aa, Gossypium hirsutum
  Clone ID: LIB3135-021-Q1-K1-D5.pep
SGRPIFVKILELVRAALESHHLNPESSSCRGLLSAWSINSSLRTAYASAQGITNESVHMNALSPER

SEQ ID NO: 91977 - protein, 58 aa, Gossypium hirsutum
  Clone ID: LIB3135-021-Q1-K1-D7.pep
GVLTVKASGGTGTGASFTLTLTGQITCRTPVHSHLGLTVLTFSFTFTKIVTVTFLYTV

SEQ ID NO: 91978 - protein, 62 aa, Gossypium hirsutum
  Clone ID: LIB3135-021-Q1-K1-D8.pep
WHALKPVHVLSIIFLTIRGLCIVPFSHTIGVVHIHGARLWTCIKTTSPTFVTSWEQFDCLLM

SEQ ID NO: 91979 - protein, 72 aa, Gossypium hirsutum
  Clone ID: LIB3135-021-Q1-K1-E2.pep
AALLKFFSCFEQFHEFCFFLLPFFYWRICKPILFIVSSIISIRLLYFYLIFDLYSFIQNSSLLQEGPLICAY

SEQ ID NO: 91980 - protein, 132 aa, Gossypium hirsutum
  Clone ID: LIB3135-021-Q1-K1-F11.pep
MKIMVAVKRVVDYAVKIRIKPDKSGVETQNVNMSMNPFCEIALEEALKIKESGLAKEVVAVTMGPSNCVDTLRTGLAMGADRGIHVEAARDLVPLSVAKVLKKLVEVENPGLLILGKQAIDDDCNQTWQMIA

SEQ ID NO: 91981 - protein, 119 aa, Gossypium hirsutum
  Clone ID: LIB3135-021-Q1-K1-F4.pep
TRPQKHTPDSIETIISDVSLAISLLTNRKTRDLIMILNSKRFLDRLVSSLEEKKYHEAKLKEGLKDVAAKRMELQNSLSSSWPKQEAALAKTRELKKLCESTLSSVFDGRPAHIIGEIN

SEQ ID NO: 91982 - protein, 38 aa, Gossypium hirsutum
  Clone ID: LIB3135-021-Q1-K1-F5.pep
LINSLQSPCWGLFNMLQKDWLRDYYTDGESCKPMKIGS

SEQ ID NO: 91983 - protein, 78 aa, Gossypium hirsutum
  unsure (1)..(78): unsure at all Xaa locations
  Clone ID: LIB3135-021-Q1-K1-F8.pep
MGKIKIGTLGFGKIDRFXFARVALQSDDLELVAGNESFXMTTEYMTNMLYLXMGHGQWRPRELKVKDSKTLLFGEKPV

SEQ ID NO: 91984 - protein, 79 aa, Gossypium hirsutum
  Clone ID: LIB3135-021-Q1-K1-F9.pep
GKGGGKQNNGHPRGWGPRNRKAHQGPKEEAQPPDEPSPTPQTARGGNPQPKQDTKEGFSRTGNLEANQGATRPTGKRTH

SEQ ID NO: 91985 - protein, 93 aa, Gossypium hirsutum
  Clone ID: LIB3135-021-Q1-K1-G10.pep
APVPFSGWQPRIPLVMGSRVSAVRSDHPAFCLRNVLLSEGLYIDKSPAPKSVLCSIHLRGLSGCPRLPHAWTSAVNETSCADAWTHACVSPEI

SEQ ID NO: 91986 - protein, 83 aa, Gossypium hirsutum
  unsure (1)..(83): unsure at all Xaa locations
  Clone ID: LIB3135-021-Q1-K1-G3.pep
TDALAAIAVVTKVEVLAIWSDHLFHMALLGTHVRXNWDDATNSPCREKTMPRPVPQNKWNCHPVRAPWFEDTSRLSSQRVICI

SEQ ID NO: 91987 - protein, 75 aa, Gossypium hirsutum
  Clone ID: LIB3135-021-Q1-K1-G7.pep
RAGLDWVVYCTNIHKHAISYRVSMNIVILICIVYCNLVLCLFTAVYTHRLRLSLVHRLKSMSCSWIPNLTGKLFG

SEQ ID NO: 91988 - protein, 130 aa, Gossypium hirsutum
  Clone ID: LIB3135-021-Q1-K1-H10.pep
MGFLFTTRISSWLNVDQSLGWRSLVIDRLSPSFFRPRRILVFGEFFLFDPMPYPSCVHDTWPGYIFHKNKVRLRGLISCSFCNLHLRVEKIILVALFFSFTIFFFCYGFHVDSSPRSLFLGLGYIPSVNP

SEQ ID NO: 91989 - protein, 94 aa, Gossypium hirsutum
  Clone ID: LIB3135-021-Q1-K1-H11.pep
RPRVRPCLAAFESDISPPAFKGGWLGTRENEATELLVKGPSGPLLRHAREGGRPSYVQKITSTCEVRDFGRQTRIIERNWDEHQAGMILLEQGS

SEQ ID NO: 91990 - protein, 87 aa, Gossypium hirsutum
  Clone ID: LIB3135-021-Q1-K1-H3.pep
GDYSPPISSFFFILSRIFFPSFLKYNRVFKRDFRKDWRDLTWLSLRPPSRRACGGVAMMGVVTGPSKWKKGESSFIFFSISANGNGG

SEQ ID NO: 91991 - protein, 52 aa, Gossypium hirsutum
  Clone ID: LIB3135-021-Q1-K1-H4.pep
MGHSYAWNSHTKTHGPGSCACRVCGNPHAMIRKYRIMSYRQCIRSNDKEIVF

SEQ ID NO: 91992 - protein, 114 aa, Gossypium hirsutum
  unsure (1)..(114): unsure at all Xaa locations
  Clone ID: LIB3135-021-Q1-K1-H6.pep
VRPPSDQQRLVRSGMHHAYGRTILEYNIQEDCALHLGVHLKGVAKKRKMKTYTQPKKIKDKKKKVMLARLQIYMVEESSMVQRLMKECPNAVXGAGTTMANHFDRHYCCESGLT

SEQ ID NO: 91993 - protein, 143 aa, Gossypium hirsutum
  unsure (1)..(143): unsure at all Xaa locations
  Clone ID: LIB3135-022-Q1-K1-A1.pep
TRTPLAPARARPPRPRPPRPSXRACTGTRTWRRQEGTLKGGGNAWRCRHCRGGKGRPRCSWQPSIRRLLWPVKSCAGSCRRSGWRLRRHSGNVLLLLLCPDGERRLRLLSASCRCSPARRLGHPFDPQPLRRARRHQQVDDYR

SEQ ID NO: 91994 - protein, 71 aa, Gossypium hirsutum
  Clone ID: LIB3135-022-Q1-K1-A10.pep
LAIHAPRKGIIEVWQMRTGPGVLAIQCAKGCRLLQPTYRFGSLSDSPYVPLEVFLLNGDSGQLSVLNRFLN

SEQ ID NO: 91995 - protein, 91 aa, Gossypium hirsutum
  Clone ID: LIB3135-022-Q1-K1-A6.pep
RVNALSKEKKRKGRLKNRNRQIQNPVSNFVCFQYRKKYIQNCCQKEKKYHLMNLLIKSFVGDCISNKRIRIIPETIRLGCRRLWLIPHPLF

SEQ ID NO: 91996 - protein, 144 aa, Gossypium hirsutum
  Clone ID: LIB3135-022-Q1-K1-A7.pep
KIEENPKSHFVFVDCNSSPGAKFIHAAVDLSVSDIVSPTYVPLVVQSFFDHDRAINYDGHTRPLLSIQVTELVDGVFIGCSMNHVLGDGATFWHFFNALSEIFQAQGDTKMKISRPPVLEKWFPRGHGPLLNLPFTNQDEFITR

SEQ ID NO: 91997 - protein, 71 aa, Gossypium hirsutum
  Clone ID: LIB3135-022-Q1-K1-A8.pep
HASAHASGYTAVGVFVLGPRFHEAWGSKAGEKHVQFNDFIEWNRICISMELVTAVLGDHGQRSREDYGNGI

SEQ ID NO: 91998 - protein, 53 aa, Gossypium hirsutum
  Clone ID: LIB3135-022-Q1-K1-B1.pep
GISIAWALSMIFCLLCLLHFRHYSRKLDILHMDMTNVYVCRRGILTHGTFGLF

SEQ ID NO: 91999 - protein, 41 aa, Gossypium hirsutum
  Clone ID: LIB3135-022-Q1-K1-B2.pep
NGIYHIIADIIHDFIKLITTDMHTYFRTPDPSTNAVFISTL

SEQ ID NO: 92000 - protein, 42 aa, Gossypium hirsutum
  Clone ID: LIB3135-022-Q1-K1-B3.pep
TVETHENGMLNTGELMKQRGPKNFRLQEAAANALLRYSMQFT

SEQ ID NO: 92001 - protein, 36 aa, Gossypium hirsutum
  unsure (1)..(36): unsure at all Xaa locations
  Clone ID: LIB3135-022-Q1-K1-B5.pep
MTFKPRNVGRNKHALCHVKYIRXSNCGTCCPKDKSI

SEQ ID NO: 92002 - protein, 78 aa, Gossypium hirsutum
  unsure (1)..(78): unsure at all Xaa locations
  Clone ID: LIB3135-022-Q1-K1-C10.pep
MFPDAPEILYGGDXLFLPSLQIFIDYVRNPKLYPLDIINPYKIVDTXPYTNLISQIITVNSRCNSPDANLPRKWIVCV

SEQ ID NO: 92003 - protein, 45 aa, Gossypium hirsutum
  Clone ID: LIB3135-022-Q1-K1-C11.pep
QHPEKAPFQHSKYFTILIHFPSVRFHCISQFPADEEFPSHHFLSR

SEQ ID NO: 92004 - protein, 142 aa, Gossypium hirsutum
  unsure (1)..(142): unsure at all Xaa locations
  Clone ID: LIB3135-022-Q1-K1-C12.pep
PTRPRTRGLYSDEEEDDFGVGEDDCDDDEVMSTAHSPIGIKRSFQNQDHDNDVIEQVASSDGPNKRQKLLNGGHKQSIMVDAACSVKLEGSHEYDSDAESSYRGEILHTEQSMKDKIRLTLKILESXIPGTKGKDPLLVLDE

SEQ ID NO: 92005 - protein, 46 aa, Gossypium hirsutum
  Clone ID: LIB3135-022-Q1-K1-C3.pep
SDFRYYCIKNFFLALIINNGGYFERDLINLGLRRNLQNACFTLLKP

SEQ ID NO: 92006 - protein, 57 aa, Gossypium hirsutum
  Clone ID: LIB3135-022-Q1-K1-C5.pep
TSTINRPSHFLFQKKKKKKKKKKKKKKKKKKKKKKGGHFGGRKLTSAFMKPGWLFFG

SEQ ID NO: 92007 - protein, 39 aa, Gossypium hirsutum
  Clone ID: LIB3135-022-Q1-K1-C9.pep
SITSFVLLQENISYVIDFLKLVSSFYTNSAGDVVQFISF

SEQ ID NO: 92008 - protein, 93 aa, Gossypium hirsutum
  Clone ID: LIB3135-022-Q1-K1-D3.pep
HAFEVIEDAMDDTDAADTTGDTDVVVGMVDDTVDEDVDVIEEVMDKDAPIDTIIQNITEDAALTAAIMLMMIQMLKHIIKLYTKIKSCLYACI

SEQ ID NO: 92009 - protein, 58 aa, Gossypium hirsutum
  unsure (1)..(58): unsure at all Xaa locations
  Clone ID: LIB3135-022-Q1-K1-D5.pep
YLSNLIRHVLXGTPKRPGGCIYTYLFALFDQNSKPGPELYRHFGLFSPNTQPKYQLHF

SEQ ID NO: 92010 - protein, 37 aa, Gossypium hirsutum
  Clone ID: LIB3135-022-Q1-K1-E10.pep
HIFKIKVFNFILPPITTASEYEHLQQINSLLNQKTFI

SEQ ID NO: 92011 - protein, 80 aa, Gossypium hirsutum
  Clone ID: LIB3135-022-Q1-K1-E12.pep
PASLIIHKRLSFLSILPIYHAFGLRFFQTLSIPTPLSNHQFFLLKKIMLYKAIANLIFFCVSMLNLLYILRLKMFFFNDF

SEQ ID NO: 92012 - protein, 115 aa, Gossypium hirsutum
  unsure (1)..(115): unsure at all Xaa locations
  Clone ID: LIB3135-022-Q1-K1-E5.pep
PRVRPRVRACVRNDEDRCAGCTGDMDEQDNKVLDVIVXEKGMQNGQRITFPXKTDETPDTATEDIGLRLQQKDHATFKRMGDDLFVEHTLALTEALCGYHFILTLLQGTCIYSIL

SEQ ID NO: 92013 - protein, 117 aa, Gossypium hirsutum
  unsure (1)..(117): unsure at all Xaa locations
  Clone ID: LIB3135-022-Q1-K1-F6.pep
ISLKKEYEENAKVXIKEKGGGIPDHYIFTTDERANRNVXIYTELFFYQNINNFYDIXDLTNTKLNPDYKSVCHIALAKENNXRPEEILIRTDSYTCTATPFGNFHTGIGNTEARSVL

SEQ ID NO: 92014 - protein, 64 aa, Gossypium hirsutum
  Clone ID: LIB3135-022-Q1-K1-F7.pep
MLHINNKVPIYETRHHPTEKAKSKAHLNAIPTTISLSDPIRRSASSSNEAHHFRVTDHINIRRV

SEQ ID NO: 92015 - protein, 65 aa, Gossypium hirsutum
  Clone ID: LIB3135-022-Q1-K1-G1.pep
EFVLDLIDSTTRKWKEELINRYLSPEELLAHILIDPTIRISGARVTSKVWRVRTNTGNTHVRSAL

SEQ ID NO: 92016 - protein, 48 aa, Gossypium hirsutum
  Clone ID: LIB3135-022-Q1-K1-G12.pep
VEITCLYLFVLCYGRGLVNVHKLHYFFLLLFHFNNPIQNFQVKIHRKT

SEQ ID NO: 92017 - protein, 69 aa, Gossypium hirsutum
  Clone ID: LIB3135-022-Q1-K1-G4.pep
ISKMKLMHHKLAYLMVLLKVYCQHIVQAMRIRMMIRRCFSTNCRAVRDNLLFKIYKCRESFVSILSWKS

SEQ ID NO: 92018 - protein, 50 aa, Gossypium hirsutum
  Clone ID: LIB3135-022-Q1-K1-G7.pep
LFMEDNDIYVFRFLNLPYIKHSSSIKTISLNTKIIKTKISKLGSIYNLLL

SEQ ID NO: 92019 - protein, 131 aa, Gossypium hirsutum
  unsure (1)..(131): unsure at all Xaa locations
  Clone ID: LIB3135-022-Q1-K1-G8.pep
PHIHSLSNSFGIDYTDPGAVELIVMTLIHLDAMDGKINVSLLQKCXTFHNVNTKQAFANALTTATSIKTLRNPPIGPLQTLPYHHNPAIRRAXTKATYQLKKQWEIQKGHTLRFIINIKPSEDIHQDDEYN

SEQ ID NO: 92020 - protein, 54 aa, Gossypium hirsutum
  Clone ID: LIB3135-022-Q1-K1-H11.pep
GLTPESQCSLKAVLFLQNITRRNSDTPDPRDNILCICNSLPYLLVSIFRTRGRP

SEQ ID NO: 92021 - protein, 39 aa, Gossypium hirsutum
  Clone ID: LIB3135-022-Q1-K1-H12.pep
EQWTLSNTEVSLSIPCAIQRARSGKPYIHSLASMLLVNS

SEQ ID NO: 92022 - protein, 62 aa, Gossypium hirsutum
  Clone ID: LIB3135-022-Q1-K1-H5.pep
IHFISYIILITYMIQLWRVIKPCALGLYQLLLIYRLSENLLYITNSQDITMQMNNLLALGTF

SEQ ID NO: 92023 - protein, 131 aa, Gossypium hirsutum
  Clone ID: LIB3135-022-Q1-K1-H8.pep
PRVRALSEADGIDYTDPEEVELLVMTLIDLDAMDGKSSVSLLQECSSSPDVNTRQALANALAAAPSMWTLGNAGMGALQRLAEDDNPAIAAAASKAIYELKKQWEIEEGDSWRFMMNMKPSEDIDGDDEDN

SEQ ID NO: 92024 - protein, 38 aa, Gossypium hirsutum
  Clone ID: LIB3135-023-Q1-K1-A10.pep
KFHKRDPQVITVIYLSHVSKQWSAIATDNRPRRLISKR

SEQ ID NO: 92025 - protein, 56 aa, Gossypium hirsutum
  Clone ID: LIB3135-023-Q1-K1-A4.pep
HTILSKICNSREKRKPKIGILYFLLGYIKPLRKIERGNTHAYCIKNAKSIQKKGDF

SEQ ID NO: 92026 - protein, 46 aa, Gossypium hirsutum
  Clone ID: LIB3135-023-Q1-K1-A6.pep
INSLFFFFQHLIHTPEKKKIKPSNLYLPLSIKEEVHIFLSNKASKK

SEQ ID NO: 92027 - protein, 80 aa, Gossypium hirsutum
  Clone ID: LIB3135-023-Q1-K1-A8.pep
LVKSDQLLCNGRQGHLYNRNARHGLVTNMLREHEIMDGNGTEMNPVDFLVAQFPGFATENLAEAYFANSCDLNRTIEMLT

SEQ ID NO: 92028 - protein, 89 aa, Gossypium hirsutum
  Clone ID: LIB3135-023-Q1-K1-B11.pep
TVRVVIKGRVHGVFYKNWTIENATQLGLKGWVRNRRDGSAEALFSGTPDSVEEMEQMCRHGPPAAMVTGLQVVPSNDDPGTGFQRKQTG

SEQ ID NO: 92029 - protein, 81 aa, Gossypium hirsutum
  unsure (1)..(81): unsure at all Xaa locations
  Clone ID: LIB3135-023-Q1-K1-B12.pep
VTRSSTCGFVAPEGLATGHLSAWRDVDSFXVLRAGMVWCRRALXQNRPFGEHSLVGWAXPYLANRRHMCAAPILPCVNANM

SEQ ID NO: 92030 - protein, 37 aa, Gossypium hirsutum
  unsure (1)..(37): unsure at all Xaa locations
  Clone ID: LIB3135-023-Q1-K1-B2.pep
HQTIVSSLXTPRTPHLQNLGKYLPSLKPSVRTHLSYS

SEQ ID NO: 92031 - protein, 68 aa, Gossypium hirsutum
  unsure (1)..(68): unsure at all Xaa locations
  Clone ID: LIB3135-023-Q1-K1-B3.pep
ESFSXQKVMSRIYVYELGEYQSIEIISPLLRQITNSRLFIAAQEICGPPRGIGISVRNSLSNALPSLT

SEQ ID NO: 92032 - protein, 84 aa, Gossypium hirsutum
  unsure (1)..(84): unsure at all Xaa locations
  Clone ID: LIB3135-023-Q1-K1-B8.pep
HASGSHYFICGYKGYYEYAKSKGVDVGVPVGXDVLIDGTVPTGSGLSSSAAFVCSSTIAIMAAFGVNFLKKELXQVTCDCEQNI

SEQ ID NO: 92033 - protein, 47 aa, Gossypium hirsutum
  unsure (1)..(47): unsure at all Xaa locations
  Clone ID: LIB3135-023-Q1-K1-C1.pep
NLLIRPQXRDIYMGHNFLGTKGXFILRGLVWRRKKCRVQLPHLEAHF

SEQ ID NO: 92034 - protein, 91 aa, Gossypium hirsutum
  Clone ID: LIB3135-023-Q1-K1-C11.pep
HKEPCAEVFFLVLVGVVFIGHKLWKNPICLARRSYVYGNGKCYGTTEEAKNIITTLYEHEIPYDDNGEVGENSTLVRLTFVKRLRRSDLHV

SEQ ID NO: 92035 - protein, 36 aa, Gossypium hirsutum
  Clone ID: LIB3135-023-Q1-K1-C6.pep
MAVATYDYENTSPVAHARLFKAFTVEAPKVSPTAAP

SEQ ID NO: 92036 - protein, 56 aa, Gossypium hirsutum
  Clone ID: LIB3135-023-Q1-K1-C8.pep
NEHTNRRRASNVRSSTHCTSYKSIRHGYHQHVHSITALIFRTRGSPSGRTRSRRRG

SEQ ID NO: 92037 - protein, 81 aa, Gossypium hirsutum
  Clone ID: LIB3135-023-Q1-K1-D11.pep
QNKRDYTYSWGAVIDVPILPRPLIYKENTCQKNKPSMVKPRRVKTNWLGNPTPFEDKAIITTAPLPKRSQKEDGPNRESSP

SEQ ID NO: 92038 - protein, 41 aa, Gossypium hirsutum
  Clone ID: LIB3135-023-Q1-K1-D7.pep
PTRPRWRKFILASILSTYMRRSISCVIVILLEDCMIATTLC

SEQ ID NO: 92039 - protein, 40 aa, Gossypium hirsutum
  Clone ID: LIB3135-023-Q1-K1-D8.pep
PHFVANIPHIISETSEHELVLLMPFILQFARLPVRHHVRV

SEQ ID NO: 92040 - protein, 75 aa, Gossypium hirsutum
  Clone ID: LIB3135-023-Q1-K1-D9.pep
KSLKAPSVKWHASIFISSQRRELLIAPAPYVSPSFYLYLVMQQIRLCLFTAHRVIMPCFFDRGAARVNVCVSERV

SEQ ID NO: 92041 - protein, 45 aa, Gossypium hirsutum
  Clone ID: LIB3135-023-Q1-K1-E7.pep
FFLPRTSPWLTSKLLLVCFVRASKILSRRYSGCFPDDTYACTHAC

SEQ ID NO: 92042 - protein, 49 aa, Gossypium hirsutum
  Clone ID: LIB3135-023-Q1-K1-F11.pep
PTRAFYGGFPLQLRRHPRARWLMSVPKTRALAPAYLTDSLQAEIIGRSS

SEQ ID NO: 92043 - protein, 51 aa, Gossypium hirsutum
  unsure (1)..(51): unsure at all Xaa locations
  Clone ID: LIB3135-023-Q1-K1-F12.pep
GGAPMATTDQCKGGRCGQGMTTYYQMQTRSADEPMTTXVTCVNCNNHWKSC

SEQ ID NO: 92044 - protein, 84 aa, Gossypium hirsutum
  Clone ID: LIB3135-023-Q1-K1-F2.pep
ASPGLYPFSFPFYFFYAFSFCNFILIRKINIKKGRGSAPESALRSAGDWSFAVIGFGLERGPKILFSPRFPFPRLEPLKVPDAW

SEQ ID NO: 92045 - protein, 35 aa, Gossypium hirsutum
  Clone ID: LIB3135-023-Q1-K1-F7.pep
DRTLDVSVGHAIESSNHEGTTVASQTNRTLGRTRG

SEQ ID NO: 92046 - protein, 90 aa, Gossypium hirsutum
  Clone ID: LIB3135-023-Q1-K1-F8.pep
HASAHASVLIGDGATFDEKRTSRSYTWAQHLAGIDYLPEVSPLLNIQEASNNETKSEAAISGLALYRQQNRMQTVVQRIPSRIKTELALA

SEQ ID NO: 92047 - protein, 100 aa, Gossypium hirsutum
  unsure (1)..(100): unsure at all Xaa locations
  Clone ID: LIB3135-023-Q1-K1-F9.pep
GTRFAEGVTSMHPEIMLAXNLSPSFNGDALGMTVEQIRDFIPRIAKLGLCXQCTTRTGXHADALVTDALPRDFARRGMLLYVEKIEKEDGDNGADTWADR

SEQ ID NO: 92048 - protein, 50 aa, Gossypium hirsutum
  Clone ID: LIB3135-023-Q1-K1-G12.pep
RITDPIVFEGGNVGFKKPAREDPEKTNKIPWRNPMQACYMNPTFYMLTGG

SEQ ID NO: 92049 - protein, 106 aa, Gossypium hirsutum
  unsure (1)..(106): unsure at all Xaa locations
  Clone ID: LIB3135-023-Q1-K1-G9.pep
PRVRPRVRTRRRIFQIHTXRMTLADDVNLEEFGMTKDEFSGADIYAICTEAGLLALRERRMNVTHADFQKAKEKVMFKKKEWVPDGLYMYKNSVYVYIFQRYSWYV

SEQ ID NO: 92050 - protein, 48 aa, Gossypium hirsutum
  Clone ID: LIB3135-023-Q1-K1-H1.pep
AWAMQQLLIILDIFKILLDFHRLDCSRTINSLSMGEFVKFNFELNLFN

SEQ ID NO: 92051 - protein, 74 aa, Gossypium hirsutum
  unsure (1)..(74): unsure at all Xaa locations
  Clone ID: LIB3145-001-P1-K1-A1.pep
SLRRVEHYRDGYGFYSHFNTIFLCFFATALCVVYCYFCIFYSFLPSFVGFDESDGTRPEVAVLRPLLLVXKKKK

SEQ ID NO: 92052 - protein, 46 aa, Gossypium hirsutum
  Clone ID: LIB3145-001-P1-K1-B5.pep
MIAFVVGNGMHYITSNSFSFKNTVVAIPKRRSPIIYSIRKCGRTRG

SEQ ID NO: 92053 - protein, 67 aa, Gossypium hirsutum
  Clone ID: LIB3145-001-P1-K1-D4.pep
HASAIGNGLIDPEIQYQADRDYALNTSIITQSDYVDIKKLVPSCVQAIKRCGSKGGDACVDFFDTCN

SEQ ID NO: 92054 - protein, 109 aa, Gossypium hirsutum
  Clone ID: LIB3145-001-P1-K1-H8.pep
PTRPVYKFNVLYKIITYSIGMVMHPTPIRNLVGTWEWDHVRHNHHFYKCSRIILPNFVISESAKILYIYIFSKYKHYASNRFRYLSRSPIQINNINLDNKYLNIYLHLL

SEQ ID NO: 92055 - protein, 114 aa, Gossypium hirsutum
  unsure (1)..(114): unsure at all Xaa locations
  Clone ID: LIB3145-002-P1-K1-A1.pep
FDGGIYNDLSDGLLETVETELTSVQRLSYWLYSAYSDTAEANYPHPSNYXMPLHRHAITEVCXKNDGSAAGASIVEHIYNAYSVYYNCTGDADWIQLDDDPHGTDGXNWHACTE

SEQ ID NO: 92056 - protein, 35 aa, Gossypium hirsutum
  Clone ID: LIB3145-002-P1-K1-A2.pep
QSLNFCVPALCWDMLYYDLTDGYTIILMKEFLKLL

SEQ ID NO: 92057 - protein, 88 aa, Gossypium hirsutum
  unsure (1)..(88): unsure at all Xaa locations
  Clone ID: LIB3145-002-P1-K1-A3.pep
FDGAIYNYFNDVLLETLDTELTTVQRLSHCLYSAYSYSAEANYPHPLNYLMPLQXHPITEVCIYNDGSPTRSSILEHTNIPKSVYHNY

SEQ ID NO: 92058 - protein, 79 aa, Gossypium hirsutum
  Clone ID: LIB3145-002-P1-K1-A8.pep
FYILSIIYSIMPTTSRQWAWPDHLALQRDLLLFLYSHPIIIIPKIMPPSILNNGNYSATAMDQSKNVDLNSIKAIIKFV

SEQ ID NO: 92059 - protein, 45 aa, Gossypium hirsutum
  Clone ID: LIB3145-002-P1-K1-B2.pep
KVRIMLHSFQQQLESFTEVTSFSSPINKQAIFNPSVCPRVGTRVR

SEQ ID NO: 92060 - protein, 48 aa, Gossypium hirsutum
  Clone ID: LIB3145-002-P1-K1-B6.pep
SNAIGRNMSNLRACCRKIDGVVMIVTLLYMVSYSNPDEGKERTYVVLV

SEQ ID NO: 92061 - protein, 43 aa, Gossypium hirsutum
  Clone ID: LIB3145-002-P1-K1-B8.pep
ITKGVNLVYAMSYSNTDEFKESTLIVLVYYDDSSSMMDRYMYE

SEQ ID NO: 92062 - protein, 78 aa, Gossypium hirsutum
  unsure (1)..(78): unsure at all Xaa locations
  Clone ID: LIB3145-002-P1-K1-C2.pep
KYARASKRFXKALKYIYYDSHFNEXIKLNAKALKVACNLNIAACKLKLNDFKQAXKLCIKALDIESSNVKSFDIMAQA

SEQ ID NO: 92063 - protein, 43 aa, Gossypium hirsutum
  Clone ID: LIB3145-002-P1-K1-C5.pep
DAKLHVNSLKASHKAGYIVCKLAYRQIQTDEHGSGRLSAPTTI

SEQ ID NO: 92064 - protein, 103 aa, Gossypium hirsutum
  Clone ID: LIB3145-002-P1-K1-C9.pep
LILFNFATNSSSFLLIKNYCGKKKKKKKKKKKKKKKKKKKKKKKKKKKKKKKKKKKKKKKKKKKKKKKKKKGPPFKRPKFTSPGLPTKNLFKGAPKFKSMAPL

SEQ ID NO: 92065 - protein, 52 aa, Gossypium hirsutum
  Clone ID: LIB3145-002-P1-K1-D4.pep
WTSIPKDRFSKDIMIMIVSLVLYVYSIVSAHDRAKIPSPSMDTVICHLNFYY

SEQ ID NO: 92066 - protein, 67 aa, Gossypium hirsutum
  Clone ID: LIB3145-002-P1-K1-D5.pep
YQVVIYGRQGLYSLKVYDIMTLEINDTVKSYYLYECLYQYMGGNGKGDAGEVCKMDIRNCKQVLRYR

SEQ ID NO: 92067 - protein, 53 aa, Gossypium hirsutum
  Clone ID: LIB3145-002-P1-K1-D6.pep
EPLTSTAFYIISGNETARVGIYMCSHCALDYCCMESTYTTTNSATCMCLNKRD

SEQ ID NO: 92068 - protein, 41 aa, Gossypium hirsutum
  Clone ID: LIB3145-002-P1-K1-E2.pep
VLEVGDKLTPGIVKFDNLGPYLDAKPIGYNQNLGMKNAHVW

SEQ ID NO: 92069 - protein, 48 aa, Gossypium hirsutum
  Clone ID: LIB3145-002-P1-K1-E7.pep
IRLSCMTLGSYHTIAKPFFIDNNVNIITMSLDKHLASIVSVNLISLLN

SEQ ID NO: 92070 - protein, 51 aa, Gossypium hirsutum
  Clone ID: LIB3145-002-P1-K1-F1.pep
LILRSAISAQLLTLISFLRSTWICMMLLSLATPGSHAYKRGTPQHQLQHVL

SEQ ID NO: 92071 - protein, 103 aa, Gossypium hirsutum
  unsure (1)..(103): unsure at all Xaa locations
  Clone ID: LIB3145-002-P1-K1-F10.pep
SLSYNLNLLIHTNASTSTNLINQQALVSIYPTSADLMELRFPKLTYVPNGWISKAPTLQCSSMSIIDQLFRILQSNTPLLDFLXXDPHRWNNPIDKIYETTWD

SEQ ID NO: 92072 - protein, 43 aa, Gossypium hirsutum
  Clone ID: LIB3145-002-P1-K1-F6.pep
ISIHEMLFFVLYDALYKAFHNFPLALYIICTPKKGKHVAVGSR

SEQ ID NO: 92073 - protein, 35 aa, Gossypium hirsutum
  Clone ID: LIB3145-002-P1-K1-F7.pep
ISIHELFIFVILEALYKAFLIQPLLLFIICTHKKK

SEQ ID NO: 92074 - protein, 37 aa, Gossypium hirsutum
  Clone ID: LIB3145-002-P1-K1-F8.pep
ISIHELFFFVLFDALYKAFLFRSLALFIRCTPKMESM

SEQ ID NO: 92075 - protein, 66 aa, Gossypium hirsutum
  unsure (1)..(66): unsure at all Xaa locations
  Clone ID: LIB3145-002-P1-K1-G3.pep
ADQLTDDQISXFXEAYRLSEKQGDGSITTKELDTAMRSLGQNPTEAELQHMINECDANRNGTIDFP

SEQ ID NO: 92076 - protein, 48 aa, Gossypium hirsutum
  Clone ID: LIB3145-002-P1-K1-G5.pep
PLSGLGCYKSASTYTKYASAHINCIKLIPISSSLNSETTILSKYDTLI

SEQ ID NO: 92077 - protein, 138 aa, Gossypium hirsutum
  unsure (1)..(138): unsure at all Xaa locations
  Clone ID: LIB3145-002-P1-K1-G6.pep
GLHPTTFRVIKVLDEYHTEGANKATSQXILYAPVHFLYIECIPVSMSIDPETTIIYKDDRLIXKWAIRLTFDDEQHPYLPXHMLYRHIEQFSDGVGYSWIDGLKVYASRHVTLNMMFNATLIFTYTHYLLXEAYYYMM

SEQ ID NO: 92078 - protein, 47 aa, Gossypium hirsutum
  Clone ID: LIB3145-002-P1-K1-G7.pep
NMLWQLEMLLVIEGQFYSSILYECIIFIYYSSFRINRHGGRYKLFVL

SEQ ID NO: 92079 - protein, 72 aa, Gossypium hirsutum
  Clone ID: LIB3145-002-P1-K1-G9.pep
WNRGSTGTDQNSQRNNSCKLNYSASSSVFSMIRNWKTFHLELKVRLIHGIVMQTSRIITYMKFVMQRTRILM

SEQ ID NO: 92080 - protein, 53 aa, Gossypium hirsutum
  Clone ID: LIB3145-002-P1-K1-H1.pep
PSIKALPKGDTKCVFLDTQCTLSVPLIANKELERRKYSVSLIGNLVTQKCHAT

SEQ ID NO: 92081 - protein, 35 aa, Gossypium hirsutum
  Clone ID: LIB3145-002-P1-K1-H3.pep
LMRTTFLTATFTFNLPLILSRKVILNICIYTRNIY

SEQ ID NO: 92082 - protein, 45 aa, Gossypium hirsutum
  Clone ID: LIB3145-002-P1-K1-H5.pep
LWSRDQMHDGYCNRHIHGQSLPPRSNGSYPAQVSIEPHSGSVMLP

SEQ ID NO: 92083 - protein, 46 aa, Gossypium hirsutum
  Clone ID: LIB3145-004-P1-K1-A11.pep
MDTAKALKGPFSIRLTSESGKKVIAKDVIPPNWRPDAVYTSNVQFY

SEQ ID NO: 92084 - protein, 152 aa, Gossypium hirsutum
  unsure (1)..(152): unsure at all Xaa locations
  Clone ID: LIB3145-004-P1-K1-A9.pep
VIWVKPLDNDCYKRRAHGTEPPLCKSGNDPDSVWGVPMEACITPYPEQMHRDGGTGLAPWPARLTAPPPRLADLYITADTFEKDTEMWQQRVENYWSLLGPKVKPDTIRNIMDMKANXXSFAAALKEKDVWVMKCVPHDGPSTLKIIYDRGL

SEQ ID NO: 92085 - protein, 116 aa, Gossypium hirsutum
  Clone ID: LIB3145-004-P1-K1-B11.pep
TERGTRTTNDRLIAMARSVPIGVAVAPLLLLLLVSTASAARTVGDTVQDACSKTQFPKICVDSLAAKPESQKATPRRLAELFVNIAAEKGSGMATFVHGKYNNAKDKTVVKCYHSC

SEQ ID NO: 92086 - protein, 142 aa, Gossypium hirsutum
  unsure (1)..(142): unsure at all Xaa locations
  Clone ID: LIB3145-004-P1-K1-C11.pep
MTVGLARRHGSXVFRSHLIGSATVVTSDAKVSRFVLHSDARAFVPWYPRSLTELMGESSILLINGSLQRRVHGLVGAFFKSPQLKAQVTADMQRRLAPALAAWKVRCASAPPLRIQDHAKTVRTTYAALLLSSLQPAPAQRH

SEQ ID NO: 92087 - protein, 162 aa, Gossypium hirsutum
  Clone ID: LIB3145-004-P1-K1-C9.pep
MACTDNAMRALFLLVLCCMVHGEKEESKGIDAKASGPGGSFDITKLGAFGNGKTDSTKAVQEAWASACGGTGKQTILIPKGDFLVGQLNFTGPCKGDVTIQVDGNLLATTDLSQYKDHGNWIEILRVDNLVITGKGNLDGQGPSVWSKNSCTKKYDCKILPN

SEQ ID NO: 92088 - protein, 104 aa, Gossypium hirsutum
  unsure (1)..(104): unsure at all Xaa locations
  Clone ID: LIB3145-004-P1-K1-D11.pep
MSFTGTQDKCKACDKTVHIIDLLTADGVSYHKTCFKCSHCKGVLSISSYSSMDGVLYCKTHFEQLFKETGTFSKNFQGGASSNMNDXSYVSSMLSSAFSGTQDK

SEQ ID NO: 92089 - protein, 88 aa, Gossypium hirsutum
  Clone ID: LIB3145-004-P1-K1-D12.pep
SAGPPTLPLTLFLTRRLHPFITLPLHSRLEYILHSAPVHSLTFYLCIPQPTLSKGLTIPRSFINHFLSSKASSPNIPLHTSAPNTNLQ

SEQ ID NO: 92090 - protein, 158 aa, Gossypium hirsutum
  unsure (1)..(158): unsure at all Xaa locations
  Clone ID: LIB3145-004-P1-K1-D9.pep
RVVQGGPHNHTITGXAVALKQATTPEYRAYQEQVISNCAKFAQSLISKGYELVSGGTDNHLVLVNLKNKGIDGSRVEKVLESVHIAANKNTVPGDVSAMVPGGIRMGTPALTSRGFVEEDFAKVADFFDASVNLALKIKAATTGGTKLKDFVXTLQSD

SEQ ID NO: 92091 - protein, 54 aa, Gossypium hirsutum
  Clone ID: LIB3145-004-P1-K1-E11.pep
DQPHQRPLRRAPQNELRMRMRPARRWRRRRRRVRRKVPSSSQWLQGVSLRRSWI

SEQ ID NO: 92092 - protein, 54 aa, Gossypium hirsutum
  Clone ID: LIB3145-004-P1-K1-E12.pep
MIQLNANQLISLIGPELLQNRLKDYVKGVVSEDLLIHAKILRFVKMFEDQLPLK

SEQ ID NO: 92093 - protein, 165 aa, Gossypium hirsutum
  Clone ID: LIB3145-004-P1-K1-E9.pep
TLGECKYTIGGDLGGGEGHNGWVSCVRFSPNTFQPTIVSGSWDRTVKVWNLTNCKLRCTLDGHGGYVNAVAVSPDGSLCASGGKDGVTLLWDLAEGKRLYSLDAGSIIHSLCFSPNRYWLCAATQDSVKIWDLESKHVVQDLKPDIQISKNQILYCTSLSWTADG

SEQ ID NO: 92094 - protein, 119 aa, Gossypium hirsutum
  Clone ID: LIB3145-004-P1-K1-F11.pep
PRSDNQDLSFPTKYSQNFYGQCAANFWKQYRSYWKNPPYNAMRYLMTCLFGLVFGTVFWQKGKNIDSQQDLYNLLGATYAATFFLGASNCITVQPVVSIERAVFYREKASGMYSPLSYA

SEQ ID NO: 92095 - protein, 68 aa, Gossypium hirsutum
  Clone ID: LIB3145-004-P1-K1-G11.pep
SMDFIASILFLALVIFCDISLDPCSSHPYYSYLYFIPIYYKCSLFIPLKPFLSSILIIIILSFFLLFF

SEQ ID NO: 92096 - protein, 57 aa, Gossypium hirsutum
  Clone ID: LIB3145-004-P1-K1-G9.pep
CNRTSKADLTSSDYSACRAHNSKPCIKHVLSLQECYTTFFIIIDSDSICFELSFIVC

SEQ ID NO: 92097 - protein, 68 aa, Gossypium hirsutum
  unsure (1)..(68): unsure at all Xaa locations
  Clone ID: LIB3145-005-Q1-K1-A11.pep
FCXCSGLFSKVRVFXYSXNSPMMTPKTCTLFLPFMHSTLPNLMDPVLTFTNIILSQKVLKLVLFFFVF

SEQ ID NO: 92098 - protein, 58 aa, Gossypium hirsutum
  Clone ID: LIB3145-005-Q1-K1-A2.pep
IYQARSNDNCFPLRISEPHFFQVFRYHLLLLLLRKISAVDSGICEFFYGHSRRNFTLN

SEQ ID NO: 92099 - protein, 63 aa, Gossypium hirsutum
  Clone ID: LIB3145-005-Q1-K1-A3.pep
ELQRWFINAFQLNRKVYLSKFGSSDLKKAKHFLIDLCILIVTILLIVRIRLLLLGSISEFMSN

SEQ ID NO: 92100 - protein, 64 aa, Gossypium hirsutum
  Clone ID: LIB3145-005-Q1-K1-A4.pep
CSSFSLLASFHQSLRLKLSRRLPTTTGSDIASHPPDGPQPFNFHHFVLFNFLHQNISSNRIPVT

SEQ ID NO: 92101 - protein, 59 aa, Gossypium hirsutum
  Clone ID: LIB3145-005-Q1-K1-A5.pep
HHSFNKKLFKFVFQNMLTIQNQCFGHMTSKLFKDMFKLSRVKIFVWLGKVLNNVFINSD

SEQ ID NO: 92102 - protein, 75 aa, Gossypium hirsutum
  unsure (1)..(75): unsure at all Xaa locations
  Clone ID: LIB3145-005-Q1-K1-B11.pep
RDTAPPLHLLAXHLHVDPSKSMNSSLWKEDTICIEWLNKQEPNSIVYVNYGSITVMFEKHLKKIAWGLANSKHPF

SEQ ID NO: 92103 - protein, 130 aa, Gossypium hirsutum
  unsure (1)..(130): unsure at all Xaa locations
  Clone ID: LIB3145-005-Q1-K1-B2.pep
SATPSGFLSNPREKFKIPSLGCTIFSGETXRSYKGRHCKKFYSEEGCPYGDNCTFLHDEQSKNRESVAISLGPGGYGGGGAGGRGSGGGGGNGSNAKPSNWKTRICNKWELTGYCPFGNKCHFAHGAAEL

SEQ ID NO: 92104 - protein, 50 aa, Gossypium hirsutum
  unsure (1)..(50): unsure at all Xaa locations
  Clone ID: LIB3145-005-Q1-K1-B6.pep
GFSLCDSYSPPEPKXTLIXLHKGAGGGSLKATXPPESLVGXSFMVLRLRT

SEQ ID NO: 92105 - protein, 99 aa, Gossypium hirsutum
  unsure (1)..(99): unsure at all Xaa locations
  Clone ID: LIB3145-005-Q1-K1-B9.pep
DQYQNIXPIFFXHTHYXKTRELLKRAXRHVNMNLXKXIIITMADCFNDLSIENLASFXQEMDNSFTLIRYIKYLFLFNQIYTFIKNVNNVEDIHKNLLH

SEQ ID NO: 92106 - protein, 98 aa, Gossypium hirsutum
  Clone ID: LIB3145-005-Q1-K1-C12.pep
LLSKLYHRNIIKFVAACRKAPFYCVITEYLSEGSLRAYLHKLDHKSLPLQKIIAIALEVARGMEYIHSQRVIHRDLKPENILIDEEIQLKIADFRITW

SEQ ID NO: 92107 - protein, 58 aa, Gossypium hirsutum
  Clone ID: LIB3145-005-Q1-K1-C3.pep
LVPSSISGQVKVSTRKVLVMKCSCHYCLWNHLTIHCIPSVVCLCLWIKTAGRIGGRVA

SEQ ID NO: 92108 - protein, 51 aa, Gossypium hirsutum
  unsure (1)..(51): unsure at all Xaa locations
  Clone ID: LIB3145-005-Q1-K1-D12.pep
RGRVPAMRVKELEIVGFSGLTKXPVGGSLLIDLYWWEEKRAANLKXDTQHT

SEQ ID NO: 92109 - protein, 57 aa, Gossypium hirsutum
  Clone ID: LIB3145-005-Q1-K1-D3.pep
NTNRACKLNAKTINYWFKNPFLGQISADKYTFLIQTSHGGPPKFLKGLRKAKIGLHV

SEQ ID NO: 92110 - protein, 48 aa, Gossypium hirsutum
  unsure (1)..(48): unsure at all Xaa locations
  Clone ID: LIB3145-005-Q1-K1-D5.pep
IGKFSDSHGREVSTSNAIFVTTSTLTKETQVVCHKQHTSXDKILGTKG

SEQ ID NO: 92111 - protein, 149 aa, Gossypium hirsutum
  unsure (1)..(149): unsure at all Xaa locations
  Clone ID: LIB3145-005-Q1-K1-D8.pep
GKPGGTHASAHPSCLCKPDTDSILNSGRRPIWEAVREEAKLEAEKEPILSSFLYASILAHDCLEQALAFVLANRLQNPTLLATQLMDIFSNVMMHDRDIQRSIRLDVXAFIDRDPACLSYSSALLYLNGYHSLASYRVAHAFMEAGRNV

SEQ ID NO: 92112 - protein, 79 aa, Gossypium hirsutum
  unsure (1)..(79): unsure at all Xaa locations
  Clone ID: LIB3145-005-Q1-K1-E9.pep
TSNSSVFFNLHIYIDTAAFTRELVXPPTLHRLRLLLIIILLPLHYRKKKKYFIKKKIKKKKKKKNKKKKYIIKNNKKKK

SEQ ID NO: 92113 - protein, 65 aa, Gossypium hirsutum
  Clone ID: LIB3145-005-Q1-K1-F4.pep
CKYVVVVVVVVAIVQNPCKEYLHFYTKTSFQFDQLVVNCCLVDLVLSKKNLPLLLSSLLLFHLYT

SEQ ID NO: 92114 - protein, 53 aa, Gossypium hirsutum
  Clone ID: LIB3145-005-Q1-K1-F8.pep
KKKNKKKKKKKQKEFIKQKNQKNEKNINSLSSVIKPKNLLGVNFNGKTTEKYK

SEQ ID NO: 92115 - protein, 104 aa, Gossypium hirsutum
  unsure (1)..(104): unsure at all Xaa locations
  Clone ID: LIB3145-005-Q1-K1-G1.pep
IPTGGIPYRGVLGKNGGKNGGGLPXELHKNGGNNGGGNGGKKGAPNGVSDGFPTMGGGANGGNMSQQQRAAAMNMAMGQMGSLPQMGNIPAVQGLPAAAINGGG

SEQ ID NO: 92116 - protein, 86 aa, Gossypium hirsutum
  unsure (1)..(86): unsure at all Xaa locations
  Clone ID: LIB3145-005-Q1-K1-G3.pep
YLRLWALSLPHSELSSVFYDNVLLLAXGFNNIFILIIGIFEFICATVGVLLVMETLSAFLHXLKLHXLNFQSKFYXGDRYKXQPFS

SEQ ID NO: 92117 - protein, 73 aa, Gossypium hirsutum
  unsure (1)..(73): unsure at all Xaa locations
  Clone ID: LIB3145-005-Q1-K1-H6.pep
LPVLWTFLFSVNMDEENYENPCLFEPWRWEKIGAAANNNSXTPFGGGQRLCPGLELSRLEISIFLHHLVTTYR

SEQ ID NO: 92118 - protein, 41 aa, Gossypium hirsutum
  Clone ID: LIB3145-006-Q1-K1-A1.pep
GVPKVTFFVRCRNSSRTVALCLRRPNGLTSHVFAVRNRTGN

SEQ ID NO: 92119 - protein, 138 aa, Gossypium hirsutum
  Clone ID: LIB3145-006-Q1-K1-A10.pep
LLGTRVEWLYHILQAFNSGDLARYQELCHVHNAALRAQPALVENEKKLSEKINILCLMEIIFSRPSEDRTIPLKVIAERTKLSIEDVEHLLMKSLSVHLIEGTIDQVEGTVHVSWVQPRVLGIPQIKSLRDRLDNWVG

SEQ ID NO: 92120 - protein, 103 aa, Gossypium hirsutum
  Clone ID: LIB3145-006-Q1-K1-A12.pep
NGEGEILATQAVQHSNIENPFTAEAYAGLQAIKLGISLGINKIDIIGNSKTVIKKCQSSIIDRSVIGAIIRYIQERKYSFQELSLLLFKKKKHLHPYYCYGGS

SEQ ID NO: 92121 - protein, 40 aa, Gossypium hirsutum
  Clone ID: LIB3145-006-Q1-K1-A7.pep
KGFIHQIQPFLCTVVVFIIVLVANVFHHETSLSNLSARVD

SEQ ID NO: 92122 - protein, 43 aa, Gossypium hirsutum
  Clone ID: LIB3145-006-Q1-K1-A9.pep
ASTHTYGHTCGYHILFNCHCLWVSLNQNISSFSLNEIPCWLTR

SEQ ID NO: 92123 - protein, 138 aa, Gossypium hirsutum
  Clone ID: LIB3145-006-Q1-K1-B10.pep
KKARDKLPSSRKKKSKLASAEKYPVSGDDGIDVRPKKSKSSHKKKVSTNDKVVGKDKPADIQGEPENSSTPEIDETGDDKTNLGRSSQLQNTGKGSADELITTTEVKKLPSRSARRKKAKRRWLREQAKLVKEKPQSK

SEQ ID NO: 92124 - protein, 137 aa, Gossypium hirsutum
  Clone ID: LIB3145-006-Q1-K1-B4.pep
PRVRESAKSKELGSQSSCTTPVHAVTSSTVQRGSPVPHWEPLKGDNYFPGQPRVSSLLPSSTLSAKLCETQSFQVIRSHGVENWDRGSININENLNETSEGQIIAGNVKQENSEGKSGKSCGQSWKSPLNDASNGWD

SEQ ID NO: 92125 - protein, 53 aa, Gossypium hirsutum
  Clone ID: LIB3145-006-Q1-K1-B7.pep
VVACIQPIDLYPLTKLSVVPRSCILDVESQPGGLTKIIESTDHTNRSQVQMVA

SEQ ID NO: 92126 - protein, 56 aa, Gossypium hirsutum
  Clone ID: LIB3145-006-Q1-K1-B9.pep
NYMAADGDYMVNQKWERHIIKGPMNYQGHLVLIWGRPSDERTWRKRKLKSQRHVCL

SEQ ID NO: 92127 - protein, 126 aa, Gossypium hirsutum
  unsure (1)..(126): unsure at all Xaa locations
  Clone ID: LIB3145-006-Q1-K1-C10.pep
HLRKGDLFVLRKTQDIIHETLKLQIMRKGNSPMAQNQFTCFNSTVQSPMQLQNQTNHDNQLKASRDVAMATDAKAKLLLLELKTVKADLAFVKERCAQLEDENKLLRESXEKGDNPADDDLIPLQL

SEQ ID NO: 92128 - protein, 69 aa, Gossypium hirsutum
  Clone ID: LIB3145-006-Q1-K1-C2.pep
KEQNTLYPFVSQLSALAMNPNLCAASPSIERKKGSTLLLLGLTSPTERVCGDTITGIAWKPSPSLIISV

SEQ ID NO: 92129 - protein, 55 aa, Gossypium hirsutum
  Clone ID: LIB3145-006-Q1-K1-C3.pep
SDSPKIVLLKPNSRVPILEEAQTCCFLYLKPTIHKNLLLVRVLREQIEIMHYISL

SEQ ID NO: 92130 - protein, 48 aa, Gossypium hirsutum
  Clone ID: LIB3145-006-Q1-K1-C4.pep
CSHPWMQQKLDLSLPVNDYNLGYEHMLANGLQNLGSGDLIRQQLQHSF

SEQ ID NO: 92131 - protein, 140 aa, Gossypium hirsutum
  Clone ID: LIB3145-006-Q1-K1-C7.pep
SEPFIIAATGTGTIPASALAAAGASVCAQGNSVSAGLHTKMGLGACTGSKDRNNWAMLGGNLGRSQIPSGAWSSSNGIGSGLVQASEQSTSASNFGNENSNHIHQNYGFQGLEFPNINMGFVSFSSLLNGSNPQVPGLEL

SEQ ID NO: 92132 - protein, 55 aa, Gossypium hirsutum
  Clone ID: LIB3145-006-Q1-K1-C9.pep
IKKIDRSITVNCFNLFLFKFITKNKLYYILLIVINFIYVLYSQKNYLHTLNLYIF

SEQ ID NO: 92133 - protein, 77 aa, Gossypium hirsutum
  Clone ID: LIB3145-006-Q1-K1-D2.pep
DSSSTIEHSPQRPEPVKHHIAKTDNVNQERILLEERIKAEKVKAVNLKRSGKQTEALDALRKAKMLEKAKFLVLIKY

SEQ ID NO: 92134 - protein, 56 aa, Gossypium hirsutum
  Clone ID: LIB3145-006-Q1-K1-D5.pep
ALIKGGSNPYRIQDTGYMIQDTRAWRHMLYTVQRTLLQFHCIFLRRITALFSLVFH

SEQ ID NO: 92135 - protein, 141 aa, Gossypium hirsutum
  unsure (1)..(141): unsure at all Xaa locations
  Clone ID: LIB3145-006-Q1-K1-D6.pep
HAFSLRVSGPARLLCARSLDRMGLATNALKSLSLSAAGSRPHTPNRTSVSRGASPSTARPFTTPTRGVIATTRRDITSLMRTSTLSNQFHSSTLGLSFIADINKGRKGANYIQDAHXLPLLYNRYLQWRFANARSYTVLYI

SEQ ID NO: 92136 - protein, 69 aa, Gossypium hirsutum
  Clone ID: LIB3145-006-Q1-K1-D7.pep
KNELYFFSYLHHRQIAITYIKNKKKTYKSNFYLNIHLLPLSFPNNKNLPCTLTQSWLTAPSTSNYINQK

SEQ ID NO: 92137 - protein, 44 aa, Gossypium hirsutum
  Clone ID: LIB3145-006-Q1-K1-E1.pep
DVMTILIITFSSSCSMPAEYKTGTSGMFYVIMQRQSIKHLLRTR

SEQ ID NO: 92138 - protein, 58 aa, Gossypium hirsutum
  unsure (1)..(58): unsure at all Xaa locations
  Clone ID: LIB3145-006-Q1-K1-E2.pep
MPDRRKYHRKKKKKKKKEKIKKKKKKKKKKKKKKKKKKKKKKKKNKNKXKNKKKKLKK

SEQ ID NO: 92139 - protein, 77 aa, Gossypium hirsutum
  Clone ID: LIB3145-006-Q1-K1-E4.pep
EFNLGGPKKKLLRCKHGEVNLDPLKRPPPFFFFFFFFFFFFFYFFFFFFFFFFFFFFFFFFFKYNKNIYVLPRKYKF

SEQ ID NO: 92140 - protein, 61 aa, Gossypium hirsutum
  Clone ID: LIB3145-006-Q1-K1-E8.pep
KQGEIKFDSLKRTPLFFFFYFFFFFFFFFFFFFLFFLFSPFFFFFFFFFFFFFFFFLKKNF

SEQ ID NO: 92141 - protein, 63 aa, Gossypium hirsutum
  Clone ID: LIB3145-006-Q1-K1-E9.pep
NSYQLLFTLTTHNILLLIKRYFHILSKILFLFTHHMIFKLYLKLQSYSTSLLKYQNFSTQNIN

SEQ ID NO: 92142 - protein, 51 aa, Gossypium hirsutum
  unsure (1)..(51): unsure at all Xaa locations
  Clone ID: LIB3145-006-Q1-K1-F1.pep
MLLLCLPITQLGRSKWNGNVGNSXIVVRVDTPLSSVGRPSFSVLINHVIEF

SEQ ID NO: 92143 - protein, 57 aa, Gossypium hirsutum
  unsure (1)..(57): unsure at all Xaa locations
  Clone ID: LIB3145-006-Q1-K1-F2.pep
MKIWGWSINSSFTXCTMSLKRISQVQNVVDLNISRCLFLLAFLWSQKTFSCICKVDN

SEQ ID NO: 92144 - protein, 112 aa, Gossypium hirsutum
  Clone ID: LIB3145-006-Q1-K1-F9.pep
FPENLFEAVIARLPIATLFGWRSVCRKWNSFLESQKFSHHCAEIPLANPWFYTITHENINVVAMYDPSTNKWHHPTISFLPPKMIALPVASVSGLICFLDIGHRNFYVCNPL

SEQ ID NO: 92145 - protein, 136 aa, Gossypium hirsutum
  Clone ID: LIB3145-006-Q1-K1-G11.pep
SVINFFCSPTLNPSPGAVQATILTLRATVIPTNKPLTPPPNRRRCLFITAQSQAAVTPDPPSPPTVKLNKYSSRVTEPKSQGGSHAMLYGVGLSEDDMSKPQVGISSVWYEGNPCNMHLLKLSDEVKRGVEDAGMV

SEQ ID NO: 92146 - protein, 43 aa, Gossypium hirsutum
  Clone ID: LIB3145-006-Q1-K1-G7.pep
FTINSLVFINIKIKSKIQKINVHLQIQSLIQSLTQILNINRDS

SEQ ID NO: 92147 - protein, 87 aa, Gossypium hirsutum
  Clone ID: LIB3145-006-Q1-K1-H2.pep
PTRPPTRPEKRSEQESAENGAIKGGNRAVGQKQPYPNGIVKSLNPAPAEISQTLSAATSVLNTDLPLKHESSIGKEDTKNVGIEGSN

SEQ ID NO: 92148 - protein, 82 aa, Gossypium hirsutum
  Clone ID: LIB3145-006-Q1-K1-H3.pep
ELKMYKNIPGRENIHIQAQEIRPSWSTVNQLIDAETCTWDRALLLKIVDESTVDRILAITTSESRPEDRLVCKHPRVRPRVR

SEQ ID NO: 92149 - protein, 138 aa, Gossypium hirsutum
  unsure (1)..(138): unsure at all Xaa locations
  Clone ID: LIB3145-006-Q1-K1-H4.pep
HASGFRGMFKGNGTNCARIIPNXAVKFFSYEEASKGILYLYRQQSGNEDAQFTPLLRLGAGACAGIIAMSATYPMDMVRGXTVQTEKSPRQYRGIFHAXLTVLREEGPRALYKGWLPSVIGVVPYVGLNXCCYESLKD

SEQ ID NO: 92150 - protein, 138 aa, Gossypium hirsutum
  unsure (1)..(138): unsure at all Xaa locations
  Clone ID: LIB3145-007-Q1-K1-A8.pep
PSLPINKRIRDLMRRMSLDEKXIGQMVQIDRKVATPEVMRDYKIGSILSGGGSVPHLQATPQEWLNMVNGFQNGSLSTRLGIPMIYGIDAVHGHNNVYKATIFPHNIGLGATRDPELVKEDXSATAREXRATGINYVF

SEQ ID NO: 92151 - protein, 137 aa, Gossypium hirsutum
  unsure (1)..(137): unsure at all Xaa locations
  Clone ID: LIB3145-007-Q1-K1-C10.pep
MSIPPSSATPPGSSSSCQFTYQTTANQSYFPLPFHLQQQPQHYASAPPSVSVAPAPVYPASVAPVPGVYSLPQYQQAQQLFQRDAQIVTPEALESVKAALASSEIEHKAETKKKAIPRKAAGQSWEDPTXAEWPEND

SEQ ID NO: 92152 - protein, 150 aa, Gossypium hirsutum
  Clone ID: LIB3145-007-Q1-K1-D12.pep
HASANAQYDDPDILDRLRVEMMPHGTGDRGWDVFSLEYDARVPLDTVFTESVMTRYLRIFNFLWKLRQVEHALIGAWKTMKPNCLTSHVYTKLQHAVKLQLLSTLRRCQVLWDEMNHFVTNLQYYIMFEVFEVSWSNFSNEMEVAKDLDD

SEQ ID NO: 92153 - protein, 41 aa, Gossypium hirsutum
  Clone ID: LIB3145-007-Q1-K1-D8.pep
QALHALLGILLQYYKKPSEEAPNQVLHINFMPMDNVKCNCV

SEQ ID NO: 92154 - protein, 152 aa, Gossypium hirsutum
  Clone ID: LIB3145-007-Q1-K1-D9.pep
KLLRENNSLPSYGGPADVCGETVYTLSRSCLDSLLSLFKQAVELEPSDKSMDRREPVVKQIALEADNLSWLLEILADRQSADEFALMWASQQELATLHSKLPIVSRHHVSCITARLFVGIGKGELLPAKDTRQLLLQTWLQPLINDYNWLQH

SEQ ID NO: 92155 - protein, 112 aa, Gossypium hirsutum
  Clone ID: LIB3145-007-Q1-K1-E10.pep
LASGIDRKSLSQKHVTEDLILKWRDAFKDALRINFKVDFAMEHLKKIACAYIGLMERQKLDSAGLRISKLVAELSAAKEEHAKICEQSKVFMDAAEEFNDKPVSSGMFKSVG

SEQ ID NO: 92156 - protein, 95 aa, Gossypium hirsutum
  Clone ID: LIB3145-007-Q1-K1-E12.pep
MLLEPVLPVTSPLGHGNEVILRETLYDAVIKMDHAFLGPEGGILLPGRQVKDLALTWSFVADNAIRSVRENGNQTKAISYINAFSESWLLSQLIR

SEQ ID NO: 92157 - protein, 114 aa, Gossypium hirsutum
  Clone ID: LIB3145-007-Q1-K1-F1.pep
LKKFIQLCKSNPCILDDPSLSFFRDYHQSLGAKIPSSDDTADDSKSRSYVLEESDEELADAGVKINIEEEEDEDDIIESDIELEGDTVEPDNEPPQKMGDPCVEVTDDNRDASH

SEQ ID NO: 92158 - protein, 66 aa, Gossypium hirsutum
  unsure (1)..(66): unsure at all Xaa locations
  Clone ID: LIB3145-007-Q1-K1-F3.pep
RGTEIGFYVEPPHIFFFLLHAFFFFFFFFFFFLFFFFFFFFFFFFFFFFXFLIPLMRKGSFKSHWQ

SEQ ID NO: 92159 - protein, 102 aa, Gossypium hirsutum
  Clone ID: LIB3145-007-Q1-K1-F6.pep
SVIFLVKDHSTIVRGVQKVLQNYKNLQDIIAILGMDELSEDDKLTVARARKIQRFLSQPFHVAEVFTGAPGKYVELKESITSFQVQLYLFLACFYCIILVCL

SEQ ID NO: 92160 - protein, 121 aa, Gossypium hirsutum
  Clone ID: LIB3145-007-Q1-K1-G1.pep
RPSRPPTRPAYDTAPAPETVVVQKLWCVAKPSVPTETLQEAMDYACGEGGADCKELMPDGSCFYPDTIVAHASYAFNSYWQKTKRNGGTCNFGGTAMIINADPSFLECRFVLSRMENVGIV

SEQ ID NO: 92161 - protein, 69 aa, Gossypium hirsutum
  unsure (1)..(69): unsure at all Xaa locations
  Clone ID: LIB3145-007-Q1-K1-G6.pep
EIQVTTFDSNNEENPXTKQXXRSNFKNLPTTXXPNQXPITXYRPQSPLLKXXNLRPHSXALQDGTAALS

SEQ ID NO: 92162 - protein, 67 aa, Gossypium hirsutum
  Clone ID: LIB3145-007-Q1-K1-G9.pep
VEVVRSSYTYSMIYNIVSQLVMFADTFLPLYYLSRFIIVNLGCVGHQIEMLRSLRVGLSSLMLSFLI

SEQ ID NO: 92163 - protein, 53 aa, Gossypium hirsutum
  Clone ID: LIB3145-007-Q1-K1-H4.pep
THACGSSSLIFCPFLPMYHSAFCTNWLRFPNMFMNSREMPRSLRCTCRIFYSI

SEQ ID NO: 92164 - protein, 151 aa, Gossypium hirsutum
  Clone ID: LIB3145-007-Q1-K1-H8.pep
LEALDDTDRIHIVDFDIGFGAQWASFMQELPMRSRGAPSLRITAFASPSTHHSIELGLMRDILMQFANEIGLSFELEVVNFDSLDQNPHSLPMFQSNGNEAIAVNFPVWSCSNRPSALPHLMRFVKQLSPKIGVSLDQRCDRNDLTFPQHV

SEQ ID NO: 92165 - protein, 147 aa, Gossypium hirsutum
  Clone ID: LIB3145-008-Q1-K1-C12.pep
HASAHASANVSDAHTINGRAGSTPSCPSKGGYTLAVKPGKTYMLRIINAALNEELFFMIAGHQLTVVEVDATYVKPFKTDTIVISPGQTTNVHVTTHRRAGKYLVAASPFMDAPIAVDNLTATATLHYAGSLTSAATTLVSPPPKNA

SEQ ID NO: 92166 - protein, 125 aa, Gossypium hirsutum
  Clone ID: LIB3145-008-Q1-K1-C2.pep
LLSFHNMYIGVNGCSLKMAENLDVVRGIPVERMMIETDSPYCEIKSTHAGINFVKSLWPSKKKEKYDKECLVKGRNEPCLVLVKATIERYKKASDSSNTGSVAEVNAQFYQQEAEKLRNQIRNLQ

SEQ ID NO: 92167 - protein, 81 aa, Gossypium hirsutum
  Clone ID: LIB3145-008-Q1-K1-C7.pep
GKNGVRGGSGMIGWDLSLRAQSKRALAMNSIWLHKDREDGTCGSLYGERNLEYKPWRIRTNSPTGVSIDREVGINLEGNFP

SEQ ID NO: 92168 - protein, 154 aa, Gossypium hirsutum
  unsure (1)..(154): unsure at all Xaa locations
  Clone ID: LIB3145-008-Q1-K1-C9.pep
KRAADAYAHASAELLDYSLCLLLLAPLPLLKGCGVSKFXIIKXGDASQLYTQLSLVHRPNDRAITHSRLVSKKTLPNKREEHAKGEGIHNKKVNPKEKGIKQREKEEAFVDKQGFEDDVCDRNDDISYTRSPSFRVYCIPSQSDDGNNEFDHNL

SEQ ID NO: 92169 - protein, 74 aa, Gossypium hirsutum
  Clone ID: LIB3145-008-Q1-K1-D1.pep
GRKSSVLSEWHDQLVANLHYSMISFFSLHTSITLTPVYFWYLSMHRFVFIWISTPLKSVKDRYSIELLSCFPYV

SEQ ID NO: 92170 - protein, 83 aa, Gossypium hirsutum
  unsure (1)..(83): unsure at all Xaa locations
  Clone ID: LIB3145-008-Q1-K1-D10.pep
HSLSSKINATYIKPFKTHTIVISPLQTTNVHITSHRPTKKYLITASSXMDAPIKLDNLTFTATLHYAFFLLVHTLLWHHPLLK

SEQ ID NO: 92171 - protein, 38 aa, Gossypium hirsutum
  Clone ID: LIB3145-008-Q1-K1-D12.pep
TNNLLTPPPTTTIKENISTHIRKAGIHIINSFWEPDCL

SEQ ID NO: 92172 - protein, 40 aa, Gossypium hirsutum
  Clone ID: LIB3145-008-Q1-K1-D3.pep
TPVKKAFIYNSFKVPNYQKLPPLFPKFFLFLSFQWFLLLF

SEQ ID NO: 92173 - protein, 121 aa, Gossypium hirsutum
  Clone ID: LIB3145-008-Q1-K1-D8.pep
ADDAYAHAYFGNKFWIKIDLTTAGAWTFICIVGAQLPGQSPSAAPTKATPAATTPSTAPATDPESKSNTPAPTAVPTTLPPAEAPSDSAAAPSPSKFSPASSPPATTPVSTLPATATVSTS

SEQ ID NO: 92174 - protein, 52 aa, Gossypium hirsutum
  Clone ID: LIB3145-008-Q1-K1-E10.pep
RGAPQFFFVVKPLVCKCIWLFIWIFFFYYKFLNYFFLYVFFFLNKLNKGGFF

SEQ ID NO: 92175 - protein, 51 aa, Gossypium hirsutum
  Clone ID: LIB3145-008-Q1-K1-E3.pep
NAPITIQYVKNIIIHALQIHHIIPAKGGKINDVKNHHLLQCDIDRNFVNIF

SEQ ID NO: 92176 - protein, 69 aa, Gossypium hirsutum
  unsure (1)..(69): unsure at all Xaa locations
  Clone ID: LIB3145-008-Q1-K1-E5.pep
XSWNSLQGIAIVELDFSEVNALGFASHHHYFTVNISSRFCQANRTCYVDYLGIAIIGELAHSLYAGVEM

SEQ ID NO: 92177 - protein, 133 aa, Gossypium hirsutum
  Clone ID: LIB3145-008-Q1-K1-E7.pep
ENPGRPTRPLTHRGGALVALWVTNREKWRGVIEKELFPAWGVRYVSTIYWLKVKGDGSLISDLDLFHHRPYECLLLGYCQGKEMDSNCPSVFRSIKDEHIIISIPGGYSRKPPIGELLLDHVPGVKPARCIEL

SEQ ID NO: 92178 - protein, 90 aa, Gossypium hirsutum
  unsure (1)..(90): unsure at all Xaa locations
  Clone ID: LIB3145-008-Q1-K1-F3.pep
HANLDACLTPLTYPDPTYYCAGDHSLEHIAAYALELHLYICITDSQXNYIHGAENIKSNPDVSFPETDLETSFITLIIKPPNNLIQYLLQ

SEQ ID NO: 92179 - protein, 96 aa, Gossypium hirsutum
  Clone ID: LIB3145-008-Q1-K1-F9.pep
EHPGRRGRTLGITIITTLVLKSICNFIEQSWLYTSFNAFPKRIIVSKEKLMDEAHSTDYSLVLDNDGWTCFLLRARKRAMHNSIFLQPLFQVRQDY

SEQ ID NO: 92180 - protein, 124 aa, Gossypium hirsutum
  Clone ID: LIB3145-008-Q1-K1-G10.pep
TICKATIHNSCPTCRNELGNIRCLALEKVTESLELPCRYQILGCHDIFPYYSKLKHEKNCRYRPYNCPYAGAECSVTGDIPFLVMHLKNDHKVDMHDGCTFNHTYVKSNPHEVKNATWMLTVFN

SEQ ID NO: 92181 - protein, 119 aa, Gossypium hirsutum
  Clone ID: LIB3145-008-Q1-K1-G7.pep
LFTLPFLSTKAYSGIGEYSTIKELTLMKQELLLFAQSAKSMLQEVDESAKQEPSGSSKPSLDAVAEQPKNPAPERAKIVISIQNKDEIKQFRIYMDDKFEKPFSLYANKAKLDLQSLVF

SEQ ID NO: 92182 - protein, 100 aa, Gossypium hirsutum
  unsure (1)..(100): unsure at all Xaa locations
  Clone ID: LIB3145-008-Q1-K1-G9.pep
CLFIDRWEWVSQNLAVGASPPSLLPLKIMLRIFQTSPPSLLPLKIMFRILLPLKIMLRIFQISXXSLLPFKIMLPILLPLKIKNRVFQKKNQTVRLLGRF

SEQ ID NO: 92183 - protein, 54 aa, Gossypium hirsutum
  Clone ID: LIB3145-008-Q1-K1-H1.pep
PVSFQKKKEHKYIIVEIMSKKNSFQIKIHLVQCQIIPASDSQMKPFGILAGGRT

SEQ ID NO: 92184 - protein, 47 aa, Gossypium hirsutum
  Clone ID: LIB3145-008-Q1-K1-H10.pep
AIKYLLNFTFLYFWYLFACQVLFIDRCKHTLIKATLQLSFYVLRCLI

SEQ ID NO: 92185 - protein, 65 aa, Gossypium hirsutum
  Clone ID: LIB3145-008-Q1-K1-H2.pep
PRVRLLKPYLSFLISYLLSMVVAMKPYTIRKDYMICLLLNHFDQTKKCRYPTQFNCITSHSRLLT

SEQ ID NO: 92186 - protein, 121 aa, Gossypium hirsutum
  Clone ID: LIB3145-008-Q1-K1-H3.pep
SELGVQFGNCLEAPHVIDIKAQVWSAVISHGPDNYQLDASYKTADQYAFQDSLGKSLEEIFKIVPGGCLIFFPSYKLMKKLSDRWHNTGQWSQLKARKPLFVEPRGGDQEEFETVLKGYYN

SEQ ID NO: 92187 - protein, 99 aa, Gossypium hirsutum
  unsure (1)..(99): unsure at all Xaa locations
  Clone ID: LIB3145-008-Q1-K1-H4.pep
GGMXCKQEEEWIVGFNCYLGLCTVFDAELWGVLDGITLVHERGYQKVVIHTKNLEVVKVIQDANLTDSCLALLRRIHVSLQAIQHWKIKHVQRESNQVA

SEQ ID NO: 92188 - protein, 55 aa, Gossypium hirsutum
  Clone ID: LIB3145-008-Q1-K1-H9.pep
DNLILYVLLISYFVYINNYSYIICACLKKKNLLCELYLIMYFPSFVFNTLFKVIM

SEQ ID NO: 92189 - protein, 122 aa, Gossypium hirsutum
  unsure (1)..(122): unsure at all Xaa locations
  Clone ID: LIB3145-009-Q1-K1-A10.pep
TPTRPTRSHEGVLLSIRGSPGPLFGAVAPSDNKYVKAVALVSQPALYSKELMKEHPVGPAMIHPTETVHGPSWSDLFEPGVKHALLVGVGIQVLQQFLGIKGVLYYTPQILXQAGVGFLLSN

SEQ ID NO: 92190 - protein, 64 aa, Gossypium hirsutum
  Clone ID: LIB3145-009-Q1-K1-A11.pep
HFDIVSHHHMCQNWKKLHNLRTKCCLISVKFRTIVYLKEKLNKKTLLKTIDLNLPCHDSDSRTL

SEQ ID NO: 92191 - protein, 62 aa, Gossypium hirsutum
  unsure (1)..(62): unsure at all Xaa locations
  Clone ID: LIB3145-009-Q1-K1-B7.pep
APRXCQPXQILNSMCIVVPEALRSKPHHFIMKWTIERPPKRKTPRRKKPXAREARPETRAXG

SEQ ID NO: 92192 - protein, 54 aa, Gossypium hirsutum
  Clone ID: LIB3145-009-Q1-K1-B9.pep
KKKKKKKKKKKKLKNSKITTLLIRFTTDYKSRMESLNYNLLILLNIIVLHEKHI

SEQ ID NO: 92193 - protein, 72 aa, Gossypium hirsutum
  Clone ID: LIB3145-009-Q1-K1-C12.pep
CFKLWEKHSSELKCEFQQLKMNEGRHLSLLSNLALNQKSITQISRPNICNSMLVRLFLFLYASMFDASLGPE

SEQ ID NO: 92194 - protein, 145 aa, Gossypium hirsutum
  unsure (1)..(145): unsure at all Xaa locations
  Clone ID: LIB3145-009-Q1-K1-C3.pep
PRVRPRVRLIAILAFTQLARMRARNKQLGWTRQKVFHILIGTTNTGYFIYFVLSLVAACRGWLCWSYSCGFVAMAFPRILLFATFLLLLSFWXDDEEEEDDEQGFLEALIQNSLNRPRSSPADSRRSCYPFRLIHVGSRQKIVIL

SEQ ID NO: 92195 - protein, 54 aa, Gossypium hirsutum
  Clone ID: LIB3145-009-Q1-K1-C4.pep
NIAMRKYNLLFSFKSSTFTHYNGMPQRELFFNRVNIRTSKNPSRLDLFDLEGSH

SEQ ID NO: 92196 - protein, 100 aa, Gossypium hirsutum
  Clone ID: LIB3145-009-Q1-K1-C8.pep
MDASDSNFNKAGNPFVSEQQVQGNDNVSLETGAESPPPSTTFNDMKLPSPRKRKPIHKRVVSVPINDVDSSRLKGESAPPSDSWAWRKYGQKPIKGSPYP

SEQ ID NO: 92197 - protein, 111 aa, Gossypium hirsutum
  unsure (1)..(111): unsure at all Xaa locations
  Clone ID: LIB3145-009-Q1-K1-D6.pep
NITLLHDILYSISQLLLSTIASLLLKFTTSPLGVPPFPLSSDVGSLNAFLFXIVITFSLLYTVYSTAFDPKQCNFVMIAPFAIGLIVATNILTARAFYGTLMNPTVSFPPT

SEQ ID NO: 92198 - protein, 36 aa, Gossypium hirsutum
  Clone ID: LIB3145-009-Q1-K1-E2.pep
EMPTEMNKENLSFDGTPGLVTREKDALILVARKIND

SEQ ID NO: 92199 - protein, 69 aa, Gossypium hirsutum
  Clone ID: LIB3145-009-Q1-K1-E7.pep
SSEDLYDAKLCVICYDDQRGCFFFPCGHCATCYDCAQRIMDEDNKVCPICRTLIHKVRRLFSPYKYVMK

SEQ ID NO: 92200 - protein, 53 aa, Gossypium hirsutum
  Clone ID: LIB3145-009-Q1-K1-E8.pep
VVSKIHIFTQEEVEKTSLLFGSDDTQSCLEQAAVIMEASKSSSVGQPDSSSPM

SEQ ID NO: 92201 - protein, 120 aa, Gossypium hirsutum
  Clone ID: LIB3145-009-Q1-K1-F1.pep
HENVASPFAAEAHAGAQAVKLAILLGLHECDINGDSRTVIKKCQSTDRDNSIIGAIIRDIQDMKHFFQKINFHHIPKSENTFAHVIAKEALKENEGHYLDGGIPEHVRRVLERRRPRAPD

SEQ ID NO: 92202 - protein, 67 aa, Gossypium hirsutum
  Clone ID: LIB3145-009-Q1-K1-F10.pep
IPIIALLNYSFLIYTIKLTFQISTPTKIIHLSFLTYLNTTHFKYSNSHILYIHTKITLKLPNTIHIP

SEQ ID NO: 92203 - protein, 47 aa, Gossypium hirsutum
  unsure (1)..(47): unsure at all Xaa locations
  Clone ID: LIB3145-009-Q1-K1-F11.pep
HAYAHASGFMLXFSSFYVFTALHPAINSIGIFSSPAHNKCADAVFLN

SEQ ID NO: 92204 - protein, 84 aa, Gossypium hirsutum
  Clone ID: LIB3145-009-Q1-K1-G5.pep
KDRKWKNKIVRSIEWRVQALGPDLSRPSAIEMEPINDSDHLDQILARARQLSQPIIIDWMAAWCRKCIYLKPKLEKLAAEFDTK

SEQ ID NO: 92205 - protein, 56 aa, Gossypium hirsutum
  unsure (1)..(56): unsure at all Xaa locations
  Clone ID: LIB3145-009-Q1-K1-G7.pep
PTRTYLWXFLCSLSESLYLNQTSGPHFKLCLSSIYTSSNHDYXRNDFKSYFDFEHL

SEQ ID NO: 92206 - protein, 147 aa, Gossypium hirsutum
  Clone ID: LIB3145-009-Q1-K1-H1.pep
PTRPADFGLAKFLVDGGASECGCAIAGSYGYIAPEYAYTLRVDEKSDVYSFGVVLLEMITGRKPVGEFGEGVDIVQWAKRSTNCRREEVSNIVDRRLTSVPKDEAMHLLFIAMLCVQENSIERPTMREVVQMLSEFARHSLDSQSSS

SEQ ID NO: 92207 - protein, 90 aa, Gossypium hirsutum
  Clone ID: LIB3145-009-Q1-K1-H12.pep
YCWSDIMQTFFSGYSSSDEFLGAFSGSFIYILDVDIYITFLLEDEPQINLHLVTTGWLDRGFCLISFIKFSSHFHQLLRCNTLNICSHRR

SEQ ID NO: 92208 - protein, 140 aa, Gossypium hirsutum
  unsure (1)..(140): unsure at all Xaa locations
  Clone ID: LIB3145-009-Q1-K1-H3.pep
THADQAWIMEMASHVKSIDRNHLPAAGLXGFYGQSTPXKKRLNPSLDIGTDFIANNQIPGIDFATVHSYPDQWLSSSSEQYQLSFLNNWLDAHIRDARIILRKPILLAEFGKSWKDPRFNTYQRDQLFNIVYNKIYWSAK

SEQ ID NO: 92209 - protein, 116 aa, Gossypium hirsutum
  unsure (1)..(116): unsure at all Xaa locations
  Clone ID: LIB3145-009-Q1-K1-H6.pep
RTRPPTRAPTRXNVSPELDPEVXLEFFKQYGEIEEGPMGLDKQTGKPKGFALFVYRSVESAKKALEEPHKNFQGHVLHCQKAIDGPKQTKGVSGGHHQQYQHHHQGQHQSQSHYHH

SEQ ID NO: 92210 - protein, 82 aa, Gossypium hirsutum
  Clone ID: LIB3145-009-Q1-K1-H8.pep
AFSRPIKSNVRIAKQIIHRITCNVLSLKYKPYLYNPKNTKQKFKCLIINNIKFLSYDIISHLCVINVSLLQTPFYYTQITIP

SEQ ID NO: 92211 - protein, 93 aa, Gossypium hirsutum
  unsure (1)..(93): unsure at all Xaa locations
  Clone ID: LIB3145-010-Q1-K1-A1.pep
XGDGFGSXAIWLSLPYKRHAYYLVRWYLQQXVMESLGKEFDLDGNRVNQGISVYGNKGSTDQHAEQDQLYMQNTESSVLVTAKKGHLKLVGPL

SEQ ID NO: 92212 - protein, 72 aa, Gossypium hirsutum
  unsure (1)..(72): unsure at all Xaa locations
  Clone ID: LIB3145-010-Q1-K1-A10.pep
KXSNPHIXXFFSKFSVAEIHDSTEDFDPSFNIAXGAYPNVYRYTLRHTXIAIKMLHQNNLQRPLQFQKEGDI

SEQ ID NO: 92213 - protein, 65 aa, Gossypium hirsutum
  Clone ID: LIB3145-010-Q1-K1-A2.pep
KGRLMNGENTQEIEKSTEYRLFLIQGEIFSFYYSFYFICFDFFLKKSNKGKKTYLSWGRNRGRIA

SEQ ID NO: 92214 - protein, 84 aa, Gossypium hirsutum
  unsure (1)..(84): unsure at all Xaa locations
  Clone ID: LIB3145-010-Q1-K1-A3.pep
MSLVPLFNSSRWDSMIPNLSLTCLCPSLIFLCSSLISSISDFNLVKRSAMFFIPFIXXLDLDLSRLLIRSEAGIGFGIENEKIV

SEQ ID NO: 92215 - protein, 29 aa, Gossypium hirsutum
  unsure (1)..(29): unsure at all Xaa locations
  Clone ID: LIB3145-010-Q1-K1-A8.pep
LIISSKNFHSIGLXGIFKIKEFAHKANLK

SEQ ID NO: 92216 - protein, 48 aa, Gossypium hirsutum
  Clone ID: LIB3145-010-Q1-K1-B3.pep
HSKLQLKGNCSNIHTRGQKKGIIYVQEPVKARASVIKPPLIDMIKLSG

SEQ ID NO: 92217 - protein, 47 aa, Gossypium hirsutum
  unsure (1)..(47): unsure at all Xaa locations
  Clone ID: LIB3145-010-Q1-K1-B4.pep
KYNTPCHECINVQCEIGFQSGNKIWQQLCSKLLRVLHXMKVGGXXGV

SEQ ID NO: 92218 - protein, 81 aa, Gossypium hirsutum
  Clone ID: LIB3145-010-Q1-K1-B6.pep
KRIKRRKRELTGVSVNASPEILPPLSSSNLRKVGRCLPISIFQTLKVWPSNVAQSRAEKPVCCCHNHRPRWRNERRWRRNS

SEQ ID NO: 92219 - protein, 71 aa, Gossypium hirsutum
  Clone ID: LIB3145-010-Q1-K1-B7.pep
KTGPTHAYGGFLTFKLQHFYLYLTLQTAALLLHLVRPYIIICLSTPLIWLLTTPITRTKFKYLNTANKNQP

SEQ ID NO: 92220 - protein, 44 aa, Gossypium hirsutum
  unsure (1)..(44): unsure at all Xaa locations
  Clone ID: LIB3145-010-Q1-K1-C10.pep
LXXCFIXLSLPFYPALLIKSTTSKNILXTIXSFYISTHTLFQFL

SEQ ID NO: 92221 - protein, 44 aa, Gossypium hirsutum
  unsure (1)..(44): unsure at all Xaa locations
  Clone ID: LIB3145-010-Q1-K1-C5.pep
AXFPLVSHELHSSASPFCFPRFFTRFIILFDYFLIDKLIFSFSS

SEQ ID NO: 92222 - protein, 108 aa, Gossypium hirsutum
  unsure (1)..(108): unsure at all Xaa locations
  Clone ID: LIB3145-010-Q1-K1-C6.pep
MERVTKLASEKPVVIFSKSSCCMSHTIKTLFYDFGVNPAVHELDEISRGREIEQTLSRLRCNPSVPAVFIGGEFVGGANEVMSLHLNRSLIPMLRKXGAXWVNPKIIH

SEQ ID NO: 92223 - protein, 147 aa, Gossypium hirsutum
  Clone ID: LIB3145-010-Q1-K1-D2.pep
PGTLIVLWNVAKKCFTVGVIWRTVSDLFASIVPVRGASMSPTFNPKTNSLLDSLSDDRVLVEKLCLRKYKFSHGDVIVFCSPDNHKEKHIKRIVGLPGDWVGTIYDVVHIPEGHCWVEGDNSASSLDSRSFGPVPLGLVKGRVTHIL

SEQ ID NO: 92224 - protein, 102 aa, Gossypium hirsutum
  unsure (1)..(102): unsure at all Xaa locations
  Clone ID: LIB3145-010-Q1-K1-E10.pep
ENPGRRARVRSXIEKEKDVHKTVXIYNPPRSACGRVPXMIAKKYXDTGFAGKLNLTFITCNAGQSFACFLTPGMNIQLIGDANDFGGKLFFTEMLPFVFCWE

SEQ ID NO: 92225 - protein, 74 aa, Gossypium hirsutum
  unsure (1)..(74): unsure at all Xaa locations
  Clone ID: LIB3145-010-Q1-K1-E12.pep
YHENLTNGNLHHYPTINPGLSSARYPRCLSLLHPDSDKAXWTITSILDDATAIAFSYICGNLXSIHRFNTPIPF

SEQ ID NO: 92226 - protein, 121 aa, Gossypium hirsutum
  Clone ID: LIB3145-010-Q1-K1-E7.pep
HKVRNSVHIRLLPGDVHGSGNSIMEQVVVQPTFRAKHIRPHPMLGFVKQPARQLKISQFKKQLILPLTLSGQLSCRSVANAFWVIATAPIPITATQIFRNRRGASTTLTDLDDLNPTGRVG

SEQ ID NO: 92227 - protein, 51 aa, Gossypium hirsutum
  Clone ID: LIB3145-010-Q1-K1-E9.pep
IWVSLYECYYVECMGDKVGFLVRPAFNIIIFYVLLVTWCRDFSLNEKSYSW

SEQ ID NO: 92228 - protein, 85 aa, Gossypium hirsutum
  Clone ID: LIB3145-010-Q1-K1-F4.pep
LGKGGCFWSVQVVNGWKVFGDGGGFILGGGRRGAFGCWDVLGRPEFFFFLFFFFFFFFWVGFFFKGAGMTFKMKYFSKCGITFNN

SEQ ID NO: 92229 - protein, 142 aa, Gossypium hirsutum
  unsure (1)..(142): unsure at all Xaa locations
  Clone ID: LIB3145-010-Q1-K1-F7.pep
EKLSLVLPETPPYVPRQFGRCAVIGNSGDLLKTRFGKEIDSYDVVIRENGAPIENYTEYVGKKSSFRLLNRGSAKALDKVVELDETRQEVLIVKTTIHDIMNQMIRDIPIRNPVYLMLSASFGSAAKGTGLXALEXALSICD

SEQ ID NO: 92230 - protein, 60 aa, Gossypium hirsutum
  unsure (1)..(60): unsure at all Xaa locations
  Clone ID: LIB3145-010-Q1-K1-G11.pep
GPTHACGRILKPLPSPFFFPIXKSTXRLHQSTSTHPPXXLHXSTQFXNXNLKXSFYLFYL

SEQ ID NO: 92231 - protein, 66 aa, Gossypium hirsutum
  Clone ID: LIB3145-010-Q1-K1-G2.pep
RPTHASAHASFFFSGVKAWVHRLHHFGPTMVLPLIKELLTFSFYLLWRLPISSIDDLFLYFIFIGI

SEQ ID NO: 92232 - protein, 112 aa, Gossypium hirsutum
  unsure (1)..(112): unsure at all Xaa locations
  Clone ID: LIB3145-010-Q1-K1-G3.pep
PLNWLIFYYPNCFTSARFKQTWHLYTXSRIPSTGSXSTIQTVSPAVVNAQTLQRSTASGIPSTGSASTMQTDSPAVVNAQTLQRSTASRIPSSNSTSTLQTASLAAINAQTL

SEQ ID NO: 92233 - protein, 74 aa, Gossypium hirsutum
  unsure (1)..(74): unsure at all Xaa locations
  Clone ID: LIB3145-010-Q1-K1-H10.pep
YACTLHNGRRHTKLLRPHNSSTXSLISKTKHLPHITTLTHITSPTNLTPTTKSKIHHIIKSLHISKIISPFHII

SEQ ID NO: 92234 - protein, 125 aa, Gossypium hirsutum
  Clone ID: LIB3145-010-Q1-K1-H8.pep
WNDLWHTLEKIGRTTMDCGDFWMDVNRSQGKKRALSELLKLLESTGLHRHKFEIMEISNPSSWLFLQPSYDAKHLLMARTRLPNGVADVASNVEKCLPKENLDSESPTVNEFYFKSLAAVQVFQQ

SEQ ID NO: 92235 - protein, 140 aa, Gossypium hirsutum
  Clone ID: LIB3145-011-Q1-K1-A11.pep
GGFALKKEMLDDRRFPKMRLNLQRLLQVIAHGEQVFPRVKEKCSSKHWFASEDIGSLEELIGRLRRLKENVGFLANRVTAIQAGLDSWQSEQINRKLYYLSFLSIIFLPLSVITGVFGMNVGGVPWTVQKDPALKDGFRN

SEQ ID NO: 92236 - protein, 96 aa, Gossypium hirsutum
  Clone ID: LIB3145-011-Q1-K1-A2.pep
ICKTKKKFEILVAGQNLFIISFEDENDFEHIMEGHPWFFRKQLTIFDRLLKSIERNKIRLIYSLFWLTFGPCPPECDKKDLMHAVGSTFGGIIRPE

SEQ ID NO: 92237 - protein, 67 aa, Gossypium hirsutum
  Clone ID: LIB3145-011-Q1-K1-A3.pep
KESIDVEVTGNHPQFILFHICSILQSQPIFIAFVYGSLDRQKMKIPSEGFEFVYSARAFFMDGHRGF

SEQ ID NO: 92238 - protein, 72 aa, Gossypium hirsutum
  Clone ID: LIB3145-011-Q1-K1-A4.pep
PRSASVVHLQVDIPVLIDWSRHFFMLGYYTFLSTYMDPVIRSWLNGLPSKVRYEWKRHLEAWKYGSGLDYRL

SEQ ID NO: 92239 - protein, 49 aa, Gossypium hirsutum
  Clone ID: LIB3145-011-Q1-K1-A8.pep
NKGLVKIVKQLGIKKSWNLKKIQIIVDTNKTRKLIVLSLRYKSFFQRTI

SEQ ID NO: 92240 - protein, 57 aa, Gossypium hirsutum
  Clone ID: LIB3145-011-Q1-K1-B6.pep
KLHMSTSMSSESVADTAPISLNCNSQSISHMHFYTNVHFIYFVRLRGERERQMQFLP

SEQ ID NO: 92241 - protein, 54 aa, Gossypium hirsutum
  Clone ID: LIB3145-011-Q1-K1-C2.pep
NALIVEGTWRRIAKILPGHAQMELWGLVISNIAMEMVTRVEPDHDVNRRIFKGT

SEQ ID NO: 92242 - protein, 53 aa, Gossypium hirsutum
  Clone ID: LIB3145-011-Q1-K1-C7.pep
NPLVYVRPNVVIPISNIYYIHRTIDYSYIIWSELQLLLFSSGRCSFFLYVSLT

SEQ ID NO: 92243 - protein, 104 aa, Gossypium hirsutum
  Clone ID: LIB3145-011-Q1-K1-D1.pep
RYSSAVTNVVTQTLSVILSVVATLTVTALLVTTILHAFVQRDLFPNDIAIAISDRKPKSHRRWFNLIRHGSSEHNADIDTFLKFANGDTKDIEAGLKISSAEAK

SEQ ID NO: 92244 - protein, 88 aa, Gossypium hirsutum
  Clone ID: LIB3145-011-Q1-K1-D10.pep
LLYVIVGIQMSPRIAARMNLVSIGTRSFCLKPNPGMFGDPGKSRNPIFDHHTRVSSPVSIELNYTTRALHSIESGENKFGTIVVDKSI

SEQ ID NO: 92245 - protein, 73 aa, Gossypium hirsutum
  Clone ID: LIB3145-011-Q1-K1-D11.pep
LLYVIDGIQTCSYICKRLNLGCIDTRSFCLRPNPGILYDPCRSQGSICASHTRVSNASSIELDYTTRALLKHR

SEQ ID NO: 92246 - protein, 75 aa, Gossypium hirsutum
  Clone ID: LIB3145-011-Q1-K1-D12.pep
LFFIQNSSPLFTLIKLVSILTLSFSLLPKTSIFNLSTNKFKIPFFISLLQIFISFFLFNFYFTSFILFTSIYKPY

SEQ ID NO: 92247 - protein, 57 aa, Gossypium hirsutum
  Clone ID: LIB3145-011-Q1-K1-D6.pep
PFHWLCFLSCSIVVSPFFFLIIIIIAIVVSLAITQTKHELLFAPYYCHKKDNIVDIL

SEQ ID NO: 92248 - protein, 83 aa, Gossypium hirsutum
  Clone ID: LIB3145-011-Q1-K1-D9.pep
CIQSVPFASSRPILRNRYYFSGSSPLRQTVPHTAGLCNDRFRSKVLQLAHGLKVGCLLIRASRRPHRSVPLSNCSLFLSSVGR

SEQ ID NO: 92249 - protein, 96 aa, Gossypium hirsutum
  Clone ID: LIB3145-011-Q1-K1-E10.pep
EVSFCSDASLAKEAFYYEWNRPPTQRSCSCQDEDFASCAGRAPQSSRIAYLLLRWNRRSTMNTSTRNRSSEPFMRTQRPLSYIRSRSILFVRSSQI

SEQ ID NO: 92250 - protein, 46 aa, Gossypium hirsutum
  Clone ID: LIB3145-011-Q1-K1-E7.pep
DSTPTIFEFNLISYFYFETIKITFFNCFNVHFEETKIKFFELRPKT

SEQ ID NO: 92251 - protein, 121 aa, Gossypium hirsutum
  Clone ID: LIB3145-011-Q1-K1-E9.pep
MEAEEMKGKVVEEKDPVRVKRKTLQAVLEECQRALELLSNCEDGTDDDDEDGKGKDEVNHQGELNGVDLRRDQEADELCDLLKSRVQCPAFLDKLECAQVPVPENIAEDGSSCDMVNPNDL

SEQ ID NO: 92252 - protein, 126 aa, Gossypium hirsutum
  Clone ID: LIB3145-011-Q1-K1-F11.pep
HASVGKWCGVFGVAALLLVVSVFLGVRGAPQVPCYFIFGDSLVDNGNNNQLSSLARANYLPYGIDFPNGPTGRFSNGKTTVDVIAELLGFDNYIPPYSTASGRQILGGVNYASAACRIREEYPTAL

SEQ ID NO: 92253 - protein, 85 aa, Gossypium hirsutum
  Clone ID: LIB3145-011-Q1-K1-F12.pep
YPYVPTFLLFLCDSHKKKTSSLFVSPLPPTCFILYISHLDDYILTRTFIYLFTPLNQKTQEQSTSSPTCSKKYPSLNYTPTNTSI

SEQ ID NO: 92254 - protein, 73 aa, Gossypium hirsutum
  Clone ID: LIB3145-011-Q1-K1-F3.pep
VMAIKLSLWIGGLKTRHTETHRQSNAAKDIRSPRFRKPLNANIHDHHPNHCPFSLYQIPPSMLHILKLYSDKI

SEQ ID NO: 92255 - protein, 60 aa, Gossypium hirsutum
  Clone ID: LIB3145-011-Q1-K1-F4.pep
GANGRKLIWQGIPRSIRDSHRKVRDSQDGLVIQRNLALYFSGGDRQELKLRVTGRIWKEE

SEQ ID NO: 92256 - protein, 51 aa, Gossypium hirsutum
  Clone ID: LIB3145-011-Q1-K1-G11.pep
TADHCRTCYSLSACSWGAFAPMSMRISRPREASPLATFSGTSVSEPGRRGR

SEQ ID NO: 92257 - protein, 65 aa, Gossypium hirsutum
  Clone ID: LIB3145-011-Q1-K1-G3.pep
KHGGREDTPPPQMSYGLKKLGISCAFKCHGYTLFEAYSECVLVHDQLYLFLCEHNLYLFSCSYMI

SEQ ID NO: 92258 - protein, 100 aa, Gossypium hirsutum
  unsure (1)..(100): unsure at all Xaa locations
  Clone ID: LIB3145-011-Q1-K1-G8.pep
AHSYGKLFFCLNDENHYAGRLIKTKAIHTILKRKLYEAIXNLTQAIFLNPTSXIMSVTQALFYIKIKKPYAVIQYANAVLEINPYYVKAYNSYCIALAML

SEQ ID NO: 92259 - protein, 47 aa, Gossypium hirsutum
  Clone ID: LIB3145-011-Q1-K1-H8.pep
IRLHGTRDLCENDDTMYILCIHQLGQVPFIFMWRRDCMKHLRNNRLF

SEQ ID NO: 92260 - protein, 91 aa, Gossypium hirsutum
  Clone ID: LIB3145-012-Q1-K1-A12.pep
NHLVSLSSPQHQHQLATIISCSFPSCIYISARMLFSGNTVVSMSRPFFTSMSSIVRFCPSGQRLQRGLKAFRLTHPFMSQEQGVSHSTTVP

SEQ ID NO: 92261 - protein, 97 aa, Gossypium hirsutum
  Clone ID: LIB3145-012-Q1-K1-A2.pep
PTRPVISSSHHFISIPTISLAKLLLNRFTFFSFEAFLPFFPHLLSFSSLVHATSHIFSAPLHTQEPLFQGKSPLSSLRFPLQECVRDYLQILVCAEI

SEQ ID NO: 92262 - protein, 54 aa, Gossypium hirsutum
  Clone ID: LIB3145-012-Q1-K1-A8.pep
LAYFIIFCGSFFLLFSFLFFFFFFIFFFLSRDGLKTIYQQNYDDISKQKYLLQC

SEQ ID NO: 92263 - protein, 86 aa, Gossypium hirsutum
  Clone ID: LIB3145-012-Q1-K1-B1.pep
LSIFDMLTLKLSEQFEMYIVIIHTLHPVCVFSDMQLILDLYKQMIAETDSAVVDLQNEDCVEKSTVWKMNDGRLRGSYIVNQFTMG

SEQ ID NO: 92264 - protein, 72 aa, Gossypium hirsutum
  Clone ID: LIB3145-012-Q1-K1-B2.pep
DFCVFYNLVLLAHHVRLSPSSRQAHFAHLPSATSGDRPKFMMALNCYITTNRRPSNPNPPSPTRCLPLLHNR

SEQ ID NO: 92265 - protein, 56 aa, Gossypium hirsutum
  unsure (1)..(56): unsure at all Xaa locations
  Clone ID: LIB3145-012-Q1-K1-B4.pep
KKXIKKLNMSFHLTTLHIEYTFVYTPPNSTQLFEWLNYNCKQANLPGPKEEQIQNK

SEQ ID NO: 92266 - protein, 86 aa, Gossypium hirsutum
  Clone ID: LIB3145-012-Q1-K1-B5.pep
SNALQRSGTGRCEEGVHGHVNVKYVRRKRVLKQWRAYWLTQKQQHRKVERERVLLTPKTCAYWAWFISFSIMPSSNFVGLSKMQLA

SEQ ID NO: 92267 - protein, 79 aa, Gossypium hirsutum
  Clone ID: LIB3145-012-Q1-K1-B6.pep
TVIIQNASKESKTTYESLINLCLSNFKYLRALDLRNSPLTALPNSIGTLKHLLHLDLIGCSSLLKLTRSFDKQQSLYLL

SEQ ID NO: 92268 - protein, 69 aa, Gossypium hirsutum
  Clone ID: LIB3145-012-Q1-K1-B8.pep
LGGAPPGSGNNNMEMYDKLAFHERSMMLGLTFINNSLDCSGLTLRPGFYLLRVAKIRGELAQTIKHIEP

SEQ ID NO: 92269 - protein, 87 aa, Gossypium hirsutum
  Clone ID: LIB3145-012-Q1-K1-C12.pep
PLIQPRNMKCYRESIMRHTAFTNCYNNGRISLYYIPQLVISAYVGLVHYARCPQCYFQVEECLHVSRECHVFSRTAAITSGGFADMR

SEQ ID NO: 92270 - protein, 127 aa, Gossypium hirsutum
  Clone ID: LIB3145-012-Q1-K1-C4.pep
GVNGALFVLREILFITRPLIYVLFIRRYGIRSWIPWFLSLGVDFIGYGFLSHVTKSRMVEREQWFHLSASEKDEVKRRKLLWALYLMREPFFSKYTRQKLASTDSLLEPAPLIGTLTSKLVELIIEL

SEQ ID NO: 92271 - protein, 69 aa, Gossypium hirsutum
  Clone ID: LIB3145-012-Q1-K1-C7.pep
RTRGFGSHLHHPQPQAYLPFEDDFRPQDPSFTLDFDGARRSQRQTLEVSLFRFLFRIPESQTHERNEKK

SEQ ID NO: 92272 - protein, 40 aa, Gossypium hirsutum
  Clone ID: LIB3145-012-Q1-K1-D1.pep
IYQHCINKVFSFTYFVTWELNSNLNMTWSMFRTPESNLYT

SEQ ID NO: 92273 - protein, 79 aa, Gossypium hirsutum
  unsure (1)..(79): unsure at all Xaa locations
  Clone ID: LIB3145-012-Q1-K1-E11.pep
FPGSDPNASAPFXFQXXNPKSVHSXQLXPLXXLVPKQTSKCIIKPCGKXLHVRXXWLRRGGSEGRLPATRSECIEASSF

SEQ ID NO: 92274 - protein, 48 aa, Gossypium hirsutum
  Clone ID: LIB3145-012-Q1-K1-E3.pep
PKFFFFFFFFFFFFFFFFFFFFFFFFFFFFFFFFNHKEQRMVAYHLVI

SEQ ID NO: 92275 - protein, 131 aa, Gossypium hirsutum
  unsure (1)..(131): unsure at all Xaa locations
  Clone ID: LIB3145-012-Q1-K1-E4.pep
PSPDPLNGRDVAKSEPSANGKFTGPSHGSEQDSYNLPSPKSPEDDDFDDNKSGELDRSNRRRQRPQRYSAKEFVEAVSDNEADFDSDDDIVGEAVYDEEYLRXRKQRRQSSSSERDEEYRWDEXNAEDEEE

SEQ ID NO: 92276 - protein, 93 aa, Gossypium hirsutum
  Clone ID: LIB3145-012-Q1-K1-E5.pep
AKVDVQKFLQIPLAQRSHNDLLIWRGEASGQYTVRSGYKLLLKGNDYNSNGYSLPVITKCYKKLWNCNLPSKVRITAWNTILNYLPTLGIVAQ

SEQ ID NO: 92277 - protein, 29 aa, Gossypium hirsutum
  Clone ID: LIB3145-012-Q1-K1-E7.pep
GQLPSYIWKSVWAAKGLLKTGICWRVGTG

SEQ ID NO: 92278 - protein, 111 aa, Gossypium hirsutum
  Clone ID: LIB3145-012-Q1-K1-E8.pep
VDPKEHPMLLAEPSSNTQQQRERTAELMFEKYKVPALFLAKNAVLTSFASGRATSVVVDSGGGSTTVAPVHDGYVLQKAVSSSPIGGEFLTDCLMNSLNSKRHRIKPEVLF

SEQ ID NO: 92279 - protein, 56 aa, Gossypium hirsutum
  Clone ID: LIB3145-012-Q1-K1-F12.pep
MQWDVIFYSLKRPALFFFFFFFFFFFFFFFFFFFFFFFFFFFFFFFFFFFFAFNKS

SEQ ID NO: 92280 - protein, 86 aa, Gossypium hirsutum
  Clone ID: LIB3145-012-Q1-K1-F6.pep
LRGKDADITQEAAEIQMYIETLQSLPKTRMLDLFQPKYIRSVMIGVALMVFQQFGGINGISFYARETFASAGLSSRKAGTIAYACV

SEQ ID NO: 92281 - protein, 147 aa, Gossypium hirsutum
  Clone ID: LIB3145-012-Q1-K1-F9.pep
TFGVESKRVVDIGTIDGFQGREKDVVIFSCVRASKDRGIGFVSDFRRMNVGITRAKSSVLVVGSASTLKRDEHWNNLVESAEERGCLFKVGKPYTSFLNDEYLESMKVINKDAQMMEDMDDLDNDNVAAYNMAGDADQAVEDNDYGD

SEQ ID NO: 92282 - protein, 147 aa, Gossypium hirsutum
  Clone ID: LIB3145-012-Q1-K1-G10.pep
PRVRESQVQASVICAKRLDIHLRFRSGGHDYEGLSYVSQIESPFVIVDLSKLRSIKVDIQDNSAWVEAGATIGEVYYRIAEKSNIHGFPAGLCTSLGIGGHITGGAYGSMMRKFGLGADNVIDARIVDVNGRVLDRAAMGEDLFWAI

SEQ ID NO: 92283 - protein, 141 aa, Gossypium hirsutum
  unsure (1)..(141): unsure at all Xaa locations
  Clone ID: LIB3145-012-Q1-K1-H10.pep
HASDSPIASRTSTAIEIPTQLAGTQGDTNTVRYGEETINKQVKFLVPVSNSEMDYPDAEGQQIERELPSNWRSGNSPYTPAQDDPSSSYPPYLPSVLEEPSSSFSEAAEDDLLXAIEGXQISGEAYPGRELQACGYSINGT

SEQ ID NO: 92284 - protein, 98 aa, Gossypium hirsutum
  unsure (1)..(98): unsure at all Xaa locations
  Clone ID: LIB3145-012-Q1-K1-H4.pep
DFSSDTCFCFLVSATGLQREWSLSLAMIDINALIMILSLKKYRTXILLFTIRNAIAFTPTFTACRTSACITGLIDKDLDIWSQYHDVQCETVTRNKLY

SEQ ID NO: 92285 - protein, 74 aa, Gossypium hirsutum
  Clone ID: LIB3145-012-Q1-K1-H7.pep
PTRTAKRAMVRGAWGNLWPIGAAVVQELKTFNIINGGPDLRATSLSADYDASRTLDMPCSACATITDMEGSCDA

SEQ ID NO: 92286 - protein, 111 aa, Gossypium hirsutum
  Clone ID: LIB3145-013-Q1-K1-A2.pep
NNVLSTAQQVWLRKLGGAKAVVDESASGIITAGRAKRSAAQPARAGDRFRQLKEDEKKKKVSKALPAEEFQSLDSASDSDGESDEETKGKGDEALEEAYSSSASNQVLIFL

SEQ ID NO: 92287 - protein, 116 aa, Gossypium hirsutum
  Clone ID: LIB3145-013-Q1-K1-A3.pep
LEIVTGRRAVDKSKQSLVIWAKPFLESNQVKELVDPRLKDDYNPSEVQRILITASMCLSHLPSNRPTMTKVVRMLKNEDGPIEFHQISCGRKAVIFDGHDLKDSSCKNYLYTMRPT

SEQ ID NO: 92288 - protein, 47 aa, Gossypium hirsutum
  Clone ID: LIB3145-013-Q1-K1-A5.pep
IRFLCENHSRPYCTPFHNVQSWIRVNPMAYRVAGLSLRACLQVISLA

SEQ ID NO: 92289 - protein, 54 aa, Gossypium hirsutum
  Clone ID: LIB3145-013-Q1-K1-B1.pep
REALFFFFFFFFFFFFFFFFFFFFFFFFFFFFYFPLFFFFFFFLYNEQIISDAW

SEQ ID NO: 92290 - protein, 63 aa, Gossypium hirsutum
  Clone ID: LIB3145-013-Q1-K1-B11.pep
FLSHNYFIPPCKFHKTSPLYLLSSSYEQKTNLLDLTTPPLLFFEWWRMEFEKSTSLLCFPKTI

SEQ ID NO: 92291 - protein, 128 aa, Gossypium hirsutum
  Clone ID: LIB3145-013-Q1-K1-B12.pep
PTRPPQHFRGGTWSNGHCHHIKLPDFGPFPDKTEEHVDIVRDVLSKHPGREQVIETMNVTPMTYQRQDGHTSLYHFGRGNETEPPGEDCSHWCLPGVPDLWNELLYALFLKWESDHSSTPTFSSHSCT

SEQ ID NO: 92292 - protein, 103 aa, Gossypium hirsutum
  unsure (1)..(103): unsure at all Xaa locations
  Clone ID: LIB3145-013-Q1-K1-B2.pep
MGDDNVHINLDVIVHVNSDKTTTTDHFIYKLDSIDKRVIETFDKEAAXMNKMSFNYALMLHTLNAHREQSITIDIALXKFDTTKYYCTFIDTPXHRYFNKNII

SEQ ID NO: 92293 - protein, 117 aa, Gossypium hirsutum
  Clone ID: LIB3145-013-Q1-K1-B3.pep
IDPSGKIFFKMEDLKVGKTMAIYLTNKDPSTSPHLLSREEANSIPFSSAKIAQIIDFFRFSKDSDQAKAIEYTIKQCELEPLEDELRFCATSLESTLAYASSLLGRTRGRTRGRTRG

SEQ ID NO: 92294 - protein, 50 aa, Gossypium hirsutum
  Clone ID: LIB3145-013-Q1-K1-B6.pep
GNVILLTSNLYCIIIYARYSEFINCLFNFYFDFTNSTKLNSYNILLFNFK

SEQ ID NO: 92295 - protein, 55 aa, Gossypium hirsutum
  Clone ID: LIB3145-013-Q1-K1-B7.pep
TQSIIVLVSVSTSDLAFKVLYYIIKVKGSPLQNQFNGDPCSSFTAWGNTGTAIIE

SEQ ID NO: 92296 - protein, 91 aa, Gossypium hirsutum
  Clone ID: LIB3145-013-Q1-K1-B8.pep
VAATLHLNKIEREDNLMAAVSYFDKDGNGYITQDELQKACQEFGFKEIHLDKITGKVVQANVGRLNTIELGALIQKGTLIFVKKTFGIKKA

SEQ ID NO: 92297 - protein, 82 aa, Gossypium hirsutum
  Clone ID: LIB3145-013-Q1-K1-C5.pep
RIGQWPYLMGYRQKAQGPVKELSYARWKTAESNSETQDYGGMIWQKSRMHIQTGEPKNPWMSITNLHKICGFKIYKLDLRAE

SEQ ID NO: 92298 - protein, 35 aa, Gossypium hirsutum
  Clone ID: LIB3145-013-Q1-K1-C8.pep
VCSTKYAECVKSYGYEAKEWSSISELIKVHRMCKA

SEQ ID NO: 92299 - protein, 61 aa, Gossypium hirsutum
  Clone ID: LIB3145-013-Q1-K1-D3.pep
TTRNNFNIHTYFLTLTKIYCGRAHSEICTLIIIKFCSYLDQIITYYYPNFKNNYLFHSLFN

SEQ ID NO: 92300 - protein, 38 aa, Gossypium hirsutum
  Clone ID: LIB3145-013-Q1-K1-D4.pep
LYGEGWKRGLCIKRVLMLLDYNLVCLLHSANVNLSLWP

SEQ ID NO: 92301 - protein, 60 aa, Gossypium hirsutum
  Clone ID: LIB3145-013-Q1-K1-D5.pep
PTLIPSTRSRTARPGEALYPVLLNLRTLSKLSTIMNEETTSKPHTYHTLNNNSNTEKDLV

SEQ ID NO: 92302 - protein, 99 aa, Gossypium hirsutum
  unsure (1)..(99): unsure at all Xaa locations
  Clone ID: LIB3145-013-Q1-K1-E1.pep
SRIKEKLPPTDSRLGPDQRHLGNGKYDRANAEKQRLVRRRRMXRKLHENGWKPRWLHQDSENGSLRYTGRYWEAXKQRKWDGCPNIYGVFDEKLDDWCE

SEQ ID NO: 92303 - protein, 85 aa, Gossypium hirsutum
  Clone ID: LIB3145-013-Q1-K1-E10.pep
PTRPPTRPNNPKLQFTKKYSGGEPKSPEKRPPSTARKRIISNARLEEKFRTTMTKSEEISKGGHITRHVFRNKVRRYKLLDEVSS

SEQ ID NO: 92304 - protein, 76 aa, Gossypium hirsutum
  unsure (1)..(76): unsure at all Xaa locations
  Clone ID: LIB3145-013-Q1-K1-E5.pep
RKKTEKEGKKFPXKKKKKKKKKKKKKKKKKKKKKKKKKKKKKKKKIKKNKKKKTITKIKNNRIKKNKWRYREKTCW

SEQ ID NO: 92305 - protein, 56 aa, Gossypium hirsutum
  Clone ID: LIB3145-013-Q1-K1-E8.pep
VALTFIYSNILLHHNSLHFITYFDSLNTLLFPVYSTIHLRCPPGDHVFFRSQCFHR

SEQ ID NO: 92306 - protein, 74 aa, Gossypium hirsutum
  Clone ID: LIB3145-013-Q1-K1-F11.pep
MSIERFIENCPGVSPTVNDTQNVFHSDNTYLATELVHETYHGAYQPVAVPYAFKTDFHTHIHVPILVVLLGNNG

SEQ ID NO: 92307 - protein, 59 aa, Gossypium hirsutum
  Clone ID: LIB3145-013-Q1-K1-F12.pep
LGGDNFDGLCRDLHPGPVSVLHWSGKGKPWARLDAKTPCLLDALWASYDLMDTSFAFDS

SEQ ID NO: 92308 - protein, 38 aa, Gossypium hirsutum
  Clone ID: LIB3145-013-Q1-K1-F7.pep
QHNDLKANGCKNSLSVLCGKEIQSPNDLSMLRNSIKPY

SEQ ID NO: 92309 - protein, 82 aa, Gossypium hirsutum
  unsure (1)..(82): unsure at all Xaa locations
  Clone ID: LIB3145-013-Q1-K1-F8.pep
TKIVIQIYTDHNSIKYLIGHAXVKASLDHDCHDIPSGRLLQVTFAPDRFFTYCKSKCSPKRLYFESIDQSHCLSVGPPIGRS

SEQ ID NO: 92310 - protein, 51 aa, Gossypium hirsutum
  Clone ID: LIB3145-013-Q1-K1-G1.pep
CVILNKSQNILRCVTFQNEFIFRFEYLIFAILYISDLIFLNKFILCFKVES

SEQ ID NO: 92311 - protein, 82 aa, Gossypium hirsutum
  unsure (1)..(82): unsure at all Xaa locations
  Clone ID: LIB3145-013-Q1-K1-G4.pep
VCIVGLQEYIVLDDQTINFVIGRINSTRITHTTVSNDESLKSHAILQLAIKRSSYGTXSKPPKPVGKLYFIDLAXKERGADT

SEQ ID NO: 92312 - protein, 77 aa, Gossypium hirsutum
  unsure (1)..(77): unsure at all Xaa locations
  Clone ID: LIB3145-013-Q1-K1-G5.pep
MVTIISILAHERTLGATLXCSLTGIVVLDQRKRIYDSVTNYQSAMKEPIFGKKSHLKFALLLNKTEDHIFVPVIEAI

SEQ ID NO: 92313 - protein, 40 aa, Gossypium hirsutum
  Clone ID: LIB3145-013-Q1-K1-G6.pep
DRRNSVDPPSDLRPGCDIVEVGRGIFCLGMLFMDDLYLQV

SEQ ID NO: 92314 - protein, 85 aa, Gossypium hirsutum
  unsure (1)..(85): unsure at all Xaa locations
  Clone ID: LIB3145-013-Q1-K1-G7.pep
LEKVLLTVKPQYGFGDDGGPATFGECSVPPNATLHITVDLVSCKNVSYITKYKKVSKXIVKEADGYQRPLDGTVFQVKLIGKLPY

SEQ ID NO: 92315 - protein, 40 aa, Gossypium hirsutum
  Clone ID: LIB3145-013-Q1-K1-G8.pep
TIGLNRSTVVTQISCHVNKLCGLNIGYAQQVQMIFKIPKC

SEQ ID NO: 92316 - protein, 52 aa, Gossypium hirsutum
  Clone ID: LIB3145-013-Q1-K1-H12.pep
NLRLIFFFFFFIFFFFFFFFNNLKQFHPNLFRFNRLIYLPQQGRFKVDYPQS

SEQ ID NO: 92317 - protein, 70 aa, Gossypium hirsutum
  Clone ID: LIB3145-013-Q1-K1-H3.pep
SSALRIIILKSNTLLVHLINNFSYHKKLKHTPIGSTETENPQPKIACPYTSQYRTRGTYSSPDKSFHTLT

SEQ ID NO: 92318 - protein, 116 aa, Gossypium hirsutum
  Clone ID: LIB3145-013-Q1-K1-H4.pep
FFGAAILINSIKDMLGKKWGSYIPLPMAMAIPFYLGPYFAIDMCVGSLILFVWEKLNKEKAAAFAPAVASGLICGDGIWTLPSSILALAGVQPPICMKFLSKATNTKVDNFLNSKS

SEQ ID NO: 92319 - protein, 156 aa, Gossypium hirsutum
  Clone ID: LIB3145-014-Q1-K1-A11.pep
SSHASRLTIAGTVNYYDIRKQCEGDVCDDFSDVETFLNLKSVREALGVGDIDFVSCSSVVYEAMLMDWMRNFEVGIPSLLEDGIKVLIYAGEYDLICNWLGNSKWVHAMTWSGQKGFGSSPIVPFGVDGVEAGKLKTHGPLTFLKVHDAGHMVPMD

SEQ ID NO: 92320 - protein, 34 aa, Gossypium hirsutum
  Clone ID: LIB3145-014-Q1-K1-A8.pep
INQSLEQLSQISKVSNTGSRKLSLLSFPKNRTRG

SEQ ID NO: 92321 - protein, 146 aa, Gossypium hirsutum
  unsure (1)..(146): unsure at all Xaa locations
  Clone ID: LIB3145-014-Q1-K1-A9.pep
RLTIAGTVNYYDITKPCQRDGWGDFSDVETFLNLKSVIEALGVXYIHFVSCSSVAYETMLMDWMRNFKAGIPSLLDNCIQVLIYAGEYDLICNWLENSKWAHAMTWSVQKGYGSSAIGPIXVDGVDAEILKTHGTITVLTDHDAGH

SEQ ID NO: 92322 - protein, 47 aa, Gossypium hirsutum
  Clone ID: LIB3145-014-Q1-K1-B12.pep
VELFGFWRKWNTIIKVKQQDQFHSFSSKLQYCMLSQMNVSLPCFLTL

SEQ ID NO: 92323 - protein, 55 aa, Gossypium hirsutum
  Clone ID: LIB3145-014-Q1-K1-B7.pep
TSSVSSSMRIRICIVVILIAEHSDGPTDEHIVGDKGSNQHPHLLATLLVYLPIHL

SEQ ID NO: 92324 - protein, 138 aa, Gossypium hirsutum
  unsure (1)..(138): unsure at all Xaa locations
  Clone ID: LIB3145-014-Q1-K1-B8.pep
LRGDNGKDKGETGIIKRVIRSQNRVIVEGKNXVKKHIKHGPGHEGGIFTVEAPFHASNFQVLDPVTXPCKIGVKYLENGTKVRVSRGIGASGSIIPRPEILKMRTTPRPTVAGPKDTPMNLVLEKTYEPKSGXGMPEL

SEQ ID NO: 92325 - protein, 117 aa, Gossypium hirsutum
  Clone ID: LIB3145-014-Q1-K1-C7.pep
GFSCTIPHKETALKCCDEVDPVAKSIGAVNCIIRRQSDGKLFGYNTDYIGAISAIEDGLQARYNMSSAAGSPLAGKLFVVIGAGGAGKALAYGAKQKGARVVIANRTYGTMHLFFLL

SEQ ID NO: 92326 - protein, 75 aa, Gossypium hirsutum
  Clone ID: LIB3145-014-Q1-K1-C8.pep
HACGTCAAMTPKVIVYGDLSQETIMNEVPSLHNHVMAEGSVLKESFFPPFNVPSKDSSEACSSNLAQGEDLQPSC

SEQ ID NO: 92327 - protein, 67 aa, Gossypium hirsutum
  Clone ID: LIB3145-014-Q1-K1-C9.pep
RTCPNSYHYQRMLLIRGAMTVHCLFTVYMTILKIQEEARIKLHAYVLSRSLAVANTMTMKRKTSIVK

SEQ ID NO: 92328 - protein, 102 aa, Gossypium hirsutum
  Clone ID: LIB3145-014-Q1-K1-D2.pep
EYVRRDIADKEETLHGNRESSSSRRKRERDEILDPRKRVEQQRIRDTFDHHSVRHKDEIWLHRERVERQRERDDWNRLKQSHDESLSKREREDRRGPVRSGR

SEQ ID NO: 92329 - protein, 60 aa, Gossypium hirsutum
  Clone ID: LIB3145-014-Q1-K1-E3.pep
KTSKMKEIKELLLWNRKLGSAYLWSLKTHLERSFSIRQVFIQHWLIYLLEALNWFQKQNE

SEQ ID NO: 92330 - protein, 83 aa, Gossypium hirsutum
  Clone ID: LIB3145-014-Q1-K1-F9.pep
STFFNAFACAGSKSTRAKPLHWTSCLKIAEDVAQGLAYIHQAWRLVHGNLKSSNVLLGPDFEACLTDYSLAVLITPTHDEDPD

SEQ ID NO: 92331 - protein, 74 aa, Gossypium hirsutum
  Clone ID: LIB3145-014-Q1-K1-G5.pep
PYPLILRIYKICHIKSNLIFTRYDSLYLLRLITKISLSYHVFIIEPIRLQSDRLLQQFLESGQFSWAKCSPSNR

SEQ ID NO: 92332 - protein, 49 aa, Gossypium hirsutum
  Clone ID: LIB3145-014-Q1-K1-G7.pep
NIMREILRIHTIKMPALSSCKLRLLKGSCSILIRAVNKVQVKSIEIKRG

SEQ ID NO: 92333 - protein, 48 aa, Gossypium hirsutum
  Clone ID: LIB3145-014-Q1-K1-G8.pep
FCISHYLNHLQILSNIPTNQAPTLSYVKCLAVSIIVKKTTRGSPNHRR

SEQ ID NO: 92334 - protein, 34 aa, Gossypium hirsutum
  Clone ID: LIB3145-014-Q1-K1-H1.pep
VLPPTGAIMSTIYDEKKDEDGFLYVTYSGENTFG

SEQ ID NO: 92335 - protein, 141 aa, Gossypium hirsutum
  unsure (1)..(141): unsure at all Xaa locations
  Clone ID: LIB3145-015-Q1-K1-A10.pep
PRVRPRVRPRVRRRHGNYNLRVRADINDVIAALATEAGWVVLADGTTFSSRSQSSPAAGTSAGMTSSSSQMVSQQIPPPPATLQRVSYGYRTTEEYNAXRMKSVFMPTPSPYDLSSTAPAQSSRVDADGGEQTERLSLIAG

SEQ ID NO: 92336 - protein, 124 aa, Gossypium hirsutum
  Clone ID: LIB3145-015-Q1-K1-A2.pep
GPPATALGFNPPDIGIMHKPPRRSDDALINSWVLFRYLIIGSYVGIATVGIFILWYTRASFMGINLVSDGHTLVELSQLHNWGECSTWSNFTVAPYMVGGSQLITFSNPCDYFTAGKVKAMTLA

SEQ ID NO: 92337 - protein, 107 aa, Gossypium hirsutum
  Clone ID: LIB3145-015-Q1-K1-A5.pep
RRSRSRSGSAEGRHYTKERNERSRDKKSKHRDRRRSRSRSADGKHRDRKRSRSRSFDGKHHRGSRRSPRNSDETRLKHRRRSRSKSTDGKHRSIDKVDERSKRHDKK

SEQ ID NO: 92338 - protein, 48 aa, Gossypium hirsutum
  Clone ID: LIB3145-015-Q1-K1-A9.pep
FNSSILLPKLKNEISFFPSNLNANHRQPATVSFYCITFIFNFLKFFIA

SEQ ID NO: 92339 - protein, 81 aa, Gossypium hirsutum
  Clone ID: LIB3145-015-Q1-K1-B10.pep
VELYEFVQVSWSYTYTRPGYIKKQHQSVPKDWWTEDVSDLDIDLFRCIITAVRSTYIPPPQLIGEALHVYACRWLPDTTKS

SEQ ID NO: 92340 - protein, 95 aa, Gossypium hirsutum
  Clone ID: LIB3145-015-Q1-K1-B2.pep
LHPLCSCSHHRYVYSVQPIHQPRDRYYSFEPSPSTRFKKTDKEEGAGLSWFSYSKNKRAHPVVFNIQTYTNTNLHQSLQNSACDSRNFSFFRTRG

SEQ ID NO: 92341 - protein, 97 aa, Gossypium hirsutum
  Clone ID: LIB3145-015-Q1-K1-C7.pep
FPLPPFLKPGPGNLFWGPQKKNFTFPTPGQKIWSLKKAPPLFFFFFFFFFFFFFFFFFFFFFFFFFFFFFFFFFFFFFFFFFFFFFIKVGFSNFLRN

SEQ ID NO: 92342 - protein, 145 aa, Gossypium hirsutum
  Clone ID: LIB3145-015-Q1-K1-D6.pep
LTFSRLEPGGKLVMGFRKASAASASEQENEAKNSNGVSTHGDAELADPSSWSKVDKSGYIAKEALGTKVAVPRKRKNSVLGSKSKRLRIDNEDMIELKLTWEEAQGLLRPPPNHVANVVSIEGFEFEEYEDAPVLWKPTIFATDK

SEQ ID NO: 92343 - protein, 70 aa, Gossypium hirsutum
  Clone ID: LIB3145-015-Q1-K1-E11.pep
KSHILPKSSLLTSSPLAGPPLSHGVLWLSPALSSTPLQILFFGSLRTQIRCSLLHCQEWVSAFIRIGHRD

SEQ ID NO: 92344 - protein, 48 aa, Gossypium hirsutum
  Clone ID: LIB3145-015-Q1-K1-E5.pep
SIPVSLVNDVDDEKWPSNFTYYPGLKYSKPGNSNGSSTGWGWHGGWLT

SEQ ID NO: 92345 - protein, 121 aa, Gossypium hirsutum
  Clone ID: LIB3145-015-Q1-K1-E6.pep
DAWADAWADAWGGAISSVRIINSEGAGSVTVATASKDRTLRLWKFDAEDSTDHPARIRAFKILRGHNASVHSIAAKTSGDMICSGSWDCTINLWRTNDTDTNGDAVSIKKRKVNNKIEESQ

SEQ ID NO: 92346 - protein, 139 aa, Gossypium hirsutum
  Clone ID: LIB3145-015-Q1-K1-E9.pep
PRVRLFDDPNTVETIVSVYRINDLSDPKTRFKVDVNAQENRLTGCAVISEGITVIVVEGGSKSIKRYGKLMLRRINWAEAVKDDKDGDEDEDEEKPPNKCVLVWQGSVAKSSFNKFSVHECITEAAAKKVFADARVAHY

SEQ ID NO: 92347 - protein, 54 aa, Gossypium hirsutum
  Clone ID: LIB3145-015-Q1-K1-F12.pep
VFGFSTLKEKKGWWTYTQDKDLILETMEEISKQFSKPDVRVIHTKVSLCVWRCI

SEQ ID NO: 92348 - protein, 54 aa, Gossypium hirsutum
  Clone ID: LIB3145-015-Q1-K1-F4.pep
TLTLRPPAAPAPPSAPRPKPAPPPSPPPAPPAAPPPKPPPSPPPAPPPAAPLKF

SEQ ID NO: 92349 - protein, 57 aa, Gossypium hirsutum
  Clone ID: LIB3145-015-Q1-K1-F5.pep
LGLEALLILKLQLVFTATYVRKSAWQPNLSKSAVSLHSNIHTKSVWQPPPIGWVKIN

SEQ ID NO: 92350 - protein, 142 aa, Gossypium hirsutum
  Clone ID: LIB3145-015-Q1-K1-G4.pep
LGLKQRMGMGLLCSGASMVASAIIESTRRRIAIEEGLSDEPAAAVHMSALWILPLYILSGLAEAFNGIGQIEFCYSELPKTMSTIAANIYGFGTFISNLVASFITSTDDNVTKRRRERLISSNMNERHYDYYYCLLCWLEHA

SEQ ID NO: 92351 - protein, 135 aa, Gossypium hirsutum
  Clone ID: LIB3145-015-Q1-K1-G8.pep
GRDFIKFAAYNFGKDHQDIAKWLPGSHLKKVVLYGCASLDKNNVFAAKRLRKFFKIQENTVCSRCMLKDSCGYANKSVWGIGTNNLLLVDVMKVITLYALDLVPAKLTVPDEVKDSINQLLKLVIKVSQPPCQDF

SEQ ID NO: 92352 - protein, 103 aa, Gossypium hirsutum
  Clone ID: LIB3145-015-Q1-K1-H10.pep
DLLTGRTAATLEMFPSWPMRYQQTPGSSKSGGESTDSGSALNTISSKTENQFEPDSPISKKASSSYHQALDQQNLQQQQQQQEMASDPSRTGTSLNQSAPIVK

SEQ ID NO: 92353 - protein, 77 aa, Gossypium hirsutum
  Clone ID: LIB3145-015-Q1-K1-H11.pep
NKTDSVLCFTGRQAHSSLSFSGLTGESSGADYQDCGASSMLLMGEPPWCPPCTESSFQSSTRSNAVMRYKEKKKTRK

SEQ ID NO: 92354 - protein, 101 aa, Gossypium hirsutum
  Clone ID: LIB3145-015-Q1-K1-H4.pep
HASAQSRFGGYQTLNEREKSFLARNQTIHCGFVKGMSRLSSPGFELSENDKAYMNTCRVAVSSCIFGSSDFLRRPTSRLISEFSKKNVCFGIVRDEQTLSK

SEQ ID NO: 92355 - protein, 103 aa, Gossypium hirsutum
  Clone ID: LIB3145-015-Q1-K1-H5.pep
IRQGTFSQYDYGVLKNLLIWGQVKPPAFDLNNIPKSLPIWMSYGGNDALADATDVQRTLEELSSKPELLYLDNYGHIDLLLSLKTNRDIYYPMIGVFKAVGKS

SEQ ID NO: 92356 - protein, 49 aa, Gossypium hirsutum
  Clone ID: LIB3145-015-Q1-K1-H8.pep
HMIEKMCRILPLSGEICLRHTGIQVSFIDFTLCHSFYIFLLSISRITFR

SEQ ID NO: 92357 - protein, 110 aa, Gossypium hirsutum
  Clone ID: LIB3145-016-Q1-K1-A3.pep
GLSHITVAGSLLHGLKEVEVWLQTFAPGSRTPIHRHSCEEVFVVLKGSGTLYLASSSNKYPGKPEEHFIFSNSTLHIPVNDVHHVWNTNEHEDLQMLVIISRPPIKVFIY

SEQ ID NO: 92358 - protein, 100 aa, Gossypium hirsutum
  Clone ID: LIB3145-016-Q1-K1-A5.pep
DFSFSLFIFSLLLSFSRPSSLFLRLSIIFLPFHHLGHHFILISPPLHHHTRMLHHHRHRIVAPLPLATTKVPHFSFFLLYSAKSPFLVGSSCEIVKPLSF

SEQ ID NO: 92359 - protein, 113 aa, Gossypium hirsutum
  Clone ID: LIB3145-016-Q1-K1-A7.pep
PRVRAQNAEELSNKKVVDAMVQVDEANVSKMEILKKVEEATEEIKTSKKALEEALNRVEAANKGKLEVEEALRKWRSEHGQKRRSLHNPTKFKSSYPSHNRKDSRLFDVNGLN

SEQ ID NO: 92360 - protein, 64 aa, Gossypium hirsutum
  Clone ID: LIB3145-016-Q1-K1-B12.pep
FFEKKRIWDFSTYSDFFLQLSLFGEVENAYMVDSFNSFFLKIFVVMEFKHTKKKKRKRKVLGIF

SEQ ID NO: 92361 - protein, 60 aa, Gossypium hirsutum
  Clone ID: LIB3145-016-Q1-K1-C12.pep
KIISLQARGSKVGSFKTAPPFFFFFFFFFFFFFFFFYFFFFFFFFFFFFFFFFFFFFFLR

SEQ ID NO: 92362 - protein, 102 aa, Gossypium hirsutum
  Clone ID: LIB3145-016-Q1-K1-C4.pep
ITTVFQPPLIFSQMDHLDLISMVLEGALEAQKEETLRLEESHRAAFVALVEKERERSMLITKNRDLVANEAPKAKFLEDFMVFIEAIEMKIWRLSRVSMRKL

SEQ ID NO: 92363 - protein, 112 aa, Gossypium hirsutum
  Clone ID: LIB3145-016-Q1-K1-C5.pep
HVCSLSLELKESKKDIEEETSASCVAETEETNIKETEAHAEVEKGKNEINNVVVVKENSLARSEHEESGVCSAEIDVKSGDSHLTHEKDMEKEEDTMQQREDFKVQEKQFQP

SEQ ID NO: 92364 - protein, 70 aa, Gossypium hirsutum
  Clone ID: LIB3145-016-Q1-K1-C8.pep
QLCRSLDSSGCNHRRMCLYQVSYGDGSVTYGDFSTETLTFRMNRIGRVALGCGHNNQSLFVGAAGLLSLG

SEQ ID NO: 92365 - protein, 89 aa, Gossypium hirsutum
  unsure (1)..(89): unsure at all Xaa locations
  Clone ID: LIB3145-016-Q1-K1-D12.pep
CDAKWQPKARAFYVASDLLVNXILXSSCLCPYXXQXXAVPTRXVLHCCSWGKKHFLLARFKTLPRTLLKTCAKCYXXSAVGTEFRTXQQ

SEQ ID NO: 92366 - protein, 140 aa, Gossypium hirsutum
  Clone ID: LIB3145-016-Q1-K1-D3.pep
IGEALNAYTLRRLPGFSKGVNQNIDFVKYRSLVETIVWLLPTEKGVVSCSFLLRLLRAAIFLDCGETERNELMRRIAQQLPEATMNDLLIRAPPGEATVFDVDIVQNLVEGFVTHSSQTEPVDNEFLGSRSPKFGPDASK

SEQ ID NO: 92367 - protein, 49 aa, Gossypium hirsutum
  Clone ID: LIB3145-016-Q1-K1-D4.pep
IKDVNQGSHLKEQCSLLETIVELLSNDKGMVSYILWLTLLITCICLHCL

SEQ ID NO: 92368 - protein, 77 aa, Gossypium hirsutum
  Clone ID: LIB3145-016-Q1-K1-D5.pep
RGNPINVAPVDVHIIALLADEMYPLLEIHEAPEFPKWTICHRYNEFYTFDYYIRSHWYDRYDKFQKSILMLRITGMT

SEQ ID NO: 92369 - protein, 131 aa, Gossypium hirsutum
  Clone ID: LIB3145-016-Q1-K1-E2.pep
MKILSSSKRVVSNEVKGDIEWELRPGGMLVQKRNMADAASAPMIKIKVSHGSYHRDIAVPAQSTFGDLKRVLAQETGLEPKEQRLLFQGKEKDDEECLHMVGVKDMSKVVLLEDPASKERKLVEMNSNQSV

SEQ ID NO: 92370 - protein, 131 aa, Gossypium hirsutum
  Clone ID: LIB3145-016-Q1-K1-E6.pep
HASALLKYPQITGGSKGRPSGGKAGLAAGPAVEKPEKLSGGKDFRDRFGGVEGVPRRHISTTRQKAVEDVNLSKHVHHDSDKRRSASRYGSTSRRAVIASRASSAGEANDIPQNRRLSTGSRIHNPAERIQ

SEQ ID NO: 92371 - protein, 120 aa, Gossypium hirsutum
  unsure (1)..(120): unsure at all Xaa locations
  Clone ID: LIB3145-016-Q1-K1-E8.pep
GSGENMSDFTYAENVAHAHICAAETLESRIVSVAGKAFFITNLEPMMFWEFVSLILEGLXYQRPFIKIPTWIVAYVLSLLQRIHEESHFRIDKYSPHYIVQLASCTTTFDCSKAQKHLGY

SEQ ID NO: 92372 - protein, 61 aa, Gossypium hirsutum
  Clone ID: LIB3145-016-Q1-K1-E9.pep
WVTIWFSQSRRCHRSSQSIALIFLYIIIYYFACSCYLVLDLLDRPTFFFFFFFFFFFILTE

SEQ ID NO: 92373 - protein, 63 aa, Gossypium hirsutum
  Clone ID: LIB3145-016-Q1-K1-G10.pep
TTNLLQIRPVSRRPKLMFRKMKTLGHPHAVPPSMCALGMHDAQGPTLPSALHQNGILSPSLTP

SEQ ID NO: 92374 - protein, 112 aa, Gossypium hirsutum
  unsure (1)..(112): unsure at all Xaa locations
  Clone ID: LIB3145-016-Q1-K1-G5.pep
PTRARTRALSVLFTKAPKISNWTDVDMAYEPEWTIGTCKAATPVQAHEVHCELRKRLHANVHLAVDESTRIIYGWSATAENCXVLAPQLDLNVXLGSGASLKQDYIDIIKTA

SEQ ID NO: 92375 - protein, 84 aa, Gossypium hirsutum
  Clone ID: LIB3145-016-Q1-K1-G8.pep
KALAKEMAPDTRVNCVAPGLVPTNFAAFLTKDEVLRKTAEEITLLGKLGTPGDMAAAASFLASDDASYITGETLVMAGGAPSRL

SEQ ID NO: 92376 - protein, 73 aa, Gossypium hirsutum
  unsure (1)..(73): unsure at all Xaa locations
  Clone ID: LIB3145-016-Q1-K1-H12.pep
MGTGRWGTWEEPLLGGAVLRHGTRDWNLVASELRTRTVAPFGFTPEICKAKYEDLQQRYSXCKAWFEELRKQR

SEQ ID NO: 92377 - protein, 134 aa, Gossypium hirsutum
  Clone ID: LIB3145-016-Q1-K1-H7.pep
PRVRANRIFYLSVPHEALPDVASSLADNAQTKKGWNRIIIEKPFGFDAVSSQLFTKSLLSKFEEKQIYRIDHLLGRNLIENLTVLRFSNLVFEPLWSRTYIRNVQVILSEDLSMPLGRYFDGYGVIRDIVHSHI

SEQ ID NO: 92378 - protein, 110 aa, Gossypium hirsutum
  Clone ID: LIB3145-016-Q1-K1-H8.pep
KNRADRHVRPFILSNKIFYFSEPQKTLPDGSFFIADPPQTNNVLYYFIIIKPFCFVSLYYQLFTKSHSSKFLHKLIYFIYHLSFSNFTYNLTFIQFLNLHFYSLFIQTIH

SEQ ID NO: 92379 - protein, 89 aa, Gossypium hirsutum
  Clone ID: LIB3145-016-Q1-K1-H9.pep
PFGLSFQTPKISLFLREPKMLGPPLQACATIALHTLFYYYKTTPRGGWVYQFYTICTDDMNHHDQLQRTLLLQTNHTTSDQPTLAIHLA

SEQ ID NO: 92380 - protein, 94 aa, Gossypium hirsutum
  Clone ID: LIB3145-017-Q1-K1-A2.pep
MAASGVAAPTRTEVLQLYRSLLRVARQFCDYNIREYSKRRTIDAFRDNKNLTDPSQLSAAFSDGKAQLEVAKRQALVYSLYAPKVKSIMDIKPS

SEQ ID NO: 92381 - protein, 141 aa, Gossypium hirsutum
  Clone ID: LIB3145-017-Q1-K1-A6.pep
PRVRENILKDRGASNLVNVLIGMDIPVRENNQAVGDFNHSDIGIDDEVPFDDEYFEVMDSEIYEAPVRWGMPDSADSSWVHPIYFAKCLMKAVHVEHDRKMDHPSNGVSIVGCLRPAFADEESYLRRLFHFDYDEGYTSDW

SEQ ID NO: 92382 - protein, 90 aa, Gossypium hirsutum
  Clone ID: LIB3145-017-Q1-K1-A7.pep
YKHRIKEKKLGNYIDLSFLLSKQIKSLNDKQGKFLKLRCKHQGLCLQLSLWNKALLGMDPSFFIFFSRFTFFSWSALFYPTFPSGIKSAA

SEQ ID NO: 92383 - protein, 140 aa, Gossypium hirsutum
  unsure (1)..(140): unsure at all Xaa locations
  Clone ID: LIB3145-017-Q1-K1-A8.pep
PRVRSPAAVDSFIQRCNLDAESLITVHPREMENRHIDNNVNTLDVPIKLRTFVELTMDVTSASPRRYFFEARXVMSFFATAEHEKERLQYFASPEGRDDLYQYNQKERRTVLEVKXVLEDFPSVQMPFEWFVQLXPPLKT

SEQ ID NO: 92384 - protein, 133 aa, Gossypium hirsutum
  Clone ID: LIB3145-017-Q1-K1-A9.pep
HASVQDQAGLLFFISVFWAFFPMFTAIFTFPQERVMLAKERSVGMYRLSAYLLARMISDLPLDLILPLVFLVIVYLMAGLKSTFTAFSLTMLTVFLSVVAAQGLGLTIGAAFMDVKKASTLASVIIMTSMLSG

SEQ ID NO: 92385 - protein, 62 aa, Gossypium hirsutum
  Clone ID: LIB3145-017-Q1-K1-B12.pep
KKITLTNPPFNFINSHLHHISTYYSLKTITIHNPTYLNIIFNPTSTIILPHLSKPTNTNYTP

SEQ ID NO: 92386 - protein, 54 aa, Gossypium hirsutum
  Clone ID: LIB3145-017-Q1-K1-B9.pep
ATHAVRFLVPYLRRHISLLSPPIPRWSPFCLAIWHLFVDFNLYLRFNFCFLFQC

SEQ ID NO: 92387 - protein, 52 aa, Gossypium hirsutum
  Clone ID: LIB3145-017-Q1-K1-C1.pep
FILSAYILNFHIKTPFPFFFFLKKKSFNIGIFITRKGRFSWPLILPLVGPNL

SEQ ID NO: 92388 - protein, 102 aa, Gossypium hirsutum
  Clone ID: LIB3145-017-Q1-K1-C5.pep
HASGLYCASSMVEGSNEWGRNSDPKMSLRTEKRASVLAMEVVEDFIYLNCSSSANSLQIWLRGTQQKVGRISTGSKITSLITANDVVLCGTESGLIKAWIPL

SEQ ID NO: 92389 - protein, 62 aa, Gossypium hirsutum
  Clone ID: LIB3145-017-Q1-K1-D10.pep
HSGCKGQEELFLFTLAKSCNLNTSTTKDASLSNQISNLPSNDSPRFVAIDEFRGLSFPAIDI

SEQ ID NO: 92390 - protein, 140 aa, Gossypium hirsutum
  Clone ID: LIB3145-017-Q1-K1-D4.pep
FVFFRQPDRFLESYDKKGYVSGVHLEKTTLKGIGSGKQIAIGTGQFENLSCGIVLKSIGYKSVPVDDLPFDNQKGVVPNVKGRILSDNSGDPTSIENGLYVCGWLKRGPTGIIATNLYCAEETVASLSEDLELGVLASTT

SEQ ID NO: 92391 - protein, 121 aa, Gossypium hirsutum
  unsure (1)..(121): unsure at all Xaa locations
  Clone ID: LIB3145-017-Q1-K1-E10.pep
RALTHASNRIFHCFYPNFQTHIYYIIARTFNNPHNLTKNLPTAATKIIQRLTYXKRHNYATKSNQTRVVKTPHGKLVYQYTNNISXGPNYPNTVKKIHKIPHLRHSEYNKFNLSRNHTTFN

SEQ ID NO: 92392 - protein, 90 aa, Gossypium hirsutum
  unsure (1)..(90): unsure at all Xaa locations
  Clone ID: LIB3145-017-Q1-K1-E12.pep
MAQRLTYRKRHSYATKSNQTRVVKTPCGKLVYQYTKKRASGPNCPVTGXKIQGIPHLRPAEYKRSRLSRNHRTVNRSYGGVLSGIAVMER

SEQ ID NO: 92393 - protein, 36 aa, Gossypium hirsutum
  Clone ID: LIB3145-017-Q1-K1-E4.pep
APLSLALAHAGVEDGKVVFVPWVETDFRTGDGPWWS

SEQ ID NO: 92394 - protein, 48 aa, Gossypium hirsutum
  Clone ID: LIB3145-017-Q1-K1-E8.pep
RCSLPFNYAICCGIFKIYPDMNFSDQTTTATLVLDAAPPKVHFDGAHI

SEQ ID NO: 92395 - protein, 95 aa, Gossypium hirsutum
  Clone ID: LIB3145-017-Q1-K1-F3.pep
IKKENDCSWSYGSDNNSCDVNLDVSRTPLMSSSKHLFPPSVRPTSMTQLLQGSSRPDLQCVKLDQVVQEESFCNMFNGVDEQQGFWPWSEQQSFH

SEQ ID NO: 92396 - protein, 87 aa, Gossypium hirsutum
  unsure (1)..(87): unsure at all Xaa locations
  Clone ID: LIB3145-017-Q1-K1-G5.pep
SYVRDFPRLRRFRTRSKNVQGWYLLARRXRPFPCFSSPLQDPSSNSIPFFVNIQFKFCHKKEKKKRFPVLNLCKIKKVICICFCLEF

SEQ ID NO: 92397 - protein, 76 aa, Gossypium hirsutum
  Clone ID: LIB3145-017-Q1-K1-G9.pep
HRSHLITSFPLRTKYQTTCPRFDYVYTYPLAKLYLLCVTRAMNNLHSGILKRLSMNKTNLPPIFITHSCQFHFLTG

SEQ ID NO: 92398 - protein, 61 aa, Gossypium hirsutum
  Clone ID: LIB3145-017-Q1-K1-H12.pep
QLLLLPIRAFLARRFFSSNSYKASSSPLVMGGSQYDDEWVLPSADITLVLVGKLGYGMSAT

SEQ ID NO: 92399 - protein, 84 aa, Gossypium hirsutum
  Clone ID: LIB3145-017-Q1-K1-H3.pep
PRLRSPLTTIGRLGSAITYAIRVCSDASQSYNDRCHQECIYSLLDGSVRKCPLPDMTGTRHTQSTNAVKGGLAVTITFNACPYK

SEQ ID NO: 92400 - protein, 55 aa, Gossypium hirsutum
  Clone ID: LIB3145-017-Q1-K1-H4.pep
THACVKPYPLFGSPLQWLRLYSYGLCWGTLYSRSLSKTPRPTPGLPFTFPHATSF

SEQ ID NO: 92401 - protein, 50 aa, Gossypium hirsutum
  unsure (1)..(50): unsure at all Xaa locations
  Clone ID: LIB3145-017-Q1-K1-H6.pep
SNPXLYLGALSNGFXSTAXGFPPLHFSPISLQISQNLPLASLHLSPRARL

SEQ ID NO: 92402 - protein, 108 aa, Gossypium hirsutum
  unsure (1)..(108): unsure at all Xaa locations
  Clone ID: LIB3145-017-Q1-K1-H9.pep
MRSQFNLCDAADANVLPCSYDASLXCPRDQKIHAANKLANNHQRFPLSSSSSHMPKCDICQEASSFFLXLQDRALLSPKCNAAIHTSNPYLFNHHTFLLTAIKVCLET

SEQ ID NO: 92403 - protein, 46 aa, Gossypium hirsutum
  Clone ID: LIB3145-018-Q1-K1-A6.pep
IVFRSHTHLDGVGRVKTINPGVDLNGAMGVKRGERSILVSHPMGCY

SEQ ID NO: 92404 - protein, 110 aa, Gossypium hirsutum
  unsure (1)..(110): unsure at all Xaa locations
  Clone ID: LIB3145-018-Q1-K1-B5.pep
ETLGLTLGLARSFSRGQGLSWSSGMTARTAGIVFXCAVRKTGDDHWGLWVPGYIIHILFWNNSAYHDMHDPLQGTKFNYSQPNFVDWDKLLGTHIAHDLSNPPEGGFEAC

SEQ ID NO: 92405 - protein, 92 aa, Gossypium hirsutum
  Clone ID: LIB3145-018-Q1-K1-B7.pep
CELYTQRTCLDSNPCPISYKAPTVENVDGLFTQQCLICYREKVKISLSTNMRFSCRMTMRIAYISLFQASAEAFLFCESVASLIESRDHFRG

SEQ ID NO: 92406 - protein, 98 aa, Gossypium hirsutum
  Clone ID: LIB3145-018-Q1-K1-B9.pep
TLLQDSVCPGLQMVSSIPSCKLIKETCERNFSMHSYYRTTASPDFISLDKTTFRNIIHHPDLTVISEERVLDAILMWYMKSQKIVGWEVVNELNSKFN

SEQ ID NO: 92407 - protein, 54 aa, Gossypium hirsutum
  Clone ID: LIB3145-018-Q1-K1-C4.pep
YYSQVKRGDLDSHQLWRNGDCLYIDNKLFMFSFILIIIRYLLSLIGTKQHSMSV

SEQ ID NO: 92408 - protein, 60 aa, Gossypium hirsutum
  unsure (1)..(60): unsure at all Xaa locations
  Clone ID: LIB3145-018-Q1-K1-C9.pep
NPASAAFKKASGVGDSSPASFPFPLRVEPKPKSGIRPQDLLKKGVEVXPKPPKISFPFSF

SEQ ID NO: 92409 - protein, 145 aa, Gossypium hirsutum
  unsure (1)..(145): unsure at all Xaa locations
  Clone ID: LIB3145-018-Q1-K1-D2.pep
QVHSYGTVDFERRPMVKWNALYKKISLMENPELGSASVLNEWEKGGRKLTKWELCRVVKELRKYKRFKQALEVYEWMNNRGERFRFSASDAAIQLDLISKVRGVSSAEDFFLQLPDTLKDKRIYXALLNAYVRARMQEKAESLID

SEQ ID NO: 92410 - protein, 85 aa, Gossypium hirsutum
  Clone ID: LIB3145-018-Q1-K1-D5.pep
VCMHVRPLCRLFRITKAVNGVPICQQRYFRLVHKLGRAQKTFMSIGILMCKTCNIAVGVFRWQCFPRQYGPPDMIHSFVMESSAA

SEQ ID NO: 92411 - protein, 43 aa, Gossypium hirsutum
  Clone ID: LIB3145-018-Q1-K1-E10.pep
TFLFPLLFNIILPKYLVIFLLFFLSQTFKPYLYLVLILAPPFL

SEQ ID NO: 92412 - protein, 52 aa, Gossypium hirsutum
  Clone ID: LIB3145-018-Q1-K1-E12.pep
PLFLLIHSCSKVAYKNYCTWFVKHKLYYFHPISVIIYRHFGPLIHPTSYLPK

SEQ ID NO: 92413 - protein, 113 aa, Gossypium hirsutum
  unsure (1)..(113): unsure at all Xaa locations
  Clone ID: LIB3145-018-Q1-K1-E5.pep
RDALFQFTGTWTFNQYSVIQGVPCCRRSPTSPIDXKYRPLCVGYGAGFGATXDVLNPIMVNTVADSGLRAHCLVCAQCAWHCWAYRIITVDMDPQILGDSYXFGITNFGNPKN

SEQ ID NO: 92414 - protein, 50 aa, Gossypium hirsutum
  Clone ID: LIB3145-018-Q1-K1-E8.pep
FPFLLPKLYLIALLFPMLIFLHPFLFPPILLSSNSTFPHHVYFSFFPKTF

SEQ ID NO: 92415 - protein, 71 aa, Gossypium hirsutum
  Clone ID: LIB3145-018-Q1-K1-F1.pep
WNCQSEVKDQDFPANSSQVIISFVHAADIPAPRTGTRLKIGFPSIFESWSPSSSQAFSLSLSDILNALISA

SEQ ID NO: 92416 - protein, 64 aa, Gossypium hirsutum
  Clone ID: LIB3145-018-Q1-K1-F11.pep
AKSLVKLCFLDALSCASTPPCWFFPALVRGNIANNVSVAFNGEYESGFHLSFPEIHATLNLSLP

SEQ ID NO: 92417 - protein, 73 aa, Gossypium hirsutum
  Clone ID: LIB3145-018-Q1-K1-F12.pep
LPRMGVSTCTQSNIFSHNRRLLMTSVTNYLGCHFYSLEATISKRELELSGKHGKPSWTKTAAHSEDKTWLCLK

SEQ ID NO: 92418 - protein, 141 aa, Gossypium hirsutum
  Clone ID: LIB3145-018-Q1-K1-F3.pep
HAFGAPEYAMTGQLTVKSEGCSFGVVLLEIITGRKAIDNSKAAGEQNLVAWARPLFKDRKMFSQMADPMLQGQYPPRGLFQALAVAAMCVQEQPNMRPLIADVVTALTYLASQKFKPDTQPIQGSRLMPGTPPWTKRDIDK

SEQ ID NO: 92419 - protein, 108 aa, Gossypium hirsutum
  unsure (1)..(108): unsure at all Xaa locations
  Clone ID: LIB3145-018-Q1-K1-F5.pep
ATTRPITGDETNFKLCKIRSVQTGQKGFPYLNTYHCRTILYPYPLIKVNDTIKLDLQSNKFVDXIKPDVENVDMVTGGRNRRRVVVNKNSEKHKDSLATIHVQYANRH

SEQ ID NO: 92420 - protein, 98 aa, Gossypium hirsutum
  Clone ID: LIB3145-018-Q1-K1-G10.pep
STTRPDESNARAYNTQDYSKMLDKIARAPAPVSTPLQMPIQTAYLTSAAYSTSATAAPANQPVYLISTPAAGVYQQSPTIQQVTVPAGQPYYGVQRVV

SEQ ID NO: 92421 - protein, 137 aa, Gossypium hirsutum
  unsure (1)..(137): unsure at all Xaa locations
  Clone ID: LIB3145-018-Q1-K1-G11.pep
MKKQVICSTVFPLLCILLLFLSVEAETCSPSGKIKGKTPPPGQCNQENDSDCCKDGKWYTTYKCSPPLSSQTKATLTLNSFERDGDGGAPSECEXYHSDDDPVVALSTGWYNNGKRCLKYINIHGNGKSVRAKVVDE

SEQ ID NO: 92422 - protein, 85 aa, Gossypium hirsutum
  Clone ID: LIB3145-018-Q1-K1-G2.pep
MNVMRRLKSIASSRSSISDSGGDSFTKRAKFDQESEFKATGESNISDRSTPGPEHHMASTSSETVASTSNAASSSSNITEKLDLD

SEQ ID NO: 92423 - protein, 62 aa, Gossypium hirsutum
  Clone ID: LIB3145-018-Q1-K1-G3.pep
KKDSGSDFKNCPNPKPIFFETKPCNYGVQRHQKKNHHLNVKPTRDSPLFVFYFRVGGFYQKI

SEQ ID NO: 92424 - protein, 49 aa, Gossypium hirsutum
  Clone ID: LIB3145-018-Q1-K1-G4.pep
GSPTRPHFYTLVIINRWNVRGAAVVGGGDYLFFCSYFSGLMDHRTAGWL

SEQ ID NO: 92425 - protein, 140 aa, Gossypium hirsutum
  Clone ID: LIB3145-018-Q1-K1-G8.pep
PTRPVLREVSSSVLKAESGVRVHALAHFPAAKITTILVGDTILCQNGKGEEDSLGFLLPSLKNIYHSLTKWGLEKDIKVSAVFSSDCLMQNSVVFTDDLGKKVVKSLLEFFQNTNSTYSIVAFPNLSSSFHETLVLLSSH

SEQ ID NO: 92426 - protein, 100 aa, Gossypium hirsutum
  unsure (1)..(100): unsure at all Xaa locations
  Clone ID: LIB3145-018-Q1-K1-H1.pep
YIHTSNHTSNQEISKCLNXISMKNQWHTMCEDLRASYHTFLFVWFNYEQKNLEHSKRRMTDNNGRSLSSNPPPPQNKKQQKNINQLMIKVKDIVPYQVDS

SEQ ID NO: 92427 - protein, 56 aa, Gossypium hirsutum
  Clone ID: LIB3145-018-Q1-K1-H11.pep
KLWFYVFNNSHHYINWGTKKFLSYYEIKMLILIPKTLLQFVKDIDYFIRDFFINIF

SEQ ID NO: 92428 - protein, 104 aa, Gossypium hirsutum
  unsure (1)..(104): unsure at all Xaa locations
  Clone ID: LIB3145-018-Q1-K1-H3.pep
MSPHLRMVSSIYVLLLLFISASKVQSYAIYLIPTFDAKTDGKTHLSKPFLYAXKETSSFVTPSTDIIPKWTYLLSKVHLESPXKYPIYINVQNTIKASPHPHTI

SEQ ID NO: 92429 - protein, 111 aa, Gossypium hirsutum
  Clone ID: LIB3145-018-Q1-K1-H7.pep
IEEESNVGNGRDLSRRRQSSYFSGCYTMSPSCLPVKEEMEYSRIHECSSSGSEKRRQRWRNLLRRLVKDGKSSIYGSSKPLSFHYDAVSYSQNFDEGFHHEQSIFQDVRSR

SEQ ID NO: 92430 - protein, 68 aa, Gossypium hirsutum
  Clone ID: LIB3145-018-Q1-K1-H8.pep
EKDVFNPGFLYIIKLYIYNIWDCISYGSPGALNLYQACSYCLIDIMRSTNKLVRTFYCGRQLFGTESA

SEQ ID NO: 92431 - protein, 37 aa, Gossypium hirsutum
  Clone ID: LIB3145-019-Q1-K1-A2.pep
LSCINRKFNHLSPKPPHFYTPDELQTCTSANTLTFNK

SEQ ID NO: 92432 - protein, 133 aa, Gossypium hirsutum
  Clone ID: LIB3145-019-Q1-K1-A3.pep
KKLRYQNQETHFCSLKFFPLRPKMADTAVVVDVPRKSRNNGRKALKQKNSSSSSSTTTTTNEANTLAQKLSQQLSPTQAPSPMKSDPSKENHDGLSQSLKGKAAGKGKQSKKSFEKDLQEMQDMLQKLRIEKE

SEQ ID NO: 92433 - protein, 82 aa, Gossypium hirsutum
  unsure (1)..(82): unsure at all Xaa locations
  Clone ID: LIB3145-019-Q1-K1-A4.pep
VSTFLSMYYFQKHSTSQNLGXDWYWDFXFQAPKSCSLYSLNSKQTFSHSYISYPXXIPIHRYVGMVPPYSLPXMLDXSDXXX

SEQ ID NO: 92434 - protein, 56 aa, Gossypium hirsutum
  Clone ID: LIB3145-019-Q1-K1-B11.pep
GRVGQVLQFEVPPTGASVIGRESETCCHIPQDHSKWSKSSGASLQIGQTTSTINFL

SEQ ID NO: 92435 - protein, 96 aa, Gossypium hirsutum
  Clone ID: LIB3145-019-Q1-K1-B5.pep
ADLNRGMQIGSVDSYAGAGRFNLALTTCSNLSTQRQNGPIGFSHLEVGRPSSTNDWHTGYPRFTSKQSHFTPHMTQNHPSPLEQQTLSRLNHGRST

SEQ ID NO: 92436 - protein, 67 aa, Gossypium hirsutum
  Clone ID: LIB3145-019-Q1-K1-B8.pep
LFCSFSPTCVQFSLKLVQCNTCLMSPDGFCTVAMSLATVIVFTTYMKTPPLSVLSILAEDVLVTTTH

SEQ ID NO: 92437 - protein, 138 aa, Gossypium hirsutum
  Clone ID: LIB3145-019-Q1-K1-C10.pep
IFQYNGGHSREIYHTKRMQRVFCVKYSCDASYVISGSDDTNLRLWKAKASEQLGVVLPRERKKHEYLEAVKNRYKHLPEVKRIVRHKHLPRPVYKAANLKRTMIEAERKKEQRRKAHSAPGSIVTEPVRKRRIIKEVE

SEQ ID NO: 92438 - protein, 49 aa, Gossypium hirsutum
  Clone ID: LIB3145-019-Q1-K1-C3.pep
NLHLSLIHNQGSKSCAIPYADLTHMAGVSKETLTLSTSLCKKNIVSSHS

SEQ ID NO: 92439 - protein, 67 aa, Gossypium hirsutum
  Clone ID: LIB3145-019-Q1-K1-C5.pep
QYMVTSIHENWFCARCLNTSKSAGEGAIVMQASVFLLVALYDGSVGLASRAMASVDQLVWQLNRKNL

SEQ ID NO: 92440 - protein, 26 aa, Gossypium hirsutum
  Clone ID: LIB3145-019-Q1-K1-C6.pep
HSLASWRMSGFINLAHHLVSQWLYGT

SEQ ID NO: 92441 - protein, 113 aa, Gossypium hirsutum
  Clone ID: LIB3145-019-Q1-K1-D1.pep
MAASLRLNPTSTPALCPISTYKSLTPVLCGPRDNRGPVVKGRILSTEAIQAIQSLKRAQRNSSSTETVTPLPYLSRLIKYDLLAALRELLLQDQCALCVHVLSTGRSEYPPPD

SEQ ID NO: 92442 - protein, 81 aa, Gossypium hirsutum
  Clone ID: LIB3145-019-Q1-K1-D10.pep
QHGVSEEKAYEELKKLIDSAWKDINQELLFKPARAPFPVLTCVLNLARVMDFLYKEGDGYTHVGNVTKAGITSLLIDPVPI

SEQ ID NO: 92443 - protein, 51 aa, Gossypium hirsutum
  Clone ID: LIB3145-019-Q1-K1-D11.pep
AVPLLSLPSFICFFFDLLRHFPPIFHALGCCSTAIVLVLIQQGEFESQNND

SEQ ID NO: 92444 - protein, 54 aa, Gossypium hirsutum
  Clone ID: LIB3145-019-Q1-K1-D3.pep
VGGFLLHEHFYKVSRVIKMCPFRSCLFYGHHILVMYVLVSPGSHLALQALYFWT

SEQ ID NO: 92445 - protein, 142 aa, Gossypium hirsutum
  Clone ID: LIB3145-019-Q1-K1-D4.pep
KGVIFLAATNRRDLLDPALLRPGRFDRKIRIRPPNAKGRLQILKIHASKVKMSESVDLSSYANNLPGWTGAKLAQLVQEAALVAVRKRHESILQSDMDDAVDRLTVGPKRVGIDLGHQGQCRRATTEVGVAITSHLLKRYEN

SEQ ID NO: 92446 - protein, 43 aa, Gossypium hirsutum
  Clone ID: LIB3145-019-Q1-K1-D5.pep
ALFFICIAPNSIGRLLPVRIQNGVVSQLMFIPIFDWYKITDPV

SEQ ID NO: 92447 - protein, 64 aa, Gossypium hirsutum
  unsure (1)..(64): unsure at all Xaa locations
  Clone ID: LIB3145-019-Q1-K1-D6.pep
TEMGNIGLCNAGHGXENKMTISRKIEYHIFSTTPNHKCRVHTEHGRKKSSDFGCSQATCQGQGT

SEQ ID NO: 92448 - protein, 47 aa, Gossypium hirsutum
  Clone ID: LIB3145-019-Q1-K1-D7.pep
RRRMRRKRRKNGDALYVDQQKPSARKKEKYLQHNPMRMLRNDAIFFS

SEQ ID NO: 92449 - protein, 47 aa, Gossypium hirsutum
  Clone ID: LIB3145-019-Q1-K1-D8.pep
FFFSFHLLYPYLMSSKVSCTPNVPPCSHQLRFRFWHHSFCREVFWLI

SEQ ID NO: 92450 - protein, 113 aa, Gossypium hirsutum
  unsure (1)..(113): unsure at all Xaa locations
  Clone ID: LIB3145-019-Q1-K1-E10.pep
PEQHQXAPNSTFHCHQILVLHPLESRQIRENHHHPNKLLAFSAQLLVHYLNNSETEALILQIIQGDRLLVVCRALSRPSRYRVQLSRDCKLEGGEWDSFAFLSKDFEHPGRIR

SEQ ID NO: 92451 - protein, 61 aa, Gossypium hirsutum
  Clone ID: LIB3145-019-Q1-K1-E2.pep
CPPKLVVKTMYHHVPISCGCGCGIIPLALDSPRHRHHHQAEPTCLDFVPLRFPRFVALHSG

SEQ ID NO: 92452 - protein, 63 aa, Gossypium hirsutum
  Clone ID: LIB3145-019-Q1-K1-E3.pep
RNTPSKSRGTKIKVCRLRSIPEAIAKPLHSKMNYLILLTTVYVNMAVHCFYNKIWRTFDHTTA

SEQ ID NO: 92453 - protein, 50 aa, Gossypium hirsutum
  Clone ID: LIB3145-019-Q1-K1-E6.pep
FIACELGFIVHARARGLHFIRKYAAHVTTADVYHAGPFHVQLTILDLSQG

SEQ ID NO: 92454 - protein, 50 aa, Gossypium hirsutum
  Clone ID: LIB3145-019-Q1-K1-E8.pep
VFTILSSIEFRMLSKCQAPSQPHALLYGVQFHVSRTLANSTHASVEQFIP

SEQ ID NO: 92455 - protein, 42 aa, Gossypium hirsutum
  Clone ID: LIB3145-019-Q1-K1-F10.pep
SLLIVISAFCAFFFKKRNKFKELATIRLMGIYINHCSMNIFF

SEQ ID NO: 92456 - protein, 137 aa, Gossypium hirsutum
  Clone ID: LIB3145-019-Q1-K1-F6.pep
GRVGVAENFVNTIKEIRVQCAGDTSSNYPAIINDYDINGGAPQCVYFVNGCRNRGSLCIFSHSLQAKKPACKLFFSLHGCRNGDICSFSHESYQPISSYGSNVCQPEADHADASSLVRLFGTSSAGYILLLDDANMH

SEQ ID NO: 92457 - protein, 42 aa, Gossypium hirsutum
  Clone ID: LIB3145-019-Q1-K1-F7.pep
QKRDPPYPSAKARNRFLINGQLGDFRISNKCIFTIFLLNCFC

SEQ ID NO: 92458 - protein, 85 aa, Gossypium hirsutum
  unsure (1)..(85): unsure at all Xaa locations
  Clone ID: LIB3145-019-Q1-K1-F8.pep
PRRKVPKTPIKGRDAPSLDDDFYLYLDDWSSQNVLADGLGTCDYLWTAYISEVTKWCDLXPNDNVCAVQWTRQGSYISSGANLSQ

SEQ ID NO: 92459 - protein, 50 aa, Gossypium hirsutum
  unsure (1)..(50): unsure at all Xaa locations
  Clone ID: LIB3145-019-Q1-K1-F9.pep
LEPSNSVSRCLSILNLAHNSQPLVVLVSXASSIVRCQHLSPLDCFSLFTK

SEQ ID NO: 92460 - protein, 32 aa, Gossypium hirsutum
  Clone ID: LIB3145-019-Q1-K1-G11.pep
GGPLDPPLQVSKVTTESDTLSLSWNHWPKVLY

SEQ ID NO: 92461 - protein, 45 aa, Gossypium hirsutum
  Clone ID: LIB3145-019-Q1-K1-G3.pep
HASAHASGGGVVRGAWHEWKNRLEAAVAEISRVSAEKILSVLGWG

SEQ ID NO: 92462 - protein, 54 aa, Gossypium hirsutum
  Clone ID: LIB3145-019-Q1-K1-G5.pep
MHPVDQDKASVHSKKMIGCYASQRRIWNVNVGLGPQDISVLSGLCIANLGPVRL

SEQ ID NO: 92463 - protein, 67 aa, Gossypium hirsutum
  unsure (1)..(67): unsure at all Xaa locations
  Clone ID: LIB3145-019-Q1-K1-G7.pep
PTRAIPMATTSSDVHAGERVQRACSVKQPQLVAPLVQTLAYSXAVPAAWARLVSMERLQNRIKGQHK

SEQ ID NO: 92464 - protein, 71 aa, Gossypium hirsutum
  Clone ID: LIB3145-019-Q1-K1-G8.pep
YTQTYLPVHAMILLLHRVTIHQFRWPSMFSVVTGISLALPHAVVLALTPFSTAGVTTHMLAPISLINNSSV

SEQ ID NO: 92465 - protein, 131 aa, Gossypium hirsutum
  unsure (1)..(131): unsure at all Xaa locations
  Clone ID: LIB3145-019-Q1-K1-H12.pep
MKASRLINGGIALPNDKSNMAERELEERPLCDQKVCSNEVSDLNLESESNTHLIENAKIVLRLLPIWTMLLVFAVIFQQPATFFTKQGMTMKRNIGKNFKIPXATLQSAITLSIILXMPLYNKVFIPITKM

SEQ ID NO: 92466 - protein, 59 aa, Gossypium hirsutum
  Clone ID: LIB3145-019-Q1-K1-H3.pep
AFHSARSCPNRVLENRNIRRLMYQHVQSIHKLQIYGIHLCMYILVENLPAGLWKMFFIL

SEQ ID NO: 92467 - protein, 77 aa, Gossypium hirsutum
  Clone ID: LIB3145-019-Q1-K1-H7.pep
IDWSHLQKILLLTHILNLHNSKKMKLTSLPNFIISHTYLTKFFFLHFHIITLTPLYSTISYYTSSTTTLLILAITRS

SEQ ID NO: 92468 - protein, 145 aa, Gossypium hirsutum
  Clone ID: LIB3145-020-Q1-K1-A12.pep
PTRPGQYSVKSDVYSFGVLGVEIISGKKISSFSNQEVGDSLLTHAWRNWREGTPLEVVDPILRDGSRSEIMRCIHLGLLCVQDNIDSRPTMASVVLMLSSYSISLPLPSRPALSMLSTMETETKSQSSSLFNPSIRRNISSVSQR

SEQ ID NO: 92469 - protein, 103 aa, Gossypium hirsutum
  Clone ID: LIB3145-020-Q1-K1-A4.pep
SLMFFDDHSAHDQDHERNREVQSLTETLLATSSFTRERSNYVFWEREKELTRHLIKGFVAAFLFLDPLVMGHEKTANLMASKDSLNRSFLPRSLTSFMMIPPN

SEQ ID NO: 92470 - protein, 49 aa, Gossypium hirsutum
  Clone ID: LIB3145-020-Q1-K1-A5.pep
QNNPEVKDGFFKVMVLCVAMLLLVLLCFLFPILYSHVMAWYKKAFFKRT

SEQ ID NO: 92471 - protein, 67 aa, Gossypium hirsutum
  Clone ID: LIB3145-020-Q1-K1-A6.pep
MGDEKSTIVMASRESRDRELLIPVSDFVHDDSSKPSSSSSPRHAGHETFYKFVKSWASKKFMTGCVI

SEQ ID NO: 92472 - protein, 86 aa, Gossypium hirsutum
  Clone ID: LIB3145-020-Q1-K1-A8.pep
PAATKAKAPLLAVVEARKGGLFNPVLDLHLKARYSRPNKSNHGETFRRLLEPITTPIMVSGDGLSRPLLVNSSGIGRINLAFIVQT

SEQ ID NO: 92473 - protein, 36 aa, Gossypium hirsutum
  Clone ID: LIB3145-020-Q1-K1-A9.pep
FKTPVSPINSLGTGIALAGVFLYSKVKRIKPKTKAA

SEQ ID NO: 92474 - protein, 103 aa, Gossypium hirsutum
  Clone ID: LIB3145-020-Q1-K1-B12.pep
AAFHSSNFLFYHHRKLTLVNYRYQLKVLSRLSLQSAYCYNQHRNYDHSFTDTNSINSHNIYIMSICPSHSFLRILETHLNTRFLNVLENDIVTRHVRLIVFSN

SEQ ID NO: 92475 - protein, 61 aa, Gossypium hirsutum
  Clone ID: LIB3145-020-Q1-K1-B4.pep
PETNPFGNGAIRVYLREVRDCQAKARGIPYRKKKKKKTQIKPNVDDPMPSSNQQPSSQLAT

SEQ ID NO: 92476 - protein, 80 aa, Gossypium hirsutum
  Clone ID: LIB3145-020-Q1-K1-B5.pep
KAPPPDALIEQNPPSVPTLVAVKWASSLRKSAFIVDWHNCGYTLLGLAGGRSSPFVSIYHWFEKHYGQMANGSLCVTRAM

SEQ ID NO: 92477 - protein, 80 aa, Gossypium hirsutum
  Clone ID: LIB3145-020-Q1-K1-B8.pep
DSASTNITIVGIIITTKSSYCMPWLSNNPASRSLLSICTKRPDKVIKPWVLRCHSVQRAEPHAWANAWAYAWADACLHAW

SEQ ID NO: 92478 - protein, 80 aa, Gossypium hirsutum
  Clone ID: LIB3145-020-Q1-K1-C6.pep
SYTCVASIGTFHIFSLLKYSVNRILSSVRFHHNPVGGCHNFCGYQHIPGCSELGRARRTWESPRCGRFQLGENRNRWSWT

SEQ ID NO: 92479 - protein, 43 aa, Gossypium hirsutum
  Clone ID: LIB3145-020-Q1-K1-D11.pep
PQAGLQWGTLHHPSSNNSFTSPLPPVKLGIYCYKYSSQTSLIR

SEQ ID NO: 92480 - protein, 116 aa, Gossypium hirsutum
  unsure (1)..(116): unsure at all Xaa locations
  Clone ID: LIB3145-020-Q1-K1-D9.pep
NLTQFFRFPFYXVDTVSLSNPRMDGHLYLLLDLYLFPYGQDRFNTSGISKIASAFSSQDYKPPEQYFGPYVFTGAEYEYFSDGPAHLNKSSAGIAIRTTIGASMLFILLMGAWIYA

SEQ ID NO: 92481 - protein, 143 aa, Gossypium hirsutum
  Clone ID: LIB3145-020-Q1-K1-E2.pep
ATSGTPIAASTPGAPAATPSTSIGTPPLCAPATTPSTPIGAPPPNAPAATVGKPIGAPPPGAPAAAATGAPPPISGASEPGSDDKSAISSSGNQHTTASVESNPTKSINDKPADATPTDKPLADVPSLTPDNQETSVPTTDPT

SEQ ID NO: 92482 - protein, 97 aa, Gossypium hirsutum
  unsure (1)..(97): unsure at all Xaa locations
  Clone ID: LIB3145-020-Q1-K1-E9.pep
EFRAGFEVKLRVDCLCKQGXIHREGFKILWKEPRLILYEVEEIEKKIDFLVNTMNYKVGCLVEVPEYLGANFDKQILPRYNVVEYLKSQGALEFDVG

SEQ ID NO: 92483 - protein, 36 aa, Gossypium hirsutum
  Clone ID: LIB3145-020-Q1-K1-F1.pep
FPWNKILKTGGVTWPKLTPLVARGFKMEFLESTSVV

SEQ ID NO: 92484 - protein, 85 aa, Gossypium hirsutum
  Clone ID: LIB3145-020-Q1-K1-G11.pep
SELKYHLRTEINFKESKRYVLFIVILCSSLIYNCFFIKTFLFIYILKRIACFLLIFNVLKISLYNSKLFFYIYLLIILTFFKLLL

SEQ ID NO: 92485 - protein, 46 aa, Gossypium hirsutum
  Clone ID: LIB3145-020-Q1-K1-G4.pep
FTNQNLISWRSANYQRTLSLSHLIFPDNLKLQKNPTSTNMKNEDTV

SEQ ID NO: 92486 - protein, 102 aa, Gossypium hirsutum
  Clone ID: LIB3145-020-Q1-K1-G6.pep
RVAIKVVTDLLEDQSSYVWDSHFSMIRFSASTWRSKHEKECLINDISLYVYTEFHSFSGSKLECVFVLHVGCSWVIFEHLDERRLLGEINREVVDKYRLYCR

SEQ ID NO: 92487 - protein, 80 aa, Gossypium hirsutum
  Clone ID: LIB3145-020-Q1-K1-H11.pep
VVVFKLHFQDFLTSILIDLLKPVLDLLKVFRWKRRVRRQYVQSSIRHPSLLVSPSFLCQPTVLSVSLTPNTTTNTKDPRI

SEQ ID NO: 92488 - protein, 99 aa, Gossypium hirsutum
  unsure (1)..(99): unsure at all Xaa locations
  Clone ID: LIB3145-020-Q1-K1-H6.pep
MHVATTSNQAPVLALCAAHYTPDDDTEHQTLAADLESWVHGPPTHQMKKRLLTAALYDDPYLFEVNRVLDTDFGSTXIVRCCDNRRSISWVHAWTVRDG

SEQ ID NO: 92489 - protein, 67 aa, Gossypium hirsutum
  unsure (1)..(67): unsure at all Xaa locations
  Clone ID: LIB3145-020-Q1-K1-H7.pep
LTGQYVLYLGAYSAFYIREGIYRYWTEQHFTXWIACVCCIVLTATHAYFXYYYFVSRKNNAELKIPL

SEQ ID NO: 92490 - protein, 53 aa, Gossypium hirsutum
  Clone ID: LIB3145-020-Q1-K1-H8.pep
RLGTGVPYVCLGLQKGKTHRLVHVGFLQHFFTVRHPVVSALNHNSKAKIFWFC

SEQ ID NO: 92491 - protein, 46 aa, Gossypium hirsutum
  Clone ID: LIB3145-021-Q1-K1-A10.pep
SFCSSPHFPTTKHMRGSLTRGISYNITYPYSHRQLQSYSLIPIKLT

SEQ ID NO: 92492 - protein, 130 aa, Gossypium hirsutum
  Clone ID: LIB3145-021-Q1-K1-A12.pep
VYLQQPKVRGRPNSRFLTATVLGVQQANRAVEVNEMWRVRQKEIELNDRLKGRSKKDTSHIRSYGDTSNSSRRTSGKHESDFSASCSSSKRPDESSRSREDDEGLRDEEIEEFPQSKVKRGRGSIGSRMD

SEQ ID NO: 92493 - protein, 39 aa, Gossypium hirsutum
  Clone ID: LIB3145-021-Q1-K1-A2.pep
WPTVFYVGESLRRLSCCSMNHVLLLAPYHTKSTCGSCAR

SEQ ID NO: 92494 - protein, 100 aa, Gossypium hirsutum
  Clone ID: LIB3145-021-Q1-K1-A6.pep
TTTLLLNAYRMFCNSIASTLYDTIFVWHKLQSSIYSAAWKHLIMFTPSKAFQYSTEIQYQFNCRVYILIWDDRRTKYNEYVILSTHVVVNFTCYIIHSVT

SEQ ID NO: 92495 - protein, 125 aa, Gossypium hirsutum
  Clone ID: LIB3145-021-Q1-K1-A8.pep
FFFFFFFFFFFFFFFFFFLFFFFFFLKKGGEFSLLELKGGNFWVLGGGAFPNFSFLGVGGGGKFGNFHLGGLLGILQGAVFLGRGGLKIFYWAIWGLFGRSFKGKWFFTGGGTLFGLENPHSWGK

SEQ ID NO: 92496 - protein, 133 aa, Gossypium hirsutum
  Clone ID: LIB3145-021-Q1-K1-B6.pep
QGRAANPDLDSSDMEKLFREHIKMLFERCVNDFRALLAKVITQDAAAQETEGGKTALNSWSTAKRLLKPDPRYNKMPRKEREALWRRYAEDMLRKQKSALDQEEEKHTDVKGRSSGGDFGRYSSGTRRTHERR

SEQ ID NO: 92497 - protein, 48 aa, Gossypium hirsutum
  Clone ID: LIB3145-021-Q1-K1-C1.pep
MTLSSKEKEEDFMAMKGCKPPQRPRKRAKIIQRSLLVSNIDEFIPNFQ

SEQ ID NO: 92498 - protein, 78 aa, Gossypium hirsutum
  Clone ID: LIB3145-021-Q1-K1-C12.pep
YHYKRIRLQCFSPSYPKETSKCLHLTCEAWPLTANSTTADFSFTKSSSSLIPLSRFSSESKVKFPPLLPISCISAPNG

SEQ ID NO: 92499 - protein, 82 aa, Gossypium hirsutum
  Clone ID: LIB3145-021-Q1-K1-C7.pep
TKTLSLLLFFFLKVFKIGGFISLLSQFRRSLPYRISLCRQTHKNFNRKTLHTFSEKPCIYIRENRVKTILIFGARKNENIGI

SEQ ID NO: 92500 - protein, 45 aa, Gossypium hirsutum
  Clone ID: LIB3145-021-Q1-K1-C9.pep
PRVRSSFAQYRARFLIGFGVLKPTSFVPQPVHTFCFNLNTLELSI

SEQ ID NO: 92501 - protein, 91 aa, Gossypium hirsutum
  unsure (1)..(91): unsure at all Xaa locations
  Clone ID: LIB3145-021-Q1-K1-D9.pep
FRYNKKKTLTLQARVKKLWNLKNARPIFIFLFLFFFFFFYFLFFFFFFFFFFFXQNPNKHGPIGLFFTDQTLPKYKPKMIKNLGPNGPKNK

SEQ ID NO: 92502 - protein, 135 aa, Gossypium hirsutum
  Clone ID: LIB3145-021-Q1-K1-E10.pep
DMPADKLLGHFAQYGEIEEGPLGFDKQTGKSKGFALFVYKTAEGAQSALVEPVKNIDGRQLNCKLAIEGKKGKPGQDGMMQSGVGAPGNTEMGVGGHGGGYGGPVGPGGPGGMGGYGGFPGGLQGPPGPMGHPHH

SEQ ID NO: 92503 - protein, 48 aa, Gossypium hirsutum
  Clone ID: LIB3145-021-Q1-K1-E11.pep
GYLLSISRLHAAILGLFMYGKFHANKLVVLLDLLKYNTWRNGKLFLQQ

SEQ ID NO: 92504 - protein, 131 aa, Gossypium hirsutum
  Clone ID: LIB3145-021-Q1-K1-E3.pep
MKKEHNIFALAMLFCLAIVPVYGQYYSKTVMRATQRAKKMTRLHFFLHDTVSGENPSAVVIARPNITQPSSFGFGTLFAINDPLTVRPALTSTLIGNAQGLYVSSSRDPAVFTTVMYADFAFTSGRFNESF

SEQ ID NO: 92505 - protein, 119 aa, Gossypium hirsutum
  Clone ID: LIB3145-021-Q1-K1-E5.pep
VAPTIIFEDEVDSMLGQRTRVGEHEAMRKIKNEFMTHWDGLLTKAGERILVLAATNMPFDLDEAIIRRFERRIMVGLPSIESREMILRTLLSKEKAENLDYKELATMTDRYSGSDLKNL

SEQ ID NO: 92506 - protein, 62 aa, Gossypium hirsutum
  Clone ID: LIB3145-021-Q1-K1-E9.pep
LYFFILKKNNNQTLLDKFSLSNNGFLHNHNNDDIYNAIICKEKAISTSTNLPANLSIKLAFS

SEQ ID NO: 92507 - protein, 39 aa, Gossypium hirsutum
  Clone ID: LIB3145-021-Q1-K1-F3.pep
LGLIINSINRYFKSHLRRLDQLSHLVILGFYFSFYFLPI

SEQ ID NO: 92508 - protein, 128 aa, Gossypium hirsutum
  Clone ID: LIB3145-021-Q1-K1-F4.pep
SWYLFLNYANLRYRRVTVNDRCHGCYSSVEQSVHVYRECPLGLQEKRQRSMSTFMQRSSTRLYFNVAFDSRTFSSPPGLVGWDFRENLMVLKTVIHRDVPSPSAAEVYACLKADGRRYVRSSFRLGRD

SEQ ID NO: 92509 - protein, 52 aa, Gossypium hirsutum
  Clone ID: LIB3145-021-Q1-K1-F6.pep
LVVARRAYSHVHAISVVIKAYSKDSQLNLMGVVMHSSTSFHQHVHSFCQHNS

SEQ ID NO: 92510 - protein, 121 aa, Gossypium hirsutum
  Clone ID: LIB3145-021-Q1-K1-F9.pep
MRRNHLSYPNSLFFTFNINRLFRYRVNIVCIYIDSVLMMKVICTMAHLLHRLVIFTILITMAATVTPITHQHSKEASKFYNSPACLSISEPYILCSHQALHLAMTIDKAYIRGSMAAILSV

SEQ ID NO: 92511 - protein, 142 aa, Gossypium hirsutum
  Clone ID: LIB3145-021-Q1-K1-G10.pep
SLRGANCNIICTQPRRISAISVAARISSERGENVGETVGYQIRLESKRSSQTRLLFCTTGVLLRQLVQDPYLNGVSHLLVDEIHERGMNEDFLLIILLDLLPRRPDLRLILMSATINADLFSKYFGNAPTIHIPGLTFPVAE

SEQ ID NO: 92512 - protein, 43 aa, Gossypium hirsutum
  Clone ID: LIB3145-021-Q1-K1-G11.pep
YNMYSSGSHIWRIFYNQNIPHKFLNNVIINFYLIKYTYSQINL

SEQ ID NO: 92513 - protein, 101 aa, Gossypium hirsutum
  unsure (1)..(101): unsure at all Xaa locations
  Clone ID: LIB3145-021-Q1-K1-G2.pep
KIRTDEVVVPSALVESVAQAFFDPENTNQDQKSDLEDLYIYSPIHIDSVXGSLKAVVIHVPDQXRKAASMVDVKLARELVKKCKRKDVTLIATRRILMTPK

SEQ ID NO: 92514 - protein, 136 aa, Gossypium hirsutum
  Clone ID: LIB3145-021-Q1-K1-G8.pep
VVGSNESGQLELVCWSDKLAVSILEKKAMEGGSGYSKGMPLAFPVKFSKGFEMDKKVKKWWDDWQKLPYVSPYENALHLSPKTDESDKWAAAVLHEILNLFVAKKAEKDDVLCIGEYLGIRSRFKRVLLYHPQHFY

SEQ ID NO: 92515 - protein, 99 aa, Gossypium hirsutum
  Clone ID: LIB3145-021-Q1-K1-H10.pep
SPSQPTILNFFSAATLPLATKVQPPLPPLPLAITRATTTAWGTNHRHSTRLTPARRNGEPTVTPSKDSSHSSRSDLKGKGRSLFFRFSSDFGEPCFGSV

SEQ ID NO: 92516 - protein, 80 aa, Gossypium hirsutum
  unsure (1)..(80): unsure at all Xaa locations
  Clone ID: LIB3145-021-Q1-K1-H12.pep
KRNGKIRKKDILFIVEEILKFRNGMITIKMDLKRGGNGRLLKTAAXGHFGRNNTELNWEVVKLIKWPKPQYYSVLWISRH

SEQ ID NO: 92517 - protein, 114 aa, Gossypium hirsutum
  Clone ID: LIB3145-021-Q1-K1-H4.pep
PEGNSGVQKLNSIIEKDDKSCSSVLTNGDETITVERSDQNNVVVAIEGLGIPSSFEYLGDEVLIPAEFFYNEGLSLDELLEVPQATNNSNWIQDQSITNPDDVEFLNSSFVDND

SEQ ID NO: 92518 - protein, 78 aa, Gossypium hirsutum
  Clone ID: LIB3145-021-Q1-K1-H7.pep
NGNLTLNKRTQINTAFPNRFDLNILGVQKLGKIINPFNLYFMVAYSRTQSKDHTHLLSPFLPLNNPHERNFLCTEQQS

SEQ ID NO: 92519 - protein, 59 aa, Gossypium hirsutum
  Clone ID: LIB3145-022-Q1-K1-A10.pep
TTSQRAYKRSKGDPLRGFEDEKFSFIAFRRGQRPRDRWPLDGMKFETLKEQLCRPEHLQ

SEQ ID NO: 92520 - protein, 49 aa, Gossypium hirsutum
  Clone ID: LIB3145-022-Q1-K1-A12.pep
NNLSTRNTYLEYIIIQTLFDYKEAYNFSRALMPSFDVSLACSYPCTKMA

SEQ ID NO: 92521 - protein, 39 aa, Gossypium hirsutum
  Clone ID: LIB3145-022-Q1-K1-A3.pep
FLDGCDVTVACAFLSFAVGLVLSVVSPCAHHDIVWLHTV

SEQ ID NO: 92522 - protein, 38 aa, Gossypium hirsutum
  Clone ID: LIB3145-022-Q1-K1-A6.pep
KKWPVRCIYGQSSWKFTKGWAEFVLDNNLDEGDVCVSA

SEQ ID NO: 92523 - protein, 88 aa, Gossypium hirsutum
  Clone ID: LIB3145-022-Q1-K1-A8.pep
YQCVLSFGCPKKKKKKKKKKKKKKKKKKKKKKKKKKKKKDARSKKTQIKNTNKYKTKTFLKKKPKGAPLLKIIKFYHRENPGFLLFNS

SEQ ID NO: 92524 - protein, 47 aa, Gossypium hirsutum
  unsure (1)..(47): unsure at all Xaa locations
  Clone ID: LIB3145-022-Q1-K1-A9.pep
VVVFINPNNFQIQNVXEINESKNGFIKSKVFIEYALFSKPLHILVQE

SEQ ID NO: 92525 - protein, 70 aa, Gossypium hirsutum
  Clone ID: LIB3145-022-Q1-K1-B10.pep
FFLLSLLLLFFAVCYPCCNLLSIYVAAILFCYYVRRGDGCSWESCGCGHDALEIPAEATAALALGFQFLE

SEQ ID NO: 92526 - protein, 74 aa, Gossypium hirsutum
  unsure (1)..(74): unsure at all Xaa locations
  Clone ID: LIB3145-022-Q1-K1-B3.pep
PTRPHCSCICNPRFLLVPRPSCGDLLYSCLEACIPKYLFCCNFSLSWTVNIYKELSPKCIASMAALXLFGVCIC

SEQ ID NO: 92527 - protein, 82 aa, Gossypium hirsutum
  Clone ID: LIB3145-022-Q1-K1-B6.pep
MLYLVPFWIAFLVGILVGWAWKPKWAELLIQKLSSVVSKSLELSLPSSSSMSPMFCLKNSGSSSCLNSLNMQPEAWVTDNGE

SEQ ID NO: 92528 - protein, 51 aa, Gossypium hirsutum
  Clone ID: LIB3145-022-Q1-K1-B8.pep
DKRKISTAFLLCESPHINGLGNLHECLRTTLTQPRTLVLTRKRISTGAKAT

SEQ ID NO: 92529 - protein, 44 aa, Gossypium hirsutum
  unsure (1)..(44): unsure at all Xaa locations
  Clone ID: LIB3145-022-Q1-K1-C10.pep
YNNLYNMYITRQMKKKCNTRHKSTTYLIXLINGSHNYLYKPYAW

SEQ ID NO: 92530 - protein, 96 aa, Gossypium hirsutum
  unsure (1)..(96): unsure at all Xaa locations
  Clone ID: LIB3145-022-Q1-K1-C11.pep
RLLSRTQNSAFSSFKKTSRLADFSTSYFPFSFRVEPKPKNGIXHQNFLKKMFYFNPNPPKFYSPPTLNLNGINSNYNLKGRSSTIKKRIALFFLNS

SEQ ID NO: 92531 - protein, 38 aa, Gossypium hirsutum
  Clone ID: LIB3145-022-Q1-K1-C3.pep
PLTLSITQWIISTGQTATSQVDNFSQHDITWLHIYSLY

SEQ ID NO: 92532 - protein, 139 aa, Gossypium hirsutum
  Clone ID: LIB3145-022-Q1-K1-C4.pep
QASRTRPKEGPEPNILLGNRKLSDPTRTGSSLPGSPTVKPKINPKTQSKLSHTVSLPVLEGNQRVGNPRKHDRVNSKQHQRKNNGVVGKFDSAMGLSIIMVTLVIMLVWGRLCAILCTSAWFYFRSRYRTINNDNDTES

SEQ ID NO: 92533 - protein, 69 aa, Gossypium hirsutum
  Clone ID: LIB3145-022-Q1-K1-C5.pep
HTCTTTPKLGPDPNILLWNKKLSDPTRTLSSLTSSPTVKPKINPKTQAKLSHTVSLPILEGNQHVVNPP

SEQ ID NO: 92534 - protein, 41 aa, Gossypium hirsutum
  Clone ID: LIB3145-022-Q1-K1-C6.pep
TFTRPTKDIARGRYFVKDSCMCHGPLAAAHDRRKDRQPASV

SEQ ID NO: 92535 - protein, 45 aa, Gossypium hirsutum
  Clone ID: LIB3145-022-Q1-K1-D8.pep
VSGRELFSVPKWYFPGRYNTAYQQPTLCQEPRDHVNGLPSECPTS

SEQ ID NO: 92536 - protein, 151 aa, Gossypium hirsutum
  Clone ID: LIB3145-022-Q1-K1-E10.pep
GRRHAFDSQILCCSFPLQYWDVDSFVEGVRYNNKTSLLVGMSLAQIGEFAFVLLSRASNLHLVEGKLYLLLLGTTALSLVTTPLLFKLIPPVVHLGVLLRWFPPDIHSEMGFKGDSLRSYSVKQSNILRSDSGKQSNNFRSYIAKRITLLV

SEQ ID NO: 92537 - protein, 83 aa, Gossypium hirsutum
  Clone ID: LIB3145-022-Q1-K1-E5.pep
CIDKLAQVGLKLWVLTGDKVESAINIGYACSLLRQGMKQICITEISSDAKEVWFLLCLYAHAFACKRTGIFLQEIDFIDANVW

SEQ ID NO: 92538 - protein, 145 aa, Gossypium hirsutum
  Clone ID: LIB3145-022-Q1-K1-E9.pep
QEGDFMAKPGSPIFKCSRRMEVVYSDVYMLDDEMKWKTLPPMPKPDSHIEFAWAIVNNSLVIAGGTTEKHPITKKMILVGEVFQFNLDTLEWSVIGKLPYRVKTTLVGFWQEYLYFTSGQRDRGPDDPSPRKVIGEMWRTKLKLN

SEQ ID NO: 92539 - protein, 130 aa, Gossypium hirsutum
  Clone ID: LIB3145-022-Q1-K1-F12.pep
LEEEAAEELAPRLEVILQHGMCAFGKYQRRNIRIVYDAIGTLADAVGEKLNQPVYLEILMPPLIAKWQQVSNSDKDLFRLLECFTSIAQALGTGFSQFDQPVFQRCINIIQTQQLAKVDPISAGVHCELT

SEQ ID NO: 92540 - protein, 39 aa, Gossypium hirsutum
  Clone ID: LIB3145-022-Q1-K1-F5.pep
CVKLVCSEGSLDKEDASLDDLVSHEKLFHLRNKPRLWVE

SEQ ID NO: 92541 - protein, 70 aa, Gossypium hirsutum
  Clone ID: LIB3145-022-Q1-K1-F7.pep
HAIVPSSNPFTPSMLPTYLSRQSIKKTTLLKEHCKNDPCTNRLNINHIPVIEFDEQLIIYQAHPLTQQMF

SEQ ID NO: 92542 - protein, 107 aa, Gossypium hirsutum
  unsure (1)..(107): unsure at all Xaa locations
  Clone ID: LIB3145-022-Q1-K1-G2.pep
TXXKKQKGRHHKLHIKQQQKWPFPLKKTKLTNPNIQKKKKMGPPLLKNPTFLPLACNFIVFFLGPLNSIPCPPFSTFVTGKTLPFPNLFPFQHIPFFPVGLLPKRPP

SEQ ID NO: 92543 - protein, 39 aa, Gossypium hirsutum
  unsure (1)..(39): unsure at all Xaa locations
  Clone ID: LIB3145-022-Q1-K1-G3.pep
NCIVGVLNLEPLKRPPFNXHNFKFIHFTIFFLSFTKYLF

SEQ ID NO: 92544 - protein, 125 aa, Gossypium hirsutum
  Clone ID: LIB3145-022-Q1-K1-G5.pep
MALNFSHRPVFPANLTEDNLLSPMRIANGYLVEGVAEKNGDGCMKPCHSDHAMEDCFDYGRDKGGGDRCGSQESVSNDIIDLLPSDPFGMDITSTFTAISGWLEALEFDYSHYVRDEVGTGDRSY

SEQ ID NO: 92545 - protein, 61 aa, Gossypium hirsutum
  Clone ID: LIB3145-022-Q1-K1-G7.pep
RRKTMVFLCGKQEVKLWVLTPSFFYFFKMSLTHWEMEKLKTNKGYYISVIGAQFLAVREIR

SEQ ID NO: 92546 - protein, 85 aa, Gossypium hirsutum
  unsure (1)..(85): unsure at all Xaa locations
  Clone ID: LIB3145-022-Q1-K1-H3.pep
SEMNFRKGKYLYYARGGDYCRGMNHYLWSFLCGLGEAMYLNRTFVMDLSVCXSATYNPSNKDEEGKDFLFYXDSEHINDVTSFVE

SEQ ID NO: 92547 - protein, 60 aa, Gossypium hirsutum
  Clone ID: LIB3145-022-Q1-K1-H4.pep
THHSEVTPPYEGTLLDSSNPHSQDLKQIHFSNHSAHLINNIKIAKAFKNLQPYRNHHSKP

SEQ ID NO: 92548 - protein, 137 aa, Gossypium hirsutum
  Clone ID: LIB3145-022-Q1-K1-H7.pep
FLSPSSFSILFLLTIFQLSCALDDFHFTSCAPFDCGNLSNISYPFWTDQYNRPSYCGYGNEGYKLKCRQNQPPVMTLSSQEFYVLHLNRSHDLLTIKRVELNNTCPQPILINNVFNHTETAENITLFYDCRSRGGPN

SEQ ID NO: 92549 - protein, 57 aa, Gossypium hirsutum
  Clone ID: LIB3145-022-Q1-K1-H8.pep
TRGSHFFKLRLILGGCFQLGFYIASSLFFFFFFFFFFFFFFFFYFNLIYINRKLLNI

SEQ ID NO: 92550 - protein, 70 aa, Gossypium hirsutum
  Clone ID: LIB3145-023-Q1-K1-A11.pep
FEQSLCYCLNLYKHTGYWARCFPLNSSVHLLTQKFFNSLPIQGTHLWINTGGFFEKLSQRGLRSVKPEWV

SEQ ID NO: 92551 - protein, 90 aa, Gossypium hirsutum
  Clone ID: LIB3145-023-Q1-K1-A2.pep
GNLGHPRHNPHVGTPRTIPVCPAPCSRPCSTPLVLHNFMACELDKETAEAACMLAIKPSIFNCKGTGFFFQRYRAHIEGIILAYILTSIR

SEQ ID NO: 92552 - protein, 62 aa, Gossypium hirsutum
  Clone ID: LIB3145-023-Q1-K1-A4.pep
TSLITQTLLRGSISTTSQFFANFANKTKTKTLLHITSFLLLLRGRASSSFQSQLTSKMTKLP

SEQ ID NO: 92553 - protein, 56 aa, Gossypium hirsutum
  Clone ID: LIB3145-023-Q1-K1-A7.pep
LSQVAKASMLRYLCSIMLDTRTCTLLPCFQSYKRLSVASIATLVRELSNIQLLVQG

SEQ ID NO: 92554 - protein, 85 aa, Gossypium hirsutum
  Clone ID: LIB3145-023-Q1-K1-B1.pep
KDRGGVSRGTRFTSAGMRGQSFFMGKPSSISRGVGSNTSDWETPGATLLRELGENPLFAKGEYYKKAPPMGPSNNLAPLKVKGDP

SEQ ID NO: 92555 - protein, 53 aa, Gossypium hirsutum
  Clone ID: LIB3145-023-Q1-K1-B11.pep
EGVPKQDFHNQTSRKYLQRRGMRMTNITGTCQMKPFPIDRILPCLLFTYLLRL

SEQ ID NO: 92556 - protein, 74 aa, Gossypium hirsutum
  unsure (1)..(74): unsure at all Xaa locations
  Clone ID: LIB3145-023-Q1-K1-B2.pep
KGXXXXXXXXVWVFCTVFVFSSYTNQVPAFLLVVACHGKRETFWGAKFLTPYLKACVRTSITYSPIYWLDSCRL

SEQ ID NO: 92557 - protein, 29 aa, Gossypium hirsutum
  Clone ID: LIB3145-023-Q1-K1-B6.pep
MYTQCLKKKRKNTVNFPTDNSPNSIVFSS

SEQ ID NO: 92558 - protein, 34 aa, Gossypium hirsutum
  Clone ID: LIB3145-023-Q1-K1-B8.pep
RQILPSSSPPKGGESFESMLQSESTLLVISYKLG

SEQ ID NO: 92559 - protein, 63 aa, Gossypium hirsutum
  unsure (1)..(63): unsure at all Xaa locations
  Clone ID: LIB3145-023-Q1-K1-C11.pep
ACTLFFLGNXAYFFLCHSHYQTQKKAPDAINNNNQATRTTHQVKVLTIKPVMFNNVWASICHN

SEQ ID NO: 92560 - protein, 115 aa, Gossypium hirsutum
  unsure (1)..(115): unsure at all Xaa locations
  Clone ID: LIB3145-023-Q1-K1-C12.pep
MNTFSMDIARKIMQIPLAKTEYEDFQVWRGELSGEFXVRSAYKLLQESNMDPNNYFIQTEIKNFYKKLWKLYIPSKVTLTVWRISWNFIPSLVNLKQKKVVVDTQCPRCHQDEQQ

SEQ ID NO: 92561 - protein, 58 aa, Gossypium hirsutum
  Clone ID: LIB3145-023-Q1-K1-C4.pep
KWSQCHRNHGTNNSNKLFIPARGLTKNGENPGHVLQCYSVSSVFYKFRSVYSFEVGYL

SEQ ID NO: 92562 - protein, 62 aa, Gossypium hirsutum
  Clone ID: LIB3145-023-Q1-K1-C5.pep
CKARTQTINWYLSLGGGHAFSGGGGVDSTLDTMTTLPINHSFSQRSKNYLVSILNIKQRRRF

SEQ ID NO: 92563 - protein, 63 aa, Gossypium hirsutum
  unsure (1)..(63): unsure at all Xaa locations
  Clone ID: LIB3145-023-Q1-K1-C8.pep
IGSFLTAPPPFFFSFFFXXPFFFFFFFFFFFFFFFFFFFFFFFFFFFFFXXCVYLLLYIFTSI

SEQ ID NO: 92564 - protein, 81 aa, Gossypium hirsutum
  Clone ID: LIB3145-023-Q1-K1-C9.pep
RNCHLMYHFGSINIILNFEEFYLLSMYVYIEVYTVVIPYNHVRRSYMEFLFWVKFWNMGKTRRCHTKKKIVIYNIIHVGRE

SEQ ID NO: 92565 - protein, 70 aa, Gossypium hirsutum
  Clone ID: LIB3145-023-Q1-K1-D11.pep
IRAKIEVHLVTSVSGLSEMCGLLLNMDHLCIHARCERYLYTFMNWSGRLLAVGSESYVMRGLPSFTEHYT

SEQ ID NO: 92566 - protein, 131 aa, Gossypium hirsutum
  unsure (1)..(131): unsure at all Xaa locations
  Clone ID: LIB3145-023-Q1-K1-D7.pep
MEFEDQEEQEEEMGLAPSYDPLANSSRVKMSGVEPGSITPTGQQQQQQQRKPRYRECLKNHAVGIGGHAVDGCGEFMPAGTEGTLDALKCAACNCHRNFHRKETELGSPHSVPMTDLYXHHPHHQPPQFTP

SEQ ID NO: 92567 - protein, 59 aa, Gossypium hirsutum
  Clone ID: LIB3145-023-Q1-K1-D9.pep
VKLFGLEPGTTWRNEALFLAMMKILENTECDCAKTVEILMQCELPYRSYGFMLFWTRTT

SEQ ID NO: 92568 - protein, 57 aa, Gossypium hirsutum
  Clone ID: LIB3145-023-Q1-K1-E10.pep
QFMVSSQHCCALEVNLLAVTMPVTALRSVGDGIVGFCQHCVKIDSRVSRYQCSIPSS

SEQ ID NO: 92569 - protein, 49 aa, Gossypium hirsutum
  Clone ID: LIB3145-023-Q1-K1-E12.pep
EILIKIKTKHKNNTIKPSHRWIHEPMEQPSSMVFSTTNKTSEAQIRVNR

SEQ ID NO: 92570 - protein, 50 aa, Gossypium hirsutum
  Clone ID: LIB3145-023-Q1-K1-E2.pep
WGQTKKATQGPGHFFLSNLIRFNFCTLIILSKPSSKLSSSSNQLQLLNKF

SEQ ID NO: 92571 - protein, 56 aa, Gossypium hirsutum
  unsure (1)..(56): unsure at all Xaa locations
  Clone ID: LIB3145-023-Q1-K1-E7.pep
QFLAIPLYYCFINLTSRMVIKEFAYMHVKIHCMLFKELFSNXIGSFVYKSDTEYAI

SEQ ID NO: 92572 - protein, 59 aa, Gossypium hirsutum
  Clone ID: LIB3145-023-Q1-K1-E9.pep
IMCSARFFYFSRCASFSSVAISLLINHKHWHNTLTNSCKTQTVIQVGFMTDFNDSALSY

SEQ ID NO: 92573 - protein, 89 aa, Gossypium hirsutum
  unsure (1)..(89): unsure at all Xaa locations
  Clone ID: LIB3145-023-Q1-K1-F1.pep
MSTVCDVQLHQRNSYDLIGEDIHGDALIIAEHQIASCPXVRVERVLLGWAYWYDIFWVFASKWLFHESVMIVVARGDRSGEDGIPMLLK

SEQ ID NO: 92574 - protein, 62 aa, Gossypium hirsutum
  unsure (1)..(62): unsure at all Xaa locations
  Clone ID: LIB3145-023-Q1-K1-F11.pep
SASFYFYFKGHFISVDTCPSIPKAFEHPNRTLDIKQXNVRTPFPVTPGSRRLQKLIWQSRGG

SEQ ID NO: 92575 - protein, 101 aa, Gossypium hirsutum
  Clone ID: LIB3145-023-Q1-K1-F6.pep
QYTNKVLHICSFMFHRTLLRCIDNLLPCSPSHKLSFSFIPLTIQNYTNQPALGFRSFFKTRQQIEILLKASMALNLKWEKIRKEAYVFNQNLLTVDAWEQV

SEQ ID NO: 92576 - protein, 72 aa, Gossypium hirsutum
  Clone ID: LIB3145-023-Q1-K1-F9.pep
VLIGIGHPGVNFFAFVSRRPFLNQMDARIHRECLMQGGTVAHAIPGTRPAIYADGILRLGKHSGPPALYNCT

SEQ ID NO: 92577 - protein, 140 aa, Gossypium hirsutum
  unsure (1)..(140): unsure at all Xaa locations
  Clone ID: LIB3145-023-Q1-K1-G3.pep
PRVRLDVVYNASNNELVRTQTLVKSAIIQVDAAPFKQWYLQHYGIDIGRKKKMASKKEATEEPEGAAEETKRSKHVARKLEKRQKDRKXLDPHVEEQFGGGRLLACISSRPGQCGRADGYILEGXELEFYMKKMYKKEGK

SEQ ID NO: 92578 - protein, 48 aa, Gossypium hirsutum
  Clone ID: LIB3145-023-Q1-K1-H1.pep
MIWAIRAFDVNGLWAINIIFGFNFGLLGPELNRPITCYLAHGEPGRVG

SEQ ID NO: 92579 - protein, 112 aa, Gossypium hirsutum
  unsure (1)..(112): unsure at all Xaa locations
  Clone ID: LIB3145-023-Q1-K1-H12.pep
CIDAIGTGWMVXYIPMLEFDCRGFPLASEGYAYSEGLLRINLXPLSKPXDTCYTLAPYIAYFESLPVHENTEEYRSKTELFVDAYLVNVKPVQQHEHEVTTFIGLYRYKVRD

SEQ ID NO: 92580 - protein, 47 aa, Gossypium hirsutum
  Clone ID: LIB3145-023-Q1-K1-H3.pep
PYAQFSKRAFTYYRDLGMIKISTSIDKVHPVNTDPSLSPNVQAQVAV

SEQ ID NO: 92581 - protein, 70 aa, Gossypium hirsutum
  Clone ID: LIB3145-023-Q1-K1-H5.pep
EYRKFHSFFPHQPIALYKSAKAANKGIGKTHIKAEFKVHSVNMKNALNISTGFLCLFHHMFIGQNTRKMD

SEQ ID NO: 92582 - protein, 76 aa, Gossypium hirsutum
  Clone ID: LIB3145-023-Q1-K1-H6.pep
SAHSVSKRAVESIRLEPHRNRNYQCALAPITALSDAPAAMMELNSLFMSMGYPWIITRTADPCVLRLTFGKCPSVV

SEQ ID NO: 92583 - protein, 108 aa, Gossypium hirsutum
  Clone ID: LIB3145-023-Q1-K1-H7.pep
LKFGSLLLETQKAFFVSLSNPSSLSVCTLTHRHTPASDNRSKESSKPPLSLLQIRVHKHSLELHEINTQVSNYLKLDLCHWLLDRLGNSVMASLPSHCWGSRTKTQKI

SEQ ID NO: 92584 - protein, 72 aa, Gossypium hirsutum
  unsure (1)..(72): unsure at all Xaa locations
  Clone ID: LIB3145-024-Q1-K1-A12.pep
EGRGRCHCQSASLFKYVQLDIAKAPKXQHIEIFDCNCNMILRSRFYNPLLDRQANQKQTKKWIFVVGLTSLG

SEQ ID NO: 92585 - protein, 81 aa, Gossypium hirsutum
  Clone ID: LIB3145-024-Q1-K1-A3.pep
GSLGYTVLHNSSCQHAAPTFINLMNSAILRLATRDKNMTIRARYHPLSMTKSLRLQHQDLGAFSAAIIVNIAYLFISCFIC

SEQ ID NO: 92586 - protein, 44 aa, Gossypium hirsutum
  Clone ID: LIB3145-024-Q1-K1-A6.pep
KKLIKGKKNTFPLSYLNRIWVATSMAMVQGHGKIQCQNCKSGIK

SEQ ID NO: 92587 - protein, 44 aa, Gossypium hirsutum
  Clone ID: LIB3145-024-Q1-K1-B1.pep
ADAFADSFVIFVLKIFHDLHGVVMNFGGSFCIINETAVRYVPLS

SEQ ID NO: 92588 - protein, 37 aa, Gossypium hirsutum
  Clone ID: LIB3145-024-Q1-K1-B2.pep
IHSLKLLIHGNELTNCTPGLPLFLRHPMIFSPLFNFS

SEQ ID NO: 92589 - protein, 57 aa, Gossypium hirsutum
  Clone ID: LIB3145-024-Q1-K1-B6.pep
CMIKLRIYTCLLRRVVWLVNLKNKGGTILYWLRYKLKFIMNEKQLCLLCLILKIYII

SEQ ID NO: 92590 - protein, 67 aa, Gossypium hirsutum
  Clone ID: LIB3145-024-Q1-K1-C10.pep
SVKIFYTIVFGISILRLMLLFDPGVSMNMSSNILPLEPRLCLSHKKDYLQKIKVALASDFMITKRER

SEQ ID NO: 92591 - protein, 35 aa, Gossypium hirsutum
  Clone ID: LIB3145-024-Q1-K1-C2.pep
KQSIRITPFNQLALSTISPASGVKGDPQVIDRESV

SEQ ID NO: 92592 - protein, 50 aa, Gossypium hirsutum
  Clone ID: LIB3145-024-Q1-K1-C4.pep
RGLLTTTVMGRVIRAQRKGTVSFLRSYQLTIVFLHFVFLLFILYFLYLIL

SEQ ID NO: 92593 - protein, 85 aa, Gossypium hirsutum
  unsure (1)..(85): unsure at all Xaa locations
  Clone ID: LIB3145-024-Q1-K1-C5.pep
ILIHEPRINVFNTRSFCLKGVIQTHKKEVKQAIFGNCLDLNLMQHQSLILHQVCYKHHLTRFXSHCIKKDKNKSMFPYAWVGPGF

SEQ ID NO: 92594 - protein, 45 aa, Gossypium hirsutum
  Clone ID: LIB3145-024-Q1-K1-C7.pep
INRLTHHLCHSFASKLTLPNKFKAKGLKFPSIAVRETRTRGSARL

SEQ ID NO: 92595 - protein, 76 aa, Gossypium hirsutum
  unsure (1)..(76): unsure at all Xaa locations
  Clone ID: LIB3145-024-Q1-K1-D11.pep
ILPLGLGVLKDCKDFKKIPQSGWDKLYISFVPADSGKTTAKTTKANVRNGTCKWADPVYETXKLXQDIKTKQFDGK

SEQ ID NO: 92596 - protein, 59 aa, Gossypium hirsutum
  Clone ID: LIB3145-024-Q1-K1-D2.pep
RFSFPNQSFHFSARERERTYVSFTSIISLGFLNSIPLFPCSPILQIRSVCSCCSSVSIR

SEQ ID NO: 92597 - protein, 49 aa, Gossypium hirsutum
  Clone ID: LIB3145-024-Q1-K1-D8.pep
FFIIFILFLIYYFLIFYIFLFFFIIYLIYIFYTMIIKFIFTIFILYYIL

SEQ ID NO: 92598 - protein, 56 aa, Gossypium hirsutum
  Clone ID: LIB3145-024-Q1-K1-E1.pep
WCRQALLSYNQNKLTPTPTIRLCTFNQQKPCRFFFISTSNFQSRPLMLKFQTKTIF

SEQ ID NO: 92599 - protein, 89 aa, Gossypium hirsutum
  Clone ID: LIB3145-024-Q1-K1-E11.pep
VTYFFIFGVINVRLLPTGSSWEANPEAAFMFDAANGHENDGDLLLHGHATGNKSSFCIYYIGFHLLYILILPSDWQRIMSCSFLINFPC

SEQ ID NO: 92600 - protein, 66 aa, Gossypium hirsutum
  unsure (1)..(66): unsure at all Xaa locations
  Clone ID: LIB3145-024-Q1-K1-E4.pep
FDIYIFNLLIFLFIYFYKLIILYIXIYLHILFFFIIYILFSIFNIYIYYILFIKFFIFYIIIFYYI

SEQ ID NO: 92601 - protein, 67 aa, Gossypium hirsutum
  unsure (1)..(67): unsure at all Xaa locations
  Clone ID: LIB3145-024-Q1-K1-E6.pep
SKYHLXDVIIGKIYLLLVRRKIKNMDLEIRCIESTGSGAISHVETETLAKYELMDGAPVRGESNSIR

SEQ ID NO: 92602 - protein, 43 aa, Gossypium hirsutum
  Clone ID: LIB3145-024-Q1-K1-E7.pep
LCMHLKTIRQVKCASWTEQGKKHHRAHTLTGAPLKRTWKPVRR

SEQ ID NO: 92603 - protein, 62 aa, Gossypium hirsutum
  unsure (1)..(62): unsure at all Xaa locations
  Clone ID: LIB3145-024-Q1-K1-F4.pep
LXEANILAGLCVILSASLAEVLNGXPEFTVHITHKLKHHPGQIEAASLMEHILVGSSIVKAV

SEQ ID NO: 92604 - protein, 51 aa, Gossypium hirsutum
  Clone ID: LIB3145-024-Q1-K1-F6.pep
TPFLITPNLKIIRRGFIQRDTENHLGYILRKGILYQLLYPCSTVRINIFRN

SEQ ID NO: 92605 - protein, 57 aa, Gossypium hirsutum
  Clone ID: LIB3145-024-Q1-K1-G5.pep
SGLSQFLNHSHGKWVISDVYQGSFPNGAEVCSFRPSSFLTVRSWHELSNLSTIFLLS

SEQ ID NO: 92606 - protein, 59 aa, Gossypium hirsutum
  Clone ID: LIB3145-024-Q1-K1-G8.pep
NIKWHTNKFTLPLDLAKTNNSCTLVHMSIYAFKESYRSSQSPPCWVKLKSRLHYMVVPF

SEQ ID NO: 92607 - protein, 55 aa, Gossypium hirsutum
  Clone ID: LIB3145-024-Q1-K1-H1.pep
NTGEKLGLVPPAVGEAAGASQALKAHIEAAATMMAVETFFMSMAYKGIIKRTGTE

SEQ ID NO: 92608 - protein, 56 aa, Gossypium hirsutum
  Clone ID: LIB3145-024-Q1-K1-H5.pep
AHSSVKICSFFLKLPRSLPGVYHMNLSQTEPLLMKIDLYFFMLIVYPSFESNIETP

SEQ ID NO: 92609 - protein, 105 aa, Gossypium hirsutum
  Clone ID: LIB3145-024-Q1-K1-H6.pep
LKSEGHKRRQVCTDNFDYRHWLIHEERRTRVVISLNRAFDQQLIKSASGLLVRNMQGDILVSKSVIHENVASPFAAEAHAGEQAVRLGILLGFHECDINKDSRTV

SEQ ID NO: 92610 - protein, 65 aa, Gossypium hirsutum
  Clone ID: LIB3145-025-Q1-K1-A12.pep
NIIYIFINIKELNHIFIIIKRQCAMLITRPCSRLKLAFAQIIISDDYLVDIMDEFKNLFKGLYFT

SEQ ID NO: 92611 - protein, 60 aa, Gossypium hirsutum
  Clone ID: LIB3145-025-Q1-K1-A3.pep
ILFHVVDVLLLLRHQGFRARNCPFQSTHKYLIDLNARKVGSGIIRSLAAKKSYRLSSELY

SEQ ID NO: 92612 - protein, 129 aa, Gossypium hirsutum
  unsure (1)..(129): unsure at all Xaa locations
  Clone ID: LIB3145-025-Q1-K1-A6.pep
MESLSSLYSDNQNKQSKANASPMSATALLQKAAQMGSTRSNPSFFGNSFGVMSSSSSHTAPTFMASSSASMSATSNKLDKLMLQTGGKPSEPSLLSMHHPCSNSFAQSLTRDXLXMSNDQSPRXFLPQE

SEQ ID NO: 92613 - protein, 87 aa, Gossypium hirsutum
  Clone ID: LIB3145-025-Q1-K1-B11.pep
NSTYQTSMLALSLVKTAKDPLCSSLTKALPAKVISYTLSPSFPSSAPASSFHETQVTKPWQARSRSMRSRREGASGFIARIFDRTRG

SEQ ID NO: 92614 - protein, 123 aa, Gossypium hirsutum
  Clone ID: LIB3145-025-Q1-K1-B7.pep
PFSGQNGDVRSPKRQCTDYRSVLVERNSFTSPAKDRLLAFSDLRKAPLQSVFASPTRPNPVGGGETCAETGINIFFSKINKLAAVWINGMVERLQLSQEIRESVYFLFQQILSQRTSLFFNHH

SEQ ID NO: 92615 - protein, 76 aa, Gossypium hirsutum
  Clone ID: LIB3145-025-Q1-K1-C10.pep
RRQQEAELKLIEEETAKRVEEAIQKKVEERLNSEEIKQEIQKRLEEGRRRLNDEVAAQLEKEKEAAILEARQKEEV

SEQ ID NO: 92616 - protein, 65 aa, Gossypium hirsutum
  Clone ID: LIB3145-025-Q1-K1-C11.pep
LKIFTSPSAQKHFSAFNKLLPKRGSFFTAFQRKAFFRASVRLLSNDVLSLSHGRHFRSSIDWNAL

SEQ ID NO: 92617 - protein, 131 aa, Gossypium hirsutum
  Clone ID: LIB3145-025-Q1-K1-C12.pep
GKVVIATDNLIKLSTDGITWNPGSAGFDSHGNLAFMICDPMKLATSPNTKSSGTSSSSSSSWKKDTPMQFGIPIPVICDWLNQHWEGSLDEVTKPKLPIIRLMSSSQKSEHSSASFTMRQVFKVTRRRYDI

SEQ ID NO: 92618 - protein, 55 aa, Gossypium hirsutum
  Clone ID: LIB3145-025-Q1-K1-C3.pep
PASNLQHPPKLLKIVKQRENAKCSVVLVCIEVNIKDQIWTINAINKFAYAKAEIA

SEQ ID NO: 92619 - protein, 108 aa, Gossypium hirsutum
  Clone ID: LIB3145-025-Q1-K1-C5.pep
SNEFGHTCGFQKHVVHPILDQNFFLDTSHKRRLKEEYEIEPWTFEQHVGEAIIIPAGCPYQIRNVKSCVNVVLDFVSPENVTECIRLINEFRLLPDDHKAKAKKFEVE

SEQ ID NO: 92620 - protein, 80 aa, Gossypium hirsutum
  Clone ID: LIB3145-025-Q1-K1-D10.pep
LPRAQNLAPFKPPPPSIFFFFYYFFSFPRGSYCPLVPLIFKTWKLLSGKSYYHFFGKKKKNQPPKKKKVKIKNIKKPDAW

SEQ ID NO: 92621 - protein, 116 aa, Gossypium hirsutum
  Clone ID: LIB3145-025-Q1-K1-E10.pep
LQRVNQERYNRNVCWKGNLNTAIHQLYTKKGGFNIPFDLNISDTFPKLIEIWKRNPQEILESKNLSRMEIYKCSSLNYIFTPSMLLSLKQLRRIESKECNAMEQVIKERRGGSNHT

SEQ ID NO: 92622 - protein, 60 aa, Gossypium hirsutum
  Clone ID: LIB3145-025-Q1-K1-E2.pep
PLYRKYTNTCIQGVSSVKCLYTINSCSSSSQAKSIMPVNIVHVTRVQDSKVNIRYGYVYV

SEQ ID NO: 92623 - protein, 66 aa, Gossypium hirsutum
  Clone ID: LIB3145-025-Q1-K1-F12.pep
QLMNGALMLRGRRMFPMHVAEELVEFTSQYQRIRYNTFFFSCTYISYRFTFYKFKSLCSAAESKFY

SEQ ID NO: 92624 - protein, 42 aa, Gossypium hirsutum
  Clone ID: LIB3145-025-Q1-K1-F4.pep
IRVLDGEPGFLSSIFYYETQTMLFKLLATHFGLQPTRPRTRG

SEQ ID NO: 92625 - protein, 104 aa, Gossypium hirsutum
  Clone ID: LIB3145-025-Q1-K1-F9.pep
REKITTICRFTLLLTVLGSSICGHSRELAGSPTPSPENSGLIAGTRRPGSLPASRDSKCKQCEPRMPVQASVRAVEIEQNDCYPQCEHACAKRIYTHLNYYQHI

SEQ ID NO: 92626 - protein, 98 aa, Gossypium hirsutum
  Clone ID: LIB3145-025-Q1-K1-G1.pep
YSSPLFRVRTANAIQERVQVHNTGPSWVPGFIVMSIEDGNEGIPGLSQLDPIFSYVVVVFNACSTEESFTIPTLRGRTLQLHAIQVTSTDETVKKSCY

SEQ ID NO: 92627 - protein, 70 aa, Gossypium hirsutum
  Clone ID: LIB3145-025-Q1-K1-G12.pep
PASRLFRKESESSSFPLVPQNFCLLAHVSTLRHLYECPPTKHSTCNVIRRLAGKGPWVQKGAVTAPIPNK

SEQ ID NO: 92628 - protein, 99 aa, Gossypium hirsutum
  unsure (1)..(99): unsure at all Xaa locations
  Clone ID: LIB3145-025-Q1-K1-G2.pep
PSDKRKLDWNTMMKIASTCCKRYGVLXDTCKTTGIYRDVKCLNISIGAGYHTKLSDFDWAQLRPVGDKTHVSTTVISTYRYWSTKXSYAGXLTLKSDVY

SEQ ID NO: 92629 - protein, 74 aa, Gossypium hirsutum
  Clone ID: LIB3145-025-Q1-K1-G3.pep
IGMPCQASKLSYFKSKPPLLRCTPAVIEFVFYNPKTLCILLHVCSFMSWHSSLVCTFIFFFLIFILYFLLSDAW

SEQ ID NO: 92630 - protein, 60 aa, Gossypium hirsutum
  Clone ID: LIB3145-025-Q1-K1-G5.pep
NDMLITLSVNYTLFLTVIQKLGQTKEARFAHSKQYHNGLFMHLPMRVVGDGMVCASRTRG

SEQ ID NO: 92631 - protein, 71 aa, Gossypium hirsutum
  Clone ID: LIB3145-025-Q1-K1-H7.pep
ESRHCLQVQTMQSIRALIFVINYILMTRIRRKHMRILGVTAKFVQVSGRYKVRTLSCDLLWIMRTCAESGS

SEQ ID NO: 92632 - protein, 120 aa, Gossypium hirsutum
  unsure (1)..(120): unsure at all Xaa locations
  Clone ID: LIB3145-026-Q1-K1-A9.pep
MAVSGFEGFEKRLELHFFGDDNDPTVTTMGLRLLDFESLENVLRVVQCTVVSAVGNHFFDAYVLSESSLFVYPTKIIIKTCGTTQLLKSIRPLIHLAKNXRLTICGCRYTRGTFIFPKSQ

SEQ ID NO: 92633 - protein, 116 aa, Gossypium hirsutum
  unsure (1)..(116): unsure at all Xaa locations
  Clone ID: LIB3145-026-Q1-K1-B1.pep
MSTGEGKTVCVTGASGYIASCLVKHLLLRGYTVKASVRDPSDPRKTQHLLALEGAEERLKLFKANLLEEGSFDSGVEGCDGVFHTASPFYHDVTDPQAELLDPAVRGTLXVLNSCA

SEQ ID NO: 92634 - protein, 62 aa, Gossypium hirsutum
  Clone ID: LIB3145-026-Q1-K1-B10.pep
QTHWKLILHALCQTAIVLVQITVVLTVIRRLQTYALNVYKPLLEGTRTIWLHYSQILFSLLL

SEQ ID NO: 92635 - protein, 55 aa, Gossypium hirsutum
  unsure (1)..(55): unsure at all Xaa locations
  Clone ID: LIB3145-026-Q1-K1-B2.pep
FRFHPACIEMTAEEAKRLDHFFCETCSSXGKKKLRNSHAACRPSDTKVDTKRRRR

SEQ ID NO: 92636 - protein, 47 aa, Gossypium hirsutum
  Clone ID: LIB3145-026-Q1-K1-B5.pep
LQNEIHKTSIERETLKLEMMSAQTMIDILQSKIDFLSKENEDLKKSN

SEQ ID NO: 92637 - protein, 51 aa, Gossypium hirsutum
  Clone ID: LIB3145-026-Q1-K1-B6.pep
LYDYNFNYIISECGWKLHLHCYNCHMIVLYLSGEQRGGGGSSWLVVNIFFH

SEQ ID NO: 92638 - protein, 60 aa, Gossypium hirsutum
  Clone ID: LIB3145-026-Q1-K1-B9.pep
RFKSQNPSYADGDLVVNNTEPVFLFLFVSALVFSFLNISIILLYNSGLRFIYDQINQFLI

SEQ ID NO: 92639 - protein, 116 aa, Gossypium hirsutum
  Clone ID: LIB3145-026-Q1-K1-C7.pep
KSNIKLNQNLTQIQDQKIQIITIQFTIQLQKLVAQLQDQARKAQNVKVSETLGPSPSCRSQAPALAPYDAPTTSVRLSSPQRTTPVRPTPGASIPRTCKRTNTTAAKKRKRNIAFC

SEQ ID NO: 92640 - protein, 119 aa, Gossypium hirsutum
  Clone ID: LIB3145-026-Q1-K1-C9.pep
MAFLSKIGSILRQTTSMHVNAKLSASGPGLFQVLRSMSTSPSSKLFVGGISFQTDDQSLREAFSKYGEVIDARIIMDRETGRSRGFGFVTYTSSEDASSALQALDGQVLHGRQVRVNYA

SEQ ID NO: 92641 - protein, 61 aa, Gossypium hirsutum
  unsure (1)..(61): unsure at all Xaa locations
  Clone ID: LIB3145-026-Q1-K1-D10.pep
AQLGVWDXGSKNVXTPELLFSKXPGCTIRRSVWDHSPCSXSTAQRTDGSLSSSSSERTSDK

SEQ ID NO: 92642 - protein, 76 aa, Gossypium hirsutum
  unsure (1)..(76): unsure at all Xaa locations
  Clone ID: LIB3145-026-Q1-K1-D12.pep
DFDSVIIQRXLXGSHXGFRQRITSDHHLKSKIQSDSKGSYCKLKYNGYYQTTSAPIFTIRASIKGNKSNIQRLYRQ

SEQ ID NO: 92643 - protein, 80 aa, Gossypium hirsutum
  Clone ID: LIB3145-026-Q1-K1-D2.pep
FRKLVHLENDRPFLPRPCLVKCSISIIALPLSFTTNGSTLTTVVLYLIHSRQSFFMFYGFIYISCKDLYLIRIHYITTHF

SEQ ID NO: 92644 - protein, 117 aa, Gossypium hirsutum
  unsure (1)..(117): unsure at all Xaa locations
  Clone ID: LIB3145-026-Q1-K1-D3.pep
MAEASRIFHSTLFPTLSLQLSKPCYNSHVYPSLSLKKAPRPVQCSVSTSETKSTSSNATQEVPWGCDIDSLENAEALQKWLSNSGLPPQKMAIDKVAVGERGLVALKNIXKGEKLLF

SEQ ID NO: 92645 - protein, 51 aa, Gossypium hirsutum
  Clone ID: LIB3145-026-Q1-K1-D7.pep
IPDIQYTKLIMFFSHSKLERENTHLICIYAHIYIIKIRIQFHAVKKGKARK

SEQ ID NO: 92646 - protein, 65 aa, Gossypium hirsutum
  Clone ID: LIB3145-026-Q1-K1-D8.pep
LAMWCKLNFELDRDSSFSHFHGQWTNLSPWTIVEFDCRHYFRPLFEFSSSLRIRNHKNINQFSFF

SEQ ID NO: 92647 - protein, 57 aa, Gossypium hirsutum
  Clone ID: LIB3145-026-Q1-K1-E10.pep
DKVQPVTLNLDSNASNCCRIGSHSVLSHRLFYREVYIRTCWKLGPLCIVLEPDARYL

SEQ ID NO: 92648 - protein, 64 aa, Gossypium hirsutum
  Clone ID: LIB3145-026-Q1-K1-E11.pep
SSLLTFPFAWKVGLEGLPNGGKTEFLSRGKGKFYYSKTFVGGNLNLKEKPWIVKVVGSRRKRNL

SEQ ID NO: 92649 - protein, 130 aa, Gossypium hirsutum
  Clone ID: LIB3145-026-Q1-K1-E8.pep
PEPPSSSRSQDDSSSSSSLIGKRTKHSQDDELSSPVNRPTPGSSGASPESRYGKNSSWGCSLSLTEYKVCKNDGLADASTQTEENTDRPKSRETCTRGVSTDDGSLEPECNENFQNLVPNACVKDNPEIC

SEQ ID NO: 92650 - protein, 59 aa, Gossypium hirsutum
  unsure (1)..(59): unsure at all Xaa locations
  Clone ID: LIB3145-026-Q1-K1-F10.pep
TYRXILQGPAFISIIPFTVFKLQKNRNIPYQGGFILSDQLIQLLSQPVEFSRRKFYTKS

SEQ ID NO: 92651 - protein, 53 aa, Gossypium hirsutum
  Clone ID: LIB3145-026-Q1-K1-F3.pep
LEVLCVLSYLAPLQDQAYLKIDNPLPCRGVTRAVFTVPAIGIASILLLINLNG

SEQ ID NO: 92652 - protein, 43 aa, Gossypium hirsutum
  Clone ID: LIB3145-026-Q1-K1-G1.pep
LLILFWVHFSSKPPMNLSIMYSEFEVDDLLLCYEFMKISTTSA

SEQ ID NO: 92653 - protein, 38 aa, Gossypium hirsutum
  Clone ID: LIB3145-027-Q1-K1-A1.pep
LGQTPNVAPLKPILLCPNCDGKTYPIRTHAQVTTQMDT

SEQ ID NO: 92654 - protein, 131 aa, Gossypium hirsutum
  unsure (1)..(131): unsure at all Xaa locations
  Clone ID: LIB3145-027-Q1-K1-B1.pep
PKVVLAVLYLMALLLPYYTLTYSLITGARLSTEDYTHTLVLTNVNIAFMNWFNNNAPSFSTLHSMAILNPHLLYFLHHLTIFXSSSQLINTXPITYSRPHTTLSLSITSGLNTSHQRTTNTLITSLTIPFS

SEQ ID NO: 92655 - protein, 112 aa, Gossypium hirsutum
  unsure (1)..(112): unsure at all Xaa locations
  Clone ID: LIB3145-027-Q1-K1-B11.pep
YPLANPTLLITPILSQGVLFLIQLASPTTTPYFSPXSQSLLQQCFHQLKQLYPQHLYQAIFHFILQSILQHQPQNCQLTLLFSIHISQQLTANFRLQQPTPCPYPSSHCVPH

SEQ ID NO: 92656 - protein, 54 aa, Gossypium hirsutum
  Clone ID: LIB3145-027-Q1-K1-B5.pep
SSPCSTCFHQSNKANFISSHLSLPTGGSVVTSLNHQSYYSTSMHSLLYCSNNYN

SEQ ID NO: 92657 - protein, 39 aa, Gossypium hirsutum
  Clone ID: LIB3145-027-Q1-K1-B9.pep
TSLISFLPFLFFKKPTIHLYINSPFNFSFFPHKKIYYNF

SEQ ID NO: 92658 - protein, 40 aa, Gossypium hirsutum
  Clone ID: LIB3145-027-Q1-K1-C1.pep
IVHSSSLSNSYLFKKSLRCLIYHLIFILTLVPLLFYNLLI

SEQ ID NO: 92659 - protein, 52 aa, Gossypium hirsutum
  Clone ID: LIB3145-027-Q1-K1-C5.pep
ILSQPLLTPWVRYNHFLTIISLFQYSIKFFANIIYQSTYYYSIYNPLNFLSL

SEQ ID NO: 92660 - protein, 68 aa, Gossypium hirsutum
  unsure (1)..(68): unsure at all Xaa locations
  Clone ID: LIB3145-027-Q1-K1-C9.pep
SSIIYPLLFITPILYQGAYFLIHQRTPTTXPYCSPQCQSMRQQCCHQLTQVEPQHQYQAILGFVLHSI

SEQ ID NO: 92661 - protein, 78 aa, Gossypium hirsutum
  Clone ID: LIB3145-027-Q1-K1-D10.pep
MASKRILKELKDLQKDPPTSCIAGPAGEDMFHWQATIMGPPDSPYAGGVFLMNIHFPPDYPFKPPKVSFKTNVFHPNI

SEQ ID NO: 92662 - protein, 44 aa, Gossypium hirsutum
  Clone ID: LIB3145-027-Q1-K1-D3.pep
FILNRFRLIQSTNNSFHTPNFLILYQNLIYLFYLSPHEGFGLQQ

SEQ ID NO: 92663 - protein, 63 aa, Gossypium hirsutum
  Clone ID: LIB3145-027-Q1-K1-D5.pep
FSKLYILNRSVGCHMNTYSMLLLTVLNNAILLNSILTICTTIHTRADPLICSKPYINLIDTLH

SEQ ID NO: 92664 - protein, 72 aa, Gossypium hirsutum
  unsure (1)..(72): unsure at all Xaa locations
  Clone ID: LIB3145-027-Q1-K1-E1.pep
TREIYPYPLLQNFNGKFIRSSHGIKRIFXNPHLIDILTSLTIYTDPHRRKYLLVNYQIIPSPRMFWRPEIYF

SEQ ID NO: 92665 - protein, 54 aa, Gossypium hirsutum
  Clone ID: LIB3145-027-Q1-K1-E5.pep
TSISLSNNIITSKYWSYMNMWCFENVPTLPPLGSGGFKMKQENLLGMFDDAYKG

SEQ ID NO: 92666 - protein, 96 aa, Gossypium hirsutum
  unsure (1)..(96): unsure at all Xaa locations
  Clone ID: LIB3145-027-Q1-K1-F2.pep
VGQSAKKTLWSTIHRRPFNIGINNQXLSVLAGXDRCINSSRPLLKCVYRKIGTVDSLDHIPPQNKNVNPRQGFSFRVPYPPTFRSGCGNMKRSHVS

SEQ ID NO: 92667 - protein, 33 aa, Gossypium hirsutum
  Clone ID: LIB3145-027-Q1-K1-F3.pep
GPTHAFQGIISPKGFPTQVPQTPELSVVCQFSP

SEQ ID NO: 92668 - protein, 78 aa, Gossypium hirsutum
  Clone ID: LIB3145-027-Q1-K1-G12.pep
WIINNLASNVTNKIFSLVITHHYCIKQEGGICENHCSDPGAKEEPTSYGTNTPIWNAPHGPFSTDENFPVKLTNPNTD

SEQ ID NO: 92669 - protein, 112 aa, Gossypium hirsutum
  unsure (1)..(112): unsure at all Xaa locations
  Clone ID: LIB3145-027-Q1-K1-G2.pep
MKTLYANPDLEKFDGRLRCLAQGLXGTIISPHLMDILNRITIYTDAHTGKYYWSRHHIMAYPVGFYAPELTFALYGTMXNAPPQQHIVGQLGHGAYRTLSXTLYRRPFNIWD

SEQ ID NO: 92670 - protein, 52 aa, Gossypium hirsutum
  Clone ID: LIB3145-027-Q1-K1-H5.pep
SSPEALIKCTLYNHNILFTYHFHLLDNWDITTTPFIIKSLINIYQIQYLINK

SEQ ID NO: 92671 - protein, 115 aa, Gossypium hirsutum
  unsure (1)..(115): unsure at all Xaa locations
  Clone ID: LIB3145-028-Q1-K1-A1.pep
VNPTKLRWEMLAYNCQNVERVALCGNDTDGDAEICXIALKCISPKKLCIXRCPISYHGMEALASGCPDLVKGKVTERGGVTPERAYWSRVLYGVLSGNWAMGVHLHVTADHGVLQ

SEQ ID NO: 92672 - protein, 79 aa, Gossypium hirsutum
  Clone ID: LIB3145-028-Q1-K1-A3.pep
RMQGNESTRLVCSILTMDQSCFSYKACRFCETPVPDDTPAVFICKNHRCAGRLCSSKRLFRLLFSNGTKTRGINVGTFD

SEQ ID NO: 92673 - protein, 68 aa, Gossypium hirsutum
  Clone ID: LIB3145-028-Q1-K1-A4.pep
SARASSVSAVSKRRVHLTRYRDMLASSSSPIINILEIILYTNRKNARPAHPRSVKENSPSSELAFFLE

SEQ ID NO: 92674 - protein, 124 aa, Gossypium hirsutum
  unsure (1)..(124): unsure at all Xaa locations
  Clone ID: LIB3145-028-Q1-K1-A5.pep
PTRTLGGACPAGNSSDFMRLELGDMAIPAMLLALDLCFDHLKTRETVSLVNLHSSNGHKLILVALPGYASGLITSLAVGILTHSDXPALFYLVPPTXLGPVIFISWIRKDLDVLWERTMPNLID

SEQ ID NO: 92675 - protein, 143 aa, Gossypium hirsutum
  Clone ID: LIB3145-028-Q1-K1-A9.pep
DVPGGSTYRESSFTEPGKDIAAVDSPIGRLGLTICYDLRFPEIYQQLRFNHDAQVILVPSAFTPVTGQAHWEILLRARAIETQCYVIASAQAGKHNEKRESYGDTLIIDPWGTVVGRLPDRLSTGITVADIDLSLIDSVRKKM

SEQ ID NO: 92676 - protein, 58 aa, Gossypium hirsutum
  Clone ID: LIB3145-028-Q1-K1-B10.pep
IWTTNRCLLTRYALIIGFYLLMQLSTGIRGFGYTNTSLSTIFRLLLSSTMLIILPLGC

SEQ ID NO: 92677 - protein, 46 aa, Gossypium hirsutum
  Clone ID: LIB3145-028-Q1-K1-B2.pep
IIEQYVGPIYQQYLSYVNANCLRRFLTICLFSLTPLLETPGICLIL

SEQ ID NO: 92678 - protein, 60 aa, Gossypium hirsutum
  Clone ID: LIB3145-028-Q1-K1-C1.pep
KRGCRTIVFGWAGPRHSRSQCGNTRLNILTHRRRYKAVRTQQACVCELASCIQQAPGIYL

SEQ ID NO: 92679 - protein, 123 aa, Gossypium hirsutum
  Clone ID: LIB3145-028-Q1-K1-C11.pep
SASLTIFGTDSCAAAIEAARKFHRLIHPVIHPADTQSVTFSISFPGRSHGATTGALDEPCHAPFQPALPPVTPWVSGFIHGSIHAIMNGMMAGMFADPFEEPGQDYSATYNASEDLVSALHYA

SEQ ID NO: 92680 - protein, 87 aa, Gossypium hirsutum
  Clone ID: LIB3145-028-Q1-K1-C12.pep
KNMNPTRLSTALTCTYSYIRRRNMATEKRIGAALHSSSNCQSSRKTGYGKRYPQRESSYPYYHSSRKELLERRDASLGKHRSTLKAS

SEQ ID NO: 92681 - protein, 138 aa, Gossypium hirsutum
  Clone ID: LIB3145-028-Q1-K1-C7.pep
GVPDVDKQNKTVSTFFDSAWVFNQGINEQCCLFCCGLWLIWSNRNQLLYENKITNSRDISRQITSYNLKLQGLEEKLRICEEGRLRNQDEQRTRVTIHFDVTFDQKFFRSASGLENGISEQVRYKFDKIKQMGPDIVS

SEQ ID NO: 92682 - protein, 43 aa, Gossypium hirsutum
  Clone ID: LIB3145-028-Q1-K1-D1.pep
PRVRVSSEVIFRCPVKDTQVLVLDAVSLEVTCYIDGWFNLYGS

SEQ ID NO: 92683 - protein, 136 aa, Gossypium hirsutum
  Clone ID: LIB3145-028-Q1-K1-D4.pep
ILLTLDNGVEISKRRSGSLHIFRSRCLLRSVSPQQFITVANAIDGAKQWDPDLVEARYIKDVEDNLSIIRLKFGENSKALFRKREFISYERRENMEDGTVVVAVASLPKEIAAGLLPKPNNAIRGLLVQSGWVVEN

SEQ ID NO: 92684 - protein, 85 aa, Gossypium hirsutum
  Clone ID: LIB3145-028-Q1-K1-D6.pep
FSLFEQCKNFFYFGKPPFSHIFNLLNSVFYKSYLCTKVFSFIRKHLNLLSSVKYLLYFFFFFFLFFFIFFLFFFFFFELIMKHSR

SEQ ID NO: 92685 - protein, 94 aa, Gossypium hirsutum
  Clone ID: LIB3145-028-Q1-K1-D7.pep
PMQQGGMISIEATMTPFTLIVSFPAGASKGKAKGSLYLDNDELPEMKLGNGYSTYVELYATLHHGIVNVRSEVYESKFAFNEGSIIEKGTWVGV

SEQ ID NO: 92686 - protein, 92 aa, Gossypium hirsutum
  Clone ID: LIB3145-028-Q1-K1-E1.pep
HALRKRSIRVCAFNNMVTGVQKSTAGYDPGSTYVGISLSVFSSLIYGLGRLVHRYCKVGAIGSPTAGPELGHSSAIHHVPGVKVKDSSSCAW

SEQ ID NO: 92687 - protein, 65 aa, Gossypium hirsutum
  Clone ID: LIB3145-028-Q1-K1-E12.pep
CLMWLLLRGLLRRPGGSGRMPLACLPSLLCAISMHSSISRYSLLLLTLSICLVIRLLQLIVCKLG

SEQ ID NO: 92688 - protein, 61 aa, Gossypium hirsutum
  Clone ID: LIB3145-028-Q1-K1-E5.pep
RDYFISCNHEVSRGNITVLAPKTSFEQKPRNKKYELKSEQEINLTPAPAKAKGKGKRKLNW

SEQ ID NO: 92689 - protein, 48 aa, Gossypium hirsutum
  Clone ID: LIB3145-028-Q1-K1-E6.pep
PRQHFSCLLHLPWLDPVSEKFTVSDCHSYFLSLGTGSELVGDAYAAML

SEQ ID NO: 92690 - protein, 90 aa, Gossypium hirsutum
  Clone ID: LIB3145-028-Q1-K1-E8.pep
RTRGRTRGQVSKHNNLTDLEINTARPVETSQGVDETVGEPSSRSQGILPAGEGGNADQQEAPRELEKVTESDGNVSSDTNLKSDQSNHEM

SEQ ID NO: 92691 - protein, 39 aa, Gossypium hirsutum
  Clone ID: LIB3145-028-Q1-K1-F10.pep
MCNSFHFFFFFYYFFYFFFFFFIFFFFFFFFFFYFLFFF

SEQ ID NO: 92692 - protein, 61 aa, Gossypium hirsutum
  Clone ID: LIB3145-028-Q1-K1-F11.pep
KWLCWKFEQLSVVGGISFYRESCNFVSKIMMTEQEDACMPIVCFRCMRVWIASSSPKFDEL

SEQ ID NO: 92693 - protein, 69 aa, Gossypium hirsutum
  Clone ID: LIB3145-028-Q1-K1-F12.pep
ICLCFAFQKKKKKRGKKKKKKKKKKKKKKKKGKKKKKKKKKKKKKNKIKKKKKKKKKKKKKKKKCGGPL

SEQ ID NO: 92694 - protein, 146 aa, Gossypium hirsutum
  Clone ID: LIB3145-028-Q1-K1-F2.pep
PTRPLSRTTNDLADIRGSVESLNKKLEKERNSLEKTRDRLSQNSLKISSLEEELTQTRLKLQVAKEAEIKTGVDNPLDISRELQRLSSEAEQFKKIGQAAKSEVSRAVSEIEQTKTRIKTTEMRILAAKKMKEAARAAESLALAEI

SEQ ID NO: 92695 - protein, 80 aa, Gossypium hirsutum
  Clone ID: LIB3145-028-Q1-K1-F3.pep
QAMGYILDYTLTLNPIIQCHIRFFFFVANRKRMLHFLLLNSLMSRIISPKIRTKKNVFESCKKGAGESALKSSTIPLIRT

SEQ ID NO: 92696 - protein, 112 aa, Gossypium hirsutum
  Clone ID: LIB3145-028-Q1-K1-F4.pep
TSTLVLSLAGHKRLFKRGGPGNYMALGNAAWVVNPYDLSVETGIDDCDATRMANGEVALSDSEPNSKPWIDPGAFPLTVRMLSTIPVALYAIGGGDGPLEIWVRLYMSSYLK

SEQ ID NO: 92697 - protein, 75 aa, Gossypium hirsutum
  unsure (1)..(75): unsure at all Xaa locations
  Clone ID: LIB3145-028-Q1-K1-F5.pep
ELECFQALHXQEHLAASHRINGLWEEVQKQKELEQTLQRRYGNLMSELERMQRLMNVYRAQAEKQEEVGEKESCS

SEQ ID NO: 92698 - protein, 99 aa, Gossypium hirsutum
  unsure (1)..(99): unsure at all Xaa locations
  Clone ID: LIB3145-028-Q1-K1-F7.pep
ANKILEDDHVXAIKEENNKVGDLXEELDIYGRVHGXPSRNGIVEYCGERLSRXAFTDNGLEHYYGSRSVKTPIIYXDQSLPKSKTVFWSSTCQSITYPP

SEQ ID NO: 92699 - protein, 137 aa, Gossypium hirsutum
  Clone ID: LIB3145-028-Q1-K1-F9.pep
HDITTKDSKQFNVNVLGCKNITFEHFTVTNPEHSLNTDGIHIGRSDGVTILHSEIKTGDDCVSLGDGSKNVVVNGISCGPGHGISIGSLGKFQGEEPVAGIKIANCTITNTMNGVRIKSWPASYPGTASDMHFEDIT

SEQ ID NO: 92700 - protein, 84 aa, Gossypium hirsutum
  unsure (1)..(84): unsure at all Xaa locations
  Clone ID: LIB3145-028-Q1-K1-G1.pep
AIKEENKNVGDLXEELDIYGRVHGXPSRNDMVEYCREXLISICFTLITDWMQYYGSRSVKTPIIYXDHSLTKSMTVIWSSTCQS

SEQ ID NO: 92701 - protein, 127 aa, Gossypium hirsutum
  Clone ID: LIB3145-028-Q1-K1-G10.pep
KIFGRPTRPASSFLVDLLSLLLKLKNFRNALLTDPLQCCPICLEARLTESHEKEIEGLYFLVRICFGLSVERSFVVIVSWKIKLVHVPEKVILFNEPFTVGISILRSLFVLPFYFYSSALLIIFQLK

SEQ ID NO: 92702 - protein, 51 aa, Gossypium hirsutum
  Clone ID: LIB3145-028-Q1-K1-G11.pep
RGCVLPCHHHFCFLSTFFMFRANAIRIGKDHQDRIESERVKCRASGSGIGR

SEQ ID NO: 92703 - protein, 67 aa, Gossypium hirsutum
  Clone ID: LIB3145-028-Q1-K1-G6.pep
ANAHTHIVKIESNPKSVLKKGDFRFIFSRFHTFLLILFPFLKHLKIKFKGTPYQMLWIPFCCVEIEA

SEQ ID NO: 92704 - protein, 32 aa, Gossypium hirsutum
  Clone ID: LIB3145-028-Q1-K1-G7.pep
MREFLDRKVPAHANPNVGALFLRAVTDQRSSL

SEQ ID NO: 92705 - protein, 58 aa, Gossypium hirsutum
  Clone ID: LIB3145-028-Q1-K1-G8.pep
NVINYHEDIDDSQKKTQNRYRDYLKPSAIMTLINTEAALKDHEGLQQRAEKQQKRSGG

SEQ ID NO: 92706 - protein, 74 aa, Gossypium hirsutum
  Clone ID: LIB3145-028-Q1-K1-H3.pep
EMRLVFGSIYSSGSVAYAPQVPWILSGTIRGNILFGKNLDSQRYADVLEACALHVDISLMAGHDLAYIGEKGTN

SEQ ID NO: 92707 - protein, 64 aa, Gossypium hirsutum
  Clone ID: LIB3145-028-Q1-K1-H4.pep
IIFGGSLQVHNWEPGAAFGDNCLIFGRSNSPHDIVFSITKGLTKARPVKFTGQYFMIIIEGPYL

SEQ ID NO: 92708 - protein, 49 aa, Gossypium hirsutum
  Clone ID: LIB3145-029-Q1-K1-A1.pep
TQSPWELYIPKQYNRSRYHHLYHYHIELTRSQFWQLGANISSLSFVEST

SEQ ID NO: 92709 - protein, 43 aa, Gossypium hirsutum
  Clone ID: LIB3145-029-Q1-K1-A10.pep
HLIVIFELLFVDFFYFLLSRSFRHNISYGIETIEIHQYNTISH

SEQ ID NO: 92710 - protein, 64 aa, Gossypium hirsutum
  Clone ID: LIB3145-029-Q1-K1-A2.pep
PLLHLSVSLFSSVLSQIRLFLLSDSNLLKPSTSHGFKLSFSLVGAFFFFSCQLSIVLELGFCSS

SEQ ID NO: 92711 - protein, 86 aa, Gossypium hirsutum
  unsure (1)..(86): unsure at all Xaa locations
  Clone ID: LIB3145-029-Q1-K1-A3.pep
SYRCFYESAISHIPLPGKAEWSWYYVLMQIKGCTLIASLCYGSDKRTRLYLPYGCXKFKVHNVHELQLFMMHNTTYXAEIAHDVST

SEQ ID NO: 92712 - protein, 70 aa, Gossypium hirsutum
  Clone ID: LIB3145-029-Q1-K1-B11.pep
MQGAICVCSLRLLMVAFLLVFMLKSSKHIQVILLTALISASDYLICGIRVLTSHEKGKNTQRNFSLSDAW

SEQ ID NO: 92713 - protein, 93 aa, Gossypium hirsutum
  unsure (1)..(93): unsure at all Xaa locations
  Clone ID: LIB3145-029-Q1-K1-B2.pep
NSCYYKDGGIDHPHKLTNHASLAERDAQNKEARQLPVVQLMKXLDLLVXASQCRSAHSQYPNCRKVKGLFRHGIQCTKRAPGGSVLCKKMWYL

SEQ ID NO: 92714 - protein, 41 aa, Gossypium hirsutum
  Clone ID: LIB3145-029-Q1-K1-B6.pep
PTRTVVIRERTSVDTTYGASATKKPEFLDLGVEKFVLHGGG

SEQ ID NO: 92715 - protein, 60 aa, Gossypium hirsutum
  Clone ID: LIB3145-029-Q1-K1-B7.pep
TLNEHINRSLAHIGLQVIRHTKMSIFIEFKDKLTKKILNYLNTNLLSVEKSLICHNKLWQ

SEQ ID NO: 92716 - protein, 28 aa, Gossypium hirsutum
  Clone ID: LIB3145-029-Q1-K1-C1.pep
SRSLGCNKSVNILTFGHPIQPLGRSRRV

SEQ ID NO: 92717 - protein, 38 aa, Gossypium hirsutum
  Clone ID: LIB3145-029-Q1-K1-C12.pep
YSSSPLILLFVHHTHQPVARFVNCSIGRVNERVDERVG

SEQ ID NO: 92718 - protein, 45 aa, Gossypium hirsutum
  unsure (1)..(45): unsure at all Xaa locations
  Clone ID: LIB3145-029-Q1-K1-C6.pep
KYINRMRSMKIMYIYVLGSNEYDIQYIYLMFCNNXVWTMACDVST

SEQ ID NO: 92719 - protein, 55 aa, Gossypium hirsutum
  Clone ID: LIB3145-029-Q1-K1-C7.pep
DRNGMVDPTHPSGEPIHMIRNVFNSQSREPFHQGWSQDMSVHNELIDVGGIIAAC

SEQ ID NO: 92720 - protein, 80 aa, Gossypium hirsutum
  Clone ID: LIB3145-029-Q1-K1-C9.pep
AERIISRLQSELATSMAVAAAAELPCTVKLKVWSYDIKNPCALLNVGKCRLTIPHAVLCSEMGAHFSPCGKFLAACVACV

SEQ ID NO: 92721 - protein, 32 aa, Gossypium hirsutum
  Clone ID: LIB3145-029-Q1-K1-D1.pep
HITFSVTPSTTKTWISLTRQRMITSLDTRTRG

SEQ ID NO: 92722 - protein, 61 aa, Gossypium hirsutum
  Clone ID: LIB3145-029-Q1-K1-D11.pep
IMYQLIIQSRCLNFNQYKKKYKNTFINKQLSQVLRRKGNLASKGFKEGQKKNSCMQTHFFF

SEQ ID NO: 92723 - protein, 72 aa, Gossypium hirsutum
  Clone ID: LIB3145-029-Q1-K1-D4.pep
ESPQSKLRLHKGTKNNHFEPQTTPTHLHSMPFIGFLLLTYNCYYRTDLNKRDYKYRNSVSPRPKGMIITDAW

SEQ ID NO: 92724 - protein, 36 aa, Gossypium hirsutum
  Clone ID: LIB3145-029-Q1-K1-E1.pep
LRWACFGLPLPGLERKLSGASYHVPGVKVFCSSSDA

SEQ ID NO: 92725 - protein, 78 aa, Gossypium hirsutum
  Clone ID: LIB3145-029-Q1-K1-E11.pep
RNPKASRRKGKRRSSVVVCEEKQLENYGDWQGPPPWDISLGGDGCPKFLCDVMVEGLAKHLRCVGVDAAVPHSRKPEP

SEQ ID NO: 92726 - protein, 59 aa, Gossypium hirsutum
  Clone ID: LIB3145-029-Q1-K1-E12.pep
SNCSSTPNDFTQPASYFTKRTGVVAQSLQHISHVRVHINGYLARMIDHPESTALLVRSL

SEQ ID NO: 92727 - protein, 140 aa, Gossypium hirsutum
  unsure (1)..(140): unsure at all Xaa locations
  Clone ID: LIB3145-029-Q1-K1-E2.pep
PRSWHSSCTLDGLNLLVLGGXADSRVLLSDTFLLDLSMEKPVWRXIPVAWXPPSRLGHTLSVYGGRKILMFGGLAKSGPLRFRSSDVFTMDLSEEEPCWRCVTGSGMPGAGNPGGIAPPPRLDHXAVSLPGGRILIFGGS

SEQ ID NO: 92728 - protein, 50 aa, Gossypium hirsutum
  Clone ID: LIB3145-029-Q1-K1-E4.pep
VRVCQPKCIQTSQFSSLNVIAVLLPPSDRLVIAVIPVLLLSQCYIKGLYF

SEQ ID NO: 92729 - protein, 110 aa, Gossypium hirsutum
  Clone ID: LIB3145-029-Q1-K1-E6.pep
ERSHLCHLIAFLFSLCVYFVCPKYNDFFEAFIAEKKENKNTIFILSICCSLSFFCLCLLLWFVHFFAGTGALELGYGAVLERAWLLDGTNRTALEAWLRRKGDNPRVLGF

SEQ ID NO: 92730 - protein, 37 aa, Gossypium hirsutum
  Clone ID: LIB3145-029-Q1-K1-E7.pep
VQLGLRGGSLTAIANRIGRLYKPQSGLGCLNGRPVVE

SEQ ID NO: 92731 - protein, 71 aa, Gossypium hirsutum
  Clone ID: LIB3145-029-Q1-K1-F12.pep
RMRGCSQSVHVIIALIQCFRHVCFDSDKQNERDMYTSQSYKALSRKCREVRFGLNIAQEILASSVERPSSH

SEQ ID NO: 92732 - protein, 98 aa, Gossypium hirsutum
  unsure (1)..(98): unsure at all Xaa locations
  Clone ID: LIB3145-029-Q1-K1-F7.pep
PRVRPRVRPRVRNYLGYDESNLDADVLKQLAEVVDKAEMTPADIVKXFDQNRRCKPKAVSELLEALKTRANRNLLQNGILREKNSEDIMEDEEQEKGL

SEQ ID NO: 92733 - protein, 61 aa, Gossypium hirsutum
  Clone ID: LIB3145-029-Q1-K1-G1.pep
YRTHLLSVKANPISAHQIPTIVISGRLSMNHVHKCNALLKGPTRSQFPPQWLKHNHPLSSC

SEQ ID NO: 92734 - protein, 73 aa, Gossypium hirsutum
  unsure (1)..(73): unsure at all Xaa locations
  Clone ID: LIB3145-029-Q1-K1-G10.pep
YLIYVCFLLFYLFFLIVFXFLFLCLFYVNFLFLLFFFLFLXFFYNFFILSFFVIFYFILVYLFLFFFLSISFF

SEQ ID NO: 92735 - protein, 65 aa, Gossypium hirsutum
  Clone ID: LIB3145-029-Q1-K1-G8.pep
PAFHEPMFLSLNNLHRTFSYKYSSPSSCSLGFIRSSHGCYLITNNLSFDHFPVWLHHRYLLCTSS

SEQ ID NO: 92736 - protein, 30 aa, Gossypium hirsutum
  Clone ID: LIB3145-029-Q1-K1-H10.pep
LLIILCMMHMHYHYTICFCISLNFLGYSQR

SEQ ID NO: 92737 - protein, 73 aa, Gossypium hirsutum
  Clone ID: LIB3145-029-Q1-K1-H11.pep
YAQELVSVGDKTVSLGYIIRLTGVTRVGKGMDAQEWHAACVKYILVQSDAATVVEAMSLFTEDVDAVVRTTCH

SEQ ID NO: 92738 - protein, 134 aa, Gossypium hirsutum
  unsure (1)..(134): unsure at all Xaa locations
  Clone ID: LIB3145-029-Q1-K1-H2.pep
NTDANPQKNQPGAPGKMEEVNSIAAKPTTMTRPDEAQGARAGQLXTGAKGAXEGHRTGKIGSGNAGQGYTFEEVKVLFLILMDLCRRTSGLPHPLPVSQVGSSSIQVRLHYIDGNYTVLPEVVEASLGPHMQNM

SEQ ID NO: 92739 - protein, 71 aa, Gossypium hirsutum
  Clone ID: LIB3145-029-Q1-K1-H4.pep
ADKNLEICFKMVLIQVESENKNQPTSRNFLFFFFKLSTSRKNMWVLMYKTSTTSYRVTLLFLTYFSFLGVA

SEQ ID NO: 92740 - protein, 58 aa, Gossypium hirsutum
  Clone ID: LIB3145-029-Q1-K1-H7.pep
LSPLSFLLDFAHSNSSHCTIGVDHLTHAVIATITFRRSRRAGVPFDEIGAWADRRPKG

SEQ ID NO: 92741 - protein, 56 aa, Gossypium hirsutum
  Clone ID: LIB3145-030-Q1-K1-A4.pep
MKQEMSNISFCDRHVANPCKTFGRRCSRLVKEQRARFYILRRCVTMLVCWHECGET

SEQ ID NO: 92742 - protein, 84 aa, Gossypium hirsutum
  Clone ID: LIB3145-030-Q1-K1-A6.pep
LDFTIFFWGDQGGGRGLVSSCTGAKFMGVSNSEMFLTEKDLTSSMEISFLVRRRPPLVLQQGDECQITTFQDDYDEPQQQKEER

SEQ ID NO: 92743 - protein, 60 aa, Gossypium hirsutum
  Clone ID: LIB3145-030-Q1-K1-B1.pep
IISFSAGPWLLSNLLWFAHVSFLDCTYDRPIFVLFWSPHIGHVCIIGLNVFLGGLDGTVL

SEQ ID NO: 92744 - protein, 136 aa, Gossypium hirsutum
  unsure (1)..(136): unsure at all Xaa locations
  Clone ID: LIB3145-030-Q1-K1-C1.pep
HASAHASAHASGGYIDGNITVSGFQKKQETFARISGYCEQNDIHSPHVTVYESLLYSAWLRLSADVKAETRKMFIEEVMELVELNPLRQALVGLPGVNGLSTEQRXRLTIAVELVAXPSIIFMDEPTSXLDARAAA

SEQ ID NO: 92745 - protein, 107 aa, Gossypium hirsutum
  Clone ID: LIB3145-030-Q1-K1-C10.pep
LYILEFMFHEKSNYKLKFTFHRKLIGRDKEFKLMGEKLTPLLMVPHCDETLMGYYIDDSVVNAFFKLLKKRSDKYPNVYIKHYSFDPQIATCLIKGSKLEGEVLAWF

SEQ ID NO: 92746 - protein, 96 aa, Gossypium hirsutum
  Clone ID: LIB3145-030-Q1-K1-C7.pep
EIGDGSEQKPSAVVLQLALEKEPSTTAQVGRSVFEVEYVPLWGSTSICGRRPEMEDAFATVPRFLKVPIQLLIGDRVVDGLSKDFVHQTAHFFGVY

SEQ ID NO: 92747 - protein, 85 aa, Gossypium hirsutum
  Clone ID: LIB3145-030-Q1-K1-D10.pep
NSKVLSLLVYYIYQFLCKKKKKKKKKKKKKKKKKKKKKKKKKKKKKKKKKKKKKKKKKKKKKKKKKKKRGCSFLKKKHLQTRPDN

SEQ ID NO: 92748 - protein, 63 aa, Gossypium hirsutum
  Clone ID: LIB3145-030-Q1-K1-D12.pep
NFRPGQFLLLSFRVDQCSVGCSFLHRALCLGGILISASDVAWVTTIALNIGEGVVCSLGSASN

SEQ ID NO: 92749 - protein, 51 aa, Gossypium hirsutum
  Clone ID: LIB3145-030-Q1-K1-D2.pep
LMHLQFYVVLIGVRIFDFVEKCNALIRYLCTGYCSNDACSGGRSYQPGRML

SEQ ID NO: 92750 - protein, 126 aa, Gossypium hirsutum
  unsure (1)..(126): unsure at all Xaa locations
  Clone ID: LIB3145-030-Q1-K1-D3.pep
KIGDEGLANLTGLSLLKSLELSDTEVGSSGLRHLSGLTHLETLNLSFTLVTDSGLKKLSGLTALKSLNLDARQITDAGLSALTSLTGLVHLDLFGARISDTGTNYLRCFKNLQSLEIXXGGLTDCV

SEQ ID NO: 92751 - protein, 47 aa, Gossypium hirsutum
  Clone ID: LIB3145-030-Q1-K1-D8.pep
LSVFHSCHDEATRICRLLSIRPRNHITVNPRVTKKPMLKYNQLRDHP

SEQ ID NO: 92752 - protein, 66 aa, Gossypium hirsutum
  Clone ID: LIB3145-030-Q1-K1-E1.pep
MICMQIFTDARQYVIHFGKADPVLKTGPASMIQELDVSRSLTLSERAIAVALAISLDNDYFSRHGG

SEQ ID NO: 92753 - protein, 80 aa, Gossypium hirsutum
  Clone ID: LIB3145-030-Q1-K1-E2.pep
KKNIRIRFFLKKRKSERKPYYRISKIGISVDKIRSSSALLAIKLMKVSGCAMKGPSRNRIFCFLFKFWKESKEGEEKDTY

SEQ ID NO: 92754 - protein, 118 aa, Gossypium hirsutum
  Clone ID: LIB3145-030-Q1-K1-E4.pep
QTCYKLLLGNQQKLQSNHGFQEVQMLQKSELRGKKQQSELKEEQSTEQILRRKKQKGNELFSKPMSGATNLQKKQPQMKQAETSRKGPSKHIDVTKLNGFPDGRHHQNLARTGSSKLK

SEQ ID NO: 92755 - protein, 105 aa, Gossypium hirsutum
  Clone ID: LIB3145-030-Q1-K1-E5.pep
FPLVSIGLLNQLLHLLGKSGKTESMMKLFYKIIASGVPVSFNTYSILLKNLLAAENWRKYIEVLQWMEDSGIQPSKGMFVDIVSFSQKRCGVEYADKITSAYLLF

SEQ ID NO: 92756 - protein, 131 aa, Gossypium hirsutum
  Clone ID: LIB3145-030-Q1-K1-E7.pep
ATLTRYWVNGLRGQSRHGLLKQGNPEYDAKRQALFEYYHPLEFSPAIPLEEKTKLMEEWWGKTHGLLIEGGLTYDAIKSSVANSNIAFRDGVVELFELLEEKDVPVLIFSAGLADIIEEVLRQKVHRYFKN

SEQ ID NO: 92757 - protein, 72 aa, Gossypium hirsutum
  unsure (1)..(72): unsure at all Xaa locations
  Clone ID: LIB3145-030-Q1-K1-F1.pep
LQVLMQTHSLTAPXATSQHHTTTNFYMYIYIQAPSIYLNCSLGTNSNIDIDVANQGLWFMLERVQRLNLDLI

SEQ ID NO: 92758 - protein, 49 aa, Gossypium hirsutum
  Clone ID: LIB3145-030-Q1-K1-F2.pep
ITNLSTFCDNMILVNAIRGSIILRIVDCTNGIKAVHVFFVLNRLSIYRR

SEQ ID NO: 92759 - protein, 92 aa, Gossypium hirsutum
  unsure (1)..(92): unsure at all Xaa locations
  Clone ID: LIB3145-030-Q1-K1-F4.pep
KSSLCQVLKCKGTTEEVNKKXSTLNAGEVPSTDVDEVEDSPPFLILPLVKTSLRPEFXVAVQNCWVKKGGALTVEVCAEMLGTFEHFLGVIY

SEQ ID NO: 92760 - protein, 122 aa, Gossypium hirsutum
  Clone ID: LIB3145-030-Q1-K1-F6.pep
GDQQVAPATTEPKISQAQQVNSKEEGSVSGSVVTKPAEPEEVVCQGKESCKEYIKSFLAAIPIREMQADIKKGLMASTPLHHRLQIEFHYTEFWQPKPETSATPMTTTKPLLVEVPLTEVAA

SEQ ID NO: 92761 - protein, 36 aa, Gossypium hirsutum
  Clone ID: LIB3145-030-Q1-K1-F9.pep
LSMGMSSDFVLAIEMGSTNVRVGSTIFGAREYPKKK

SEQ ID NO: 92762 - protein, 139 aa, Gossypium hirsutum
  unsure (1)..(139): unsure at all Xaa locations
  Clone ID: LIB3145-030-Q1-K1-G10.pep
HASGFFLVELGFEYAYKKTLHYVMDFIKTSKYKGLIFFRTSTPDHFENGEWHNGGTCPKTIPAXEGEVKIKDLNRILRNIELEEFEKTFAKVAHNEVNLKLLDFTNLLLSRPDGHPGPYRQFQPYSKNKTAVGQNDCLH

SEQ ID NO: 92763 - protein, 51 aa, Gossypium hirsutum
  Clone ID: LIB3145-030-Q1-K1-G8.pep
KGIVWEGIAKLLVFDEASKKFPPFLCPFHEINFPLPTKFIQEPGPFHWEFF

SEQ ID NO: 92764 - protein, 65 aa, Gossypium hirsutum
  Clone ID: LIB3145-030-Q1-K1-H10.pep
DEEEYKVGGVLISMLRDPVVKAMAATKEFDDLDQIEEEEDAERELQEAERKRLEEIEKLEKDGNQ

SEQ ID NO: 92765 - protein, 84 aa, Gossypium hirsutum
  unsure (1)..(84): unsure at all Xaa locations
  Clone ID: LIB3145-030-Q1-K1-H6.pep
HASAHASXPPSSNSLKPLLCFFISFHFELSLTFLCDLQILLLLAAFPLGMLIKIKLYAEGLKVYLQIIYKMKLLLMLARVLTST

SEQ ID NO: 92766 - protein, 63 aa, Gossypium hirsutum
  Clone ID: LIB3145-031-Q1-K1-A10.pep
KFKHVELDLFFVRERVAAGTIIVGEVPACDEIADILTKPLSHTVFTRFRQFLRVLPIETMDAC

SEQ ID NO: 92767 - protein, 75 aa, Gossypium hirsutum
  Clone ID: LIB3145-031-Q1-K1-A4.pep
MSTPARKRLMRDFKRLQQDPPAGISGAPQDNNIMLWNAVIFGPDDTPWDGGTFKLTLQFTEDYPNKPPTVRFISR

SEQ ID NO: 92768 - protein, 140 aa, Gossypium hirsutum
  unsure (1)..(140): unsure at all Xaa locations
  Clone ID: LIB3145-031-Q1-K1-A8.pep
DICTLRCIRSDMVTGDQFLEESVWDTTDAKFGTVPFSIWVVANELGTFFVRGGSRKPPRRFALKLADPYLHSGSDDTVIDAEITTFSAALFDDYGGLMVPLFNISLSGIAFSLRXRPDYSNSNVSFSLAARSYNDKYESW

SEQ ID NO: 92769 - protein, 55 aa, Gossypium hirsutum
  Clone ID: LIB3145-031-Q1-K1-B11.pep
TGGHLIPVSQLNDLYLSSKGTPLELAHRGKASGHIWTKKNSRRNSRHTKAGTSSR

SEQ ID NO: 92770 - protein, 63 aa, Gossypium hirsutum
  Clone ID: LIB3145-031-Q1-K1-C1.pep
SYLGEILYFPANSFVGVVCFLLWFLPSCPFVFTLNPCFNGVFHVKDHMFCLIGSLRLLSFILC

SEQ ID NO: 92771 - protein, 141 aa, Gossypium hirsutum
  unsure (1)..(141): unsure at all Xaa locations
  Clone ID: LIB3145-031-Q1-K1-C11.pep
IHMVYGLEPAIATWEVRLGAAATAFLHKLQKGIPPWVPLKGHEEKTYKQLQEEAIESKRRDLAVLKANDGIWPGVRIPSHALFLWASGSEMTTLLESDHMPNKYISKDLRRKLAKVIPGLRPWEVXSVEQAMDDITYSGEW

SEQ ID NO: 92772 - protein, 65 aa, Gossypium hirsutum
  Clone ID: LIB3145-031-Q1-K1-C9.pep
PKLKPETENKEAARPFDQRRMFVGRPTSRSSTFAPTYHISAHVHNATHNLNSRSWHWRVLLRRRD

SEQ ID NO: 92773 - protein, 144 aa, Gossypium hirsutum
  Clone ID: LIB3145-031-Q1-K1-D1.pep
PTRPEQADKEITNEEEAQYAAHQIFSNAARHESNHNHNYIDEDDLLRFMIKEEVDLVFPLFEGSNTGKIDRKSFTNWVIKVYKDRKTLAHALSDTKTAVKQLNKLVTVVLVVVTVIIWLLLMEIATTKVLLLLSSQLVVAAFMF

SEQ ID NO: 92774 - protein, 48 aa, Gossypium hirsutum
  Clone ID: LIB3145-031-Q1-K1-D5.pep
NGPPLFFFFFFFFFFFFFFFFFFFFFFFFFFFFFFFFFFFFFFFFFFF

SEQ ID NO: 92775 - protein, 61 aa, Gossypium hirsutum
  Clone ID: LIB3145-031-Q1-K1-D8.pep
ERCSRELVREALKRNTCDNLTVIVVCFSTDPPPRIEIPQFRVRRSISAEGLNFLKGVLDSN

SEQ ID NO: 92776 - protein, 40 aa, Gossypium hirsutum
  Clone ID: LIB3145-031-Q1-K1-E12.pep
DPPPVMTPASKHFPYRSLRAFPILKNPSSQNFCCSTIEEI

SEQ ID NO: 92777 - protein, 62 aa, Gossypium hirsutum
  Clone ID: LIB3145-031-Q1-K1-E4.pep
WTKYPLLNADNQQDKVGSVAKGYPKFRASLLALSICKDEISVVKHLYSSFKQLLVTSILRIH

SEQ ID NO: 92778 - protein, 62 aa, Gossypium hirsutum
  Clone ID: LIB3145-031-Q1-K1-E6.pep
LRVACTCVVPRPKDRPSIYQVYESLKIMGEKHGALEQYDEFPLIFGKQQDHDNYERTLVWGE

SEQ ID NO: 92779 - protein, 98 aa, Gossypium hirsutum
  Clone ID: LIB3145-031-Q1-K1-E9.pep
AKLEKSSHKAQDQYAVNKLKQVSQKSNFTNRYPVPLSFDIIQSRLENNYYRSLEAVQHDIQVMLLNAESYFGRNAELLSKLRRLSDFFMRTLSSLQPP

SEQ ID NO: 92780 - protein, 66 aa, Gossypium hirsutum
  Clone ID: LIB3145-031-Q1-K1-F1.pep
KKKKKKKKKKKKKKKKKKKKKKKKKKKKKKKKKKKKKKKKKKKKKKKKKKKKNKNKWGGLFKRTKF

SEQ ID NO: 92781 - protein, 50 aa, Gossypium hirsutum
  Clone ID: LIB3145-031-Q1-K1-F11.pep
ARFMTLRATMGMTAWHICHAAPVACTRAASSVIDQRVTALRPLSMSTVMR

SEQ ID NO: 92782 - protein, 81 aa, Gossypium hirsutum
  Clone ID: LIB3145-031-Q1-K1-F6.pep
PTRPPTRPVIFSASSLLSGILIATLLPVTESLAVVLYHEKFQVEKAISLVLSLWGSLNYFYGEFHEINKMKQKQDAKTDVA

SEQ ID NO: 92783 - protein, 64 aa, Gossypium hirsutum
  unsure (1)..(64): unsure at all Xaa locations
  Clone ID: LIB3145-031-Q1-K1-G2.pep
TQLLKAEEIDTSQPPYVFKCQVYDLTGVPAERHKIMAKGGLLKDDADWSTVDLXQGQKMMMMGT

SEQ ID NO: 92784 - protein, 50 aa, Gossypium hirsutum
  Clone ID: LIB3145-031-Q1-K1-G9.pep
PTPCPISKSASMVFGRIVMLFSRVALHSDYSYSSSGSTPSSAPTSLPTCS

SEQ ID NO: 92785 - protein, 53 aa, Gossypium hirsutum
  Clone ID: LIB3145-031-Q1-K1-H10.pep
PIRIHLYHVVSMPSLLASSLNGIGDPTIDSNPGARVRVLVGHKSDELDANRTL

SEQ ID NO: 92786 - protein, 66 aa, Gossypium hirsutum
  Clone ID: LIB3145-031-Q1-K1-H11.pep
SSFLLKASKINTRYCLELTMKSAWFIFLAHPVSSWQLSLDLVSLCQRIGRLYARWRVPRERSSRTD

SEQ ID NO: 92787 - protein, 115 aa, Gossypium hirsutum
  Clone ID: LIB3145-031-Q1-K1-H12.pep
QYHACLTIMECWKHTRLNYLRNITSLTKTTNKIKPKTKFLKYTNAGSALQLSWDISTKLKEFFLLLPDDPSDLQFTINFVFQSLSILGHSLACTMDYLVLDRDEQQDSRMPLSLR

SEQ ID NO: 92788 - protein, 48 aa, Gossypium hirsutum
  Clone ID: LIB3145-031-Q1-K1-H4.pep
ATAKHAIMSHRAGRVIHVWHICVNPRWLQCLRLSLEYKAWHPNDDSNR

SEQ ID NO: 92789 - protein, 65 aa, Gossypium hirsutum
  unsure (1)..(65): unsure at all Xaa locations
  Clone ID: LIB3145-032-Q1-K1-A10.pep
GPTHANVYTYXKQHFYSLSNLNIPTAGLISHPHSLPTPPHLCDSNQNYFLSLRLNIIANNVRPNL

SEQ ID NO: 92790 - protein, 102 aa, Gossypium hirsutum
  Clone ID: LIB3145-032-Q1-K1-A6.pep
ETEELVLRTGSVGAGCSRLLSDMQAFKAANPGCVLEDFVRWHSPPDWIEDEPSDKVPGARSQLSSRMQKGSNLWRELWETSKPVPAIKQTPLYDEDFAMDGI

SEQ ID NO: 92791 - protein, 124 aa, Gossypium hirsutum
  Clone ID: LIB3145-032-Q1-K1-A8.pep
PTRPPTRPENGYDSFAAIHTGEWVGGAQNAYETGYGKIDVADEAQVEGSFLDNEHKDNIFKGSEESKLDSTYSEKVDMALKNASLIDGETSIFLEVDAVNEEKISLADNPTAYEDVAVANDTKF

SEQ ID NO: 92792 - protein, 57 aa, Gossypium hirsutum
  Clone ID: LIB3145-032-Q1-K1-B7.pep
SLAILKADLKSQRKQVRNLKKKSLWSRSLEEVMEKLVDIVHYLILEIHCAFGSNDHR

SEQ ID NO: 92793 - protein, 117 aa, Gossypium hirsutum
  Clone ID: LIB3145-032-Q1-K1-C11.pep
GPTHAFAGSEPKTETEIADLEAISARRELTALELNEKGNELVKKGKKHYPEAIHCYSRAIDQKALNDHDTSVLFSNRAHVNLLLGKYRRALSDSQDAIKLFPANVKAYYRAVKACLS

SEQ ID NO: 92794 - protein, 115 aa, Gossypium hirsutum
  Clone ID: LIB3145-032-Q1-K1-C8.pep
KSEWSPIVLIYTSGTTSSGRGVVHSHRGIFTMTVDSLIDWEVPKQPVYLWTLPMFHANGWSFTWGMAAVGGTNVCVRKFDASTVYSLIKKHGVTHMCGAPVVLNIVSNSPEIKPL

SEQ ID NO: 92795 - protein, 48 aa, Gossypium hirsutum
  Clone ID: LIB3145-032-Q1-K1-D1.pep
SRKNRQIPTRWFPSKTGHQCLTRKAVLASFKIEEERLSKEFRKAWRTA

SEQ ID NO: 92796 - protein, 51 aa, Gossypium hirsutum
  Clone ID: LIB3145-032-Q1-K1-D7.pep
LRCCTKLQLYLAWVFSQRSPSQCRLFCYVLCVIWGDRNAGVHKKASKSGKK

SEQ ID NO: 92797 - protein, 51 aa, Gossypium hirsutum
  Clone ID: LIB3145-032-Q1-K1-F1.pep
SFYDFKPFKLFLLASLCELPKYELLGLGVLQRTRSTLTYVTATFRLPMGTR

SEQ ID NO: 92798 - protein, 36 aa, Gossypium hirsutum
  Clone ID: LIB3145-032-Q1-K1-F11.pep
RISLHSFKRLTNITQPTILGWVNSSDSVLIYFNLTH

SEQ ID NO: 92799 - protein, 110 aa, Gossypium hirsutum
  unsure (1)..(110): unsure at all Xaa locations
  Clone ID: LIB3145-032-Q1-K1-F9.pep
PRVRSNLSRYSCSNKPHMXKDVRWAAIRHIKMQEGVLGLRHFNLLKKLGCGDIGTVYLAELIGTNCLFAIKVMDNEFLARRKKLPRAQTEKDILRMLDHPFLPTLYTPIH

SEQ ID NO: 92800 - protein, 84 aa, Gossypium hirsutum
  Clone ID: LIB3145-032-Q1-K1-G10.pep
GATHAFERIPLIYHILMLRWVICHPRGHLWAGDIIILITYDALMCKSIVYPTCILMCSTGEISSEMEENFSCMRPFCNCCEMDT

SEQ ID NO: 92801 - protein, 51 aa, Gossypium hirsutum
  Clone ID: LIB3145-032-Q1-K1-G12.pep
YDYLSIQSLNNNIMYRGTFTAAMRIRIRNVRTPLFITTFALNKLPIGGRLF

SEQ ID NO: 92802 - protein, 58 aa, Gossypium hirsutum
  unsure (1)..(58): unsure at all Xaa locations
  Clone ID: LIB3145-032-Q1-K1-G4.pep
LDHSSMQLHLVQPHXWGSSSQGTEATNQLFRKKKDTRSSFTGLIRKEKLETKKLKDLT

SEQ ID NO: 92803 - protein, 61 aa, Gossypium hirsutum
  unsure (1)..(61): unsure at all Xaa locations
  Clone ID: LIB3145-032-Q1-K1-G5.pep
PTRXACLGFVGYLGTWQLAQILIFLFLGISRSFYINQLWLPLGSFTLMDLFICKPLLEISF

SEQ ID NO: 92804 - protein, 106 aa, Gossypium hirsutum
  unsure (1)..(106): unsure at all Xaa locations
  Clone ID: LIB3145-032-Q1-K1-H5.pep
PYEALYGQLPPTHMLYLAGTSSVAVVDRSLQTREATRKQLQFYLKRVQTRMKLFADKYRSERTFQIGDLVHLRLQXQXKNSYQKLSSKFYGPFPVIKKVGEVAYTL

SEQ ID NO: 92805 - protein, 67 aa, Gossypium hirsutum
  Clone ID: LIB3145-032-Q1-K1-H6.pep
FRTCEHLNCVQTPNCIRQTVFDAVAHNYQPVTVIVDATAAATADIHDANIYDMRNIGVATPTLEEWY

SEQ ID NO: 92806 - protein, 45 aa, Gossypium hirsutum
  Clone ID: LIB3145-033-Q1-K1-A11.pep
PGVRPRVRSSSPSSPFTLALSYLGVVSVLACVNWSSSHYHLLLSS

SEQ ID NO: 92807 - protein, 71 aa, Gossypium hirsutum
  Clone ID: LIB3145-033-Q1-K1-A12.pep
VFYAALSAQFGSFMRFVFKLVFKKTVTEAPSRERNRWIYPPIFLPIQVKKGLRDEIRLGVQDRICQTCSGA

SEQ ID NO: 92808 - protein, 59 aa, Gossypium hirsutum
  unsure (1)..(59): unsure at all Xaa locations
  Clone ID: LIB3145-033-Q1-K1-A9.pep
NXGGDGRVRSYTFNHSPFIPYSLHLLWAWPLLTQTYPILSSLYWKLDCSIQLYLLNNLM

SEQ ID NO: 92809 - protein, 116 aa, Gossypium hirsutum
  unsure (1)..(116): unsure at all Xaa locations
  Clone ID: LIB3145-033-Q1-K1-B10.pep
PRRPTISANGEREIGELIARAMYKVGKEGVITVTDRNTLDNELXVVEGMKLGRSYFSPYFVTDQKTQXCELENSLILIHDKKISNINSLVRXLELAINKNRPLLXVAEDFEEVIAP

SEQ ID NO: 92810 - protein, 51 aa, Gossypium hirsutum
  Clone ID: LIB3145-033-Q1-K1-B2.pep
VVRILSSGTLSSYVTGLLSAGSSSKSFSVTGLLSVGSSSSSTSSLTRRGDL

SEQ ID NO: 92811 - protein, 84 aa, Gossypium hirsutum
  unsure (1)..(84): unsure at all Xaa locations
  Clone ID: LIB3145-033-Q1-K1-C10.pep
NSLFWIAHPCVSAILYHVEARLALKSEKLLSTRHVLSXYRNMSSACALVILDEMRQISIVDXLGTTGEGLEAGVLFGFRPKLTF

SEQ ID NO: 92812 - protein, 70 aa, Gossypium hirsutum
  Clone ID: LIB3145-033-Q1-K1-C4.pep
RLSTLHSNGSILNHHQWHQGRWLCIWGPNPSQHPSSLLPSSSPQRPLPNLPQNLPLDLRCQKCLFHNLTL

SEQ ID NO: 92813 - protein, 81 aa, Gossypium hirsutum
  Clone ID: LIB3145-033-Q1-K1-C7.pep
ATARVRHHAITVGNRVITDTNIPAGAVSASSAAVELAFMKLPESSHTTARMLVVGAGKIGKLVIKHFLAKSCTKMGVVYRS

SEQ ID NO: 92814 - protein, 40 aa, Gossypium hirsutum
  Clone ID: LIB3145-033-Q1-K1-C8.pep
SSMPGVFYFINFIIFLFTYLPMSKWKLVYSLNIFRNCHTL

SEQ ID NO: 92815 - protein, 62 aa, Gossypium hirsutum
  Clone ID: LIB3145-033-Q1-K1-D10.pep
DDYKTSSSAPKAISGTSGGGGKSIRSNAVYYEYSDDDRDFKRRPSRYSRSPSAEWIEPRHSI

SEQ ID NO: 92816 - protein, 96 aa, Gossypium hirsutum
  Clone ID: LIB3145-033-Q1-K1-D3.pep
HAFSHAFAHSFFHSFVHSFEETYFKIWQKLHRGPWFQWQSAYCLPSLASPMPSVSSTCSSYSANFIATLAAYSSKPNLSNPFHVPMLNLDCMKICD

SEQ ID NO: 92817 - protein, 63 aa, Gossypium hirsutum
  Clone ID: LIB3145-033-Q1-K1-D5.pep
EFQARPTHTLSHSLITNLNSQSHQLYKAELYFQHLLTSSLFFFSSTNILINFHFLILILHFTT

SEQ ID NO: 92818 - protein, 31 aa, Gossypium hirsutum
  Clone ID: LIB3145-033-Q1-K1-D6.pep
FKKVVMRIRNGRMFELWCNSHIMMNYRLKLI

SEQ ID NO: 92819 - protein, 107 aa, Gossypium hirsutum
  Clone ID: LIB3145-033-Q1-K1-D8.pep
QNLVVNMLSNTHSNTMQMNSHAKMWEEMQPKIHVDISLPASSNNNASGRYGYGHGGVVFIGGDVVLLSNGNKFYSYDMKKRASKDLGELDIDTKAGIVGYVNSLVEL

SEQ ID NO: 92820 - protein, 115 aa, Gossypium hirsutum
  unsure (1)..(115): unsure at all Xaa locations
  Clone ID: LIB3145-033-Q1-K1-E10.pep
QSAPIDTRRALYKNIVLSGGXRTMFKDFHKRLQRDLKKIVDARVLASDARYGGEVKAQPVEVNVVSHPIQGFAVWFGSSVLASTPEFYAAFHTKAEYEEHGTSICRTNPVFKGMY

SEQ ID NO: 92821 - protein, 52 aa, Gossypium hirsutum
  Clone ID: LIB3145-033-Q1-K1-E11.pep
CLIIFFERYSFLRCGHKKIGMYTLHYTVLTLWLFFPASVTFSFIRFELSLFV

SEQ ID NO: 92822 - protein, 62 aa, Gossypium hirsutum
  Clone ID: LIB3145-033-Q1-K1-E7.pep
PPDILLITSCQCAVIYIDIVVKLLDWGEDGIATTAETAALRASFLQEVAVWHKLDHPNVTKS

SEQ ID NO: 92823 - protein, 44 aa, Gossypium hirsutum
  Clone ID: LIB3145-033-Q1-K1-F1.pep
KKGKFPIVSFWLMYINYPPCADMLSATVVTVLYLIICFSNKYCC

SEQ ID NO: 92824 - protein, 98 aa, Gossypium hirsutum
  Clone ID: LIB3145-033-Q1-K1-F2.pep
LDSRSTARPVVFPHFPLPSLSSSPSSSSWAEPSPRPQFFASSASPMDNSPKKFMDFPFVTAPRRNLMIDLVSTMEHRLQSQLIPCTLPFDLQHYYNPS

SEQ ID NO: 92825 - protein, 70 aa, Gossypium hirsutum
  Clone ID: LIB3145-033-Q1-K1-G11.pep
LKVVHFGSSLLAQHPQRLFAHHQLLGFLFGKNFLRPFLFATIFFFYLQGIDSTYFFYDLFTQSFLHFYIF

SEQ ID NO: 92826 - protein, 70 aa, Gossypium hirsutum
  unsure (1)..(70): unsure at all Xaa locations
  Clone ID: LIB3145-033-Q1-K1-G12.pep
TIHLHRFIIVSSASLKTSDYKRCVAFISNFWIMLFPANDYKIVVVGINNAXKQPRFSKLHLFXVVTTHPT

SEQ ID NO: 92827 - protein, 58 aa, Gossypium hirsutum
  Clone ID: LIB3145-033-Q1-K1-H11.pep
AFVPYMGTEVNGNGLQSRLISHAEGKFNLSSLPNIRDVTTDYTLYDQLQQVMAEETNS

SEQ ID NO: 92828 - protein, 40 aa, Gossypium hirsutum
  Clone ID: LIB3145-033-Q1-K1-H7.pep
NPNQRFFSRLKLRLIWAKNPGTLEGLVPLKKSDGVAEGVA

SEQ ID NO: 92829 - protein, 58 aa, Gossypium hirsutum
  Clone ID: LIB3145-033-Q1-K1-H8.pep
RIASRFPYEYSLIRVTSYLSLISTTGKATSSKWASATHADSITGEWGERVNWVSHASA

SEQ ID NO: 92830 - protein, 113 aa, Gossypium hirsutum
  unsure (1)..(113): unsure at all Xaa locations
  Clone ID: LIB3145-034-Q1-K1-A1.pep
MKWPASFFSCGTNCSSWPAMGGKLPGPASGTAPANAYTTESNPIVVIGEQYIAPYPVDLKIQHTVFTVAENNFDITDVNDNPIFKVKNKLFSFPDRRVLLDAAGNPLVSLNKX

SEQ ID NO: 92831 - protein, 55 aa, Gossypium hirsutum
  Clone ID: LIB3145-034-Q1-K1-A10.pep
RKKFYYKNYYGISKLVKWKVPIKIKKRLVNFILLVKNERRGGRWCGRMRRSGRVF

SEQ ID NO: 92832 - protein, 68 aa, Gossypium hirsutum
  Clone ID: LIB3145-034-Q1-K1-A12.pep
KTRADPRVRPPVLNHKLFFHPPTNFSCGGLLKLQSPHPTILNLTFIPVMLFHIDHKFHLMSTNLSFIH

SEQ ID NO: 92833 - protein, 51 aa, Gossypium hirsutum
  Clone ID: LIB3145-034-Q1-K1-A4.pep
SSHATPITMNPTITSREIHTALRLVLPGESANHAASEWTNAVTKFTNSYFP

SEQ ID NO: 92834 - protein, 127 aa, Gossypium hirsutum
  Clone ID: LIB3145-034-Q1-K1-A9.pep
MFFVYPDPDQPGPVDHFDRLPHSVLLLVFNKIGDVKALGRCCVVSRRFHSLVPQVENVVVRVDCVISDDDCSSSSSSSDKSRALVGPFSNLFRLVFGAIVKPLQALGQFLGPKRSVLNETLNSLFSS

SEQ ID NO: 92835 - protein, 114 aa, Gossypium hirsutum
  unsure (1)..(114): unsure at all Xaa locations
  Clone ID: LIB3145-034-Q1-K1-B12.pep
TSXNSXSNFFLYFKTSHHRSAYTLSLIPSNSLNPSLILALSSLFSSNTFPCPFLITPSSHFAKVIYPSRQTTFPSPSHPLLLFPYSSSMKPYYSTFHNLYLKEKKKVFLLKKIQ

SEQ ID NO: 92836 - protein, 78 aa, Gossypium hirsutum
  unsure (1)..(78): unsure at all Xaa locations
  Clone ID: LIB3145-034-Q1-K1-B6.pep
PQXCSFLCXXLALHQATFGNKVWLTXXGXXFLXRIGFLIMACFGLFSFKASXXSRXVFQXXSFIFXXDLLTLARXLXX

SEQ ID NO: 92837 - protein, 106 aa, Gossypium hirsutum
  unsure (1)..(106): unsure at all Xaa locations
  Clone ID: LIB3145-034-Q1-K1-B7.pep
TTYTSSSYLLSSHPNRLVLALDFLIIYYXILNSSXRACHLAKQAFYEAIAKLAGLNEQSYNDSTLIMHLLRDNLTLLTSDLPQERSDQSKSYEPHAESSLDERVFF

SEQ ID NO: 92838 - protein, 131 aa, Gossypium hirsutum
  Clone ID: LIB3145-034-Q1-K1-B9.pep
EALTHESVHESYCYQRLEFVGDSVLDLLITQYLYNHHTDIDPGELTDLRSASVNNENFGQVAVRHDLHKHLQHCSTLLSNQISEYVQSFTESDNTTRLDPSIKGPKALGDLVESIVGAILIDTNLNLGKVW

SEQ ID NO: 92839 - protein, 85 aa, Gossypium hirsutum
  unsure (1)..(85): unsure at all Xaa locations
  Clone ID: LIB3145-034-Q1-K1-C11.pep
NLXFHADEFATMGTLHDIFHVTKVLQGAQPVPFLDSIHRIRITINTSWYLEYFHENIQPSIIHRYIXSINFHIFEDFKTKIAYFN

SEQ ID NO: 92840 - protein, 56 aa, Gossypium hirsutum
  unsure (1)..(56): unsure at all Xaa locations
  Clone ID: LIB3145-034-Q1-K1-D12.pep
GPTHANSFNLXFYDFYFYVQVKLSVCLFYFCLTLISRRSLHYSVTRLYALTNNILS

SEQ ID NO: 92841 - protein, 70 aa, Gossypium hirsutum
  Clone ID: LIB3145-034-Q1-K1-D3.pep
PRAYNLVTKMTSYRFNYLSHQIIPSMDDPDKSFYFHEKIQPYLTFPLVGISIYVIQTKACSLYIYDIVTI

SEQ ID NO: 92842 - protein, 56 aa, Gossypium hirsutum
  Clone ID: LIB3145-034-Q1-K1-E12.pep
ILITISLFFLLKNIKYWRRFLMWKGHLLFLPQSNPLLSPSKSMYPLNYKNFKFISY

SEQ ID NO: 92843 - protein, 74 aa, Gossypium hirsutum
  Clone ID: LIB3145-034-Q1-K1-E3.pep
ILIPLYEHRTTMQEREITSKPTFYAFNNNIYQYYNLCSDYLIQTQLMCKPKFHPKKKEKDLNPTNINLYLALII

SEQ ID NO: 92844 - protein, 129 aa, Gossypium hirsutum
  Clone ID: LIB3145-034-Q1-K1-E4.pep
SLRTVLRKVSDDGGSIDANRQESAAVSVGEGTSSSSSTLGDNYVALFVRMLGLDHDALDREQAIVALWKYSLGGKNCIDAIMQFQGCINLTVNLLNSESSATCEAAAGLLRSVSSINLYKDIVAESGAI

SEQ ID NO: 92845 - protein, 44 aa, Gossypium hirsutum
  Clone ID: LIB3145-034-Q1-K1-E6.pep
HQYPIKIYNTSLNMIILYFLSNLYSQYPKPTYSGFYHKHHQILS

SEQ ID NO: 92846 - protein, 58 aa, Gossypium hirsutum
  Clone ID: LIB3145-034-Q1-K1-E8.pep
IFDSLVGFSDLKSLFPTPLKIRLLYGDSLPNISSLSRIVRTTGLFHWPGRAFGQQKGY

SEQ ID NO: 92847 - protein, 40 aa, Gossypium hirsutum
  Clone ID: LIB3145-034-Q1-K1-E9.pep
VIYQTYQDTLFVSTFSPHTLLICLFFSFFNRILIFIFIFT

SEQ ID NO: 92848 - protein, 82 aa, Gossypium hirsutum
  unsure (1)..(82): unsure at all Xaa locations
  Clone ID: LIB3145-034-Q1-K1-F5.pep
MGRGRVELKRIANKINRQVTFAKRRNGLLKKAYELSVLCDSSNSLIIVIYVFRIFLGSPPFTFDNTFXMYLTCNYGAPEPNV

SEQ ID NO: 92849 - protein, 107 aa, Gossypium hirsutum
  unsure (1)..(107): unsure at all Xaa locations
  Clone ID: LIB3145-034-Q1-K1-F9.pep
AINVISCWYEDKTEWGQSVGWIYGSVTEDVVTGYRMHNRGWRSVYCVTKRDAFRGTAPINITDIHYHVLHSATVSXRDIFFTQHNALLGSPRLKFLQRIAYLNVGIY

SEQ ID NO: 92850 - protein, 51 aa, Gossypium hirsutum
  Clone ID: LIB3145-034-Q1-K1-G1.pep
SGWAYYLRSCILVHHVLRGVALVLTLPASKQHLFSGLLIMHLKSYYVQFWV

SEQ ID NO: 92851 - protein, 31 aa, Gossypium hirsutum
  Clone ID: LIB3145-034-Q1-K1-G10.pep
QSNNARIHIKKTHDRTIVKKDTLRLMKDGHL

SEQ ID NO: 92852 - protein, 129 aa, Gossypium hirsutum
  unsure (1)..(129): unsure at all Xaa locations
  Clone ID: LIB3145-034-Q1-K1-G12.pep
WVNSRLQLNFVANNFTLXGEEIRVLPGLECLQRSFPCFRNASRYANFSLNCGGPAIIADGIQFEAENRTLGPAKFNVTSTQKWAVSNAGLFADRQNQQFVENNGGQVRSTNTPELYETSRLSPGSLRYY

SEQ ID NO: 92853 - protein, 69 aa, Gossypium hirsutum
  unsure (1)..(69): unsure at all Xaa locations
  Clone ID: LIB3145-034-Q1-K1-G7.pep
RADPHKRXQLPTLTLFFQPEFNINWGCSFLYANTTNLSFKSKAVNKSFNSANYPNNPKIPTISFFLYIL

SEQ ID NO: 92854 - protein, 130 aa, Gossypium hirsutum
  Clone ID: LIB3145-034-Q1-K1-G8.pep
LQEVQVRIAGFGPEEDEWVDIRKHVRQRSLPCEASECVAVLPGDLVLCFQEGKDQALYFDAHVLDAQRRRHDIRGCRCRFLVRYDHDQSEEIVPLKKVCRRPETDYRLQQLHAASNLSNDQHKTSTDQST

SEQ ID NO: 92855 - protein, 64 aa, Gossypium hirsutum
  Clone ID: LIB3145-034-Q1-K1-H10.pep
LNRYVYLNPHPLHNTTRPQQVIRILHLCLTQWTRYFHTQSPTLQIIKVRHQIIHHSPNIYFNFP

SEQ ID NO: 92856 - protein, 51 aa, Gossypium hirsutum
  Clone ID: LIB3145-034-Q1-K1-H11.pep
KQQSENGEAPGSYIVGGSAGGWNFITFTGNKSVYYGVTKELFRSAQASLGE

SEQ ID NO: 92857 - protein, 80 aa, Gossypium hirsutum
  Clone ID: LIB3145-034-Q1-K1-H7.pep
MGFPVGYTEVFLPKLFVHTLSFLGFIRNLISALLNFMGLTNFLETDAVWPENPTRTTPEHPPVSALLIREILPVIKYEEL

SEQ ID NO: 92858 - protein, 58 aa, Gossypium hirsutum
  Clone ID: LIB3145-035-Q1-K1-A11.pep
TPTLRGGWRVFINEPNCLIHLDLKPRNVLLVNSRAGHLKVVDFCPSITLMVYNCLVVI

SEQ ID NO: 92859 - protein, 105 aa, Gossypium hirsutum
  Clone ID: LIB3145-035-Q1-K1-A12.pep
GRPTRPHSCIKAIPLNLHFLLRLYIIRQCTFQSPKHKKRGFGQMYLSIHRTTPEFGLTSQEVQQKAVMRVKKGIVKGQQNLDACYQRVLQRISMLHITNDAPFYE

SEQ ID NO: 92860 - protein, 57 aa, Gossypium hirsutum
  Clone ID: LIB3145-035-Q1-K1-A6.pep
SWVYSFHSIVTNVFSRWRYRLIWSLISQQHFQRFRWCHLSASPSRDKHFFDGEIVRV

SEQ ID NO: 92861 - protein, 88 aa, Gossypium hirsutum
  Clone ID: LIB3145-035-Q1-K1-A7.pep
NFYGFERASEVDTHTHTYIEIEREKRMGLSCKQVSSDEVEWIQGQSLLQAPTMERPKASSMKRRHHQENQLQQSEPPLKCPRCDSFNT

SEQ ID NO: 92862 - protein, 103 aa, Gossypium hirsutum
  Clone ID: LIB3145-035-Q1-K1-B1.pep
PTRPPTRPSQIYGKTLAQDLGGEGILKDTVECLCTPQTYFTRVLEAAVKEDADEESKRALTRVIVTQKEQLVQEGFVPNKIQDILLGLYKDFLLASIASGDIK

SEQ ID NO: 92863 - protein, 100 aa, Gossypium hirsutum
  unsure (1)..(100): unsure at all Xaa locations
  Clone ID: LIB3145-035-Q1-K1-B11.pep
GSHAAKQCLQLQTLTDELLHSTLASRYVRAFVPRFKMPNKSIPKDAAYQVIHDELMLDGXNPRLNLTFYVTTWMEPVCCXLMMAAFNKNYVDLDEFPVTT

SEQ ID NO: 92864 - protein, 54 aa, Gossypium hirsutum
  Clone ID: LIB3145-035-Q1-K1-B12.pep
VFCINIVFLNVSLHHIPLSLVQSFISFTPATTNFLLVSSKEKVLCQANNSLSGS

SEQ ID NO: 92865 - protein, 43 aa, Gossypium hirsutum
  Clone ID: LIB3145-035-Q1-K1-B2.pep
KLISIYIKILTTFLNSGSNYMDVFVGFYLSLFRIHNTCTNLLS

SEQ ID NO: 92866 - protein, 48 aa, Gossypium hirsutum
  unsure (1)..(48): unsure at all Xaa locations
  Clone ID: LIB3145-035-Q1-K1-B3.pep
VVYRLSAEKILTYLNVSEEKELGPLISNIXAVVAHSIYKSQNIXLAML

SEQ ID NO: 92867 - protein, 69 aa, Gossypium hirsutum
  Clone ID: LIB3145-035-Q1-K1-C1.pep
FWVPHKKSIKLEGRGSKIWFFKRGAPFFFFFIFFFFFFLFFFFFYLYFSLFFFFFFFNLIFYFYFFFFF

SEQ ID NO: 92868 - protein, 103 aa, Gossypium hirsutum
  Clone ID: LIB3145-035-Q1-K1-C8.pep
EGTLFSFPFLFSHLRILDTNTRTIKNQFEKGDFGISFFFRFCFYFFDLSTACKTNKGEGLIFIMAFESLFASLKSKFRWGLGGCGFKGNRVRPSCDAIRQPRW

SEQ ID NO: 92869 - protein, 58 aa, Gossypium hirsutum
  unsure (1)..(58): unsure at all Xaa locations
  Clone ID: LIB3145-035-Q1-K1-D10.pep
KIFVLGYTASGKSTVNEVFXRLVEPTKCXFFIDKIYIFMLSLNDLKSRFRDIPQEPDL

SEQ ID NO: 92870 - protein, 70 aa, Gossypium hirsutum
  unsure (1)..(70): unsure at all Xaa locations
  Clone ID: LIB3145-035-Q1-K1-D12.pep
PTRAPTRPHKYTSLIXSLNSSTSLDIWQVGVHNYSVGTTRPIVNNEFSTDTIPCQIAIIIIRNVAIAHNM

SEQ ID NO: 92871 - protein, 41 aa, Gossypium hirsutum
  Clone ID: LIB3145-035-Q1-K1-D5.pep
YHRCVLLIMALYVSNDKVLMQGPYVVLVVVQFMILCPTAGS

SEQ ID NO: 92872 - protein, 59 aa, Gossypium hirsutum
  Clone ID: LIB3145-035-Q1-K1-D6.pep
ETPGRFDQKPPLNKKNLGRSGRLRDQPMKGWAPKLRKKMVAKRESHLQLKSFYKSADAW

SEQ ID NO: 92873 - protein, 103 aa, Gossypium hirsutum
  Clone ID: LIB3145-035-Q1-K1-D7.pep
KNNFHSFLFAVLLSFFVCICCRVHPFYRYEMCWRALALDVWRTEARTWSFGAEGSWKLGLLRRKQTARVLKSFGPFGPRNFGLFCKWARVLVIRSCNWDWVLG

SEQ ID NO: 92874 - protein, 33 aa, Gossypium hirsutum
  Clone ID: LIB3145-035-Q1-K1-E10.pep
RLIIVLSDYSTEELLSLLSDVQLVLKCAMQFYG

SEQ ID NO: 92875 - protein, 26 aa, Gossypium hirsutum
  Clone ID: LIB3145-035-Q1-K1-E11.pep
RAAPAYSIYPSHSPINTTTIRSSGHL

SEQ ID NO: 92876 - protein, 62 aa, Gossypium hirsutum
  Clone ID: LIB3145-035-Q1-K1-E12.pep
HACVQISFLSRFAVHFLFPLSLSRVTVVFKKRIGQLPIVQEAKFIKWFCMPKVGTRRFYTPN

SEQ ID NO: 92877 - protein, 111 aa, Gossypium hirsutum
  unsure (1)..(111): unsure at all Xaa locations
  Clone ID: LIB3145-035-Q1-K1-E3.pep
RACGLLIGAVVNMGPDLWKAAAAGLPXDDVLTTMLDPTIPLTTSQWEEWGDPRKGXLHSYMKSYSSVDNVKALKYANILVTSWLHDPSGMDSTPVXFVTKLMDIKTDYNML

SEQ ID NO: 92878 - protein, 84 aa, Gossypium hirsutum
  unsure (1)..(84): unsure at all Xaa locations
  Clone ID: LIB3145-035-Q1-K1-F4.pep
RTTMKNCEKLANLALANQNGLPSLFVSPDGLITAMAYRLPHVASFAKPQDSAARANSGSQASNAPQLXSQNCSRGLNSSLKLLM

SEQ ID NO: 92879 - protein, 47 aa, Gossypium hirsutum
  Clone ID: LIB3145-035-Q1-K1-G11.pep
HAGDMCVLSLEIHLKFRHAYPAKGKKNSLKEVLGHDFCMFETLMSNV

SEQ ID NO: 92880 - protein, 52 aa, Gossypium hirsutum
  Clone ID: LIB3145-035-Q1-K1-G8.pep
FVRVHITTIFNSKCAIRMNAIHTPLLTHPKVLNYTCLKVLLVGFNFYFSPED

SEQ ID NO: 92881 - protein, 97 aa, Gossypium hirsutum
  unsure (1)..(97): unsure at all Xaa locations
  Clone ID: LIB3145-035-Q1-K1-H10.pep
RVRDDAVSPGLLLPLPIPELAXEDMXIYFVEGLPRSQGKSTVLVVVDILTKYDHFLELVHPYTALTVVQEYHTHVYXLHGIHESIVTDRDKIFLVPI

SEQ ID NO: 92882 - protein, 113 aa, Gossypium hirsutum
  Clone ID: LIB3145-037-Q1-K1-A10.pep
SPNLSPVQRRENSSSPQASAAHSANQRPPRAPPPAYAPSMRLTHPYPANTNNKNSSRNRGMEALFFIVIVIGYKTEGRNFVKKKRPPAIKKYTPKVDIRVYLICFFFISFQFL

SEQ ID NO: 92883 - protein, 107 aa, Gossypium hirsutum
  Clone ID: LIB3145-037-Q1-K1-A8.pep
NETNRITNTGLSTRTTFIWTAVVTLSYSTNFSTFWCYKILVNGITGLVQLGMVQCINGRNSVHVVEVVIGAVNEPPCWCHSEVEQIYAAVRKNIVNIDFTLHHSWCG

SEQ ID NO: 92884 - protein, 74 aa, Gossypium hirsutum
  Clone ID: LIB3145-037-Q1-K1-B1.pep
DLSLSFKSFPLYHINFNSLLYNQISSIYSLILLGTSLALHHYLIFYHKKSRKGKKLSTYFSPFKLFKVNNFFFK

SEQ ID NO: 92885 - protein, 91 aa, Gossypium hirsutum
  Clone ID: LIB3145-037-Q1-K1-B6.pep
THRERATNPLVWCAAIICTILTVAVIIAGIVTFIGYLVIHPRVPYVSVMDAHLDHIQIDYAGILEIQVTILIRAQNGNEKAHASFSDSSYS

SEQ ID NO: 92886 - protein, 135 aa, Gossypium hirsutum
  unsure (1)..(135): unsure at all Xaa locations
  Clone ID: LIB3145-037-Q1-K1-C8.pep
HKSLKYLMTXNELNLKQXWWLELLKEDDLLIDYQPXKANVGVDSLSQKSLFALRALNAHLILNHDCSILAELKARPVFLQRIEEFQNVDPKLVAKRDQIQSDSSTEFSVGIDSILXFHNRLCVLNNLELKQNILT

SEQ ID NO: 92887 - protein, 54 aa, Gossypium hirsutum
  unsure (1)..(54): unsure at all Xaa locations
  Clone ID: LIB3145-037-Q1-K1-D12.pep
QVDFCMIYTRYIRDDISVFTSYAIKLPSPENIIXMLHTHTHLTSTSQLTRSISF

SEQ ID NO: 92888 - protein, 126 aa, Gossypium hirsutum
  Clone ID: LIB3145-037-Q1-K1-D5.pep
GRVGETWSRLYGVIHRAGRAVSNWIYLGGVKAFADGSLGSNSALFHEPYFDDPHNYGLQVVEFESLFNMTIASDLSGLQVAIHAIGDKATDLILDMYESVALKNGKRDRRFRIEHAQHLAPGTADR

SEQ ID NO: 92889 - protein, 124 aa, Gossypium hirsutum
  unsure (1)..(124): unsure at all Xaa locations
  Clone ID: LIB3145-037-Q1-K1-D8.pep
KKTRADPHVRLKQKLDYPFSFIHFSQLNXRLHKKEGLSQXIKTFPTSILFSFSSXTTYLPXTFYFYQXHHQKNPFFTLFHYLLKTSYYKQIYFQHPKPIFLYTFQITQPYYFSPSLLSIQILLI

SEQ ID NO: 92890 - protein, 59 aa, Gossypium hirsutum
  Clone ID: LIB3145-037-Q1-K1-E3.pep
TKKENPKLNFTAVLPSPCFYLERKHRKVKRRVYNGEGKERWMKLQPSVQEEQPNFIWGI

SEQ ID NO: 92891 - protein, 37 aa, Gossypium hirsutum
  Clone ID: LIB3145-037-Q1-K1-E8.pep
KPEPAHTYTLIKIYLNIFLSFINTKLNRLLNNNNRPR

SEQ ID NO: 92892 - protein, 135 aa, Gossypium hirsutum
  Clone ID: LIB3145-037-Q1-K1-E9.pep
LIEGYENSFWTCSNTRLGEWGTAMVWGIKPLAVRYGLGISDHDSEGRVVTAEFDSFYLLSVYVPNSGDGLRRLAYRITEWDPSLGNYIKELEKSKPVILTGDLNCAHEEIDIYNPAGNRRSAGFTIEKRQSVSTN

SEQ ID NO: 92893 - protein, 76 aa, Gossypium hirsutum
  Clone ID: LIB3145-037-Q1-K1-F4.pep
LVPLYVVAFVSPDLILCMAIYDFSKRGLLWTRLLESCFNKVSQVTLSPSFGNALPNVQAQNAGPPSAGSANVGRSE

SEQ ID NO: 92894 - protein, 134 aa, Gossypium hirsutum
  Clone ID: LIB3145-037-Q1-K1-F8.pep
GRVGGRVGCFQAGVGCSPRGGCEGGGGSFGRKDGCDESGSDGEGLEACEKNASDKNSHDIVTHKNAEEHRDLPVPSNISRLPLAYSGKFTGSFPHSIRSSSQLCNTPERCSSESSLGQSKFNSNLQAIPEDETP

SEQ ID NO: 92895 - protein, 63 aa, Gossypium hirsutum
  Clone ID: LIB3145-037-Q1-K1-G10.pep
NGRVPRQNNQNIYLYIPIISSSTNMLITSNHHSSFHITSLHIHQLFTYTTTFSTFTLYVFFLS

SEQ ID NO: 92896 - protein, 73 aa, Gossypium hirsutum
  unsure (1)..(73): unsure at all Xaa locations
  Clone ID: LIB3145-037-Q1-K1-G11.pep
KKPGRPTRTTFXHFNFTFFFIHPNQKTVQDKINIGLAHKKTKTHTLLSTNSISTFFYCTSPNNIFLFQKLIYY

SEQ ID NO: 92897 - protein, 128 aa, Gossypium hirsutum
  Clone ID: LIB3145-037-Q1-K1-G5.pep
SQVHKLKTRVDNVVNESPRKGTSVNVLSSVTPCNTLTGSRSYSSPPGSGERTPVTSQRRSGGNMGDLLMPGSSAVSSHGEVTPFPDAIDGTGQHLPVVSYDNTEDDILIHNHAAKEELRNFQSGLTQQ

SEQ ID NO: 92898 - protein, 47 aa, Gossypium hirsutum
  Clone ID: LIB3145-037-Q1-K1-G6.pep
GLDKQRVHQFAATVRSCKPREVYKGEGIMYTDEIIKKKQGGKIKMIC

SEQ ID NO: 92899 - protein, 31 aa, Gossypium hirsutum
  Clone ID: LIB3145-037-Q1-K1-H11.pep
MFGQTLSSLSLASEFSCNSEKKKYKDSGCVG

SEQ ID NO: 92900 - protein, 135 aa, Gossypium hirsutum
  unsure (1)..(135): unsure at all Xaa locations
  Clone ID: LIB3145-037-Q1-K1-H12.pep
GTVTQTQKIWFSFQALGNMAGAYSYGVXLIEIHVCNFILSNLSTSNNSMILVXDTLKAPPSESKTMSKATLLSVGVTTLFYMLCGCMGYAAFGDLSPGNLLTGFGFYNPFWLLDIANARHXIHLVGAYQVYCQPL

SEQ ID NO: 92901 - protein, 70 aa, Gossypium hirsutum
  Clone ID: LIB3145-037-Q1-K1-H5.pep
LNLIPNVLLLFFNALLGPLKAMSFALGCGAARITCAHINSTRTFRMLLATKLDLTRATFYMIMQCLVAIY

SEQ ID NO: 92902 - protein, 108 aa, Gossypium hirsutum
  Clone ID: LIB3145-038-Q1-K1-A10.pep
YPEMSKCPISLSLSLFLGAITMITAAKALNLNIFNSNPHSPYILSSRSRVPFIISKTPIYLQTLQKNTPQNQNPSPNDSPMAKITKQGSSNKPHKITLPFLFLFIQRH

SEQ ID NO: 92903 - protein, 134 aa, Gossypium hirsutum
  Clone ID: LIB3145-038-Q1-K1-A12.pep
MKSGGGGDSDHSDLEVSGSKEADGGGVTISAEPEKRPRKRGRKPANGREEPLNHVEAERQRREKLNQRFYALRAVVPNVSKMDKASLLGDAISYINELKIKLQKVDSMKEELHKQLEETKKESQRGGLTTSHKL

SEQ ID NO: 92904 - protein, 48 aa, Gossypium hirsutum
  Clone ID: LIB3145-038-Q1-K1-A7.pep
ANPTEIVLIQTKIPSCWRFQNLINLVNKNNGIKQTSYIVTRGNSVKSS

SEQ ID NO: 92905 - protein, 135 aa, Gossypium hirsutum
  Clone ID: LIB3145-038-Q1-K1-B12.pep
PRVRIAIGAARALLYLHEECDREMVDRDVKAANILLDDYCEAVVGDFGLAKLLDHTDSHVTTAVRGTVGHIAPEYLSTGQSSEKTDVFGFGILLIELITGMRALEFGKTVGQKGAMLEWVKKIQQEKKVEVLVDR

SEQ ID NO: 92906 - protein, 50 aa, Gossypium hirsutum
  Clone ID: LIB3145-038-Q1-K1-B4.pep
YTFSRLFHWSDDTLWMTGWICIWGQEQITFIYYDQVLGKAYSHMSYNHHT

SEQ ID NO: 92907 - protein, 96 aa, Gossypium hirsutum
  unsure (1)..(96): unsure at all Xaa locations
  Clone ID: LIB3145-038-Q1-K1-B7.pep
DKELPGFISKEALLHGVETRTSWWMQIPRDSDTYESMSLRGLYPVGEGAGYAGGIVSAAVDGMYSGFSVAQKLGLXFNGDIKSVLGKAQSAGMVKY

SEQ ID NO: 92908 - protein, 35 aa, Gossypium hirsutum
  Clone ID: LIB3145-038-Q1-K1-C5.pep
PRVRPRVRFLPPANELILSVACCAPAPLELELVNL

SEQ ID NO: 92909 - protein, 132 aa, Gossypium hirsutum
  Clone ID: LIB3145-038-Q1-K1-C7.pep
PRVRRVSFNILGYPLRPGETECAYGVRTGQCKFGSTCKFHHPQPTNMMVSLRGSPIYQTVPSPATPGQQSHPGGITNWSRASFIPSPRWQGPSSYASLILPQGMVSVPGWNAYSGQLASVSSSENLQQTNVN

SEQ ID NO: 92910 - protein, 127 aa, Gossypium hirsutum
  unsure (1)..(127): unsure at all Xaa locations
  Clone ID: LIB3145-038-Q1-K1-D11.pep
MGHSAAVGDYRAAXEITKDWNGVDKIVLRSPRGASARVSLHGGQVTSWRNEQGEELLFTSSKPPKAVRGGIPICFPQFGNCGSLEQHGFARNKIWTIDENPPPLGPNDSHAKSFIDLLLKPSEEDLK

SEQ ID NO: 92911 - protein, 133 aa, Gossypium hirsutum
  Clone ID: LIB3145-038-Q1-K1-D3.pep
ARQTSEYPISSNPVLEKERAVGFLSVAFESKAYETTRNLPPFQSLLDVDKTKASEVDVEEISLKEERDLEVEFSAHAAEAADALHKAKELSSQGVNQDGTRWWIETGIEQRPDGVICRWTMIRGVSADQAVEW

SEQ ID NO: 92912 - protein, 41 aa, Gossypium hirsutum
  unsure (1)..(41): unsure at all Xaa locations
  Clone ID: LIB3145-038-Q1-K1-E11.pep
NFEFATDTLEELLYDKEKLLXNGDRGETDIAXNLXSESLYR

SEQ ID NO: 92913 - protein, 98 aa, Gossypium hirsutum
  Clone ID: LIB3145-038-Q1-K1-E4.pep
SYLPLLKMDRKHCGLDVGDRACNLALPTKARGGSLSVRLPCANLYGSTVPYIPHFYHAALEIAGQPINCTFFSVCSGLTVRPDFSPIAPCTHSQRVAS

SEQ ID NO: 92914 - protein, 45 aa, Gossypium hirsutum
  unsure (1)..(45): unsure at all Xaa locations
  Clone ID: LIB3145-038-Q1-K1-E7.pep
RSRVXLKPPLLHHLHYIFQKLNLIKKLYLHLFILQTLKIQISSFI

SEQ ID NO: 92915 - protein, 70 aa, Gossypium hirsutum
  Clone ID: LIB3145-038-Q1-K1-F10.pep
WIREGRKALTQRASEFLRNMEQERDALATEYKSLLEGFLTQLPVQQHVDLKFLLFRLDFTEFYTRQHATM

SEQ ID NO: 92916 - protein, 61 aa, Gossypium hirsutum
  Clone ID: LIB3145-038-Q1-K1-F2.pep
LRTRENASHLPIDRMKMSVKRRRKSGKKKKKTPKNKQNPKTRASGGRQNCAKIVDLFLINS

SEQ ID NO: 92917 - protein, 53 aa, Gossypium hirsutum
  Clone ID: LIB3145-038-Q1-K1-F3.pep
MGSHLNFKNFGGDGNNRSKPVVIFPFVRQSSIYSLTFDELQSTFCGLGKDFGS

SEQ ID NO: 92918 - protein, 129 aa, Gossypium hirsutum
  unsure (1)..(129): unsure at all Xaa locations
  Clone ID: LIB3145-038-Q1-K1-F5.pep
ALDSASICCKXIQIFEKKGCTLGIMRFLVQSAHDKFFKSHVESALKSALRKPKTTTVKLPFGLCGCQEESTKGRDFGEIEEEPSEQTHRNGIENPNTRIQLPMPLPSSSLVVLVDEWQTIQSGADEIGK

SEQ ID NO: 92919 - protein, 66 aa, Gossypium hirsutum
  Clone ID: LIB3145-038-Q1-K1-G1.pep
NRPNTDGDNDYLLNIPELSNVLLYSAIIGELFTNSHILADLFNQSRSQTFRVNEGQFIDKTCPRVR

SEQ ID NO: 92920 - protein, 94 aa, Gossypium hirsutum
  unsure (1)..(94): unsure at all Xaa locations
  Clone ID: LIB3145-038-Q1-K1-G5.pep
RYTSVSVXXIXLELXXQARLSQLTSEFWRRRGPSKGWVLHSSLRIRKGSGLHCSRXSKLXDPMFQKEEYIYKXSSTLXPPVYLVXTPNXXRPSX

SEQ ID NO: 92921 - protein, 133 aa, Gossypium hirsutum
  Clone ID: LIB3145-038-Q1-K1-G7.pep
HASAGQGIFLFAASKPQVMAFCDSEWASCPMSRRLVTGFCVKLGDSLISWKSKKQTTVSRSSAEAEYRSMAVAVAEVVWLNGLLREVSPSQFDKALIFSDSKVALQIAANLVFHERTKHIEINCHFVRDKIKD

SEQ ID NO: 92922 - protein, 82 aa, Gossypium hirsutum
  Clone ID: LIB3145-038-Q1-K1-G8.pep
FANVRNHYKRISFGFYSRVTNYLLFYFCPFLFVSTSCRFFFLFLLLACDSFFAGDRSMRWQVTNEPSGIGKCEGGARWVSGG

SEQ ID NO: 92923 - protein, 118 aa, Gossypium hirsutum
  unsure (1)..(118): unsure at all Xaa locations
  Clone ID: LIB3145-038-Q1-K1-H10.pep
PSRPNSPKFVSLISASLIASSGTLKRSGGVEKXFXKRVPSLATSPSSFKVETSGGKKIKTDNPYRINSDISLTDGVDAFYKYSHLXNVYQYLNKYIANVHGHITGLDTNDWSPTSDFY

SEQ ID NO: 92924 - protein, 58 aa, Gossypium hirsutum
  Clone ID: LIB3145-038-Q1-K1-H12.pep
RVDFNLPRAPLTTLSVIYKSGRVKLKGLLPVICQAFLGWVGEVECHYNDHKINLGHNR

SEQ ID NO: 92925 - protein, 99 aa, Gossypium hirsutum
  unsure (1)..(99): unsure at all Xaa locations
  Clone ID: LIB3145-039-Q1-K1-B12.pep
PVSLNVPSFIDTGRRMTVRSHGNAXKRGGAPRDIFVVIEVIPDPVLKLYDTNILYTCKISYIDAILGTTVKVPTVDGSADLKIPAGVHPGTILVMSKKG

SEQ ID NO: 92926 - protein, 107 aa, Gossypium hirsutum
  unsure (1)..(107): unsure at all Xaa locations
  Clone ID: LIB3145-039-Q1-K1-B2.pep
NQTLKFHXXRDPIFNCSAFLHYALVIRATLIVKTPLFVGSLQXFLQHHQSPCXXYXINQFXXPIXLAISSVYSIAIXLIPWYXLVRTTRSRTISLSFKEETHYFHGX

SEQ ID NO: 92927 - protein, 77 aa, Gossypium hirsutum
  unsure (1)..(77): unsure at all Xaa locations
  Clone ID: LIB3145-039-Q1-K1-B5.pep
QLIFCLVNVYEVRNYSPPPSINNSIKMEVGIEDCLHIEFEYNKSKHWWNPNCXXYHLKDVIIGKIYFLLVRIKIKNM

SEQ ID NO: 92928 - protein, 54 aa, Gossypium hirsutum
  Clone ID: LIB3145-039-Q1-K1-B6.pep
GIVVRDAKEKVLLSCSEIHNDIPFAFAPEAIACCQAVQIGVEKEWQSIIFERYS

SEQ ID NO: 92929 - protein, 65 aa, Gossypium hirsutum
  Clone ID: LIB3145-039-Q1-K1-B7.pep
FNLGAPKKKLLRCKHAYVNLDPLKRPPLFFFFFFFFFFFFFFFFFFFFYFFFFFFFFFLENILNK

SEQ ID NO: 92930 - protein, 78 aa, Gossypium hirsutum
  unsure (1)..(78): unsure at all Xaa locations
  Clone ID: LIB3145-039-Q1-K1-C1.pep
LLHLSPKKKLILINIFPHNTSSTKKPFYYKIIFETFFPQNSTLFTLPRRTNLTYNTDKASXFYATFKNNLYPSSKSTL

SEQ ID NO: 92931 - protein, 80 aa, Gossypium hirsutum
  Clone ID: LIB3145-039-Q1-K1-C4.pep
VHLNIKIRKYTRILTILKWPQSSAKDRCSKILTNIKIRQDLPQQYELLHLKEWFVRLCKHIKKKKQRWSGEMIAHNFKKH

SEQ ID NO: 92932 - protein, 48 aa, Gossypium hirsutum
  Clone ID: LIB3145-039-Q1-K1-D1.pep
CGKAKLTNSFIDEKEVHTFSQMKGKTRLLDPKLQVPIILIYMIKVYSS

SEQ ID NO: 92933 - protein, 44 aa, Gossypium hirsutum
  unsure (1)..(44): unsure at all Xaa locations
  Clone ID: LIB3145-039-Q1-K1-D11.pep
GSGFGKSYMAQKLTTIGGFFNARTKLVAQLWNWKTPXRKNNYKK

SEQ ID NO: 92934 - protein, 65 aa, Gossypium hirsutum
  Clone ID: LIB3145-039-Q1-K1-D5.pep
QVRPQTIGQASRVGGVSPADITALMIILETKRRKAQELRRHQIRASVMVDTVENLSDTLTEAVGK

SEQ ID NO: 92935 - protein, 69 aa, Gossypium hirsutum
  Clone ID: LIB3145-039-Q1-K1-D8.pep
SPGSDKKTFYYCFTTPFLQLTDLFYAQLPLNPYNRIAHGIKPETLKDHSIYSDHRVTLSPAHKYGPNLI

SEQ ID NO: 92936 - protein, 69 aa, Gossypium hirsutum
  Clone ID: LIB3145-039-Q1-K1-E1.pep
HVLGPCKQRTEQVKQHTSTQKSYQVNCISMAHPPHQTISSNILSPAFDKFLRSNLGEKIAITNGFFLRQ

SEQ ID NO: 92937 - protein, 63 aa, Gossypium hirsutum
  Clone ID: LIB3145-039-Q1-K1-E2.pep
VLKGDFSVFFLFEFSLDLDFVCSVSFSNFFKRFFFKKQERERGDLPTNSRPRLAGSPMRVAQA

SEQ ID NO: 92938 - protein, 86 aa, Gossypium hirsutum
  Clone ID: LIB3145-039-Q1-K1-E4.pep
DCLFKLSDTPAASVKVTVVHHLYKLLSNKMPYFLDFYKKLVHLKSASNLQLQNLAEQMLAVNKGLEKVLQKLFASHNDRYISLCFP

SEQ ID NO: 92939 - protein, 62 aa, Gossypium hirsutum
  Clone ID: LIB3145-039-Q1-K1-F2.pep
VSEHPIHIGRYPVSHFSLVPSLLRSDVNPPKVHLRPSKLPIISEFRGAYCHHHSDKNTDSSR

SEQ ID NO: 92940 - protein, 95 aa, Gossypium hirsutum
  unsure (1)..(95): unsure at all Xaa locations
  Clone ID: LIB3145-039-Q1-K1-F5.pep
VFAPLGPSLXCGVFVPXRCVPFXXXXASSXXVLSFSLAPXRXVXFFFFCLFLAXFSVPWLSXFXXXXPPVVXPVPPLXAFVFCWLRXVARLRLLR

SEQ ID NO: 92941 - protein, 131 aa, Gossypium hirsutum
  unsure (1)..(131): unsure at all Xaa locations
  Clone ID: LIB3145-039-Q1-K1-G2.pep
ISLYSIAADMRGKAAILGPLITEHAKGGKCIVFTQTKRDSDRLAYAMARNFKCEALHGDISQSQRERTLSGFRDGHFNILVATDVAARGLDIPSVDLVIHYELPNTSETFVHRTGRTGRAXKKRSAILIYT

SEQ ID NO: 92942 - protein, 30 aa, Gossypium hirsutum
  Clone ID: LIB3145-039-Q1-K1-G4.pep
ILITLGKYFKGPRNPTKSCKARGSYLKGHF

SEQ ID NO: 92943 - protein, 102 aa, Gossypium hirsutum
  Clone ID: LIB3145-039-Q1-K1-H12.pep
FLISYKHSIISFTVTNASGFLRMAAHNKNTYLYLQTKKVFRFVLFKINEKKIDLLFEKTENPSQNYHDLTSSFPENDYLFADYDFYFQTINNCHNIKIFFIT

SEQ ID NO: 92944 - protein, 67 aa, Gossypium hirsutum
  Clone ID: LIB3145-039-Q1-K1-H3.pep
KVYRSPWGVTTTGSVDKCPPTGVCPISQFSLRNLLVRSIGCGLFRYYSQLLKGVCFSSRFKLGTASF

SEQ ID NO: 92945 - protein, 70 aa, Gossypium hirsutum
  Clone ID: LIB3145-039-Q1-K1-H5.pep
CWKKKKKKKKKKKKKKKKKKKKKKKKKKKKKKKKKKKKKKKKKKKKKRGGPFKKSKVFKRILETQYFFFI

SEQ ID NO: 92946 - protein, 55 aa, Gossypium hirsutum
  Clone ID: LIB3145-039-Q1-K1-H6.pep
VAPLFALCLGFAPPSPPPFMCHGLDATSGRRTGFSTPFWSSPEGEVSFPSFSFLF

SEQ ID NO: 92947 - protein, 46 aa, Gossypium hirsutum
  Clone ID: LIB3145-039-Q1-K1-H9.pep
LHTPITDTSAPTYHPIIDRGHLDKFLTQMTKPPPNYSNYLEHQTRS

SEQ ID NO: 92948 - protein, 115 aa, Gossypium hirsutum
  Clone ID: LIB3145-040-Q1-K1-A4.pep
YSKKLKLYMDVSEPTGYFLCGTYLCIKTGRWFSHFKTSRCSCGELMDNPTDMCLKVGTVAYKDESEGESMFFITDDLRVMHGLPGDLMNILLNLGINNVCQIEEKVVDISSNEVI

SEQ ID NO: 92949 - protein, 129 aa, Gossypium hirsutum
  Clone ID: LIB3145-040-Q1-K1-B11.pep
GEKRGLAGLQNLGNTCFMNSALQCLVHTPPLVEYFLKDYSDEINTENPLGMHGELALAFGELLRKLWSSGQTAVAPRVFKGKLARFAPQFSGYNQHDSQELLAFLLDGLHEDLNRVKKKPYIELKDADG

SEQ ID NO: 92950 - protein, 93 aa, Gossypium hirsutum
  Clone ID: LIB3145-040-Q1-K1-B7.pep
IIFITILFTSQPTIVRWACTPPVSDDVLHQWKGFCALIANAYFIRGMAWLPVKTLQLEQMAVAGRAEEPSVVASRMRLVFSTLEVVSPQWPRV

SEQ ID NO: 92951 - protein, 84 aa, Gossypium hirsutum
  Clone ID: LIB3145-040-Q1-K1-C4.pep
LTSDLLWKEVRKQSFSSNDLYYLDLDLIVGYRYASKHEYVFLLSFLMYLENLWRVISTTLYGYFKKKKKSPSNISYDYLINLLT

SEQ ID NO: 92952 - protein, 46 aa, Gossypium hirsutum
  Clone ID: LIB3145-040-Q1-K1-C6.pep
RPKAESPIFLDLARNHFQHHHAPTFSTTPPHQHTHEQFLSTPGRVG

SEQ ID NO: 92953 - protein, 132 aa, Gossypium hirsutum
  Clone ID: LIB3145-040-Q1-K1-D1.pep
GFCPRCRSDKETLLHAMRDCPRTKAVLALGGLNTKVLEGTYSRCVDWIEDMARTLDKKALSDLITVLWNIWNSQNNRIFRDKEEAAMVMWGRAAALSQDFRIFNFVEKPLIPKPESEKGWSKPDQGVVKINF

SEQ ID NO: 92954 - protein, 80 aa, Gossypium hirsutum
  Clone ID: LIB3145-040-Q1-K1-D12.pep
MYLYMGGKVTGAVEICSVKMDQLLSYLGDHSFQKHSCSWMSGLNVIDLVRWRDLHISETYWKLVKEAIFKEGSLSLATLL

SEQ ID NO: 92955 - protein, 56 aa, Gossypium hirsutum
  Clone ID: LIB3145-040-Q1-K1-D6.pep
GILLIKLHVFVCWFSPLSLHFQSDVLISQAISLANPLSLETLNSINLSCFLESKLF

SEQ ID NO: 92956 - protein, 60 aa, Gossypium hirsutum
  Clone ID: LIB3145-040-Q1-K1-D8.pep
LTIFCLADPPNVGGVPYNAKDTTSKNNRTDVHLHAYRYQQSSTDHGCKILTGWAACKYIQ

SEQ ID NO: 92957 - protein, 130 aa, Gossypium hirsutum
  Clone ID: LIB3145-040-Q1-K1-E1.pep
PPVRPRVRACFSFYYASTPYFLPYFGCPLILRTRNLPPAKKRQAFLCRIAVVLSIGDFQLTAETFDPFCFDTLILWVLCLQYMACQVGRINLQAGLSISENDVFASSCLTLATCAIQRWSNEYSLSGQSS

SEQ ID NO: 92958 - protein, 73 aa, Gossypium hirsutum
  unsure (1)..(73): unsure at all Xaa locations
  Clone ID: LIB3145-040-Q1-K1-E10.pep
PTRPLFTFFLYFAGLLSTXGASYVTRNKGRRASILVGAVSFFLGGAINTGIQHLLMHLEIWMTLLQWCTCLQC

SEQ ID NO: 92959 - protein, 71 aa, Gossypium hirsutum
  Clone ID: LIB3145-040-Q1-K1-E12.pep
SALQGSSSLQHFIFPISNANVLGFPGGLNPVEFRRISELVSQSLYMYIYTRGFPSSKRIGSHNTSVSTDIK

SEQ ID NO: 92960 - protein, 73 aa, Gossypium hirsutum
  Clone ID: LIB3145-040-Q1-K1-E2.pep
LSSLLPNNNDSNSFAHLLSFSLINPFLFNLQNQTKALKNSPHIHAFLFLHTQTYILKIFSCFFNFPCICKSKN

SEQ ID NO: 92961 - protein, 82 aa, Gossypium hirsutum
  Clone ID: LIB3145-040-Q1-K1-E4.pep
RATNRRHNFELHRKYNDMPVSACSLKVKPNTHTKLDLMPLKQLETEQQIEHNYLPPYSKNPRAANNDTPAHTRVTLNNFIHY

SEQ ID NO: 92962 - protein, 110 aa, Gossypium hirsutum
  Clone ID: LIB3145-040-Q1-K1-E5.pep
YSPPPPVHSSPPPSPPPCIERPPPPPPPCVEYSPPPPSPSPPPPIHYKPPPSPSPPPPVVTYSSPPPPPPVIYHSPPPPSLSPPPAPVYEGPLPPVIGVSYASPPPPPFY

SEQ ID NO: 92963 - protein, 55 aa, Gossypium hirsutum
  Clone ID: LIB3145-040-Q1-K1-F10.pep
YSKTNYKSYKKTPDYPRLTFPHQISPYNHEGVENSLGAYNWPIIFVKVSVSSHVS

SEQ ID NO: 92964 - protein, 53 aa, Gossypium hirsutum
  Clone ID: LIB3145-040-Q1-K1-F4.pep
NISIKGATLKAKPCHVTVCGISHAASAITGTSPTGRAATGRYKQTSNRAKQLC

SEQ ID NO: 92965 - protein, 130 aa, Gossypium hirsutum
  Clone ID: LIB3145-040-Q1-K1-F9.pep
PRRKNRSRFWNWRNKQHEDAPPLYGELFPSGLGNALLQASENINRLFDSLNMTPSQLIGRVKEQDDCYKLHYDMPGLTKEDVKITIDDGVLNIKGQHKEEEEEGSGDEHWSARSYGYYNTSLVLPDDAKV

SEQ ID NO: 92966 - protein, 53 aa, Gossypium hirsutum
  Clone ID: LIB3145-040-Q1-K1-G10.pep
IIYIECYIIIFFFFFFLKQNYTKNILYKLEMNIQNILKIMLKVTRKHVYDGGF

SEQ ID NO: 92967 - protein, 118 aa, Gossypium hirsutum
  unsure (1)..(118): unsure at all Xaa locations
  Clone ID: LIB3145-040-Q1-K1-H12.pep
ARILKSKWSLSFKKTCLAAIPIFRTPFLGVSLVFMLLYVWSREFPNAQINIYGLVTLKSFYLPWAMLALDVIFGSKLIPDLLGIIAGHLYYFLTVLHPLATGKXFLKTPMWVNKTVAR

SEQ ID NO: 92968 - protein, 43 aa, Gossypium hirsutum
  Clone ID: LIB3145-040-Q1-K1-H4.pep
LACVYTLWRIISGILVSSRTRVQFMASYRVLAMTMLLRAFIGA

SEQ ID NO: 92969 - protein, 125 aa, Gossypium hirsutum
  Clone ID: LIB3145-040-Q1-K1-H5.pep
MIMEGIASRSELRKELERERRRVRDRQRRQSMSHEEREKHLARRRRNYQLRRQRAETARLYPAPPPVQFEDTSISTIQSPLSNSISNISPQFYAAALVDPNHGPKRLMPDTRSAQSLKIPAYKLA

SEQ ID NO: 92970 - protein, 71 aa, Gossypium hirsutum
  Clone ID: LIB3145-040-Q1-K1-H6.pep
RQNPEKQVVLSFKKTCFVILPAYLSFCTECKAIFIIKYFSNNILKKKRTLNVMAGWFSFLCYHYYQMWYFY

SEQ ID NO: 92971 - protein, 51 aa, Gossypium hirsutum
  Clone ID: LIB3145-041-Q1-K1-A10.pep
IFLCFLLFSFFLFFFLTNKRRLDHFIQSPQNVLYQAEIQQRSMTKSSSNIY

SEQ ID NO: 92972 - protein, 61 aa, Gossypium hirsutum
  Clone ID: LIB3145-041-Q1-K1-A12.pep
YLTFISFCNCYLDFVPQTNKDRPLNFVLIDGTWSNSAAMFKRVKEQAKLAWGEEDIPCISL

SEQ ID NO: 92973 - protein, 60 aa, Gossypium hirsutum
  unsure (1)..(60): unsure at all Xaa locations
  Clone ID: LIB3145-041-Q1-K1-A5.pep
MLMDIDEIREESGCPFCXXYFYIVNLCCHIADEHPAEAKNEDRTLYAMRMGVDMVVHITL

SEQ ID NO: 92974 - protein, 41 aa, Gossypium hirsutum
  Clone ID: LIB3145-041-Q1-K1-A6.pep
YGWFFLLRNTFSKEQSKLIRGYSRPLEAYPKAAWKETLTFF

SEQ ID NO: 92975 - protein, 69 aa, Gossypium hirsutum
  Clone ID: LIB3145-041-Q1-K1-A7.pep
HTFVFTKNLHDDWPLPKIKDTIRFKKTNQREAVQSQNGEFIARICRQSVRKMNKSCCEYDHFISGRLAS

SEQ ID NO: 92976 - protein, 61 aa, Gossypium hirsutum
  Clone ID: LIB3145-041-Q1-K1-B1.pep
AHIEYAAPVPMKSSTLCMFLKKTEFDHKAVDITLPCKVSSYLGLYTIYCTIRNIAAIWHVG

SEQ ID NO: 92977 - protein, 65 aa, Gossypium hirsutum
  Clone ID: LIB3145-041-Q1-K1-B11.pep
NPKGSFRRDHGSRRLRRGQPPDPDRRRRKGILQDDGPYPSKLHPCLASPLFLVFHPRHPDLCGGG

SEQ ID NO: 92978 - protein, 89 aa, Gossypium hirsutum
  unsure (1)..(89): unsure at all Xaa locations
  Clone ID: LIB3145-041-Q1-K1-B4.pep
SNKSPIFPMPEPHHFRDYGFDPQYHYLQVLEHARKHKIGTRDFIDSLQFKLEKPISKDDPXSKTMKYWRRNALLFFNWKKWPANSNNQH

SEQ ID NO: 92979 - protein, 70 aa, Gossypium hirsutum
  unsure (1)..(70): unsure at all Xaa locations
  Clone ID: LIB3145-041-Q1-K1-B6.pep
GFSPSLASXXXLVAGLLLPLPGVXFPLLVVLSPALGASSLGXXPPFCLLLSRCAGAPFPCVPPGERPRVR

SEQ ID NO: 92980 - protein, 87 aa, Gossypium hirsutum
  Clone ID: LIB3145-041-Q1-K1-B8.pep
PRVRFGTGSLSDKQSETGSTDDEKSEITDAALSMGTETDGSAEYVHSPEERISGEAQSRTKGPSFTKTCTSNTNIKIRISESFFTRH

SEQ ID NO: 92981 - protein, 65 aa, Gossypium hirsutum
  Clone ID: LIB3145-041-Q1-K1-C1.pep
PRVRCLFWLPLVLIGNICTSQSQNTTVSQLNRNGWSPLTTASEESEIYIGPFFFNFLGPTSCKIS

SEQ ID NO: 92982 - protein, 56 aa, Gossypium hirsutum
  Clone ID: LIB3145-041-Q1-K1-C11.pep
SPFQGTLNHPKLFHYLCCLLENHSCKCCYAHNDGLFLPTHLMFHVLPHHSMFDTTL

SEQ ID NO: 92983 - protein, 43 aa, Gossypium hirsutum
  Clone ID: LIB3145-041-Q1-K1-C6.pep
YTLYLQYSNRQEIVNNKTTADVAGNVLLVTIDSQDARLVSIDV

SEQ ID NO: 92984 - protein, 75 aa, Gossypium hirsutum
  Clone ID: LIB3145-041-Q1-K1-D1.pep
MRLGQGYCHGEGEGQRFRGTDGQHAGRLIDFMPFKKWVPWMIPGLGLGNIFLFMITMYINNCPNNSKKCVGSFLG

SEQ ID NO: 92985 - protein, 48 aa, Gossypium hirsutum
  Clone ID: LIB3145-041-Q1-K1-D11.pep
LAGRDRSGTTTTTYGVYTAKLHFHLAYFYCSVVLTDFIDRYYQEKLYV

SEQ ID NO: 92986 - protein, 95 aa, Gossypium hirsutum
  unsure (1)..(95): unsure at all Xaa locations
  Clone ID: LIB3145-041-Q1-K1-D4.pep
AHLVFVFNLRFRMGPVVDHKCRVCGKLWWQKSPXSSHRIIKGSDMPTAGILPCCHVFHAECLEQVTPKSQIHDPPCPLSLKTIGPLEESASVSEP

SEQ ID NO: 92987 - protein, 93 aa, Gossypium hirsutum
  Clone ID: LIB3145-041-Q1-K1-D6.pep
PTRPVNATELIIALFALYRNKIHVLKYSLMGSILSNLLLVLGTSLLCGGLANLKREQRYDRKQADVNSGLLLLGLLCHMLPLMFKYAVKPETG

SEQ ID NO: 92988 - protein, 79 aa, Gossypium hirsutum
  Clone ID: LIB3145-041-Q1-K1-D7.pep
HASASIQRIGTFCRSGPSENIIAGCCRPPEIIPPFIIWSDDLFIIQNILFLLKKKTHLTSMKYEGFLWGQNIKINFFYI

SEQ ID NO: 92989 - protein, 53 aa, Gossypium hirsutum
  Clone ID: LIB3145-041-Q1-K1-D8.pep
EKVTFYMRLQRHKMGVDDFELLTIIGRGAFGEVRLCKEKATSNVYAMKKSITI

SEQ ID NO: 92990 - protein, 57 aa, Gossypium hirsutum
  Clone ID: LIB3145-041-Q1-K1-D9.pep
VFPSGLFEKRGRGFKFWGPKKKHNSSNGRERKFGSLKGTPHDSILIIRTGLCFNDTV

SEQ ID NO: 92991 - protein, 64 aa, Gossypium hirsutum
  Clone ID: LIB3145-041-Q1-K1-E2.pep
KNMQERKRQRRFDSRLMPSHQDCYRKNESTNSLRTLVSELWYHVKLANMVVSRSSLFLILFHYI

SEQ ID NO: 92992 - protein, 42 aa, Gossypium hirsutum
  Clone ID: LIB3145-041-Q1-K1-E3.pep
KPSSFHLKQDLSKRIQGLILPLTCCFLRRNQQWYHKVPWIGL

SEQ ID NO: 92993 - protein, 44 aa, Gossypium hirsutum
  Clone ID: LIB3145-041-Q1-K1-E6.pep
ETLSLNDLCSYNIASCYYSSLNNDEATLYMTWPYETKSWRTNNA

SEQ ID NO: 92994 - protein, 86 aa, Gossypium hirsutum
  unsure (1)..(86): unsure at all Xaa locations
  Clone ID: LIB3145-041-Q1-K1-E8.pep
FWRSGXVXXSPXGAFXXLXLXXAGXPPFCXXXXLGXXWFSSSLLVXAALAALGALXXVLLXLXXLXXXXGXPAXALFXXLPILLVF

SEQ ID NO: 92995 - protein, 62 aa, Gossypium hirsutum
  Clone ID: LIB3145-041-Q1-K1-F11.pep
RAGVRPFQDLATRGQCAASGGCRWCRSEALDDMCFEAIEAWRLPRQVFSCDPPSGAAHARFN

SEQ ID NO: 92996 - protein, 86 aa, Gossypium hirsutum
  unsure (1)..(86): unsure at all Xaa locations
  Clone ID: LIB3145-041-Q1-K1-F2.pep
DNVEFFLSHDDTDARDAVGRCVDVTKGVTFMELNSVRASNNKVTCCHFSSDGKLLASGGHDKKAALWYTDTLXPKSTLEEHSCLIT

SEQ ID NO: 92997 - protein, 91 aa, Gossypium hirsutum
  Clone ID: LIB3145-041-Q1-K1-F3.pep
MDTNMFHFHFPSDLRSFKDMADGMARGPTSPAGGSHESGEQCSSHSTVREQDRYLPIANISRIMKRALPTNGKIAKDAKETVQECVSEFIS

SEQ ID NO: 92998 - protein, 77 aa, Gossypium hirsutum
  Clone ID: LIB3145-041-Q1-K1-F5.pep
TFSMFHAGLFPERDVISQTSIGLQRELGSALGSGALESARGSAHTNCWRSMLRLPKRFSLSKERTSCGTMGRGSLEP

SEQ ID NO: 92999 - protein, 93 aa, Gossypium hirsutum
  unsure (1)..(93): unsure at all Xaa locations
  Clone ID: LIB3145-041-Q1-K1-G10.pep
HAVALIFACCEKRENFILKQYCRFVFLLEQELFLLHENKHSSVGSTVMEHPVTHPGSNLWPDRIHYSDHTNSKTSLAFQLQPRKWEKGXEAWV

SEQ ID NO: 93000 - protein, 45 aa, Gossypium hirsutum
  Clone ID: LIB3145-041-Q1-K1-G11.pep
HYSLIHYTCYHYHYTMIFVATPLVQYRVQKKIHNHRIHTNTIPYL

SEQ ID NO: 93001 - protein, 49 aa, Gossypium hirsutum
  Clone ID: LIB3145-041-Q1-K1-G4.pep
PTVSFLYDLVLPPPRSCSISIMSDCFCFSFSISFLFSFFWFCFFLADPI

SEQ ID NO: 93002 - protein, 51 aa, Gossypium hirsutum
  Clone ID: LIB3145-041-Q1-K1-G8.pep
TKGGSGEEEPTIVHRCGSPRFQMATLPYIVHLRFQCNHISFINFDVTITSF

SEQ ID NO: 93003 - protein, 71 aa, Gossypium hirsutum
  Clone ID: LIB3145-041-Q1-K1-H10.pep
SISRFFIGNYCSRRILEKRSSWIAPALHLLPMEMHPPWPEGLLSAPGIRKNSVGPSMRIRSDKSTPGGLYT

SEQ ID NO: 93004 - protein, 66 aa, Gossypium hirsutum
  unsure (1)..(66): unsure at all Xaa locations
  Clone ID: LIB3145-041-Q1-K1-H11.pep
FSQIQKCIGRHERKHAALAISSFNGKQLYGQPIXCNWASPSTPREGTSSHFNIFVGDLCPEVTHAT

SEQ ID NO: 93005 - protein, 99 aa, Gossypium hirsutum
  Clone ID: LIB3145-041-Q1-K1-H12.pep
FELTIDYRQLVFLDGRGKKKLMDGARIAFTDDVDPSSIAGRIVECSWNKEEQCWSCMRIRSDKSTPNDINTYRKVMRSITDNITEEKLLEEIDEISLLP

SEQ ID NO: 93006 - protein, 31 aa, Gossypium hirsutum
  Clone ID: LIB3145-041-Q1-K1-H5.pep
YSIYLHLSIELQVFNPVQTSQHLCSIRKNTK

SEQ ID NO: 93007 - protein, 61 aa, Gossypium hirsutum
  Clone ID: LIB3145-041-Q1-K1-H8.pep
SSSGRSLVPELILDPSIFSDESRFGAVKDQFNRMQSRSSKTTTITQSSDSTSTVWLGSFST

SEQ ID NO: 93008 - protein, 96 aa, Gossypium hirsutum
  Clone ID: LIB3145-041-Q1-K1-H9.pep
FSPFFHKPHLVERVYIREAPLIAYSPLIYTTYTHPYYITMLFFEHTFNKPQQTRSNFLMITYTSTPYNIFTYHINNWCHTTHCALLNTLEVMHDLT

SEQ ID NO: 93009 - protein, 50 aa, Gossypium hirsutum
  Clone ID: LIB3145-042-Q1-K1-B1.pep
SILIRYNSTIISQYIIHFNSTNASHVFWPQVIIGFLVALIGQFVVMSPIS

SEQ ID NO: 93010 - protein, 108 aa, Gossypium hirsutum
  unsure (1)..(108): unsure at all Xaa locations
  Clone ID: LIB3145-042-Q1-K1-B4.pep
NLGISGFIFSQLSYGAWGGFFDQLXLNKXNSLLQCCQDNXLYFFFNANVYANGRTHEIMCQSIMELXWKRSDIVDFTQHLXGGPSPNDKGLSINHIVEGTNVSLITLF

SEQ ID NO: 93011 - protein, 54 aa, Gossypium hirsutum
  Clone ID: LIB3145-042-Q1-K1-C1.pep
CNKSKRWDNIHGLNKIKYGLIHTREPGLLVSLTCTEIGTSTSSFLVRLTLKNIE

SEQ ID NO: 93012 - protein, 70 aa, Gossypium hirsutum
  Clone ID: LIB3145-042-Q1-K1-C2.pep
NNFVISIVVFIFSSYNQINSNKLEGMVVVYLPAPFFNLRRWWGILISHAHVIKFVDPPCLFDKASFVSVN

SEQ ID NO: 93013 - protein, 52 aa, Gossypium hirsutum
  Clone ID: LIB3145-042-Q1-K1-C5.pep
ATAGIPGAHASEPYKLVNKNGLIYGALRPILTKSLLPVMLSGKTFTSLKGRP

SEQ ID NO: 93014 - protein, 130 aa, Gossypium hirsutum
  Clone ID: LIB3145-042-Q1-K1-C8.pep
HAGKGYNIVGLSQGNLIGRAVVEFCDGAPQVKNFISLGGPHAGTASVPLCGSGFPCLIADKLIKSEIYSDYIQAHLAPSGYLKLPNDIPHYLEKCRFLPKLNNELPHERNSTYKERFTRLQNLVLILVSW

SEQ ID NO: 93015 - protein, 44 aa, Gossypium hirsutum
  unsure (1)..(44): unsure at all Xaa locations
  Clone ID: LIB3145-042-Q1-K1-D1.pep
QILLANVIDDAGTYTXHALNNTATVMDEAYALKRQGLTVYGKGG

SEQ ID NO: 93016 - protein, 44 aa, Gossypium hirsutum
  Clone ID: LIB3145-042-Q1-K1-D7.pep
NQVIEHSYTTKRIKRTYRILMRLVKNDKILKIHIDTSQKQYLHS

SEQ ID NO: 93017 - protein, 87 aa, Gossypium hirsutum
  Clone ID: LIB3145-042-Q1-K1-E1.pep
MGNNPSQLLPSELIDRCIGSKIWVIMKGDKELVGTLRGFDVYVNMVLEDVTEYEITTEGRRITKLDQILLNGNNIAILVPGGSPDPE

SEQ ID NO: 93018 - protein, 122 aa, Gossypium hirsutum
  Clone ID: LIB3145-042-Q1-K1-E2.pep
FSFYSSRITTMESDFTTLSLDDEEEEILQMEGEIESVSKEEDLSLVGCFLTASIIHYPAMKSIMANLWHPIKGVQIRDLGERGVFLNFFTLWIWRELLKGLLGHLITICISCNGEKTHSGFY

SEQ ID NO: 93019 - protein, 60 aa, Gossypium hirsutum
  Clone ID: LIB3145-042-Q1-K1-E6.pep
RQNRTVLGYPHPGIRVFSFKMGEYPSRSFRILHLFQLDPSDCFYFFQLSLIILFSSHFNP

SEQ ID NO: 93020 - protein, 90 aa, Gossypium hirsutum
  unsure (1)..(90): unsure at all Xaa locations
  Clone ID: LIB3145-042-Q1-K1-E8.pep
PTRAIKRAIVSYKVVHSLSVRPIVGTLARIATALGVSELILDGRRDFNAFCSXGSPSIIXYRHFHSLTDARLLLREIDCDICGVDITDDA

SEQ ID NO: 93021 - protein, 96 aa, Gossypium hirsutum
  Clone ID: LIB3145-042-Q1-K1-F4.pep
CISYIVFPAQLIILGTGSYILTFLKDKKNMNDAYKTKTQYDIHFTSHGNQSPHLRDFYAISPYPTLTKRSEKQIKDTYVYMYVCTYVPLYVYTAKT

SEQ ID NO: 93022 - protein, 94 aa, Gossypium hirsutum
  Clone ID: LIB3145-042-Q1-K1-G10.pep
LLELRVAKGKSAPSVAPQVSVSKNLPPASDWDHAPQHTAQQPVLSSNVVEMSGVDMVDEISPIEYEGEIKSVYVRNLLSTVSESEIEEEFKKFG

SEQ ID NO: 93023 - protein, 79 aa, Gossypium hirsutum
  Clone ID: LIB3145-042-Q1-K1-G11.pep
DFATLILVLLVHGFKVETWTECLCCLVCQYPNYPFRLIIMTMMKMLPSSNLKSVRAQSVSLRMYILCVHINVMMLLKGE

SEQ ID NO: 93024 - protein, 46 aa, Gossypium hirsutum
  Clone ID: LIB3145-042-Q1-K1-G3.pep
KKQAFDRGSHEGGGCLSRIFLRISNNSPWNLGFQIGCNVSKGAHAS

SEQ ID NO: 93025 - protein, 48 aa, Gossypium hirsutum
  Clone ID: LIB3145-042-Q1-K1-G6.pep
LLTGGLYKRADPATFLRRLYQMSFLIEFLVSPCYLSIFHALFYLIVEI

SEQ ID NO: 93026 - protein, 43 aa, Gossypium hirsutum
  Clone ID: LIB3145-043-Q1-K1-A12.pep
HASEKSRSKSISTNKDEAMREFWVILGYLSPTCSFSLFIPSFF

SEQ ID NO: 93027 - protein, 42 aa, Gossypium hirsutum
  Clone ID: LIB3145-043-Q1-K1-A4.pep
LILFTILIFIFYIYIFLKLTYSNFIKFIFNNYILIGGVFFRD

SEQ ID NO: 93028 - protein, 126 aa, Gossypium hirsutum
  Clone ID: LIB3145-043-Q1-K1-A5.pep
PTRPVESKGGQVKVESAAPPMRQSLSDGSLDTMARKPADPEEELRWMSQEVRGYVEAVLNSLAANVPKAVILCQVEKAKEDMLIQLYSSVSAISNPRIEELLMEDQNVKRRRERYQKQSSFFLKLT

SEQ ID NO: 93029 - protein, 45 aa, Gossypium hirsutum
  Clone ID: LIB3145-043-Q1-K1-A8.pep
HASGSIYENTSHFIVSSCWFILFLNRNIKFVYDPYTCFFWATLYW

SEQ ID NO: 93030 - protein, 57 aa, Gossypium hirsutum
  Clone ID: LIB3145-043-Q1-K1-B1.pep
SAQLWYSLRLWNSRSADHLTVRNRECRLPIRIGCVSSSWLLLAVNKYRIGGLDMFFG

SEQ ID NO: 93031 - protein, 60 aa, Gossypium hirsutum
  Clone ID: LIB3145-043-Q1-K1-B10.pep
MNTLQSFHLLFLPFFFITRQTILLIQIETNNFTQFSVHTNKFNIINTKELQPKSKYQNEF

SEQ ID NO: 93032 - protein, 107 aa, Gossypium hirsutum
  Clone ID: LIB3145-043-Q1-K1-B11.pep
DTTAPADSALNTLGHRSPDSDPTPNPDASPTPSDLNRAAEETGHDESNLEQQLQDLDLKEEVAAAVAAAETKDDGERKGDNDYNEADAGAAEEKEDEEEKNENENDG

SEQ ID NO: 93033 - protein, 106 aa, Gossypium hirsutum
  Clone ID: LIB3145-043-Q1-K1-B2.pep
MNKDFIAEELDNDMQEEEEEGVGGDHGFPDDEKKKKGYGRRGAAGGGGGVSPPACQVEKCGLDLSDAKRYHRRHKVCEIHAKAPFVVVAGLKQRFCQQCSRFHELP

SEQ ID NO: 93034 - protein, 66 aa, Gossypium hirsutum
  Clone ID: LIB3145-043-Q1-K1-B7.pep
LFFFYQSTLVFGHIGLWWTKEEPMMISWFWTKRTRLPYIFDIHEWKFTGFCSTFGLYMTLETIEVL

SEQ ID NO: 93035 - protein, 82 aa, Gossypium hirsutum
  Clone ID: LIB3145-043-Q1-K1-B9.pep
QTTTRFIPQCSTISLSMESKIVSLYLSSIVEQYRASCQFMVINAWSHVGSPKIHKEQAVHHVQPRCSFQDIINKLGRVLIFT

SEQ ID NO: 93036 - protein, 71 aa, Gossypium hirsutum
  unsure (1)..(71): unsure at all Xaa locations
  Clone ID: LIB3145-043-Q1-K1-C1.pep
FLXKXFFFFFFFFFFLLERSLEDIIPNTHQHSSTRHGIVKVTMIRKTATEPALTIKTICITMKLWLLDIGS

SEQ ID NO: 93037 - protein, 98 aa, Gossypium hirsutum
  Clone ID: LIB3145-043-Q1-K1-C10.pep
WGVDDILSFIKARMFSHGNKAASVPNWVYISSRIGTSRTVSRPSWLWRLGIGHVFLIIIFCLELMENKMNHNSPRLQHTAAERNGEKEALEREASQSL

SEQ ID NO: 93038 - protein, 68 aa, Gossypium hirsutum
  Clone ID: LIB3145-043-Q1-K1-C11.pep
SIPMFYWLVLSIFYYGHFVLDPRLFCVSLPKSYYLEELVLERTIRVLIYGVWAFTGDYSFDLGIKNVG

SEQ ID NO: 93039 - protein, 68 aa, Gossypium hirsutum
  unsure (1)..(68): unsure at all Xaa locations
  Clone ID: LIB3145-043-Q1-K1-C12.pep
DAQSCDALLLLDITXRSLWDKETDRIFVLMNFRCIDTIKXLLXRECLAVVTCADILELSAREGIVSEG

SEQ ID NO: 93040 - protein, 53 aa, Gossypium hirsutum
  Clone ID: LIB3145-043-Q1-K1-C2.pep
TAPLIAITLNRMSLHSQSVFFVYRAAKNYRQDICHMSFSSNTYDITLWLLHCG

SEQ ID NO: 93041 - protein, 61 aa, Gossypium hirsutum
  Clone ID: LIB3145-043-Q1-K1-C7.pep
LSKIWPLIRENLVWYIRDGANVCCWKDHWIPSMGPLILKIPSFTNLDLDCSIREMVNFDGS

SEQ ID NO: 93042 - protein, 74 aa, Gossypium hirsutum
  Clone ID: LIB3145-043-Q1-K1-D10.pep
VRRHLQMQVRATKLSAFATCVKIAEEGGGMHALYAGLIPSILQVLPSAAISYLVYEFMKIVLKVESAYNIISFY

SEQ ID NO: 93043 - protein, 67 aa, Gossypium hirsutum
  Clone ID: LIB3145-043-Q1-K1-D7.pep
LQDNTVAYYLTALKDMFGGGINRLFLLYEIGGAQGALHRLAIPMKNVLYWEIFAVNINILRRWWEQT

SEQ ID NO: 93044 - protein, 49 aa, Gossypium hirsutum
  Clone ID: LIB3145-043-Q1-K1-D9.pep
DSVGKKFFDPSKSQCLQDVTSSPFCFTRAPSRVPKEGKMSRIIPGPHIL

SEQ ID NO: 93045 - protein, 34 aa, Gossypium hirsutum
  Clone ID: LIB3145-043-Q1-K1-E10.pep
PALVTRTHQKELWLDRRRVPFSLMKYYVCIPLKP

SEQ ID NO: 93046 - protein, 135 aa, Gossypium hirsutum
  Clone ID: LIB3145-043-Q1-K1-E5.pep
QINETEPGTEIAAETSAAMAASSIVFRYVDPPYARRLLNKAKSLFYFGKRNKGTFDGECPFYCSFSGYNDELLWAASWLYTATHDQKFRKFITEEAVSAVVDEFNWDLKYAGIQVLLSDIFLQSNDEALKIFRNM

SEQ ID NO: 93047 - protein, 74 aa, Gossypium hirsutum
  Clone ID: LIB3145-043-Q1-K1-F10.pep
VQYWRGKYYEWVLKGLKPNLLNNKELKIWTWMARQLGPFAYTKGTRDSSTFTEQNLQRDTAGSIGDVLDPVRQE

SEQ ID NO: 93048 - protein, 106 aa, Gossypium hirsutum
  Clone ID: LIB3145-043-Q1-K1-F12.pep
THASAKRFLNRLFISYDEKKYQGAEFKDGMKDVATKRMELQNSLSILWSKQEAALVKTRELKKLCDSTPFIVFRRKTRINIWRDQCLVNYQYLALDLTLHLMIVYF

SEQ ID NO: 93049 - protein, 118 aa, Gossypium hirsutum
  Clone ID: LIB3145-043-Q1-K1-F2.pep
QENNWWVSKVIRKKHDSSVTSVAWHPNNILLATTSTDGKCRVFSTFIKGVDTRESKTGSSSDPKFGEQIVQLDLSSSWAFGVKWSPSGNTLAYVGHNSMIYFVDDIGPSPLAQNVAFR

SEQ ID NO: 93050 - protein, 85 aa, Gossypium hirsutum
  unsure (1)..(85): unsure at all Xaa locations
  Clone ID: LIB3145-043-Q1-K1-G1.pep
KMTDEWACGVTLXVMLGWANTFEDQQDAKKHKKTIRRMMXFNPKTETRAIYSKSAXHLLSSIFVASLCTKIIIHDMRSHSWLLKN

SEQ ID NO: 93051 - protein, 47 aa, Gossypium hirsutum
  Clone ID: LIB3145-043-Q1-K1-G3.pep
GQPTVTPMKVNRLIYETRCSITEYQCPHIKPIFFEAFSFFIFFGRVG

SEQ ID NO: 93052 - protein, 59 aa, Gossypium hirsutum
  Clone ID: LIB3145-043-Q1-K1-H2.pep
VINTVSSTAASVVRFISSAVSCVYFEVASSVFITVSVGNSRGSCAISRSDASHSSPSPL

SEQ ID NO: 93053 - protein, 65 aa, Gossypium hirsutum
  Clone ID: LIB3145-043-Q1-K1-H6.pep
PTRSTNHTYLYVALKGIIACCGDVYLYPFTCCTKDHAEMVTGASLTIVNDYCTWYMQDTSGKRSL

SEQ ID NO: 93054 - protein, 131 aa, Gossypium hirsutum
  unsure (1)..(131): unsure at all Xaa locations
  Clone ID: LIB3145-044-Q1-K1-A3.pep
VQSCVVHLQKVPLARRFALVPLGPPLLAYRSNCKAMLSAVAGAVELVVDRPYKAGEPIVVWCGPQPNSKLLINYGFVDDDNSYDRLVVEAALNTEDPQYQDKRLVVQRNGKLSVQAFPVYAXKGKEAVSDM

SEQ ID NO: 93055 - protein, 114 aa, Gossypium hirsutum
  Clone ID: LIB3145-044-Q1-K1-A7.pep
HASDRWKNKRQVAVDSKIGRITNFINKVKVPMQVFIACGISSSGGKAVDPFRKPKPGMWHIMEKHFNSGIPIDMDQSFYVGDAAGRPNDHSDADIKFAQAVGLKFYVPEDYFKS

SEQ ID NO: 93056 - protein, 79 aa, Gossypium hirsutum
  Clone ID: LIB3145-044-Q1-K1-B2.pep
VGFEELVGSVGLVEFVGFVESVGSVEFLGFLEFEKMVDRNRQDYNYRNIHKTNIFQDHLKNQNREYQFRTLSGQHDLRE

SEQ ID NO: 93057 - protein, 59 aa, Gossypium hirsutum
  Clone ID: LIB3145-044-Q1-K1-B7.pep
SEHQSADILRYTTTPLRLAMTPYITTCVVAILIQHHGPCAHTMNRCWLKESACLSPLDR

SEQ ID NO: 93058 - protein, 84 aa, Gossypium hirsutum
  Clone ID: LIB3145-044-Q1-K1-C11.pep
NSSQDPFFSDDNYQWRGTASSSSKKNKFIHSSSTTQGSATQVRFSRDSHDIISMGCWGYSTINRTSIPHSSHIWIFFPLLEHYT

SEQ ID NO: 93059 - protein, 108 aa, Gossypium hirsutum
  unsure (1)..(108): unsure at all Xaa locations
  Clone ID: LIB3145-044-Q1-K1-D2.pep
PRVRPRIRPHERSGAKTGLSAIISXTIMCCALLVLTALYEYIPQCAMAAIVISGAITMADYEEALFLWRVYKKESILWTITTTTTLXLRINIGVLAGACVTLAIVIHK

SEQ ID NO: 93060 - protein, 63 aa, Gossypium hirsutum
  Clone ID: LIB3145-044-Q1-K1-D9.pep
AEAASKEAKAQRKYEELHLQLKANAAAREADTSRKYDKLQLASEYDEDVSAVTEICRLRRLFS

SEQ ID NO: 93061 - protein, 52 aa, Gossypium hirsutum
  Clone ID: LIB3145-044-Q1-K1-E1.pep
MLCQVERVSHRDNLESFVQKSENLERQCLAKAMRSYCELRVLPYEENKTVVF

SEQ ID NO: 93062 - protein, 82 aa, Gossypium hirsutum
  Clone ID: LIB3145-044-Q1-K1-E12.pep
PRVRRKTFSILFSTLSSAQLQNFLCRLSLEMYVFYFHFHFYSFSVASPIPIHSSFRFPQSFPLRPYTRISIHSSFSLNYFCW

SEQ ID NO: 93063 - protein, 65 aa, Gossypium hirsutum
  Clone ID: LIB3145-044-Q1-K1-E4.pep
NLGGRNLFALQLLEKFYQDPFSVQAFSIPSFCKKSGPPQKTRFGGGDLKTPTPLNPVLGTPPFLF

SEQ ID NO: 93064 - protein, 77 aa, Gossypium hirsutum
  Clone ID: LIB3145-044-Q1-K1-E5.pep
NMGTKNEISDQKWGEGLNVLRFKKMTTIQTTTSIKINYPILYGSQLCMKNNSYLSHSETTIFIAKRIEIVTSEQCRF

SEQ ID NO: 93065 - protein, 111 aa, Gossypium hirsutum
  Clone ID: LIB3145-044-Q1-K1-E8.pep
KNHKHTASCKVKQYKCSCQCNEPSQLALHRYAGSEYACCQLLHVATLTQLEQCNPMTHVYMHHYGHQMQQDYQSYNDRLVYIKSIGMFDHRFQPCRSLRPWQQSQLFTRAC

SEQ ID NO: 93066 - protein, 66 aa, Gossypium hirsutum
  Clone ID: LIB3145-044-Q1-K1-F5.pep
FIVFDGAFISEIFTIHRGLASTSKAVEIYKIRSVLGSPTEKSLTNGLNYARPIHYQIPVFYWTHYA

SEQ ID NO: 93067 - protein, 52 aa, Gossypium hirsutum
  Clone ID: LIB3145-044-Q1-K1-F9.pep
HSGLAQSYHYLTALNSIIQSIETETVFTKIQSRQETESCSANFGIFFLKLVS

SEQ ID NO: 93068 - protein, 44 aa, Gossypium hirsutum
  Clone ID: LIB3145-044-Q1-K1-G10.pep
VQECKQYRHVRMESKQDERGQSKNREPPVSLVCNQRKSVVFIDT

SEQ ID NO: 93069 - protein, 34 aa, Gossypium hirsutum
  Clone ID: LIB3145-044-Q1-K1-G12.pep
LRCIHFNTPTASLNKSPDLAGIEHNNNCVFNPET

SEQ ID NO: 93070 - protein, 114 aa, Gossypium hirsutum
  unsure (1)..(114): unsure at all Xaa locations
  Clone ID: LIB3145-044-Q1-K1-G2.pep
FGYIPPEYAYTMQVTAPGNVYSYGVVLLEILTTRFPVDEDFGEGVDLVKWVHGARARGETPEQILDARLSTVSFGWRREMLAALKVALLCTDTTPAKRPKMKKVVEMLQEIGXN

SEQ ID NO: 93071 - protein, 46 aa, Gossypium hirsutum
  Clone ID: LIB3145-044-Q1-K1-H5.pep
HCHIISIDLIFKNLKTRLLNFNFKSHIPFVRKSYIFFQNFIKKDFI

SEQ ID NO: 93072 - protein, 99 aa, Gossypium hirsutum
  Clone ID: LIB3145-044-Q1-K1-H7.pep
LDSFPMAIQNSTRVSQDMGIEAPIPISSKLSDFNNIFRRIVNAAEHPHLSIPETEAGRSRKQYHRLINRSLMVVSVGAAVAIVGFAAYRVYATRKNASS

SEQ ID NO: 93073 - protein, 49 aa, Gossypium hirsutum
  Clone ID: LIB3145-044-Q1-K1-H9.pep
VHQAGFRGEKIDVVVKVSALENNFKTSHVYVILTIQVYGKCNILESGIL

SEQ ID NO: 93074 - protein, 95 aa, Gossypium hirsutum
  Clone ID: LIB3145-045-Q1-K1-A3.pep
PRVRLGDVCRIMQKVTHNERNRSNRTRTKSCGEMQEEKLKEVGVANRATCSFDLVGRLLHACTSSSSSSSCDEKLLQSQQMDAWMDGAVWLCYYY

SEQ ID NO: 93075 - protein, 109 aa, Gossypium hirsutum
  Clone ID: LIB3145-045-Q1-K1-A4.pep
PRVRKNSTAPIFSQTPLIFGRLDCRQRTRGRRPASCEGFSGQSVEARSKAKTADRGNKERKNLAPSQTESDDGERPPTAGLRVCFKSVEEACGGAAAAMAGLDAAAEEG

SEQ ID NO: 93076 - protein, 44 aa, Gossypium hirsutum
  Clone ID: LIB3145-045-Q1-K1-B10.pep
TCPPFLIFFPLYFLPFFFFFFFFFLFFFFFFFFFYFIFFFFFFF

SEQ ID NO: 93077 - protein, 36 aa, Gossypium hirsutum
  Clone ID: LIB3145-045-Q1-K1-C10.pep
LILLWLSLTWISGIVQTLLYADFFYYYFDSWKNNKK

SEQ ID NO: 93078 - protein, 94 aa, Gossypium hirsutum
  unsure (1)..(94): unsure at all Xaa locations
  Clone ID: LIB3145-045-Q1-K1-C7.pep
KKSSIQXRKESKEIILTKYTVNSGYKSPNRKRCKGPIFTFSKYVHRFNKKFIFTYIYRKEYYSRSKYAKVKFFKIYVHIYIANNKKERDTFNRR

SEQ ID NO: 93079 - protein, 133 aa, Gossypium hirsutum
  Clone ID: LIB3145-045-Q1-K1-E11.pep
PRVRFLTFAVFTGSFAQCKEIIYGNAEEQWHKKLWFFIVGRPAYGKWFYMDGLPSLFLSCFGILFDDHKGPPMYVFVDQNDTNTVPRWVGSGQNGIGRMRAVSLDDSHEEMKIPLPMRFLGCARSSYIVLELL

SEQ ID NO: 93080 - protein, 132 aa, Gossypium hirsutum
  Clone ID: LIB3145-045-Q1-K1-E2.pep
MAIPSLSLLFLFTSLPLFSSSPVKDPELVVQDLHRAINVSRRNLKYLSCATGNPIDDCWRCDPNWEKNRRRLADCAIGFGKNAIGGRDGKLYIVTDSSDDDPVNPKPGTLRHAVIQDEPVWIVFAHDMTIQL

SEQ ID NO: 93081 - protein, 41 aa, Gossypium hirsutum
  Clone ID: LIB3145-045-Q1-K1-E5.pep
LTTIGVLAGGKGLLRLGFFFFFLFQFCCIGLLVTEFRVWVC

SEQ ID NO: 93082 - protein, 49 aa, Gossypium hirsutum
  Clone ID: LIB3145-045-Q1-K1-F2.pep
LEDFFFLSYFSFFNKESKFSFALPDPIINFVSINFLRQPYLDIGCFLGL

SEQ ID NO: 93083 - protein, 86 aa, Gossypium hirsutum
  Clone ID: LIB3145-045-Q1-K1-F3.pep
EDYTCVKSHGPNPKTTHIYGNCVVKSFCSSVLDEPRCAAESDFLSFCHTCKKNLEQKIDIYIYRGEKAFCSQECRYQEMVLDEEEK

SEQ ID NO: 93084 - protein, 93 aa, Gossypium hirsutum
  unsure (1)..(93): unsure at all Xaa locations
  Clone ID: LIB3145-045-Q1-K1-F9.pep
LRNPLQRLKFWLYSRKGKEKFTKNKKNTMFFFFCFPLLLLLVCLFAGVGVLALGYGWCVKTVRRCAGGRTEARAWLLEGTERLTQGRGTTXGF

SEQ ID NO: 93085 - protein, 40 aa, Gossypium hirsutum
  Clone ID: LIB3145-045-Q1-K1-G2.pep
SFLGLRTISVFKFLFFNIHRFPEFDHDFTRIKSPVVLSFD

SEQ ID NO: 93086 - protein, 50 aa, Gossypium hirsutum
  Clone ID: LIB3145-045-Q1-K1-G4.pep
YLFFLLYLLHYKFVCLSSNLHPSLAAPCEQPSFCILLIVLQKYTTVGSIS

SEQ ID NO: 93087 - protein, 88 aa, Gossypium hirsutum
  Clone ID: LIB3145-045-Q1-K1-H11.pep
SKCREGIDVNMMESSGMLRARLDSSMQEPQQEEQEVGVKDGKDRTVGQSGMSLANSSTAEYMPEPLNALPCGTAAELGLDFKVREDLV

SEQ ID NO: 93088 - protein, 85 aa, Gossypium hirsutum
  Clone ID: LIB3145-045-Q1-K1-H12.pep
GNDCYEFFNVSHKPGEDPEIQIDPLFCYYIYNFSYLPVLFSVQAQCCLTPIRLACEAVEMNNLFWNMCFCLQQKYYCAVKYMDVL

SEQ ID NO: 93089 - protein, 51 aa, Gossypium hirsutum
  Clone ID: LIB3145-046-Q1-K1-A1.pep
FSKILYMIIKSRLFVKSEFVYISGRYFSLHCQFIYSLQVYFGVTYMYEPLP

SEQ ID NO: 93090 - protein, 44 aa, Gossypium hirsutum
  Clone ID: LIB3145-046-Q1-K1-A3.pep
QSSLSTSVSPQYNPICTISQVYQGFVLSQSRHTYMNVFHIVRVG

SEQ ID NO: 93091 - protein, 137 aa, Gossypium hirsutum
  unsure (1)..(137): unsure at all Xaa locations
  Clone ID: LIB3145-046-Q1-K1-C6.pep
DKSKFRILLSFGQHGRELITSELALRILSILSEEQFLPKMDRASLNGTLENVVIKIVPMENLNGRKLVEEGNLCERRNGRGVDLNRNWSVDWGKKEKDYDPYEENPGIAPFSEPXTQIMRKXAISFDPHIWVNVHSG

SEQ ID NO: 93092 - protein, 141 aa, Gossypium hirsutum
  Clone ID: LIB3145-046-Q1-K1-C7.pep
PRVRPRVRAFAWEPKGHRFAVIHGDNPRPDVSFYSMRSTHNLGRVAKLTTLKGKQANALFWSPGGRFIVLAGLKGFNGQLEFFNVDELETMATAEHFMATDVEWDPTGRYVATSVTSVHEMENGFNIWSFNGKLLYRILED

SEQ ID NO: 93093 - protein, 48 aa, Gossypium hirsutum
  Clone ID: LIB3145-046-Q1-K1-D3.pep
IKVFMDLKSIYNLFSPNKNTSLNKYPKFLNPTTYNLTQLNRHPNYTVL

SEQ ID NO: 93094 - protein, 94 aa, Gossypium hirsutum
  Clone ID: LIB3145-046-Q1-K1-D7.pep
PRVRTSSSSNVDDMSSTPEELSEIVELPSLGTSYESAESGNEFVYVDRFDGWLFNPCGIPWDYEENCGYFGDETSMQIQDSLITNGFSPLLWDH

SEQ ID NO: 93095 - protein, 106 aa, Gossypium hirsutum
  Clone ID: LIB3145-046-Q1-K1-E10.pep
RPPTRPGLQVFKDGHWIDAKYIPGALIIHIGDQIEILSSGKYKAVLHRTTVDKEKTRMSWPVFLEPPGEFVVGPLPQLVDPQLPPKYKPKKFKDYSYCKFHKLPQY

SEQ ID NO: 93096 - protein, 133 aa, Gossypium hirsutum
  Clone ID: LIB3145-046-Q1-K1-E2.pep
SLNIEEDEEDFPQDSPEERRVDLVVPLKKSVKQIIRETTVVTTRRILERLAVIYVSQRMAWKLLKDVPKSAVRKSQRGMPATVYFFRVSRTTFRGHLLGVTAAWIVQTGIEIYRSFSRITNSDESNEANVTVR

SEQ ID NO: 93097 - protein, 34 aa, Gossypium hirsutum
  Clone ID: LIB3145-046-Q1-K1-E5.pep
DPIASRCDEQLDNPRRSMFLDGFSNYSSHLNHWK

SEQ ID NO: 93098 - protein, 53 aa, Gossypium hirsutum
  Clone ID: LIB3145-046-Q1-K1-E6.pep
LPQPHFRASHSVFPRRSLTRSLTRYRNRGRNCFVLGLLRFRRVATRGDRNPVA

SEQ ID NO: 93099 - protein, 61 aa, Gossypium hirsutum
  Clone ID: LIB3145-046-Q1-K1-E7.pep
TPIFIFNFVFGSRVYIRRKKRDPILVFLFSFAFSRIKKFIISLSKRTSQFQFLLQTFRFGA

SEQ ID NO: 93100 - protein, 130 aa, Gossypium hirsutum
  unsure (1)..(130): unsure at all Xaa locations
  Clone ID: LIB3145-046-Q1-K1-E9.pep
VKPTPVTPEGKPVEAAPSPVELEIQKLSEERKELLKGSYRDRHFNAGSILLGFGVLEAVGGGVNTWFRTGKLFPGPQLFAGAAITVLWAAAAGLVPAMQKGSETARSLHIALNAXNVILFIWQIPTGIDI

SEQ ID NO: 93101 - protein, 76 aa, Gossypium hirsutum
  Clone ID: LIB3145-046-Q1-K1-F12.pep
KNTTGNYSLCCKASHCSMCLLKETSLCVGYVYCGPSLVLATVSLSKCSIAFTIGIVKAHKSSCPHQKCEPKSVARQ

SEQ ID NO: 93102 - protein, 88 aa, Gossypium hirsutum
  Clone ID: LIB3145-046-Q1-K1-F2.pep
VAPTEKHPGSLLEGFSQSQIHTLAVKDTCMDAGSLPGEFTFEHSYRQRVAYCTRTTYDNNSDTNAIAIYNSLKGRINCMIATNDCSML

SEQ ID NO: 93103 - protein, 91 aa, Gossypium hirsutum
  unsure (1)..(91): unsure at all Xaa locations
  Clone ID: LIB3145-046-Q1-K1-F5.pep
CTEAYDGDGNRYGTGSDDGTCKLSDIRNGHQLQVYYQQHNDKDVPLVTSIAFSISGRLLFAGYSNGDCYVXYTLLATVVLNLGSDQKSHEN

SEQ ID NO: 93104 - protein, 48 aa, Gossypium hirsutum
  Clone ID: LIB3145-046-Q1-K1-F6.pep
PEETYGSVRTDLSDTQQSCQHSVSMNRSAAIVVPSPMMHQRPSQLDVG

SEQ ID NO: 93105 - protein, 76 aa, Gossypium hirsutum
  unsure (1)..(76): unsure at all Xaa locations
  Clone ID: LIB3145-046-Q1-K1-G1.pep
DQVCRGGSQPIAPENEEFLIHASHFDTDNFPXCVLVNKIDVDGGISKLVSLKNVLAWRALKGNIPYFETSAKEVSY

SEQ ID NO: 93106 - protein, 87 aa, Gossypium hirsutum
  unsure (1)..(87): unsure at all Xaa locations
  Clone ID: LIB3145-046-Q1-K1-G11.pep
HPQTMLAIGGDILPMCTKXKSKTAYCPFDYLGINQHTTNYLYDPHHPKPKVSGYQQDWYAGFAYAKXGLSIGPTTHSXWIYNVPWGL

SEQ ID NO: 93107 - protein, 35 aa, Gossypium hirsutum
  Clone ID: LIB3145-046-Q1-K1-H11.pep
NMDLLSYMLLYNITSRMFDLLELVSCGDIWINLIS

SEQ ID NO: 93108 - protein, 38 aa, Gossypium hirsutum
  Clone ID: LIB3145-046-Q1-K1-H2.pep
QKGMHKVKQIGSQDQLLNAAKVSLGILGVISKLTLKRG

SEQ ID NO: 93109 - protein, 113 aa, Gossypium hirsutum
  Clone ID: LIB3145-046-Q1-K1-H6.pep
HASAAVPQVYYNAQQGVKNVVTETGAGQWGSSLAFACSLFGLGCEVWQVRASYDQKPYRKLMMQTWGAKVHPSPSDITHAGRKILQMDPSSPGSLGIAISEAVEIAAANDDTK

SEQ ID NO: 93110 - protein, 115 aa, Gossypium hirsutum
  Clone ID: LIB3145-047-Q1-K1-A2.pep
HACALIRDSQYIVEEVSDAQVNQIVSGALDRLHYERDPCVQFDGERKLRVYLHREREEEDFADDGTSSTKKWKRPKKDTAEQSDQGAVIAAFHAAGDQLGFDDDKKMETECEDRQ

SEQ ID NO: 93111 - protein, 49 aa, Gossypium hirsutum
  Clone ID: LIB3145-047-Q1-K1-A3.pep
AFEHCFAVYSPFFLPVSMHVVLAALRELRRYKQEKAKYLTWKAKANTAT

SEQ ID NO: 93112 - protein, 50 aa, Gossypium hirsutum
  Clone ID: LIB3145-047-Q1-K1-B3.pep
GVLGCRGPYSSQGRMGIRQHHVLVRISELVISPSAAIYGRCNKMISAFCS

SEQ ID NO: 93113 - protein, 128 aa, Gossypium hirsutum
  Clone ID: LIB3145-047-Q1-K1-B4.pep
AEELLRKIQELEAGHEHLQQEMSRLKQSGAGQSKPDHIRQRSHSTSPQRRRFPGNSAAAAATTAAALKKSSCSFRHSSPLQRESRRCDTGNGGGGGDGESRNTGPVAVNFTNSQYLNILQSMGQSVHI

SEQ ID NO: 93114 - protein, 74 aa, Gossypium hirsutum
  Clone ID: LIB3145-047-Q1-K1-B5.pep
PRVRFVEPLMNNQYLFARHEHLQREVSKLIQTRSDHSNLLPHSTKIPIFLSLTPPISVEFCRIYKYDICKLSIK

SEQ ID NO: 93115 - protein, 110 aa, Gossypium hirsutum
  Clone ID: LIB3145-047-Q1-K1-C12.pep
SRVRPRVFLLEEDEEEEEEEEYPCSSEVEFPLQEEPLPQILIDEKWSNRLFKFIAIGIPSAILVIVAIKWVGPFMLKKEIVPVLQWEAHAFITTESILVNGTSLASISNF

SEQ ID NO: 93116 - protein, 41 aa, Gossypium hirsutum
  Clone ID: LIB3145-047-Q1-K1-C2.pep
LCWLCKIAVSKYKVICYILVYYILYICMYDYVIISTYSFLF

SEQ ID NO: 93117 - protein, 83 aa, Gossypium hirsutum
  Clone ID: LIB3145-047-Q1-K1-C5.pep
GHKLLLQGEQNQIQSNYRLFYKRLWSLDLHPKIKITNWRIFCNYVPTFCNLHYRRMLGSATCRRCQNGAESREHLFWEYPTIK

SEQ ID NO: 93118 - protein, 73 aa, Gossypium hirsutum
  Clone ID: LIB3145-047-Q1-K1-C9.pep
HASGLIDFMFDWQQLLQWIILSLIFSYLLAKLISLVVSFQDDNLFYNPSPKLQCSRLLENRPFRFLILPDWKY

SEQ ID NO: 93119 - protein, 67 aa, Gossypium hirsutum
  Clone ID: LIB3145-047-Q1-K1-D11.pep
RRRLAGHNERRRKSSAESSSAAESSSRRGMMISAQLKESHYLADDQRARVNPMAIHGSSSFKRSQIR

SEQ ID NO: 93120 - protein, 60 aa, Gossypium hirsutum
  Clone ID: LIB3145-047-Q1-K1-D2.pep
HHPFHPSFFITVPTSLSFCHCVDISLLVVSRSTLWFSNTRSSPFKLGSNYLREWNCILQR

SEQ ID NO: 93121 - protein, 72 aa, Gossypium hirsutum
  Clone ID: LIB3145-047-Q1-K1-D3.pep
MFCLIYSVLNGLSTHPSFKWSNRITSINIYIYLFADDLMNPGFFLLYCIHRQNISRNKQAEAKKGIDQDFLS

SEQ ID NO: 93122 - protein, 42 aa, Gossypium hirsutum
  unsure (1)..(42): unsure at all Xaa locations
  Clone ID: LIB3145-047-Q1-K1-D5.pep
HFGHSYFKRKFILHNQLIYTLMSLFLXKKKKKKKKRKKKKKE

SEQ ID NO: 93123 - protein, 44 aa, Gossypium hirsutum
  unsure (1)..(44): unsure at all Xaa locations
  Clone ID: LIB3145-047-Q1-K1-E10.pep
HCLNTPGYDCTTRIGYSEXHEKTRAATLYENDIIAAAALFSNRN

SEQ ID NO: 93124 - protein, 76 aa, Gossypium hirsutum
  Clone ID: LIB3145-047-Q1-K1-E7.pep
GRPRERLAMNVSSNFFLRTREEKGTIQELTMFTDILIHVTSIKTWENLYHNIMTILNAYFHFSKTKLSLYMIYYMG

SEQ ID NO: 93125 - protein, 58 aa, Gossypium hirsutum
  Clone ID: LIB3145-047-Q1-K1-E9.pep
MWYKNGESILFFFQKNALGDCVMLTLKLFVYTVVIFFVSLFIFGFLSNDPGRNPGREE

SEQ ID NO: 93126 - protein, 92 aa, Gossypium hirsutum
  unsure (1)..(92): unsure at all Xaa locations
  Clone ID: LIB3145-047-Q1-K1-F11.pep
MPTNENFSGVSNCYVFKSQLQEYAQKVGLPTPVYETFKEGPSHKPSFRSTVTVNNVKYDSLXPGFFNRKAAEQSAAEGALLELFKAGKLMKA

SEQ ID NO: 93127 - protein, 121 aa, Gossypium hirsutum
  Clone ID: LIB3145-047-Q1-K1-F12.pep
DAILIGAQFCSDSFSSISHAGVKNGVSYSLYARIESITSLEILEQCGGLQRKQITLVDNDGVKLRFLLWNEQVILANLFSVGSMLALDRPYIAIAAESALETSMPIIHTKSNSRIKVACCS

SEQ ID NO: 93128 - protein, 113 aa, Gossypium hirsutum
  unsure (1)..(113): unsure at all Xaa locations
  Clone ID: LIB3145-047-Q1-K1-F7.pep
GPISITLRHRLLCRVVRDAAKNEYETEEPFLVLNEVTIDRGISSYLTNLECYCDNSFVTCVQGDGLILSTTSGSTAYSLAAGGSMVHPQVPWYLCSQPICPHSLXSFRPLIFA

SEQ ID NO: 93129 - protein, 93 aa, Gossypium hirsutum
  Clone ID: LIB3145-047-Q1-K1-F9.pep
SSSEDVQPLDCPIVFLLEEATSFKAERNSSASIASPIQSLKPCPTGDKDPANQEPDCNVKMQFNFQNKVLTQSRNKLKIKLVQHQFVNTYTSI

SEQ ID NO: 93130 - protein, 80 aa, Gossypium hirsutum
  Clone ID: LIB3145-047-Q1-K1-G1.pep
VDTLISGEIDCADFRAKLLANKSKPAIINVNIGTTVKGAVDDLDLVIQTLEGCGFSRDRFYIHCDGALFGLMMPFVKRVS

SEQ ID NO: 93131 - protein, 97 aa, Gossypium hirsutum
  Clone ID: LIB3145-047-Q1-K1-G10.pep
AELDGCAIYDQCASLLNVGRGKDLRKLASMLVNLMNGGQPLQNASIDVLSPSLIPATYAFVFQKAMDLYKKHRLQICAFTNAIGGMFGIYFIAQRGA

SEQ ID NO: 93132 - protein, 108 aa, Gossypium hirsutum
  Clone ID: LIB3145-047-Q1-K1-G3.pep
SSLELSTCNAQIFNVVCCRLKGIHEQHSSRTQIASQYFSAIVPYHLMGDFQDSQLPYCYLVYWNSAGPLLDTVEGVIASGEDPYTADKDQQNLGSVAGLGFACQVGST

SEQ ID NO: 93133 - protein, 46 aa, Gossypium hirsutum
  unsure (1)..(46): unsure at all Xaa locations
  Clone ID: LIB3145-047-Q1-K1-G5.pep
YNFLIIYFKLNNIYILKIFYILFNYIFFFFFFFFIFXISQCIFCST

SEQ ID NO: 93134 - protein, 73 aa, Gossypium hirsutum
  Clone ID: LIB3145-047-Q1-K1-G6.pep
NPKIDFPKHTAILAKTPKQISPKIPRHLKLLSRPDHLLITVLCSLYCVPSPSLSAAVTNRLALVNFLLHFGFL

SEQ ID NO: 93135 - protein, 134 aa, Gossypium hirsutum
  Clone ID: LIB3145-047-Q1-K1-H2.pep
LSQESIHVIVLGFSSAIITAENIRGEFKYRTKDKEELFASKSHKRHVIKVGTMIRFLVKSFDEEILHIIGSLISAHTGSIRWLDRHLEEDSEFDRSSMKSRDREWLGDKAVDEGATPMSYDNHIKMSKKRRITE

SEQ ID NO: 93136 - protein, 115 aa, Gossypium hirsutum
  unsure (1)..(115): unsure at all Xaa locations
  Clone ID: LIB3145-047-Q1-K1-H7.pep
MMKLNLLFGLTLAILISGAQMATFTVKNNCQYPIWPATLVGDPNLPQLPKTGFQLDPQAQDSLNVPSPWKGRLWARTQCSTSGGRFTCATADCGSDQIACNGXGGAPSATLAEFT

SEQ ID NO: 93137 - protein, 51 aa, Gossypium hirsutum
  unsure (1)..(51): unsure at all Xaa locations
  Clone ID: LIB3145-047-Q1-K1-H8.pep
RSLLKKERPFKMRVFLTIVYPSKPALFVFFDILFFFIFSFFFFFXKQTILD

SEQ ID NO: 93138 - protein, 89 aa, Gossypium hirsutum
  Clone ID: LIB3145-047-Q1-K1-H9.pep
GDFRPPCTVADAVKLRRRAVAFLTDFWASPERKLPFSSFFFPRLSELGPLAHHSNFGPLSPKISRAQKSCTLQSKFCSLHININRSDAW

SEQ ID NO: 93139 - protein, 52 aa, Gossypium hirsutum
  Clone ID: LIB3145-048-Q1-K1-A10.pep
CFKYDLLFRFMFLSTNYDQINFLFVVPVHLGIHMRPIILHERVINFTVTAHI

SEQ ID NO: 93140 - protein, 115 aa, Gossypium hirsutum
  Clone ID: LIB3145-048-Q1-K1-B7.pep
MQPPLLYFQNSSNRRGVQTHFPTSARVSRLRNRILNQPRMAPSRTRNFQFPLDMDLDMRLDILEAMDAAIGDSYDMGMASHIFQIQRDFNEIDYEMLLALDDYYHQHWCAFINQI

SEQ ID NO: 93141 - protein, 93 aa, Gossypium hirsutum
  unsure (1)..(93): unsure at all Xaa locations
  Clone ID: LIB3145-048-Q1-K1-B9.pep
GKPLTVRQEVFGALRPTALRGTYTDYAILTEDXLSSKPASLTHAVTNAIPFATLTAWSALKSPARTTVGETLLEVCSGGTVSFSSIQIAVAAG

SEQ ID NO: 93142 - protein, 68 aa, Gossypium hirsutum
  Clone ID: LIB3145-048-Q1-K1-C2.pep
HASEKRDFRRLWITRINAVIRGVGVSYSYSRLIHNLYKKQLLLNRKILAQIAILNRNCLYMISNEIRK

SEQ ID NO: 93143 - protein, 84 aa, Gossypium hirsutum
  Clone ID: LIB3145-048-Q1-K1-C8.pep
SVNSFPLLEMYKVHVKLILFFKRCAIQSTVASSEFHIPALYKSENCHMWSKHRRHKLSFWEVYWGPVLNFKSNVICALGGFFES

SEQ ID NO: 93144 - protein, 129 aa, Gossypium hirsutum
  Clone ID: LIB3145-048-Q1-K1-D3.pep
FYSWGEESGGRLGHGVEADVPKPKHIDTLNGTKFESVACGEYHSCAVTVSGDLFTWGDGTHNSGLLGHGTEVSHWIPKRVSNMEGKHVLYVSCGPCHTALVTCGSQLFTFGDGSFGALGHGDHSSSNIP

SEQ ID NO: 93145 - protein, 99 aa, Gossypium hirsutum
  Clone ID: LIB3145-048-Q1-K1-E12.pep
LFKMKIKPYIPDFKLAFEHFCIHAGGRAVLDELEKNLQLSEWHMEPSRMTLFRFGNTSSSSLWYELAYSEAKGRIRKGDRTWQIAFGSGFKCNSAVWKA

SEQ ID NO: 93146 - protein, 58 aa, Gossypium hirsutum
  Clone ID: LIB3145-048-Q1-K1-E5.pep
ASPFAIQLLAFEQAKNLLLHLVTFDARIPDKLLFMLLVFLTNSSYTRKHCKAVKLSLL

SEQ ID NO: 93147 - protein, 95 aa, Gossypium hirsutum
  Clone ID: LIB3145-048-Q1-K1-F11.pep
NKKEKVLYYTKKVGDQIQFRSQANIQEIMENESTLENQNYKMEKLCNYMPSFSNLKFLRMMASPMCRRCLTGAETREHIFKACPPLRVDPWLSIE

SEQ ID NO: 93148 - protein, 76 aa, Gossypium hirsutum
  unsure (1)..(76): unsure at all Xaa locations
  Clone ID: LIB3145-048-Q1-K1-F12.pep
SLFCRCFPDPKIXIYDVGMKKKGVDDFPFCVTWSSGEKENVSCESLEAXARIAFNKYFFKYAVNDSLLLLVRVHPF

SEQ ID NO: 93149 - protein, 59 aa, Gossypium hirsutum
  Clone ID: LIB3145-048-Q1-K1-F5.pep
LVSCLTTTGRMRVYRRWRRPKSDTCYARRCNDCYARPWVPMSVSLTYSERWRHLWRKNT

SEQ ID NO: 93150 - protein, 80 aa, Gossypium hirsutum
  Clone ID: LIB3145-048-Q1-K1-G4.pep
ASAATYEDLKRKLEFFQSKVKHAVEVLKPQCINNGTGAGAIQELEGLAEMDINAPFHEQAQPSQQVPTQPPILQNEGQGP

SEQ ID NO: 93151 - protein, 54 aa, Gossypium hirsutum
  Clone ID: LIB3145-048-Q1-K1-G7.pep
YNYNLSRLKKKKKKKKKKKKKKKKKKKKRKGGLFKKTKLTLACKAINFFFFEVT

SEQ ID NO: 93152 - protein, 66 aa, Gossypium hirsutum
  Clone ID: LIB3145-048-Q1-K1-H10.pep
KISLDMKLVCFIWSHIKSFSIAATINSHLIVHTVSLSNTLLSMQIGVIYSRSFKVADKNQFSSHAS

SEQ ID NO: 93153 - protein, 55 aa, Gossypium hirsutum
  Clone ID: LIB3145-048-Q1-K1-H3.pep
IFVIYEAIVERLYRFQSSETNICIFFLRKKEGTMESELRTCWMLLLKDNCISQRD

SEQ ID NO: 93154 - protein, 44 aa, Gossypium hirsutum
  Clone ID: LIB3145-048-Q1-K1-H4.pep
SSQAMNDVGDFCYRVGLRGLKKRVHFCFLRKKPTSLKLCIYSME

SEQ ID NO: 93155 - protein, 71 aa, Gossypium hirsutum
  Clone ID: LIB3145-048-Q1-K1-H5.pep
HASEQLEFGEEQLRLHREWINGSWTPPLAGDEQVKESDRAVTEAKMKFSKVVTQEKLKRDNAASKKKSKSG

SEQ ID NO: 93156 - protein, 61 aa, Gossypium hirsutum
  Clone ID: LIB3145-049-Q1-K1-A1.pep
FQLKPKLSINFTGSERMLSQTGYPQQKRMAVGQLVLPIDQPPVDRYSQNQNRLLCRYRQLD

SEQ ID NO: 93157 - protein, 80 aa, Gossypium hirsutum
  Clone ID: LIB3145-049-Q1-K1-A10.pep
QRIDQLAMMLCKMSSQTTWKEFHIQQPREKDMAKKDKVIIIIFNGNLKISYTATSQMPKKPFSFPAFLSNRNLHKATPRC

SEQ ID NO: 93158 - protein, 43 aa, Gossypium hirsutum
  Clone ID: LIB3145-049-Q1-K1-A11.pep
KPLMTTTREDSETMHKIAHSKSRIPRALAEPMIKEGLGLISFN

SEQ ID NO: 93159 - protein, 43 aa, Gossypium hirsutum
  Clone ID: LIB3145-049-Q1-K1-A12.pep
IKLLFYLHKPCNVLFICSTYLIVYSYELGAAVVQHFMNLHYLR

SEQ ID NO: 93160 - protein, 130 aa, Gossypium hirsutum
  unsure (1)..(130): unsure at all Xaa locations
  Clone ID: LIB3145-049-Q1-K1-A6.pep
LESLLNYSFQDPSFLVEALTHGSYMLAEIPGCYKRLEFLGDSVLDYLITRHLYNNYPGISPGLLTDLRSASVNNNCYALSAVKAGLHKHILQSSQKXYKHIKETVESFQELSLDCTFGWESEKSFPKVLG

SEQ ID NO: 93161 - protein, 90 aa, Gossypium hirsutum
  Clone ID: LIB3145-049-Q1-K1-A8.pep
QNEESLKLKLHHTEQVALRMEEAAEVVWGRFLEAENVAEVLMGISKELLGRLQIVQFNMNGSIQREAELKSKLEGCIEELNAKCLALGKA

SEQ ID NO: 93162 - protein, 128 aa, Gossypium hirsutum
  Clone ID: LIB3145-049-Q1-K1-A9.pep
EKSDSGGNDEHSDSNTTPTSTENGDGANGGSTSNSDSGESNGQTEKSNAGSDSNSNAVQSEESNNNSGGEGTHTNENSNADQNSGTSSNTNDNAGAGQNENDSSNSNNDGNANGNGGSTGNQSNTNDN

SEQ ID NO: 93163 - protein, 39 aa, Gossypium hirsutum
  Clone ID: LIB3145-049-Q1-K1-B11.pep
STNINPTILKKKVQKPILNNREIFHGLLNRPAPLPPNFR

SEQ ID NO: 93164 - protein, 100 aa, Gossypium hirsutum
  Clone ID: LIB3145-049-Q1-K1-B12.pep
HTDVEMDVVDSAIVYGEERGAAIGTTKDTSKNAGLYWRSFHLTYHELFDARVDPAEELSKERFEECIKDMVTRIGTSVGQSVITYVNSDMALLWTLLSES

SEQ ID NO: 93165 - protein, 102 aa, Gossypium hirsutum
  Clone ID: LIB3145-049-Q1-K1-B4.pep
AQVVGIFENPRVSLYLQCSPTFGIPLPHTSAHHTTPDSRTDVGAWPAPRPCASLSCLHILQLEQENGQKPLVFGYKAFKFFNVKGRIQYRYREKREQNPNFF

SEQ ID NO: 93166 - protein, 38 aa, Gossypium hirsutum
  Clone ID: LIB3145-049-Q1-K1-B5.pep
MLLCYVEIWMNKILILLFFFLKQSYLVFNKSYRGVMKM

SEQ ID NO: 93167 - protein, 80 aa, Gossypium hirsutum
  Clone ID: LIB3145-049-Q1-K1-B7.pep
IMGTKCRDEAAVNVEHQFIPSFNGKSSVHDNYQGENPESKSLSALRKGSENDIYVSLQLGEPEPKRRKYSDSLCIVKESK

SEQ ID NO: 93168 - protein, 128 aa, Gossypium hirsutum
  Clone ID: LIB3145-049-Q1-K1-C7.pep
NMTCFSLKKYTANAENIATRIAINIHNSLKLPVFLFSSTCLLGIALVPPSIMVLEGLAAVLRRDTSFDGSSTCTLVAEGTSFSNVFVHVALVESLFRTDISLPSSPPELQTAEESAFTIFCNFFTKIS

SEQ ID NO: 93169 - protein, 43 aa, Gossypium hirsutum
  Clone ID: LIB3145-049-Q1-K1-D7.pep
RSRYLRLLPQFSTSFLHIILFCAVRKLLPYLSSCTLAVLECDE

SEQ ID NO: 93170 - protein, 81 aa, Gossypium hirsutum
  Clone ID: LIB3145-049-Q1-K1-D9.pep
RKMTAQVSSSLVRVLSGHMEEQHAGKSDILITKDLLGNLSNAKPTTPKAIDLEFKVKNFRFIFFFFSFVSATNPKNSFMSI

SEQ ID NO: 93171 - protein, 39 aa, Gossypium hirsutum
  Clone ID: LIB3145-049-Q1-K1-E10.pep
SNSWWRKEPLPSPQMTRHGPLTRAYYTPGWKGQTNTTTT

SEQ ID NO: 93172 - protein, 68 aa, Gossypium hirsutum
  Clone ID: LIB3145-049-Q1-K1-E3.pep
AGPWYSILSHRVQHPSALCCLLPCQPTQDLLINAAIIYRLAERRMPYHATRVKLGGQDRPSLHEGPVT

SEQ ID NO: 93173 - protein, 78 aa, Gossypium hirsutum
  Clone ID: LIB3145-049-Q1-K1-F1.pep
AEYVLSSQSPCYELNQPPSALYWSRFLYLFALCMNTMLHCTHKRCLSTCVHSICTATGRPNPSVFPERAGMLRDSFAS

SEQ ID NO: 93174 - protein, 67 aa, Gossypium hirsutum
  Clone ID: LIB3145-049-Q1-K1-F5.pep
DQHQLNKPFHAQPDFSRTKATKKHRKNICTVHLFLVRRPWIFPKNVITIFFPKTTLRKQHSSLFFSI

SEQ ID NO: 93175 - protein, 46 aa, Gossypium hirsutum
  Clone ID: LIB3145-049-Q1-K1-G4.pep
KHPGQRLWRLLVLKKPKIFPSENEIGRPRRVLVNHYSDPEGQHNRI

SEQ ID NO: 93176 - protein, 89 aa, Gossypium hirsutum
  Clone ID: LIB3145-049-Q1-K1-G5.pep
WKTERPRVSETLSAANISINASVHLASFQLPTISAVVPGHDSRLQIMPWSTPESTPVYRCQHSFTAKSPRWYLQKGKEERQRQHIYGRK

SEQ ID NO: 93177 - protein, 71 aa, Gossypium hirsutum
  Clone ID: LIB3145-049-Q1-K1-G6.pep
TVNLGSFRLFTNSALFTFHHSIHFNHPVVKVKFFFICAVVSIFSLTLSPFFFFLFFYFFFFFFFFFFFFFF

SEQ ID NO: 93178 - protein, 129 aa, Gossypium hirsutum
  Clone ID: LIB3145-049-Q1-K1-H7.pep
EKIQVSGLKEFLYSEGKLISVSLGAAPTVQLMFSSPMTKSKAEKFRGHILQAFETVLGSSVTVEIRCEAKKDGRAGVGPSQMVMDLESNSRNRMHAGVGSQAQQSGNEIVEIPASPREAKDNEHADNFE

SEQ ID NO: 93179 - protein, 87 aa, Gossypium hirsutum
  Clone ID: LIB3145-049-Q1-K1-H9.pep
VKTRTSLAQLGLFRTLRVIHLKMNRMIPRRICRCRLEARKEAGKSIIKWKLKEKPPRNGYREKKLQPPSNSQNRKVKRTVGKLCKTD

SEQ ID NO: 93180 - protein, 91 aa, Gossypium hirsutum
  unsure (1)..(91): unsure at all Xaa locations
  Clone ID: LIB3145-050-Q1-K1-A1.pep
IDPSFIIISISNSFCTALARLRVSCXSLRDHAHFWSPXMYSNSXVPEVTLGTKVKXARVXSEPDSLLLYIFLFEKFVNFKPCFIFFFLKNC

SEQ ID NO: 93181 - protein, 49 aa, Gossypium hirsutum
  unsure (1)..(49): unsure at all Xaa locations
  Clone ID: LIB3145-050-Q1-K1-A3.pep
LCKKCIIFKERXXGKXKEPKGLQLHESGDTTNGCMSTGAHFNSNNMTHG

SEQ ID NO: 93182 - protein, 59 aa, Gossypium hirsutum
  Clone ID: LIB3145-050-Q1-K1-A4.pep
KLKNKRFRFLQNLRTDPIDLSVTWMLKSISKSKIACHLLVPLRRPQHHQMPDKYEESCP

SEQ ID NO: 93183 - protein, 130 aa, Gossypium hirsutum
  unsure (1)..(130): unsure at all Xaa locations
  Clone ID: LIB3145-050-Q1-K1-A7.pep
ITIGAMLEEIQGLYQQHHQPCFLYLSSEVIKIFGSDPSCASYLKNMIEALFKHTTCLLTSIKEFTRRPDIGDDCFLLASRCIRYCPQLFIPSSIFPALVDCAMIGITVQHREAXNSILTFLSDIFDLAKS

SEQ ID NO: 93184 - protein, 35 aa, Gossypium hirsutum
  Clone ID: LIB3145-050-Q1-K1-B12.pep
PTRPRMWCHCRMVYLPMSFLYGKKFVGPITPTILS

SEQ ID NO: 93185 - protein, 68 aa, Gossypium hirsutum
  unsure (1)..(68): unsure at all Xaa locations
  Clone ID: LIB3145-050-Q1-K1-B4.pep
LYPRSVIIESSPRFNMYGNEFGLGKALTLRSGYXNKFDGKISPYPAVEGEGSVTIEISLPHFSTRTRG

SEQ ID NO: 93186 - protein, 104 aa, Gossypium hirsutum
  Clone ID: LIB3145-050-Q1-K1-B9.pep
MAAVLAFIFIVFKDNKGGYKKLVRGAQTLFKKVRDQRRTYTAGGSDPDLFYNYLKHWDELDWGETWLYYTTVNSYYFELATHAKLAKHARACWGGPYYGGLSWN

SEQ ID NO: 93187 - protein, 32 aa, Gossypium hirsutum
  Clone ID: LIB3145-050-Q1-K1-C5.pep
FISRAVAHEDPILRPRASDVIVLLSGQLNTFH

SEQ ID NO: 93188 - protein, 52 aa, Gossypium hirsutum
  Clone ID: LIB3145-050-Q1-K1-D4.pep
GSFKKSLLGRIGGFFLTKKLRPKPWALVGTPGPVNFLFTFKPYFQGRGFLGG

SEQ ID NO: 93189 - protein, 134 aa, Gossypium hirsutum
  unsure (1)..(134): unsure at all Xaa locations
  Clone ID: LIB3145-050-Q1-K1-D5.pep
EEMALDCVNHVSALDESLPEFEEKRLSILNQLKALEDKLLTMGDDQFMEDXNQFRIPFDGLDEKNDLRSXEGNEFSKETSCGKTMASMAKSLLPFLDAADNGTEEGTMYGKQGESDSEPVVMQTYPGPELELDP

SEQ ID NO: 93190 - protein, 34 aa, Gossypium hirsutum
  Clone ID: LIB3145-050-Q1-K1-D6.pep
PSLRVGLERGKIFLRVPGSKVINGYSFKLCFRAT

SEQ ID NO: 93191 - protein, 87 aa, Gossypium hirsutum
  Clone ID: LIB3145-050-Q1-K1-E11.pep
PRVRLYMQKLANFSMVKLKQFSYEKRPLTPDEISTTYLRFVPQIYVLSAGFLKVLLPTMVILPLYTHIKLYHLRLANALLSALCYST

SEQ ID NO: 93192 - protein, 93 aa, Gossypium hirsutum
  unsure (1)..(93): unsure at all Xaa locations
  Clone ID: LIB3145-050-Q1-K1-E3.pep
NXKALSMAPQPFSLHASVRSXVSVVMRAPVRQLSYRTPSTSRTSVLGSPRSLAHFVAIGVFLGGDSETFKRTFGLTVERKRIRPFVLLPSIQE

SEQ ID NO: 93193 - protein, 64 aa, Gossypium hirsutum
  unsure (1)..(64): unsure at all Xaa locations
  Clone ID: LIB3145-050-Q1-K1-E7.pep
QHTKWETDETHHLSKHAWTELDXSDSFWKIILIICRTSWLKTENHCGRIERVLKVHNMQNTFVL

SEQ ID NO: 93194 - protein, 124 aa, Gossypium hirsutum
  Clone ID: LIB3145-050-Q1-K1-E8.pep
PTRPEELDASSSKDNGVIATRLNQIKRWLLSHSQHMNFFTILVLASVPNPLFDLAGIMCGQFGIPFWKFFLATLVGKAIIKTHIQTVFIISVCNNQLLDWIENELIWVLSSLIPGFDSYLPTLT

SEQ ID NO: 93195 - protein, 134 aa, Gossypium hirsutum
  Clone ID: LIB3145-050-Q1-K1-F2.pep
HASVSGEFPDSYVDCKSLERLRINKNHLSGKILDGVWALPHATMIDFGDNDFEGEISPMIVFSISLNQLVLKNNRFSGNVPSVLGKLANLERLLLNNNSFSGNLPAEIGALKQLSSLHLEQNSLTGLIPGEISD

SEQ ID NO: 93196 - protein, 74 aa, Gossypium hirsutum
  Clone ID: LIB3145-050-Q1-K1-F3.pep
MAEKGEALPKFGEWDLKDPATADGFTVIFNKARNEKKTRATAPPPPSIVPQKVDIGNKPPPSPPKTKCFCFFRV

SEQ ID NO: 93197 - protein, 69 aa, Gossypium hirsutum
  unsure (1)..(69): unsure at all Xaa locations
  Clone ID: LIB3145-050-Q1-K1-F6.pep
NCLSLSVFLXFCAVPTTTFSFSFLRSIDKGINAKLNHWSLIEALPNGELTQTQAPGTLLLDEFLFYSTF

SEQ ID NO: 93198 - protein, 100 aa, Gossypium hirsutum
  Clone ID: LIB3145-050-Q1-K1-F7.pep
SWQLRVEKEDMLLESTDPESKVALIYAMAAKRNETAMTLWEGPQGKRRPLTIQLQQLSPKRIGTSQIAALRASSSLPYASYWLRRCHLLKDHRELAIFKN

SEQ ID NO: 93199 - protein, 33 aa, Gossypium hirsutum
  Clone ID: LIB3145-050-Q1-K1-F8.pep
INSLTAGFPQKIRILRCYNKDRVIHLALKLTPP

SEQ ID NO: 93200 - protein, 122 aa, Gossypium hirsutum
  Clone ID: LIB3145-050-Q1-K1-F9.pep
MEIETAQSPKTKMESLRSICDREVRVHQQNLDSFTALFPTSLHFIKALAQDAAQAHVELAKLKANLREAEDELVKVLAAKTRKEAKQMATRDSISAIKARVEEFKRTVQVQKARRDELESII

SEQ ID NO: 93201 - protein, 119 aa, Gossypium hirsutum
  unsure (1)..(119): unsure at all Xaa locations
  Clone ID: LIB3145-050-Q1-K1-G1.pep
QISVTDFVRLTGTECXARIFNIYPRKGAILVGSDADIIIFNPNSSFEINPRSHHSRTNTNVYESRKRKGKVEVTISRGRIVWKDDELKVAPGSGKYIPMPSFGFLFDGIEKIDAKLVSF

SEQ ID NO: 93202 - protein, 132 aa, Gossypium hirsutum
  Clone ID: LIB3145-050-Q1-K1-G7.pep
VREDGHIMLTDFDLSLRCSVNPTLLKSSSNLDPARMSGSCGGSGCAEPFCIEPSCQIRCFSPRLSPAPTKTKTVRPSHASQVRSLPQLVAEPTDARSNSFVGTHEYLAPEIIKGESHGAAVDWWTYGVFLYE

SEQ ID NO: 93203 - protein, 68 aa, Gossypium hirsutum
  unsure (1)..(68): unsure at all Xaa locations
  Clone ID: LIB3145-050-Q1-K1-H11.pep
GRSSNISKERNFFFKKAFFYLKRNNMVCXXXXXATEALKTGEETYLEDVAFLRHQRGREDKMKLMTKP

SEQ ID NO: 93204 - protein, 108 aa, Gossypium hirsutum
  Clone ID: LIB3145-051-Q1-K1-A12.pep
RSGSPHRIHGLFERALAIDKFHNSVILWRLYVAYEINVVHNPSAARRIFFRAIHACPWSKKLWLDGFLKLNSILTAKELSDLQEVMREKELNLRTDIYEILLQDEILS

SEQ ID NO: 93205 - protein, 96 aa, Gossypium hirsutum
  Clone ID: LIB3145-051-Q1-K1-A5.pep
NKYHNDMHTTYLEDTQGIIDCRGIEAAQMRIHLIRINDDKVRVARCYRGTGKTKYSCRNHFIYVSNCRHKTRNAVDKMLEMDIRGWLQNKSADTFT

SEQ ID NO: 93206 - protein, 58 aa, Gossypium hirsutum
  Clone ID: LIB3145-051-Q1-K1-A8.pep
KNRLSINAYVNMVLLKRPPRFKVLHGFIFFFYLPKFLCNGPVFLCIAVRIKRYFVFFF

SEQ ID NO: 93207 - protein, 49 aa, Gossypium hirsutum
  Clone ID: LIB3145-051-Q1-K1-A9.pep
GTKKRARIPRPIPSISRSTLKVLVYVYSSIVYTSLTPLESFINVDLEFC

SEQ ID NO: 93208 - protein, 99 aa, Gossypium hirsutum
  Clone ID: LIB3145-051-Q1-K1-B3.pep
HASANESMVKKEPPQETSKLNGIMPEGALSNDGYNLESSTRSAQASDSAGIQTEMSSPSSLASQQNIKKTEPLVRRTPPDDVGSWHQRSNADRVHRENK

SEQ ID NO: 93209 - protein, 60 aa, Gossypium hirsutum
  unsure (1)..(60): unsure at all Xaa locations
  Clone ID: LIB3145-051-Q1-K1-B4.pep
DMHSAQPQHIFGVNFFHLYATINDVDPSPTCSLTMVDCGFDFPEHISIISWYMHSAXPQH

SEQ ID NO: 93210 - protein, 101 aa, Gossypium hirsutum
  Clone ID: LIB3145-051-Q1-K1-B7.pep
EIKPLPNPVQILTAGAPPPAAVLSRTESLGFVVSHGYGLTETGGLVESCAWKREWNKLPATERARLKARQGVRTIGMTEADVVDPESGLSVKRDGSTLGEI

SEQ ID NO: 93211 - protein, 55 aa, Gossypium hirsutum
  unsure (1)..(55): unsure at all Xaa locations
  Clone ID: LIB3145-051-Q1-K1-C11.pep
QNLVSSSTNLSLRGSSLSPEGLQLPMMSPALGESFAAATSGGWMDGGAQKPXDAS

SEQ ID NO: 93212 - protein, 60 aa, Gossypium hirsutum
  Clone ID: LIB3145-051-Q1-K1-C3.pep
ASHISKILTIEELYLSVIVRYYKHKQLTCWMQIVQILFQPLNQPNFLMTAQNLLGIELLG

SEQ ID NO: 93213 - protein, 44 aa, Gossypium hirsutum
  Clone ID: LIB3145-051-Q1-K1-C5.pep
NTLKNPRVLMRRSNHQQPRWHFCTLPHQLNLREEMKQPLQNPVA

SEQ ID NO: 93214 - protein, 116 aa, Gossypium hirsutum
  Clone ID: LIB3145-051-Q1-K1-D10.pep
LSLISTPCNHAVNLSTMVEERSNLDSSQQKGEASTIKVQDEQNLNRKIPSCLTSKLNHVKESSFEKETRKKLDFEEVASSVSRERKGNKSIISPDSLNFKRSKSSRVLLPSMEFWR

SEQ ID NO: 93215 - protein, 53 aa, Gossypium hirsutum
  unsure (1)..(53): unsure at all Xaa locations
  Clone ID: LIB3145-051-Q1-K1-D2.pep
LHHLLVVILQLPGISNHCFTGNSRFKTSNFLYSGYKLMNTTCDXIPSLLGLIL

SEQ ID NO: 93216 - protein, 30 aa, Gossypium hirsutum
  Clone ID: LIB3145-051-Q1-K1-D7.pep
CNMLDPFIQCPFPVSTLLATHETLIHHEHA

SEQ ID NO: 93217 - protein, 88 aa, Gossypium hirsutum
  Clone ID: LIB3145-051-Q1-K1-E10.pep
FVVATNIAETSLTVDGVVYVIDSGYVKQRQYNPATGMYSLDVVQISKVQANQRAGRAGRTRPGKCYRLYPSRVYHDDFLDVTVPEIQR

SEQ ID NO: 93218 - protein, 46 aa, Gossypium hirsutum
  Clone ID: LIB3145-051-Q1-K1-E11.pep
EELSGGPLATLGNYQQQGFEVVYDLEKRNVGFARRKCSSLWDSLKN

SEQ ID NO: 93219 - protein, 122 aa, Gossypium hirsutum
  Clone ID: LIB3145-051-Q1-K1-E12.pep
RELSLPEIRNMLMDKALRVIRKKLKDLSSVTEAKNGDKVKGKAREKENRKQRSMANGDGCDTNKDHQGKQPVPASSPDESGRGTAPLSINVPDPDFHNFDLDRSESSFEDDQVWAAYDADDG

SEQ ID NO: 93220 - protein, 105 aa, Gossypium hirsutum
  Clone ID: LIB3145-051-Q1-K1-F10.pep
SSSDDDEKKSKKKKTKKKKRRNYSGSSSSGGAEFDKHKRQRINKHSYSSEDSDSGRQYRTKESREKRSYTSEGSKSNPEPCGKKNRSKHSYSSADDFDRHYRKGK

SEQ ID NO: 93221 - protein, 102 aa, Gossypium hirsutum
  unsure (1)..(102): unsure at all Xaa locations
  Clone ID: LIB3145-051-Q1-K1-F2.pep
PTRPPTRPVIGRQGESCDSVCKSNGQSCVLNKLLILNQCDIIQKYMSCKGACLASVGPDQPAEVVDDAPKNLNPGACLYTRTQSMLSCDGSHRHTXKTCPCA

SEQ ID NO: 93222 - protein, 83 aa, Gossypium hirsutum
  Clone ID: LIB3145-051-Q1-K1-F4.pep
MSLRANAPLDQPTAEGVVTLDFSIIKPGIAADLKFGGSGSFPNLPWVSTTGTGPHGRTISGVTYRFSANQIKIGCACHGTHMF

SEQ ID NO: 93223 - protein, 103 aa, Gossypium hirsutum
  Clone ID: LIB3145-051-Q1-K1-F8.pep
LDRKNRTLQTPLNKEKNITSHYCPLPLSLTKHIRPPYLKPCLIVLVRLFSSRNNHRHISRHCKKLLKSFSKFDTSKVIISINLTFIVAHLNNMGFQFQYWKIG

SEQ ID NO: 93224 - protein, 69 aa, Gossypium hirsutum
  Clone ID: LIB3145-051-Q1-K1-F9.pep
KLSLFFLHPKTMKAEAIILLFVIFHNSANANPQPPCYFNCADSLILNRNHNILNTLAKDNSSPYLIYFP

SEQ ID NO: 93225 - protein, 44 aa, Gossypium hirsutum
  Clone ID: LIB3145-051-Q1-K1-G1.pep
SSRNSRVFFPNLRNKRKNQAWFSLMYSFLFPLMNPILKCVLIQF

SEQ ID NO: 93226 - protein, 51 aa, Gossypium hirsutum
  Clone ID: LIB3145-051-Q1-K1-G12.pep
NLGISENGEIPSLQLYAKEPDLALTLVALKRLRMAWGMGLFIYQNGMLLRW

SEQ ID NO: 93227 - protein, 74 aa, Gossypium hirsutum
  Clone ID: LIB3145-051-Q1-K1-G2.pep
IFTSSVYENGVPEICFLTPLTIRSLHIKCWLDPYIPNVGPLVDKISLHGNLEMDCLFKDMVTKDGKWNFDISQL

SEQ ID NO: 93228 - protein, 86 aa, Gossypium hirsutum
  Clone ID: LIB3145-051-Q1-K1-H2.pep
MSLEPFIYSFVARGTMILAEYTEFTGNFPAIATQCLQKLPSSNNKFTYNCDHHTFNFLVEDGYAYCVVAKDSVGKQISIAFLERMK

SEQ ID NO: 93229 - protein, 67 aa, Gossypium hirsutum
  Clone ID: LIB3145-051-Q1-K1-H3.pep
KSKHQATSATPPSPSESLSIAAPKVLGSGAISLGAASYIELSLLGTSASGIGEDLKALSDSERDSSS

SEQ ID NO: 93230 - protein, 69 aa, Gossypium hirsutum
  Clone ID: LIB3145-051-Q1-K1-H4.pep
KRSPFQNPIMHFNPLLYQKGRGLIKIALYTTLHPAISNNNHGLGQYFKPMTTSSQALKPASTDAFYYKL

SEQ ID NO: 93231 - protein, 55 aa, Gossypium hirsutum
  Clone ID: LIB3145-051-Q1-K1-H5.pep
RKITGIVARYCCNWPLPIKLQPRSTAINVTLLHIAIFSSSSFGRHCYRYIVATIP

SEQ ID NO: 93232 - protein, 40 aa, Gossypium hirsutum
  Clone ID: LIB3145-051-Q1-K1-H6.pep
GGSYRGSKVTATCMRRYSVSIEEPNGTSLTAVLHGKTLGK

SEQ ID NO: 93233 - protein, 106 aa, Gossypium hirsutum
  Clone ID: LIB3145-052-Q1-K1-A10.pep
PCFLSFSFITKIVHHFQKMAMFYRMQMLLPAYALLLILFTLASSTTITSSSKEQIKRDTCTPVPSATTPPIVVTECPPPTYPAFPPTASPSPPPNPASPPPACPSC

SEQ ID NO: 93234 - protein, 117 aa, Gossypium hirsutum
  Clone ID: LIB3145-052-Q1-K1-B3.pep
PTRPPTRPIIELAVLRECTATIDSSVSVLNANPDSENRDGDIGWPGVMTVRVYELDGMSDHPDLPMAGDAWQLLEIACHSKLAARRYQKPKKGSKPDGSDDNGDLPTVDMRSSVDSP

SEQ ID NO: 93235 - protein, 121 aa, Gossypium hirsutum
  Clone ID: LIB3145-052-Q1-K1-D11.pep
QGLGAGKAADLTYWESAARMIADVAKSNKIVVEKSTVPVKTAEAIEKILTHNSKGINFSILSNPEFLAEGTAISDLLNPDRVLIGGRETPEGKKAIEALRDVYAHWVPVDRILCTNLWSAE

SEQ ID NO: 93236 - protein, 89 aa, Gossypium hirsutum
  unsure (1)..(89): unsure at all Xaa locations
  Clone ID: LIB3145-052-Q1-K1-D9.pep
MCIYEWKGPSVIYASYTAEEVSHGIDGSAPTGMDTGSSSGIGEETTIVLELSGVHILMAVWNADARQNVKESILXEIPSANTDVMELDL

SEQ ID NO: 93237 - protein, 24 aa, Gossypium hirsutum
  Clone ID: LIB3145-052-Q1-K1-E5.pep
NVTYFVRCSSMLSGFEMINIYVCN

SEQ ID NO: 93238 - protein, 50 aa, Gossypium hirsutum
  Clone ID: LIB3145-052-Q1-K1-F12.pep
QACILPNFFLLLNLVQLRAGFSVATAWSKLKVWHHMDMLVTIIITYVMDL

SEQ ID NO: 93239 - protein, 144 aa, Gossypium hirsutum
  Clone ID: LIB3145-052-Q1-K1-F2.pep
PSQKIIREFKKNELQKHVAQQTGPTTTKASVTEWQVLYTTQVTQKAKKYHDGFLKLVNSAALQRQIMLYDGSKKLINSRFLNKDEVIQSGESITFDAHLVNIGEAEGNHPGLMDSDAHVSNYNAAGKTEMIHRVQNRLKTHKSF

SEQ ID NO: 93240 - protein, 88 aa, Gossypium hirsutum
  Clone ID: LIB3145-052-Q1-K1-F6.pep
ILVALSTSHKAHQADINQHTAKCDARRLYETGEGSPGAIDEGTVLEIFTKRSIPHLKLTFSCYKHIYGHDYTKVNLFLFLPACQLQSS

SEQ ID NO: 93241 - protein, 58 aa, Gossypium hirsutum
  unsure (1)..(58): unsure at all Xaa locations
  Clone ID: LIB3145-052-Q1-K1-G3.pep
PTRLDRMANWVGTSMASAFFASLERCSCINLSTTDFDDEEEAYDRPLVLTXAPHPRRT

SEQ ID NO: 93242 - protein, 69 aa, Gossypium hirsutum
  Clone ID: LIB3145-052-Q1-K1-G4.pep
HLHENLLNKLHLLIVTFFFWLPVIVIIYETCSLSSSSISPFIKKIVIDKIKVDCCDKYYRKTKKETSIT

SEQ ID NO: 93243 - protein, 44 aa, Gossypium hirsutum
  Clone ID: LIB3145-052-Q1-K1-G9.pep
SWMLTGLEVKTVNVFYMYYAKLTKLNKAMLGRIVSGVLCYLVQM

SEQ ID NO: 93244 - protein, 55 aa, Gossypium hirsutum
  Clone ID: LIB3145-052-Q1-K1-H11.pep
LATPNRLQTAPQMTWLRRLQMPPILMVSCLLHKRLLSRQQALNEFHCGYPHNKVQ

SEQ ID NO: 93245 - protein, 90 aa, Gossypium hirsutum
  Clone ID: LIB3145-052-Q1-K1-H12.pep
NIEAVVEHSNEKLMVDGDQVGVKANLVEESVNASDIKDCLLVKKSTTQPTAEESCRNHSMTEMTAKAGSLSDGCAKNLEVLSTAETGRAT

SEQ ID NO: 93246 - protein, 56 aa, Gossypium hirsutum
  Clone ID: LIB3145-052-Q1-K1-H2.pep
MNKKKHINNNIINRQNMEHKKIKGGARFKGPRLPPPSLQGISFFLGPPNSIPWPAF

SEQ ID NO: 93247 - protein, 112 aa, Gossypium hirsutum
  unsure (1)..(112): unsure at all Xaa locations
  Clone ID: LIB3145-052-Q1-K1-H6.pep
MKKGAKIQLILGSVHPGSLTINLGSSGVMAYSREKQNPLLPGLSAVVDEIFCVLLGHIENVGVLKHLCGWHITAYXGIIVTEAYXPLEADXPYPSYQVVRYIQGKVIFMLFD

SEQ ID NO: 93248 - protein, 73 aa, Gossypium hirsutum
  Clone ID: LIB3145-053-Q1-K1-A10.pep
RPGSESTIWPFKFHSFVLGFRIFSERQLSSSYQDRRTISLHMKTPASAHEQAPYDTYNSIHNFTKAYVLTCPN

SEQ ID NO: 93249 - protein, 41 aa, Gossypium hirsutum
  Clone ID: LIB3145-053-Q1-K1-A2.pep
SSVVSKYGVVVIYLKRSRPRLESGTSLSSSHSFCSIPIFLY

SEQ ID NO: 93250 - protein, 119 aa, Gossypium hirsutum
  unsure (1)..(119): unsure at all Xaa locations
  Clone ID: LIB3145-053-Q1-K1-A3.pep
MLQNATQKSQKVFVHVPSEIAAHEVEEIGMPFDEIWCHLFRILPLWLRXPLFHLQTAVKHLLRDVKDTTISTLATEVTGKLTALKGLDARLREIRGYLDLVIDEKLPLNHEILYHLQLN

SEQ ID NO: 93251 - protein, 125 aa, Gossypium hirsutum
  Clone ID: LIB3145-053-Q1-K1-A7.pep
ITSKRESSARVDYVPALYYISKAFTTAASKLEKIGYVDTENESEASEPKGGKEAIDFKEVKRVDHILASLQRKLPPAPPPPSFPDGFVPPTTEADKEPENQQTAEPQPPAVDPIIDQGPAKRMKF

SEQ ID NO: 93252 - protein, 98 aa, Gossypium hirsutum
  Clone ID: LIB3145-053-Q1-K1-B1.pep
EIEDPSFSSSLFSLIVAEDDVCLESRMLDRLLEITDTDAHVGRMEADNVAVDVIDEAGWLLHRSHMKTILGQLDSNSEFYALMRFKWVKEFIIDHEWC

SEQ ID NO: 93253 - protein, 59 aa, Gossypium hirsutum
  Clone ID: LIB3145-053-Q1-K1-B10.pep
TFLYLLLAYLQGTGCFIYGHSSCIRIALCLQMLLYSFIFNNLGGIATSYMVIIYDFFDN

SEQ ID NO: 93254 - protein, 95 aa, Gossypium hirsutum
  Clone ID: LIB3145-053-Q1-K1-B6.pep
HTSMDTRAREALTIISLIAGKPILIRQRAVHQLLLHHQTKAILLRPLDMMPILLRRLGRTATVTKAILLEAAEGCYSTKGRAVWDTRLKHCAYWP

SEQ ID NO: 93255 - protein, 62 aa, Gossypium hirsutum
  Clone ID: LIB3145-053-Q1-K1-B9.pep
NKIFRDLVLENLLKSSCFVYGDSSGVVIVLCFQMLLFGFIFNNLGGIATCYLVFIYFFFFNF

SEQ ID NO: 93256 - protein, 60 aa, Gossypium hirsutum
  Clone ID: LIB3145-053-Q1-K1-C1.pep
GGKPFYVFHLPKKRFKNKGNSFSSLLGTCNQENWQEITETERIIPLQATPKKKKATSLSI

SEQ ID NO: 93257 - protein, 76 aa, Gossypium hirsutum
  Clone ID: LIB3145-053-Q1-K1-C10.pep
SKTAPPFFFFLFIFFFFFFFYFFFFFFFFFFFFFFFFFCWVVYGDMIHSITQKLGRGSPLTSDNILCKNQFTNLGD

SEQ ID NO: 93258 - protein, 52 aa, Gossypium hirsutum
  Clone ID: LIB3145-053-Q1-K1-C3.pep
HASAHASGVGGCIHSYIEMHLLIFYRLVLGWALNSFQMLIKISCVAAAFIIL

SEQ ID NO: 93259 - protein, 113 aa, Gossypium hirsutum
  Clone ID: LIB3145-053-Q1-K1-C6.pep
ATRPVAISKCIEERQMNLSVNSKRLLLFHLQKLVAAAKLATGNNAPLLTSAQASKPGITGCARAKRKPAVDTIPVSKPTEGKRAPTTYISAADTKAKAALNPKACSKATSTPP

SEQ ID NO: 93260 - protein, 133 aa, Gossypium hirsutum
  Clone ID: LIB3145-053-Q1-K1-D11.pep
HASAHASAFYSSGAAGGSGGSGSDLGLASLSKSSKSASINSSSMGEVKMTKFTSEAFEAIPDDISNQNEAFRAELAGTSPTLEASVGSGEPLLSLKLGKQTYFEDVSGGSNTKNLSYSSTSGQSPAQAKRSKP

SEQ ID NO: 93261 - protein, 36 aa, Gossypium hirsutum
  Clone ID: LIB3145-053-Q1-K1-E10.pep
NAIIVYQLLQSNVNVYAVGHQARHLRRHLRRLACII

SEQ ID NO: 93262 - protein, 66 aa, Gossypium hirsutum
  unsure (1)..(66): unsure at all Xaa locations
  Clone ID: LIB3145-053-Q1-K1-E2.pep
NXXVXFLXTRXXSHELNTSKGXYHHFGAXATTAFWHLENXTPXXLRCHAAAQNPNKEERFSFIVFL

SEQ ID NO: 93263 - protein, 88 aa, Gossypium hirsutum
  Clone ID: LIB3145-053-Q1-K1-E7.pep
ASVRCQRRALRTVQQPRPRQHSPVPERLAPVPAKKNKQATAAYTQCESKERILYFYLFFFSFSAIKQKHSIIVFFWMHNRQYKKTTNI

SEQ ID NO: 93264 - protein, 76 aa, Gossypium hirsutum
  Clone ID: LIB3145-053-Q1-K1-F11.pep
LRVSQAVSFAALQIRVTFVNEFGVEEPGIDGGGIFKDFMENITRAAFDVQYGLFKVVNLCYCYLLFIFSCKQVISR

SEQ ID NO: 93265 - protein, 134 aa, Gossypium hirsutum
  Clone ID: LIB3145-053-Q1-K1-F4.pep
TDWTEGETFVLLDAWGDRFLQRKRKSLRAEEWQEVAEKVSEVSKIERTDTQCRNRLDTLKKKYKKEKAMVAETGTSTSNSKWVYFKKMDMLMSSSPQQGVIHKAISGEMRDSPTISESTDSEEDVSEGLPPKKR

SEQ ID NO: 93266 - protein, 133 aa, Gossypium hirsutum
  Clone ID: LIB3145-053-Q1-K1-F5.pep
PTRPEKVSSWHMKVLVDAITNSGLSTISNTLDESVYKEGGEQADKEITNEEEAQYVAHQIFSNVVCHESNQNRRYIDEDDLLRFMIKEEVELVFPLFEVSSTGKIDRKSFTNWVIKVYQDRKTLAHALSDTKT

SEQ ID NO: 93267 - protein, 135 aa, Gossypium hirsutum
  Clone ID: LIB3145-053-Q1-K1-G1.pep
FNVKGSNLYFWIAVLPITLVLLVGAKLQHVIATLALETADMTGYVTGAKLRPRDELFWFKKPEWLLSLIHFILFQNAFELASFFWFWWQFGYDSCFIRNHTLVYIRLILGFAGQFICSYITLPLYALATQMGTNY

SEQ ID NO: 93268 - protein, 128 aa, Gossypium hirsutum
  Clone ID: LIB3145-053-Q1-K1-G11.pep
DPDVHHRHLSHLYGLFPGHTVTIESMPDLCKAAENTLHKRGEEGPGWSTMWKAALRARVHDSEHSYRMVKHLIYFVDPEHEKAFKGGIYSNLFAAHPPFQIDANFGFTASDAEMLVQSTLEDLYLLPA

SEQ ID NO: 93269 - protein, 88 aa, Gossypium hirsutum
  Clone ID: LIB3145-053-Q1-K1-G3.pep
KAQPCDPHSDYRCQDLPEASVAQSQRYSSLFQYNKPPPGRNLHRALTNSGPPSGGIVNQPISQQPQLSSRSGHSQVHSVPAFLASQEM

SEQ ID NO: 93270 - protein, 64 aa, Gossypium hirsutum
  Clone ID: LIB3145-053-Q1-K1-G9.pep
KKKKKKKKKKKKKKKKKKIRKGGMIETTAAYGPNNVNVLKYTEVYSIQWLLKRILTVKLLNAYK

SEQ ID NO: 93271 - protein, 117 aa, Gossypium hirsutum
  Clone ID: LIB3145-053-Q1-K1-H10.pep
AVHAYESSLRDQPRLNILFGHLAAGPWLFSKIMPSTEDNNDDDLAITSPGLSIWKKWVPSLCGTDLTWCLSVVKNENRDKLDEVVSGADAVLFLVSQNIPWKLLKAELYSLFNIKGC

SEQ ID NO: 93272 - protein, 77 aa, Gossypium hirsutum
  unsure (1)..(77): unsure at all Xaa locations
  Clone ID: LIB3145-053-Q1-K1-H11.pep
KETRKIWNDSDVKDTATCIRVPVTRAHAXSDNLHFKKPLDXDTARENLVWITGDIVIDDLISNHFPTPLEVSNKDDV

SEQ ID NO: 93273 - protein, 77 aa, Gossypium hirsutum
  Clone ID: LIB3145-053-Q1-K1-H2.pep
TPSNPLPTNDQLSTPGGRAVAPAVAGRAPPSKPSAAAHTHLPSSSLQFCYINLLPLLVLWHLLVSSFPIDTGTTTHG

SEQ ID NO: 93274 - protein, 73 aa, Gossypium hirsutum
  unsure (1)..(73): unsure at all Xaa locations
  Clone ID: LIB3145-053-Q1-K1-H5.pep
MGIGPKCMETNVLQEIMGRIPYXMNFLTFYXFDANGCVNYXGXXFLLPSXFSKIEGVEVNGDXGEFDKREMEL

SEQ ID NO: 93275 - protein, 83 aa, Gossypium hirsutum
  Clone ID: LIB3145-053-Q1-K1-H6.pep
PRVRPRVRWAPLMGKQLCSAGDDSRALIWEVVGSNYRAENGVAVMEPEMWYGSAAEINHARWSPIELDWIAIVFLNKLQLLKV

SEQ ID NO: 93276 - protein, 129 aa, Gossypium hirsutum
  Clone ID: LIB3145-053-Q1-K1-H7.pep
MSSTRSKDKSSGWTAFDLKQRQKQVLVPETENDPFPPVAMAALHPCTSQTNCNDLSARSFSSVLKPSSDFPTLKQNKNSIKSINVGKPIGNEDKIAGVNNNDLALKKLKEIHCWAENSLIEDILLATNN

SEQ ID NO: 93277 - protein, 135 aa, Gossypium hirsutum
  Clone ID: LIB3145-054-Q1-K1-A11.pep
DVAIASSISKVLASIMTYPHEVIRSRLQEQGQARHTEVQYAGVVDCIRKVFRKEGVSGFYRGCATNLLRTTPSAVITFTSYEMIHRFLHQVLPPERKKSEAGPRSDGHVNKSWPNKRASAEESKISQTHSNKITP

SEQ ID NO: 93278 - protein, 135 aa, Gossypium hirsutum
  Clone ID: LIB3145-054-Q1-K1-A2.pep
PRVRAHSIVVAERIALNFMQRMSGIATLTKAMADAAYPAYILETRKTAPGLRLVDKWAVLIGGGRNHRLGLFDMVLIKDNHISIAGGISNALRSVDQYLERGNLQMEVEVETRTLAEVKEVLQYASQMKTSLTRI

SEQ ID NO: 93279 - protein, 51 aa, Gossypium hirsutum
  Clone ID: LIB3145-054-Q1-K1-B1.pep
HACAETESQGTDLHGIYRTNLMLALQLLEQMGKLAVVKGTLTDDEGVKMSV

SEQ ID NO: 93280 - protein, 137 aa, Gossypium hirsutum
  unsure (1)..(137): unsure at all Xaa locations
  Clone ID: LIB3145-054-Q1-K1-B3.pep
RNFRADEHGHALACSVDQNGSIASHAFMETLRERMFKPSLSSIIAEYSXMHVVNYGXPICVAAKKMRDLRVNSVVTVTGNTNHGMLTSYDILMXVCAPNLSPELTPVEKVMTPNPECVTVXTTILDALHLMHDGKKF

SEQ ID NO: 93281 - protein, 103 aa, Gossypium hirsutum
  Clone ID: LIB3145-054-Q1-K1-B8.pep
MEKEKKEAETKKIQEEESSQHDSKQLGKRPIIEDSPPPSLPPKQTSKSLMTTPEESFIIIFKTLLRQSGTRNFSYSACNRPNLSGSIKNQKPKNKIIKLNRNK

SEQ ID NO: 93282 - protein, 114 aa, Gossypium hirsutum
  Clone ID: LIB3145-054-Q1-K1-B9.pep
MWLAGLVKNNIKGGNGGVGSLLVRYMSRTRAVNVRKINPKVPIPEAKSIASSLYDLIKQRGPLTVPNTWTLAQEAGIGGLNSKTHMKIMLKWMRGRKLLKLFCNQVGSNKKFLH

SEQ ID NO: 93283 - protein, 78 aa, Gossypium hirsutum
  unsure (1)..(78): unsure at all Xaa locations
  Clone ID: LIB3145-054-Q1-K1-C1.pep
PTRPPTRSDEGTRDRPYGHCLVAGXKKYPDQIIPQGLGQKTGKKSRGKWFVKLVNYQHLIATRFTLEVDFKDMVNAHA

SEQ ID NO: 93284 - protein, 132 aa, Gossypium hirsutum
  Clone ID: LIB3145-054-Q1-K1-D1.pep
RVAKACEAFVELADACGYPIGVMPSAKGLVPEHHSRFIGTYWGAVSTSFCAEIVESADAYLFVGPIFNDYSSVGYSLLLKKEKAIVVQPDRVVIANGPAFGCVLMKDFLQALAKKVNRNPTAFENYQRIFIP

SEQ ID NO: 93285 - protein, 133 aa, Gossypium hirsutum
  Clone ID: LIB3145-054-Q1-K1-D11.pep
PRVRSDYLDMADDLTGDVEFMNADGNGSVKKEDLSNDQSNGELMACNMSNNFLEEEDADENVVSLEISDGEPNKGSANDLGLGSTHVTTTVWSCIESIDASTSTTPEWPSSEPCTDSITHVISAEEHILINMV

SEQ ID NO: 93286 - protein, 98 aa, Gossypium hirsutum
  Clone ID: LIB3145-054-Q1-K1-D3.pep
RPRMHFLESSPFKVSFLSLFQLNSKNKEKKGNSLIEIASTCAFSFRRCWTQRFSLLVVTVDPTSKTHIRLFLLREILPCMFFFSLIIKRLIEFRITLN

SEQ ID NO: 93287 - protein, 90 aa, Gossypium hirsutum
  Clone ID: LIB3145-054-Q1-K1-D7.pep
YFIYLSYMPTLCFLLGRPAEMDDDKFKRRMKKMKRRYSNPTPAVLRITGSVVTMVLLLLTICCGFQLTIEPGRYRAIGARAFHVGISTII

SEQ ID NO: 93288 - protein, 57 aa, Gossypium hirsutum
  Clone ID: LIB3145-054-Q1-K1-E2.pep
ALMIILKAENLVAIIFPELKKKRLKGKRIIKSFLVDLCGTAHFAPPLFFSSCRDCQA

SEQ ID NO: 93289 - protein, 42 aa, Gossypium hirsutum
  Clone ID: LIB3145-054-Q1-K1-E5.pep
FDKSGEYTIKSDYKMYVLEDLKMLRNKITADQDLTRSYFPKI

SEQ ID NO: 93290 - protein, 116 aa, Gossypium hirsutum
  Clone ID: LIB3145-054-Q1-K1-F4.pep
MFILGDQMLQSDPRVPILPIERKWKSNVETAPNCPRCASANTKFCYYNNYSLSQPMYFCKGCRRYWTKGGSLRNVPVGGGCRKSRRGKSRRERVEKRDQISMTDSKNSTSSSDGDS

SEQ ID NO: 93291 - protein, 106 aa, Gossypium hirsutum
  Clone ID: LIB3145-054-Q1-K1-F9.pep
HASAHASGKRWRCSRDVIPDQKYCARHMHRGARKQTEVSQPVAVPSVGDCRPPSRLTTAYKAACPALSTSLSISIPRSQHIAEDEKSTSSSSETTISDTNGYCLRE

SEQ ID NO: 93292 - protein, 61 aa, Gossypium hirsutum
  Clone ID: LIB3145-054-Q1-K1-G10.pep
YCQIEHSINQCIWGVVGCRFLDKAYIEAVKHNVKAANIWRLIRADLLEEPKFFTPNCNNMG

SEQ ID NO: 93293 - protein, 63 aa, Gossypium hirsutum
  Clone ID: LIB3145-054-Q1-K1-G7.pep
SHKNNFKERAACLKDTSLTTLTFKKYFLLYCAPIIHILWRVFHNRETKKTPREPNLIGLEKIP

SEQ ID NO: 93294 - protein, 94 aa, Gossypium hirsutum
  Clone ID: LIB3145-054-Q1-K1-G9.pep
CVQIHQIKIHVSNYTLNQNSYINLIFVLFLFLISKLPFHLKNLITGKISTNTLNMPNCQMKHPSTPTYTGRMRGISNLTRQLDNHLALDRQFVL

SEQ ID NO: 93295 - protein, 65 aa, Gossypium hirsutum
  Clone ID: LIB3145-054-Q1-K1-H2.pep
ICKNTANQFNFGGHKKKLLCCMDAVVNLVSLKRPPLIILIFYYLYPHILSFFFFFFYFFNLKIFY

SEQ ID NO: 93296 - protein, 78 aa, Gossypium hirsutum
  Clone ID: LIB3145-054-Q1-K1-H3.pep
QVTTLLGVLKTKFEGRFMQIYTLFCQSLSTRKNNTYAVHALALPLMTIDILWNTCMFYAITVRKGLRGFCKELGTCSL

SEQ ID NO: 93297 - protein, 51 aa, Gossypium hirsutum
  unsure (1)..(51): unsure at all Xaa locations
  Clone ID: LIB3145-054-Q1-K1-H5.pep
RNYTEYWILYFLCMEARMGLGLANNALIRISQVXLKRLAEIHVFSASSIEH

SEQ ID NO: 93298 - protein, 135 aa, Gossypium hirsutum
  Clone ID: LIB3145-054-Q1-K1-H7.pep
SVSPEENIDVTETIGPAMIFLPSETTSEDLDSIVACTKHGVALTGAAATGTMGPIVGLVDIGVLEDSYYFRVSLPGVSPDKKDFSCDIESDGKVLIRGITTTGEKVVVKNFQVFHMLTQNLCPSGHFTVSFELPG

SEQ ID NO: 93299 - protein, 35 aa, Gossypium hirsutum
  Clone ID: LIB3145-054-Q1-K1-H8.pep
PGAILGQSEARCKMYHAQSFPYRPKRTERVVARVG

SEQ ID NO: 93300 - protein, 48 aa, Gossypium hirsutum
  Clone ID: LIB3145-055-Q1-K1-A11.pep
RFFLNPKFSRVSSSLLLLCLATNSFIAADLAPKSYHYFLQFPFLFQTL

SEQ ID NO: 93301 - protein, 69 aa, Gossypium hirsutum
  Clone ID: LIB3145-055-Q1-K1-A12.pep
YSNIRSITWDVRVLARNFLACRFEFVARGGNSAAHAMAMRSLENHIWVKDALSRVSELADSDHHFQQPS

SEQ ID NO: 93302 - protein, 67 aa, Gossypium hirsutum
  Clone ID: LIB3145-055-Q1-K1-A2.pep
VFDSYPNNRLNGRNIRNNFCPAKGVQAHIMLTSFGMSDFVHGQTNNMKKHPPKTLKGVVSNDLVWKF

SEQ ID NO: 93303 - protein, 48 aa, Gossypium hirsutum
  Clone ID: LIB3145-055-Q1-K1-A7.pep
GNGQPALLYLVPCTLGVTVVLAAIRGDLKALWGYSSKSSAMINPTAEV

SEQ ID NO: 93304 - protein, 61 aa, Gossypium hirsutum
  unsure (1)..(61): unsure at all Xaa locations
  Clone ID: LIB3145-055-Q1-K1-B11.pep
RTRGFVGFKYINSIKVAKNVSIPPDAPGCNCRGXCTYPRSCSCAQLNGGDFSYVSRDGCKA

SEQ ID NO: 93305 - protein, 64 aa, Gossypium hirsutum
  Clone ID: LIB3145-055-Q1-K1-B12.pep
AKINGGELSYVSPDGGTSDCLCRPSYIVLKYQIGAYQAREREWEITTLRLYCSRCTTLIACHAS

SEQ ID NO: 93306 - protein, 24 aa, Gossypium hirsutum
  Clone ID: LIB3145-055-Q1-K1-B6.pep
NRNKVNQIIYESNVQLQIFGPKLN

SEQ ID NO: 93307 - protein, 131 aa, Gossypium hirsutum
  Clone ID: LIB3145-055-Q1-K1-B9.pep
ITYILSCITKHSPQYKVLMLGRVLGGIATSLLFSAFESWLVAEHNKRGFDQQWLSITFAKAIFLGNGLMAILSGLFGNVLVDSLKLGPVAPFDAASCFLSIGMIIILSTWTENYGDPSENKDLLTQFKGAA

SEQ ID NO: 93308 - protein, 131 aa, Gossypium hirsutum
  Clone ID: LIB3145-055-Q1-K1-C12.pep
TKEVFPEVSDHSLLKEFVRSIRARRRYWARSYAGWRQFTAAQPGAAHVALASLEQAGRINFMITQNVDRLHHRAGSNPLELHGTVYSVICLDCGFSFCRNLFQDEVKALNPKWAAAIESLDYGNAGSDKSF

SEQ ID NO: 93309 - protein, 145 aa, Gossypium hirsutum
  Clone ID: LIB3145-055-Q1-K1-C2.pep
ELSKLRSELNGKMVEIRRLQMELNRQEDESADDTQDNLKRAISTLEKENTRLKMEKNELEAALESSRKSLTGKIDPNASETLKLDSSGSSSRMKEMELSLQQMEKDLKETCRERDKALQELNRLKQHLLEKESEESEKMDEDSKI

SEQ ID NO: 93310 - protein, 40 aa, Gossypium hirsutum
  Clone ID: LIB3145-055-Q1-K1-C6.pep
PRIPIRNAMPLPLTEIKFRSHFHPRLITDQPKPPFQRSKE

SEQ ID NO: 93311 - protein, 123 aa, Gossypium hirsutum
  Clone ID: LIB3145-055-Q1-K1-D11.pep
LISSLSNLEGDFNELKKVKCAVWERLARFSEDLLLASNVRVHVLELMQFIAGKSEKGLSSELQLNVHPWVGWDESLCAYNKSQITSNDGLPEQIDTFSRFTSTIVALRSSQLMATISSGFGIT

SEQ ID NO: 93312 - protein, 82 aa, Gossypium hirsutum
  unsure (1)..(82): unsure at all Xaa locations
  Clone ID: LIB3145-055-Q1-K1-D5.pep
XXSGVQNSEKDFLKKLGHVIVSEIEVDKPSLGAKQEQVGTHHNLKILQRIIYVLDMFGGDCRWCLGGXCXKRRRPTLRGRVG

SEQ ID NO: 93313 - protein, 121 aa, Gossypium hirsutum
  unsure (1)..(121): unsure at all Xaa locations
  Clone ID: LIB3145-055-Q1-K1-E10.pep
HEAHIEKDRHTHTAKAVLPLXIHIQXALNGTPLQNQIEKPLFLTRFXQIRAYYDYYCKDCDCQTLDYTSXTHCPHCPHNSVTHSXHWNKYIATPIQQSRHEQICKRALILLRHIDSNNIYL

SEQ ID NO: 93314 - protein, 132 aa, Gossypium hirsutum
  Clone ID: LIB3145-055-Q1-K1-F1.pep
KTEQLQDLDDPLPPAHRYFFHADPRIQNLVRSRLPFFSPLSMVDNGGHQQPTVSIMDFKNQFNKGESSKQRGSRKGSGKNCSISRSSKSKKPNAENGAFEGWVNPKTSGAVPKNAGKRRVHASGQPAGHWYT

SEQ ID NO: 93315 - protein, 69 aa, Gossypium hirsutum
  Clone ID: LIB3145-055-Q1-K1-F10.pep
CKIICWAVIFYLFMGPGNIGLVHEVKGLTEHERYLALSKIPNHPTQMLIFFSLPFSVRLEWIRRFLADH

SEQ ID NO: 93316 - protein, 141 aa, Gossypium hirsutum
  unsure (1)..(141): unsure at all Xaa locations
  Clone ID: LIB3145-055-Q1-K1-F11.pep
KHYITTIINGSDVEPTFSAGAVXELRTEDTACSLLNDVRDQVERTTDANVVYRTATGLSARVHSMATGKSSVVGAGATFRPASSSTNVGMKGAQNDGHADVRSRSSLTTWSCIGPRRQNVVLGSNAEGDDMTEPSLKSKTS

SEQ ID NO: 93317 - protein, 52 aa, Gossypium hirsutum
  Clone ID: LIB3145-055-Q1-K1-F12.pep
IKLTSVVFFFFYFFYFSHTIHYFYLYRSKIILNKHDRPTTTTSISMIIGRVG

SEQ ID NO: 93318 - protein, 48 aa, Gossypium hirsutum
  unsure (1)..(48): unsure at all Xaa locations
  Clone ID: LIB3145-055-Q1-K1-F6.pep
CLAFESKQSNEITQIHPXARHITPITLFFTFNLDLACVFPLGLAALLI

SEQ ID NO: 93319 - protein, 75 aa, Gossypium hirsutum
  Clone ID: LIB3145-055-Q1-K1-G4.pep
SHPRLSRHKWNIWNMWDSVGLVGSVGIVEFVGFVGYVEFEGYLHFTPFLEPQTMVERFHQEDKNTEHQEEQHLSA

SEQ ID NO: 93320 - protein, 105 aa, Gossypium hirsutum
  unsure (1)..(105): unsure at all Xaa locations
  Clone ID: LIB3145-055-Q1-K1-H10.pep
HLHGATHYGSAADLSKAGCILADIYAGXPIMPGRTEEEHLHKIXRLCGWPYEDYWSKLKMLNAHILTPTRPCKRXACETLMEFSDXALATMETLLCMDPAVRGSA

SEQ ID NO: 93321 - protein, 65 aa, Gossypium hirsutum
  Clone ID: LIB3145-055-Q1-K1-H5.pep
SAPSINQRSHAKWYKLGAMLTSSNQHTEIDESKQAQIENLIRIQYLCSSHGIQRTFSQILYTNEF

SEQ ID NO: 93322 - protein, 61 aa, Gossypium hirsutum
  Clone ID: LIB3145-056-Q1-K1-A7.pep
KPVKSTNPITLTNRPIYYRPKSLGTKRPNDLKHQQETLGFPWNLSAAGAVPEVTPRQTRSS

SEQ ID NO: 93323 - protein, 47 aa, Gossypium hirsutum
  Clone ID: LIB3145-056-Q1-K1-B10.pep
NPVGILMSLRRWERVGDFRRVVRATRQIHAKEGLPSFPMGKIDQTQM

SEQ ID NO: 93324 - protein, 72 aa, Gossypium hirsutum
  unsure (1)..(72): unsure at all Xaa locations
  Clone ID: LIB3145-056-Q1-K1-B6.pep
KSLLGFRDNGDRXKKKKKKKKKKKKKKKKKKKKKKKKKKKKKKKKKKKKXGGGRFKGSKFTYACLQRNNFFI

SEQ ID NO: 93325 - protein, 101 aa, Gossypium hirsutum
  Clone ID: LIB3145-056-Q1-K1-B8.pep
RFYDEIKSTGIMPSETILENLLEGFCRRRRFNQVKEFIKSCLEVWQEISVKMAEEVVGLYLEHGKVEEMEELLSTVVESGQAVTLFSQVNSGIIRMYAALN

SEQ ID NO: 93326 - protein, 110 aa, Gossypium hirsutum
  unsure (1)..(110): unsure at all Xaa locations
  Clone ID: LIB3145-056-Q1-K1-C5.pep
PKKKLIICKPGEVKFVPLKGPPPFFLFFFFFFYIFFFFFFYFFFFFFFFFFFFFFFFFFFFFFFFFFFXXNLDPRSYLLQTETKDFYKKLWNLQLPSKIAFTIWRFSWDF

SEQ ID NO: 93327 - protein, 39 aa, Gossypium hirsutum
  Clone ID: LIB3145-056-Q1-K1-D10.pep
ASHNLHGLLWGVTFIPVTGPCILPVGMFSFKIPYSFQAA

SEQ ID NO: 93328 - protein, 59 aa, Gossypium hirsutum
  Clone ID: LIB3145-056-Q1-K1-D11.pep
KTNVQCLKDKQTDGAGGKDTGTGRQNEPPTKKAMPDREQTDMGRENYGKKRRTTNSRRT

SEQ ID NO: 93329 - protein, 107 aa, Gossypium hirsutum
  Clone ID: LIB3145-056-Q1-K1-D7.pep
EELPRNRSELESESSLIDELNARVSSLVVERDNSMREFVSLQEEYNDSKLLSENKAVADAELLGERENEIRLLKEKLELALNDASENKTIAADLNKEKESLERALEM

SEQ ID NO: 93330 - protein, 81 aa, Gossypium hirsutum
  Clone ID: LIB3145-056-Q1-K1-D9.pep
NECLERNGGCWQDKHANITACKDTFRGRVCECPIVKGVQYRGDGYISCEAFGPARCTINNGGCWSDTKDGLTFSACSKKQL

SEQ ID NO: 93331 - protein, 53 aa, Gossypium hirsutum
  Clone ID: LIB3145-056-Q1-K1-E10.pep
SNRGFIPGGNSTSEPRCCAALGITSSLPLLLDLYVSFMSVGNYGIYISLQKLN

SEQ ID NO: 93332 - protein, 80 aa, Gossypium hirsutum
  unsure (1)..(80): unsure at all Xaa locations
  Clone ID: LIB3145-056-Q1-K1-E12.pep
HASVHASCPILFLMQGFEAYVGVLLLKTAFFWVVPEWQIIXCGILLVVMAVGNFINTVQTLVAKSRFKAKMKKTNGKQEL

SEQ ID NO: 93333 - protein, 57 aa, Gossypium hirsutum
  Clone ID: LIB3145-056-Q1-K1-E2.pep
PVISYLNPQLSCNFHFGSFDPNQGSPAIQNGEMSVLVVKTEGMKTMKEKKKSLALSF

SEQ ID NO: 93334 - protein, 57 aa, Gossypium hirsutum
  Clone ID: LIB3145-056-Q1-K1-E3.pep
MASGWVKSLQCKSRAYEDVYHPSPKYLIPSTSCTRSSQSIKDVIQTAKKKPKKSGTK

SEQ ID NO: 93335 - protein, 103 aa, Gossypium hirsutum
  unsure (1)..(103): unsure at all Xaa locations
  Clone ID: LIB3145-056-Q1-K1-E7.pep
PHDRSIVFACLNADYESGNSVKFNEILTILAAKIGAKADGKTDSSKPLMDAGKETCASETPSTVVIAKRTYLLSKVIFEGPCMAAIEIYAXSTIQASADPSAF

SEQ ID NO: 93336 - protein, 114 aa, Gossypium hirsutum
  unsure (1)..(114): unsure at all Xaa locations
  Clone ID: LIB3145-056-Q1-K1-F11.pep
NNYSEVVFSEFLGYKRHRGRDRSMLVPNCFFKMECSTVLLSXNRRRDYRRSKYLLEHLVQTHKXSDVRRCMSIYHKKNXQCFKCLKINKDLMEIGGIVRKTYITTFGALSLSFF

SEQ ID NO: 93337 - protein, 59 aa, Gossypium hirsutum
  unsure (1)..(59): unsure at all Xaa locations
  Clone ID: LIB3145-056-Q1-K1-F4.pep
LCLQHVFGILGIIXTQDWTCPCCVAGISYVTTPIVWLQHTEERNYRRANYRIKHTVRTH

SEQ ID NO: 93338 - protein, 56 aa, Gossypium hirsutum
  Clone ID: LIB3145-056-Q1-K1-F7.pep
RKRMEKGFWDLVKTRKSERTDNQPIIQLPHTNSLVGSAQRDAFPSAKKAEAPRRRA

SEQ ID NO: 93339 - protein, 69 aa, Gossypium hirsutum
  Clone ID: LIB3145-056-Q1-K1-F8.pep
LESGHVASVATLQTYLCLQLFRLILTPPALIESINALIASFCCRLLSYACFEDAGVAYHFEYSRFSFCP

SEQ ID NO: 93340 - protein, 101 aa, Gossypium hirsutum
  Clone ID: LIB3145-056-Q1-K1-G5.pep
KASRTMGDLMNIHAHACIGSKSAREDITKLENGVHVMSATPGRVCDMIKRRTLLARALKLLILDESDEMLSRGFKDHIDDVDRHLTPELHVCVISATLTHE

SEQ ID NO: 93341 - protein, 40 aa, Gossypium hirsutum
  Clone ID: LIB3145-056-Q1-K1-G9.pep
ISYLHDQGHDSIIRLRSSVQREDHNHILRLLSQICLSHVS

SEQ ID NO: 93342 - protein, 102 aa, Gossypium hirsutum
  unsure (1)..(102): unsure at all Xaa locations
  Clone ID: LIB3145-056-Q1-K1-H1.pep
ILPHVDNFAHIGGFLTGFLLGFVLLLRPQFGWVQCQHVPAGAPVKSKHKAYQYVFXVIAVVLVIIGFTMGLVMLFRGENGNDHCSWCHYLSCVPISSWHCGK

SEQ ID NO: 93343 - protein, 76 aa, Gossypium hirsutum
  Clone ID: LIB3145-056-Q1-K1-H3.pep
INADDIPTTDMNEERNTFYDCEADVSLDDRDVFGPERRGDRDQRGSSSSNKRKKKSDARDNMYSSFDEAATLLAEN

SEQ ID NO: 93344 - protein, 57 aa, Gossypium hirsutum
  Clone ID: LIB3145-056-Q1-K1-H6.pep
KTLNQGTARGSAIGFKLDSLLKLTDTRASTSKMTLMHYLCKVLAAKAPALLDFHLEF

SEQ ID NO: 93345 - protein, 60 aa, Gossypium hirsutum
  unsure (1)..(60): unsure at all Xaa locations
  Clone ID: LIB3145-056-Q1-K1-H9.pep
MMHSFGYRXNALLTIAVTILALMCAITSVSDNLNTPSCSAXIKIMNINWFQKQAQGHDEG

SEQ ID NO: 93346 - protein, 131 aa, Gossypium hirsutum
  Clone ID: LIB3145-057-Q1-K1-A11.pep
HASAKVLLEGWIARDGIHCGCCSKILTVSKFEIHAGSKLRQPFQNIYLDSGVSLLQCQVDAWNRQEESEQIGFHSVDVDGDDPNDDTCGICGDGGDLICCDSCPSTFHQSCLNIEFLPAGDWHCPNCTCKF

SEQ ID NO: 93347 - protein, 44 aa, Gossypium hirsutum
  Clone ID: LIB3145-057-Q1-K1-A2.pep
NFYHNSHIPFINDPKSNSYASKATIPTLFLLIYTPLSRYQQSLQ

SEQ ID NO: 93348 - protein, 55 aa, Gossypium hirsutum
  unsure (1)..(55): unsure at all Xaa locations
  Clone ID: LIB3145-057-Q1-K1-A3.pep
LALFMHEECGFKLIHQRLXTKHHTMVMLYLRSMMNTLSDNPPKASVMIAWNLIIR

SEQ ID NO: 93349 - protein, 43 aa, Gossypium hirsutum
  Clone ID: LIB3145-057-Q1-K1-B1.pep
NSKKKDPCSCIKMQSDPNSVIKLELSQHEISSTQSVYSSNSQS

SEQ ID NO: 93350 - protein, 130 aa, Gossypium hirsutum
  Clone ID: LIB3145-057-Q1-K1-B4.pep
PRVRPRVRPRVRPRVRDTQNFEKFDESDDQCPMPSKSGPWRKMLSSKDVNFVGYTYKNFEIVNDFHVPGMAELKKKSSKSSTPSVKTLFDSGAEASDASDSTPGAQPVQGSFLNLLPPELEATVKQCGSQ

SEQ ID NO: 93351 - protein, 96 aa, Gossypium hirsutum
  Clone ID: LIB3145-057-Q1-K1-B5.pep
LRFTPNISITPYHANVKESRFNVDFYKEFDVVLNGLDNLDARRHVNRLCLAADVPLVESGTTGFLGQVTVHLKGNRNLALSTTKIKTLFDNWAKDI

SEQ ID NO: 93352 - protein, 84 aa, Gossypium hirsutum
  Clone ID: LIB3145-057-Q1-K1-B7.pep
VLMEGIFSSTKHNLTEAVTAVVVEDFEETAGTTVYAVDIVFAVNVDMEVVVTDVDTGMVVDTDTVDLLTQVAAALGLMLTQFMI

SEQ ID NO: 93353 - protein, 77 aa, Gossypium hirsutum
  unsure (1)..(77): unsure at all Xaa locations
  Clone ID: LIB3145-057-Q1-K1-C1.pep
FGWEKKSELAWAKDPVIQAAFEKFNGRLMELERIIDERNANKDXRNRNGAGIVPYEFLKPLSEPGVTGKGVPYSISI

SEQ ID NO: 93354 - protein, 39 aa, Gossypium hirsutum
  unsure (1)..(39): unsure at all Xaa locations
  Clone ID: LIB3145-057-Q1-K1-C10.pep
RDLYNTIFSFYFXDYGHIAXHGPYLTYHDSYLPITSGSG

SEQ ID NO: 93355 - protein, 80 aa, Gossypium hirsutum
  Clone ID: LIB3145-057-Q1-K1-C2.pep
EICNTYLPNIKGNIYYVQKKKKQKKKKKKKKKKKKKKKINTGGTAKKSPIYAPPSAPKNLLLLLYRDALKRPGFYIDKSG

SEQ ID NO: 93356 - protein, 135 aa, Gossypium hirsutum
  Clone ID: LIB3145-057-Q1-K1-C4.pep
PTRPPTRPETVQYTFLDYLAAGFELNFMVAIDFTASNGNPRLPDSLHYIDPSGRLNAYQKAIYEVGEVLQFYDADKRFPAWGFGARPIDGPVSHCFNLNGSSNYCEVERIRGIMMAYTSALFNVSLAGPTLFGHV

SEQ ID NO: 93357 - protein, 45 aa, Gossypium hirsutum
  unsure (1)..(45): unsure at all Xaa locations
  Clone ID: LIB3145-057-Q1-K1-C6.pep
FISQMIVTHSPCRKFLSAPQICQHHFNSYVPQAGTXCPEWLKKTS

SEQ ID NO: 93358 - protein, 84 aa, Gossypium hirsutum
  unsure (1)..(84): unsure at all Xaa locations
  Clone ID: LIB3145-057-Q1-K1-D10.pep
MVSTSVLYTYTLSSYTFGSKQPRMENDSCDAYRLACMKTNCLKEGLXTSVAAMILVHEHNYPHILLLHIGNKFCILAGGRPKPV

SEQ ID NO: 93359 - protein, 91 aa, Gossypium hirsutum
  unsure (1)..(91): unsure at all Xaa locations
  Clone ID: LIB3145-057-Q1-K1-D12.pep
RPQHTFWFASECLLLMLVLLSLVHSHRHRCSSSDTYVWXTKLQIPRTWALTKYXEVSHTKAXSGKRDVTSAWNPARGXYLNATKEEIAMQR

SEQ ID NO: 93360 - protein, 125 aa, Gossypium hirsutum
  Clone ID: LIB3145-057-Q1-K1-D3.pep
MENEYNNNVVDNLMRSSSYNYGFSRRATSPEIISLEPHSFRSVKISADDFEFNSPSSPASSLCHEPVSVPSDSMHQKEDDEDEDEDEEEVMSSYVIEINSDVRESNGEAVSIDEAIAWAKERYNS

SEQ ID NO: 93361 - protein, 137 aa, Gossypium hirsutum
  Clone ID: LIB3145-057-Q1-K1-D4.pep
LKQEQDDDDGDHDDDDDDHDHEHESTTCGDGMAHEVHETSFHNAPESMTRLVTHLIMEAETEQNCYGDGEASSYMVTQKLESWKEVESNTIYMMAGQDLRRSDVDEVDRIVLQIQETALELEDAIFGLLMEEMSEEL

SEQ ID NO: 93362 - protein, 73 aa, Gossypium hirsutum
  Clone ID: LIB3145-057-Q1-K1-D8.pep
KLNHYYSTKKKKKKKREKKKKRGEKKKKRGDGMGGPGLRSRVCALLSLVWGALFFLYWPLFCTVVSGIYPGVT

SEQ ID NO: 93363 - protein, 63 aa, Gossypium hirsutum
  Clone ID: LIB3145-057-Q1-K1-D9.pep
PRVRNYCAAIRVASSVASPHPHPGSRDRNVKLRIKSFKVPELLVEIPTTATVGSLKVISRNNV

SEQ ID NO: 93364 - protein, 75 aa, Gossypium hirsutum
  Clone ID: LIB3145-057-Q1-K1-E6.pep
PRVRKKFMEHDFWENTSQISTVDFYQAQTVSTGLGLSLDYDNNYQTGFSGDSAMLTLIGDDIDNELRRNDADIDR

SEQ ID NO: 93365 - protein, 53 aa, Gossypium hirsutum
  Clone ID: LIB3145-057-Q1-K1-F11.pep
NSLKCTSSCVIRTRAFFSLRSHGQRLVENAKHNSTNLERDGKATDEPSDLQKR

SEQ ID NO: 93366 - protein, 62 aa, Gossypium hirsutum
  Clone ID: LIB3145-057-Q1-K1-F12.pep
MVHVIDKICIAVGSFIAASGNLMYGGRKSFMLRPLPNESKRRTKNLHEGGSGTALCLNCLLY

SEQ ID NO: 93367 - protein, 51 aa, Gossypium hirsutum
  Clone ID: LIB3145-057-Q1-K1-F2.pep
YHHLPLCFCVATPLCWVPLRFSQSDRCWLPLCHLCSCGIIEELCCCMLAHV

SEQ ID NO: 93368 - protein, 139 aa, Gossypium hirsutum
  Clone ID: LIB3145-057-Q1-K1-F4.pep
QFADTQYKFFSTRYGQQVIDILEFPIKVVLSPFTLAFDIAGSAPRGFGIPEFISKLSHTSIFAIAALGTYDIALELGKKVICQRNCRTCNGWQALRCTMCKGSGKVHYQVKTHSLRSGEKATAECVADAIADNRAELVH

SEQ ID NO: 93369 - protein, 57 aa, Gossypium hirsutum
  Clone ID: LIB3145-057-Q1-K1-F6.pep
IQLMCSHSKEISFTFMHQQVHKEWDEGIPRIGMINVTGTSDLTEGDFWGQCPPRFHG

SEQ ID NO: 93370 - protein, 47 aa, Gossypium hirsutum
  Clone ID: LIB3145-057-Q1-K1-G10.pep
WELPMIQARTSQIVWLRKKPKVRFDLCGPGEDKCPPCDKIVQDFGYT

SEQ ID NO: 93371 - protein, 82 aa, Gossypium hirsutum
  Clone ID: LIB3145-057-Q1-K1-G3.pep
DRCLNQVQPTETLAPRLPSASHVRSQCKHRSRDGSTRPLHQKGSLCPVDLLHRPANTQKEESQQNKRKMKTEQKERAKKMKN

SEQ ID NO: 93372 - protein, 109 aa, Gossypium hirsutum
  unsure (1)..(109): unsure at all Xaa locations
  Clone ID: LIB3145-057-Q1-K1-H11.pep
NSGSPTPSVTKTFDKNLASCLFKLLLKYRPEDKAVKKVRFLKKTRPRLKEKPPSVKYQLCVKYAVNHVTVPYXHNKGQLVVIAHDVDPIKMVVWRLALCLKMDGPYLIV

SEQ ID NO: 93373 - protein, 41 aa, Gossypium hirsutum
  Clone ID: LIB3145-057-Q1-K1-H12.pep
KRGSTSICILDTYMHINYFPTGKLVTLKLKNIPTLFSQLSH

SEQ ID NO: 93374 - protein, 69 aa, Gossypium hirsutum
  unsure (1)..(69): unsure at all Xaa locations
  Clone ID: LIB3145-057-Q1-K1-H5.pep
STKIFDKNLASGLFKXVLKYRAKDKTGKKERFLKKAQAEAEGKAPQXKKPLVXKYRLNHGTYLIEQNKG

SEQ ID NO: 93375 - protein, 40 aa, Gossypium hirsutum
  Clone ID: LIB3145-057-Q1-K1-H7.pep
TQKSMPIMLDLAHPPLSSNVITDKPSAVVITLVGSASSFL

SEQ ID NO: 93376 - protein, 85 aa, Gossypium hirsutum
  Clone ID: LIB3145-058-Q1-K1-A2.pep
TSRTMEMAKEYCQVVEQDEKHRNLSSTLEELYEWEKKLYKEVKDEERLRVIYEKKCKRLIMLDNQGAESSKIDATRASIRKLLTK

SEQ ID NO: 93377 - protein, 59 aa, Gossypium hirsutum
  unsure (1)..(59): unsure at all Xaa locations
  Clone ID: LIB3145-058-Q1-K1-A7.pep
FYFFFFFFFXXFFFFFFFFFFFFFFFFFFEKPTGILLQYFKSKEYGIWICIYNIENIDT

SEQ ID NO: 93378 - protein, 78 aa, Gossypium hirsutum
  Clone ID: LIB3145-058-Q1-K1-B10.pep
PDLVKAMCIMSASGSASGLKLVCRFGVYIEAHRWSECTNCESSPSPRISVVVYSPNGEKHTHKNCTLFNFHLVEVINV

SEQ ID NO: 93379 - protein, 40 aa, Gossypium hirsutum
  Clone ID: LIB3145-058-Q1-K1-B12.pep
LGVQGSFQDCVPAQVNACDSDYAFRCVGLPQQLHRTICLL

SEQ ID NO: 93380 - protein, 90 aa, Gossypium hirsutum
  Clone ID: LIB3145-058-Q1-K1-C4.pep
GEHSSEFSVRSAYKLLQEANMGPSAYLIQTETKNLYRKLWNLHLPSKIAITIWRLSWNFIPTLKNLILKRVASDISCPRCRNAEEDSNHV

SEQ ID NO: 93381 - protein, 130 aa, Gossypium hirsutum
  Clone ID: LIB3145-058-Q1-K1-D10.pep
PRVRKNSISCATITTTTTTPFPGFDKEKKGRNWCKMLALSVNSKRQRRPNVRLGEIGYVSAAFACGFSQKTKENLVHKTWKPDSLYSQHNELDTVIEFSSKGISPDFFISADSQHNTENKNPNSSKPGFD

SEQ ID NO: 93382 - protein, 71 aa, Gossypium hirsutum
  Clone ID: LIB3145-058-Q1-K1-D3.pep
PRVRFDQMIESGLEPDNATYMTLISGYCKRGYLARALNLFEEMYRRGIQPDMRTISTVDHCILNAKRVVRK

SEQ ID NO: 93383 - protein, 67 aa, Gossypium hirsutum
  Clone ID: LIB3145-058-Q1-K1-E12.pep
SKGVYDSIAAFNYVLCIHVKSRFQLRLFICALAASLRALICYMGMQLSAPFCCVCRNPIEIFSPLIG

SEQ ID NO: 93384 - protein, 134 aa, Gossypium hirsutum
  unsure (1)..(134): unsure at all Xaa locations
  Clone ID: LIB3145-058-Q1-K1-E5.pep
HASADHHAAANKADVEVETSVQVDAVQTNDQPKDPKDAAGSRELQETEATKAVEKVVVDTTNLANFVGKPVFHAERIYDRTPVGVVMGLAWTAMGGSTLYIETTQVEQGEGKGALHLTGQXGDVMKESAQIAHT

SEQ ID NO: 93385 - protein, 79 aa, Gossypium hirsutum
  Clone ID: LIB3145-058-Q1-K1-F12.pep
IHFTSHGNQKPSFSRFICDFTISNLTKRSEKQIKDTYVYMYVCTYVPLYVYTAETIDIPTEHSCMKWQTYFFFLIHTYM

SEQ ID NO: 93386 - protein, 92 aa, Gossypium hirsutum
  Clone ID: LIB3145-058-Q1-K1-F3.pep
MGRSPCCSKEGLNRGAWTALEDKFLTDYIKVHGEGRWRNLPKRAGLKRCGKSCRLRWLNYLRPDIKRGNISPDEEELIIKLHKLLGNRWSLI

SEQ ID NO: 93387 - protein, 74 aa, Gossypium hirsutum
  Clone ID: LIB3145-058-Q1-K1-G2.pep
PRVRPRVRGVSNMKIWLICLALIDIVVMEEVIQIDAAMTTHHPEVPGLVSYRRLLQEDVNPWQRGCLKLTRCRS

SEQ ID NO: 93388 - protein, 61 aa, Gossypium hirsutum
  Clone ID: LIB3145-058-Q1-K1-H10.pep
DLNVEFSNEVEEPVPRRSEGNHAGYGEEDNMEGNGFFEGLDEFLSSLPILSAVGDDKVKAT

SEQ ID NO: 93389 - protein, 135 aa, Gossypium hirsutum
  Clone ID: LIB3145-058-Q1-K1-H11.pep
KDECLNLSLRPLQVSDVDDFMVWASDEKVTRFCTWEPYTNKEDGLNYIKNTVVPHPWFRAICVDDRPVGAISVSANSGNDKCRGELGYVLASKYWGKGIVTRAVKMVVDTIFVEWPHLERLEALVDVENVGSQRV

SEQ ID NO: 93390 - protein, 57 aa, Gossypium hirsutum
  Clone ID: LIB3147-001-Q1-K1-A7.pep
GVSDTNIYHHPLNLGRSVSTRKLTRLPSITQNDAKFRGYDGIHRSGFSYCLLKLELI

SEQ ID NO: 93391 - protein, 61 aa, Gossypium hirsutum
  Clone ID: LIB3147-001-Q1-K1-A8.pep
RFSKITKDLLVPAESRVTGINEICGQALTSDLTKDFLGILADNGMLRHIESIANRFVEVTI

SEQ ID NO: 93392 - protein, 39 aa, Gossypium hirsutum
  Clone ID: LIB3147-001-Q1-K1-B6.pep
ITNTPEFILLDCSNQGLSTSGSFKLHHEWLWLIFYFVHI

SEQ ID NO: 93393 - protein, 39 aa, Gossypium hirsutum
  Clone ID: LIB3147-001-Q1-K1-B7.pep
MFLEAIPFFMGSPISWLQISYCFFLGSPITGLPISFFLF

SEQ ID NO: 93394 - protein, 40 aa, Gossypium hirsutum
  Clone ID: LIB3147-001-Q1-K1-D6.pep
RSVVFESLIGKHELFLSNQQPFSMVEAICDIVNMLNTIAL

SEQ ID NO: 93395 - protein, 83 aa, Gossypium hirsutum
  Clone ID: LIB3147-001-Q1-K1-E4.pep
VLDDLHCPSRINTYGLSFMVDCPQRAMEMRRLDRILSTWARSIEHRVSSLASICASSDGARTMVYLEQSVSQSSTASVDECVA

SEQ ID NO: 93396 - protein, 52 aa, Gossypium hirsutum
  Clone ID: LIB3147-001-Q1-K1-E5.pep
DYVVHMGALPSVGCNLGHGQPSGDFEPIGLWSSQCWFCGLGESWSNAFVRDQ

SEQ ID NO: 93397 - protein, 45 aa, Gossypium hirsutum
  Clone ID: LIB3147-001-Q1-K1-F4.pep
NRTTNSTLVKRKPFVVINLNASTSSVYFLFNAWPATNMSRIYVED

SEQ ID NO: 93398 - protein, 67 aa, Gossypium hirsutum
  Clone ID: LIB3147-001-Q1-K1-F6.pep
MASNAKGFVDMTIGGQPARATCMELFAHCTSSTAENFRAIRTGQKGVSRSGKPLHYISFSFHWVIPN

SEQ ID NO: 93399 - protein, 73 aa, Gossypium hirsutum
  Clone ID: LIB3147-001-Q1-K1-G2.pep
SHPRYQVYIRACIISSSCKRYMLGQDKVMVVQVCDLHILIVKVTLLADSIHKFSSKRTSIDAFNHDISLIKAS

SEQ ID NO: 93400 - protein, 46 aa, Gossypium hirsutum
  Clone ID: LIB3147-001-Q1-K1-G6.pep
LDLIKSLHFHCSLMRELEYLGLHWALMIVRRSHLLGWVDHTMSMCW

SEQ ID NO: 93401 - protein, 73 aa, Gossypium hirsutum
  Clone ID: LIB3147-001-Q1-K1-G7.pep
VLRIARRPGYRPSSRGTPIRHKFVRSLSMVRAHDVDYARVDLLSIIYLAHQYLDPVGPLTSCKYPTCMPAEPS

SEQ ID NO: 93402 - protein, 38 aa, Gossypium hirsutum
  Clone ID: LIB3147-001-Q1-K1-H7.pep
KVTFQAVILVLNNIIKRTYSESLIYYFFRAGNCNQHLP

SEQ ID NO: 93403 - protein, 73 aa, Gossypium hirsutum
  Clone ID: LIB3147-001-Q1-K1-H8.pep
SDIQEHPVKDPYENDNEGYIQAPSLDNCQKRCASTRQTKSPFRHVSAHPLLVPTIPTHKKNPTRPPTRPPTSQ

SEQ ID NO: 93404 - protein, 68 aa, Gossypium hirsutum
  Clone ID: LIB3147-001-Q1-K2-A1.pep
KSKCDRECNDLHLSSVMTDGGFFQGRVRTYMLTAFDSIFKLVHRVYLSVALWYFITFALRCIVMTLKW

SEQ ID NO: 93405 - protein, 50 aa, Gossypium hirsutum
  Clone ID: LIB3147-001-Q1-K2-A7.pep
RSDQLLFQQTVAESRPVNAIIPPELCIVMSNVSQPSQPSGRNTSSIIKDW

SEQ ID NO: 93406 - protein, 88 aa, Gossypium hirsutum
  unsure (1)..(88): unsure at all Xaa locations
  Clone ID: LIB3147-001-Q1-K2-B10.pep
YWIYKAYADEVGIPFMETSGKDSMNVEQAFMAMAAFIKDRMASQPAMNNARPXTVQIQRQAVAQKSGCCSFKKEKGKKSIMWLDFTWF

SEQ ID NO: 93407 - protein, 44 aa, Gossypium hirsutum
  Clone ID: LIB3147-001-Q1-K2-B12.pep
TMLPATHAATLKIIRASSSFGCWCNSITSYAYCHLPTIFITTDH

SEQ ID NO: 93408 - protein, 87 aa, Gossypium hirsutum
  Clone ID: LIB3147-001-Q1-K2-B6.pep
CRSHKFVSLFCFVKNLHKHHRKKKLDGEKTEAQCGCRSWRNNTTGFILLESSKPAPSTTGSSKLHHELLSLIFYFSIFEAHVGVSFP

SEQ ID NO: 93409 - protein, 79 aa, Gossypium hirsutum
  Clone ID: LIB3147-001-Q1-K2-E12.pep
DQYRSLTYMRPLAIWAMQWALSRAKVPKQELKPEMEADSLRVHHAGFSKVARLLKLPEDQRSKSLLQIMFDYTCKRMLT

SEQ ID NO: 93410 - protein, 105 aa, Gossypium hirsutum
  unsure (1)..(105): unsure at all Xaa locations
  Clone ID: LIB3147-001-Q1-K2-E5.pep
GLDLLTGTTITLDVETHDSIYDVQVNIQDXNXMTCDQHSLMFVAKHFEVYITLACYSVRTESTVQLKLRLTRSANKIMKMIYDMRKMIMHNRNNVELVDLHLYNV

SEQ ID NO: 93411 - protein, 44 aa, Gossypium hirsutum
  Clone ID: LIB3147-001-Q1-K2-F4.pep
TYILLMFVAGQAFKRVIDYYTVLEFKLITTRGLVLTSELSDVLF

SEQ ID NO: 93412 - protein, 103 aa, Gossypium hirsutum
  unsure (1)..(103): unsure at all Xaa locations
  Clone ID: LIB3147-001-Q1-K2-F6.pep
DDMTIGAESGCGIVMDAFXDCTSCTENNYRALRTGEKGVCRMRKPLHYISSCLHRVIPNFMCQGRDYTGXTVPXGESIYGSKFDDENLIKKHTGSGILSMADA

SEQ ID NO: 93413 - protein, 68 aa, Gossypium hirsutum
  Clone ID: LIB3147-001-Q1-K2-F8.pep
RHPIPRAYLRASIISSTCTRNMIGQGIVTLVRVCDVHILIVKLTILAHSFHEVSTSRSSLDASTEDLS

SEQ ID NO: 93414 - protein, 64 aa, Gossypium hirsutum
  Clone ID: LIB3147-001-Q1-K2-F9.pep
TYIFYIVSFFSFFFLNEILKVKEEEQWSIWFINHQSSIINHGHSSSYIEMQWEWIEEVFLLMLL

SEQ ID NO: 93415 - protein, 62 aa, Gossypium hirsutum
  Clone ID: LIB3147-001-Q1-K2-G2.pep
CLGSICSRIRYTKYILEHASSVAAVTRHMIGQDTVMVVQVCDLHILLVIVALLADSFHEFSS

SEQ ID NO: 93416 - protein, 37 aa, Gossypium hirsutum
  Clone ID: LIB3147-001-Q1-K2-G6.pep
MSCLNETDSIKIYTDTKSVEKHRMHGRTCWTHRSIRE

SEQ ID NO: 93417 - protein, 102 aa, Gossypium hirsutum
  unsure (1)..(102): unsure at all Xaa locations
  Clone ID: LIB3147-001-Q1-K2-G7.pep
HAFVRHMATYCNSATLYARTGQLTCTXDRYCLEDGHQVLNTVYKATCYTGDRATHHLTSWARTMHKDXTNLSRMVDPLLQGRYLDRVLYQALDIAPMRVQEH

SEQ ID NO: 93418 - protein, 46 aa, Gossypium hirsutum
  Clone ID: LIB3147-001-Q1-K2-G8.pep
PNDRIDPRMRPHHRELLVWMLTCALPTLRKLNQKTEHHLQSNDACT

SEQ ID NO: 93419 - protein, 66 aa, Gossypium hirsutum
  Clone ID: LIB3147-001-Q1-K2-G9.pep
RDNLARLIACSVTIHGTIRPYIMITICITAIINSHSYHRIMILTSIKILLQSIPTAFQCMMMNDHD

SEQ ID NO: 93420 - protein, 52 aa, Gossypium hirsutum
  Clone ID: LIB3147-001-Q1-K2-H12.pep
KFKSCLRVGWIKFPLESPYHKSESAKPHHITRSDIYRLTNTWLTIVNRIYLI

SEQ ID NO: 93421 - protein, 67 aa, Gossypium hirsutum
  unsure (1)..(67): unsure at all Xaa locations
  Clone ID: LIB3147-001-Q1-K2-H2.pep
RPHVGDVLVWLRTAALPTFSKLYGETAQDLQPNDQIPVTLDNYFHSYRFNGXKKLVLSTTSWLGGKN

SEQ ID NO: 93422 - protein, 52 aa, Gossypium hirsutum
  Clone ID: LIB3147-001-Q1-K2-H7.pep
ILVTLGSIHILYHDHDSLQKMRTIACPGKIVFEGLTGSPNYYIIQNQHQGCK

SEQ ID NO: 93423 - protein, 55 aa, Gossypium hirsutum
  Clone ID: LIB3147-002-Q1-K1-A11.pep
GNKTLHVLKIYHQFYMCPMSKFMLFFCPCNYISSPIQVGHRTAKVSFWNVSVAFT

SEQ ID NO: 93424 - protein, 57 aa, Gossypium hirsutum
  Clone ID: LIB3147-002-Q1-K1-B12.pep
AVRIVLEMAGVENALGKQLGSKNALNNARATVVAVQKMKQFREVAQERGIPMEELWK

SEQ ID NO: 93425 - protein, 71 aa, Gossypium hirsutum
  Clone ID: LIB3147-002-Q1-K1-C11.pep
SNHYGGLGGGHYTAYAKLIDENRWYHFDDSHVSAVNESDIKTSAAYLLFYKRVRSESKVEAGEASHSHSIS

SEQ ID NO: 93426 - protein, 149 aa, Gossypium hirsutum
  unsure (1)..(149): unsure at all Xaa locations
  Clone ID: LIB3147-002-Q1-K1-D11.pep
DLAQAFMKQYSHVADMVLDRITLQNMEKKPNESFRQYAQRWREVAIQVQPPLLEKEMTMLFINTLKAPFITHMLGSASKSFSDIVMSGEMIESAVRSGKIDAGENNRRSDLKKKENXVSNVNTYNKSITQPRKVITSQQSSSRQESYVK

SEQ ID NO: 93427 - protein, 40 aa, Gossypium hirsutum
  Clone ID: LIB3147-002-Q1-K1-D9.pep
KLIFIPLNTLINGITYNFSQKKDLVYPHVCVCGHNKVLTC

SEQ ID NO: 93428 - protein, 80 aa, Gossypium hirsutum
  Clone ID: LIB3147-002-Q1-K1-E10.pep
GRSAGSAKGKPKIEVYDKDRKKGAGLITPAKSYNPAADSVRGQTTNSGALDEQDTAPRKKKKVDVEPQEEEAAEVAAIED

SEQ ID NO: 93429 - protein, 71 aa, Gossypium hirsutum
  Clone ID: LIB3147-002-Q1-K1-E9.pep
MNSRTCRPLARFKPLKYIYETETVMYAYYKNLNYFSTERTYSPFAARRLSREFIMDLELTQPCAIIDLIQT

SEQ ID NO: 93430 - protein, 54 aa, Gossypium hirsutum
  Clone ID: LIB3147-002-Q1-K1-F11.pep
VDLSFPSSPNVSMEARNLINRLLVKDSSKRLSLQKIMEHPWIIKNANPTGTCKK

SEQ ID NO: 93431 - protein, 38 aa, Gossypium hirsutum
  Clone ID: LIB3147-002-Q1-K1-F12.pep
SICSLRILVNKDSQLGPTRDCKPSQWYFITSCHGKAFS

SEQ ID NO: 93432 - protein, 105 aa, Gossypium hirsutum
  Clone ID: LIB3147-002-Q1-K1-G12.pep
RPRVRFLENGSPPPKRKKGTELPGSEVPSTGNSPGQKQKKSAKKQKPLNFDFINVPEKVDWFLTDACSDSWTPFLGNDLVSESTKQDWAAAFTSLTVKKSSQAMF

SEQ ID NO: 93433 - protein, 153 aa, Gossypium hirsutum
  unsure (1)..(153): unsure at all Xaa locations
  Clone ID: LIB3147-002-Q1-K1-G9.pep
HSSPMHLLPVCIPAIVTSKIWVSKKANLIFLFFLLRKLILPFYSFTLFCIILPLTMFIPEAELPLWVICYIPIFMSFLNILPAPKSFPFLVPYLLFENTMSVTKFNAMISGLFQLGSAYEWVVTKXTGRSSESDLVALAERESKSLNEEKITR

SEQ ID NO: 93434 - protein, 146 aa, Gossypium hirsutum
  unsure (1)..(146): unsure at all Xaa locations
  Clone ID: LIB3147-002-Q1-K1-H12.pep
QIEAAGRGVLVYLRGHEGRGIGLGHKLRAYNLQDAGRDTVEANVELGLPVDSREYGIGAQILRDLGVRTMKLMTNNPAKYSGLKGYGLTIASRVPLLTPITRENRRYLETKRAKLGHVYGLDXNGSLNSLIIGGNGNTAPTDAASE

SEQ ID NO: 93435 - protein, 102 aa, Gossypium hirsutum
  Clone ID: LIB3147-003-Q1-K1-A5.pep
AHAYASTLYDTLVFKYDPPSNTAFPHGVSLLPNLRSFLNCDLKKAKLIANQTQGGGNGFEFVLKKKNKKKPYYFVCGERNGFHCKVGIMKFAVAPLLRPRPF

SEQ ID NO: 93436 - protein, 140 aa, Gossypium hirsutum
  Clone ID: LIB3147-003-Q1-K1-B7.pep
DEVQEWLYTDGEDATATEFQERLNLLKAATDPIFFRFKELTARPEAVKFARRYLTELQQTIRGWEKDKPWLPKDKVEELSINIDKFKTWLDEKEAEQQKMSGLRTPVFTSKEVYEKVTFVQNKADSIKKIPKPKPKTEKP

SEQ ID NO: 93437 - protein, 61 aa, Gossypium hirsutum
  unsure (1)..(61): unsure at all Xaa locations
  Clone ID: LIB3147-003-Q1-K1-C3.pep
GEPSVRVFFVDDRVSSFNEGXQSGLKWAGGALILAEKSWLFVCFMLKQYSQHIQLSVLCTF

SEQ ID NO: 93438 - protein, 104 aa, Gossypium hirsutum
  unsure (1)..(104): unsure at all Xaa locations
  Clone ID: LIB3147-003-Q1-K1-C4.pep
LTQHTNILALYCITRGIDDESEKKGRVTLKKAGLVSYHYWHXDKFLFCYTYYGQSXWGVELQSIGTICSNPACFLAITSIMKYELNLSTTKTAMTEDNVFRSPY

SEQ ID NO: 93439 - protein, 58 aa, Gossypium hirsutum
  Clone ID: LIB3147-003-Q1-K1-C6.pep
GGHLIEFRSRKKKPSWPQACVSLLDRYDRPPLFFFLPLFFAVFFFVLNVFFSFIRTRG

SEQ ID NO: 93440 - protein, 65 aa, Gossypium hirsutum
  Clone ID: LIB3147-003-Q1-K1-D11.pep
GGVRMKIFIKFKVKIYINFNIIILYLNYYIILYYIILYYIILYYIILYYIILYYIILYYIILYYI

SEQ ID NO: 93441 - protein, 64 aa, Gossypium hirsutum
  Clone ID: LIB3147-003-Q1-K1-D4.pep
SCKAMLSIYIVPIIKINPKAFLVILSLFKKNNSQLNQTIIWSYIITFPMSISKIRRHLPLQYKI

SEQ ID NO: 93442 - protein, 67 aa, Gossypium hirsutum
  Clone ID: LIB3147-003-Q1-K1-E1.pep
MFIQVGSFLMGWWGVVFKGDISQVSDILAIGLTTGYLGSVTTFSGWNQKMLDLSVDGHWVQAILGFL

SEQ ID NO: 93443 - protein, 151 aa, Gossypium hirsutum
  unsure (1)..(151): unsure at all Xaa locations
  Clone ID: LIB3147-003-Q1-K1-E12.pep
IFAKHPHRAGDMVIEYTGELVRPSIADRREHFIYNSLVGAGTYLFRIDNERVIDATRAGSIAHLINHSCEPNCYSRVISVHGDEHIIIFAKRDXXRWGEELTYDYRFFSIDERXLACYCGFPRCRGVVNDTEAEEQVSKILVNRGELIQWT

SEQ ID NO: 93444 - protein, 40 aa, Gossypium hirsutum
  Clone ID: LIB3147-003-Q1-K1-E6.pep
LILFHYSHQNLISSLNMLPTSARYFHPLVKIKKCGCFRPT

SEQ ID NO: 93445 - protein, 77 aa, Gossypium hirsutum
  Clone ID: LIB3147-003-Q1-K1-E8.pep
LSHHFIYFVFFFFFLFFFFFFFFTKLKFKKKNSNTKFDIKIKRKYRKTFINLFLCFCTRQNSKTYISLIKSIIIYKN

SEQ ID NO: 93446 - protein, 101 aa, Gossypium hirsutum
  Clone ID: LIB3147-003-Q1-K1-F10.pep
HASELPYPRIDGLHIYTYRAFLDAVNFYLEMCDISELFHIRGMPLHRSNDRSRKWRCMEEDDGVFVYREGTLEQTTYKMYHFNKLNSNSCNGYNGAIFCHS

SEQ ID NO: 93447 - protein, 50 aa, Gossypium hirsutum
  Clone ID: LIB3147-003-Q1-K1-F3.pep
RNRTYSARLMRWHISNMMVIGTRSVDVTTTALQTTSWSERDRCTESTDYI

SEQ ID NO: 93448 - protein, 38 aa, Gossypium hirsutum
  Clone ID: LIB3147-003-Q1-K1-G1.pep
RTRGRTRGRTRGRTRGSILNIVSSFGILLVYLLNGSFC

SEQ ID NO: 93449 - protein, 88 aa, Gossypium hirsutum
  Clone ID: LIB3147-003-Q1-K1-G3.pep
PTRPALKKITFFLSFSLCRRSWFGRGSGELPPLSVASPPLATSVHGGQRYTGGGCDMGGAASVGWSKVPRCTAPTVYLLFFSNFGYWA

SEQ ID NO: 93450 - protein, 52 aa, Gossypium hirsutum
  Clone ID: LIB3147-003-Q1-K1-G4.pep
PNKYNIYFFKTTFILFYIPITFLILFLNTFFFFIYFPFFFFFLNFLIIFSNA

SEQ ID NO: 93451 - protein, 42 aa, Gossypium hirsutum
  unsure (1)..(42): unsure at all Xaa locations
  Clone ID: LIB3147-003-Q1-K1-G6.pep
LCPAVKIQIPAKNKVVEYMNMXTSGAIAISHAIIYFGNITIF

SEQ ID NO: 93452 - protein, 96 aa, Gossypium hirsutum
  Clone ID: LIB3147-003-Q1-K1-H10.pep
PRVRKRLVTFDKVFAAYHEARSCIRSDLASAGSAENVKDDLNGLDKAVSAVLGQRTIERNQLLVSIAKSKLTRRRDDKNEKVTKPEELVRLYDLLL

SEQ ID NO: 93453 - protein, 99 aa, Gossypium hirsutum
  Clone ID: LIB3147-003-Q1-K1-H12.pep
DSPTSKNFLGFIVALSESIRGRKISDPSHESATVSNIVSIIENLSLWVDQIPPVQQSSRYGNISYRTWHERLTENAESFMLQFLPEDLKPATIEIVPYF

SEQ ID NO: 93454 - protein, 123 aa, Gossypium hirsutum
  unsure (1)..(123): unsure at all Xaa locations
  Clone ID: LIB3147-003-Q1-K1-H2.pep
ESLEDRELLSSYLPLLREFIPAAAAEIEADVRAYMFEKDADGYVYDYYTVKNDLGVGEEDMASNPFPLVKVDDEDFYDVPYESEYDSEDSNAEDNPRNDYPDETSEEEEEEKEEEXDEDEDEE

SEQ ID NO: 93455 - protein, 70 aa, Gossypium hirsutum
  Clone ID: LIB3147-003-Q1-K1-H6.pep
MADWGPVLVATVLFVLLCPGLLFQIPGKNKVVEFGNMQTSGASVLVHAIIYFGLITIFCLAIGVHIYASQ

SEQ ID NO: 93456 - protein, 149 aa, Gossypium hirsutum
  unsure (1)..(149): unsure at all Xaa locations
  Clone ID: LIB3147-003-Q1-K1-H7.pep
KNMGLYGERVGALSVVCRAADVASKVESQLKLVIRPMFSNPPIHGASIVVTILKDSNMFNEWTIELKAMADRIISMRKQLFDALRARGTPGDWSHIIKHIGMFTFTGLNSKQVEFMTREYHIYMTSDGGISMQELIXKDSPHLADAIHD

SEQ ID NO: 93457 - protein, 55 aa, Gossypium hirsutum
  Clone ID: LIB3147-004-Q1-K1-A12.pep
HASAHTCYFDHKLNTVVCEVVLYIYIIFIMPSFNIILSTDHIEKISLLSNLMTDI

SEQ ID NO: 93458 - protein, 127 aa, Gossypium hirsutum
  unsure (1)..(127): unsure at all Xaa locations
  Clone ID: LIB3147-004-Q1-K1-A2.pep
MASIYCCKECGTNLNLRSTYLSPPDFYFEAGNKGTLSFATIDDTKFNFEKEDKFRPFFXETLDYWGIQRNRTKMKCKSCGKLVGYIYDDGPPLTDSPGQFHMGPSQVVPRCPRYRFKIKALTISSET

SEQ ID NO: 93459 - protein, 65 aa, Gossypium hirsutum
  unsure (1)..(65): unsure at all Xaa locations
  Clone ID: LIB3147-004-Q1-K1-A3.pep
MALASIIGTVALASAYILSARQEFNEXGVDGGPAAKELMPECNVFSKTVTSDTGLQVPEFDINDV

SEQ ID NO: 93460 - protein, 75 aa, Gossypium hirsutum
  unsure (1)..(75): unsure at all Xaa locations
  Clone ID: LIB3147-004-Q1-K1-A7.pep
MKQWPPLSSASPIEVMASPRAPTLCGRGDKKTKKGXRFKGSYGNARPKKEKKIERIKDKVEVPRSTPWPLPFKLI

SEQ ID NO: 93461 - protein, 76 aa, Gossypium hirsutum
  Clone ID: LIB3147-004-Q1-K1-B10.pep
SHEMCSVFCRNMKPDTRWSPAAPDHIMGSITSFMGMVSEFYNLTKPGCYCTSISAHDKQNHIKDTRAGISLGLQQI

SEQ ID NO: 93462 - protein, 118 aa, Gossypium hirsutum
  Clone ID: LIB3147-004-Q1-K1-B2.pep
PTRPPTRPPTRPPTRPKKRPEDSKTCPYFHQLDALYREKNKHDSSSTQFKPQNSVPLMVRPEQQWPPLPPSDPDHQHRRDPEDLESYQNHQDEDGNDEYEDEDEDERGEYEIVASKPV

SEQ ID NO: 93463 - protein, 51 aa, Gossypium hirsutum
  Clone ID: LIB3147-004-Q1-K1-B3.pep
QTQKQLNYKSSALHNKVRMSDPSQTRQQTEITRITKRREVSRTKHQASDHS

SEQ ID NO: 93464 - protein, 53 aa, Gossypium hirsutum
  Clone ID: LIB3147-004-Q1-K1-B6.pep
MLCGIGKDYVPLSWIHRLHLCIGATRGLHYLHTVAKHAVIDRHINSCNILLDE

SEQ ID NO: 93465 - protein, 27 aa, Gossypium hirsutum
  Clone ID: LIB3147-004-Q1-K1-C2.pep
RKDNLEFSRCFIVYYNSTKSNNLMSNQ

SEQ ID NO: 93466 - protein, 64 aa, Gossypium hirsutum
  unsure (1)..(64): unsure at all Xaa locations
  Clone ID: LIB3147-004-Q1-K1-C5.pep
YGHVTIFWXGNHSNYLNPTNEQYAGLPSXGCITFNGEAEMKALVIGQNATDVIPIRIFDQGQQN

SEQ ID NO: 93467 - protein, 69 aa, Gossypium hirsutum
  Clone ID: LIB3147-004-Q1-K1-C8.pep
LSYTSALPRTPYLGAELHLNVLAASHQAGRIGSESSYGVINTDQHVVGRLSAPTTSQAVSYDGRGNPYG

SEQ ID NO: 93468 - protein, 46 aa, Gossypium hirsutum
  Clone ID: LIB3147-004-Q1-K1-C9.pep
TMLLKWMFGAGDWIVLLVLFILYSRFLITLMLISIIVLYYFYIKFI

SEQ ID NO: 93469 - protein, 106 aa, Gossypium hirsutum
  Clone ID: LIB3147-004-Q1-K1-D7.pep
SPQPSQEQQVKFNTNSVACMLASISQLLPVPCLIVEGTPLGGDFFFSRMVGWHAESLCTIISKCAHCRPFIRHAIQLAIILCFHLDCITSAIQRPCCIYIEMIVSV

SEQ ID NO: 93470 - protein, 76 aa, Gossypium hirsutum
  Clone ID: LIB3147-004-Q1-K1-E11.pep
KYLFTLCVSDAEKAYQLKQSLSSSFSGQDLLKYCNLKVVTRFICDESYILILGLMDFLAFCNNETQISVIGSMFFC

SEQ ID NO: 93471 - protein, 69 aa, Gossypium hirsutum
  Clone ID: LIB3147-004-Q1-K1-E12.pep
LHTKQVQSNLLTNKLGIKYPAEPFNGMRFQATLYTWWISSTTINFILSIIITFRYSKQTFQLPFQSTSE

SEQ ID NO: 93472 - protein, 42 aa, Gossypium hirsutum
  Clone ID: LIB3147-004-Q1-K1-E9.pep
FRRPLRLNTSCIDTTIYAEDSVNVTPACLKVLIMSCACNLVP

SEQ ID NO: 93473 - protein, 37 aa, Gossypium hirsutum
  Clone ID: LIB3147-004-Q1-K1-F8.pep
ISIHELFFFFLFDALYKAFLFLSLVLSIICTPQKASM

SEQ ID NO: 93474 - protein, 119 aa, Gossypium hirsutum
  Clone ID: LIB3147-004-Q1-K1-G1.pep
PTRPPTRPTGEKIFNMIYMLFNIGLTAYTIGNMTNLVVHAAVRTFAMRDALNELLRYASKNRLPEGLREQMMAHMQLKFKTAELQQEEVLQDLPKAIRSSIAQHLFRRTVEKSYLFNGV

SEQ ID NO: 93475 - protein, 70 aa, Gossypium hirsutum
  unsure (1)..(70): unsure at all Xaa locations
  Clone ID: LIB3147-004-Q1-K1-G3.pep
TYIYGPGAITASTVWGLTELVPYSDKENLYHDICIDPDTKMIXKIKXRIKKWRIRRALHDEXHPYLPKHI

SEQ ID NO: 93476 - protein, 67 aa, Gossypium hirsutum
  Clone ID: LIB3147-004-Q1-K1-H2.pep
IACLIALGVLERTPKRAQPILHKNLCNVPCCQGVSVVICVFSVVCRMESTTYRDELSLEMSQKGCLN

SEQ ID NO: 93477 - protein, 99 aa, Gossypium hirsutum
  Clone ID: LIB3147-004-Q1-K1-H7.pep
ENITRKEEPSPQTVSTILHDERKKEVNKVIGEQHCGDIESKTSVKASTPQMQTKLPAIPSFSQFVNSRKSKEMQQPKASEEKEHHHSPNIHTKKRMKLQ

SEQ ID NO: 93478 - protein, 95 aa, Gossypium hirsutum
  Clone ID: LIB3147-005-Q1-K1-A2.pep
LILVWEFELEYFNATEFESNFRKDKNRLPVCMILCVIMLRTFAFYFQHYIIIRVFLEVTEALHTIGIKSLYKGKFLGWLKNKNMVKNFLGNICFA

SEQ ID NO: 93479 - protein, 45 aa, Gossypium hirsutum
  Clone ID: LIB3147-005-Q1-K1-A8.pep
RLGPSSAASIRFSNKSGPVVSSNKVGPTFSVRLAVRVDASVNSGL

SEQ ID NO: 93480 - protein, 51 aa, Gossypium hirsutum
  Clone ID: LIB3147-005-Q1-K1-C1.pep
AQRSRLFQHQPLISFGSVGAQWTTGSVCPPPPYELRLFDERLKNGKICRNT

SEQ ID NO: 93481 - protein, 131 aa, Gossypium hirsutum
  Clone ID: LIB3147-005-Q1-K1-C10.pep
HASECRIMYYWYKKQKDLPGSEMGGFTRILHSGNPDNLMNEIPTVIVDPLPAGLDRGYIVLNRPWAFVQWLEKATIEEEYVLMAEPDHIFVTPLPNLAHGGYPAAFPFFYIKPDQNEKLLRKFFPEEMGPV

SEQ ID NO: 93482 - protein, 142 aa, Gossypium hirsutum
  Clone ID: LIB3147-005-Q1-K1-C11.pep
HASAACTGLVIGGKVHVLHKGLSKVQVLDNVCSGWTVEDYGWLQGPMAVVQGALYVMSHGLIFKQEKEVRKVVTSSSEFRRRIGFAMTGVRDEIYVIGGVIGPDRFNWDIKPMSVVDILTVGGDRPTWRQAAPMTMCRGTIF

SEQ ID NO: 93483 - protein, 122 aa, Gossypium hirsutum
  Clone ID: LIB3147-005-Q1-K1-D11.pep
TLPQTIIISFAVQDVQQITEQWSFIPRVVKELAFLDASNHGSLTKEDLLREAKVCKQIYEDELSRINSGSLKRKRPKTDGGEEGNKGETKAIFASGYDSDETIKMTEEEIELAYKNFNSGTL

SEQ ID NO: 93484 - protein, 50 aa, Gossypium hirsutum
  Clone ID: LIB3147-005-Q1-K1-D6.pep
LDYFLMGFGLYRSTLSVSRRSPLSPTCISPELLSPESMGLKLKPIKTRIS

SEQ ID NO: 93485 - protein, 105 aa, Gossypium hirsutum
  Clone ID: LIB3147-005-Q1-K1-D9.pep
PRVRPRVRGRVGGRVGCRVERPVLSEQRPADMYTLSAYFLARTTSDLPLDLILPVLFLLVVYFMAGLRLSAGPFFLSMLTVFLCIIAAQGLGLAIGATLMDLKRA

SEQ ID NO: 93486 - protein, 74 aa, Gossypium hirsutum
  Clone ID: LIB3147-005-Q1-K1-E11.pep
PTRPNPSDPLNGEAAALMMRDRTSYEQRVKEYCEKYAKPEDIGAAPEEKSSDEELSDDEYAASDDEEIAGKADP

SEQ ID NO: 93487 - protein, 65 aa, Gossypium hirsutum
  Clone ID: LIB3147-005-Q1-K1-E12.pep
GKWRFGAQRCRRWPIKRRQKKGFLRFPPTKLLFYVKLCPTIFFFLLWFSKGFIFLGACFKDKKEK

SEQ ID NO: 93488 - protein, 65 aa, Gossypium hirsutum
  unsure (1)..(65): unsure at all Xaa locations
  Clone ID: LIB3147-005-Q1-K1-E3.pep
FKLPHKKINLGHARGRKFGSYKRAPPFGSFILXALFFFFFFFFFFFFFFLKNPIQERGSFWPTRR

SEQ ID NO: 93489 - protein, 60 aa, Gossypium hirsutum
  Clone ID: LIB3147-005-Q1-K1-E4.pep
YFNCLPKVNNCACWVRQGIYTCGSLLWLDLYSTGFDHFALWMDIVCKLLYKLPNDTHFLI

SEQ ID NO: 93490 - protein, 69 aa, Gossypium hirsutum
  Clone ID: LIB3147-005-Q1-K1-E6.pep
KRHKGFLEAKQSEELCEARAIEHVRVLAHEIDGRQEKATEQDAVEILMYESLRFAYGLLEGWTFVTSFP

SEQ ID NO: 93491 - protein, 80 aa, Gossypium hirsutum
  Clone ID: LIB3147-005-Q1-K1-F4.pep
HASAKPWQVRSNSMGGPPSLTKIPQLDLHHRHPMPVDCSNSQTNVAPDLELTLAAPRPALEENKSSPTTTTLLIRPISVT

SEQ ID NO: 93492 - protein, 98 aa, Gossypium hirsutum
  Clone ID: LIB3147-005-Q1-K1-F7.pep
GKSAARIQDHLRPNGAHRWHNYMKTPNEIKLDEAAVLHYTYPKFSDLTSRHDRCGCKPTKEDVKRCFMLEFDRAAFIIASTATEEEMLRWYREHVVWT

SEQ ID NO: 93493 - protein, 95 aa, Gossypium hirsutum
  Clone ID: LIB3147-005-Q1-K1-G11.pep
PRVRVLMPRELFKAAPTPAPAPAPEEAADAPKASKSKSKSKSKSKSAPTPESDAPADSPDDDPADQTADDNAALSFKGGRFVAVGLNFLLVFLLL

SEQ ID NO: 93494 - protein, 48 aa, Gossypium hirsutum
  Clone ID: LIB3147-005-Q1-K1-G7.pep
TGSLTHLCRLIYSCEKIVVGAFTCPLFIETSFGNRMLDVLAHELRLLS

SEQ ID NO: 93495 - protein, 139 aa, Gossypium hirsutum
  unsure (1)..(139): unsure at all Xaa locations
  Clone ID: LIB3147-005-Q1-K1-H1.pep
HLQAFSGHQKPVSCLSFRQGTTDLFSGSFDRTIKYWNMEDRAYIDTICGHESEVLTLDCLRKERVLTVGPDQCMMWFKVLDQPEWVFRPQPTSWECCCLINKDKFXFASANGSFHLWTVLKKKPCFLGKMAIPLLPVGQ

SEQ ID NO: 93496 - protein, 104 aa, Gossypium hirsutum
  unsure (1)..(104): unsure at all Xaa locations
  Clone ID: LIB3147-005-Q1-K1-H6.pep
GHRPLLSLARAXLQRPNIPVLDEATAGDDVLTDALIQKTIREEITLCTMLIIVHIPNTVTDCTSLLLLESGMVLEYDTPDELWLNERXLFMRRAQTTGDANAQY

SEQ ID NO: 93497 - protein, 53 aa, Gossypium hirsutum
  Clone ID: LIB3147-005-Q1-K1-H8.pep
FRNSPIHPRSPCQVLSSNAIGFIEVCGVRDEKSSSTSSFSVFPLCDKNLLSSS

SEQ ID NO: 93498 - protein, 69 aa, Gossypium hirsutum
  Clone ID: LIB3147-005-Q1-K1-H9.pep
SNQVILWVSVLYKSDNLSSLAKAIALRRPLRMFLRNKPLNLSSSTHIHQFKNSFSPNITGFQSQIIFKM

SEQ ID NO: 93499 - protein, 99 aa, Gossypium hirsutum
  Clone ID: LIB3147-006-Q1-K1-A1.pep
HASEVIADPEADSAEDILLKQFMKKDLEKVLDSLSPREKQVIRWRFGMEDGRMKTLQEIWESMGVSRERIRQIELCAFRKLKNKRRTKHLQQYLLSYAS

SEQ ID NO: 93500 - protein, 53 aa, Gossypium hirsutum
  unsure (1)..(53): unsure at all Xaa locations
  Clone ID: LIB3147-006-Q1-K1-A3.pep
MRLKSLVPANNKADRVXILDVTIEYLQTXQRKVAELESCRSQKQNENERTSIL

SEQ ID NO: 93501 - protein, 66 aa, Gossypium hirsutum
  unsure (1)..(66): unsure at all Xaa locations
  Clone ID: LIB3147-006-Q1-K1-A4.pep
LPNFFFFFFFCSLSFFFLFFFFCFXLGTIIIAPKLDPFKVSFHFDHSIYPGCNFTIITHGRVVTGI

SEQ ID NO: 93502 - protein, 59 aa, Gossypium hirsutum
  Clone ID: LIB3147-006-Q1-K1-B12.pep
LRLLLDSYIFLTLFTQTVQRDKRSGDFSLLLLIDLAYQWALLPTDARVFLSQIHIFHQS

SEQ ID NO: 93503 - protein, 100 aa, Gossypium hirsutum
  Clone ID: LIB3147-006-Q1-K1-B3.pep
DAWADAWGGQVTDKWRNFMKDQIKRARMFFDEAEKGVSELNAASRWPVWASLLLYRQILDVIEENDYNNFSKRAYVWKVKKFASLPVAYGRALMGTSKLF

SEQ ID NO: 93504 - protein, 64 aa, Gossypium hirsutum
  Clone ID: LIB3147-006-Q1-K1-B9.pep
VWYVMSSGNSSINGYLLKQKIWKVKINKPYGSSKHAFNNHTSDVLKLSECYMHYRYQIQVVRVG

SEQ ID NO: 93505 - protein, 64 aa, Gossypium hirsutum
  Clone ID: LIB3147-006-Q1-K1-C1.pep
GDMWACSNLQLSCSIHDLKAWHSWAVGRFSLLQYCNTLRMGMGKWNYWLFGHYFFQQNLQLLTI

SEQ ID NO: 93506 - protein, 74 aa, Gossypium hirsutum
  Clone ID: LIB3147-006-Q1-K1-C11.pep
REREGRHSLYGHHGAGHCPFPLRVLVLPPSFVHRSKARVIRLSFSAPVKSLVMGRPLISLAFWFLSSLLLFAFC

SEQ ID NO: 93507 - protein, 105 aa, Gossypium hirsutum
  unsure (1)..(105): unsure at all Xaa locations
  Clone ID: LIB3147-006-Q1-K1-C8.pep
PTRPEKQFDNVVERVLQETKSGKDGLQKTTELIRSFFEKHGKDFGLPPSESNDAVILLYDAVFSEVENEESVVKADNEFREYMKDVLKKFAEQXEDNPIYCDLDD

SEQ ID NO: 93508 - protein, 130 aa, Gossypium hirsutum
  Clone ID: LIB3147-006-Q1-K1-C9.pep
VALGVHFTVSGVSITGLYVAIKNNVDVESLFDKLHLPGFSNDQKNQNPPSQSTESDRFLIEEPIGEKSTAVVGEKQRNRTAELAASTGGALALAVLCNKALIPVRVPITVALTPPIARFLAKRRIIKNSV

SEQ ID NO: 93509 - protein, 81 aa, Gossypium hirsutum
  Clone ID: LIB3147-006-Q1-K1-D7.pep
EIISPLLMQANYFRNPLFLYVKRFFFLLFSHINDSSPSESHSTVLCWYIYVLYSREGLIYTCVKSKSSTVSLTLESRFNLL

SEQ ID NO: 93510 - protein, 72 aa, Gossypium hirsutum
  Clone ID: LIB3147-006-Q1-K1-E11.pep
VDEVGGPGKSYDDLAASLPTDDCRYAVFDFDFVTVDNCRKSKIFFIAWSVAFSTYTVTTVHFLVGTLLFIQG

SEQ ID NO: 93511 - protein, 62 aa, Gossypium hirsutum
  Clone ID: LIB3147-006-Q1-K1-E2.pep
GPYFVRQDFFRMALTHNSFQVKIMVGFLAIMLLMFSAAAALPIPLLTLGVGSFFNIITFSTH

SEQ ID NO: 93512 - protein, 56 aa, Gossypium hirsutum
  Clone ID: LIB3147-006-Q1-K1-F10.pep
SIQSLIPFFSFENGIFVIHRFINKCKSGRGSVPMSDNGTEDNLKAISRFMKKVTFN

SEQ ID NO: 93513 - protein, 67 aa, Gossypium hirsutum
  Clone ID: LIB3147-006-Q1-K1-F2.pep
SVSNVPQNSTRPQEMSRRFQFSLAQRAYYFFTQCSSCQISVVRRQIMDQPPYMYFIFAGISKVHSPL

SEQ ID NO: 93514 - protein, 76 aa, Gossypium hirsutum
  unsure (1)..(76): unsure at all Xaa locations
  Clone ID: LIB3147-006-Q1-K1-F5.pep
PMVGKLLMNKIPXLHDAHHIHMDPKAKNLPKTSSFIRACSESLGNERGPFARMEKVENVGGEWKLRKDYPVRVKID

SEQ ID NO: 93515 - protein, 63 aa, Gossypium hirsutum
  Clone ID: LIB3147-006-Q1-K1-G10.pep
RWGVIPLTYLGHSISCCIGVKGESDIISGGQGCICLIYITLEGSRPVVSLVDVMLAGSDRSRW

SEQ ID NO: 93516 - protein, 57 aa, Gossypium hirsutum
  Clone ID: LIB3147-006-Q1-K1-G5.pep
DACKILVFSNRHNNCLYTDHNTSMNYQLQTSSTKILKLKITISHNSNPNLQISPEKF

SEQ ID NO: 93517 - protein, 149 aa, Gossypium hirsutum
  Clone ID: LIB3147-006-Q1-K1-G6.pep
PTRPTRCNRQITVSYAYKRDTKGERHGTPAERVLAASNPSSQKSRPHTLFASGPPTLPSGPQANGGIGAPVPPRPFPNGTVPPGSMPVARPPPPQNVPYPQMQLAGQSPWQGQPQHLGQQIPPPVMPPPPMQYRPPMPNMPPPPPPQSV

SEQ ID NO: 93518 - protein, 113 aa, Gossypium hirsutum
  unsure (1)..(113): unsure at all Xaa locations
  Clone ID: LIB3147-006-Q1-K1-G9.pep
MPVKLSLMLRLLSNMGLCTETRTNDVGIYAPTCKPTGCPSECSSDDWNGYEIGXYNCTIWVTTXPTNDITLDEAIRTGTINVFDYIXGYIQCKHQIEMTAAVITAVITGDGPF

SEQ ID NO: 93519 - protein, 51 aa, Gossypium hirsutum
  Clone ID: LIB3147-006-Q1-K1-H1.pep
IVPNLKIYKITILQKGSIFNSAHKPYYHNFSGSIHLQLKSFNRVCPMKTRE

SEQ ID NO: 93520 - protein, 124 aa, Gossypium hirsutum
  Clone ID: LIB3147-007-Q1-K1-A11.pep
LSSRNNAKLSLVQATKESSTASTNDSAAVFSGENLHQIATNGKATNIVWHKSSVGKVHRQEVLQQKGCVIWITGLSRSRKSTLACALCQALYSRGKLAYILDGDNVRHGLNRDLSFKAKDRAEN

SEQ ID NO: 93521 - protein, 62 aa, Gossypium hirsutum
  unsure (1)..(62): unsure at all Xaa locations
  Clone ID: LIB3147-007-Q1-K1-B1.pep
ADINFFTGSYSKCPXXKKKKKKKKKKKKKKKKLKKKKKINKNXKKIKKKKKNKKNKIKKKKI

SEQ ID NO: 93522 - protein, 79 aa, Gossypium hirsutum
  Clone ID: LIB3147-007-Q1-K1-B11.pep
KEEAVLLYRKSQKKKKERKPPDYSDLAPFFITFHSALIADFNTIFYYLASVSVSLLSCLQVSAKSTSIGGITLAILVQG

SEQ ID NO: 93523 - protein, 43 aa, Gossypium hirsutum
  Clone ID: LIB3147-007-Q1-K1-C4.pep
KKTGADIHLISYTSSKAISSLQPQWLLTKDYRNLLRCYYSPVY

SEQ ID NO: 93524 - protein, 41 aa, Gossypium hirsutum
  Clone ID: LIB3147-007-Q1-K1-C6.pep
TSFNFGFVNFYSIIYMFTRYKKILLIAKRSIKKDRPNAKSR

SEQ ID NO: 93525 - protein, 48 aa, Gossypium hirsutum
  Clone ID: LIB3147-007-Q1-K1-D2.pep
KGPPQNLFFLFFFFFIFFFFFFFFFFFFFFFFFFFFFFFFFFFFFFFF

SEQ ID NO: 93526 - protein, 89 aa, Gossypium hirsutum
  Clone ID: LIB3147-007-Q1-K1-D5.pep
KNKWLDFKARLNKILSMTEPWTLILDDALANSFIAPATDDIKDDHQLIFEEYERSWEQNEELGLNDIDTSSADAAYNSTGVTSNENPQE

SEQ ID NO: 93527 - protein, 113 aa, Gossypium hirsutum
  Clone ID: LIB3147-007-Q1-K1-E1.pep
AKKWSDLPPLVMANCVKVNPDSPQKQVRFLTLSDGKKLLTPQPRLRTGFFSILESSMLTPSTINEACTSVGVAKYGRPIGLDEKIKVDVIVIGSVAVDPKTGARLGKGEGFAE

SEQ ID NO: 93528 - protein, 68 aa, Gossypium hirsutum
  Clone ID: LIB3147-007-Q1-K1-E2.pep
FSSTCGFSVWSMCFSDGCTVHCFLWFFSTAFCCSMQHRELHRLQFIHLAPVLQVSHHGEQSQVTQHLQ

SEQ ID NO: 93529 - protein, 48 aa, Gossypium hirsutum
  Clone ID: LIB3147-007-Q1-K1-E8.pep
HASGKMTKDLALLIHGPKVSRSQYLNTEEFIEAVAKELSNRMYVKPKL

SEQ ID NO: 93530 - protein, 63 aa, Gossypium hirsutum
  Clone ID: LIB3147-007-Q1-K1-F11.pep
PTRPATHHLNAMLVPINSSSNIKELYYCDSNMNVKYEYVLNLHGKTRKRWKKVHLKHIAYCRI

SEQ ID NO: 93531 - protein, 72 aa, Gossypium hirsutum
  unsure (1)..(72): unsure at all Xaa locations
  Clone ID: LIB3147-007-Q1-K1-F7.pep
KVNIIGLYFYKQQHGRQHSLYVAVSRVLSVSLLVIPSFNSTHSILQLTFSQHFNXLLFKIYLHYQTEGVAEG

SEQ ID NO: 93532 - protein, 53 aa, Gossypium hirsutum
  Clone ID: LIB3147-007-Q1-K1-F8.pep
RLSLNANQHGNRSAGKDGKRDSMKLAAPANIVTVSKEDAASHVSRTDSVPASP

SEQ ID NO: 93533 - protein, 97 aa, Gossypium hirsutum
  Clone ID: LIB3147-007-Q1-K1-H1.pep
AEYRAAFLGMKYALRKGFKHVRVQGDSNLVCMQVQGRWKIKSQNLVELNKVAKDLKDKFISFQINHVDREFNSEADALANQAVNLMNGQVQEDWLLK

SEQ ID NO: 93534 - protein, 75 aa, Gossypium hirsutum
  unsure (1)..(75): unsure at all Xaa locations
  Clone ID: LIB3147-007-Q1-K1-H3.pep
KRAPPLFFFFFFFFFXXFFFFFFFFFFFFFFFFFFFFFFFFFXGTNIFRFLSTWKLVFMNLGNKKNSRRRRNSLM

SEQ ID NO: 93535 - protein, 70 aa, Gossypium hirsutum
  Clone ID: LIB3147-007-Q1-K1-H9.pep
DIFPKLRPFYPCLGKQFTLVKCFQASKHCKIKKIFSEKCFPANKRTLIALSDAYWYKVECFTLQTLNAWI

SEQ ID NO: 93536 - protein, 90 aa, Gossypium hirsutum
  Clone ID: LIB3147-008-Q1-K1-A9.pep
VEFGRTVTNVGDGSFTYKANVTPINGLKVTVEPDTLVFKTKYEKKSYKLSIEGPKQLHKAVLFGYLTWEDSGKEHVVTSPIVATSYKIEK

SEQ ID NO: 93537 - protein, 97 aa, Gossypium hirsutum
  Clone ID: LIB3147-008-Q1-K1-C3.pep
KSGRHRVFPKVRFENGGLTKRCSASSERTSASVNGVMIFVTSKAVPLVFSVASGKEFSSHEIFCFLTFFFLCKTPFNIFFFFFLRYYEFFLFFRTRG

SEQ ID NO: 93538 - protein, 109 aa, Gossypium hirsutum
  Clone ID: LIB3147-008-Q1-K1-D3.pep
PTRPPTRPRVKSSAVDGSDRRQPSRLQRCAPASIRISPVSNWNVAIPLLSPVPPSPPSIDLGMTEKREELPRKEQQRQKQTTERQKRVFAMWQHPAAPFCYEPAPFVPV

SEQ ID NO: 93539 - protein, 50 aa, Gossypium hirsutum
  Clone ID: LIB3147-008-Q1-K1-D5.pep
LCTRGISRLHNQLSVILLLNINNNKIKPVDRTTIGDRFGPVCIIKPRMVL

SEQ ID NO: 93540 - protein, 61 aa, Gossypium hirsutum
  Clone ID: LIB3147-008-Q1-K1-E10.pep
ANMESREVFKPEMQHFSFNSISHILCKATSSTFLYLQICFPFFYLLNFQPYWFEKLMLFCF

SEQ ID NO: 93541 - protein, 121 aa, Gossypium hirsutum
  Clone ID: LIB3147-008-Q1-K1-E11.pep
TVHEEAMLAIGALAYATGSQFEKYMPEFYKYLEMGLQNFEEYQVCGITVGVVGDICRALDDKVLPYCDGIMGLLLKDLASSELHRSVKPPIFSCFGDIALAIGEHFEKYVPYALPMMHGAT

SEQ ID NO: 93542 - protein, 125 aa, Gossypium hirsutum
  unsure (1)..(125): unsure at all Xaa locations
  Clone ID: LIB3147-008-Q1-K1-E2.pep
EDYSETMQSIATGCAAQFSLIPPVSSTFSSPNMTDELQTGEIEADGILIDENPALIVYTSGTTGKPKGVVHTHKSISAQVKMLADAWEYTSTDQILDLLPLHNVHXLFNAXLAPLYAGSTVEFIP

SEQ ID NO: 93543 - protein, 67 aa, Gossypium hirsutum
  Clone ID: LIB3147-008-Q1-K1-E3.pep
MKFSLGFTRRPLFFFLLMYVFFFFFILSAFFFFFFFFFFFFFFFFFFLVNNAKDQMPGHLMIYTTKC

SEQ ID NO: 93544 - protein, 63 aa, Gossypium hirsutum
  Clone ID: LIB3147-008-Q1-K1-G11.pep
AQSLWKRLGIRVEDALQHDFKRYYVIPFILLYLSCNERVEFEIRNLLFVIAYVIIYSCMTWRW

SEQ ID NO: 93545 - protein, 105 aa, Gossypium hirsutum
  Clone ID: LIB3147-008-Q1-K1-G4.pep
HACGKTGIQSVLLHGLNQGKKDLTWQKWSYQVGLRGEAMNLVSPHGASSVEWIRGERIQGSLAARSRQSMTWYKTYFNAPGGNEPLALDMRSMGKGQVLVNGQSL

SEQ ID NO: 93546 - protein, 73 aa, Gossypium hirsutum
  Clone ID: LIB3147-008-Q1-K1-G5.pep
NVVLSHSFIFLVHFICSSFTKQFIWFSLVSIKNFKTLWQPRDFKKKKKRSSSATLIVYAQACQSGEKGLPGWS

SEQ ID NO: 93547 - protein, 47 aa, Gossypium hirsutum
  Clone ID: LIB3147-008-Q1-K1-H10.pep
VTYHPKLMLLIRTMRLYQLNMWNIEGGIGFLHSVILHLCCLQIGYPN

SEQ ID NO: 93548 - protein, 56 aa, Gossypium hirsutum
  Clone ID: LIB3147-008-Q1-K1-H7.pep
IPKILIAFILEKKEKEGHYFYGNCINQRVPAFHVLTKFDTQSSFPTCCQGVFWTAQ

SEQ ID NO: 93549 - protein, 89 aa, Gossypium hirsutum
  Clone ID: LIB3147-008-Q1-K1-H8.pep
PRSLAVKSPGPKRLLTTLINKAIKFVNRKKAGEKTGNEEEEIGDGGVWQRAILMGDKCQPLDLSGVIYYDRKRNQVEELPFRSPRASTM

SEQ ID NO: 93550 - protein, 70 aa, Gossypium hirsutum
  Clone ID: LIB3147-009-Q1-K1-A1.pep
LILDVSLQRQGKYQEAIKYHSMVLAISDREGEDSRNTEAYGAIADCYTELGDLEKAGILYDKYISRLETD

SEQ ID NO: 93551 - protein, 55 aa, Gossypium hirsutum
  Clone ID: LIB3147-009-Q1-K1-A10.pep
EPPPTDKAYFDNLPAPSKDVKIKSNLAETLQSKCSVNIPYKISTYTNCLNLHRDR

SEQ ID NO: 93552 - protein, 73 aa, Gossypium hirsutum
  Clone ID: LIB3147-009-Q1-K1-A11.pep
RALVWSISGSYSDALLGPPHGVFSLRANLCIKSTVSNQITNASLTHPAIAIQFVLKQKLKKTIKGPIARVGRV

SEQ ID NO: 93553 - protein, 40 aa, Gossypium hirsutum
  Clone ID: LIB3147-009-Q1-K1-A2.pep
YFPSVCNENFLINQSYRLGHMFPIMESDNRRTKKRILDHS

SEQ ID NO: 93554 - protein, 99 aa, Gossypium hirsutum
  Clone ID: LIB3147-009-Q1-K1-A5.pep
SLLLLDQRLLKPLSGIKWLLYICFAFCFYSILNSFKLNFFCLNQHNNCLFTDHNTSLNYQLQTSSTKILKSKTPISHNSNTDIKISPEKFRTRGSGRVF

SEQ ID NO: 93555 - protein, 68 aa, Gossypium hirsutum
  Clone ID: LIB3147-009-Q1-K1-A7.pep
SPVYVRVGHCLISSDQILIHVSRSSTSSEHSSSINGAWLGVHKLWHVGMLFSASFAMFSERATNRLAY

SEQ ID NO: 93556 - protein, 132 aa, Gossypium hirsutum
  unsure (1)..(132): unsure at all Xaa locations
  Clone ID: LIB3147-009-Q1-K1-A8.pep
MASSATFRTWVLSSSFATQCNVSNRHHQSCFLSSPPKIPIFSIPKPVSLKLTSLLSKTPTFFTIPKSSESDAAVVDVEPDNVEPEPEPEAAPEPEPVPEPASVVEASKEEPKREEIFAGVMNXGRQYIVFPG

SEQ ID NO: 93557 - protein, 120 aa, Gossypium hirsutum
  Clone ID: LIB3147-009-Q1-K1-B1.pep
RWVSEGLPVYCGRFKHGEPESIEDRLMFSHLISWEKGPYRDTYKIYPRKGEVWALFKNWNVNWKSRTEKHGYEFVEILSENGEGVGIHVAYLTKVKGFVSVFCPMSKDGVNTILIPPNEL

SEQ ID NO: 93558 - protein, 95 aa, Gossypium hirsutum
  unsure (1)..(95): unsure at all Xaa locations
  Clone ID: LIB3147-009-Q1-K1-B10.pep
SSSLSRSAIDQPAVFVSRSRQPPDXKKYMDTKLQIKLDANRMAVGTLRGXDQIMNLVVDITVEENGHEKTVISMEVIRGNSVVTDAALEPVGKRQ

SEQ ID NO: 93559 - protein, 84 aa, Gossypium hirsutum
  Clone ID: LIB3147-009-Q1-K1-B9.pep
RTRVRTIFQNLCHRYINKELRDAYVSNSLTDISQRFNGSIINNRILKADVETLKAKVKMAEEAVKRTTGLNPVFHALPRIPSLS

SEQ ID NO: 93560 - protein, 88 aa, Gossypium hirsutum
  unsure (1)..(88): unsure at all Xaa locations
  Clone ID: LIB3147-009-Q1-K1-C3.pep
PTRPISRSPFKLVHKYGHMQKRRKHSLIKELEDALKVEAIKIDIEIXDVIEKMHEWKAAHYRAADINVHDESKMSEQTLPHEEKTHKN

SEQ ID NO: 93561 - protein, 65 aa, Gossypium hirsutum
  Clone ID: LIB3147-009-Q1-K1-D10.pep
FHFFPVLLFVDSPAVSMITNVQFFFIALRRKDGIFFHTLSSASYQDTISTKHSFFWLDNTDIYIY

SEQ ID NO: 93562 - protein, 90 aa, Gossypium hirsutum
  Clone ID: LIB3147-009-Q1-K1-D12.pep
PNNNKKNSFLAILCFYFYLLLFSCLFAGTWQRGGVRRTEALKASTALEARAAALPAVRVCCLANPMFRFCAIGPHGYLGLSLGLFGSLVM

SEQ ID NO: 93563 - protein, 85 aa, Gossypium hirsutum
  unsure (1)..(85): unsure at all Xaa locations
  Clone ID: LIB3147-009-Q1-K1-D6.pep
EVDDEGKAEVPESLLKKQYMTEEWDLAKKHELEVANKKIVKNRKLIYTMADQYAXEYEAQDKELIQLKREAKLIGGFYVDPETKL

SEQ ID NO: 93564 - protein, 67 aa, Gossypium hirsutum
  Clone ID: LIB3147-009-Q1-K1-D7.pep
MSDGSSISYHRVYWWFGSNGGASDLVVDLTQQCFLVFAAEAYACLEAQDRDLMECTRPIIGDSNQYK

SEQ ID NO: 93565 - protein, 52 aa, Gossypium hirsutum
  Clone ID: LIB3147-009-Q1-K1-D9.pep
APQSESSIPYHSDLWMAPTRREDKASCCSYNHGHLNYMNVGIIRVMMYFDMT

SEQ ID NO: 93566 - protein, 64 aa, Gossypium hirsutum
  Clone ID: LIB3147-009-Q1-K1-E1.pep
QKLVVSMSTTKAKYHATMMAAQESTWLLQLFEDLLQLAQFPIPDILLTIHLAENLVFFIYLLKN

SEQ ID NO: 93567 - protein, 71 aa, Gossypium hirsutum
  Clone ID: LIB3147-009-Q1-K1-E10.pep
FRKAISYCPYVNKENMLNCYNSIIDMGWRSNKAEDMVSQQFSSSERDMLKRRKTNDYGKKHTVHLSQVQHC

SEQ ID NO: 93568 - protein, 56 aa, Gossypium hirsutum
  Clone ID: LIB3147-009-Q1-K1-E2.pep
HASVKKFDLIICDTEVLFVGNGKAPSYRPFLKKPGKITSTLYQMCRDKHTMNWKLC

SEQ ID NO: 93569 - protein, 57 aa, Gossypium hirsutum
  Clone ID: LIB3147-009-Q1-K1-E4.pep
HASAHASVIRFNWQHPLIKKVSKRLYSEYWNVFLDSNFHCDCCLSFQVIYPVFINFF

SEQ ID NO: 93570 - protein, 49 aa, Gossypium hirsutum
  Clone ID: LIB3147-009-Q1-K1-E5.pep
KNLILYPMNCTHYINNRKLPYLNPDTQSFQLPYALLSSQHQYTALLFCD

SEQ ID NO: 93571 - protein, 70 aa, Gossypium hirsutum
  Clone ID: LIB3147-009-Q1-K1-E9.pep
GDHLFYKACMISASTPSVIPQPWYSSLLSRSMFKIFIEIRYELLLLRSCGHSEYKPKGIVGCVCARVGPS

SEQ ID NO: 93572 - protein, 77 aa, Gossypium hirsutum
  Clone ID: LIB3147-009-Q1-K1-F11.pep
HQKQEPPPPSQTQHPKRMPNQWMVAMQYPPAAMAMIQHQPMMMMYPPHHYMAYNNHHSHYERHYHQHLLHEQQQGSN

SEQ ID NO: 93573 - protein, 47 aa, Gossypium hirsutum
  Clone ID: LIB3147-009-Q1-K1-F3.pep
LLIAYYTCLSCPFSINTNHQTLNPNGTASSAYGPFESVNHGLLLRNQ

SEQ ID NO: 93574 - protein, 117 aa, Gossypium hirsutum
  unsure (1)..(117): unsure at all Xaa locations
  Clone ID: LIB3147-009-Q1-K1-F4.pep
PTRPSISAIFALEDCCYLAGLNMDFLSSSFKTVNGTSETLPPVEAEDVQTLLSAILTNQQTCLDGIQSTASTRGIRENITVPMSNDTXLYSVSLALXTXGWVPKEKKSASRHPSSKQ

SEQ ID NO: 93575 - protein, 57 aa, Gossypium hirsutum
  Clone ID: LIB3147-009-Q1-K1-F5.pep
NFFFKPLYRYALNTPFCIHHINRSQKNNNNNSRCKLHDTNKQQPLVAARKKKLGRWA

SEQ ID NO: 93576 - protein, 142 aa, Gossypium hirsutum
  unsure (1)..(142): unsure at all Xaa locations
  Clone ID: LIB3147-009-Q1-K1-F6.pep
PTRPPTRSIFPMTMFIPEAELPAWVVCYIPATMSLLNILPTPKSFPFIVPYLLFENTMSVTKFNAMISGLFQLGSAYEWVVTKKSGRSSEGDLVSLVKKETKRQRGESERNLDETXTNILREQKSSPKKHNMMYTKELALAF

SEQ ID NO: 93577 - protein, 57 aa, Gossypium hirsutum
  Clone ID: LIB3147-009-Q1-K1-G10.pep
LHTKKMLSLLHTTYSTIIFQDTARFLGMSDEDSSYYVLRQRRTSNPTPQLITRMNLA

SEQ ID NO: 93578 - protein, 101 aa, Gossypium hirsutum
  Clone ID: LIB3147-009-Q1-K1-G12.pep
THAPTRAPTHAFPIFYFPSPDTSPWARRNQKFTLIKLTNQLLILIRTIITIYARQFFRTREENASNNLLIHVSTWNPTYRMLTVMIHAIPTDRYLYPAKLQ

SEQ ID NO: 93579 - protein, 114 aa, Gossypium hirsutum
  Clone ID: LIB3147-009-Q1-K1-G2.pep
VHLLVGTPGLILDLAKKGVCILKDCSMLIMDEADKLLSPEFQPSIEQLIRFLSANRQILMLSATFPVNVKYFKDRYLQKPYIINLMDELTIKGITQYYAFVEKRQKVHCLNTLF

SEQ ID NO: 93580 - protein, 66 aa, Gossypium hirsutum
  Clone ID: LIB3147-009-Q1-K1-G7.pep
LDIYDQEFLYTSALHILDILLLVDYFIHRTSRSCSCSSHVRHPFPPTVPFASQTPLPSRDPCLVHV

SEQ ID NO: 93581 - protein, 41 aa, Gossypium hirsutum
  Clone ID: LIB3147-009-Q1-K1-G8.pep
ASPLLMFENTISDALYLFTHCIHYMCMALVKGTHHRIMNNS

SEQ ID NO: 93582 - protein, 62 aa, Gossypium hirsutum
  Clone ID: LIB3147-009-Q1-K1-H1.pep
STSSIFSLHKPSVKIDDPIWSSYRMSLTHPVLPNDRTIPESHDPESAMYCFGRLKRVAIFGF

SEQ ID NO: 93583 - protein, 25 aa, Gossypium hirsutum
  unsure (1)..(25): unsure at all Xaa locations
  Clone ID: LIB3147-009-Q1-K1-H12.pep
FLIVALYAEKVHKNPSYXFTRPRVR

SEQ ID NO: 93584 - protein, 57 aa, Gossypium hirsutum
  Clone ID: LIB3147-009-Q1-K1-H4.pep
HRRIRLDICSSIDERTAFSAYSYAQHKSYGETNPPQQAEGVTRGRYAWPDCVASNPG

SEQ ID NO: 93585 - protein, 92 aa, Gossypium hirsutum
  Clone ID: LIB3147-009-Q1-K1-H5.pep
MQRQPSQTELDKTLRPITVGTIVRYEEEKIELQYSECVICLEEFKGGDCCRVLPNCKHQYHQHCIDEWLVKDRHCPLCRGSVHGLEPTPITV

SEQ ID NO: 93586 - protein, 62 aa, Gossypium hirsutum
  Clone ID: LIB3147-009-Q1-K1-H7.pep
RTYSVVECGFLIKYIGFPTVTLIGWCHGIVVHNDPHDNIGWPGIGLHCCRIHVRRGFPGSSV

SEQ ID NO: 93587 - protein, 88 aa, Gossypium hirsutum
  unsure (1)..(88): unsure at all Xaa locations
  Clone ID: LIB3147-009-Q1-K1-H9.pep
GGGAKVHVMFHASKSGSGEAESXQFHSTAKRGDIIGVTGFPGITKRGELXFPTSFLALSHCLHMMPLQKAGPDASVKKTDVWIPRSTK

SEQ ID NO: 93588 - protein, 67 aa, Gossypium hirsutum
  Clone ID: LIB3147-010-Q1-K1-A2.pep
HASAHASDHVSVHSYTFITLENMGAITITGLIRGVTIHVLNGAIASPKEDDKTRCTCFLSYKRWNFN

SEQ ID NO: 93589 - protein, 132 aa, Gossypium hirsutum
  Clone ID: LIB3147-010-Q1-K1-A3.pep
HASDRAAVVIQKWIKGRNVKKTFKKINDASIVIQSVIRGWLVRRCSQDIGLVKPGGSKENESDEVLVKSSFLSEVQRRVLKAEAALREKEEENDILHQQLQQYESRWSECEVKMKSMEEVWQKQMRSPTSSL

SEQ ID NO: 93590 - protein, 69 aa, Gossypium hirsutum
  Clone ID: LIB3147-010-Q1-K1-A4.pep
EANDEAAGEVLKVIKGENQTSSGKKVPDAGIGLHSDMRCWTHTICYDNVRVAEPDGSKAKEADYETDKK

SEQ ID NO: 93591 - protein, 90 aa, Gossypium hirsutum
  unsure (1)..(90): unsure at all Xaa locations
  Clone ID: LIB3147-010-Q1-K1-A6.pep
MSVYQDLIYADELVSDSFPYKEIXNGMLLYVDGKWLVHGAVHIVIAADPXAEGAEDDEGVGDQSXDCCDIADTIMLQELPPLDKKHVVVF

SEQ ID NO: 93592 - protein, 103 aa, Gossypium hirsutum
  Clone ID: LIB3147-010-Q1-K1-B1.pep
WISVPPDQTSFFINVGDSLQVMTNGRFKSVKHRVVTNSVKSRLSMIYFGGPPLSEKIAPLPSLMRGDQQSLYKEFTWFEYKKSAYNSRLADNRLIHFEKIAAS

SEQ ID NO: 93593 - protein, 37 aa, Gossypium hirsutum
  Clone ID: LIB3147-010-Q1-K1-B5.pep
TPYGNCEFCAAPVKHKVLTSGAVSRLSMIYFGGPPLS

SEQ ID NO: 93594 - protein, 95 aa, Gossypium hirsutum
  unsure (1)..(95): unsure at all Xaa locations
  Clone ID: LIB3147-010-Q1-K1-C3.pep
MLREEEFPEVSVEFQETFLGHTSPITRCRFSASGNNIASASVDGTVRIWTYDSSIPASRNATIYCGAEIMSLDWECXSDRLLLIGTADGXIKAWN

SEQ ID NO: 93595 - protein, 71 aa, Gossypium hirsutum
  unsure (1)..(71): unsure at all Xaa locations
  Clone ID: LIB3147-010-Q1-K1-C9.pep
VVAXXFFRXXXLFXXXXSXXXPXXXXXEVXXFXRPXXSGVXPGFFVLXXXXPSVXXXXXXXXASAXASAXA

SEQ ID NO: 93596 - protein, 90 aa, Gossypium hirsutum
  unsure (1)..(90): unsure at all Xaa locations
  Clone ID: LIB3147-010-Q1-K1-D10.pep
VCSAPGGAAGXSAXGPPAAXRSPAXAXAPSWXXRXXSSXVXXXALXXXXSXVGXSAFFAASSSRVAGXVXXPKXXAAVARXPWRXRGXAR

SEQ ID NO: 93597 - protein, 48 aa, Gossypium hirsutum
  Clone ID: LIB3147-010-Q1-K1-D4.pep
MDADSWSTRLSSVSKRYQFTLQSRSDMFMGFEEIDGEDDIREEFPSPF

SEQ ID NO: 93598 - protein, 65 aa, Gossypium hirsutum
  Clone ID: LIB3147-010-Q1-K1-D9.pep
TAVKKRVDMRTKTYGQELNFQLNGVAAVPDPVYKIEPSLVADLYGDWIMPLTKEVQVEYLLRRLD

SEQ ID NO: 93599 - protein, 61 aa, Gossypium hirsutum
  unsure (1)..(61): unsure at all Xaa locations
  Clone ID: LIB3147-010-Q1-K1-E1.pep
VAKKQRFKHRLPGFFCGEPLDFVFFCYFFFPFFFFFFFFFXFLNFFFFFFFFFSDAWSTGI

SEQ ID NO: 93600 - protein, 68 aa, Gossypium hirsutum
  unsure (1)..(68): unsure at all Xaa locations
  Clone ID: LIB3147-010-Q1-K1-E5.pep
EGCQKKSYXXGINXGXXGSXKRSFSDVAFFEILXXVGFFPLSXXEXXNSTTVCGFVHXXPIGKREAGS

SEQ ID NO: 93601 - protein, 142 aa, Gossypium hirsutum
  unsure (1)..(142): unsure at all Xaa locations
  Clone ID: LIB3147-010-Q1-K1-F10.pep
GRPTPVGENALFVRPXVFYNNPLLSFVQLVIGPYADELGNVLPNAVEGVGVPVDPLAFAGLLGIVVTSLNLLPIGRLEGGRIAQALFGRGTAALLSFGTSVLLGAGAISGSVLCLAWGLFATFIRGGEEIPAQDEITPLGNE

SEQ ID NO: 93602 - protein, 63 aa, Gossypium hirsutum
  Clone ID: LIB3147-010-Q1-K1-F2.pep
ANEPVFDKKRLKRDGTMLSLRGINLYSECGNAHNYVSNDTWKTWRSFYNFGVEQLTIPSWTHV

SEQ ID NO: 93603 - protein, 78 aa, Gossypium hirsutum
  unsure (1)..(78): unsure at all Xaa locations
  Clone ID: LIB3147-010-Q1-K1-F6.pep
GSRMRAREADKAAKRAYXEKEHVIKLLFKQAXQLFVYKQWFQILQLEALIVHTKDNGQTHSPLYPVNLAPTFYNRRKL

SEQ ID NO: 93604 - protein, 51 aa, Gossypium hirsutum
  Clone ID: LIB3147-010-Q1-K1-F8.pep
NHFKVYRSHLNKGSVATPIFVSFLSRPLNFCFSQRGFDTSHNANLTPVQRS

SEQ ID NO: 93605 - protein, 86 aa, Gossypium hirsutum
  unsure (1)..(86): unsure at all Xaa locations
  Clone ID: LIB3147-010-Q1-K1-F9.pep
SKRATRRGSKXRQTTRXQXXSTQSTSQEKELWWSTELSIRISHFQDFQWCVFNPERILISSQTFNSHCMRYPISFSRYELKSTIRK

SEQ ID NO: 93606 - protein, 67 aa, Gossypium hirsutum
  Clone ID: LIB3147-010-Q1-K1-G1.pep
GMMQGKCQPKLLLSQHLCRWLSIMPLHFVCEVLMSVLNTKNKAFSSEILETRIFVFLIYLFMVFLVC

SEQ ID NO: 93607 - protein, 53 aa, Gossypium hirsutum
  unsure (1)..(53): unsure at all Xaa locations
  Clone ID: LIB3147-010-Q1-K1-G6.pep
PYIDHDYGNPMVKEXVDRLVEEKMPKSIKKPSDFLKDLPPLPFFNFQHHPMIG

SEQ ID NO: 93608 - protein, 94 aa, Gossypium hirsutum
  unsure (1)..(94): unsure at all Xaa locations
  Clone ID: LIB3147-010-Q1-K1-G9.pep
HAGHSQAEREEEKRAKXPXXHXXXXRTRXXXARPXRKKGHXPSXTYLRTYKIGDYVYRKGNSAVHKGMPHKFYHGRTGRALEXQKRAIGVEVNK

SEQ ID NO: 93609 - protein, 89 aa, Gossypium hirsutum
  Clone ID: LIB3147-010-Q1-K1-H1.pep
CSNRQKDPGKQTCWSNGILVGRRGMRLENFSWDKCACFCDCTTYMNWKWIWVNQFLGGYGNQGRCICVVFFCEVMQKREDKSLFFNLKF

SEQ ID NO: 93610 - protein, 39 aa, Gossypium hirsutum
  unsure (1)..(39): unsure at all Xaa locations
  Clone ID: LIB3147-010-Q1-K1-H2.pep
AKSCLEKGITXVAFDRGGYPDHGRVQALADSAREHGLQF

SEQ ID NO: 93611 - protein, 103 aa, Gossypium hirsutum
  unsure (1)..(103): unsure at all Xaa locations
  Clone ID: LIB3147-010-Q1-K1-H4.pep
DAWADSFYDSWACARSADKRLLAHMMMIYKCNLSXLPVSTATQLLNSMIKTPRPSQADTTDIANAVLNCTNCVMLSDERAAGAYPQLAVKIMPRICIESRILP

SEQ ID NO: 93612 - protein, 45 aa, Gossypium hirsutum
  Clone ID: LIB3147-010-Q1-K1-H7.pep
WSIISQVMDHQRLLEPHEDIDKQKDRCLISLHALQAQSALQCLKI

SEQ ID NO: 93613 - protein, 74 aa, Gossypium hirsutum
  Clone ID: LIB3147-010-Q1-K1-H8.pep
DTWTYSSYYFFTLFTSADNSLLAHIMNIYKSNHTCNPITTVTQMLKSMIKSPNPSQAQTTDIANAVLNGTNTLM

SEQ ID NO: 93614 - protein, 62 aa, Gossypium hirsutum
  Clone ID: LIB3147-011-Q1-K1-A10.pep
PTRPDTESFSLHPNEPFRTLGDCFNDFLAKMNDENMKQSDKNTNQTNDIPPPKSINKAFALT

SEQ ID NO: 93615 - protein, 100 aa, Gossypium hirsutum
  unsure (1)..(100): unsure at all Xaa locations
  Clone ID: LIB3147-011-Q1-K1-A11.pep
MTFTNVLKEENFLLMIRYKAVNDHHVMLDCTVXQPNMATHVFDFSIVTPEINAEYTDGALHCTSNVQRDPIEITSDDHXEDEATFNLNVIIYLQSNKPWL

SEQ ID NO: 93616 - protein, 69 aa, Gossypium hirsutum
  Clone ID: LIB3147-011-Q1-K1-A4.pep
KKDENSVFKKIMEKTMVYSTVMKTINLGSTSGNIKPNFSHVSSQMGNWIQEWMQDSSMESIIELLNERA

SEQ ID NO: 93617 - protein, 38 aa, Gossypium hirsutum
  Clone ID: LIB3147-011-Q1-K1-A5.pep
QSSTHLLNLITMTKRTTMPCVDLKCHEQPVTFTIETHY

SEQ ID NO: 93618 - protein, 78 aa, Gossypium hirsutum
  Clone ID: LIB3147-011-Q1-K1-B1.pep
ITACWKYLLGALYAPICCQLCAFSSLVILPLHIRPLPEYMPDLYIRWKGRNFRGALQMSLTKMSVLAVAEADAGDRLY

SEQ ID NO: 93619 - protein, 61 aa, Gossypium hirsutum
  Clone ID: LIB3147-011-Q1-K1-B11.pep
MRPNKGGKVAVPAKKKQEKAVNPVFEKRPKHLGIEGALPSKKDLHRFAKWTNVVRIQRKKT

SEQ ID NO: 93620 - protein, 113 aa, Gossypium hirsutum
  Clone ID: LIB3147-011-Q1-K1-B12.pep
GLFRVGGSGEVQGLAQCVGDLSLAECQDCLSSAIQRLKSECAAAAYGDMYLGKCYARFSTAGDNGHYHPKSHNEKSGNEGEKTFAIIIGLLAGIALLIIFLGFLRKGVNRNGK

SEQ ID NO: 93621 - protein, 86 aa, Gossypium hirsutum
  Clone ID: LIB3147-011-Q1-K1-B2.pep
FPIVLSRLETFWVSYAPHLNLEIFGETNQLFARALRMVDVRRVWTKLRLCKTRNFHQGAERARVWASSLASVSLGKSSSGRSSSSP

SEQ ID NO: 93622 - protein, 74 aa, Gossypium hirsutum
  Clone ID: LIB3147-011-Q1-K1-B5.pep
YSISTIFHRKSDRDHLNNSGLDVPVMRTIRPFLMPVECLWFLGYSPSKYLSLYRNLCPISTYFEMPRALEMLLN

SEQ ID NO: 93623 - protein, 90 aa, Gossypium hirsutum
  Clone ID: LIB3147-011-Q1-K1-B7.pep
RSAYLAKCSRTRLTPLLPCAGSWLQALSPSLNLNLNQSQTLLSLHLDLTSALHLHLLSSHMLSCTQTRSSVPLILLPVNTGLHLFYAVLK

SEQ ID NO: 93624 - protein, 54 aa, Gossypium hirsutum
  Clone ID: LIB3147-011-Q1-K1-C11.pep
VWDNCISKHRTKNLHSVPHSLKQQIIDCSIMRSTFYQNPRTGKLYMRATQVMHI

SEQ ID NO: 93625 - protein, 53 aa, Gossypium hirsutum
  Clone ID: LIB3147-011-Q1-K1-C12.pep
RRCLGMQPSLNRLGLGYQNRLTPWGATVHQFQWWNAAVEWSNPGMGKPHNKLS

SEQ ID NO: 93626 - protein, 54 aa, Gossypium hirsutum
  Clone ID: LIB3147-011-Q1-K1-C5.pep
DMRLSACFLRSELSCPCCWKQHVSSGFDAQIHRFPIEQLGVYRQSVQKVMSYAS

SEQ ID NO: 93627 - protein, 55 aa, Gossypium hirsutum
  Clone ID: LIB3147-011-Q1-K1-C8.pep
VSDDQIWLSLQLIEDFISRMLWVGCQVRPDFNSLVPFYLFFQAYFDSHLFLLPVN

SEQ ID NO: 93628 - protein, 50 aa, Gossypium hirsutum
  Clone ID: LIB3147-011-Q1-K1-D6.pep
QVFHHRLPTQHILNQNLTLQINKKVKRNRLPKLNKALNAASQTKCHRIYL

SEQ ID NO: 93629 - protein, 70 aa, Gossypium hirsutum
  Clone ID: LIB3147-011-Q1-K1-D9.pep
CSTRPLLTASFININLNTSYSFPNMMNQNQYIHTQLHLTTQTPKNCKHYCDHLLLEMTDQNSQHGPYQYF

SEQ ID NO: 93630 - protein, 90 aa, Gossypium hirsutum
  unsure (1)..(90): unsure at all Xaa locations
  Clone ID: LIB3147-011-Q1-K1-E10.pep
FLLVSFFYTYVFFFFIQVVLVGVCFNKKNDLVSKGMQIMVCQQLLWYNKICCLRAHGRNTASPRGNEKLVRTKLICNRTRGRTRGSAPXF

SEQ ID NO: 93631 - protein, 65 aa, Gossypium hirsutum
  Clone ID: LIB3147-011-Q1-K1-E2.pep
WISTKKTQKCFLKKFQSCTFFFLYRKAQVLPFRCWQSLQAYHILLPFNLIITVVYESCMSSSKHL

SEQ ID NO: 93632 - protein, 99 aa, Gossypium hirsutum
  Clone ID: LIB3147-011-Q1-K1-E3.pep
PESAATHPRVRELCKSSHHMLPGLQHGQEKMSKSDPSSSIFMEDDEAEVNVKIKKAYCPPKIVKGNPCLEYIKYIIFPWFNEFRVERNADNGGDKTYKD

SEQ ID NO: 93633 - protein, 38 aa, Gossypium hirsutum
  Clone ID: LIB3147-011-Q1-K1-E4.pep
PAPAPDIRVLRCGPPPMNKAVTGHLDALGYSPDMQFQF

SEQ ID NO: 93634 - protein, 74 aa, Gossypium hirsutum
  Clone ID: LIB3147-011-Q1-K1-E7.pep
TRAATRAYMPLKRFRILPFKGRLKGLPKNIPCTGMKNQGANSVDYLPEINQAYLTEKAIYELDCAEKKKRSVID

SEQ ID NO: 93635 - protein, 68 aa, Gossypium hirsutum
  Clone ID: LIB3147-011-Q1-K1-E9.pep
MMRTWLLRGGTIFICAVAYLMTKGLKVESTSGLMQYKGILACETSAVLLYFSTCIINTILKSSAVGAT

SEQ ID NO: 93636 - protein, 94 aa, Gossypium hirsutum
  Clone ID: LIB3147-011-Q1-K1-F1.pep
SGGDSGIYAFKTLSNSSIQVRIERLTNKSGSPSMEDIEAFSVSYRAKLDEAELARSVAENITLEVSSPGVERVVRIPQDLDRFKDRSLYVKYVT

SEQ ID NO: 93637 - protein, 70 aa, Gossypium hirsutum
  Clone ID: LIB3147-011-Q1-K1-F11.pep
LLLRTRFRLRFQLRTSLLAWGSHMSSSDGNSLRSWLDVIVHRLIPMMIRMMMLPSTCVALRDALTVDLPD

SEQ ID NO: 93638 - protein, 78 aa, Gossypium hirsutum
  Clone ID: LIB3147-011-Q1-K1-F3.pep
PCSSLEAQGQAGAITPMWSAGPESIIFKFGTKIFNRKLLSQTRSKQKVLRFFQLCCAAPFLHMMKFGPEIDESSLPHQ

SEQ ID NO: 93639 - protein, 39 aa, Gossypium hirsutum
  Clone ID: LIB3147-011-Q1-K1-F5.pep
DSPLSFVRNKIFFLLVFFFFLVLDYAPHNPLRPILSRFT

SEQ ID NO: 93640 - protein, 83 aa, Gossypium hirsutum
  Clone ID: LIB3147-011-Q1-K1-F7.pep
RKKGILFGSPGFFLKDVLKKYLGVSRNLRMIYSFSVSYHGKKAILQIHGVGGHDLQKWAFTLCVTHPLQMHFSNSLIVRAVLV

SEQ ID NO: 93641 - protein, 60 aa, Gossypium hirsutum
  Clone ID: LIB3147-011-Q1-K1-F9.pep
VVPCNQSQSSLLAIRLRNTEESTVSFLQVSHSLQISWSPASVGFCLRCKYSSRSAPTRQR

SEQ ID NO: 93642 - protein, 70 aa, Gossypium hirsutum
  Clone ID: LIB3147-011-Q1-K1-G12.pep
HASAISSYKFLWTAMSAGELATLAHYVYTGYKYKPEAHYPYLAIYDAPEEAAAEQLKLYDDYVLLNLSSR

SEQ ID NO: 93643 - protein, 54 aa, Gossypium hirsutum
  Clone ID: LIB3147-011-Q1-K1-G5.pep
ETELLIKLKDIKALLFLLRVAKVTGSAPNKLCKIKVVRLSIAQVFTVIYQKQNA

SEQ ID NO: 93644 - protein, 42 aa, Gossypium hirsutum
  unsure (1)..(42): unsure at all Xaa locations
  Clone ID: LIB3147-011-Q1-K1-G6.pep
XFCFYFHLTFYFIPSYPTSNYRNVCNKKLSSQLLIYMMPIPS

SEQ ID NO: 93645 - protein, 119 aa, Gossypium hirsutum
  Clone ID: LIB3147-011-Q1-K1-G9.pep
LSLAVADNLSLSLIGAMERRWFHQIILFPEPISLFSLKPLQPLQPYSESIATPTSPSATSLAEDNISTPVCPLFDHQPLAPADDSKNEEEEEEMKKRARRGSVTLKVVNILNFIQPKSV

SEQ ID NO: 93646 - protein, 41 aa, Gossypium hirsutum
  Clone ID: LIB3147-011-Q1-K1-H11.pep
HHYLELRNSYAGDDFPKHDGSRDFRTHGARNAIANHHSLTV

SEQ ID NO: 93647 - protein, 75 aa, Gossypium hirsutum
  Clone ID: LIB3147-011-Q1-K1-H5.pep
GSRGTRHAYRESTPVGTHVLAKRRLALLGLTNEQRGPALTVLWLTMPTMPYNMTRLLYKTVLESVIGELTCKMQY

SEQ ID NO: 93648 - protein, 48 aa, Gossypium hirsutum
  unsure (1)..(48): unsure at all Xaa locations
  Clone ID: LIB3147-011-Q1-K1-H7.pep
YSFFNKKNGLPFFFHIRTXGQRLLTKAHKQLFKVPFLHYTQNDTHRSQ

SEQ ID NO: 93649 - protein, 74 aa, Gossypium hirsutum
  Clone ID: LIB3147-013-Q1-K1-A11.pep
HKIISIVINVIRFTYQYKHVYYSLTFRFIIFIHQSYPLYIKLKKKKMPSLSKYPTLLTPSLNYIIFLLINSKLI

SEQ ID NO: 93650 - protein, 77 aa, Gossypium hirsutum
  Clone ID: LIB3147-013-Q1-K1-A9.pep
RKTSDALTQNLAFLLTHTPLGIRGSVMAVFRVLIITLEVTYKNPFDEACNNCSSTGGGQRHYIRVLNWNITIPQMIV

SEQ ID NO: 93651 - protein, 56 aa, Gossypium hirsutum
  Clone ID: LIB3147-013-Q1-K1-C10.pep
TSIVRQTNRGAILVIEIFLLQLNGNQIVTDVEFCIIFSVYHFLQGFLCNFMFPSDK

SEQ ID NO: 93652 - protein, 56 aa, Gossypium hirsutum
  Clone ID: LIB3147-013-Q1-K1-D9.pep
CHSPPPSAIGNFSFDTLHLSKICLHVTWSRVLGRDSYKGMIDDMLNISVNYMYLRE

SEQ ID NO: 93653 - protein, 83 aa, Gossypium hirsutum
  Clone ID: LIB3147-013-Q1-K1-E11.pep
TRRFKEGYRGRFIFDFVGKGVWGGAIRWSFCCKRRCVKRGVLKGDLNGFHKGFFEKRRCKKLGLWNFFRGPNIKDDCVGKRGT

SEQ ID NO: 93654 - protein, 60 aa, Gossypium hirsutum
  Clone ID: LIB3147-013-Q1-K1-E5.pep
NRFSPHARSNIENNTMADGFQGSLLQIRRAKVGFVHHKPSFHEEVSFALAKKKVLPEIPD

SEQ ID NO: 93655 - protein, 43 aa, Gossypium hirsutum
  Clone ID: LIB3147-013-Q1-K1-F10.pep
FFFLVNQRPTPYFYFFFFFFFFFFFFFFFFFVFFFFFFFFFLK

SEQ ID NO: 93656 - protein, 109 aa, Gossypium hirsutum
  Clone ID: LIB3147-013-Q1-K1-F11.pep
PTRPGLGSLVSGARFITDGMVQAAAECLASYMSDEEIQKGILYPSIDSIRHITAEVGASVLRAAVAEELAEGHGDVGPKELAHMSKEETVGYVFRNMWYPIYSPLVQEK

SEQ ID NO: 93657 - protein, 67 aa, Gossypium hirsutum
  unsure (1)..(67): unsure at all Xaa locations
  Clone ID: LIB3147-013-Q1-K1-G5.pep
NAKRTFFCGRRNAIKGPVMESVDSSGXKKLAIQRLEITKNDLQHLIAKEALXNANLQACLERRKQAL

SEQ ID NO: 93658 - protein, 86 aa, Gossypium hirsutum
  Clone ID: LIB3147-013-Q1-K1-G9.pep
INNTPLLTQNVYLLALSSCMKILLASFVMFYSLIYYKHSHAICMFKGLIVQVAGREKINCSHVKNQLILIIICDYIFNTHLSFLFL

SEQ ID NO: 93659 - protein, 58 aa, Gossypium hirsutum
  Clone ID: LIB3147-013-Q1-K1-H8.pep
HHNKSKLYLNTYLPFCLSSLSIQINNKYISLTYHIFIITAHNQITYIYTNFHLYLIIY

SEQ ID NO: 93660 - protein, 40 aa, Gossypium hirsutum
  Clone ID: LIB3147-015-Q1-K1-A5.pep
QICLTLFLELLFSKVPWDHLHNNLYIVTIKTIITYFLIPF

SEQ ID NO: 93661 - protein, 144 aa, Gossypium hirsutum
  Clone ID: LIB3147-015-Q1-K1-B12.pep
RGEEGHNRFKDTVAAAEAAEESAKKAITAAQAAAYLANRESNLFSEASGCVGNAARGSVPTSPPGTRRMYESRSFGTFNPPSTEDVRPGNNGGGKTCRRHSYNHAPAAHSDIKFDESDCDEEIEIEDYPVGSTDLPPPVPSLEK

SEQ ID NO: 93662 - protein, 77 aa, Gossypium hirsutum
  Clone ID: LIB3147-015-Q1-K1-B9.pep
IIFFFFIFFFFFFFFLFFFLYFFFFFFFFFFLSRSFSIFLNILYVMGQFSPGPYKHKPNNNKTKPAVQVRLQPIQAQ

SEQ ID NO: 93663 - protein, 46 aa, Gossypium hirsutum
  Clone ID: LIB3147-015-Q1-K1-C1.pep
IFMSKQSLAYTYVTHVLSFISIVSYPDVKFCIKLYTLCNEKLFWGP

SEQ ID NO: 93664 - protein, 65 aa, Gossypium hirsutum
  Clone ID: LIB3147-015-Q1-K1-C6.pep
KGPPYYIFFFFIFFFFFFFFFFFFFFFFFFFFFFFFFFFFFFFFFFFFFLMQIVDIFIYQTQVIA

SEQ ID NO: 93665 - protein, 54 aa, Gossypium hirsutum
  Clone ID: LIB3147-015-Q1-K1-C8.pep
HASVSLKISPLHTTSDQSVMPISHTIHLQILRDKCQVDCREAKYVLINIIVFLA

SEQ ID NO: 93666 - protein, 72 aa, Gossypium hirsutum
  Clone ID: LIB3147-015-Q1-K1-D5.pep
MTSHTECKESCFFYMYFRAADFLCFLFLFLFFIILFGVIMLLAFVAFCISNINIVCTTMFCFTSTVQVSIEL

SEQ ID NO: 93667 - protein, 64 aa, Gossypium hirsutum
  Clone ID: LIB3147-015-Q1-K1-E11.pep
LGMAYGTIYSYGDFGMWMRKFNMVIDIQIDCKNFVKNRLLEFLWFAKTEEVTGASNLNYLYVLL

SEQ ID NO: 93668 - protein, 98 aa, Gossypium hirsutum
  unsure (1)..(98): unsure at all Xaa locations
  Clone ID: LIB3147-015-Q1-K1-E2.pep
YYLIEIYKFWIFFDXSNLLLLIFFSIFFPKAKQFSHFFYYFLSFSHLFPSSLFFLLLPIVLKLIPLFSLPLFLPQTLYLSFFLSFIYSKSRTYHSFYC

SEQ ID NO: 93669 - protein, 86 aa, Gossypium hirsutum
  Clone ID: LIB3147-015-Q1-K1-E5.pep
SDGIHGIFLHDPVSFMALARADLFTYKKGVVRVETQGIYKGHTLLDQGLKRWNGSNPWTGYSPVSVAWTVNVDEVLNYIKQQLMKP

SEQ ID NO: 93670 - protein, 145 aa, Gossypium hirsutum
  Clone ID: LIB3147-015-Q1-K1-E6.pep
PRVRDITVVLDQPLVGQGMSDNPMNAVFIPSPLPVEVSLIQVVGITHFGSYIEAASGENFAGGASSSPAVEYMNNLDETTFRGGFILEKVMGPISTGHLELRTRNPNDNPSVTFNYFKDPQDLQRCVQGIQTIEKIIESKAFFRF

SEQ ID NO: 93671 - protein, 83 aa, Gossypium hirsutum
  unsure (1)..(83): unsure at all Xaa locations
  Clone ID: LIB3147-015-Q1-K1-F3.pep
QQSGSRXLLANGMGKSNKHPLLKSKPGFKSSTPSTTKVQPGDTLWSISSRIHGTGAKWKELAALNPHIRNPNVILPNETIRYR

SEQ ID NO: 93672 - protein, 121 aa, Gossypium hirsutum
  Clone ID: LIB3147-015-Q1-K1-G12.pep
METVIGNPFIKALIILFLVSATTAAGDAPFIISHKKASLTRLNSCAERVSVSIDIYNQGFSTVYDVSLVDDSWPKDLFDIISGNTSKSWERLDAGGILSHSFELDAKRQGMFHGAPAVITY

SEQ ID NO: 93673 - protein, 143 aa, Gossypium hirsutum
  Clone ID: LIB3147-015-Q1-K1-G9.pep
RHPHLVSLIGFCLSEKEMFGVLEYMSRGSLAHVLYGKDHVPLAWKHRLHICIGAARGLHYLHTGAKRAVIHHNIKSSNIFLDEEWCSKLSDFGLSKLPLSTSKALTRIDTDHAVGTSGYMAPEHRVRLLKEKSDVFSFGIVLY

SEQ ID NO: 93674 - protein, 69 aa, Gossypium hirsutum
  Clone ID: LIB3147-015-Q1-K1-H10.pep
APFFYLIFFFFFLIIFFFFFFNLKTVLSPGEDLNNFLKMKQVVSRKTIFRDIIASLLQNEALQFKNISF

SEQ ID NO: 93675 - protein, 41 aa, Gossypium hirsutum
  Clone ID: LIB3147-015-Q1-K1-H12.pep
IYKGLIQFPLKISVFLMILHFYHIFFIEALTGRQPPCVIPA

SEQ ID NO: 93676 - protein, 78 aa, Gossypium hirsutum
  Clone ID: LIB3147-015-Q1-K1-H4.pep
MRRVRKIEKVFSIENFQFLLQKKKKKKKKKKKKKKKKKKKKKKKLKKKKKQKKKKKKKKKKIKIKKKYNKKNLGGAPL

SEQ ID NO: 93677 - protein, 48 aa, Gossypium hirsutum
  Clone ID: LIB3147-017-Q1-K1-A1.pep
PRVRLTLTLILDRKHEINAKISTKRKKTALKSYALLTSRSRIRKRRKV

SEQ ID NO: 93678 - protein, 97 aa, Gossypium hirsutum
  unsure (1)..(97): unsure at all Xaa locations
  Clone ID: LIB3147-017-Q1-K1-A3.pep
TRTLAFFVLGMYXYLRPILLQQRGNKDPDXMKIFGTMHNGKGKLNYAQHMKRSKYCICPRGYEVNSPRVVEAIFYECVSGIISDNFVPSFFEXVLNW

SEQ ID NO: 93679 - protein, 48 aa, Gossypium hirsutum
  Clone ID: LIB3147-017-Q1-K1-A7.pep
YHFPGSLEGYVHSRGRTRKAAAKGTAYTFFTAANARFAKELIAILEEA

SEQ ID NO: 93680 - protein, 121 aa, Gossypium hirsutum
  unsure (1)..(121): unsure at all Xaa locations
  Clone ID: LIB3147-017-Q1-K1-B12.pep
PTRARTHFLSRDHFQAQAPAHAAASRDLXGHTKLRLHMPPSIAFATRGRLQGLRLQLALLDREFDDLDYETLRALDSDNISTTPSMSEEEINALPVHKYKVPGTESAGSLPKQASSSSAPV

SEQ ID NO: 93681 - protein, 44 aa, Gossypium hirsutum
  Clone ID: LIB3147-017-Q1-K1-B2.pep
QAFPNPSVYPSVFLPLSFPFFGKAPIHEGELIIIIFICNIFGFF

SEQ ID NO: 93682 - protein, 43 aa, Gossypium hirsutum
  unsure (1)..(43): unsure at all Xaa locations
  Clone ID: LIB3147-017-Q1-K1-B4.pep
XKPKLWFNKNSPMNHINSLIVRAAVCFDGTAFIFISPFQHKKQ

SEQ ID NO: 93683 - protein, 61 aa, Gossypium hirsutum
  Clone ID: LIB3147-017-Q1-K1-C1.pep
SSRSRAAAFFFFFGTLMKGISNQSDGTHSRDRQAIQYTTKKHSGIYQTKMKTLKEQINCYL

SEQ ID NO: 93684 - protein, 44 aa, Gossypium hirsutum
  unsure (1)..(44): unsure at all Xaa locations
  Clone ID: LIB3147-017-Q1-K1-C10.pep
THTSVKKIFINKNNKNQKKNNRRALFKKPSAPSHTSXLITLLYT

SEQ ID NO: 93685 - protein, 99 aa, Gossypium hirsutum
  Clone ID: LIB3147-017-Q1-K1-D12.pep
IFLLQGKKVFGKRRRLTSPQGFFLFYYRWTSFSFLGFCFEHSSKVTAHGGTPSLFGLDGSHMVMSIELNDALAGRLLMPSRKRWIYSRRCPRHAQRRRR

SEQ ID NO: 93686 - protein, 92 aa, Gossypium hirsutum
  Clone ID: LIB3147-017-Q1-K1-D8.pep
YFPTFKFLLPPYSFLLPWFSFQIPETGSNYRYIHNVCLFELIANFSSCSCACVRCVREEEGTIRVKETHSTCFVVTIYILELANLRASGTPG

SEQ ID NO: 93687 - protein, 120 aa, Gossypium hirsutum
  unsure (1)..(120): unsure at all Xaa locations
  Clone ID: LIB3147-017-Q1-K1-E12.pep
FEVSSTPXYGDETVAAEGGGVPYVCVCTETIKKRSLPESSVYFREEEVLDMQDVTVLWLPGGVTSYVDVSNDGTLTIGVGWYSDEGINLVMERDYGIDGKLKEVRWKSEVKRLWSHPVSL

SEQ ID NO: 93688 - protein, 98 aa, Gossypium hirsutum
  Clone ID: LIB3147-017-Q1-K1-E4.pep
NKFPVRGGICDQNYYSSFHKTRNRKKLTKQEWKDFTRESTRHAIADLAATPEFTDWMIEHADRIKLLPCDSSEESVGSKSNSSDYDEEGSSSRFRLFN

SEQ ID NO: 93689 - protein, 99 aa, Gossypium hirsutum
  Clone ID: LIB3147-017-Q1-K1-E6.pep
VRDDQSCSEVFFMKEMLKNKAASVLRSCGWYIDVYNFMYSRKQSYALETGSTLSDNDLEKKLIADAKPTFIPQIPESLKEEFIKLLQSFSQTKQESPDP

SEQ ID NO: 93690 - protein, 120 aa, Gossypium hirsutum
  Clone ID: LIB3147-017-Q1-K1-F11.pep
QFLKSCHIFVGDGNVGTLGEVHVVSGLPAASSVEKLEILDDERHVLSFSVVGGDHRLTNYRSVTTLHHSPKGNGTLVVESFVVDIPVGNSREDTCIFVDTIVRCNLQSLARMAENMARTE

SEQ ID NO: 93691 - protein, 100 aa, Gossypium hirsutum
  unsure (1)..(100): unsure at all Xaa locations
  Clone ID: LIB3147-017-Q1-K1-F12.pep
LVATSLYVFTTQTLDKERGITILSGAIAACTEAIKHHMGKLDVKEQTIAVSERDDKLLADHMAKLRNDNEEVSGDEDSEXDEDTGLGEDDVENAGHGIME

SEQ ID NO: 93692 - protein, 37 aa, Gossypium hirsutum
  Clone ID: LIB3147-017-Q1-K1-F2.pep
IARHTLPNVPSPTSLINLYLSIFLRNKNQPFLYTGAL

SEQ ID NO: 93693 - protein, 62 aa, Gossypium hirsutum
  unsure (1)..(62): unsure at all Xaa locations
  Clone ID: LIB3147-017-Q1-K1-F6.pep
FVELEEGARLXTHYSESGTFTVLVNPEESFFEWNGSLIMCLQTGVNNGHIQFRNGAYKIRGN

SEQ ID NO: 93694 - protein, 62 aa, Gossypium hirsutum
  unsure (1)..(62): unsure at all Xaa locations
  Clone ID: LIB3147-017-Q1-K1-G12.pep
GEKKCPYKLNASSRPGIYYKFQNNIKKEKQSPKTAYHLLEPINLRYKHAITIERRSLXXXTQ

SEQ ID NO: 93695 - protein, 47 aa, Gossypium hirsutum
  unsure (1)..(47): unsure at all Xaa locations
  Clone ID: LIB3147-017-Q1-K1-G2.pep
NKKLHDFISLYVIIHNIKRLQHRNDILSPHYTIQILQXQXITKMKVH

SEQ ID NO: 93696 - protein, 32 aa, Gossypium hirsutum
  Clone ID: LIB3147-017-Q1-K1-G6.pep
FDHPPLSLNPLLEITVLFCDVKKYLNYEFCAF

SEQ ID NO: 93697 - protein, 75 aa, Gossypium hirsutum
  unsure (1)..(75): unsure at all Xaa locations
  Clone ID: LIB3147-017-Q1-K1-H9.pep
DQXPKKKILPPGYFTPQXKXPPPFFKHLAPPKTXXGKQKQPCLFRGNGPYQTKSFTVSNTSLLHRYAYPHPSLPL

SEQ ID NO: 93698 - protein, 39 aa, Gossypium hirsutum
  Clone ID: LIB3147-018-Q1-K1-A10.pep
YKNYYKWPVTQKRPHYTGLSINSHQPISNKLLTSKQSGR

SEQ ID NO: 93699 - protein, 71 aa, Gossypium hirsutum
  Clone ID: LIB3147-018-Q1-K1-C12.pep
LNSKNWILSLQKSLFFLCKAKIVAFKQVPVIFIRIIDPYLLYEHSKLFYFFPLIFYLKEVILKCEQYFWCQ

SEQ ID NO: 93700 - protein, 81 aa, Gossypium hirsutum
  Clone ID: LIB3147-018-Q1-K1-D12.pep
LSTSGSSVAAVGSLTTSFDSVSTVASVSGAWGSRDGASGTASFGYASTVLGCRSNRRFLVCCNFCNVDDFGGFLLMDCSVK

SEQ ID NO: 93701 - protein, 66 aa, Gossypium hirsutum
  Clone ID: LIB3147-018-Q1-K1-E11.pep
DGKFKESQYLRRETNIQQLIVQCAFFFLSFLFFCPICHPSFNTMNLLFGVILVIVEMEMQIKPFST

SEQ ID NO: 93702 - protein, 109 aa, Gossypium hirsutum
  Clone ID: LIB3147-018-Q1-K1-E12.pep
MVDNGSWDSLSEFTLAEVLEMENKYKAIGDETLNEEFCNNLATRFSCSSNRLGKSTITWQQVQLFFQEKQMEVQTQQESSAMALKLFVDLSGEDSSKPLEGHAKAKRYS

SEQ ID NO: 93703 - protein, 68 aa, Gossypium hirsutum
  Clone ID: LIB3147-018-Q1-K1-F12.pep
FIMNAKRKRPDTASASVTEHERIVHEVIRSKQDMGISQQDMKREINLDSNLIAKCIKSLVSKNLIKEV

SEQ ID NO: 93704 - protein, 84 aa, Gossypium hirsutum
  Clone ID: LIB3147-018-Q1-K1-G10.pep
NTGPKHITKVNTPMYHVFIPDHLYPSIRGPKSNIRPIPHTNITISYESQQYYQDYFLLTAPALLLLIYHKHLLSYLLYYTLFIG

SEQ ID NO: 93705 - protein, 61 aa, Gossypium hirsutum
  Clone ID: LIB3147-018-Q1-K1-H10.pep
KRCWRGSPFGRRYDSRQREGVRHGMRAPRWYKPHLRACTCRGIKSPHRKSYYSLSSSRRSL

SEQ ID NO: 93706 - protein, 61 aa, Gossypium hirsutum
  unsure (1)..(61): unsure at all Xaa locations
  Clone ID: LIB3147-019-Q1-K1-A5.pep
VNVCLYDHRHLSVVFLEGYLGGITYLISAPKSGVQKTKVCVRVRIVSCNGRVACARXFLPG

SEQ ID NO: 93707 - protein, 41 aa, Gossypium hirsutum
  Clone ID: LIB3147-019-Q1-K1-A6.pep
RTNVLHFGWIHNDQFENQIAAFKLVRKIQAFLNLHNFFKVI

SEQ ID NO: 93708 - protein, 47 aa, Gossypium hirsutum
  Clone ID: LIB3147-019-Q1-K1-B11.pep
FNGWILHHVNDNEECVPEMDRILTQKDHLISLKIDKNTRILVHTTTR

SEQ ID NO: 93709 - protein, 70 aa, Gossypium hirsutum
  Clone ID: LIB3147-019-Q1-K1-B5.pep
HAFVQTYKICQITPSLHYQGGADPKMHLPANYASPILHPYHWSDEYSLLPPWNCCSSSIQSASIKMTALL

SEQ ID NO: 93710 - protein, 56 aa, Gossypium hirsutum
  Clone ID: LIB3147-019-Q1-K1-C1.pep
QSIFVLLFKKQKQNRLKTQMPKNLYNYDHFFFPLKIHCIHSSHLIYHLIHHIINKT

SEQ ID NO: 93711 - protein, 76 aa, Gossypium hirsutum
  Clone ID: LIB3147-019-Q1-K1-C11.pep
GSADAYAHASGQPKAHRCYDRAEDVIRGCFEGNPFKTVPGPFKLFWQCMRSKPGEEPTEPYTYLQLDPPKREVELE

SEQ ID NO: 93712 - protein, 58 aa, Gossypium hirsutum
  unsure (1)..(58): unsure at all Xaa locations
  Clone ID: LIB3147-019-Q1-K1-C2.pep
VFITFFFIYVLVIFFFCFFFXGDISVQFLLFREENVGFSTKPLCNVFFIFQQRYITYL

SEQ ID NO: 93713 - protein, 81 aa, Gossypium hirsutum
  Clone ID: LIB3147-019-Q1-K1-C9.pep
NKNHFTKQILACLFNVSNLLSLTYLGNSFFLFSLKPIPLPHLNHPLSTKTLSKPKLISFPYYPFFPTFLIIKKPHSFLLSQ

SEQ ID NO: 93714 - protein, 155 aa, Gossypium hirsutum
  Clone ID: LIB3147-019-Q1-K1-D10.pep
AKMGFSSTVMPPSCSRTTKRVMIGSPGYTDPHYLRTGLASKKNDVYSLGVIILELVTGMEAFCPERGQLLTSIMAPNLKAISEVGTAVEVAELVDPRLGGEYDLDEAKAMVSIAGLCLHQSPTVRPSASQIMQIMKEKMGSIDLLLSPAKDCRHK

SEQ ID NO: 93715 - protein, 64 aa, Gossypium hirsutum
  Clone ID: LIB3147-019-Q1-K1-D5.pep
DKRNSLLEAMKVCLEGGLHGRVSNIRGVCQDPISGPNIKYCNLSVLTYNKLTNVPLAVHMLYLL

SEQ ID NO: 93716 - protein, 37 aa, Gossypium hirsutum
  Clone ID: LIB3147-019-Q1-K1-E2.pep
SHSEGNCKPSGHLVQLPLAVRCDYHTTFRININDVNV

SEQ ID NO: 93717 - protein, 52 aa, Gossypium hirsutum
  Clone ID: LIB3147-019-Q1-K1-F7.pep
FLIIKIAGKTSIFSNGNKFGKIVIVSGCMNKIPRNKLNVRDLYYKIKMGGCL

SEQ ID NO: 93718 - protein, 134 aa, Gossypium hirsutum
  Clone ID: LIB3147-019-Q1-K1-G11.pep
MVIQRSKMGGFKSEAIISFEEIPALLNTPKEEPDSQNDKVADNIKSKIINVDKILVPKEDLQQEVGTGKLPKAVDGSAGSTRMEFDAIEKDENREQNDLKKIFEPGCVFVQYRRTEASCMAAHSIHGRLFDNRV

SEQ ID NO: 93719 - protein, 68 aa, Gossypium hirsutum
  Clone ID: LIB3147-019-Q1-K1-G6.pep
KCSTSFHLKGGDFSKGITHVSCTMITYVQQIFAMIGACNLISKQNLIIIKTLEANKRNDFIKTYKGDL

SEQ ID NO: 93720 - protein, 102 aa, Gossypium hirsutum
  unsure (1)..(102): unsure at all Xaa locations
  Clone ID: LIB3147-020-Q1-K1-A5.pep
QQRQDVAYVRAYILALKDVXYRRGVTDEPAADAMMIAAVGNETKTLSTAALTDDKALRGLGTDEVHMNDETLMITDEDLPKCDKQLKLLRVNAQYEELTDDA

SEQ ID NO: 93721 - protein, 91 aa, Gossypium hirsutum
  unsure (1)..(91): unsure at all Xaa locations
  Clone ID: LIB3147-020-Q1-K1-A6.pep
EAEAEATSGAEKQPHKLERKWTFRFDIQSKPKQGAAXGTYLRKVYTFDTVEEFWSLYEQIFKRTKLLVNAYLHLFKAGIEPKWEDTECASG

SEQ ID NO: 93722 - protein, 121 aa, Gossypium hirsutum
  unsure (1)..(121): unsure at all Xaa locations
  Clone ID: LIB3147-020-Q1-K1-A7.pep
IMTRTFTNFSLQVRAGGDGANIEAPEHAERVLDANIGGYMVSVHLWQNVADAYYNRDTQSTHDKILDVXSYVEPGHLXSTEVVTSSALRLAHRQSVKYRSCLHGCSNDGEPWSHHHDIAIY

SEQ ID NO: 93723 - protein, 121 aa, Gossypium hirsutum
  unsure (1)..(121): unsure at all Xaa locations
  Clone ID: LIB3147-020-Q1-K1-B3.pep
DAWADAWADSWTDALSGKKGSKDSNLGGDMLSKIDMERAGVLVGTGMGRLTVLCDGIQNLMEQGYXTITSFFIPYAITNMSSALLAIDLGLMGTNYSMSTACATSNYCFYAAAKHIRRGEA

SEQ ID NO: 93724 - protein, 45 aa, Gossypium hirsutum
  Clone ID: LIB3147-020-Q1-K1-B7.pep
VYESTVAIQQLCSISFLMLSNQVVTGPLLVQGSRSAGTLSFLDHI

SEQ ID NO: 93725 - protein, 40 aa, Gossypium hirsutum
  Clone ID: LIB3147-020-Q1-K1-C1.pep
HLKRYLEPCNDMVFYLLSLSTILFYSFDIISLSLDVTMWA

SEQ ID NO: 93726 - protein, 58 aa, Gossypium hirsutum
  Clone ID: LIB3147-020-Q1-K1-C5.pep
NHCSGHIDRVGSWHVLICIHFSWSIICIMCRSHHMLLPICSSYRIQCMDSGKTVGSWN

SEQ ID NO: 93727 - protein, 56 aa, Gossypium hirsutum
  Clone ID: LIB3147-020-Q1-K1-D12.pep
LYLGLNICKLSLVCRFFLFGAFFFIFYLFLIFNFYFLMGPGEWASFRIKKKKKKNF

SEQ ID NO: 93728 - protein, 64 aa, Gossypium hirsutum
  Clone ID: LIB3147-020-Q1-K1-D4.pep
AQCVLMYGAWCFLIGSSSLSSIRKCSSSARGIGWSFITCSLVRNAHLSEWPPSCLHSQEAKTMP

SEQ ID NO: 93729 - protein, 100 aa, Gossypium hirsutum
  unsure (1)..(100): unsure at all Xaa locations
  Clone ID: LIB3147-020-Q1-K1-D5.pep
HASVHAFGKLERNKSVDTGRAVLDTCRGIRLTSDDMGLDAYSCKGLVNIGQQISHLGXGVHVHFIMRPGGIGAGDQRHLRVYTTDKTSELMPLTNFLPTQ

SEQ ID NO: 93730 - protein, 43 aa, Gossypium hirsutum
  Clone ID: LIB3147-020-Q1-K1-D6.pep
GPQYESETIDQVLTMPKKIFPNHWELKLLILSWKTLGSIILIF

SEQ ID NO: 93731 - protein, 69 aa, Gossypium hirsutum
  Clone ID: LIB3147-020-Q1-K1-D7.pep
CMALGFLLVVGNGSINPSNAAVCASAHRLIFRYSSPVLTSIFPNCPNGVYRQNKSKKCKEIKERLRGRV

SEQ ID NO: 93732 - protein, 48 aa, Gossypium hirsutum
  Clone ID: LIB3147-020-Q1-K1-E1.pep
KPETCINPIQFSCIQTSISICIKLTVFDKAVKVKNENKFPTRTSKPSK

SEQ ID NO: 93733 - protein, 63 aa, Gossypium hirsutum
  Clone ID: LIB3147-020-Q1-K1-E11.pep
CLPTEGTTFSPTMTKNNGVMKIKIVRKQVKIDSKSNHHLCKVRIVETPKTSTNTMTEVPGRVG

SEQ ID NO: 93734 - protein, 53 aa, Gossypium hirsutum
  Clone ID: LIB3147-020-Q1-K1-E2.pep
VQRGCQCLQMRVSRLKYARLKYDNAATIFQLMRLVIYRILDTASHRSDIICRT

SEQ ID NO: 93735 - protein, 41 aa, Gossypium hirsutum
  Clone ID: LIB3147-020-Q1-K1-E3.pep
AFLPSDQPIVFASRESTNTRGHTTRFVYNAACLLTLPAPLQ

SEQ ID NO: 93736 - protein, 93 aa, Gossypium hirsutum
  unsure (1)..(93): unsure at all Xaa locations
  Clone ID: LIB3147-020-Q1-K1-E4.pep
MVIGVEACLPLTAASASAMQMPCPCAGLQGLYGACADLTTIMGACGLYPYAXYLMQPQCSPVAAAPYYARCGQTSAMYHPLRRQGXQQQMTMM

SEQ ID NO: 93737 - protein, 37 aa, Gossypium hirsutum
  Clone ID: LIB3147-020-Q1-K1-E5.pep
DSPCFFFNCKRGGFSSSFHFAPKDRTHVVSIIQYQNL

SEQ ID NO: 93738 - protein, 46 aa, Gossypium hirsutum
  Clone ID: LIB3147-020-Q1-K1-F1.pep
SSSDVDAHIVAVYGRVMDSGSSNDQSMSQRMLAHQQRERRSTRSRI

SEQ ID NO: 93739 - protein, 59 aa, Gossypium hirsutum
  Clone ID: LIB3147-020-Q1-K1-F7.pep
ASADASEKKHRKIPLKLIPGSLRAAIEPMRYGHRTSTLRSTLRHRLHHTLWSELEEFNF

SEQ ID NO: 93740 - protein, 63 aa, Gossypium hirsutum
  Clone ID: LIB3147-020-Q1-K1-F8.pep
DPRVDPCVLTRIRPLFPRVETMQLCGKSLTVKTITFAVKRTRVVTSKERILYTLTEYKLSNNQ

SEQ ID NO: 93741 - protein, 78 aa, Gossypium hirsutum
  Clone ID: LIB3147-020-Q1-K1-G3.pep
PTRASKDLAFVSNVSSERTVENKERWLFNFMGKKGLEKPHDEVIVSDFEQVNTGTYMRKGKVRREQEASSHGKASPIR

SEQ ID NO: 93742 - protein, 86 aa, Gossypium hirsutum
  Clone ID: LIB3147-020-Q1-K1-G6.pep
QQVIILAQKAIDAQKPDISVSYALIGIALNKRALCGFFTFTPGIVCFELSQRVRYCTAPKEPCVLASAICGRPCHVFSRVLDYDRA

SEQ ID NO: 93743 - protein, 60 aa, Gossypium hirsutum
  Clone ID: LIB3147-020-Q1-K1-G8.pep
KFLTSSTSINRLILIVMLEMLSYSHILITHCYYHTVLDIITTFSPRNLRSRKQDLNRFMR

SEQ ID NO: 93744 - protein, 122 aa, Gossypium hirsutum
  Clone ID: LIB3147-020-Q1-K1-H2.pep
MEDYSINSSIHKSAISKDDSVEESGWTAYFEDFSNHQQQKDSYSYSFDCDSSLISDAATAWKSPHNIDHHHHVFPKKLRFKKTRTKEIYEEDDSLEDTASSPVNSPKVSDELKPNDMNPRKR

SEQ ID NO: 93745 - protein, 86 aa, Gossypium hirsutum
  Clone ID: LIB3147-020-Q1-K1-H5.pep
KSDNLLKTNTAKVRTCYSSLVYAREDFFLDPVTVVCDGHSSVELESVYAAPEVSPLAFHSVSATVVFLMVPTFTFLFMKLELPFVQ

SEQ ID NO: 93746 - protein, 125 aa, Gossypium hirsutum
  unsure (1)..(125): unsure at all Xaa locations
  Clone ID: LIB3147-020-Q1-K1-H6.pep
MGSSSKDLLRFEHHKSSSSPLESALLVCKKKDSESQTHEPDPSKKPPFTPFPKSQVLGKVKDFLGVMAEANKRLELDAKNNSQAYDIEVLNGNDSEVIEMDLMLGVADLHTXXALAAAESAIAGN

SEQ ID NO: 93747 - protein, 137 aa, Gossypium hirsutum
  unsure (1)..(137): unsure at all Xaa locations
  Clone ID: LIB3147-021-Q1-K1-B10.pep
IGFNVEFVEYINIFFTXEILGARCGLYFQNTQRLIFVVDNNDRDRVVKTRDELHKMLNXDDLRDAELLVFANKQKLPNAMNAAEINDKLGLHFLRQRHFYIHNTIFSFCXRLYQGLYXLSNNIAKQAYLKQLNRLLY

SEQ ID NO: 93748 - protein, 75 aa, Gossypium hirsutum
  Clone ID: LIB3147-021-Q1-K1-D10.pep
SLNFIQRHFNEWNLLTFSTTETPTKSIHSHSSRSIMNTIESTNNPLKTISVVLNFYRDMNILLKFFQSRKKLFNA

SEQ ID NO: 93749 - protein, 110 aa, Gossypium hirsutum
  Clone ID: LIB3147-021-Q1-K1-D11.pep
GKQPMALSVDHIPNREDEYERIEAAGGKVIQWNGHRVFGVLAMSRSIGDRYLKPWIIPDPEVVFVPRAKEDECLILASDGLWDVMSNEEACDLARRRILQWHKKNGTTLT

SEQ ID NO: 93750 - protein, 104 aa, Gossypium hirsutum
  Clone ID: LIB3147-021-Q1-K1-E10.pep
IIPILKTYFHYNFFPFYPYPPQKHHFMHYFSVFFFLLLHPTQPFLFPSAYSAALPPFYLSFTINQISFLSLCFFTFPSSPLIMVLSLKPILSSLVPEVSLSMPS

SEQ ID NO: 93751 - protein, 103 aa, Gossypium hirsutum
  Clone ID: LIB3147-021-Q1-K1-E12.pep
EAKKAKYCKKRHTIKQKKKVEFHSLVFLFLFFVLKLVFKIKNKKGKRKEDLPEPQSSVVGAPAPSLKSIPKGEENGLFSRARAKRTRPSGALNRGRTRGRTRG

SEQ ID NO: 93752 - protein, 66 aa, Gossypium hirsutum
  Clone ID: LIB3147-021-Q1-K1-F11.pep
PRVRPAYPSSAFPPPPSAYPPPHSAYPPPPSAYPPPPSSYPPSTYPQQSPYYPPGPFPGHYPPPPY

SEQ ID NO: 93753 - protein, 94 aa, Gossypium hirsutum
  Clone ID: LIB3147-021-Q1-K1-F12.pep
DHPRVRRALFFFFFSYIYPFSPTKKTNRILFTLHHLPHTLQHTYHIPHLRIHNNHPIIRQILSLIIIPHHRTKTYNYETIPYLSIISLLNQKHK

SEQ ID NO: 93754 - protein, 92 aa, Gossypium hirsutum
  Clone ID: LIB3147-021-Q1-K1-F9.pep
KNLHLLLTFCFPQRLKDFGSHCQAASVLYPTYWCIHYIHRRRSSWKKVVNRPIYQKKGKLLKRSNIILGLQITILPDETFFLHVLIVTYFLM

SEQ ID NO: 93755 - protein, 79 aa, Gossypium hirsutum
  Clone ID: LIB3147-021-Q1-K1-G10.pep
RAGAYLFLTSLSFIGALYILVIVVFGVRPLTHIILHSSQRLCSTLAPRFYPATQKSRSCTPLFVVHMMMPRADGFTRPS

SEQ ID NO: 93756 - protein, 69 aa, Gossypium hirsutum
  unsure (1)..(69): unsure at all Xaa locations
  Clone ID: LIB3147-022-Q1-K1-A2.pep
WGVLTGDERNRLSGADKKVNDARRASWRIVSSIEQKDESXXNEDHVASIKKSGSXIVAELMKMCDGRLS

SEQ ID NO: 93757 - protein, 68 aa, Gossypium hirsutum
  Clone ID: LIB3147-022-Q1-K1-A6.pep
LNNSNAIHCLNMGFSPHSETTRIITKHKNLVTGWLRINLFGNFLYIFTLQQQEVLEINDGFSYVKIAF

SEQ ID NO: 93758 - protein, 73 aa, Gossypium hirsutum
  Clone ID: LIB3147-022-Q1-K1-A7.pep
VTKYNMSLTPTSHINMQTHTRTLCNNNARGDGTGGWKCCLIKCRDLFSLGREYPRVLRFIRMESVPNQPNGSC

SEQ ID NO: 93759 - protein, 54 aa, Gossypium hirsutum
  Clone ID: LIB3147-022-Q1-K1-B1.pep
ITQPNRSQYKNINKLERQITLIADYKYEMQNTENGTTAEIPGKKRKLPIQPHNH

SEQ ID NO: 93760 - protein, 46 aa, Gossypium hirsutum
  Clone ID: LIB3147-022-Q1-K1-B11.pep
AAVTESLELHKIKNRQWAILKTSAIKGEGLFEGLDWLSNTLKSGSG

SEQ ID NO: 93761 - protein, 57 aa, Gossypium hirsutum
  Clone ID: LIB3147-022-Q1-K1-B7.pep
GWRLEHVHDAPGIACLSDKLSCNWHMGRRERLEHVQARETGGGGIKDEQPVRVMRGL

SEQ ID NO: 93762 - protein, 105 aa, Gossypium hirsutum
  unsure (1)..(105): unsure at all Xaa locations
  Clone ID: LIB3147-022-Q1-K1-C7.pep
FQLKANEAKLEAERLQRIARGKFDELGEQYAIKYLXLQLSEAKAEKQYLLEKLKLQEFXQTLQRSSGGDPXLMYSKIRDXLHGYNMIAAETESQPNERHRFRANP

SEQ ID NO: 93763 - protein, 101 aa, Gossypium hirsutum
  unsure (1)..(101): unsure at all Xaa locations
  Clone ID: LIB3147-022-Q1-K1-D1.pep
XLKXKNEAVSTKSPIFMKSIALTSSPIVLQYDSTPNRFGGTHCVKRLKRIKRIDFSLRLSQLRHSYLFPLISLLNKSLQLTFSSSXRSXXTNHGRRAGRXR

SEQ ID NO: 93764 - protein, 43 aa, Gossypium hirsutum
  Clone ID: LIB3147-022-Q1-K1-D12.pep
NLFCRCSNISNSTLIMQKANEVCRYILRKNINPKQHPPQCLNK

SEQ ID NO: 93765 - protein, 84 aa, Gossypium hirsutum
  unsure (1)..(84): unsure at all Xaa locations
  Clone ID: LIB3147-022-Q1-K1-D4.pep
VLRERWCLEVERLGLSAVIMGSRGFGAEKRGSDGKLGSVSDYCVHHCVCPVXVVRYADDKDVGNAQPVVTVRQAEVEEEGGKDA

SEQ ID NO: 93766 - protein, 54 aa, Gossypium hirsutum
  Clone ID: LIB3147-022-Q1-K1-D5.pep
SNSKRSLQTPLRVLFVCKFDGTRSFVLSSSLLIPPLSRSTSISLSLVNKGSIQK

SEQ ID NO: 93767 - protein, 67 aa, Gossypium hirsutum
  unsure (1)..(67): unsure at all Xaa locations
  Clone ID: LIB3147-022-Q1-K1-F10.pep
SWSRNQFCTTPTPTHCGKFGINGNGCDDGGDAYNHPTQNIGGVGNNLQTSISQLLSPXNHPLSHNTL

SEQ ID NO: 93768 - protein, 73 aa, Gossypium hirsutum
  unsure (1)..(73): unsure at all Xaa locations
  Clone ID: LIB3147-022-Q1-K1-F8.pep
MLVYQDLIYGGELRSDSFPYEEIENGMLWDVEGKCVVQRAAHVYMDANPSAECADEDESVHDQAVKXVVDIVD

SEQ ID NO: 93769 - protein, 49 aa, Gossypium hirsutum
  unsure (1)..(49): unsure at all Xaa locations
  Clone ID: LIB3147-022-Q1-K1-G1.pep
LHLNAPPFYNQLHYLNHPKPLTKXKFFTILNFFTFSSLFTKTEXDPLFL

SEQ ID NO: 93770 - protein, 54 aa, Gossypium hirsutum
  Clone ID: LIB3147-022-Q1-K1-G12.pep
IPVSKASTITRDQKLSRKIKKFFYQPFVLKFFIFSCKHCEHSLNFLSPSVFHWV

SEQ ID NO: 93771 - protein, 76 aa, Gossypium hirsutum
  unsure (1)..(76): unsure at all Xaa locations
  Clone ID: LIB3147-022-Q1-K1-G9.pep
PLIFTTRLLAYAAPALHYPLSCXTRQIDKGMQVQPSKFMKKHFRNLDIHESNTHPNSIHFHVQLMQSASISKTISK

SEQ ID NO: 93772 - protein, 135 aa, Gossypium hirsutum
  unsure (1)..(135): unsure at all Xaa locations
  Clone ID: LIB3147-022-Q1-K1-H9.pep
KTGQPQPYGYGNKRIGPNGDVGWVEYLLLTTNQDPNLLGTENPESFRIALDNYMAAVKKMACEILEMIADGLKVQPRNVLSKLMMDEQSDSVFRLNHYPPCXEVVQSLNGTSSNVIGFGEHTDPQIISVLRSNNT

SEQ ID NO: 93773 - protein, 46 aa, Gossypium hirsutum
  Clone ID: LIB3147-023-Q1-K1-A1.pep
KCLKFSPITRTAQNMTGPMHYPISQTQPKVKTQLQAQSYNYQNPTK

SEQ ID NO: 93774 - protein, 44 aa, Gossypium hirsutum
  Clone ID: LIB3147-023-Q1-K1-A10.pep
TKIKEKKITQPPVFFPRPIWSPEAEKSSYHRLSHKSDASAAPGF

SEQ ID NO: 93775 - protein, 74 aa, Gossypium hirsutum
  Clone ID: LIB3147-023-Q1-K1-B1.pep
CSWQERIKFTYISMDCMRFHLPTMYIWFAFTHIARMYEDCPNIELIQLIKKWCRSRPPPSRVVRLRIQGLLIVD

SEQ ID NO: 93776 - protein, 58 aa, Gossypium hirsutum
  Clone ID: LIB3147-023-Q1-K1-B11.pep
TSSRSSTKTLGNFVNPTFEFLLKTYPFFTPDFSKKTLFTMSPFHEYTHLLTKPSKTLV

SEQ ID NO: 93777 - protein, 54 aa, Gossypium hirsutum
  unsure (1)..(54): unsure at all Xaa locations
  Clone ID: LIB3147-023-Q1-K1-B12.pep
NKIKSPVLSVTXXTHXDGPNASRSEIPLRAGHYPTRFIFQHKVPDAWAYASPPR

SEQ ID NO: 93778 - protein, 75 aa, Gossypium hirsutum
  unsure (1)..(75): unsure at all Xaa locations
  Clone ID: LIB3147-023-Q1-K1-C5.pep
LFFHHAHHKNKLVHFHCNASDPSTVVSVSDYCDNTAGRRTLQIXPISDLIYTPXDDVLPYLHKFKYHIISCSSKP

SEQ ID NO: 93779 - protein, 107 aa, Gossypium hirsutum
  unsure (1)..(107): unsure at all Xaa locations
  Clone ID: LIB3147-023-Q1-K1-C8.pep
ATPTFTPTMMPPTPGATPPGRDSNGDRAAIYATPYTIPHTTPPSVMSYPLTETTAYTPNYTQMQPHEVPDQSAQPACQYLLKTLVCTVKXKCKSHRPYHRSAKPVPY

SEQ ID NO: 93780 - protein, 129 aa, Gossypium hirsutum
  Clone ID: LIB3147-023-Q1-K1-E6.pep
PESKSHLTEEPAKKKLKKKMSLTWLADGSEMKKSPSRQPIEVRKCLHCEVTKTPQWREGPMGPKTLCNACGVRFRSGRLLPEYRPAASPTFVPALHSNSHKKVVEMRKQANLPTTGTPPMLSIPAPISM

SEQ ID NO: 93781 - protein, 51 aa, Gossypium hirsutum
  Clone ID: LIB3147-023-Q1-K1-F11.pep
KTGALFFFFFFFFFFFFFFFFFFFFFFFFFFFFFFFFFFFFDETTFSLHVN

SEQ ID NO: 93782 - protein, 80 aa, Gossypium hirsutum
  unsure (1)..(80): unsure at all Xaa locations
  Clone ID: LIB3147-023-Q1-K1-G2.pep
TIHGKDASSSSDSHHDKPTSLPPLTLTIYRXIGKDRPFHHVLGLGKPADPFLRSNTIISTCVLYETTATXVLIQLIAYHL

SEQ ID NO: 93783 - protein, 69 aa, Gossypium hirsutum
  Clone ID: LIB3147-023-Q1-K1-G3.pep
LVCCPPLSLCFSASDSPHQLGRLVTEGAWLHGAMFRRMGFECNYAKAFRVNRKVESIFHSLQFVEYYFN

SEQ ID NO: 93784 - protein, 86 aa, Gossypium hirsutum
  Clone ID: LIB3147-023-Q1-K1-G4.pep
SIILKLLIHLLELTMIPITLMITLLNYINLTLNITYFPIILPTYLSFFVLKFSFKTTIVLSLLSKMLLPIQKLTLTFCCLYDSSQI

SEQ ID NO: 93785 - protein, 78 aa, Gossypium hirsutum
  Clone ID: LIB3147-023-Q1-K1-G8.pep
GITKFKSHLSSPWEASSCRLRQGRTEATRGSFSPMLNIQTKLNLELLKEENKRSHNLLNFLEKASTSRPLNKTREFRN

SEQ ID NO: 93786 - protein, 50 aa, Gossypium hirsutum
  unsure (1)..(50): unsure at all Xaa locations
  Clone ID: LIB3147-023-Q1-K1-H12.pep
RSLIDLSIWTIFTKRHLKSFFQGARLVGEPIAQPLQKKAPPPXDISXXSS

SEQ ID NO: 93787 - protein, 41 aa, Gossypium hirsutum
  Clone ID: LIB3147-023-Q1-K1-H4.pep
FFSVILLYYRQYFIQDKIGKHIDLAISTETTKEHKKVWMMP

SEQ ID NO: 93788 - protein, 69 aa, Gossypium hirsutum
  Clone ID: LIB3147-024-Q1-K1-D10.pep
KINSSDKIIIYSFIFFVVRPIFFFIVFFFFFFNIIYFFFFFFFIIFYFFFFFFFFFFFFFFFFKTQTLP

SEQ ID NO: 93789 - protein, 40 aa, Gossypium hirsutum
  unsure (1)..(40): unsure at all Xaa locations
  Clone ID: LIB3147-024-Q1-K1-D12.pep
HXFXXSWSYVYSKXXTHRGPQYLFSPIIKSCIYRYSRLVL

SEQ ID NO: 93790 - protein, 50 aa, Gossypium hirsutum
  unsure (1)..(50): unsure at all Xaa locations
  Clone ID: LIB3147-024-Q1-K1-D7.pep
ICFLISSVLFLGGCVVLSIRVFFVGGISGLKFRVGGVXXXXKKKGQPLAI

SEQ ID NO: 93791 - protein, 71 aa, Gossypium hirsutum
  Clone ID: LIB3147-024-Q1-K1-D9.pep
KDFKEASSKKGSSVISLWLTAQDTTVIVVVVVVEVKSMGILLGFFCLSKNKSKKKIILSSLLSSVSCYYSF

SEQ ID NO: 93792 - protein, 51 aa, Gossypium hirsutum
  Clone ID: LIB3147-024-Q1-K1-E3.pep
MMVCKCCDSRNSCVLFLPCRHLCTCKDCAAFLDCCPVCRTVKKASIEALVS

SEQ ID NO: 93793 - protein, 56 aa, Gossypium hirsutum
  Clone ID: LIB3147-024-Q1-K1-E8.pep
MFPRHKELLVKKVVDVAREMAKAELPPYRSHLDVVVACEDDDDNDIDIPQVSIYYG

SEQ ID NO: 93794 - protein, 123 aa, Gossypium hirsutum
  Clone ID: LIB3147-024-Q1-K1-F10.pep
NERKSPSAERDDDTESLSFAVEMAKVASDVKAADIRVLFVKPLVYWSRFFIIATAFSRPQIDAIGSRIRDLAEKKYGKVPSGDAKPNSWTLLDFGDVVVHIFLPQQRAFYNLEEFYGNATLIE

SEQ ID NO: 93795 - protein, 123 aa, Gossypium hirsutum
  Clone ID: LIB3147-024-Q1-K1-F2.pep
LNCPFCPTDIFEFLQNLQVNGERVDVIESLKQKSEENQEPAEELSEEQINGSVENAYLDSGDGETGKKNENADPEGDSQNPPLDCETERSSKRRKVDTAQVTNDENDSPSSILQVQSSEGDIE

SEQ ID NO: 93796 - protein, 71 aa, Gossypium hirsutum
  Clone ID: LIB3147-024-Q1-K1-F8.pep
PRVRALVIQSLAANLGVGTGEHLAEHCRTEYPRGPNFVLWVLAEIAIVACDIPEGDHKILKAKQAEFFIAT

SEQ ID NO: 93797 - protein, 54 aa, Gossypium hirsutum
  Clone ID: LIB3147-024-Q1-K1-F9.pep
ILLQTPTSRRGVLINLSQISNNDFISMHLLDLHTYKHSIPLMIKKSLPETIHIL

SEQ ID NO: 93798 - protein, 52 aa, Gossypium hirsutum
  unsure (1)..(52): unsure at all Xaa locations
  Clone ID: LIB3147-024-Q1-K1-G3.pep
FFFFXXTENISIMHQSFVEFIPITYIHHFSMELNSLLDFTLLLVLLRIHXTV

SEQ ID NO: 93799 - protein, 138 aa, Gossypium hirsutum
  unsure (1)..(138): unsure at all Xaa locations
  Clone ID: LIB3147-024-Q1-K1-H3.pep
VKEDLTGEEAFEAKKRKLANLEMALLANPEANIKSLKEMLQFAKDGDHSILKLGLLSLLAVFKDIIPGYRIRLPTEKELEMKVSKEVKKMRFYESTLLSAYKGYLQKLLALEKQPXFHQCWGSCICTLLDACPHFNFK

SEQ ID NO: 93800 - protein, 94 aa, Gossypium hirsutum
  Clone ID: LIB3147-024-Q1-K1-H5.pep
SGFNLLFNIIQLKCFQKKKNSKNSSLPGMSYLGKFSFFFLPIFVSFLESFLCSFFRIFLGFFFIRIFSIIFTFNNHSTMYKAIQTLIRIVQLFI

SEQ ID NO: 93801 - protein, 92 aa, Gossypium hirsutum
  Clone ID: LIB3147-024-Q1-K1-H8.pep
GRPTRADKPDFEPIAAFGIEIWTIEDRILFDNILIAKNDKVAESYRETTWKPKFEVEKEKQNADDESTDSYGLLCFHMYVFDVPFTWFLFFY

SEQ ID NO: 93802 - protein, 79 aa, Gossypium hirsutum
  Clone ID: LIB3147-026-Q1-K1-A12.pep
STHAFDSTHVSTTHCGRLIFRAAAYSSTIHATNKSYIYNTNDLLLKIDAGICNYNYILPHCNHNLLKKTCAYYPHKNLD

SEQ ID NO: 93803 - protein, 101 aa, Gossypium hirsutum
  Clone ID: LIB3147-026-Q1-K1-A2.pep
HASAHASGSIWDASSWATEDGEYKADYNYQPFVAKFTSFKAGGCSAYSSPRCRPVFASPHRSGRLTMQQYKAMKWVQRYHLVYDYYKDPKRNHALTPECWN

SEQ ID NO: 93804 - protein, 41 aa, Gossypium hirsutum
  Clone ID: LIB3147-026-Q1-K1-A3.pep
RLEISIPTVMATTRGAVNAVEKHYLCSEFPYVDNFTKKKLR

SEQ ID NO: 93805 - protein, 58 aa, Gossypium hirsutum
  Clone ID: LIB3147-026-Q1-K1-A4.pep
KKSCIKLYKIKVHKYNCTLNHSSCIVLRFIPILNDSKQKKISSEAEKLNMNKLNNYST

SEQ ID NO: 93806 - protein, 53 aa, Gossypium hirsutum
  Clone ID: LIB3147-026-Q1-K1-A9.pep
QINCQHTRFLSLWYITKKFLFSEPTLLYNKTHFAFGRFFIIKIARQKGRRTHE

SEQ ID NO: 93807 - protein, 107 aa, Gossypium hirsutum
  unsure (1)..(107): unsure at all Xaa locations
  Clone ID: LIB3147-026-Q1-K1-B10.pep
DHPRVRAHCTNKSIQTTFTGELMASTSKSRDRLLILATTFLLCLLAAISSISPTYFLPEWSIPHNPLPSYRYYVTSPTCRIVPPLPLPELKRRFFLXLSDIPAYCRY

SEQ ID NO: 93808 - protein, 64 aa, Gossypium hirsutum
  Clone ID: LIB3147-026-Q1-K1-B4.pep
GYIDYGLVEGGINFFEQIQDTAEPDKYIMSAAVHIYKFAGKEPEASSVQDSMNNFGIPIFGITS

SEQ ID NO: 93809 - protein, 98 aa, Gossypium hirsutum
  unsure (1)..(98): unsure at all Xaa locations
  Clone ID: LIB3147-026-Q1-K1-B9.pep
ERDDPRVRAHGTNKSIQRPFTGELMASTPGGSDRRLMLAATILLCLLAAISASAGTYFLPGWAIPYNQLTSXRCYMTSRTCRIVPRLPWSELKRKCCL

SEQ ID NO: 93810 - protein, 123 aa, Gossypium hirsutum
  Clone ID: LIB3147-026-Q1-K1-C12.pep
HASAHVVIIPLFQQLSCHPTTPHNSTTPVLISKTNTSSPYQTLRSPAFLPPIMAMKSMQGQFFCATNDKTIAIEIVPLTPHPKYTKPFIKKKKFQSHHPHNQFKVCDYIHLYKSPPIINTKTF

SEQ ID NO: 93811 - protein, 144 aa, Gossypium hirsutum
  Clone ID: LIB3147-026-Q1-K1-C3.pep
ADHLITKRIMSVTKTRKFLNTGGFIVSSLALMALPIFRTSAGAIFCSSVALGFLALGRAGFAVNHMDIAPKYAGIVMGVSNTAGTLAGIIGVDMTGKLLEAAKAEYSDLSSPESWRTVFVIPGLLCVFSSFIFLLFSTGERIFD

SEQ ID NO: 93812 - protein, 52 aa, Gossypium hirsutum
  Clone ID: LIB3147-026-Q1-K1-C6.pep
CNIRSQGRAMLFYCKIHHFAILYLYVDTFPVSTYFLIFMQVDWYSSSLKQQN

SEQ ID NO: 93813 - protein, 47 aa, Gossypium hirsutum
  Clone ID: LIB3147-026-Q1-K1-C7.pep
FYEILIYFFLMKKDPFFFFFLYFSKSKIGVFLKGYKILKQRGRKEFI

SEQ ID NO: 93814 - protein, 70 aa, Gossypium hirsutum
  Clone ID: LIB3147-026-Q1-K1-C9.pep
ASSFLATQKLQLLSAQGSFLQFSLSLHILLTQQSLLIYSLISYIILTYDYPFINDSCTLSQTHLFNPISS

SEQ ID NO: 93815 - protein, 83 aa, Gossypium hirsutum
  unsure (1)..(83): unsure at all Xaa locations
  Clone ID: LIB3147-026-Q1-K1-D2.pep
RPRVHSPPPPYFYXSPPPSMEGRXPTYHYSSPPPPXPFPPPQYYYKFPPPQAHFPSPPFYYKFPPSICPSHTFYIIIPLTSHT

SEQ ID NO: 93816 - protein, 113 aa, Gossypium hirsutum
  Clone ID: LIB3147-026-Q1-K1-D4.pep
VSIMFLRNAFLVVIVNEKDRRVVELNSIENGRIWKGYDVLIFDTWHWWLLTGRKQPWDYVQDNNITRKNMHRTVAYKKALSTWARWVNLNVDPAKTKVFFQGVSPDHVDSRDW

SEQ ID NO: 93817 - protein, 114 aa, Gossypium hirsutum
  unsure (1)..(114): unsure at all Xaa locations
  Clone ID: LIB3147-026-Q1-K1-D6.pep
VIYFVFTSPTNALEEEHFFPFYHTEIRIQYAKTKSDIIAKAYGSFVPREKRKMHDXNGGKKPKQHLDPNQAAASLNPSYADAYGATPSLSQIPYLGARPIVAEAPAPPNNILFV

SEQ ID NO: 93818 - protein, 34 aa, Gossypium hirsutum
  Clone ID: LIB3147-026-Q1-K1-D9.pep
ITSNLSRRTLLSYSCIQHHRVLIASHTTNSLSIY

SEQ ID NO: 93819 - protein, 41 aa, Gossypium hirsutum
  Clone ID: LIB3147-026-Q1-K1-E2.pep
CLDYISYATLSILLKTHNVLFWRHYHSLISGLEIDSLKVEP

SEQ ID NO: 93820 - protein, 53 aa, Gossypium hirsutum
  Clone ID: LIB3147-026-Q1-K1-E5.pep
FIKEVFIIKLFCFIYNFFYFLYFFLLFFFFFFFFFFLCLNCPFIAFISLILYF

SEQ ID NO: 93821 - protein, 61 aa, Gossypium hirsutum
  Clone ID: LIB3147-026-Q1-K1-E6.pep
VLTITYQQKAICSSAGYPLKTRLEFKLAEHKKNAKHLISSNPSELVVKHYIQPKSFLKPTI

SEQ ID NO: 93822 - protein, 127 aa, Gossypium hirsutum
  unsure (1)..(127): unsure at all Xaa locations
  Clone ID: LIB3147-026-Q1-K1-E7.pep
VHKLVLNICVCESSDRLTRATKVLEQLIDHTPVFSKARYTVRSFRIRHNEKIACYVTMRGEKAMHLLESGLXFRKFYFLKKTSXDTRFFRXGIQEHIDLGIKYDPSTGIYSMDFYVVLXRAGFRVGR

SEQ ID NO: 93823 - protein, 67 aa, Gossypium hirsutum
  Clone ID: LIB3147-026-Q1-K1-E9.pep
HASVEGYPKPVTTYSSVFSASQSTPGARIKSYITANPNLHPFIHQITILCHINLKIYFHTISHNIFT

SEQ ID NO: 93824 - protein, 138 aa, Gossypium hirsutum
  Clone ID: LIB3147-026-Q1-K1-F11.pep
EPLKLDIVISFPDHGFHLRFDRWSQRLRLIEIFDIKRLQMRYATSLIGGPSTLATFVAVYALFGPTYPGTYDKDRGVYTLFYPGLSFAFPIPSQYSDCCHDGEAELPLEFPDGTTPVTCRVSIYDSSAGKKVGVDPYG

SEQ ID NO: 93825 - protein, 86 aa, Gossypium hirsutum
  Clone ID: LIB3147-026-Q1-K1-F12.pep
PTRPPTRPPAEPAFSWMITLETVTLPIPSLTTTPDPNLKSSLLKPTSKLILISSPEEGTHTSLVTSLSIRPKGRHRTLVAGSLSRH

SEQ ID NO: 93826 - protein, 80 aa, Gossypium hirsutum
  unsure (1)..(80): unsure at all Xaa locations
  Clone ID: LIB3147-026-Q1-K1-G11.pep
PTTTTRTVLYLYKEAALYPNNDYNXLSKHPHIYVPNLSLIKLMHNFHYKEYITQTFSCHNYYXDLTNNVIQHLLNYLNLP

SEQ ID NO: 93827 - protein, 74 aa, Gossypium hirsutum
  unsure (1)..(74): unsure at all Xaa locations
  Clone ID: LIB3147-026-Q1-K1-G2.pep
RVRLYRXPPFFFFFFFFXFFFFFLRSFFFFFFKKKKQPFILLNPNLKYIPLFFATFKSKFNTNIFLQTFNNQHV

SEQ ID NO: 93828 - protein, 76 aa, Gossypium hirsutum
  unsure (1)..(76): unsure at all Xaa locations
  Clone ID: LIB3147-026-Q1-K1-G3.pep
YXKEDIXLLRVLLLHSITGKLVTFXKEKEGLKLELEKSSAERPSKLKGVIDPSIRGTFADESMNTTVESAIKSPSK

SEQ ID NO: 93829 - protein, 82 aa, Gossypium hirsutum
  unsure (1)..(82): unsure at all Xaa locations
  Clone ID: LIB3147-026-Q1-K1-G7.pep
VRLWFFKGFPEVLSLEDVERFLGRCEYDSAAXQTVTFSCPVFTNLVRLTTXQFPSHIQAMNACISKNRKICLNNQISVRVLY

SEQ ID NO: 93830 - protein, 88 aa, Gossypium hirsutum
  Clone ID: LIB3147-026-Q1-K1-H11.pep
HSLASGKIYGGGGFNYIKESFENGTLHLIGLLSDGGVHSRLDQLQLLLKGVSERGAKKIRVHILTDVRDFIDGSSISFADTLYIDLLE

SEQ ID NO: 93831 - protein, 80 aa, Gossypium hirsutum
  unsure (1)..(80): unsure at all Xaa locations
  Clone ID: LIB3147-026-Q1-K1-H5.pep
XPPTRKVGKRTTGPPGKRAXCVLPXQQGNNTAEXTXGGXSPGRKKNKAKGYGKPGLHKAGTKAKKXVRGKAHDGVVTKMP

SEQ ID NO: 93832 - protein, 57 aa, Gossypium hirsutum
  Clone ID: LIB3147-026-Q1-K1-H6.pep
ITFFFEIVTPFFFFSCIFSFSFICFFFFLFFFFFFLCFFLRMIKHHSFSSRHINMLH

SEQ ID NO: 93833 - protein, 107 aa, Gossypium hirsutum
  unsure (1)..(107): unsure at all Xaa locations
  Clone ID: LIB3147-026-Q1-K1-H9.pep
MQTTRVPVLILIALSASVXNATIFPQCXQAPIPTLLASYLTSMIASVCENPTLQPYRLQQAISASNIPLSPSFQQSSTLSMVQSLVQNIMAQQLQQLLLPVINQITF

SEQ ID NO: 93834 - protein, 49 aa, Gossypium hirsutum
  unsure (1)..(49): unsure at all Xaa locations
  Clone ID: LIB3147-027-Q1-K1-A2.pep
MNFFLIADLQQMSSLINNNHISSTIXKKKKKKKKKKKKKKKKKGKGRPI

SEQ ID NO: 93835 - protein, 117 aa, Gossypium hirsutum
  unsure (1)..(117): unsure at all Xaa locations
  Clone ID: LIB3147-027-Q1-K1-A4.pep
FFQVKDLPRGKHPVQLKSNLPSSPHKFESEVIEVDLEKNAQVHVGPLKYSVEEYHHKQELTPAPVFPLIVGVSVIILFLSIPRLKDIYQAATGIXTPGFMTTAKKEPRKPVVRKKTF

SEQ ID NO: 93836 - protein, 135 aa, Gossypium hirsutum
  Clone ID: LIB3147-027-Q1-K1-B1.pep
PLKYLNVSGCNQIGDAGIVAVARGCPNLTYLDVSVLQNLRDIALTELGEGCPLLKDIVLSHCHQITDIGLSHLVKNCQMLESCHMVYCPSITAAGVATVVSSCPNIKKVLVEKWKVSPRTKRRASSVLSYLCVDL

SEQ ID NO: 93837 - protein, 69 aa, Gossypium hirsutum
  Clone ID: LIB3147-027-Q1-K1-B10.pep
LYGIECLNLENFHYCPRLMYGTADFSLSRDRLGIFCDKLPAVTLPLQILPHLFVGYYQVNKCISIDAVQ

SEQ ID NO: 93838 - protein, 42 aa, Gossypium hirsutum
  Clone ID: LIB3147-027-Q1-K1-C2.pep
NHSLKPITHPVINKNPVHTLLVVNQLSWIENLNNILWLRVQN

SEQ ID NO: 93839 - protein, 117 aa, Gossypium hirsutum
  unsure (1)..(117): unsure at all Xaa locations
  Clone ID: LIB3147-027-Q1-K1-C3.pep
LPLNQYRQMSQHFQLHLQLNWRPSTPDISACSCKFSSDELASSKTSSTGSSVSPEXPASLTFTSSLATLSSAILLLPLLPHFPFSQMLLQKTLTQEEDEKKEREAIITTNHLVFMGQ

SEQ ID NO: 93840 - protein, 84 aa, Gossypium hirsutum
  Clone ID: LIB3147-027-Q1-K1-C4.pep
TRPNYWWGQDAFNMALTLNFKGDSAFNHLFKMARPYLGSKVMEGKSGEKMLRFKIVNGNLEVPEDCLREADYFSGKPLSTGLLR

SEQ ID NO: 93841 - protein, 119 aa, Gossypium hirsutum
  unsure (1)..(119): unsure at all Xaa locations
  Clone ID: LIB3147-027-Q1-K1-D3.pep
PRVRPNVDLLGIVAPTSNSGGYFLNLHKATGHPILVYMAAGRFADDLEKFSDEXPVNFVMSQLKKMFPDATEPVQYLVSHWGTDPNSLGCYSYDPVGMARDVYDKLREPLDNLFFGGEA

SEQ ID NO: 93842 - protein, 33 aa, Gossypium hirsutum
  Clone ID: LIB3147-027-Q1-K1-E1.pep
LELRMLKIIKENNCLVIDALIHPAQILCSLKLF

SEQ ID NO: 93843 - protein, 131 aa, Gossypium hirsutum
  unsure (1)..(131): unsure at all Xaa locations
  Clone ID: LIB3147-027-Q1-K1-E2.pep
HASAHAHASDKGVKAISRDWKEEKTHVSSLNQERQALENQIVKDKEARXSLXTNLEEATNSLDEVNQKILKLSRDLEIANAKISSLEDEKMVLYKTLTEQKNASKEARENMEDAHSIVMTLNKERESLESE

SEQ ID NO: 93844 - protein, 76 aa, Gossypium hirsutum
  Clone ID: LIB3147-027-Q1-K1-E5.pep
KNGKGKTGSTIKFLGQRKNLGIIVNKNGRKKNQVPKLYRKEKQNLQTVSCLFFLTVYSFFLQLIAKNKKMEKECLL

SEQ ID NO: 93845 - protein, 29 aa, Gossypium hirsutum
  Clone ID: LIB3147-027-Q1-K1-E6.pep
IISAHCYIIKLNKLTIILTWTNRRTRGAR

SEQ ID NO: 93846 - protein, 86 aa, Gossypium hirsutum
  unsure (1)..(86): unsure at all Xaa locations
  Clone ID: LIB3147-027-Q1-K1-F2.pep
KNLGNEKLKKLNLEKGKGNKIEFVXXGGPPFLKTQLYSPSLQPFNFFIFAPNFNFPPRLLQPLALKTPSFPQFNCFATHSPFPNLP

SEQ ID NO: 93847 - protein, 60 aa, Gossypium hirsutum
  Clone ID: LIB3147-027-Q1-K1-G7.pep
LNSWECALEMLFYFYIFEGCIHKLRLTRFMVSLTFFVLHRFFIDYGNEKLDGSHVFYYAL

SEQ ID NO: 93848 - protein, 35 aa, Gossypium hirsutum
  unsure (1)..(35): unsure at all Xaa locations
  Clone ID: LIB3147-027-Q1-K1-H10.pep
RTTCYRQQELWGSCIVSGNDANNIITIFSQHQSXS

SEQ ID NO: 93849 - protein, 79 aa, Gossypium hirsutum
  Clone ID: LIB3147-027-Q1-K1-H3.pep
INNNNMLFETALMKERSMTVTNMACLHSSDSRYQGNIKSGSVRAGYKKLTTTGCNLAHFGFIVYYRNRRLGKNSCRHKE

SEQ ID NO: 93850 - protein, 55 aa, Gossypium hirsutum
  Clone ID: LIB3147-027-Q1-K1-H5.pep
PNGICLRFILNACTLYKGKFYPLTYLTAYELCIMLAISSTVFGYNYNSIYIWELR

SEQ ID NO: 93851 - protein, 62 aa, Gossypium hirsutum
  Clone ID: LIB3147-027-Q1-K1-H8.pep
AIKKVQRSLACFLCLVMVISYQRGVQSTEARRGQSLRDKLQGGCVSSHNWPMVLNDKGTSRG

SEQ ID NO: 93852 - protein, 122 aa, Gossypium hirsutum
  unsure (1)..(122): unsure at all Xaa locations
  Clone ID: LIB3147-028-Q1-K1-A12.pep
SPTRPLAGFLISLTQVSSTTQRVLPLSLNFIICALFGVTFRYAIRRDLDNFQLKTGTYAAFGFVKGLATLGGGXPLELHPVSYLSHAVDGAVYVSHXIFAFLFAADALDFCIKMRILSSFSM

SEQ ID NO: 93853 - protein, 57 aa, Gossypium hirsutum
  Clone ID: LIB3147-028-Q1-K1-E1.pep
LSCDDGAAKESLTQSRRMMTPDVTFDRPKAHRSPRRYGRILRVAFSISSVERGDRIG

SEQ ID NO: 93854 - protein, 56 aa, Gossypium hirsutum
  Clone ID: LIB3147-028-Q1-K1-E11.pep
CPSNPETTFPIVVTLFSFTLVSIKQTISTLNSFILFITLMYLRGLLKPLTFQKRIN

SEQ ID NO: 93855 - protein, 45 aa, Gossypium hirsutum
  Clone ID: LIB3147-028-Q1-K1-E2.pep
FCHLHEDASNHPYYQCMHCSRDSARVNRLILMADAYLLDGSYLWL

SEQ ID NO: 93856 - protein, 149 aa, Gossypium hirsutum
  unsure (1)..(149): unsure at all Xaa locations
  Clone ID: LIB3147-028-Q1-K1-E7.pep
SECKVLSISGMGGLGKTTLAKKIYRQSHVVGHFKHXAWAYVSQNCHKRKVWEDILSDFNLLSEVDKKMNVEKLAXKLSNFLEENKCLVVLDDFWNTESWDSLKPAFSAWDTRSKTLLTFLNTXIFSHADSQGFLYESQYLNYHPNWELF

SEQ ID NO: 93857 - protein, 164 aa, Gossypium hirsutum
  Clone ID: LIB3147-028-Q1-K1-E8.pep
KLCKWLVQLLMALDYLHVNQILHRDVKCSNIFLTKDQDIRLGDFGLAKILTSDDLTSSVVGTPSYMCPELLADIPYGSKSDIWSLGCCIYEMTSLKPAFKAFDMLALINKINKSIVAPLPTKYSGAFRGLVKSMPHKNSELMPSADELLRHPDLQPYVLKAQNK

SEQ ID NO: 93858 - protein, 48 aa, Gossypium hirsutum
  Clone ID: LIB3147-028-Q1-K1-F9.pep
GTNRPLWLVWIVKRLRRYLSRLGDRYLVHGEPRAVSIPPGLTSLHVES

SEQ ID NO: 93859 - protein, 50 aa, Gossypium hirsutum
  Clone ID: LIB3147-028-Q1-K1-G10.pep
AVESYVVDVPSGNTKEDTCTFVDMIVSCNLRSLAQMAANSAKKEKYSSSP

SEQ ID NO: 93860 - protein, 110 aa, Gossypium hirsutum
  Clone ID: LIB3147-028-Q1-K1-H3.pep
SLVLLKFGDVFGSVCSLSVSVYSVLASVFHPTGSFSWSSRQKPRLDPSLMFLNQPSDASGSSFPSYAIPVHSADWPRCLFICASSRKLQFSSFECTPFLPWPPPRRDGSA

SEQ ID NO: 93861 - protein, 109 aa, Gossypium hirsutum
  unsure (1)..(109): unsure at all Xaa locations
  Clone ID: LIB3147-029-Q1-K1-A5.pep
FTALDDRSIGQFLTSLKTPHPYSILICFDATQLHKKTGLHLRELHHEDALTHSSVITNHINSNTKLLSGDIEFGESQSCFHQIXAKDYVSHIRLDXPTAKSLKDESEQM

SEQ ID NO: 93862 - protein, 51 aa, Gossypium hirsutum
  Clone ID: LIB3147-029-Q1-K1-B1.pep
SDYLIQTAPKNSYRQLWNLHFPIKNCHHYLAYFLELYYYSKKSQNKKNGFG

SEQ ID NO: 93863 - protein, 120 aa, Gossypium hirsutum
  Clone ID: LIB3147-029-Q1-K1-B5.pep
AHVVEEYLPYHNETISGVPDRLPAMGIDTPGVAALLGAHSVIRTHCVMLSHRLYPDVDHDLIPDHVAHILHKCADQIPDPMAVQYVINDAWSPLVLYNSYYWNILDNMALLIVDHQLSYD

SEQ ID NO: 93864 - protein, 161 aa, Gossypium hirsutum
  Clone ID: LIB3147-029-Q1-K1-B8.pep
HASAHASAHAFEKNGAVNYSLLIQGYDSMLPPERVKAKMKLQLAEAAEKDPTTGPGWERFEFDKDAPVDDDEIEVAEDDASLVKHIGQSFRFSAIEKRREEQLKAAHDEAIFGTSTASLSVTADSEPEEENLKKDSNDNAVATGLLSEKVIAKAPGSWRDR

SEQ ID NO: 93865 - protein, 39 aa, Gossypium hirsutum
  Clone ID: LIB3147-029-Q1-K1-C2.pep
IEAHMFWWLYRSPYRVEQPSKPWPIILWLQGGPVSNLYE

SEQ ID NO: 93866 - protein, 53 aa, Gossypium hirsutum
  Clone ID: LIB3147-029-Q1-K1-C5.pep
MHLKNSQPLILGENWSEQMWCKRLKDSHPENPALGSQIQTSERTRDVPYAWSS

SEQ ID NO: 93867 - protein, 66 aa, Gossypium hirsutum
  Clone ID: LIB3147-029-Q1-K1-D3.pep
GYGYAGDNRLVTRRDDQDILHTFEGDNADPLQQVAAYVLKQHKDKLHGCALVVTSNYLRESRSTYL

SEQ ID NO: 93868 - protein, 161 aa, Gossypium hirsutum
  Clone ID: LIB3147-029-Q1-K1-D5.pep
SRDDATRPPTRPPTRPAIQFENPGPRVLEGFTVGFHPRSWEIVHNGLTQLGFEKSHPDFSFSTEQPHVTLYLTAIASQSNLVKKPGVEVFPENGLEVKLSGTAATGNPPTTLSPSTLLLDWRCVKARDTPYEVKITIPVEGYESIEFVLTKMCDSAQNQEE

SEQ ID NO: 93869 - protein, 53 aa, Gossypium hirsutum
  Clone ID: LIB3147-029-Q1-K1-D6.pep
FQYRNITIVAPSYLHTIVIKNNQDHFAKTKSKYKACYDDCIKLYVFYHTIQHV

SEQ ID NO: 93870 - protein, 116 aa, Gossypium hirsutum
  Clone ID: LIB3147-029-Q1-K1-D9.pep
MANATVWKAIPKSTEIPSTHPNRSEKLRKCTSLRVATTFTRVCLCAPISSYNEVFRADVPPRRSNTYPRSKAFPLAQERVITSARLSTEGRRVFRGKSLTDDVLMRKIVVEEEAMM

SEQ ID NO: 93871 - protein, 165 aa, Gossypium hirsutum
  unsure (1)..(165): unsure at all Xaa locations
  Clone ID: LIB3147-029-Q1-K1-F5.pep
PYLPDGRFDLESYDDLMHMQIENGAEAVIVGGTTGEGQLMSWDEHIMLIGHXTVNCFGGSIKVIGNTGSNSSREAIHATEQGFAVGMHAALHINPYYGKTSMDGLIYHFDSVLPMGPTIIYNVPSRTGQDIPPRVIYNVSHSPNLAGIKECIGNDRIEQYTGDGI

SEQ ID NO: 93872 - protein, 56 aa, Gossypium hirsutum
  Clone ID: LIB3147-029-Q1-K1-F7.pep
ALARASYLISVMLCLLALIYWLAFYTLSLVQAGTSPKLITLDLIHFSLLTTQVSQA

SEQ ID NO: 93873 - protein, 103 aa, Gossypium hirsutum
  Clone ID: LIB3147-029-Q1-K1-G11.pep
HQVPSLVGSVPPSSVAITIHAKPGAKSSSITDFSDDSVGVQIDAPAKDGEANAALLDYISSVLGVKRRQVSIGSGSKSRDKVVVVGDITLQSVFDALNKASKC

SEQ ID NO: 93874 - protein, 69 aa, Gossypium hirsutum
  Clone ID: LIB3147-029-Q1-K1-G5.pep
LSPHIPFSVLCNRLKTRPPPTVLSRTAAPFNYDFDRTGGGDGGREMQVRFPSPFPFFLFFIHSYIYIHD

SEQ ID NO: 93875 - protein, 106 aa, Gossypium hirsutum
  Clone ID: LIB3147-029-Q1-K1-G8.pep
PRVRSNCHIPNSGCVTARANQEYRHLLALCEQLLNQEAVHLQQNHPRSGSAKRRTSCALRESASKREKRYSDLKKIDRGVHRHVHHDITVIAVVLDSNLMSMDSSD

SEQ ID NO: 93876 - protein, 57 aa, Gossypium hirsutum
  unsure (1)..(57): unsure at all Xaa locations
  Clone ID: LIB3147-029-Q1-K1-H5.pep
LGTLLLGRKLLLVRRNTAHFILHTVPDCYSGYTSYEHTSXVSDYYDRSDAYFLSGQL

SEQ ID NO: 93877 - protein, 107 aa, Gossypium hirsutum
  Clone ID: LIB3147-029-Q1-K1-H9.pep
RISPRTRKLELFSRMHNTHAGWISLGNQLNGVRLVDEGLRARYKAAYPHVEVQPLSPPKASAMELDSTSARSPFATESRSQFADPAAPDAGHAPEERAMAVDTDMTT

SEQ ID NO: 93878 - protein, 61 aa, Gossypium hirsutum
  Clone ID: LIB3147-031-Q1-K1-A12.pep
LTKISNSENDAKPVHDWESLASTYRPQYHNQALRDLFSHYMEAWKSWYSEVAGKTPIKQIS

SEQ ID NO: 93879 - protein, 45 aa, Gossypium hirsutum
  Clone ID: LIB3147-031-Q1-K1-A5.pep
LLRYPRLYFLYLRPVNCMEVTPYNSCALACSLTLTTLISSARPYL

SEQ ID NO: 93880 - protein, 49 aa, Gossypium hirsutum
  Clone ID: LIB3147-031-Q1-K1-A6.pep
GLDLQRLTKKYLKKHNVRDWILVTACNKDRTVCELRYFNIADNEGEEEE

SEQ ID NO: 93881 - protein, 52 aa, Gossypium hirsutum
  Clone ID: LIB3147-031-Q1-K1-A9.pep
VHQIKVCITLHIRSNLMCNFEMWYFIFCSSLTLCFRAQNQVEPYVNIKANGL

SEQ ID NO: 93882 - protein, 83 aa, Gossypium hirsutum
  Clone ID: LIB3147-031-Q1-K1-B10.pep
PRVRFDLANIEVNNVIAEGWAVSQMLSQLFDVVVEADDVPDEQKARICKSLAEAYKRLFDGADEYLQLLYMAINTMRALSNMP

SEQ ID NO: 93883 - protein, 123 aa, Gossypium hirsutum
  Clone ID: LIB3147-031-Q1-K1-B4.pep
QAQALSMSWMVTTGAAAPLVTDLPLYLAVDESGEGRRNQPTCEKWSNDGTDRHAAKLVDEDVGADMQFLLSKALCVVPISLPTALYHTLYHNTSSDAKPDTNPASYTPLLTHRGKENGVSYGG

SEQ ID NO: 93884 - protein, 93 aa, Gossypium hirsutum
  Clone ID: LIB3147-031-Q1-K1-B5.pep
RCLDAGQVLIESACSVDRVEETLNTLLPMHPKIRYFRFNPVDERCDMKLDETDPAVWQKLEAATKDYIENNSEYFNIACETLVQASANRDTEK

SEQ ID NO: 93885 - protein, 125 aa, Gossypium hirsutum
  Clone ID: LIB3147-031-Q1-K1-C3.pep
SKTTIHSEIANPFAAEAHAGLQAVKLGLLMGLNKLEIVGDSKQVIKKYQNTEIDKSSIGAIIRDIQHKKGKFQEIKFHFIPNIENFYAHALAKEALKRGVSHYLVGGLPDFDRQASEERRPREPD

SEQ ID NO: 93886 - protein, 44 aa, Gossypium hirsutum
  Clone ID: LIB3147-031-Q1-K1-D10.pep
PKVPLHPKSPNLIPGPSHSSPLPKWPKKAQQLENTKNLEVSRTR

SEQ ID NO: 93887 - protein, 150 aa, Gossypium hirsutum
  Clone ID: LIB3147-031-Q1-K1-D2.pep
HASVSFSSRQPSSLGILSQISEIENENLGANSFDGGKPEYQCGSWNESAQLTEKHKLFTNNQNGDIGSGVHVLPRHLSLPKTSNEMAVMEKYLQFQDSVPCKIRAKRGCATHPRSIAERVRRTRISERMRKLQKLVPNMDKQTNTADMLD

SEQ ID NO: 93888 - protein, 73 aa, Gossypium hirsutum
  Clone ID: LIB3147-031-Q1-K1-D3.pep
FFKTAPPFFFFFFFFFFFFFFFFFFFFFFFFFFFFFFFFFFFFRAQRWKLAFNKVHEKAKIYKKKKKKKGRPS

SEQ ID NO: 93889 - protein, 42 aa, Gossypium hirsutum
  Clone ID: LIB3147-031-Q1-K1-E12.pep
FLNKSLDILNKFKRDLFWEGRQSQVLMIPYPNKGTNRIKVKF

SEQ ID NO: 93890 - protein, 146 aa, Gossypium hirsutum
  Clone ID: LIB3147-031-Q1-K1-E6.pep
MSPPQPPPSAPSLPQLEPSDHSPQLPALTGLMLVPPPVPLFKHPSWSPDIFRDEAWLRRKGNSKKRRSKSVTDEDLDELKACIELGFGFDSPEVDPRLSDTFPALGLYYAVNKSYNDAISKPSTSPPSVVSDCDSIHSPIGSPHAI

SEQ ID NO: 93891 - protein, 38 aa, Gossypium hirsutum
  Clone ID: LIB3147-031-Q1-K1-E7.pep
NFACVIQEKFSPKYQCVVITHSYIFHMLHNKSCPRSRG

SEQ ID NO: 93892 - protein, 43 aa, Gossypium hirsutum
  unsure (1)..(43): unsure at all Xaa locations
  Clone ID: LIB3147-031-Q1-K1-F1.pep
NKCYIFNMFLNLKMPPQICFIRLKKKIFFNNIKCFYXGGWGRP

SEQ ID NO: 93893 - protein, 50 aa, Gossypium hirsutum
  Clone ID: LIB3147-031-Q1-K1-F7.pep
QWMWIALIQGAWLRSPLSRRAYVIICGSGGLRSRGPCSISVSFFSVDNSQ

SEQ ID NO: 93894 - protein, 144 aa, Gossypium hirsutum
  Clone ID: LIB3147-031-Q1-K1-G12.pep
VGPTKRGVFGMSTFYFFSGGIALLSGIAYIFPSWRALYVASSVPSILFLVLVVPFISESPRWYLVRGKMNEAMKIMRTIANANGHHLPDEVILALDDESNDALNGNQIWEAATVDKEAINGSIVNVIRSPNTLILLFLAVGINF

SEQ ID NO: 93895 - protein, 82 aa, Gossypium hirsutum
  Clone ID: LIB3147-031-Q1-K1-H3.pep
RSEENGELTDSEKDYDLLPKVVEFSEENGHGSEEKPKLELPSEQPKEPKNENSLEVNDDSKDESLRDEGAKVENVNGELKED

SEQ ID NO: 93896 - protein, 146 aa, Gossypium hirsutum
  Clone ID: LIB3147-031-Q1-K1-H4.pep
PTRPPTRPWIFKELQDMGNMDFRFAEEEPQDDYAAELAENLLVYPPEHVIYGDYVFEFWDEEMIRKILGYFTPKNMRVDVVSKFFKSQDVQLEPWFESHYSEEEISSSLMELWEDPPDIDVSLHLPLKNEFIPCDFSIRADTCEIN

SEQ ID NO: 93897 - protein, 137 aa, Gossypium hirsutum
  Clone ID: LIB3147-031-Q1-K1-H5.pep
LTYDQISEFFDAFTLLDTDGDGCITTKELVTVMRSLRPNPSEAELQDLIHEAVAVGNETIDYTHFLNLMATQMKDTDSEEELKQAFRALDNDQNSFISVAEMLHVMTYVAQKLTYEEVDDMIRDADVDGDGHINYEE

SEQ ID NO: 93898 - protein, 131 aa, Gossypium hirsutum
  Clone ID: LIB3147-032-Q1-K1-A10.pep
MDRKTVVHSDESDGQGGAADYDDGEEELDLEESYDEEEEEEEEEIDEGGVEKVGKTVLQRNLDEIGEDLKEAVVSDVNWSCTDEEEVDVEINDNNDNHVEEKDEKEKENEPFAVPTAGAFYMHDDRFRERA

SEQ ID NO: 93899 - protein, 131 aa, Gossypium hirsutum
  Clone ID: LIB3147-032-Q1-K1-A2.pep
RVRKSSSANSYVVDDLFGGMPVSQNANNDDDFGSFVSSTKQKGSASDLLGDFSGVAAKLKSSSKSGAWDSVNNEAGVDDLIPGFGASSPSVNRTNVKTTKSSRSSEEPFVVLDSDFGSEYNFSETPMDPLG

SEQ ID NO: 93900 - protein, 63 aa, Gossypium hirsutum
  Clone ID: LIB3147-032-Q1-K1-A3.pep
YVISNFRNNINRFFEYKMFNTVISIQIIKRTLRNSNWWILFVITSTNVSFQFLLAQSSAEPEV

SEQ ID NO: 93901 - protein, 63 aa, Gossypium hirsutum
  Clone ID: LIB3147-032-Q1-K1-A4.pep
TGIEVARRRVKGSGLTTRTRDLKSFENVYRAVTYRNTWRKLYRMMCYALKRQEGLLWFVVIWF

SEQ ID NO: 93902 - protein, 127 aa, Gossypium hirsutum
  unsure (1)..(127): unsure at all Xaa locations
  Clone ID: LIB3147-032-Q1-K1-B11.pep
MAVAMASAANCGVYFSSNTNKLNFPVFDFKNHSWSAAFVTTPPNILEKRSVRLSFSMMGIIPRATSSATAVESDGSFQDTDTVPTPKVIIDQDSDPDATVVEITFGDRLGALLDTMNALKNLXLNVS

SEQ ID NO: 93903 - protein, 99 aa, Gossypium hirsutum
  unsure (1)..(99): unsure at all Xaa locations
  Clone ID: LIB3147-032-Q1-K1-B6.pep
RAPPFFFFFFFXXXFFFFFGVGFFFFGGAKLNYFLFNVKVVFYIWKKPIVFLINPLINKKKITEIVSKIYSIYLNLKGGKKTLNNTLKSYKRSKIDIKN

SEQ ID NO: 93904 - protein, 70 aa, Gossypium hirsutum
  Clone ID: LIB3147-032-Q1-K1-B7.pep
SYSKPPLNTIKHNPLSSSNLTSKPTGDNVNKLPEHIYKHINGKLLLNKLYQNLIYNEFNDETIFYECYKN

SEQ ID NO: 93905 - protein, 28 aa, Gossypium hirsutum
  Clone ID: LIB3147-032-Q1-K1-C3.pep
NWLIFDQWHDDEGLCFIKYVTFSAYVLE

SEQ ID NO: 93906 - protein, 88 aa, Gossypium hirsutum
  unsure (1)..(88): unsure at all Xaa locations
  Clone ID: LIB3147-032-Q1-K1-C6.pep
QILLPEVAALLTNPFFFXYECQGLSTKVKRYFTFKPDYIREGINALQXTKAFQLLSGYTSIADRWYAIELQGFFPFSXLRFIQRPNIR

SEQ ID NO: 93907 - protein, 152 aa, Gossypium hirsutum
  Clone ID: LIB3147-032-Q1-K1-D11.pep
DAWVFLLLLPKNQVTPGLVGLSLSYALSLTGTQIFASRWYCSLWNYMISVERIKQFMHIPEEPPAIIEDNRPPSSWPSKGRIELQELKIRYRSNAPSVLKGITCTFQEGNRVGVVGRTGSGKTTLISALFRLVEPASGKILIDGLDICSMGL

SEQ ID NO: 93908 - protein, 44 aa, Gossypium hirsutum
  Clone ID: LIB3147-032-Q1-K1-D12.pep
PRVRTVIVVFLDSNLVSRASSAKGPSLSLRGGGIKLPAKTKAPC

SEQ ID NO: 93909 - protein, 55 aa, Gossypium hirsutum
  Clone ID: LIB3147-032-Q1-K1-D7.pep
IFRCNLLVFFFFIILCNVLSHFVGFKKKKGVVNMIWVTHYSYERILKSHKSLSKE

SEQ ID NO: 93910 - protein, 107 aa, Gossypium hirsutum
  Clone ID: LIB3147-032-Q1-K1-E1.pep
EEFSRVMSQHMVHFSTDPNADRLNRLKGEMSQVRSVMIDNIEKVLERGDRLELLVEKASTMQGNSLRFKKQSRRYKNAMWWSYCKITVTLILLLSLIIAYILFAFVF

SEQ ID NO: 93911 - protein, 144 aa, Gossypium hirsutum
  Clone ID: LIB3147-032-Q1-K1-E2.pep
LRDADTGDVFNVEVRRPELPEGSQDSVKDKGLVVRDWAPQLEILAHPAIGGFVSHCGWNSCMESITMGVPIGAWPVHSDQPRNAVLITKLLKLGITIKDWARRDEVVTAAVVEDAVKRLMASKEGDEIRKRAAEVSGAVRQSVA

SEQ ID NO: 93912 - protein, 152 aa, Gossypium hirsutum
  Clone ID: LIB3147-032-Q1-K1-E3.pep
TEPVRTYLVFLSIFTSIPDVWSIGQIFPIVPIHRLDQKPEVKAILSDLTCDSDGKIDKFIGGEANLPLHKPGNGQYYLWMFLGGAYQEALGGVHNLFGSPSVVTVLQSDGPHSFAITHAMSGPSCADVLRVMQHEPKLMFENLKHRAEEFCG

SEQ ID NO: 93913 - protein, 106 aa, Gossypium hirsutum
  Clone ID: LIB3147-032-Q1-K1-E4.pep
TLHLRFFQVHRRPVYQLRLPDLHFMDNKKPGNDGTADEVTRESLIAISYSLPDKVAAASKLSSDNSNREKLFERKGSDGDEKYRSELISISYSKSPEGKGLPSTLN

SEQ ID NO: 93914 - protein, 106 aa, Gossypium hirsutum
  Clone ID: LIB3147-032-Q1-K1-E6.pep
MTKVALVFKCSLLLMTCCFLVQDKADAGIPVTTLSPPEGNTTFLDGTTWCVALAGVSQIDLQNALDWACGLGMSDCGAIQEGGKCYEPDTLLSHASYAFHNYYQQN

SEQ ID NO: 93915 - protein, 95 aa, Gossypium hirsutum
  Clone ID: LIB3147-032-Q1-K1-E8.pep
LTLELYIIPQLLQLVLLSILLVQDWIEVLKEDSRLYAASRVTDIGPDHSPNDYKTGDGTDGKSNGDTSTSTETEPATVEDIGEELYYVETYLEMS

SEQ ID NO: 93916 - protein, 57 aa, Gossypium hirsutum
  unsure (1)..(57): unsure at all Xaa locations
  Clone ID: LIB3147-032-Q1-K1-F2.pep
KXQIKRSIYFLQSKYTIDLLQITCKNVLITHSIHSYLLMPFRLRPSLNTLQNXANIV

SEQ ID NO: 93917 - protein, 118 aa, Gossypium hirsutum
  Clone ID: LIB3147-032-Q1-K1-G1.pep
FKQNNPTTKQTPSMEPTQTPPSSKLHNPSSISLENSPWTSHFYPSMFLSSIHAPRHFNLNHDDDEELDDQTSTLNTLNPKPNPPENHQLGHETEPMFEKPLTPSDVGKLNRLVIPKQH

SEQ ID NO: 93918 - protein, 42 aa, Gossypium hirsutum
  Clone ID: LIB3147-032-Q1-K1-G6.pep
YAGYMALIILREQPVVKTRFATLRKCQKSFRVNLKASYHPKL

SEQ ID NO: 93919 - protein, 76 aa, Gossypium hirsutum
  Clone ID: LIB3147-032-Q1-K1-G7.pep
GDNRLLVFHLSCQSYNLACGASLDCSDQTLFSSEEEGNGQCTGTGELKLSWFNWLRTSLFSSNTSLKRTSIEYSQS

SEQ ID NO: 93920 - protein, 85 aa, Gossypium hirsutum
  unsure (1)..(85): unsure at all Xaa locations
  Clone ID: LIB3147-032-Q1-K1-H1.pep
MRAPNMATITESLERSLQNFSLNHERSNEGGAEEGIIGRSSTSGDNNNLPNTVSDTSXELNSHLSLPYHWEQCXDLKTGEIYYIN

SEQ ID NO: 93921 - protein, 91 aa, Gossypium hirsutum
  unsure (1)..(91): unsure at all Xaa locations
  Clone ID: LIB3147-033-Q1-K1-A5.pep
AGPAQSRESKRGAPKAATRPAEKKPPEEKKAEKAPAEKKPRAEKKQPKEAGDKRKKRPKKSDETHTSNNXKGREQXHXESGKGSTAKGTRN

SEQ ID NO: 93922 - protein, 37 aa, Gossypium hirsutum
  Clone ID: LIB3147-033-Q1-K1-A6.pep
SLLKSNELINKRNEYLESNENGSVSHARLLNSHDSKE

SEQ ID NO: 93923 - protein, 72 aa, Gossypium hirsutum
  unsure (1)..(72): unsure at all Xaa locations
  Clone ID: LIB3147-033-Q1-K1-A8.pep
XGAGRGXXKRKAYGTXSSHARSNVAGSRVHNNVEVGERIAKKLISLEPEKAGYMCCCQTYTPLLASLMKLKK

SEQ ID NO: 93924 - protein, 54 aa, Gossypium hirsutum
  Clone ID: LIB3147-033-Q1-K1-A9.pep
PSPNATAGFSVGVSTVDIGCFMIVIPYLLFSSIKLKDWHESPLCVAIFYIYIYV

SEQ ID NO: 93925 - protein, 139 aa, Gossypium hirsutum
  Clone ID: LIB3147-033-Q1-K1-B12.pep
HASDKPLHSLPPHVAATTLGNANEPILNASYIKAGPFSYGSGHIQPNFAMDPGLVYDLSTKDYLNFLCTLGYNDTLISTFSQDNYKCPGSLNLANFNYPSITIPNLVGSITVTRTVKNVGTPGTYRAQVQKPVGISVKG

SEQ ID NO: 93926 - protein, 92 aa, Gossypium hirsutum
  Clone ID: LIB3147-033-Q1-K1-B2.pep
SLLGYYWGVRVVSNFSLQFHFMAMPHKSISENSTSIILSSQSCALLQLFLLLLLLISPLFARPICSSSSTTRNLHPFSTSLTSIPAAQNPGK

SEQ ID NO: 93927 - protein, 84 aa, Gossypium hirsutum
  Clone ID: LIB3147-033-Q1-K1-B8.pep
IEVPVFEDRRSEAEEFIEIWPLSVKILAFLGLDSVLRALEGSDLKFSALRPPHAAPPPVAGAVVDGRTSGRTNWKGRELLKVFF

SEQ ID NO: 93928 - protein, 51 aa, Gossypium hirsutum
  Clone ID: LIB3147-033-Q1-K1-C4.pep
GTAPFPFSLSFSFTIKCFEQIDWNIIMISFFYYKWKWDSFRLRMSFFFFNN

SEQ ID NO: 93929 - protein, 67 aa, Gossypium hirsutum
  unsure (1)..(67): unsure at all Xaa locations
  Clone ID: LIB3147-033-Q1-K1-C5.pep
HAXXXVYPSXPXXKPPAXGTXXPPPPXXPXPPPPAQQTGPXDTXKPGAXXXXXGGXXHXXXGSSAKD

SEQ ID NO: 93930 - protein, 59 aa, Gossypium hirsutum
  Clone ID: LIB3147-033-Q1-K1-D6.pep
NSRSNWPQLHIDDFIFVTIVFIVTCMGSTSLNSSQQWNTRNSAELLVKSIAVHIAQNNA

SEQ ID NO: 93931 - protein, 49 aa, Gossypium hirsutum
  unsure (1)..(49): unsure at all Xaa locations
  Clone ID: LIB3147-033-Q1-K1-E11.pep
ISYRSLFLCIFXSRSLYKDINLNLERGAIVQKIHSYKIPPILLSKCKKS

SEQ ID NO: 93932 - protein, 72 aa, Gossypium hirsutum
  unsure (1)..(72): unsure at all Xaa locations
  Clone ID: LIB3147-033-Q1-K1-E2.pep
XGRGAXPXDGNHNXGETGEAPKGDRGNHPQXXEDNAPXAXQTATGRGTTPXKKHQPXAXDXXXGDGKPTKND

SEQ ID NO: 93933 - protein, 62 aa, Gossypium hirsutum
  Clone ID: LIB3147-033-Q1-K1-F11.pep
QPYFDKLLFFLFILDFFFFFFFFFFFFFFFFFFFFFFFFFFFFFFFFFFFFFFLTKPFYKKL

SEQ ID NO: 93934 - protein, 74 aa, Gossypium hirsutum
  unsure (1)..(74): unsure at all Xaa locations
  Clone ID: LIB3147-033-Q1-K1-F5.pep
KXEXHXXXXXKXXRXNRGEEXXQEXXENXXKRKXXRETXRXXQQAXRTXDEXPXEXETXERGXXXXXETGPKNH

SEQ ID NO: 93935 - protein, 92 aa, Gossypium hirsutum
  Clone ID: LIB3147-033-Q1-K1-G12.pep
MSSRGSVSMQSASNSRITDDQINDLVSKLHQLLPEIRNSHSDKVSAAKVLQETCNYIRSLHREVDDLSERLSELLATTDNAQAAVIRSLLMQ

SEQ ID NO: 93936 - protein, 41 aa, Gossypium hirsutum
  Clone ID: LIB3147-033-Q1-K1-G3.pep
FISVSFYHKIQTISPLEDKALTSNHGTSSIFPICALLSMSR

SEQ ID NO: 93937 - protein, 49 aa, Gossypium hirsutum
  unsure (1)..(49): unsure at all Xaa locations
  Clone ID: LIB3147-033-Q1-K1-G6.pep
LVPIDSLSKKDFCAEVQDFPAFTSLGRVLLFLPPCFSXPQLLPLHGRVG

SEQ ID NO: 93938 - protein, 59 aa, Gossypium hirsutum
  Clone ID: LIB3147-033-Q1-K1-H10.pep
PTRSPTRFSTFPKTFMIKKKVAKKMRQNRPIPYWIRMRTDNTIRYNAKRRHWRRTKLGF

SEQ ID NO: 93939 - protein, 70 aa, Gossypium hirsutum
  unsure (1)..(70): unsure at all Xaa locations
  Clone ID: LIB3147-033-Q1-K1-H2.pep
FGVSXXFXPRFVXXXXFXPLXPXXXSVVXALLGLLGLLXGPPCRRGXGRLSXWGRRGXAPRRXRVGXRVG

SEQ ID NO: 93940 - protein, 74 aa, Gossypium hirsutum
  Clone ID: LIB3147-034-Q1-K1-A2.pep
CQEILHIIIDTIEGMYKFHSSLQTSLVSACILLLLGPQLVPAIAYRRFLLKNRRTALLYTLGRHRVLSSPNGFT

SEQ ID NO: 93941 - protein, 39 aa, Gossypium hirsutum
  Clone ID: LIB3147-034-Q1-K1-A6.pep
SDQYNEFFAEISCLSFMPYTESLLIGVCYQSYGSLFEYG

SEQ ID NO: 93942 - protein, 91 aa, Gossypium hirsutum
  Clone ID: LIB3147-034-Q1-K1-A8.pep
IESNPVPRNHSQESSKPKVRDGLFSTLRFWIILLWVFSGLGFILVMLAMCSGYTSKGSSKGKSNKSRRRSYTGFLKTSARDRQGHKSDASL

SEQ ID NO: 93943 - protein, 86 aa, Gossypium hirsutum
  Clone ID: LIB3147-034-Q1-K1-B3.pep
MSPSLVKITRVLLFMSMIIPQKSVGEYEQWCIADEQTPDEESKVALDWACGEGGAHCTKIHVNQACYFTNTMTDHALYAFNDYFQR

SEQ ID NO: 93944 - protein, 66 aa, Gossypium hirsutum
  Clone ID: LIB3147-034-Q1-K1-B6.pep
SFFVEHNYSASHHRSNALVMSSQNRGPAIFYCCSLACCWFMFFGDENKMYGWQYACPDAWVWPGLP

SEQ ID NO: 93945 - protein, 65 aa, Gossypium hirsutum
  Clone ID: LIB3147-034-Q1-K1-B8.pep
CFIAGKCYGLCMSKKVFLFGSFTLYTLQNFEDIDNVMDCVWTIILKWGEGDEKSYGLNDGDVIID

SEQ ID NO: 93946 - protein, 98 aa, Gossypium hirsutum
  Clone ID: LIB3147-034-Q1-K1-C1.pep
QQAQPSYVHHNSLLATITILVFYLTETYHIYIYINQKLHFRKIFPFSVQILFPLRLHYPWLPKPVLLPCFSPSILDFLVLTEDLPFCCLQHHLVVSHR

SEQ ID NO: 93947 - protein, 58 aa, Gossypium hirsutum
  unsure (1)..(58): unsure at all Xaa locations
  Clone ID: LIB3147-034-Q1-K1-C11.pep
GGPFFFFFFFFFFFFFFFFFXTKENPLSYMSKDHTFMPYKYESNTNDFRKMKNLNNIK

SEQ ID NO: 93948 - protein, 46 aa, Gossypium hirsutum
  Clone ID: LIB3147-034-Q1-K1-C2.pep
FVQTKGKFTDHATSDLYIDISDMLPICKTLKYLFVLLNCYNERTTA

SEQ ID NO: 93949 - protein, 64 aa, Gossypium hirsutum
  Clone ID: LIB3147-034-Q1-K1-C4.pep
SGTSIPGLEKEEKEGVPVSGPLKPDRFVPPHLRPGFVGREEKPEPKVLRGREQGLKHFGSSVLW

SEQ ID NO: 93950 - protein, 51 aa, Gossypium hirsutum
  unsure (1)..(51): unsure at all Xaa locations
  Clone ID: LIB3147-034-Q1-K1-D3.pep
GTWKGSDYIIVYNSCGPKWXERGFIWMKRNTGKPEGLCGVNKIASYPTNDK

SEQ ID NO: 93951 - protein, 92 aa, Gossypium hirsutum
  unsure (1)..(92): unsure at all Xaa locations
  Clone ID: LIB3147-034-Q1-K1-D7.pep
MLQKLFLYGLAKQNQRGGISPEKLPHTPNLSRFFKILTPITHTNNKVYVSTAQTHGYTVTVFQXHPXKNAFEWDLPMIPHTDNAIEVTQHVA

SEQ ID NO: 93952 - protein, 149 aa, Gossypium hirsutum
  Clone ID: LIB3147-034-Q1-K1-E11.pep
HASDPLPTQFQLSDEGKVLAERDSFDDSTSETTTSSVGGGFSESPNKNINRRIAIGSTLAAVGLFMSSRLDFGVSLKDLSAAAVPYEEALSNGKPTVVEFYADWCEVCRELAPDIYKVEQQYRDRVNFVMLNVDNTKWGQKLDEFGVEG

SEQ ID NO: 93953 - protein, 54 aa, Gossypium hirsutum
  Clone ID: LIB3147-034-Q1-K1-E12.pep
HASAHASDAVEVVSYPSVFSSGLCLYTFLILVQSIIVETNSGLMCFLDFHYYHY

SEQ ID NO: 93954 - protein, 69 aa, Gossypium hirsutum
  Clone ID: LIB3147-034-Q1-K1-E2.pep
NPSPLLFLFLCEGFKNLLSHSTGPLWLHCERQSEPRKDQILAFFKADTKANLPSPKRLKKKRTLLPLLV

SEQ ID NO: 93955 - protein, 59 aa, Gossypium hirsutum
  Clone ID: LIB3147-034-Q1-K1-E3.pep
NSRELYKYFFIFWGRDHCFLSPSFGFECRTLSFCRSTVSLSIRVLNGAKIYHWIQYWTC

SEQ ID NO: 93956 - protein, 61 aa, Gossypium hirsutum
  Clone ID: LIB3147-034-Q1-K1-E5.pep
HLSLKPNLSIFLNLLPNRLLKDCSFHLPRLSLHCSQYSFKPSLLCWDMKRHGSPLSQHTRG

SEQ ID NO: 93957 - protein, 88 aa, Gossypium hirsutum
  unsure (1)..(88): unsure at all Xaa locations
  Clone ID: LIB3147-034-Q1-K1-E8.pep
EVLNFLGLCALMCMGVTAGAYILTIFAIKYRERVLGLILVSPLYRAPSWTEWFYNKAMTNLLYFYGMCELLKEIXLQRYFTKEARGNA

SEQ ID NO: 93958 - protein, 62 aa, Gossypium hirsutum
  Clone ID: LIB3147-034-Q1-K1-F1.pep
PSLHPIFPLSKRSKSKKPPEGPVFPFSATSYSRSMFTSSQAYKASFAPNMQQLVRQFFPQPV

SEQ ID NO: 93959 - protein, 84 aa, Gossypium hirsutum
  Clone ID: LIB3147-034-Q1-K1-F2.pep
SNLLPMAPNIPFPSAIYGARGSIPFIVDSSAPVVPQIMGSTSAVPIAHSQAQFIMNMSNAAAGLNGSGPSRPNFDLNSILAMEG

SEQ ID NO: 93960 - protein, 105 aa, Gossypium hirsutum
  unsure (1)..(105): unsure at all Xaa locations
  Clone ID: LIB3147-034-Q1-K1-G12.pep
PTRAXACCTTNVSIYPLPMSTKRRGAGIAGRKMSQGAFKKVLEKLAVENYNFSNPIDLRSHWARHGTNKFVTIVGLILVVMIVELHQLWSASLVYIPMAIFVRTL

SEQ ID NO: 93961 - protein, 83 aa, Gossypium hirsutum
  unsure (1)..(83): unsure at all Xaa locations
  Clone ID: LIB3147-034-Q1-K1-G2.pep
NERHFFVLFFNQRNSRILHLTRNKDLDSKLQIFSTEQSASLTVKRNRPRYSYXQMGVERQTGNNIGEESKENIIIHGVIEKPD

SEQ ID NO: 93962 - protein, 97 aa, Gossypium hirsutum
  unsure (1)..(97): unsure at all Xaa locations
  Clone ID: LIB3147-034-Q1-K1-G3.pep
SNQSQKIEKXINKFRVXTYIHNPPTIHNQVPNSFHSPRVFFPQMIRVPKIQLKXXKVLNKTTKPXGTSNSMAHXNLLTKQRTDVGRTDVERDDVERT

SEQ ID NO: 93963 - protein, 94 aa, Gossypium hirsutum
  Clone ID: LIB3147-034-Q1-K1-H12.pep
VFVFATVFAPFASTKRSVVLVREFTYGSALDCLNALTYLICGSLNFSFHLLLLIWFLQISLSIVPFLLISIIDSTLHLWHLFIVIFLLPIYTFF

SEQ ID NO: 93964 - protein, 79 aa, Gossypium hirsutum
  Clone ID: LIB3147-034-Q1-K1-H6.pep
DLKRCLQSMACVKGKNVLRKEPMRKDIGEDDSFFVNEKFASKFYKVKVGTVVAQKESEPEKQETRQRVEEDRKPHIEAA

SEQ ID NO: 93965 - protein, 60 aa, Gossypium hirsutum
  Clone ID: LIB3147-034-Q1-K1-H7.pep
LRLFSLTRDESVVVVIIPHRLFLKIILYHYASHTSLAYLPLPSRDSSALIYNLVAKRTRG

SEQ ID NO: 93966 - protein, 69 aa, Gossypium hirsutum
  Clone ID: LIB3147-034-Q1-K1-H8.pep
IHIRLADISPYPEAQQTQKCCSFLCIPREYGPSERGARKLVSHERSFSPANTSPGVFFPERTALANSRR

SEQ ID NO: 93967 - protein, 75 aa, Gossypium hirsutum
  unsure (1)..(75): unsure at all Xaa locations
  Clone ID: LIB3147-035-Q1-K1-A3.pep
KYIIITFALVYTMIATAYDPNKXHSGPLHPIAIGFIAGANILATGPLSGGSINPNSFLXPIITXADFNCIWIYWM

SEQ ID NO: 93968 - protein, 74 aa, Gossypium hirsutum
  Clone ID: LIB3147-035-Q1-K1-A4.pep
KRSSKKSSPHSADKQYPVTPNTGRPAQARKDLKRYSLPPLPRAYSFKTLSFDKAPGGQLKYIPNGLPLFSCLFD

SEQ ID NO: 93969 - protein, 97 aa, Gossypium hirsutum
  Clone ID: LIB3147-035-Q1-K1-A7.pep
MAVKNSTSAHAKRSRKKAAASSSLIPKFMKNPITTMALALLIIDSLLVYFIIVYVPYTKIDWDAHMSHVSGFLGGERYYKNSKGDTGPLVYPAGFLY

SEQ ID NO: 93970 - protein, 46 aa, Gossypium hirsutum
  Clone ID: LIB3147-035-Q1-K1-B1.pep
CVQAIITCLESSVRRAMRGDNKWAVIVLTWPISVSERDLKNLEFLF

SEQ ID NO: 93971 - protein, 50 aa, Gossypium hirsutum
  Clone ID: LIB3147-035-Q1-K1-C1.pep
SGNGDHMSYRKIIDIIYYSPKLNIICYRQTQIKIKIYRSNDKSSINFSKK

SEQ ID NO: 93972 - protein, 129 aa, Gossypium hirsutum
  Clone ID: LIB3147-035-Q1-K1-C3.pep
QVFDCLDRAVLRVRKGENSLLTIAPEYALRSSGSNQALAVGPVNSTAIYEGNVLSLVKVMLLWDAISRKKFEASGTKMEVSNVLFIACKYVRASKRYEKAVKHIDYDTFFSEEEKKQSTALKVACNLNN

SEQ ID NO: 93973 - protein, 75 aa, Gossypium hirsutum
  Clone ID: LIB3147-035-Q1-K1-C4.pep
RRPRSPSLPNQECFHSKILLLFREEGDFTHITDKRLLAAFPNLVITANLHTYVETVIYLLSTSAILNNALDPYFK

SEQ ID NO: 93974 - protein, 73 aa, Gossypium hirsutum
  Clone ID: LIB3147-035-Q1-K1-C6.pep
RYQDTVYTHSFRHIYIQCDIYGTMDYIFYNADDAFDNCNIYAVPPFNGQINAITAQSRTNTNHDTGTSIHNYY

SEQ ID NO: 93975 - protein, 58 aa, Gossypium hirsutum
  Clone ID: LIB3147-035-Q1-K1-D10.pep
TNYVKKRSKKRKKKISKEKKIIKSFQKGSKLNGWKLLQSNHLKVAIIFVQRHLHYQAQ

SEQ ID NO: 93976 - protein, 59 aa, Gossypium hirsutum
  Clone ID: LIB3147-035-Q1-K1-D12.pep
FKNFLEDKPILLKVGVFHKPQFIPIFIPYLNPPMNSFSLHFGKSPHPFNPYKNLNKQSL

SEQ ID NO: 93977 - protein, 68 aa, Gossypium hirsutum
  Clone ID: LIB3147-035-Q1-K1-D5.pep
IHITINCTKSTFIGSCVTTFSFQFIVEVVSVLLDCLNDMNVICCPELLDWLCKLVFCCIRLVDWEGVG

SEQ ID NO: 93978 - protein, 52 aa, Gossypium hirsutum
  Clone ID: LIB3147-035-Q1-K1-D6.pep
QMQFQFGSAGFYRSMCCTPTASELYLGAGIEELVSSMRAHASLHHIDRQLAI

SEQ ID NO: 93979 - protein, 34 aa, Gossypium hirsutum
  Clone ID: LIB3147-035-Q1-K1-E4.pep
NYVIYLYAIFIRILYIIKSDFHLSDHLKAIVSRE

SEQ ID NO: 93980 - protein, 91 aa, Gossypium hirsutum
  Clone ID: LIB3147-035-Q1-K1-E7.pep
KLLGLDGTTPTNRKPSSKGINLPSKHAASKINNKILVKSEALGSGNPSKNSIVLDVSLLKGGAPGRTRGLNVFAVDPNPFSDCLNGIHKLS

SEQ ID NO: 93981 - protein, 54 aa, Gossypium hirsutum
  Clone ID: LIB3147-035-Q1-K1-E8.pep
LLLCLICCWKSFLNVFFFLICNELFVILVNSEVGLDAKNKNFGSRLTCYGSLLI

SEQ ID NO: 93982 - protein, 65 aa, Gossypium hirsutum
  Clone ID: LIB3147-035-Q1-K1-E9.pep
TRGSHLQDTTLFSLKITNNLTLFKIFKTIKYKYGHDTIAIIYDLFILLTFDYETLINPCRPYFLR

SEQ ID NO: 93983 - protein, 75 aa, Gossypium hirsutum
  unsure (1)..(75): unsure at all Xaa locations
  Clone ID: LIB3147-035-Q1-K1-F12.pep
EKXAYARLRRAPSLTFLFSCQPGFRGNGFLLPYLAHLRKRNHPHIFRSNPTIQIHLLISLQQIVSISQSLPPTLS

SEQ ID NO: 93984 - protein, 62 aa, Gossypium hirsutum
  Clone ID: LIB3147-035-Q1-K1-F5.pep
KKKIKFQTRGNKILYFKKAPPFFFFFFFFFFFFFFFFFFFFPFFFFFFFYFIIFFFFFFFFF

SEQ ID NO: 93985 - protein, 93 aa, Gossypium hirsutum
  Clone ID: LIB3147-035-Q1-K1-G10.pep
KKIRTRPLRKFNIKQITHTKTKISFYYNLRSIPQTTSKHARNMGDNTNLSAIFKIYTPQISHQISIHSKSISHFHMGKTCHLLTLFYCTDRPI

SEQ ID NO: 93986 - protein, 39 aa, Gossypium hirsutum
  Clone ID: LIB3147-035-Q1-K1-G11.pep
AIKLRRVPFMCLNQILSSHVNSCSPGNQKVLEGRPPRGS

SEQ ID NO: 93987 - protein, 62 aa, Gossypium hirsutum
  unsure (1)..(62): unsure at all Xaa locations
  Clone ID: LIB3147-035-Q1-K1-G12.pep
ALMIANFIALMYRILEYIYPXNIVPYEIKGTEIHPSFPMTIFXPLTINLYHHTLKLLKYYTL

SEQ ID NO: 93988 - protein, 51 aa, Gossypium hirsutum
  Clone ID: LIB3147-035-Q1-K1-G7.pep
HASAHSSGRFELALIKLIRARVGLSENMLNSTLVDAALVITSNLPFIFKPT

SEQ ID NO: 93989 - protein, 115 aa, Gossypium hirsutum
  Clone ID: LIB3147-035-Q1-K1-H3.pep
AFEEGSIPDFPSDHVPNCAPVDLGASIPPDPSTSECPVNEELANLAVASNAGVDLSGDVPDMPTEVSALVSNTSRESKQSSTGDDVNGNGYARKQFREQVTTAHIGDDLEDGTCN

SEQ ID NO: 93990 - protein, 68 aa, Gossypium hirsutum
  Clone ID: LIB3147-035-Q1-K1-H7.pep
EGKFFSCQLNKMPHNQTSCVMKSRELCSLLAESSSNVKKAGSMSRRHLALSMMEMLQRKVIQLSRTFL

SEQ ID NO: 93991 - protein, 52 aa, Gossypium hirsutum
  unsure (1)..(52): unsure at all Xaa locations
  Clone ID: LIB3147-035-Q1-K1-H9.pep
RNNGXRRARERPSTTFAFFVLPEFAGLVVFNRALDWHPTKLYSLHYLLFHVI

SEQ ID NO: 93992 - protein, 47 aa, Gossypium hirsutum
  Clone ID: LIB3147-036-Q1-K1-A12.pep
IFRTLLRNITIEAETIDSIIGVSNADTFNHVDINRETISRYLANRSI

SEQ ID NO: 93993 - protein, 51 aa, Gossypium hirsutum
  Clone ID: LIB3147-036-Q1-K1-A6.pep
GHHLGRAIIGILNIGIESVHDQPVIGLIHLCDIDSPRVRGRVPSRLGLPAG

SEQ ID NO: 93994 - protein, 50 aa, Gossypium hirsutum
  Clone ID: LIB3147-036-Q1-K1-B2.pep
NMVPIQLLKHELCKEPRVCISHERLFKLICSCITSGNFLVFGMTEHRRYP

SEQ ID NO: 93995 - protein, 58 aa, Gossypium hirsutum
  Clone ID: LIB3147-036-Q1-K1-B7.pep
SWHIRQKHSYFTFVNVQYAQEIMHYSSMFMKDLVGIVGLLFAPSRFFPYCIRFQSPKY

SEQ ID NO: 93996 - protein, 85 aa, Gossypium hirsutum
  Clone ID: LIB3147-036-Q1-K1-B9.pep
MVILFQTKDPTDTGAAARMLSADIVAPLMDRDTIDAPLDLVTLFHHDTDLPDLIRATLRALSDIGRALGRLVTRRMFPHDLCQLP

SEQ ID NO: 93997 - protein, 80 aa, Gossypium hirsutum
  Clone ID: LIB3147-036-Q1-K1-C11.pep
PKRPKYNGLIPKILRFSEKPSPKPNACAADSLQRLHMLQRFSSYARASVRQQTAPVLAPRTPRTLRLGHRFSFASPKSEF

SEQ ID NO: 93998 - protein, 78 aa, Gossypium hirsutum
  Clone ID: LIB3147-036-Q1-K1-C2.pep
RMRLKLQYTCGKTYGLMGSGSLLYPKNEAALHNASIVFNTTYPIPLSQAIQQTWQAISNSEVYSKISLDMPLPIGKTC

SEQ ID NO: 93999 - protein, 70 aa, Gossypium hirsutum
  Clone ID: LIB3147-036-Q1-K1-C7.pep
SSISDSIRIECCLQVSVYAGLRFANRYSTETRRDLIGSACCSVSHMFREPTLDRIEQVVALVLCFRRYLS

SEQ ID NO: 94000 - protein, 50 aa, Gossypium hirsutum
  Clone ID: LIB3147-036-Q1-K1-C8.pep
ELLYICLWPIQFLASPRQASCSHRLAWNQKSLSGRISLMYLCPHAWVAPG

SEQ ID NO: 94001 - protein, 157 aa, Gossypium hirsutum
  Clone ID: LIB3147-036-Q1-K1-D12.pep
TNPERGFKLTDEILIKALETMKKPWVYISGPTINPTGLLYSNQEMENILSACARFGARVVIDTSFSGLEFEYEGRGGWNLGSCLSKISSSGNPSFCVSLLGGLSLKLLSGALKFAFLALNEPILIEAFHSFPGLSKPHCTDKYTIKKLLSLREHKRR

SEQ ID NO: 94002 - protein, 77 aa, Gossypium hirsutum
  Clone ID: LIB3147-036-Q1-K1-D3.pep
PRDFILCDPSVERSEAHKSLQCVATIQQPVQLIHTLVELIIQGQRNQQLLYVFNAHNEFIEHCRDPHLPLWFYKLKK

SEQ ID NO: 94003 - protein, 114 aa, Gossypium hirsutum
  unsure (1)..(114): unsure at all Xaa locations
  Clone ID: LIB3147-036-Q1-K1-D6.pep
MHMLGSGPVFERIQPHAGRGCVLHVDGTLYIHTWMYKHVHSDQHEYATTCGLTSEDAHPAEILNLAFATIIGTAITGRHVITMWLXMTVKVLETGEAHSAIHFTWCVSNTLLLY

SEQ ID NO: 94004 - protein, 45 aa, Gossypium hirsutum
  Clone ID: LIB3147-036-Q1-K1-E11.pep
IQHKSQMRINASPSSKKQHIVRFRLLHRSIFNRPSVSTKDLYCTN

SEQ ID NO: 94005 - protein, 104 aa, Gossypium hirsutum
  Clone ID: LIB3147-036-Q1-K1-E3.pep
VRAAGGKELAQGCANFHNKVLRGSIGGITKPAIPRLARRGSGKHDPGPCPIKKLREAFTTSSENVILYAPTYTEHARRKTVTAMDDAYASQTQGRTLHCFGGQG

SEQ ID NO: 94006 - protein, 69 aa, Gossypium hirsutum
  Clone ID: LIB3147-036-Q1-K1-E6.pep
PRVRPRVRAFWCNIFIYHLGVFFSCNSDQMNLSFILTLFLVAAIESKLVIRFKISLFSFLMFFKVFIII

SEQ ID NO: 94007 - protein, 68 aa, Gossypium hirsutum
  Clone ID: LIB3147-036-Q1-K1-E7.pep
FWWPHKKTFTLQARGRKLWSFKTAPPFFFFFFFFFFFFFFFFFFFFFFFFFFFFFFFYFFYFFFFFFF

SEQ ID NO: 94008 - protein, 69 aa, Gossypium hirsutum
  Clone ID: LIB3147-036-Q1-K1-F1.pep
AAWIFQLTRELGHRSDGKTIEWLSRQAEPYVIAATGSGTAAPPSPPMRSLVPLGSLQLLRLRNRVSCTQ

SEQ ID NO: 94009 - protein, 72 aa, Gossypium hirsutum
  unsure (1)..(72): unsure at all Xaa locations
  Clone ID: LIB3147-036-Q1-K1-F11.pep
GECLTFDQLALGAPIGQNTALLRGPKNAREAEKHFGPAPGVPHSHTKPYVRSKARKYERAXRGRRNSKGFRV

SEQ ID NO: 94010 - protein, 39 aa, Gossypium hirsutum
  Clone ID: LIB3147-036-Q1-K1-F12.pep
QLFNLLFLHLSYSARFWGYVQTKLVRLTSTLDLLMLSHT

SEQ ID NO: 94011 - protein, 64 aa, Gossypium hirsutum
  Clone ID: LIB3147-036-Q1-K1-F5.pep
HYAIWQISYVLLGQLRCVTAVFSHSAGCRFRSTDLPLPRKIMYTCCSTHALTSDSLQNSPIPMK

SEQ ID NO: 94012 - protein, 55 aa, Gossypium hirsutum
  Clone ID: LIB3147-036-Q1-K1-F6.pep
KFYYSVCLKITTTSSTKVSFMLHPIWVGCRYNVVTDDVYYDYAATGAAVLNGPSL

SEQ ID NO: 94013 - protein, 89 aa, Gossypium hirsutum
  Clone ID: LIB3147-036-Q1-K1-G10.pep
HALSLSAFGLNSVPTVEENVKAKWAYVQAQYQRRADLVTNLVATVKGLTALKGKIVNICNERARPKIVGAGQWKKADRTTSRNRQCAPI

SEQ ID NO: 94014 - protein, 77 aa, Gossypium hirsutum
  Clone ID: LIB3147-036-Q1-K1-G2.pep
SFINYKYIDYIKLKFHSAPKNLFWMNIYTNSHTLGSSIKKKNWTFMIWQRFQEKALAQMGDLSESKESHIAKSHLNI

SEQ ID NO: 94015 - protein, 48 aa, Gossypium hirsutum
  Clone ID: LIB3147-036-Q1-K1-G3.pep
HASGRTEKWKHGFLYLLTNMEQLIMKAILLCLSFFTFCNLYFLAMLCS

SEQ ID NO: 94016 - protein, 67 aa, Gossypium hirsutum
  Clone ID: LIB3147-036-Q1-K1-G5.pep
FISAQIIDAAEVISCLRYKDIDSLLSNKIAFQLNRARHEVNVSQHWPSSISILRIEFERHIYLDSFQ

SEQ ID NO: 94017 - protein, 66 aa, Gossypium hirsutum
  Clone ID: LIB3147-036-Q1-K1-H10.pep
WFSALFTAEPVGSLLGLTVSSNNSHITIKSISVTWRSPLNITSVFPLIFKFKNSSPLNQCHLLTPS

SEQ ID NO: 94018 - protein, 129 aa, Gossypium hirsutum
  unsure (1)..(129): unsure at all Xaa locations
  Clone ID: LIB3147-036-Q1-K1-H4.pep
MYRAASLVLEQNAHAALEEISRSLEGILTCPCEAPALAFEAIPRSLAXNSGGNXELVTMTAPAGKHADGQNAWIGIHGHTAALADMKATEICDAHNVKAQTFKTAIEAACMLIRMDDIASGIKKKHAPG

SEQ ID NO: 94019 - protein, 85 aa, Gossypium hirsutum
  Clone ID: LIB3147-036-Q1-K1-H7.pep
EPGATHAYVFYDNIYYSAFNAPRLTWLGRAWIYMLSQDTIALQKPPQRLEHTPAPKPPLDLVKRVPNTRPRIDDGLRSYCVLIEC

SEQ ID NO: 94020 - protein, 31 aa, Gossypium hirsutum
  Clone ID: LIB3147-036-Q1-K1-H8.pep
IIYSYRDKSECFLTMLNNCGDISNQTACCKL

SEQ ID NO: 94021 - protein, 67 aa, Gossypium hirsutum
  Clone ID: LIB3147-037-Q1-K1-B11.pep
NCLYTKQCEGKARHIELRYCFLLNRIRVGTFIDQIYVKKIVSYRYIHFGKMFLYISNEQFVHVIMYH

SEQ ID NO: 94022 - protein, 77 aa, Gossypium hirsutum
  unsure (1)..(77): unsure at all Xaa locations
  Clone ID: LIB3147-037-Q1-K1-B8.pep
PRVRPRVQYYGEQNIQPADPVALDLVCVSNPIDEVLDTLCTLIHDSHSQVAMAANICLGXISAETNNARIAGMLCKL

SEQ ID NO: 94023 - protein, 66 aa, Gossypium hirsutum
  Clone ID: LIB3147-037-Q1-K1-D6.pep
PRVRWDTVVSLARLYDLLFGLIVIAPVALVSWLPGFQAMQTRILFNEAFSRGLQISRIISGKKSTA

SEQ ID NO: 94024 - protein, 66 aa, Gossypium hirsutum
  Clone ID: LIB3147-037-Q1-K1-D8.pep
KPETTRNVASLTSYFISIQIRQEKLTRQEGKKRWCRGRTLCPVHTFAKTYSHGRTTAVQRPLPGMK

SEQ ID NO: 94025 - protein, 90 aa, Gossypium hirsutum
  Clone ID: LIB3147-037-Q1-K1-E2.pep
VQRTSRNHVASHLLVISTKLSIRRSLRELVTAHFHQNKGHDDHPLVQVRGRFPNDETIPVRDIIRTESVHLRRSMAHALPWVSMLEPSAA

SEQ ID NO: 94026 - protein, 96 aa, Gossypium hirsutum
  Clone ID: LIB3147-037-Q1-K1-E8.pep
IGGLSVQSPTPLEYLDHQSVSMHTVTSDNIPHTDSRNIGKETLHLKQRMIIVDLVLMKGSCNELLKTAAYRQFCRHYQTVNCYVIKSSAWVMVHAP

SEQ ID NO: 94027 - protein, 65 aa, Gossypium hirsutum
  Clone ID: LIB3147-037-Q1-K1-F1.pep
IHLNVLVGWPRNSPYQFFVLLDFHVRVIMHKLYISTLPFDNSHDMRQASSTSYLVCSTFLTMQRS

SEQ ID NO: 94028 - protein, 30 aa, Gossypium hirsutum
  Clone ID: LIB3147-037-Q1-K1-F4.pep
RSQYIIVQNRVISLNNKILSNKDDFVKALN

SEQ ID NO: 94029 - protein, 83 aa, Gossypium hirsutum
  Clone ID: LIB3147-037-Q1-K1-F9.pep
YDWKETRGAYMFKGRVPDLKKEELKIQVENDRVLPIIGERYVEKEDKNDSWHRLERCIGMFITRFTLPENVKTGYVKASMENG

SEQ ID NO: 94030 - protein, 52 aa, Gossypium hirsutum
  Clone ID: LIB3147-037-Q1-K1-H11.pep
ELIIDVYITASLAESRTLSFYFRLKDRQHNPLPYTECACRFEFNYRFYHLPK

SEQ ID NO: 94031 - protein, 72 aa, Gossypium hirsutum
  Clone ID: LIB3147-037-Q1-K1-H2.pep
KDVYSVGALVHENLTGKVKKVVGRLKSQFRGPKFEPQGTGGGGHNLTAYESLAQFWVPWDGRKAYNANCRSC

SEQ ID NO: 94032 - protein, 78 aa, Gossypium hirsutum
  Clone ID: LIB3147-037-Q1-K1-H8.pep
KKKKKKKRGNFKGGGPPLLSTQKYKPSRPQSISKKKGYPFLTNQSFQPYHPKQQHFYLNPPNPPHFPILHNILTEKTI

SEQ ID NO: 94033 - protein, 94 aa, Gossypium hirsutum
  unsure (1)..(94): unsure at all Xaa locations
  Clone ID: LIB3147-037-Q1-K2-B11.pep
KIIPDLGXKKKKKKKIKKIKNKTNKYLKKEEIIQLMGKTYSIQCNVQCKHDTLISATAFYSVETERELLSIKFMLKRLHHKDTYILGRCFCIYQ

SEQ ID NO: 94034 - protein, 63 aa, Gossypium hirsutum
  Clone ID: LIB3147-037-Q1-K2-B3.pep
KHCPMLLFSFLREPRIIRVGIMKIVFNAPIKAHNYAQPHFQTTGSPTEFIYRFYFLFDCNLVT

SEQ ID NO: 94035 - protein, 73 aa, Gossypium hirsutum
  Clone ID: LIB3147-037-Q1-K2-B8.pep
QNIQPAETFALELVCVSNPNDNVLDTLIMLSHDSDSQVAKGANISLGIIRAGTNNARIAGMLRKLTRYYYKDA

SEQ ID NO: 94036 - protein, 81 aa, Gossypium hirsutum
  Clone ID: LIB3147-037-Q1-K2-C4.pep
YPLGFEIRLMLMVKFRPLTMPSVSVRRSLLVLRASAIIRVEFGFGSSRFMDGAHDHIKGRLASGCVFIETRKGARISVRVG

SEQ ID NO: 94037 - protein, 48 aa, Gossypium hirsutum
  Clone ID: LIB3147-037-Q1-K2-D6.pep
TGPALYQNNSFKTTSNDNSLTAGGDNKFNLGQPNKPKTLLYQTPYFRI

SEQ ID NO: 94038 - protein, 88 aa, Gossypium hirsutum
  Clone ID: LIB3147-037-Q1-K2-E11.pep
EFVFYPQHEKEGSGIKQASGHHKKLPTRSRNTCQEAIATPEADPQQKPPQPLGHSPLPRQARESQSPKHNIVSHHPDHLPHSYRATTP

SEQ ID NO: 94039 - protein, 89 aa, Gossypium hirsutum
  unsure (1)..(89): unsure at all Xaa locations
  Clone ID: LIB3147-037-Q1-K2-F9.pep
KETPGAYIKKGCQPKLKKXELKVHVENDRVLQISGEMNVYKEDKNDTLHRLXLIICNFITKFMLPENVNIGQVKASNXNSVLTLTFPKI

SEQ ID NO: 94040 - protein, 104 aa, Gossypium hirsutum
  Clone ID: LIB3147-037-Q1-K2-G12.pep
PHRIDVWCEKKTRRPPKNKKKNKKKTSTCSMQPTQYYPFTPPHYTAPNTTTLTTFTPPRGPPPNLDPTQTYPPLPPLINFHWPPPISIPPPLFSPPARPGKPPP

SEQ ID NO: 94041 - protein, 57 aa, Gossypium hirsutum
  Clone ID: LIB3147-037-Q1-K2-G7.pep
RKKFKAVRRSILLYLLQTTTSFYDDNGNSMSQLYIYINIYNVSIRRQESKYTRVFEH

SEQ ID NO: 94042 - protein, 43 aa, Gossypium hirsutum
  unsure (1)..(43): unsure at all Xaa locations
  Clone ID: LIB3147-037-Q1-K2-H12.pep
DPRXRMKKFILKFRXFTTKPKKKGGVIKKKGRRHTKKTYRNQW

SEQ ID NO: 94043 - protein, 68 aa, Gossypium hirsutum
  unsure (1)..(68): unsure at all Xaa locations
  Clone ID: LIB3147-037-Q1-K2-H5.pep
KVGIAFLTREIFCINSAPSLXSLLLDPLCDAFXFFXVEIGDFLEQPYFPLKRNKYNFLLYHEQDLSRQ

SEQ ID NO: 94044 - protein, 70 aa, Gossypium hirsutum
  unsure (1)..(70): unsure at all Xaa locations
  Clone ID: LIB3147-038-Q1-K2-A12.pep
TNXXKSRRLKKGRGRKKRNVTLRMTGRMLKLNKRNRRSESMPKRKNLRCRPRKRIKNKRRRKMRLKKTNN

SEQ ID NO: 94045 - protein, 87 aa, Gossypium hirsutum
  Clone ID: LIB3147-038-Q1-K2-A3.pep
TRPTRPPTRPPTRPPTRPEESLAFLGEIGQSTSLRHAVQLLSPASIVAKMNGRDNICKADLEEVSKLYIDAKSSAKILQEQQEKFIS

SEQ ID NO: 94046 - protein, 125 aa, Gossypium hirsutum
  Clone ID: LIB3147-038-Q1-K2-A5.pep
HCSPAKSGSMGSTRSNPTVTNSGLFGLMSSPPSTIPSPINDHNKNEAYYKLFKQANQSENINEVVSSLPSTQAAIIKDGSFVNNASMKANERQGGQAVASKLNTNANEVEASLTRDFLGVGSQSS

SEQ ID NO: 94047 - protein, 95 aa, Gossypium hirsutum
  unsure (1)..(95): unsure at all Xaa locations
  Clone ID: LIB3147-038-Q1-K2-A9.pep
LFITGWFLSLAKSHRCELSFSIALEASCEPRASSRGAWDFLATRGVAVLMSIGSPRVGGASGWALATSSPDIFGVGDGVGAPERSESXRGEPSAN

SEQ ID NO: 94048 - protein, 56 aa, Gossypium hirsutum; identical to SEQ ID NO: 76341
  Clone ID: LIB3147-038-Q1-K2-B3.pep

SEQ ID NO: 94049 - protein, 61 aa, Gossypium hirsutum
  unsure (1)..(61): unsure at all Xaa locations
  Clone ID: LIB3147-038-Q1-K2-B6.pep
EGCKYIRLDYXAPQKLMRKFRLPENANVAAITAKCENGVLTVVVEKLPPPPKPKTVEVAIA

SEQ ID NO: 94050 - protein, 45 aa, Gossypium hirsutum
  Clone ID: LIB3147-038-Q1-K2-D10.pep
WEALRRTMATLFSLWNHLRRMYSQFTHPQKVSNLEDKGMHMQMLN

SEQ ID NO: 94051 - protein, 130 aa, Gossypium hirsutum
  unsure (1)..(130): unsure at all Xaa locations
  Clone ID: LIB3147-038-Q1-K2-D3.pep
RKEVDTNPVLELGRVLSLDSSANVLDIEETCEASDFEKRMAANAFNSILSVLTNYSESTGRLVCGTRCSVPGVCYISSSLNISLGRIRQSFVLIDPHLPGMPIVYASDAFLKMTGYDRHEIXXLNFCSLN

SEQ ID NO: 94052 - protein, 44 aa, Gossypium hirsutum
  Clone ID: LIB3147-038-Q1-K2-D7.pep
KAFALSERRVIEEDQESAARWDFTLRVGQCSHITRDSFDENFTS

SEQ ID NO: 94053 - protein, 98 aa, Gossypium hirsutum
  Clone ID: LIB3147-038-Q1-K2-E11.pep
IVTESIAPLIPPTRSEGKESNIRTWVIVASVVGGVALLAFLGFLVLWARKCKRRKKMQEMEKAAEVGEALHMTSVGDTKAPSATVTRTQPTLENEYVP

SEQ ID NO: 94054 - protein, 34 aa, Gossypium hirsutum
  Clone ID: LIB3147-038-Q1-K2-E12.pep
ICDYYWNVGALNKVCEFVWYLFYFLSTLHLFSKY

SEQ ID NO: 94055 - protein, 97 aa, Gossypium hirsutum
  Clone ID: LIB3147-038-Q1-K2-E2.pep
MAASLVLFSLLLLHFTQAEELMSIDGAPSPSPQAQPIDCGVACEGRCRLSKRPNLCKRSCGSCCHRCKCVPPGTSGNYEACPCYANLTTRKNVRKCP

SEQ ID NO: 94056 - protein, 42 aa, Gossypium hirsutum
  unsure (1)..(42): unsure at all Xaa locations
  Clone ID: LIB3147-038-Q1-K2-E5.pep
PVSELPGLDATPVRSEKRSVSXHLLYPXXDPXVTRRVKGVLL

SEQ ID NO: 94057 - protein, 96 aa, Gossypium hirsutum
  Clone ID: LIB3147-038-Q1-K2-E6.pep
METIVVVKLLGWNIGYGALHNRISSLWKPSQPFHLMDIKNGYFLVRFQCRVDYDLALTQGPWIVFGHYLTVQPWTIEFDPLKPFPNVITAWIRFPG

SEQ ID NO: 94058 - protein, 69 aa, Gossypium hirsutum
  Clone ID: LIB3147-038-Q1-K2-F1.pep
YYSPGWRTCAAVAIQLAWRRYKHRLTLTSLSFIRPRRPLSRSNSLGEDRLRLYTAMLTSPKPNQDDFDF

SEQ ID NO: 94059 - protein, 83 aa, Gossypium hirsutum
  Clone ID: LIB3147-038-Q1-K2-F12.pep
HANDYDNFFVQYDVQAAAEADTKGDAKFATDAATDAAAEADACSNRSKNQPKATIYASHKVAHDLAAMVDFILQVLLRVRTNE

SEQ ID NO: 94060 - protein, 86 aa, Gossypium hirsutum
  unsure (1)..(86): unsure at all Xaa locations
  Clone ID: LIB3147-038-Q1-K2-F3.pep
QSGFNPQDVGLEHGKLLVNFCQQSFWFFGILEVCFFFSFVVFFFFFFFFFFFFFFXTAKPHLSHIITILQDGTCTFNPPDDFGRVG

SEQ ID NO: 94061 - protein, 56 aa, Gossypium hirsutum
  Clone ID: LIB3147-038-Q1-K2-F5.pep
EQEQIIIIIISQISNKTALLAGFRYLETAHTLLNSFLLNFSISSLKSTMGFSRKLT

SEQ ID NO: 94062 - protein, 98 aa, Gossypium hirsutum
  unsure (1)..(98): unsure at all Xaa locations
  Clone ID: LIB3147-038-Q1-K2-F6.pep
MSVRGKGEKDDRFDNVNDALILFNKMIDKYPKPSIVEFNKLLGAIVRMKHYAIVVSMYRRIDLLGVSRDVYSLNIXINCFCQLGRIDFEFSGLXKVLK

SEQ ID NO: 94063 - protein, 105 aa, Gossypium hirsutum
  Clone ID: LIB3147-038-Q1-K2-G4.pep
PTRPKKWADDMEKRERGERAWPITVFMGAQRLHRCTNPKPLELLVQGVCTRAGCWSYGSCAGAGRGRGARRLGRTEAWSCWGCWLRREDPSALGFAKIGLNLWAV

SEQ ID NO: 94064 - protein, 61 aa, Gossypium hirsutum
  Clone ID: LIB3147-038-Q1-K2-G5.pep
AHKGPTQLVIGFISNASLKLDETFNNTHCHGLPLHDKVQWTLSRRRGQRTAHVAAIRRTRG

SEQ ID NO: 94065 - protein, 47 aa, Gossypium hirsutum
  unsure (1)..(47): unsure at all Xaa locations
  Clone ID: LIB3147-038-Q1-K2-G6.pep
RGHMLYPMPATXRGVFLTLWCTPKPXXCLLLNDSSNFKDALLIKPIT

SEQ ID NO: 94066 - protein, 60 aa, Gossypium hirsutum
  unsure (1)..(60): unsure at all Xaa locations
  Clone ID: LIB3147-038-Q1-K2-G9.pep
QGXVRTLLGFLPEMLKNPFETRVFAFVCENCYGFCVFRFVLINSVIFPSVNVMNVASFDR

SEQ ID NO: 94067 - protein, 104 aa, Gossypium hirsutum
  unsure (1)..(104): unsure at all Xaa locations
  Clone ID: LIB3147-038-Q1-K2-H1.pep
KTRPDPRFLPNNDLWLFYLRTHFNQPSGPVQIMCWHMNPHYHARERIHNSVRXHRKGQSIPLTFANKGWLKKLFGHVXFWHTHGSAYLFHPDIYTDRRIFVQGI

SEQ ID NO: 94068 - protein, 49 aa, Gossypium hirsutum
  Clone ID: LIB3147-038-Q1-K2-H11.pep
NNDKFFVYTKANKSQCSSCFETSLFLFPKLGSVCNPHVFSLIPYHVSIN

SEQ ID NO: 94069 - protein, 47 aa, Gossypium hirsutum
  Clone ID: LIB3147-038-Q1-K2-H3.pep
FIFALFFFMFLFFFEKKILHSIFMLLREQPQHRSKTTEPKPNSNRVI

SEQ ID NO: 94070 - protein, 65 aa, Gossypium hirsutum
  Clone ID: LIB3147-038-Q1-K2-H8.pep
KNVGNFPHSREILTNEKAIFSYCSCLTGNLSPKQGRYTNLKTLTMNQSHKLEGAMQFSFMLILYM

SEQ ID NO: 94071 - protein, 52 aa, Gossypium hirsutum
  Clone ID: LIB3147-038-Q1-K2-H9.pep
RSDNSCKTAGRTLNLRQPLIVLILGACKRFYKMPLLIWTLFKYSIIFFIFFF

SEQ ID NO: 94072 - protein, 94 aa, Gossypium hirsutum
  unsure (1)..(94): unsure at all Xaa locations
  Clone ID: LIB3147-039-Q1-K1-A11.pep
CARHYCYYKIITREHAMEVSXAALYYINFLILAWRTVYGIVTDGLSMIFRMLNDFLGLIGTDAMCTVTGYXLIEMHIAQANIPKYTLMWVWLKI

SEQ ID NO: 94073 - protein, 90 aa, Gossypium hirsutum
  Clone ID: LIB3147-039-Q1-K1-A3.pep
HTPGDVISMPSMPHSGSSSKPLMMFGAEGAGTLASPSNQLWDDKDLELQAEMDRFVEDGSLDDNVESFLSHDDTDPRDAVGRCMDVTKGV

SEQ ID NO: 94074 - protein, 63 aa, Gossypium hirsutum
  Clone ID: LIB3147-039-Q1-K1-A6.pep
MFGRWIAHTGTMLGSVQHISKDMNAHLTQTSLTVSHADIVAATRSTDQILECMKALAFICMSN

SEQ ID NO: 94075 - protein, 52 aa, Gossypium hirsutum
  Clone ID: LIB3147-039-Q1-K1-A8.pep
EIQILKEQLNVIRVSVIIYSRNSRLYFYNGGSFVLHNSFVLSNGFISLEFNS

SEQ ID NO: 94076 - protein, 58 aa, Gossypium hirsutum
  Clone ID: LIB3147-039-Q1-K1-B10.pep
LKTLPPPHFFLYIFEYGLGILQVIMTFVAILSQYSWEPSVVFECSSTRRSFPGSVLIK

SEQ ID NO: 94077 - protein, 52 aa, Gossypium hirsutum
  Clone ID: LIB3147-039-Q1-K1-B12.pep
RMLTESSRVTWRRHIKECHRWRHLVVSRWSVNIVKLMLMLMLLPKLLLCDFN

SEQ ID NO: 94078 - protein, 44 aa, Gossypium hirsutum
  Clone ID: LIB3147-039-Q1-K1-B3.pep
SLRFNRVILFHLLKRKELKSKYLIAWRSIYTKLLPRAPPWSRRQ

SEQ ID NO: 94079 - protein, 87 aa, Gossypium hirsutum
  Clone ID: LIB3147-039-Q1-K1-B6.pep
PNRPNRPNVQIGSQLAETLASVSAAPPLYCPCASAAHWTLEDRLCPSFAPKRKPLSLTLLPTCKQTIKGNRKCNTQRQTKKTCRDRQ

SEQ ID NO: 94080 - protein, 61 aa, Gossypium hirsutum
  Clone ID: LIB3147-039-Q1-K1-C10.pep
IISPFHHSSSDHINNLWFYESSFIHKAINIRMCGQFLSACSSTELPYIILIFHLRPVTRRR

SEQ ID NO: 94081 - protein, 78 aa, Gossypium hirsutum
  unsure (1)..(78): unsure at all Xaa locations
  Clone ID: LIB3147-039-Q1-K1-C2.pep
PTRSAILPGAQVSTITVQGSAPFGEVWTKSIAAEAVPGPGIGSAAGRGNSTGPLXVKHKXGLSRPCPGVGRPAPCRKL

SEQ ID NO: 94082 - protein, 46 aa, Gossypium hirsutum
  Clone ID: LIB3147-039-Q1-K1-C5.pep
IANLLYWFDWKLPPHISAQNLDITEAFGLGVCMKFPLCLLAMPYRP

SEQ ID NO: 94083 - protein, 62 aa, Gossypium hirsutum
  Clone ID: LIB3147-039-Q1-K1-C6.pep
SKLRLLLGIHISSIVQFFFPITWKHTQLNSIIHQCGASRAEYVLDLVPFNTCNTLLVYYFIA

SEQ ID NO: 94084 - protein, 69 aa, Gossypium hirsutum
  Clone ID: LIB3147-039-Q1-K1-D11.pep
PTRPPTRPPTCPPTRPPTRGSCTDTNSARAPDRMLGEVRGSNSRLLWMVFGKCVLNLVDRFSSLVLMVN

SEQ ID NO: 94085 - protein, 135 aa, Gossypium hirsutum
  Clone ID: LIB3147-039-Q1-K1-D6.pep
AQENDGLLDEKQNVIEQMKDKVGGTLAEMENVMARTRREADNSKKFAVQNFAKDLLDVADNLKRASAHVKGSFSKIDESNDTAGAVPLLKTLLEGVEMTDKQLGEVFRKYGIGKFDPTNEPFDPNMHNAVFQVPD

SEQ ID NO: 94086 - protein, 64 aa, Gossypium hirsutum
  Clone ID: LIB3147-039-Q1-K1-E1.pep
VVFITIFIGYLIAADKKLPRVAASGSVPELSQNGKDAANANAPPQLPFLGIQLPFGRIGLVIKV

SEQ ID NO: 94087 - protein, 84 aa, Gossypium hirsutum
  unsure (1)..(84): unsure at all Xaa locations
  Clone ID: LIB3147-039-Q1-K1-E4.pep
CDLKTLRRHCDAIMCCALKALPVHTFANQAGLDMLETTLGAMQDLTLGKIFQEHGRKNFCTEFPQNIHKGFAXVPGGICLSNMG

SEQ ID NO: 94088 - protein, 93 aa, Gossypium hirsutum
  Clone ID: LIB3147-039-Q1-K1-E5.pep
PPLDRESATGYLLSVVKKLAAGILLQTASTKIYHLQHSKETTALTIMLTTIGPLKKQTPGTVSHLHTIATTRSCITIGRLDDDTSIPTDNTFL

SEQ ID NO: 94089 - protein, 49 aa, Gossypium hirsutum
  Clone ID: LIB3147-039-Q1-K1-E7.pep
QDVYREQSVYTAAPYQGMPQMAASGSVPVLSQDGKVAANANAPPQTSSL

SEQ ID NO: 94090 - protein, 80 aa, Gossypium hirsutum
  unsure (1)..(80): unsure at all Xaa locations
  Clone ID: LIB3147-039-Q1-K1-F11.pep
PRVRNYYXASFLSMDVTSARVELRILMTLHLALQVMVADKRLIFTGFLDAEPVHNLLLGRTINTAAEVIQVFFCDDCCSS

SEQ ID NO: 94091 - protein, 70 aa, Gossypium hirsutum
  Clone ID: LIB3147-039-Q1-K1-F12.pep
QTLTTRRMLSASEPSSVQPIKAVTSSLGYHTVRTPSVTARPQSSRHLWEVRIRIYTSMVSVDTLALVTIT

SEQ ID NO: 94092 - protein, 64 aa, Gossypium hirsutum
  Clone ID: LIB3147-039-Q1-K1-F2.pep
PTRPNYCTVNNYTAQRTTVGIILNRPVTLTLWLYGKECRPLQLGPTFSWHLYFEVSDKILLIDG

SEQ ID NO: 94093 - protein, 129 aa, Gossypium hirsutum
  unsure (1)..(129): unsure at all Xaa locations
  Clone ID: LIB3147-039-Q1-K1-F4.pep
PHPQVNPLGVAXPREVLLEERGQDWRRIDLELXRRWMDRPETEEEKILKEEIDNLKKELEKDSTPASESALDQSALRDTLLHKERELEKLIRGLENKVKFGQKAVERPGSGSSRIGGSYSDRPPSQSGS

SEQ ID NO: 94094 - protein, 39 aa, Gossypium hirsutum
  Clone ID: LIB3147-039-Q1-K1-F5.pep
DPRHGKYMAVCLMYRGDVVPKDVNAAGASIKTEKDRAVG

SEQ ID NO: 94095 - protein, 36 aa, Gossypium hirsutum
  Clone ID: LIB3147-039-Q1-K1-F9.pep
IKYYHKRLSFVEKTRFKTESHIHPVTIKLKSINEGF

SEQ ID NO: 94096 - protein, 56 aa, Gossypium hirsutum
  Clone ID: LIB3147-039-Q1-K1-G11.pep
VITINMRRELVPLLLSGIHRKDIRMMLMHHGDMLHHDLLKGILLEDVLLITPLNIL

SEQ ID NO: 94097 - protein, 40 aa, Gossypium hirsutum
  Clone ID: LIB3147-039-Q1-K1-G5.pep
SRIRMYEWSCKRSGPLILKKRDNHLRCGILLSSYIVTEEV

SEQ ID NO: 94098 - protein, 45 aa, Gossypium hirsutum
  unsure (1)..(45): unsure at all Xaa locations
  Clone ID: LIB3147-039-Q1-K1-G9.pep
MLFSYAEYIYRYYVNSSTSYVSQVEVDSSLNTGSLGHSVLSPXCI

SEQ ID NO: 94099 - protein, 61 aa, Gossypium hirsutum
  Clone ID: LIB3147-039-Q1-K1-H1.pep
TNQHQFCTQMHQFKKITKKKKIISINSNSSAECLSPMTNTYNRINTIVALRMLHKLKPIHA

SEQ ID NO: 94100 - protein, 66 aa, Gossypium hirsutum
  Clone ID: LIB3147-039-Q1-K1-H2.pep
FYFLVKKKKKKKKKKQKKKKKKNARTNKKNHTYARMQPKTNLLIKTQLNSIHSPKKNNKMPEKTLS

SEQ ID NO: 94101 - protein, 86 aa, Gossypium hirsutum
  unsure (1)..(86): unsure at all Xaa locations
  Clone ID: LIB3147-039-Q1-K1-H4.pep
TRGLIIGPPIASGIVAMREPMKKPNKLPSEDLSXEYCMDTVKNTVDTHVDADQAXKTCXIIDDLGTTGGTLTVVIRLLVHVGEHAW

SEQ ID NO: 94102 - protein, 111 aa, Gossypium hirsutum
  Clone ID: LIB3147-039-Q1-K1-H7.pep
HASAHAYAWLPGLILALGSTSMHERSIERPYLTALDHIKLHFPSWPLILAKIELAEMSEHDDLEEDDRVSEPEFTEFKKLMGIIISLLKGNRSILDAVGVIFLATSVVGLD

SEQ ID NO: 94103 - protein, 48 aa, Gossypium hirsutum
  Clone ID: LIB3147-039-Q1-K1-H8.pep
DCIESHEPSYPSGLLITAYMKVSYMSEHYATIQEQSVHEPASTYLTKL

SEQ ID NO: 94104 - protein, 93 aa, Gossypium hirsutum
  Clone ID: LIB3147-039-Q1-K1-H9.pep
PRVRRETASASPKLALANAKRYFEDVIAHTHAIPYRRFCGGDGRTTQANNRLSNGQGRWPVKSAKLILDMLNNAESNADVKGTDVDSLIISHM

SEQ ID NO: 94105 - protein, 120 aa, Gossypium hirsutum
  Clone ID: LIB3147-040-Q1-K1-A10.pep
HASGYELGQMYDSHLDAFPVEQYGPQKSQRVATFLVYLSEVEGGGETAFPFENGLNMDGSYDFKKCIGLKVKPRIGDGFLFYSLFPNNTIDTASLHTSCPVIKGEKWVVTKWIRDQKDFF

SEQ ID NO: 94106 - protein, 46 aa, Gossypium hirsutum
  Clone ID: LIB3147-040-Q1-K1-B12.pep
SWCSLSPQVKWHHCNLKSDNFELFASFFFIANTAMFHLRIERSMSR

SEQ ID NO: 94107 - protein, 38 aa, Gossypium hirsutum
  Clone ID: LIB3147-040-Q1-K1-B5.pep
YSCCHTNYTMNLKSIKEIFPFFCPLNHKKMYSTIGRVG

SEQ ID NO: 94108 - protein, 108 aa, Gossypium hirsutum
  unsure (1)..(108): unsure at all Xaa locations
  Clone ID: LIB3147-040-Q1-K1-C1.pep
MGWKPGPCSLQTKIKPYPKTEYWRGVPPSYITIYDVVLKNKGEVXFTFFVHLGSWVMETISSEAYKTGRTACYKYMDXFAGTDAXHLRVRKHPLHALCINMMPSCAGA

SEQ ID NO: 94109 - protein, 57 aa, Gossypium hirsutum
  Clone ID: LIB3147-040-Q1-K1-C2.pep
LQQPHKLSDCPFNRNKTTTYFAMNVKWIQDEKEHPVLCLVYTNFLPLQHSIVKRRDG

SEQ ID NO: 94110 - protein, 52 aa, Gossypium hirsutum
  Clone ID: LIB3147-040-Q1-K1-D7.pep
LISKSKVYEAKQTPYGYGEIPWIKKNKIMRDHAAKINHHHLISESLDHRLNH

SEQ ID NO: 94111 - protein, 75 aa, Gossypium hirsutum
  Clone ID: LIB3147-040-Q1-K1-E3.pep
AQRSFVRLSAGDSDGDSIVMPLYASRIQKGSSQSPPELLTSESDCPEQSCDSITDPDFASRSSKRPCKLEALDEL

SEQ ID NO: 94112 - protein, 113 aa, Gossypium hirsutum
  Clone ID: LIB3147-040-Q1-K1-E7.pep
PRVRTSAAPAYHVQWYYPAVGTPASPFHHQHHQAVPFYGYSPTYIPTDMSYNHKLSYSGGSYMNGHFSQVYPAGQAVVSANTLMPMYPFYHYHQSQTMGLPAAATHIYPSTTA

SEQ ID NO: 94113 - protein, 61 aa, Gossypium hirsutum
  Clone ID: LIB3147-040-Q1-K1-E9.pep
FHATSQLKIPLLEWVLDMGKTKSNILSKDRAGKPHPGCLSQPVDELAVLTGKAPMEVYQDF

SEQ ID NO: 94114 - protein, 54 aa, Gossypium hirsutum
  Clone ID: LIB3147-040-Q1-K1-F10.pep
SSLKCLVAGACYEQQSLVYDIHLLRINLLICSSSSSRFLCMCVGFYGDKTTLAL

SEQ ID NO: 94115 - protein, 49 aa, Gossypium hirsutum
  Clone ID: LIB3147-040-Q1-K1-G10.pep
RTRASTRSSIVRSSIAFLYAELFTMYSSACFNFHLMARYFFFSRKRTKT

SEQ ID NO: 94116 - protein, 141 aa, Gossypium hirsutum
  unsure (1)..(141): unsure at all Xaa locations
  Clone ID: LIB3147-040-Q1-K1-G2.pep
SCGSIIGKGGSTIKSLIEDSQAGIKISALDNNFYGLNDRLVTLTGTLDEQMQAIDLILSKLCEDPHYSQAMHAPFSYAATYYSMSYAPNGTGGKFPNHNEDRSNSITIGVPDEHIXLVLGRGGRNIMEISQVKWAQNKISD

SEQ ID NO: 94117 - protein, 138 aa, Gossypium hirsutum
  Clone ID: LIB3147-040-Q1-K1-G3.pep
DILGGGSPTARPITGLLGNIYGGQVPFAKPVGFLPPDGAVPIPNANGAIPTVNGVTGLPLGTGLAGTAFAGNPNQNGQPQFPVGPDGLGLGFGTITVIDDVLTVSPDLGSQVIGKAQGVYVASSADGTTQMMAFAAMI

SEQ ID NO: 94118 - protein, 141 aa, Gossypium hirsutum
  Clone ID: LIB3147-040-Q1-K1-G7.pep
GMYEQKVLPNQPPLPPMPPPPTILPVQSDYLSSVSGSPSLLQSSIPVSDSKFMRTSMPSPSGTTRPPPSLPSTPPPFASSPYNLASLNTSASQPALYNQSVMGKTELPQGSIGPTIDARLPTSAAGLASYPPPPLMQSLVF

SEQ ID NO: 94119 - protein, 81 aa, Gossypium hirsutum
  Clone ID: LIB3147-040-Q1-K1-H10.pep
VLDQLADYFKRRLAGYPTTLNEDESLLSDPNLNPKKRVATQLVRLEKKILHACLQATMDLIDQLPDHTVSPCPAPYAPLLK

SEQ ID NO: 94120 - protein, 75 aa, Gossypium hirsutum
  unsure (1)..(75): unsure at all Xaa locations
  Clone ID: LIB3147-040-Q1-K1-H7.pep
SAHAFVHAXETIVIGTSNHVGLAKRVGSRILLTITCXVYGDSLEHSQTECXMXNANPIGDRSCYDEGKRVAETLM

SEQ ID NO: 94121 - protein, 61 aa, Gossypium hirsutum
  Clone ID: LIB3147-040-Q1-K1-H9.pep
KSLNTWEIKYIYLASHRKYIPTDDIKFGRSSLLHPTPDIYNNLDQSKNKACSNPNPIFFVF

SEQ ID NO: 94122 - protein, 69 aa, Gossypium hirsutum
  Clone ID: LIB3147-041-Q1-K1-A11.pep
PTPNDSFILPLDYFTIHHLFLINNVYTSLRFLVQNYPLLLRYIHINLPLNEKITYHVLLQITTICQRTL

SEQ ID NO: 94123 - protein, 61 aa, Gossypium hirsutum
  Clone ID: LIB3147-041-Q1-K1-B7.pep
GDLNCILLEPPFYNKLTGKTSVFPNLISLVSHGGFTSWVINQKARPNRTSQQLHKLNGKGD

SEQ ID NO: 94124 - protein, 69 aa, Gossypium hirsutum
  Clone ID: LIB3147-041-Q1-K1-B9.pep
SQKAFNRRLNFQKILPNKGGKVAVPSKNKQDKVVNSLFEKRPMHFGIGGALPPNKDLHPFLKWPNVFVF

SEQ ID NO: 94125 - protein, 52 aa, Gossypium hirsutum
  Clone ID: LIB3147-041-Q1-K1-C10.pep
RLNYTYDASLQDWAIRCAPAPYELADATTTGASYLHIIPSADTKDQTQTSEP

SEQ ID NO: 94126 - protein, 58 aa, Gossypium hirsutum
  Clone ID: LIB3147-041-Q1-K1-D10.pep
VYHQSPGNSPKNAGDYHAIQKRQNVEFRMIQIPVYVPPINSSLLVKRKRSTTLVLYIS

SEQ ID NO: 94127 - protein, 44 aa, Gossypium hirsutum
  Clone ID: LIB3147-041-Q1-K1-D12.pep
PTRSFTNSRKFCFILQLLRLVCVDLRESTINHHIDGKLSASSAK

SEQ ID NO: 94128 - protein, 42 aa, Gossypium hirsutum
  Clone ID: LIB3147-041-Q1-K1-D3.pep
LLSYLLSRPRRLIEDSQVPLVSNASQCLVKLVSYNKQLFGQR

SEQ ID NO: 94129 - protein, 82 aa, Gossypium hirsutum
  Clone ID: LIB3147-041-Q1-K1-E11.pep
EDAALKDARLRCAETAKARMSDAGGECVRHDLLALHAHNGQLSALLRMEQNAGEDDKRSLHSHDDPHRLCMHYMRSNCKKYF

SEQ ID NO: 94130 - protein, 69 aa, Gossypium hirsutum
  Clone ID: LIB3147-041-Q1-K1-F1.pep
FELPPPIPSDFCGSTLRPSGRLLFHVQRLFLWETAYSLLMTWGIKIYLLVHRNGNGKPYSNTKFFKHLL

SEQ ID NO: 94131 - protein, 80 aa, Gossypium hirsutum
  Clone ID: LIB3147-041-Q1-K1-F11.pep
SSAVETRIRTILSLLVCQSLSNSKFVPCAWDCVMMHSPNMAIACSIININLIIGSQCLRPKNMAHARWFIGISHVYSAQS

SEQ ID NO: 94132 - protein, 47 aa, Gossypium hirsutum
  Clone ID: LIB3147-041-Q1-K1-F5.pep
YCKAKFWDMLQAKTIPQSASCQLPAHEDCIEDYARLKGAMLSMCTLG

SEQ ID NO: 94133 - protein, 77 aa, Gossypium hirsutum
  Clone ID: LIB3147-041-Q1-K1-G10.pep
KKKKKNPENENITAYYMQTRLIFHAISSISLIWPSILNRKTLITIGWRFLMSLNFIPLYRDQYIFLLAPTNTFSALL

SEQ ID NO: 94134 - protein, 109 aa, Gossypium hirsutum
  Clone ID: LIB3147-041-Q1-K1-G12.pep
RTWGNPLYLGVIFVGFLIIKALWVQLDISGEFRNGALPGLLSLSTKFLPTVMNLLRKLAEEGQMPATNSSQTNQAVASKSFQNGSSTSNMSSSASSGITASENSTTKGE

SEQ ID NO: 94135 - protein, 33 aa, Gossypium hirsutum
  Clone ID: LIB3147-041-Q1-K1-G3.pep
EVPSNDIFRLCIVNVKYLGMKLVFSSYIHKSIL

SEQ ID NO: 94136 - protein, 39 aa, Gossypium hirsutum
  Clone ID: LIB3147-041-Q1-K1-H12.pep
RKFYIQYLCTYGNGQAYLLTLGKGGFLFIFKPIYISVLS

SEQ ID NO: 94137 - protein, 111 aa, Gossypium hirsutum
  Clone ID: LIB3147-041-Q1-K1-H9.pep
RTNLRPLLQHNCQFRLPRMVLGKRKNSLDLTYFKKTLLLSCDLMNTKLKEINIDDLITKANHALARKFIMAEEKAAKAFLLAQQAAEKNPIDRVKTAETKAASASTSGSYV

SEQ ID NO: 94138 - protein, 69 aa, Gossypium hirsutum
  Clone ID: LIB3147-042-Q1-K1-A1.pep
PRVRAGGAWDNAKKFIETGALGGKGSESHKAAITGDTVGDPFKDTVGPSLHVLIKMLATITLVMAPVFL

SEQ ID NO: 94139 - protein, 128 aa, Gossypium hirsutum
  Clone ID: LIB3147-042-Q1-K1-A10.pep
SNLRVELFKTYGSTLAGLRAGGCDIDADDYHGYVHGRLSYDVIKPDPKLRTMLRIISQRKIICTNSDRVHAIDVMKRLGIEDCFHQIICFQTLNANLTDIKCVVLNASSDAIKIALYVARVDSPRTLF

SEQ ID NO: 94140 - protein, 60 aa, Gossypium hirsutum
  Clone ID: LIB3147-042-Q1-K1-A12.pep
KKAIKNGTSKRVHSHDICKAMASELIFRWTHIRNITPHDFVCFVVFFIKFFFYLFGRVGV

SEQ ID NO: 94141 - protein, 54 aa, Gossypium hirsutum
  unsure (1)..(54): unsure at all Xaa locations
  Clone ID: LIB3147-042-Q1-K1-A3.pep
EYSRTGFINCVMEALIKPHRWMPXKGDFSFKTLFYGEFGNSGLGSIPLNRVPWS

SEQ ID NO: 94142 - protein, 128 aa, Gossypium hirsutum
  unsure (1)..(128): unsure at all Xaa locations
  Clone ID: LIB3147-042-Q1-K1-A5.pep
TRTSTLINVVTYSEINAILGVGANFIGRLGSIRFWLIQKLISRTDYLVWKXGDNKMEPKICFQYKIPVKVIGGQALDRXLGLLPHPWPFETVHKEMDKKPVTVKTEEDKNIIKSNEAGTTTSTLGNLN

SEQ ID NO: 94143 - protein, 59 aa, Gossypium hirsutum
  Clone ID: LIB3147-042-Q1-K1-A7.pep
TSPPPVTICSIQYPLRQPCTSASPLAEKPAGDRPLAGALPSPLSFLPLTSYILSSLSFF

SEQ ID NO: 94144 - protein, 87 aa, Gossypium hirsutum
  Clone ID: LIB3147-042-Q1-K1-A9.pep
AYLDHTQSVLVQQGFSTGQNRTSTVIRQAPFSSGDRTGHVNAQNGNQHVNSLFVDNTVRVKSERVADAPPANLYPAPFGQKDLMSVF

SEQ ID NO: 94145 - protein, 54 aa, Gossypium hirsutum
  Clone ID: LIB3147-042-Q1-K1-B11.pep
PTRPPTRPKKFVEDGKIKYIGLGETTHVTLSIAHSKNTLTGVQHQWTALYSREC

SEQ ID NO: 94146 - protein, 78 aa, Gossypium hirsutum
  Clone ID: LIB3147-042-Q1-K1-B12.pep
RLHLLSNIRLAYRTRNTLTTLGRLILALLASLPLSGSATHAFIIPQCSVAPSAHYSKLTPTSTLMGSKHPTTRAYMLQ

SEQ ID NO: 94147 - protein, 80 aa, Gossypium hirsutum
  unsure (1)..(80): unsure at all Xaa locations
  Clone ID: LIB3147-042-Q1-K1-B9.pep
PRVRQDTIKAIPPKNKSMNKASGVRVTTTTLFYVLXGIAGYSAFGNHAPRNFLTGSXFYEPFWLIDFTNVWLAVHPICAY

SEQ ID NO: 94148 - protein, 78 aa, Gossypium hirsutum
  Clone ID: LIB3147-042-Q1-K1-C11.pep
MNKARVTKVVGAVCTDLNGIIRPKKNAVLTTTTTDDKRLLSTLNIIRFTAVPVIEEVNTLHDYEDMHFMNGKCHASFG

SEQ ID NO: 94149 - protein, 81 aa, Gossypium hirsutum
  Clone ID: LIB3147-042-Q1-K1-C7.pep
IIRECAVSTPLLHAHQTSKAHPQPIPPYHHVVRINRFRDMRNVKTKSESFRLFAFFFTELPPPDLCLWLPMPKAGAGGRVG

SEQ ID NO: 94150 - protein, 87 aa, Gossypium hirsutum
  unsure (1)..(87): unsure at all Xaa locations
  Clone ID: LIB3147-042-Q1-K1-C9.pep
TPRVRIDLYLFSLLSFSXVSSVHRNREDQGLVMNFYRDPCPNVETVITVQFHLLFILHKIPVFSWLRNIFHDCAIHPCDASLLLDST

SEQ ID NO: 94151 - protein, 42 aa, Gossypium hirsutum
  Clone ID: LIB3147-042-Q1-K1-D11.pep
MSVELGVFVQRVSRAFYREHSSPMTQASLQKSVAYSPYSLSV

SEQ ID NO: 94152 - protein, 119 aa, Gossypium hirsutum
  unsure (1)..(119): unsure at all Xaa locations
  Clone ID: LIB3147-042-Q1-K1-D12.pep
RKHVHETGLSXKIELVIVSPVLRTMQTGVGVFGSEGYKDGIDVPPLMVENAGESNRPAISSLNCPPFVAVELCREHLGVHPCDRRKSIGEYRPVFPAIDFSLIASDEDNLWEAYSREKN

SEQ ID NO: 94153 - protein, 122 aa, Gossypium hirsutum
  Clone ID: LIB3147-042-Q1-K1-D3.pep
RERQEEDPLVINSTNVFAALGSLKKKKKKGGEKENLGSSSKSKGLKGLGKEAEKKEVFWAPSPLKVKSWADVDEEDDDDYYASMAPPGSAWGPPKEPEPTLEESESEEDGLEEVDDEVEEEQ

SEQ ID NO: 94154 - protein, 126 aa, Gossypium hirsutum
  unsure (1)..(126): unsure at all Xaa locations
  Clone ID: LIB3147-042-Q1-K1-D9.pep
MKICFLEFRAGELLAILRGTNAPYGTRYPIDREEMMPHDLYYERDTXLHVSLVDLKAISIXHNTHEGVDLVVKGPTGDQIQHSXDKICEKFACGAHQKGIHHSCSQNKSPYYETVDYDVHESHSTY

SEQ ID NO: 94155 - protein, 48 aa, Gossypium hirsutum
  Clone ID: LIB3147-042-Q1-K1-E11.pep
SSPPHALADAVANNKQHQLQQNLPSRSTFSQCEPFRLPTTNTTAFIYH

SEQ ID NO: 94156 - protein, 64 aa, Gossypium hirsutum
  Clone ID: LIB3147-042-Q1-K1-E8.pep
NSKYTSFMSFPKELKSFIYYTLLAEKSCKGYIKGLAFLANTMSQQPQNRTKQRISGNLLHMGTI

SEQ ID NO: 94157 - protein, 59 aa, Gossypium hirsutum
  unsure (1)..(59): unsure at all Xaa locations
  Clone ID: LIB3147-042-Q1-K1-F10.pep
TWCRNDFQMPLHYPRYTQADYETMPXWKLDCLLKKYRLPITGDVEQKRSSPMAAFLLPT

SEQ ID NO: 94158 - protein, 114 aa, Gossypium hirsutum
  unsure (1)..(114): unsure at all Xaa locations
  Clone ID: LIB3147-042-Q1-K1-F12.pep
HASLECKYILALFSNQMVSTSKIYALVLNYQICLPHLTNHLQGASLSSDPSQDLIGDTTQLEDLYXQPKHGLSQYNGHMNYKQNGRTWYQNDRCNKSNVDFETSAELTCGPRAL

SEQ ID NO: 94159 - protein, 35 aa, Gossypium hirsutum
  Clone ID: LIB3147-042-Q1-K1-F5.pep
RNRINFSTVEVTYFRRQALKNRYSYYQIMLYILTN

SEQ ID NO: 94160 - protein, 68 aa, Gossypium hirsutum
  Clone ID: LIB3147-042-Q1-K1-F8.pep
KANKANKVSFSNHMTNKWRWVNLQCAKVSLESGKRYVKLLSSTNVLNTIYTNGLYAVANKAGIDLRKE

SEQ ID NO: 94161 - protein, 45 aa, Gossypium hirsutum
  Clone ID: LIB3147-042-Q1-K1-G12.pep
GTFVFMAELSLKCFYLLFFGDEDCFGRGIYNLIPTFFKNGVFLKA

SEQ ID NO: 94162 - protein, 90 aa, Gossypium hirsutum
  unsure (1)..(90): unsure at all Xaa locations
  Clone ID: LIB3147-042-Q1-K1-G7.pep
RGRVGDKERLLTACSPCQYLGSVNGLEPTVNQLWNXWFPQVFNFLIKGNRQIFAFPDYFFLNKADFVRFNSKKKRFIAVINFTQSYFTKS

SEQ ID NO: 94163 - protein, 88 aa, Gossypium hirsutum
  unsure (1)..(88): unsure at all Xaa locations
  Clone ID: LIB3147-042-Q1-K1-G8.pep
PRVRDGRIIHYFIELGTKAKAXAASEAMDTXPALGDIPDEFLDPIQYTLMKDPVILPSSRITIDRPVFQRHLLSDSTDPFNRSHITSE

SEQ ID NO: 94164 - protein, 103 aa, Gossypium hirsutum
  unsure (1)..(103): unsure at all Xaa locations
  Clone ID: LIB3147-042-Q1-K1-H12.pep
ADGIFRSLLYXGCISECDINVXRRPYHRNCRCALHDKSLGRNCSRSFPKSKNVSYPMRRSWSEGCLAMVAATGYSSPSSSPSLAGVHGAGKQQLESFKEEEDK

SEQ ID NO: 94165 - protein, 63 aa, Gossypium hirsutum
  Clone ID: LIB3147-042-Q1-K1-H9.pep
RGRVGGRMGGRLGGRVGFNILATVGSNYEHYSPCNCKYRFVSSDGSILSNEIQFHSSIVSIIA

SEQ ID NO: 94166 - protein, 67 aa, Gossypium hirsutum
  Clone ID: LIB3147-043-Q1-K1-A10.pep
FVKDKSFQSFFAKGCTVLHVIVAMWRFWFERRVEDLAWDWLRQTVGDILLGLSWVFFLVYSWREKYD

SEQ ID NO: 94167 - protein, 43 aa, Gossypium hirsutum
  Clone ID: LIB3147-043-Q1-K1-A12.pep
PRVRPLIRSLLRLHILYFWRCFFYAEGCTHAFESHITHLAIGY

SEQ ID NO: 94168 - protein, 127 aa, Gossypium hirsutum
  Clone ID: LIB3147-043-Q1-K1-B4.pep
FGYPRVFPIPTFLKHGPGNLIWGPQKKTFSFPPPGSKIWIFKKAPPFFVNVNKYSFFFFFYIFFFFFFFFFFFFFFFFFFFFFFFFFVNSLSFVTKKKAANENVSFLTMPMYKYKNILVLFFHSMHA

SEQ ID NO: 94169 - protein, 59 aa, Gossypium hirsutum
  Clone ID: LIB3147-043-Q1-K1-C10.pep
PIRPIICRILCTEIMYMVDQVACLFMLRETRNGCVHDTTAELNYIALNNLHILTHEELW

SEQ ID NO: 94170 - protein, 61 aa, Gossypium hirsutum
  Clone ID: LIB3147-043-Q1-K1-C5.pep
ALKCYMNFHLNKGDEVYHGYYAMVQFPRCELINRREEVLKVYVQIIGLYTTLTTMMMRRLF

SEQ ID NO: 94171 - protein, 136 aa, Gossypium hirsutum
  unsure (1)..(136): unsure at all Xaa locations
  Clone ID: LIB3147-043-Q1-K1-C9.pep
MLSNMGEYSFAICMIFDDYGENEHSYGHYSXICTVRGRDNCLYCKKCSSCYAIDLPYNHLFVENSMRYHCPIFYQYLFDSLKDTTVIKCCHTMHCECYYEMIIRIIYWCPMCANSVIIMCITWNTIYQEIQPTALS

SEQ ID NO: 94172 - protein, 124 aa, Gossypium hirsutum
  Clone ID: LIB3147-043-Q1-K1-D10.pep
MRSKKMVGTSAPSLRRGPYEVLCVSRDSSDQEIKTAYRKLALKYHPDKNANNPEASELFKEVAYSYSILSDPEKRRQYDTAGFEAVEDSMDMEIDLSNLGTVNTMFAALFSKLGVPIKTTISAN

SEQ ID NO: 94173 - protein, 42 aa, Gossypium hirsutum
  Clone ID: LIB3147-043-Q1-K1-D11.pep
CLQLKSDCDAYSLYFLYFHIQGIFSPPKTFIFNNMLNCNKLL

SEQ ID NO: 94174 - protein, 68 aa, Gossypium hirsutum
  Clone ID: LIB3147-043-Q1-K1-D6.pep
IALIISDISPPYINSNKSEGVSILKKKKKIKKKKINKKKKKKKFYLNILYNKFIYIFLKGGALLKIQI

SEQ ID NO: 94175 - protein, 35 aa, Gossypium hirsutum
  unsure (1)..(35): unsure at all Xaa locations
  Clone ID: LIB3147-043-Q1-K1-D7.pep
THASXPSSTFQFHYYLKPKLCNRRQNYSIFDTFQC

SEQ ID NO: 94176 - protein, 63 aa, Gossypium hirsutum
  Clone ID: LIB3147-043-Q1-K1-E1.pep
ATDPALFIDTCFHIQKKKKTKAAAATVNKKRRAGWQMRHHPSVKVHSGSCMKLGIRTRGRTRG

SEQ ID NO: 94177 - protein, 78 aa, Gossypium hirsutum
  Clone ID: LIB3147-043-Q1-K1-F1.pep
AKLRAYHHTAQTKADKKHFSNMGLDLLNGTVRNNLEAGVIEPAMSKVKIIQFATEAAITILRIDDMIKLMKDESQNEE

SEQ ID NO: 94178 - protein, 49 aa, Gossypium hirsutum
  Clone ID: LIB3147-043-Q1-K1-F10.pep
KLHKILGVCTHKLYYYIYSREVLYEYIFNGFLSRIFRTLRSDMKLFLIH

SEQ ID NO: 94179 - protein, 46 aa, Gossypium hirsutum
  Clone ID: LIB3147-043-Q1-K1-F11.pep
HRLLYTKSGNYSSTFVYMDWIFGTDKGYRKLKALKRDGVEEESKQT

SEQ ID NO: 94180 - protein, 61 aa, Gossypium hirsutum
  Clone ID: LIB3147-043-Q1-K1-F12.pep
GLAATKLTQPRAGLFMGGRLTILIMSCIPRRRKLRTKSYYDEAFRIIAYPACYTKILIHLI

SEQ ID NO: 94181 - protein, 68 aa, Gossypium hirsutum
  Clone ID: LIB3147-043-Q1-K1-F5.pep
YIAPYVCQKLSCQNGNQISEPQKHLCVNTFLYEKPAQIPKLSCPPKNASTTPQQKTKCCNVHSFLNET

SEQ ID NO: 94182 - protein, 71 aa, Gossypium hirsutum
  Clone ID: LIB3147-043-Q1-K1-F6.pep
SCRVLHATGKPASQLMLGNPFALANTKAPRPLPTFHLNAMDPLTVINRGVGLPRYRTFQAYPVLCFSSFRT

SEQ ID NO: 94183 - protein, 50 aa, Gossypium hirsutum
  Clone ID: LIB3147-043-Q1-K1-F7.pep
MDLLKSPPHFFFFFFFFFFFFFFFFFFFFFSWTNKNQHSIDNGTSKTHKM

SEQ ID NO: 94184 - protein, 132 aa, Gossypium hirsutum
  unsure (1)..(132): unsure at all Xaa locations
  Clone ID: LIB3147-043-Q1-K1-G12.pep
MAAKIFCGLMLLGLSANSSTATIFLQCSQATISSLLPPYLSPAVSSIRENPILQPYKIQQAIPSDILPLSPLSLQQSSALLQQLPXMHSLAQNIMAQQLQQLVLAKLAAYSQQQQFLTFKQLRSLNSCFLFQ

SEQ ID NO: 94185 - protein, 29 aa, Gossypium hirsutum
  Clone ID: LIB3147-043-Q1-K1-G2.pep
NCYDVQTGKGGNWGSYFYYGGPGRNANCP

SEQ ID NO: 94186 - protein, 103 aa, Gossypium hirsutum
  Clone ID: LIB3147-043-Q1-K1-G5.pep
HASGAAQLRVYNLGNTSPVPVGRLVSILEGLLSTKAKKHVITMPRNGDVPFTHANVTLAFKDFGYKPTTDLSTGLRKFVKWYISYYGIQSKTRKESQATGESG

SEQ ID NO: 94187 - protein, 68 aa, Gossypium hirsutum
  Clone ID: LIB3147-043-Q1-K1-G6.pep
KHHRKGKFYNKLKGLIPGIKDRKKASINSFQRGKENVYNVLAWKQERSETVQPYLNNVQSKCQPRFQK

SEQ ID NO: 94188 - protein, 144 aa, Gossypium hirsutum
  Clone ID: LIB3147-043-Q1-K1-G9.pep
NKSIISESCVSVGKYHVKESVSSTLQSIFDKYGDIAANCQLESSSMRAYYLECLCAVVQELQSTPFNELTKSKVKEIFSVLKDVESANIDVSWLRALLNEISEAINLASQRQTFEAKKVKYESSLESVKNELESRMENLSQKEK

SEQ ID NO: 94189 - protein, 89 aa, Gossypium hirsutum
  Clone ID: LIB3147-043-Q1-K1-H1.pep
MMDSLGPVGFIGELCNGFRLVMDCQRGLITFYSLNNNRIMSGLHDMRDDEILCMLSEGHLDGHGAPNQDDFRILMLTIRPGSMDHMGSP

SEQ ID NO: 94190 - protein, 68 aa, Gossypium hirsutum
  unsure (1)..(68): unsure at all Xaa locations
  Clone ID: LIB3147-043-Q1-K1-H3.pep
INLEINDYGCDKAHFFLRHLPESNXSEIPDLDEYYRKVMKEFAVEXEKLSEQLLDHVCENLWLEPGYL

SEQ ID NO: 94191 - protein, 48 aa, Gossypium hirsutum
  Clone ID: LIB3147-043-Q1-K1-H9.pep
IYYIFIDSFFMNYIFFFSNRKIYIFIFGSPFIFFYHIVLFTCILVQKL

SEQ ID NO: 94192 - protein, 71 aa, Gossypium hirsutum
  Clone ID: LIB3147-044-Q1-K1-A10.pep
IKPWWVWASWLSPLQYAQRAASINEFTAARWKKISAIGNNTIGYNVLHQHGLPSAKYWGLQKVEVLEVQVR

SEQ ID NO: 94193 - protein, 45 aa, Gossypium hirsutum
  Clone ID: LIB3147-044-Q1-K1-A11.pep
ICLTMILKISIEYFSVYFFYFNLEKNLVGLQCLDNHQMMNLEKKS

SEQ ID NO: 94194 - protein, 60 aa, Gossypium hirsutum
  Clone ID: LIB3147-044-Q1-K1-A3.pep
PCWLLENMVHAPGGPFICLFLGVFLFYNNTPFSAYSVNRSRKTCGSALTLKSLTPGRASL

SEQ ID NO: 94195 - protein, 106 aa, Gossypium hirsutum
  Clone ID: LIB3147-044-Q1-K1-A8.pep
ISNIQDYPVHIHPRHKQQVYCLILRYSDPSPPFNPSFKSEHRKARKRERPPLKKVIIVRAQRQKCLQVFFPTWKGGNVLPTRDSFKRPNTLFPKPKNDSLLFPSGH

SEQ ID NO: 94196 - protein, 145 aa, Gossypium hirsutum
  Clone ID: LIB3147-044-Q1-K1-B1.pep
GIDEDKGTQIRKLYVELAELWPNGIMGKHGIKSAICRAKERRRALCEHDKVRENRRKKSAQKTKTGVVKACSVSQLQAEQENQASASSGHVLALPCMTIYCKETLDQHLAAPLESCSVPPNSSLDISEEEKNEKMIIPMLKKQMK

SEQ ID NO: 94197 - protein, 120 aa, Gossypium hirsutum
  unsure (1)..(120): unsure at all Xaa locations
  Clone ID: LIB3147-044-Q1-K1-C10.pep
GKVFPTNSSKDHYLFSIEMVNFDFLELCLXDSHLKSCLSLISFKQKKKYHLLNHIIFLVKFKGERQSVMKNNTFLVLCSTRKRKCTKKSTLVRIGIMSGFRKQTAYLIRTRGRTRGRTRG

SEQ ID NO: 94198 - protein, 68 aa, Gossypium hirsutum
  unsure (1)..(68): unsure at all Xaa locations
  Clone ID: LIB3147-044-Q1-K1-C11.pep
RIVSNKENFIMVYVIGRPKKERIPLSNQIRTFDSDKFANPISQTLIKKRKGLTIDXTRXRTRGSALFS

SEQ ID NO: 94199 - protein, 64 aa, Gossypium hirsutum
  Clone ID: LIB3147-044-Q1-K1-C12.pep
IACKSLYNHNFVYSNIYSICLFINNQTSKQKRKRKSQTFPLSIQEKNNIITIKRRKKKRQYKKI

SEQ ID NO: 94200 - protein, 104 aa, Gossypium hirsutum
  Clone ID: LIB3147-044-Q1-K1-D11.pep
VNERRLKELREKHRSAVITAVEERSKGLQDWKDCQGLATKLYNFKHDPKSVLTETNKTVQLVDSQKNVDRSCSESGSGNENKVLISLNGDAELDAVPDLQDQVV

SEQ ID NO: 94201 - protein, 71 aa, Gossypium hirsutum
  Clone ID: LIB3147-044-Q1-K1-D12.pep
PEKVILYNIDAVICNARSILSQEVVVEGQKLKWEFAVNSYSICNIYINLVEKKKKENKKKKKQKKKRGGRT

SEQ ID NO: 94202 - protein, 110 aa, Gossypium hirsutum
  Clone ID: LIB3147-044-Q1-K1-D4.pep
EIGAGDQGHMFGYATDETPELMPLTHVLATKLGARLTEVRKNKTCQWLRPDGKTQVTVEYRNDGGAMVPIRVHTVLISTQHDETVTNEKIAADLREHVIKPVIPAKYLDD

SEQ ID NO: 94203 - protein, 146 aa, Gossypium hirsutum
  Clone ID: LIB3147-044-Q1-K1-D8.pep
LKQGVLGAVLIPSEDAGKERVIASLVANVEAMIKADRKITALKQLQGHIWRTGFENNELEGVVFDDVPEALEKWHALGIKVYIYSSGSRLAQRLIFGNTNYGDLRKYLSGFFDTAVGYKRETRSYVEITESLGVDKPSDMLFVTDV

SEQ ID NO: 94204 - protein, 65 aa, Gossypium hirsutum
  Clone ID: LIB3147-044-Q1-K1-E11.pep
KKGKKTYIERGSKQRDPIEQAETSDMEERAWRPLPWRKLKLGVQRSLKYGYHLMIPKRLFGLKRT

SEQ ID NO: 94205 - protein, 42 aa, Gossypium hirsutum
  Clone ID: LIB3147-044-Q1-K1-E12.pep
CSAGTRCEERGLEDVMRYRRLVIERKGASWLSLKGKKNRLTD

SEQ ID NO: 94206 - protein, 41 aa, Gossypium hirsutum
  Clone ID: LIB3147-044-Q1-K1-F1.pep
VFFNKASVIILFLVYECANKLLISTIIINPDALLSCKILLQ

SEQ ID NO: 94207 - protein, 97 aa, Gossypium hirsutum
  unsure (1)..(97): unsure at all Xaa locations
  Clone ID: LIB3147-044-Q1-K1-F11.pep
MSRRTGGEPTGDTTNLGPAVRHTEHVYGGDHISESINDTDIHVTDLTGRETMILITRGIMVNTTRDQXIAHDTMVTLHDVALRCKELLMTAMNIKLR

SEQ ID NO: 94208 - protein, 42 aa, Gossypium hirsutum
  Clone ID: LIB3147-044-Q1-K1-G1.pep
MYKLIMPIFASSICFVIFSIIHVFINSNSISQLGLVSCLLST

SEQ ID NO: 94209 - protein, 61 aa, Gossypium hirsutum
  Clone ID: LIB3147-044-Q1-K1-G10.pep
PNWRWLYFLSLMKHLSLVLLQHCDTKSFSISPHCISIRVLLHKISQPKNRAATSIYDLATL

SEQ ID NO: 94210 - protein, 124 aa, Gossypium hirsutum
  Clone ID: LIB3147-044-Q1-K1-G11.pep
EKVYNLFLEYAHKGSLADQVKRNGGNLTEPDVRRYVRSILRGLSFVHAKGFAHCDIKLQNILLSGNGDVKIADFGLAKRRGEKQGRMEIRGTPSNIAPESVKGNDYDSAVDIWALGCAIVEMFT

SEQ ID NO: 94211 - protein, 71 aa, Gossypium hirsutum
  Clone ID: LIB3147-044-Q1-K1-G2.pep
HASEDIKCVINYDFPSSLEDYVHKIGRTGRARAKGTAFTFFTQANAKYAKDLIKLLQDAGQVVSPALSTLA

SEQ ID NO: 94212 - protein, 82 aa, Gossypium hirsutum
  Clone ID: LIB3147-044-Q1-K1-G5.pep
HQNDQKIHSTITQSSKSQSLSVLDDLPNTELDLLLLVNPESEPERDELLNLPKKETKLRKTRPKPLLSCDLLPLGAHEILLF

SEQ ID NO: 94213 - protein, 58 aa, Gossypium hirsutum
  Clone ID: LIB3147-044-Q1-K1-G9.pep
QLRSCYMFFMSFFSIIGKKEKRPSMPSGIILSTFLCSYDVNILVSSSLYNIYTYIYFF

SEQ ID NO: 94214 - protein, 55 aa, Gossypium hirsutum
  Clone ID: LIB3147-044-Q1-K1-H1.pep
DAWACNHNCNRQRIALLLGVGGPYFSQVVPMVRAFLDQFSCPGFSGSFAFSAPLL

SEQ ID NO: 94215 - protein, 50 aa, Gossypium hirsutum
  Clone ID: LIB3147-044-Q1-K1-H3.pep
DYKVINLDQWINFLRFCQEISFPDLGNYDSALAWPLILDNFVEWMRQKHG

SEQ ID NO: 94216 - protein, 56 aa, Gossypium hirsutum
  Clone ID: LIB3147-044-Q1-K1-H4.pep
VSIKGSLPLKKKKKKKKKKKKKKKKKKKKKKVNQKRGPGLTYTIIPPKTGYLDTIL

SEQ ID NO: 94217 - protein, 73 aa, Gossypium hirsutum
  Clone ID: LIB3147-044-Q1-K1-H5.pep
HASAAAASVVGIDEDETEDDVTIDPDLCGTWNKNHNTENHKADIHIQIKIMYTKILLHMFSYNARRIHYFTGN

SEQ ID NO: 94218 - protein, 90 aa, Gossypium hirsutum
  unsure (1)..(90): unsure at all Xaa locations
  Clone ID: LIB3147-044-Q1-K1-H9.pep
DAWADAWADAWADAWGVSAISFQFHKGNGTTNNRAAQSHQRTTTALGKPTTPSKWDDAXKWLVGLSRSRDKKTHSKAKPRNSNADDRRLI

SEQ ID NO: 94219 - protein, 79 aa, Gossypium hirsutum
  Clone ID: LIB3147-045-Q1-K1-A12.pep
QANGTKSTRVLVWNPDGIVRAVYLLGLRPTHRSRSIHDEYVLLDWPLLCLRQHLHTFFMLNFTQRNILIIPSGKRIKLF

SEQ ID NO: 94220 - protein, 58 aa, Gossypium hirsutum
  Clone ID: LIB3147-045-Q1-K1-A7.pep
AIIAAMRTGRLTGQAAAPAAGAVNADAKDITCCNTSSYGIHIGHSKVHKTLMLENVLE

SEQ ID NO: 94221 - protein, 105 aa, Gossypium hirsutum
  Clone ID: LIB3147-045-Q1-K1-B12.pep
PTRPGKDVFISANTQRMHNDWVSDPRAFGFVTSQIACCGQGPYNGLGLCTQLSNLCPNRALYAFWDPFHPSEKANRLIVEQIMTGSNEYMHPMNLSTIMAMDSGI

SEQ ID NO: 94222 - protein, 68 aa, Gossypium hirsutum
  Clone ID: LIB3147-045-Q1-K1-C11.pep
HAYKQHEKKRGMDIDEAQERGCILRSLLMNIFKKNSKTKITLNILLLCLLTYNIYYLHQFSLISIPQP

SEQ ID NO: 94223 - protein, 167 aa, Gossypium hirsutum
  Clone ID: LIB3147-045-Q1-K1-C3.pep
LKQIIGEGNLVEESNITCLPYLQAIVKETMRLHPSFPLLLPRKAEADIEIHSFVIPKGTQLLINAWAIGRDPKFWDEPDLFRPERFIRSEMDVKGRDFGLIPFGGGRRICPGLPLAMRMLHLMLGGLIHSFDWKLENNITPGSLDMKDKYGLFLHKAQPLRIIPISN

SEQ ID NO: 94224 - protein, 41 aa, Gossypium hirsutum
  Clone ID: LIB3147-045-Q1-K1-D6.pep
PENYSEPNRLQSVFQGVGGTLLSSIPIPTPSESTSHPVISS

SEQ ID NO: 94225 - protein, 92 aa, Gossypium hirsutum
  Clone ID: LIB3147-045-Q1-K1-D8.pep
LLFVIFLGLYIRSYGCNITKGQLCPTSWFLDKGFTCSCKEKAREGKSEEELPMGQALMVIYVVAQIFPQRGFFSFLFFALDEKQTFILTMLQ

SEQ ID NO: 94226 - protein, 28 aa, Gossypium hirsutum
  Clone ID: LIB3147-045-Q1-K1-E2.pep
KPSGNPPFLIPTFSGIVGDEIHVACVRL

SEQ ID NO: 94227 - protein, 109 aa, Gossypium hirsutum
  unsure (1)..(109): unsure at all Xaa locations
  Clone ID: LIB3147-045-Q1-K1-E3.pep
PTRPPTRPRKLQNLGIVLKIEAKSGFEKLPLLLLEAMKSSNPLGVMIARGDLAVECGWYRLADIQEEILSFCGAAHLPDICATQVLXSLVKSRVPTRAVISDVASGWLA

SEQ ID NO: 94228 - protein, 91 aa, Gossypium hirsutum
  Clone ID: LIB3147-045-Q1-K1-G12.pep
REIEMEQSGEGISRCRSTIMSSVSNSMFIHNFHSFRNGYFMKPRFVSTCSPFKSFIVSYGLEGDQNPKKVKVHIHRNFLCIKYSLSAKHCV

SEQ ID NO: 94229 - protein, 72 aa, Gossypium hirsutum
  Clone ID: LIB3147-045-Q1-K1-G8.pep
KFSFNISGTWDLQLKIRYIKMQSKTIVAEAYFTTLLSAINYQIVIFVLCIKKQETPDTKERVEALAIVGGFP

SEQ ID NO: 94230 - protein, 41 aa, Gossypium hirsutum
  Clone ID: LIB3147-045-Q1-K1-H2.pep
YSIISTPKKTILMPLYMYSYLIDYNFINAFITFVEVESLFH

SEQ ID NO: 94231 - protein, 134 aa, Gossypium hirsutum
  unsure (1)..(134): unsure at all Xaa locations
  Clone ID: LIB3147-045-Q1-K1-H6.pep
AILNACSRCDSFEDASMLLEELRLFDNQVYGVAHGLLMGYRENXWIQAQSLFDEVKSMDSSTASAFYNALTDMLWHFGQKRRAQLVVLEGKRRQVWENVWSNSCLDLHLMSSGAARAMVHAWLLNIRSVVFEVT

SEQ ID NO: 94232 - protein, 57 aa, Gossypium hirsutum
  Clone ID: LIB3147-045-Q1-K1-H9.pep
APELAKLLYWLMVVGYSLRSVEVRFDMQRVLGTPPKLAELPAGENIYVLVGNCKYTR

SEQ ID NO: 94233 - protein, 32 aa, Gossypium hirsutum
  Clone ID: LIB3147-046-Q1-K1-A1.pep
SIKKKNLPVYFLKMGEWDFFPFCRKMIVPEII

SEQ ID NO: 94234 - protein, 102 aa, Gossypium hirsutum
  Clone ID: LIB3147-046-Q1-K1-A11.pep
FINARVRLCKPMVEEMYLEEMKEHERKGGEENINKSEQKESGSTSSKSNAQQQEMNASPTHQISNSTISTSPMEGSLMPPQTSFNLIGPSELDNGVGVAQRD

SEQ ID NO: 94235 - protein, 54 aa, Gossypium hirsutum
  Clone ID: LIB3147-046-Q1-K1-A5.pep
HINLLLCLLQGELILEFANTYSEGENSLRDLRNFPEINHVNKYIMFSLNAFVDS

SEQ ID NO: 94236 - protein, 141 aa, Gossypium hirsutum
  Clone ID: LIB3147-046-Q1-K1-B6.pep
VGIDDWWRNEQFWVIGGVSWHLFALFQGLLKVLAGVSTSFTVTSKAADDGEFSELYLFKWTSLLIPPTTLLIINIVGVVVGISDAINNGYDSWGPLFGRLFFAFWVIIHLYPFLKGLLGKQDRMPTIILVWSILLASILTL

SEQ ID NO: 94237 - protein, 36 aa, Gossypium hirsutum
  Clone ID: LIB3147-046-Q1-K1-B8.pep
DDITIVFMGYDICQGFLCFIGKRIVFEDGVSWRSRL

SEQ ID NO: 94238 - protein, 48 aa, Gossypium hirsutum
  Clone ID: LIB3147-046-Q1-K1-B9.pep
TIKKGAEFIFYYFFILFCCMLVFLFFVYSPMFFFFFFFFYFFFFSDAW

SEQ ID NO: 94239 - protein, 51 aa, Gossypium hirsutum
  Clone ID: LIB3147-046-Q1-K1-D2.pep
NYNIIVYPLGNSQVFSHLLPVSISLTTYTYIHKLPYQTIIFLVHTSLHANL

SEQ ID NO: 94240 - protein, 39 aa, Gossypium hirsutum
  Clone ID: LIB3147-046-Q1-K1-D3.pep
RFYYDVPLTIHKLLTELSIGDISLTKAEDHSNYLDWTFF

SEQ ID NO: 94241 - protein, 86 aa, Gossypium hirsutum
  Clone ID: LIB3147-046-Q1-K1-D6.pep
VPLLKDTEIRDLMDAADVDRGGTIDYGEFIAATAHLNKLERVEHFVAAFRYFDKDNSGYITVDELHQACTEHNMTDVLLEDIIREV

SEQ ID NO: 94242 - protein, 50 aa, Gossypium hirsutum
  Clone ID: LIB3147-046-Q1-K1-D7.pep
SALFIFFFIKERSIHRSLYSIIHNCKMLLHYRECYEVIEYSSTQCFNYNL

SEQ ID NO: 94243 - protein, 86 aa, Gossypium hirsutum
  Clone ID: LIB3147-046-Q1-K1-F11.pep
PTRPAEYSKPLIQYLEALPEDEKVILVGHSSGGACLSYALENFPEKISKAIFLCATMVSNGQRPFDVFAEELGSAERFMQESEVLI

SEQ ID NO: 94244 - protein, 57 aa, Gossypium hirsutum
  Clone ID: LIB3147-046-Q1-K1-F12.pep
NDYRCIGLIFIHVNFLFPFKLLIYMFFCGNHYLCTHLNVNQTLISQDNQSLPYNHKH

SEQ ID NO: 94245 - protein, 67 aa, Gossypium hirsutum
  Clone ID: LIB3147-046-Q1-K1-F3.pep
FRIQMCCRIHKCRLGKKQTGNNYSPNYELWWDLRIHTCLKMPELSNVGSLNMTIEDNKRRDAWATFF

SEQ ID NO: 94246 - protein, 65 aa, Gossypium hirsutum
  Clone ID: LIB3147-046-Q1-K1-F4.pep
NASSFDHSYTLLHRNLGFFSTPQCRNTNTPLPTSLNSFHLNISRTIHSLLTILTPIIPLVKYSLR

SEQ ID NO: 94247 - protein, 43 aa, Gossypium hirsutum
  Clone ID: LIB3147-046-Q1-K1-G6.pep
LIDVSHLKNHRANVIVITFGLIFVCMHSMQRLSQAPRLRKLGD

SEQ ID NO: 94248 - protein, 125 aa, Gossypium hirsutum
  unsure (1)..(125): unsure at all Xaa locations
  Clone ID: LIB3147-046-Q1-K1-G7.pep
PTRPAFSIWDVGGDSNSLDVLPIACKNAVAILFMFDLTSRCTLNGVVGWYSQARKWNQTAIPILVGXKFDDFVGLPPDLQWTIVTXARAYARAMNATLFFSSATHNINVNKIXKFIMAKLFNLPW

SEQ ID NO: 94249 - protein, 45 aa, Gossypium hirsutum
  Clone ID: LIB3147-047-Q1-K1-A6.pep
QKYLEVYYHQKSDSSFQHKFSSKSLTKLTYTPICHLFFSTTPQFG

SEQ ID NO: 94250 - protein, 47 aa, Gossypium hirsutum
  Clone ID: LIB3147-047-Q1-K1-A8.pep
DPMLNKCKTVPIVAVLTSSQDSVIDISSKTDASPSNNPPCRIGMWHH

SEQ ID NO: 94251 - protein, 56 aa, Gossypium hirsutum
  Clone ID: LIB3147-047-Q1-K1-A9.pep
RQWITEVRPKIRCLKVGTGSNLQPYNQRFFFGSFITPLKRHFRNLSLIQDIVTLDV

SEQ ID NO: 94252 - protein, 131 aa, Gossypium hirsutum
  unsure (1)..(131): unsure at all Xaa locations
  Clone ID: LIB3147-047-Q1-K1-C4.pep
DMGNIDPYSIFTPSCSANAGQTKWLLKRRLMVSQLIEKYDPCTEKHSEVYFNLPEVQKSLHVLPEAAPSKWETCSDILNTNWKDSPITMXDVYRELIHEGLRIWLFSGDTDAVNPITSTRLHIDALKLATI

SEQ ID NO: 94253 - protein, 75 aa, Gossypium hirsutum
  Clone ID: LIB3147-047-Q1-K1-D10.pep
IVKQSVPLNKTVFTRTCTVAAPERCNLIPQLTWKLIRVSWISEKDHKTTIYYSGPVHGNHASFFTINPTTGMLCR

SEQ ID NO: 94254 - protein, 84 aa, Gossypium hirsutum
  unsure (1)..(84): unsure at all Xaa locations
  Clone ID: LIB3147-047-Q1-K1-E10.pep
IHSPPPPYVHKSPPPPILXAPAPYVYKSPSSPSHPKPHSHPYTKPXPPQPYTPLSIPKPHPSHSKTPLPXPKYFYKSSPPSKAI

SEQ ID NO: 94255 - protein, 115 aa, Gossypium hirsutum
  unsure (1)..(115): unsure at all Xaa locations
  Clone ID: LIB3147-047-Q1-K1-E6.pep
MATSSQDSSSSKRHFHWTNKVATEDTEASSTTPNEDDKNGRSGIKTHVSLSTPRKKKLPAAAVSIARLRSLFHLLGRXRSSLPFGLGSRVIGTLFGYRRGHVHFALQKEAGSPPA

SEQ ID NO: 94256 - protein, 82 aa, Gossypium hirsutum
  Clone ID: LIB3147-047-Q1-K1-F2.pep
GHTVGHLKKPTCPNYLFTLPLVVNPVWSTVLTYAGEPFDVYFINMTSINVIGNPIQIYSSLLAVVVNCSGGTNFSRSFLTLF

SEQ ID NO: 94257 - protein, 84 aa, Gossypium hirsutum
  Clone ID: LIB3147-047-Q1-K1-F4.pep
RQIPPVFCSPTQLHALVETKAVTVSPFCHSQFPFWKPRESLDLFSQISRNQFFCGMLISPLYVYPRSLVQSPTNLFSLLSSSSS

SEQ ID NO: 94258 - protein, 71 aa, Gossypium hirsutum
  Clone ID: LIB3147-047-Q1-K1-F6.pep
MAAELPKPATEDVKFDLFEDDDEFEELEIDEEWELKEEGKEITQRWEDDWDDDDVTDDFSLQLRRDLGITL

SEQ ID NO: 94259 - protein, 44 aa, Gossypium hirsutum
  Clone ID: LIB3147-047-Q1-K1-F7.pep
IWTQARPQYNKQGRVGSSSTTLMPLSMPNAIFKHQKDVIEFAMT

SEQ ID NO: 94260 - protein, 74 aa, Gossypium hirsutum
  Clone ID: LIB3147-047-Q1-K1-G11.pep
CCWYSTNTCNGSSHHLRPKLKQIRLKMRLTWKLADLSFQAFQCSQFHVQAKILPILCRRVLSQSIFCVTCDLSA

SEQ ID NO: 94261 - protein, 60 aa, Gossypium hirsutum
  Clone ID: LIB3147-047-Q1-K1-G2.pep
LSTGMTLKIMIGIAWSLPWFTIFHVLGIISLPWSILLECLDSSEAKCFSLGDSARIVIFA

SEQ ID NO: 94262 - protein, 79 aa, Gossypium hirsutum
  Clone ID: LIB3147-047-Q1-K1-G7.pep
MRNSDKTHAHLQVNSAILMGGARGIRRLTNAMLTEIVRATMQHKKKKNSISESEILSQLVWNGYLLKMWICSHRRGQFM

SEQ ID NO: 94263 - protein, 80 aa, Gossypium hirsutum
  Clone ID: LIB3147-047-Q1-K1-H4.pep
PRVRERVKSGSRVVMGNFQAPGEGNYNLTAFCLCDSWIGCDKKTNLMIKILKRSRAGTRTGALSEEGAGMEEGIDDVEHV

SEQ ID NO: 94264 - protein, 91 aa, Gossypium hirsutum
  unsure (1)..(91): unsure at all Xaa locations
  Clone ID: LIB3147-047-Q1-K1-H5.pep
ISNFHVLAVYPTNLLFAVLLYSCACLSSFCSSSSFSSSSSSSXVVCVSAHAYACXVFWSPPFVAWFRSSFGSGSSSLCCLPVLLXCLRFPS

SEQ ID NO: 94265 - protein, 61 aa, Gossypium hirsutum
  Clone ID: LIB3147-047-Q1-K1-H7.pep
HDSCVQAMNIDYLSQKCSQGGIYCMKDFQKGGGWSFKGYKCLVYQVFDVISIVMNSVLFAG

SEQ ID NO: 94266 - protein, 67 aa, Gossypium hirsutum
  Clone ID: LIB3147-048-Q1-K1-A1.pep
LNDWPNVAPGKFLMEEANLLNILQLGTIEPLSLWKFLLQKFFFKHVTLLFFYSAPWMKWLTRKLCCL

SEQ ID NO: 94267 - protein, 75 aa, Gossypium hirsutum
  unsure (1)..(75): unsure at all Xaa locations
  Clone ID: LIB3147-049-Q1-K1-A2.pep
GGVPSVPLLALVFSSXASPPXLLLLXXAPGSLLRVXXAWXPPLXLXVGCLPXXXVPPRACAXARXVXLRAWLPAL

SEQ ID NO: 94268 - protein, 40 aa, Gossypium hirsutum
  Clone ID: LIB3147-049-Q1-K1-A5.pep
PANIAQMILQIPLTETLTDDFQVWQGELSGEFSARSAYKL

SEQ ID NO: 94269 - protein, 139 aa, Gossypium hirsutum
  Clone ID: LIB3147-049-Q1-K1-A8.pep
HASGESVAIARTVGHLSKSAEVMKLVNNLMKAPQMATTMQEFSKEMTKAGVIEEIVNDAVGTALDSEDIEEETEEEVNKVLSEIAGETAARLPEAVRKERARVPTQRETTSHQEEAIAEGADDEEKLEEIRARLARVRS

SEQ ID NO: 94270 - protein, 57 aa, Gossypium hirsutum
  Clone ID: LIB3147-049-Q1-K1-B4.pep
INKNPDLMFFMCQILGSEINDINNTNCRLSLQTSYTLAGNNTIHTWQIIKKLRGHLG

SEQ ID NO: 94271 - protein, 90 aa, Gossypium hirsutum
  Clone ID: LIB3147-049-Q1-K1-B7.pep
ISYIISADFLREKKGRLWRLNDWGLRRLAYKIKKAKNAHYILMNFELEARWINELKTMLDQDERVIRHLVIKRDEAITEDCPPSPDWHTV

SEQ ID NO: 94272 - protein, 156 aa, Gossypium hirsutum
  Clone ID: LIB3147-049-Q1-K1-B8.pep
MQRLCTKLRFLGLQSTQTLPSLSASRRLLHHSFPPIHIISTKWSLEPFLNNSVASPPLAVNSFSSSPLLLSLVQVRHVSSRERAKRRKPMTPRTSKLKKIKMKSYSSYKSRFRTMNDGNIRRWREGKNHNAHLKSKKSRRRLRQPAIVPAAYAKVM

SEQ ID NO: 94273 - protein, 89 aa, Gossypium hirsutum
  Clone ID: LIB3147-049-Q1-K1-C10.pep
PRVRKQGIAKEKEKMKINRSRTHGDEAENMAPSNISLNLEDVKHKNKGEERLLQIRTNPPSPQCFSAPTKTTATPSKASRSRLMERGIL

SEQ ID NO: 94274 - protein, 127 aa, Gossypium hirsutum
  Clone ID: LIB3147-049-Q1-K1-C7.pep
DVAKEAKTQATADTTAAAPAPEAVSEAESVDTTASAATAEENPAQAEAVDAPETAPETVSSGTPGGSHDLDNALAEDGKAFMMAFVEGWEDSAKTKAQNKLYDKVSCVDTWENCLEAYLEANVEQIE

SEQ ID NO: 94275 - protein, 57 aa, Gossypium hirsutum
  Clone ID: LIB3147-049-Q1-K1-C9.pep
PRVRPPLSDIKRSKPQIPGGEKENGEGTPRCASHTLCKRNHLGLQEVVVKPVFVHFY

SEQ ID NO: 94276 - protein, 53 aa, Gossypium hirsutum
  Clone ID: LIB3147-049-Q1-K1-D8.pep
ATSRQDSKNNPSAGFIQCALDSVGTVCTCVAISISTRIVWHPSISPRSYKRSF

SEQ ID NO: 94277 - protein, 71 aa, Gossypium hirsutum
  Clone ID: LIB3147-049-Q1-K1-D9.pep
KLGEFTGKALNVYSNLPGMIMTQLDSLHWPRKPVKGRTQWKYQNGGVSVLYADGHLGLGGFAYLTANEGGR

SEQ ID NO: 94278 - protein, 57 aa, Gossypium hirsutum
  unsure (1)..(57): unsure at all Xaa locations
  Clone ID: LIB3147-049-Q1-K1-E3.pep
KTRQERKQEKWVFWIMFQSGGIRLQXLFPKSLHPSSYVDILCPVFTFWLSILGNIIF

SEQ ID NO: 94279 - protein, 67 aa, Gossypium hirsutum
  Clone ID: LIB3147-049-Q1-K1-F10.pep
HKLTKETRRNTSRIINSSDERSDYMDPYIHTKYHIQNYIQISLLKLVFEFVSLKVRTNVRSNFKFNV

SEQ ID NO: 94280 - protein, 133 aa, Gossypium hirsutum
  Clone ID: LIB3147-049-Q1-K1-F5.pep
PRVRLATDYSGNTYHLITKNCNHFCNDVGIQLTGKPIPSWVNRLARLGFLCNCVLPAELNETRVRQVRSESKLQPVEKKLRSQPSKFVPSSKPLPSSLKSCPSGPAMSSRQRRCIPSSALIHSSSTSTLSLKL

SEQ ID NO: 94281 - protein, 51 aa, Gossypium hirsutum
  Clone ID: LIB3147-049-Q1-K1-F6.pep
PVDPGVRHAFDSLHITPLTLTNLSQTSAGISSMMCVFYLLLNLFLSFLNYF

SEQ ID NO: 94282 - protein, 161 aa, Gossypium hirsutum
  Clone ID: LIB3147-049-Q1-K1-G2.pep
LVHSIMRHVAETWRIDLQDLSMKIGWPLYGKYGHAWEAFKIIETDPESVLNTLTCEVTKPDPDGQEVTEVLPAATEEVKDALVKNIMRRMTPQPLKIRADIEMKRLQFDGVLHIKEAMRKAEAAVNDDCPVKIKLDAPTLYVLTTQTLDKEHGIAILNKQL

SEQ ID NO: 94283 - protein, 86 aa, Gossypium hirsutum
  Clone ID: LIB3147-049-Q1-K1-G4.pep
PRVRSGVQSRSVFGLFNVPAKRYSFILLVVFPACYTKVLVLDPFGIWLLAIPCYHFYLTIFHCWSICECEAILCGEPIIIRNISAF

SEQ ID NO: 94284 - protein, 142 aa, Gossypium hirsutum
  Clone ID: LIB3147-049-Q1-K1-G5.pep
MPVETEEVAGPPPPPAVPIPPQRRPRVREVSSRFMSPVSSSHSSGDHSRSPLHKQHHLQRQRRQSEPEVDENILAVAPCDTPRASLESPFINITTVQKKHRHSRTYSDTSKLFGRSTANNTPLRPDTPTIERTSSLPSSTIK

SEQ ID NO: 94285 - protein, 53 aa, Gossypium hirsutum
  Clone ID: LIB3147-049-Q1-K1-G6.pep
SLELRLILEQILKHSCYVEKKTAECMSGLYKIYDLLFVSAITIVCLVKRISFY

SEQ ID NO: 94286 - protein, 107 aa, Gossypium hirsutum
  Clone ID: LIB3147-049-Q1-K1-G7.pep
TERLLVYPFMQNLSVAYRRRELKPGEPVLAWPARKRIALGAARGLEYLHEHCNPKIIHRDVKAAYVLLDVDFEAFFWDFGFFKFFYFMSSFLFNLWIFFFILILYFL

SEQ ID NO: 94287 - protein, 34 aa, Gossypium hirsutum
  Clone ID: LIB3147-049-Q1-K1-H11.pep
HASARASVVITLKSVDHSPYDNPLDDRKRVHVQD

SEQ ID NO: 94288 - protein, 146 aa, Gossypium hirsutum
  Clone ID: LIB3147-049-Q1-K1-H9.pep
RFTGIYYLDGITVTNKGLQMELEKILTIFTSIDLSCNNLEGPIPDVIRKFKALYVLNLSHNALTGKIPPSLGNLQQLESLDLSSNNLSYSIPQQLLKLTFLAVLNLSYNQLEGLIPDGKQFATFTNDSYEGNKGLCGNPLTKQCND

SEQ ID NO: 94289 - protein, 90 aa, Gossypium hirsutum
  Clone ID: LIB3147-050-Q1-K1-A12.pep
PTRPPTRPPTRPHTHRHSLTLCISIACACSSVHTQHPKYTMRGQLEGGDNLLKIPNASIIHCIRFVHNVSYSLFFSLEYMFMVFQLVSFL

SEQ ID NO: 94290 - protein, 112 aa, Gossypium hirsutum
  Clone ID: LIB3147-050-Q1-K1-A3.pep
SFSTVSFFHSFFFLPYLIGLESSSSSNLSHAFVYSSHTRRRLAFFLFGSLFLALFGGFLGVEQCIFDLPGFFELYSCQSSLLLVEVMIFALWGQSTQTGGESVSFFTLTRMC

SEQ ID NO: 94291 - protein, 71 aa, Gossypium hirsutum
  Clone ID: LIB3147-050-Q1-K1-B10.pep
KGKEKVKWKSNLQAGKFNRFNSAKEKTIKSFQVPCRLYTAVFGLTTHPKNPAEAATSQLHGAARAKKLAKE

SEQ ID NO: 94292 - protein, 69 aa, Gossypium hirsutum
  Clone ID: LIB3147-050-Q1-K1-B5.pep
AANPFWIGSYTRATPGIKIPLVQEVPRPVGLSYKIPSTSHSQGSRFTPVTQCLWENLHGLAPSRAKVRL

SEQ ID NO: 94293 - protein, 113 aa, Gossypium hirsutum
  unsure (1)..(113): unsure at all Xaa locations
  Clone ID: LIB3147-050-Q1-K1-B6.pep
HIEVFSDHESFNLMVKVHALVICNHRSDIDWLVGWVLAQMSSCFGSXINYIEKSSKFLTNKXWTMWFSEYLFLERSWAMDENTLKAGLXLLKVLSRSFLLALFVEGYFVIQSK

SEQ ID NO: 94294 - protein, 81 aa, Gossypium hirsutum
  Clone ID: LIB3147-050-Q1-K1-C11.pep
PRVRGTNCSSHYECPVRWRGTNTNRSRRLTLAYGRWSDHCVDVKIPHSTRVRHSKVTNERRYKALTSCYCPQARNFIEALM

SEQ ID NO: 94295 - protein, 45 aa, Gossypium hirsutum
  Clone ID: LIB3147-050-Q1-K1-C5.pep
HASEWSNPVTHRISPSIEVGGSTATIRDLDCNSSLVVAPVEDHQH

SEQ ID NO: 94296 - protein, 42 aa, Gossypium hirsutum
  Clone ID: LIB3147-050-Q1-K1-D1.pep
MRTHAPAPRLGTKTPFSYALIKTRKEGKKKTHTRKKEKNEGF

SEQ ID NO: 94297 - protein, 157 aa, Gossypium hirsutum
  unsure (1)..(157): unsure at all Xaa locations
  Clone ID: LIB3147-050-Q1-K1-D5.pep
FQIRRARSNNKHLEKEYDSLXATFDKLMADFDNLLKEKDDLKNHVLTLKEKLLIKETGMXNLGSVQAIHSTNDEPHKPNPDASHVPLLACXQEESCSAQSDVFDSDSPHYPDGHGYYSSFIEPAESSNVFEPYQSDKEDDLIKSLLHSPLFFPNSIV

SEQ ID NO: 94298 - protein, 45 aa, Gossypium hirsutum
  Clone ID: LIB3147-050-Q1-K1-D8.pep
PLFRRDLTAPYLDDGLLEGVGFRDAWHGLVFLSPKGHVTRLSHAH

SEQ ID NO: 94299 - protein, 31 aa, Gossypium hirsutum
  Clone ID: LIB3147-050-Q1-K1-E8.pep
LLILIISIIIGYFTYQYSPSDGYLTGKSPFF

SEQ ID NO: 94300 - protein, 52 aa, Gossypium hirsutum
  Clone ID: LIB3147-050-Q1-K1-F12.pep
VFCSSTAQIITSRPMNVTRTGPSTILNSTFFKNDHLPLSYFLPYILYHQRLI

SEQ ID NO: 94301 - protein, 68 aa, Gossypium hirsutum
  Clone ID: LIB3147-050-Q1-K1-F6.pep
YPYSLTPAKNPMNSLEAHTRRVTRYKVDFIFIKLLNETLDPFFILRCEGHSSFPIYIVNQVYSTCNSF

SEQ ID NO: 94302 - protein, 145 aa, Gossypium hirsutum
  unsure (1)..(145): unsure at all Xaa locations
  Clone ID: LIB3147-050-Q1-K1-G4.pep
GRVGQDLVILSGGHTIGVGHCNTFSNRLYNFTGNGDQDPSLNATYATFLKTQCQSLSDSTTFVAMDPGSGLTFDNNYYVTLKQNKGLFQSDAALITHEISRIIVDELLVSEVFFREFALSMVKMGSHXVLTGNEGEIRKKCSVVN

SEQ ID NO: 94303 - protein, 135 aa, Gossypium hirsutum
  unsure (1)..(135): unsure at all Xaa locations
  Clone ID: LIB3147-050-Q1-K1-G5.pep
HFLTLSPLHSIMGCQWGPFSKRLYTHPGDGDQDPCLNATYATVLITQCQHLSHSTTLVAIAPGSALTCDYSKYATLHLITGVLQSEAKLFSHEITRRSVADLLXLISFLQIGTXSMVKMGAIVFLTGDEGDIRKK

SEQ ID NO: 94304 - protein, 51 aa, Gossypium hirsutum
  Clone ID: LIB3147-050-Q1-K1-H10.pep
EVERVYSGDGTTVALGCSNDPLSYYNISEGFNVNYSLYLKLVNMKATIIWS

SEQ ID NO: 94305 - protein, 75 aa, Gossypium hirsutum
  unsure (1)..(75): unsure at all Xaa locations
  Clone ID: LIB3147-050-Q1-K1-H2.pep
EWKVXLINSTFLEEIASKILQTPLAKERIEDIRVWRGNLQGNFLSEVPINYYIKVLLTLIIHIMILGSYTKNYDL

SEQ ID NO: 94306 - protein, 59 aa, Gossypium hirsutum
  Clone ID: LIB3147-050-Q1-K1-H4.pep
GGYMQTYKPLLLLIPSIIFYPTIPTIFTLLYFTGIHCFYLHKIQCYKFPSFYHLIHAHE

SEQ ID NO: 94307 - protein, 152 aa, Gossypium hirsutum
  unsure (1)..(152): unsure at all Xaa locations
  Clone ID: LIB3147-050-Q1-K1-H7.pep
SKTRSVCQKSHSSTRQQATSDHRSEESRRIQCTKCGNSHIWVCTNRNKAKARWCQDCCQYHQAKDGDGWVEYKGSLVFDRPQKVEIPRAFVCAESKIFDVSEWAICXGMACRPNTHRPSFHVNMVGLEKTXRSKSSRYPWDLDAEMIDEDEE

SEQ ID NO: 94308 - protein, 161 aa, Gossypium hirsutum
  unsure (1)..(161): unsure at all Xaa locations
  Clone ID: LIB3147-050-Q1-K1-H8.pep
PRVRKMAASEFSAGEGSVNGEVVKVRNLRHGGGGEVGGFVLWQKRPELWCLELVVSGCKISAGSDGKVAWRQTPWHHSHASRGPPRPLRRFLQGLDPRSTANLFTNSVCVGEKTIDDEDCXVLKLDAEPSALRARSSSNVEIIRHTVWCCFSQRTGLLIQL

SEQ ID NO: 94309 - protein, 90 aa, Gossypium hirsutum
  unsure (1)..(90): unsure at all Xaa locations
  Clone ID: LIB3147-051-Q1-K1-A10.pep
YWKYRPRSGASLRNQMKKIDVTQHIKYLCEFXGKYAIXRKAVGILCCKDCXGKSKAWGAYTXDTASAVTVTSTIIRLMEHTDSCTNNIII

SEQ ID NO: 94310 - protein, 66 aa, Gossypium hirsutum
  Clone ID: LIB3147-051-Q1-K1-A6.pep
YKIIITPLKLINHHIYSQIKVHPAILINNTIIYRRESIYFQRERDLFINPTIDGPIILTPISNKRI

SEQ ID NO: 94311 - protein, 57 aa, Gossypium hirsutum
  unsure (1)..(57): unsure at all Xaa locations
  Clone ID: LIB3147-051-Q1-K1-A9.pep
NYYXFLFFKIFXFIFFFXSXLIYAKRYFMEHSIITIFAKLLFTYITQKRGKCIIRYL

SEQ ID NO: 94312 - protein, 67 aa, Gossypium hirsutum
  unsure (1)..(67): unsure at all Xaa locations
  Clone ID: LIB3147-051-Q1-K1-C5.pep
NENXHIQCMTENGEQNISQDESEVPICFWMYTLLMLYFSNQRVNSNSLEENEFFFRGPLNGTFAFSR

SEQ ID NO: 94313 - protein, 142 aa, Gossypium hirsutum
  Clone ID: LIB3147-051-Q1-K1-E11.pep
GAIVYSSGRVSIIFVDEPTSGLDARAAAIVMRTVRNTVDTGRTVVCTIHQPSIDIFEAFDELFLMKRGGQEIYVGPLGHHSRHLIKYFEGIQGVSKIKDGYNPATWMLEVTSTAQELSLGVEFAEFYKKSDLFKRNKTLIED

SEQ ID NO: 94314 - protein, 83 aa, Gossypium hirsutum
  Clone ID: LIB3147-051-Q1-K1-E5.pep
VRKSTETKLIQTRSFEGDYFSIFDFLSVFLFHSFYIRISKSKRREVPVIVSSSPESGFHQWPWRDKSSTGSVPTEKGTRGGVS

SEQ ID NO: 94315 - protein, 52 aa, Gossypium hirsutum
  Clone ID: LIB3147-051-Q1-K1-E7.pep
LDILQREWIPIYDVAPILTSIQTLLCDPNPNSPANSKAAMMFIENKREFNTK

SEQ ID NO: 94316 - protein, 69 aa, Gossypium hirsutum
  Clone ID: LIB3147-051-Q1-K1-F8.pep
KNRGDRRVRPRVRIRKVNDVFMLMLMNTRGGDEFLMGSSHWFSFELCDYNTTIYLNGNALVFLYPTKLL

SEQ ID NO: 94317 - protein, 147 aa, Gossypium hirsutum
  unsure (1)..(147): unsure at all Xaa locations
  Clone ID: LIB3147-051-Q1-K1-G2.pep
TRAAAVVHVTDDSTGCAITDLKRLLMIKDLLCNVLKGNDDLKTAKTMLSAPGVMHRERRLHQIMFADRDYERVERTGVRAVEERSSRPQVNLLNIEKEYTVITMRAKDRPKLLFDIICTLTDMQYVVFHGMVNTTRMDANXEFYIRH

SEQ ID NO: 94318 - protein, 87 aa, Gossypium hirsutum
  Clone ID: LIB3147-051-Q1-K1-G5.pep
PRVRFAVDFPFFCCVLSVALQVFVASCCRYRTKTWHGSTRCIEATVTAAGESDARGYCCGARARAECLRFLAFGLGQLARVLCLSLG

SEQ ID NO: 94319 - protein, 48 aa, Gossypium hirsutum
  Clone ID: LIB3147-051-Q1-K1-G9.pep
LINGLRWLENCFTFINIVFYCHEFDYERRIDPLLKNIILIKKFIIIYI

SEQ ID NO: 94320 - protein, 55 aa, Gossypium hirsutum
  Clone ID: LIB3147-051-Q1-K1-H3.pep
KKKNYVPNNDQVFVNIGNLDSRRYKNPAISWTFLINNQVKNEIIYLRFYKLNPSQ

SEQ ID NO: 94321 - protein, 116 aa, Gossypium hirsutum
  Clone ID: LIB3147-051-Q1-K1-H4.pep
APQPLRVAMEEKTYAEEARQEAKRQIEIAEQEFAKAKRIRQQAQAELEKAQALKDHAIKQINSTILQITCHACQHQFQARTPPEENSLVASYISSAVTEGEVENDIQTSLTKATNT

SEQ ID NO: 94322 - protein, 64 aa, Gossypium hirsutum
  Clone ID: LIB3147-051-Q1-K1-H9.pep
QTTFHLCKQLAEAAEACEGLSGRTLRKLPFLAHAELDNPYCCDPNKLLNTMIDTARRERSELPD

SEQ ID NO: 94323 - protein, 75 aa, Gossypium hirsutum
  Clone ID: LIB3147-052-Q1-K1-A3.pep
IVNSVGVEADLTQSRSSHRMMFYVFQGDYSLCSPLNSKLCLADHVKLASITKIWKEAISQHSARCKLYTSKEAFN

SEQ ID NO: 94324 - protein, 72 aa, Gossypium hirsutum
  Clone ID: LIB3147-052-Q1-K1-A5.pep
RNRGMGRLSSLLYRKGSGGSGYLAVPAEENVASHVDQKGKAEGVEGILCLKTFALLVFNSRKVVGREEASHF

SEQ ID NO: 94325 - protein, 85 aa, Gossypium hirsutum
  Clone ID: LIB3147-052-Q1-K1-A7.pep
PTRPKLLDATMNMEGVLLAGVPGAGGFDAVFAVTLGDSSRNVTNAWSSHNVLALLVREDPQGVCLESGDPRCREIISAVSSVNIK

SEQ ID NO: 94326 - protein, 21 aa, Gossypium hirsutum
  Clone ID: LIB3147-052-Q1-K1-B3.pep
PETASQLKDAYGLRTLLIIES

SEQ ID NO: 94327 - protein, 137 aa, Gossypium hirsutum
  unsure (1)..(137): unsure at all Xaa locations
  Clone ID: LIB3147-052-Q1-K1-B4.pep
QPFFGGEERSQSEMQLVRSGRLVYDPXTDWCWNAYLPXGSNRDHEAANVSGPNADDISGLDCPTTMVVVGGFDPLXKDRQIRYYEWLLKSGKEARLIEYHNMIHAFYTFPLMPNFPLGCANQGVHCQVFIQSSKPQI

SEQ ID NO: 94328 - protein, 64 aa, Gossypium hirsutum
  Clone ID: LIB3147-052-Q1-K1-B5.pep
GFSSSKNMEFCMYVFCIQKCKVFSLLSWGSMEISPYSTVFPKKNTLGAYIMFAGSCWPTNRRFK

SEQ ID NO: 94329 - protein, 134 aa, Gossypium hirsutum
  Clone ID: LIB3147-052-Q1-K1-B6.pep
PTRPDWSSLRAQTPPKLALETGAQSSDGDDYNDSSWNPTHIGDGSARQSDGIVSSSSSAESSGHITRLASIDSFDSKWQQFLDPGESVLMISMVKKLQKLSSKKVQLILTDKPKLIYVDPSKLVVKGNIIWSNN

SEQ ID NO: 94330 - protein, 41 aa, Gossypium hirsutum
  Clone ID: LIB3147-052-Q1-K1-B7.pep
QLKINKQNLTRKVPIVTNLLFYSWKQQWHVMFEAISFHSIC

SEQ ID NO: 94331 - protein, 46 aa, Gossypium hirsutum
  Clone ID: LIB3147-052-Q1-K1-B9.pep
CRFVNVRKLKFFIQSAIFFICFFFFENKKGIPLKRQIVYEISTFPQ

SEQ ID NO: 94332 - protein, 96 aa, Gossypium hirsutum
  Clone ID: LIB3147-052-Q1-K1-C3.pep
GVSANAASKVGSTVSTLASTVTVSVCTAGVSSYASSFAFYDSSAALDYSLTNSLVLSSGGASDMENSGSSPTRAISCCVRLSFKRCGRWLLYWRFL

SEQ ID NO: 94333 - protein, 75 aa, Gossypium hirsutum
  unsure (1)..(75): unsure at all Xaa locations
  Clone ID: LIB3147-052-Q1-K1-C8.pep
MGDCTKLLDCKLFLKDFXNQVLTIAALXVWSYSKLSNSTKNDSSSPTXLIIVPMNTTVRDLKTEATKFFEDVYAM

SEQ ID NO: 94334 - protein, 74 aa, Gossypium hirsutum
  Clone ID: LIB3147-052-Q1-K1-D1.pep
NLISQFFKTSPDHHGGLLLTDHPHFPLQKHLLLQTLPNPTRTKHPLLMTISLCNTIAAMSLPQFILGRTPCSPI

SEQ ID NO: 94335 - protein, 98 aa, Gossypium hirsutum
  Clone ID: LIB3147-052-Q1-K1-D6.pep
KRCSFLDETLPLLNQNFRKKGVNCRELNKLHITYFFLSRLLTTHLANYDGRTLLINWHILILTAMQRMMEWIDYECDHHSSFIMIMSLRDTTKIHGPE

SEQ ID NO: 94336 - protein, 56 aa, Gossypium hirsutum
  unsure (1)..(56): unsure at all Xaa locations
  Clone ID: LIB3147-052-Q1-K1-D8.pep
PSPSKAERPHVAVASDFNNLEPLHVESLLLMHASQPRSTKHGGXTRINTCKCGTSY

SEQ ID NO: 94337 - protein, 82 aa, Gossypium hirsutum
  Clone ID: LIB3147-052-Q1-K1-E10.pep
MSNKYNLSRRKRGDEFDLQREREEKEKKVKKLQAKKNKMKVDGSEKKKKKAGSGFQVGKRKLKTKLTEVAKAKAALAMELDK

SEQ ID NO: 94338 - protein, 90 aa, Gossypium hirsutum
  Clone ID: LIB3147-052-Q1-K1-E12.pep
RKQIEQLYKKATPKKPQRGCVVSKKGVQVRAGKGKVLVDRRMKKDARARATGKSGKGCSKKGKNGKVDKKGKGSGKASGRKGNKNKGSHS

SEQ ID NO: 94339 - protein, 58 aa, Gossypium hirsutum
  Clone ID: LIB3147-052-Q1-K1-E8.pep
FLVLVLPPALFLKTAAWHALFAAFSCKVLRISLYGVVLGLSHSQCSFCLCPFVLERLF

SEQ ID NO: 94340 - protein, 145 aa, Gossypium hirsutum
  unsure (1)..(145): unsure at all Xaa locations
  Clone ID: LIB3147-052-Q1-K1-F2.pep
TIISHPQKTLLPSTLSYVKKPXQXKEEAAAAVNNMGFFHFTNKENPRQKKDKMKKQLFRLVFPPPLLFETPISFVLFCLVCFIFYAKTVSHDNAIKEIAACSSSPNFLLLWHLCFFTTPDKDDEVCNKTSLPKANNLIFTLSLNP

SEQ ID NO: 94341 - protein, 88 aa, Gossypium hirsutum
  Clone ID: LIB3147-052-Q1-K1-F3.pep
PYIMIQTRKEVKANHKPGAPTSPRIINQPPTLERNQGRQLMIQTAMTPGCAYFTFMEEVRELYKKDHPKHKSIAAEIKAGGDKRKSIS

SEQ ID NO: 94342 - protein, 119 aa, Gossypium hirsutum
  Clone ID: LIB3147-052-Q1-K1-F5.pep
DNLENLQEEINRFQGSWGMDRSFMPSRKSFERAGRYDIARALEKWGGLHEVSRLLSLKVRQKHPSRQGQTSAKEKQVDNIAASRGIESEEKTPISKPYVSQNTQKWLTKLKGLDINWVE

SEQ ID NO: 94343 - protein, 140 aa, Gossypium hirsutum
  unsure (1)..(140): unsure at all Xaa locations
  Clone ID: LIB3147-052-Q1-K1-F7.pep
VSSELHAFLDQVIEDHLAMMNEDDDDGDTSENKDFVDILLRLQLDGKLDISLTQDNLKAIILDMFVGGTDNIAATLEWAMAELVKNPSIMKKAQEEVRAIVGKKXTISEIDVNEMHYLKCVVKETLRLHAPVMVSRQNST

SEQ ID NO: 94344 - protein, 75 aa, Gossypium hirsutum
  Clone ID: LIB3147-052-Q1-K1-F8.pep
YGGCATISKQLVRRGRIQVVLPQLHYENKMGASTPMRIEWSITFIKIFQCGSSERFAIPEEQAAIEIHPRLASFG

SEQ ID NO: 94345 - protein, 100 aa, Gossypium hirsutum
  Clone ID: LIB3147-052-Q1-K1-F9.pep
TWFCLFFETHRCAFSAITKLLEVPRIGCYFLVILCSDVMTVHFFFLVKNTGSWMEIGNSISHFGIMSAQVVFVLLLFALTNIYTKDIEIRSGSRDSRKVM

SEQ ID NO: 94346 - protein, 91 aa, Gossypium hirsutum
  Clone ID: LIB3147-052-Q1-K1-G1.pep
GAPARATTRTITNGAGLVSYPIDTDRWRLLLRCCKTVQYNSSLAAFSQIWKHARAKSLFKGAGAYILRAIAGAGVLYGYDTVQLIGIGRKN

SEQ ID NO: 94347 - protein, 42 aa, Gossypium hirsutum
  Clone ID: LIB3147-052-Q1-K1-G4.pep
PTSLLYAAKLHGYTFISKTKYIGLLQNLYNVKQYPSNFHCFI

SEQ ID NO: 94348 - protein, 90 aa, Gossypium hirsutum
  Clone ID: LIB3147-052-Q1-K1-G8.pep
HLSVQVINKKEKPYDIIHINQLYAIERMPGSRSRNKLGRKTGDTPYMIVCPDPSVKKRGPEIMPVGSTIPLKPCPCPARCCRSSTLRTRG

SEQ ID NO: 94349 - protein, 66 aa, Gossypium hirsutum
  unsure (1)..(66): unsure at all Xaa locations
  Clone ID: LIB3147-052-Q1-K1-H2.pep
FNLRKNQHMWKITSXMKLQVSHCINHSLDSKSKITNKSHKVTSFLIRFYTDNSFLNSRYGRKEWSD

SEQ ID NO: 94350 - protein, 96 aa, Gossypium hirsutum
  unsure (1)..(96): unsure at all Xaa locations
  Clone ID: LIB3147-052-Q1-K1-H3.pep
GMCILIEHKPELKGDPYQTLVNFXLGDHRHITGQGPYFTYQDSQLANTGGTGLFESFFCQGKAQQNRLHFNLFYTFYFKGIGELPKETFFKPVDPH

SEQ ID NO: 94351 - protein, 53 aa, Gossypium hirsutum
  Clone ID: LIB3147-052-Q1-K1-H4.pep
MAPPPGPYSGTSTLALVARASAFSFGLVYGNFKLKYLKMKAKSQRKAEAKAHH

SEQ ID NO: 94352 - protein, 94 aa, Gossypium hirsutum
  Clone ID: LIB3147-052-Q1-K1-H6.pep
ANMISIPITIAKMLLLCLLSTLTTTHHPSVATNYTTSSQCHNIHIYKYYIIMRTVVLHSMPCINESFACNSSRLLLVIADWMIRFCMEARSACF

SEQ ID NO: 94353 - protein, 160 aa, Gossypium hirsutum
  Clone ID: LIB3147-052-Q1-K1-H8.pep
HASAPPVHEAGPAKSLIQNVKSYPGRDDGHEPTGSLVPNLNPNMAISSNGILPVSSLRKVRSGAPDRKVRDRPSPLGPNGKVDSFSHQSMGTEDNGNKLGLENGDLTPYDYQRPLQHPQAVAEQPQIEREGLVRSTGKPRVLSKGQTERAIVEDGEEVEQ

SEQ ID NO: 94354 - protein, 47 aa, Gossypium hirsutum
  Clone ID: LIB3147-054-Q1-K1-A4.pep
KSGHLIGFRGHYRKAIKLKGGGWKIEPFKTAARFLLYFPMFLEPAFF

SEQ ID NO: 94355 - protein, 146 aa, Gossypium hirsutum
  Clone ID: LIB3147-054-Q1-K1-A8.pep
DHASGFVTVTRTQYTSMPSSSDKLRLEKLIGAGDEDADFPVNEGFNIKALDSGRARAQKVAKGSGLKKAGSSNIGESGEKRRSGKKVSYASQPVSFISSGVMVSETDEIRTTDPEGTSESYEHKDIIRSAQFGAFEVHTKGFWIQN

SEQ ID NO: 94356 - protein, 113 aa, Gossypium hirsutum
  Clone ID: LIB3147-054-Q1-K1-B10.pep
VFKKESKSPLLISCCFLLLCACKENTLICFWASSQKNKKNKEKNTSFFYFLSYLVLFSCLFAGTWCVWCVYGGYEGICGRAGDHTKLLQRKKVTYGFLVFGFWASWAVYTFWA

SEQ ID NO: 94357 - protein, 45 aa, Gossypium hirsutum
  Clone ID: LIB3147-054-Q1-K1-B2.pep
TRRATPTVKPPQSSSHAFYQLQSEGIHAQQYEHTTIQTSLAMTCF

SEQ ID NO: 94358 - protein, 69 aa, Gossypium hirsutum
  Clone ID: LIB3147-054-Q1-K1-B4.pep
EFTWCYAYDLQVEADGNQYCAPSPATLRSWQLNCVQAPVYYTNCPARVRTLAWILYSVKTNSFLHLDPR

SEQ ID NO: 94359 - protein, 41 aa, Gossypium hirsutum
  Clone ID: LIB3147-054-Q1-K1-B5.pep
EFLLIIFISAKYFTLELLHGFDVQRTCFCNLIFEYTLCGKK

SEQ ID NO: 94360 - protein, 83 aa, Gossypium hirsutum
  unsure (1)..(83): unsure at all Xaa locations
  Clone ID: LIB3147-054-Q1-K1-B8.pep
RXEFTRRHACGNKEQDHGLLFIIRTHYRTIARCRGRSLRLKARIWRIVQGCTWEFIFPRNKLNGHVRTLEEQIDKCTCAVTLN

SEQ ID NO: 94361 - protein, 70 aa, Gossypium hirsutum
  Clone ID: LIB3147-054-Q1-K1-C1.pep
NEIAFLNISGIRNYRCLVSHNPNKLSSSINGDNNIVYGPTEDGNYSTNNDGSTAGNTEAGQGESFFSSKD

SEQ ID NO: 94362 - protein, 109 aa, Gossypium hirsutum
  unsure (1)..(109): unsure at all Xaa locations
  Clone ID: LIB3147-054-Q1-K1-C7.pep
PTRPSGQPMPFTALATSLANAAPEQQRTMLGESLYPLVERLERDATAKVTGMLLEMDQTEVLHLLESPEALKAKVAEAMEVLRSVDAQQQSNNPADQLSXLSLNDNLVS

SEQ ID NO: 94363 - protein, 43 aa, Gossypium hirsutum
  Clone ID: LIB3147-054-Q1-K1-C9.pep
GCLIHTFLLMPPYFKILLPYFTTYSTAITLDLPTLNLIKPHPY

SEQ ID NO: 94364 - protein, 117 aa, Gossypium hirsutum
  Clone ID: LIB3147-054-Q1-K1-D1.pep
PNEKNKEKYNIFLSPFFFFAVVLCCFCLHADGGGRRGTSGAGEYGGRAWERTEARGYGAKVETLGFLWIIWSWAAWARFVLFGYWVMGLFGLRIGFFGYWAIVIVLGCFVIFGLMAF

SEQ ID NO: 94365 - protein, 74 aa, Gossypium hirsutum
  Clone ID: LIB3147-054-Q1-K1-D3.pep
DFIVSDKDSASIGLRNMSTGQNRKDISPKWINESRNRKEKQNLCQIWYEKWVMFLMLFSALLSNISCLQLWPKT

SEQ ID NO: 94366 - protein, 136 aa, Gossypium hirsutum
  unsure (1)..(136): unsure at all Xaa locations
  Clone ID: LIB3147-054-Q1-K1-D6.pep
APEGHRLCGDNCGDXGSPATMNLCSKXYRDLRLKEQQQACSAKSTIIPVLHLESTAGESVFSRTYPDYAXDKGVPLTVSAVAISTVADQKRQERQQLYLVQQQQRRQPTRCTVRKKLVGLTGFKCMCRITFSWSHR

SEQ ID NO: 94367 - protein, 79 aa, Gossypium hirsutum
  unsure (1)..(79): unsure at all Xaa locations
  Clone ID: LIB3147-054-Q1-K1-E11.pep
RIVAKQQIHXXLYRNGEGTASHFFYSPTVXXPSKGHQHXKTYXLXXYIIPSHMEXXALIXRYQSXDXYGGSXPLRFAGS

SEQ ID NO: 94368 - protein, 84 aa, Gossypium hirsutum
  unsure (1)..(84): unsure at all Xaa locations
  Clone ID: LIB3147-054-Q1-K1-E3.pep
IKILITELSHLMVYFELSPLFVACGLHARCARPFICTIIARALIDLPVARITLGSRNGAHVGKAHLAFPDAWAYASVAPGSPXR

SEQ ID NO: 94369 - protein, 57 aa, Gossypium hirsutum
  unsure (1)..(57): unsure at all Xaa locations
  Clone ID: LIB3147-054-Q1-K1-F3.pep
XXENHGSTHTFGTVLEFLVSIIYLTAPQMINIVRFWGKPVPKDIIPNLVHDTNLLTS

SEQ ID NO: 94370 - protein, 63 aa, Gossypium hirsutum
  Clone ID: LIB3147-054-Q1-K1-F4.pep
LINIVINVLLETGQENLDMQNSESYDFCMCVIHLCIHKRCSVYFGVFAEMLAEEGETWDVFTL

SEQ ID NO: 94371 - protein, 57 aa, Gossypium hirsutum
  Clone ID: LIB3147-054-Q1-K1-F8.pep
SLQIYTYKSREREGNIFCLSFNYPLARDIESWVARRNSELFYALRTRTTLIRGTAGI

SEQ ID NO: 94372 - protein, 149 aa, Gossypium hirsutum
  unsure (1)..(149): unsure at all Xaa locations
  Clone ID: LIB3147-054-Q1-K1-G12.pep
GLIQEAMKLFXLMREKGTIRGVVIYTAVVDGFCKAHKLEDAKRIFRKMQSKGVIPNAFSYTVLIQGLYKLSXLDDAVEFCLEMVEAGHSPSVTTFVGLVDGLCKEKSVEEAVNAIGTLKQKGFLVNDKAVRQFLDKKAPFSPLIWEAIF

SEQ ID NO: 94373 - protein, 33 aa, Gossypium hirsutum
  Clone ID: LIB3147-054-Q1-K1-G3.pep
TYHIFYYQDLLDLENALHILLPRICIINCNIDV

SEQ ID NO: 94374 - protein, 128 aa, Gossypium hirsutum
  unsure (1)..(128): unsure at all Xaa locations
  Clone ID: LIB3147-054-Q1-K1-G4.pep
EEGAENELSFQEWTQQVQDMLNTKKFGDIAFRDKDFKNAIDYYSKLVAMMSVPSGTVFVRRALSYLIIGQPELALRDAMQAQVCLPEGPTAFYMQAFAFSKLGMETDAQDMLNDGASFEXKKQNGWRV

SEQ ID NO: 94375 - protein, 138 aa, Gossypium hirsutum
  Clone ID: LIB3147-054-Q1-K1-G5.pep
KKKGTFQHSSFLAGGATIAAGRLGVDNGVLKAVWPHSGHYRPTEENFNDFISFLKENDVDLTDVKMAPVDGEESFHGTSHHLRCNSSEENSLEPEENSVKGSIEKLGDLIEEGTSESLECTMSSRFLNLSHLEIPMKT

SEQ ID NO: 94376 - protein, 86 aa, Gossypium hirsutum
  unsure (1)..(86): unsure at all Xaa locations
  Clone ID: LIB3147-054-Q1-K1-G9.pep
QGQLDTLVTLIERXQKTDQNRALYPNWSLCNYLAEAVTQADNSKLSFYDLEFMAKWIAXRQKCKATFLASVDEGLIVLLYFQLFAF

SEQ ID NO: 94377 - protein, 40 aa, Gossypium hirsutum
  Clone ID: LIB3147-054-Q1-K1-H10.pep
HFNFNIYNYIYLFFFINFLYFFLLITEFKFRTLSNSTLSH

SEQ ID NO: 94378 - protein, 65 aa, Gossypium hirsutum
  Clone ID: LIB3147-055-Q1-K1-A5.pep
AAVNLIVPHQALLGLVSEGKSYKRSDIIASTYTGKTAFGCILLRERFIVCGKKIELGFWQNRPEG

SEQ ID NO: 94379 - protein, 80 aa, Gossypium hirsutum
  Clone ID: LIB3147-055-Q1-K1-B10.pep
HASADFELILVQSSNEVVLGVLVTCNHFFSSLYISFTIEEEEKKNVDQMPFNFLVSSLYSFIYWSVYGRSGSTIWIEEFI

SEQ ID NO: 94380 - protein, 88 aa, Gossypium hirsutum
  Clone ID: LIB3147-055-Q1-K1-B2.pep
SNSFLIIIFNKSSQAMQNQGLLEEQQEMPTPMGFFSTFPPNNNITSCPPLGCHPLKAFNIAAPDHHHALPTETLLSSLSSPKHREHLA

SEQ ID NO: 94381 - protein, 72 aa, Gossypium hirsutum
  Clone ID: LIB3147-055-Q1-K1-C1.pep
LKSTPPNLFFFFYVCISSPSFILFFFFFFFFFFFFFFFFFFFFFFFFFFFFFFFFFFFFFFLTLNKYPEIVA

SEQ ID NO: 94382 - protein, 58 aa, Gossypium hirsutum
  Clone ID: LIB3147-055-Q1-K1-C12.pep
QTVRSDVLTWVNASHVRQRTIVYNNVSKKISSLLRLQIFVLCKGRYWLAILVTFTDQH

SEQ ID NO: 94383 - protein, 51 aa, Gossypium hirsutum
  Clone ID: LIB3147-055-Q1-K1-D10.pep
LPPLLPPHLPSLFSLFIQFFYGVEYSYTHPHPKLSIMSFKQGGKTKPLKPP

SEQ ID NO: 94384 - protein, 80 aa, Gossypium hirsutum
  unsure (1)..(80): unsure at all Xaa locations
  Clone ID: LIB3147-055-Q1-K1-D3.pep
PSLRPNGPPDGSKSGCTTFGADLLSYKIHYNNHYTCPDTSYAXSYKHACTHAFTYTYNYPHVMHYFIHERELTRMLCHLR

SEQ ID NO: 94385 - protein, 77 aa, Gossypium hirsutum
  Clone ID: LIB3147-055-Q1-K1-E1.pep
KKIRGQITNHKNTRQQWRQAPEYPYRDKHREHRNQCKVQSIDLQQCSLHPPLKHTKTWVSQELPHLPSFGRVGGRVG

SEQ ID NO: 94386 - protein, 84 aa, Gossypium hirsutum
  Clone ID: LIB3147-055-Q1-K1-E10.pep
FFQQFFKSGPKIGFLNQFVDEIVEVIGMAAGVTTVHIMVHTILWCIQWSCQKKGAEYVEVRPHSRYLRHNIMDTIDAANASRLA

SEQ ID NO: 94387 - protein, 63 aa, Gossypium hirsutum
  Clone ID: LIB3147-055-Q1-K1-E3.pep
KLIPLIFKNTNIYKMQLLGLVSDITNCSIVEKKSINYRANVLGIFLLQLFPSLKKTKIKINGK

SEQ ID NO: 94388 - protein, 139 aa, Gossypium hirsutum
  Clone ID: LIB3147-055-Q1-K1-E8.pep
ANWFRVVGCLSHAAILARWVDGVRTWAHPPTTILVHVLLIAVVMCPQLVLSTIFMYAFLILALRFRYRMRVTHNVYLRLSYVDAVGPDELDEEFDGLSTTRSADTSRVRYDPLRALACRAQSLLGDVATQGERLETLFN

SEQ ID NO: 94389 - protein, 54 aa, Gossypium hirsutum
  Clone ID: LIB3147-055-Q1-K1-G10.pep
EESRCDHTLFSVCLKIRDGFGILIKRKVMEIIIIIIEQKQKQDIQCPLFLLNFF

SEQ ID NO: 94390 - protein, 70 aa, Gossypium hirsutum
  unsure (1)..(70): unsure at all Xaa locations
  Clone ID: LIB3147-055-Q1-K1-G8.pep
KKIKTPKPREKKFVSLKGPPPXFFFFFFFFFFFFFFFFFFFFFFFFFFFFFFFFFFFFFRGSNKLTKQLR

SEQ ID NO: 94391 - protein, 41 aa, Gossypium hirsutum
  Clone ID: LIB3147-055-Q1-K1-H10.pep
QVYGSLGAEWESSRAESHIIGDGAVCSTSGKALPPHTFQFS

SEQ ID NO: 94392 - protein, 76 aa, Gossypium hirsutum
  unsure (1)..(76): unsure at all Xaa locations
  Clone ID: LIB3147-055-Q1-K1-H12.pep
TTSFIFYMLVLNLREKIEKKNVHTINNQNPSTLALLRVVDDDDRXLSCLSSSSRQRVEEQARGRSINGKAXAXAGR

SEQ ID NO: 94393 - protein, 66 aa, Gossypium hirsutum
  Clone ID: LIB3147-055-Q1-K1-H9.pep
IDNYFLPIPKVNAIIKLSAYHSEIRHNTAVASCMLCLNKSYTISPIGLKMMVHCHRLSEKNNTYDI

SEQ ID NO: 94394 - protein, 146 aa, Gossypium hirsutum
  unsure (1)..(146): unsure at all Xaa locations
  Clone ID: LIB3147-056-Q1-K1-A1.pep
CEATCKWRKPKCDGYGSLCYDPRSDGGDGVMFYFHGARGGNFAIVSDDQLQINAHFIGTRPQRRTRDFTWVQALTVMFDTHTLDIAANRVCQRDDNVDALSVRWDDXTVTIPYDGEGDWRKGNGYERQVLVERTDDKNSLHVKISG

SEQ ID NO: 94395 - protein, 60 aa, Gossypium hirsutum
  unsure (1)..(60): unsure at all Xaa locations
  Clone ID: LIB3147-056-Q1-K1-A11.pep
TFKGLLLALNNLFFSLGRATVPGPSTKPDHKPKPXTPTPAPHFNXGKCPKDALKLSICAY

SEQ ID NO: 94396 - protein, 38 aa, Gossypium hirsutum
  Clone ID: LIB3147-056-Q1-K1-A12.pep
FHSLNKTNIKSPSPGTIKEPAYLRNIVISSVLKCVVST

SEQ ID NO: 94397 - protein, 32 aa, Gossypium hirsutum
  Clone ID: LIB3147-056-Q1-K1-A8.pep
HASFHASFLFFRQPHLPKCARLTFKAYKFHLY

SEQ ID NO: 94398 - protein, 105 aa, Gossypium hirsutum
  Clone ID: LIB3147-056-Q1-K1-B7.pep
PRVRPRVRTSSITAYINPMAEATALSNFFHPLFINFSLHKEDHLGILLLQQKPKPSYCLWIPQSTDIPTYCFYCIRSACLLAAADLFRLEFSSCKNIPSIISKVG

SEQ ID NO: 94399 - protein, 50 aa, Gossypium hirsutum
  unsure (1)..(50): unsure at all Xaa locations
  Clone ID: LIB3147-056-Q1-K1-B8.pep
VRSNQNAKILRKCFYPLELDVYERCSNXLRKQFXCPLQILRDEEGKKLCL

SEQ ID NO: 94400 - protein, 90 aa, Gossypium hirsutum
  Clone ID: LIB3147-056-Q1-K1-B9.pep
MASSTSKLAFRIALAVLLLLALFYVGRPLYWKISATVHDIRHNKQTVQEGISQIMLEAQRSVGWFNDESDSGIHENRGKQASRRLKFRVL

SEQ ID NO: 94401 - protein, 99 aa, Gossypium hirsutum
  unsure (1)..(99): unsure at all Xaa locations
  Clone ID: LIB3147-056-Q1-K1-C3.pep
KSSKPATLNAFHIIPLSEGYDLSPLFVENTRAEXEELTLATTRPARIAMSRLGQVAIYPKFTAXYSELFARSQLQDCGWYGQLAIASHIFAVTPPILAV

SEQ ID NO: 94402 - protein, 101 aa, Gossypium hirsutum
  Clone ID: LIB3147-056-Q1-K1-C4.pep
ILYKKFFILLNYFIIFFFFFFFYFFFFFFFFFFFFFFFFFFFNHKFETYVKLYTYAIYLLAKFIKETRIQGAKEGKQGETVKAKYIITKRSNKEMNNTTAP

SEQ ID NO: 94403 - protein, 107 aa, Gossypium hirsutum
  unsure (1)..(107): unsure at all Xaa locations
  Clone ID: LIB3147-056-Q1-K1-D10.pep
QETHQAKRTSNNPTTKATKTXAXRAHPAXXGSATEAXRQPQGXRAXRATSPQXXPPXTTTGAEQPAXQAXRRQXAXAASDGQQPXAQXQQQXGAQRNQQTXATQQQQ

SEQ ID NO: 94404 - protein, 79 aa, Gossypium hirsutum
  unsure (1)..(79): unsure at all Xaa locations
  Clone ID: LIB3147-056-Q1-K1-D12.pep
GSVVXXXVVXXAXVVSSLPXGXGPAXXLVXXLXXXPRXXXXXWGLXGVXPPGXXGLLLVXXXXGWWVGSCFXPWXVGXG

SEQ ID NO: 94405 - protein, 150 aa, Gossypium hirsutum
  Clone ID: LIB3147-056-Q1-K1-E1.pep
SLELLDLSYNFLNGSIPESLGNLTALRRLNLNGNSLSGRVPGALGGRLLNGASFNFTDNAGLCGIPGLPTCGPHLSAGAKVCIAFGVSLSFLLLVICSVCYWKRRQNILRAQQIAARGAPYAKARTQFSHDIQMSRHHNHGHTRTAAENG

SEQ ID NO: 94406 - protein, 78 aa, Gossypium hirsutum
  unsure (1)..(78): unsure at all Xaa locations
  Clone ID: LIB3147-056-Q1-K1-E10.pep
VFXLPFPSPVLSAPGFVXCSCXRCXPPSFRFAFGLXWCCLSLSFLXSGGCPVLLPASPXWFGFVVGWVLALGXXPWFF

SEQ ID NO: 94407 - protein, 67 aa, Gossypium hirsutum
  Clone ID: LIB3147-056-Q1-K1-E8.pep
VLDAQCFYSNSSFNGETTTRMNPKQSSVDKKLMNHYFCFGAQGLAVEDNRSHTRLDRRIKSARSLVA

SEQ ID NO: 94408 - protein, 150 aa, Gossypium hirsutum
  Clone ID: LIB3147-056-Q1-K1-F2.pep
PTRPQQERTTFVSSLLPLLAEYSLQPPVPDAQSIVSYVKVLFKHLQEKLIITESKLKDSQYQLAPWRSDVNHSNFAPQSPSHSLGPTLTASSKNGLELVPQPVFSHGKTQIVSDAQTDSNWDLPGQYQGGSGGGIVSKNLEPDDLGRYSP

SEQ ID NO: 94409 - protein, 60 aa, Gossypium hirsutum
  Clone ID: LIB3147-056-Q1-K1-G3.pep
FVKIGDAAVYPVCTMITHAHLHLSSIQYSERRRSDGGWVKHGSQARRPASQLPFKGLIAI

SEQ ID NO: 94410 - protein, 76 aa, Gossypium hirsutum
  Clone ID: LIB3147-056-Q1-K1-G8.pep
LLYRGAGRSLESTLTYTCLPGNTFSLPPLNLIALHPLFHRWRLGKPVPLPILLAIDCTPFMPDGTLPVTPIPLALP

SEQ ID NO: 94411 - protein, 45 aa, Gossypium hirsutum
  Clone ID: LIB3147-056-Q1-K1-H1.pep
KKDQTELSKFQQVYVPTAPFFLKHRIRECVPRNTNEESRAEKKIT

SEQ ID NO: 94412 - protein, 141 aa, Gossypium hirsutum
  Clone ID: LIB3147-056-Q1-K1-H6.pep
RESLIGSKLNGFNGFRGVLYAMRNVSSLLLMILLYGLVYCRTESSFLRGGYEGCLIFGSAFMISTGRLQQRVAAEINQMNGRPGILLYEFRRSKLAMEELRGELERMGGGGVEEWETEVGGIRERVENLKGWFGVLRSGAD

SEQ ID NO: 94413 - protein, 59 aa, Gossypium hirsutum
  unsure (1)..(59): unsure at all Xaa locations
  Clone ID: LIB3147-057-Q1-K1-A4.pep
PXPGVFFISCAAHPQXLLPYINSFSFLNFSIYKLNQNLYLFTFHSNFHYVLFNFDMFNK

SEQ ID NO: 94414 - protein, 84 aa, Gossypium hirsutum
  Clone ID: LIB3147-057-Q1-K1-B2.pep
MSGHIICSLVKIRSSKCGSRGIPFACKASSSGYRRSPDFSRHRHGLQGRNRQNEDKYSFENLDESEMLSSKNGPVLSLFRSTNF

SEQ ID NO: 94415 - protein, 52 aa, Gossypium hirsutum
  Clone ID: LIB3147-057-Q1-K1-B3.pep
IYFLRNNPHSWIINHCVDFKIHKVKYYLKHVSNKTVSIPIDHQLRTQIASPL

SEQ ID NO: 94416 - protein, 136 aa, Gossypium hirsutum
  unsure (1)..(136): unsure at all Xaa locations
  Clone ID: LIB3147-057-Q1-K1-B6.pep
GVYPVKCNLXRFVVEDIVRFGTPFRCGLEAGSKPELLLAMSCLCKGNPEALLICNGFKDAEYISLALLARKFQFNTVIVLEQEEEVKLVIDISKKLSVRPVIGLRAKLRTKHSGHFGSTSGEKGKXGLTTNHILRV

SEQ ID NO: 94417 - protein, 56 aa, Gossypium hirsutum
  Clone ID: LIB3147-057-Q1-K1-C3.pep
IFYGSQYILKPAPPIHQIFHLLSVPKSIYQPSIMYCPLSKRLIIHPHFKLYLSLSP

SEQ ID NO: 94418 - protein, 90 aa, Gossypium hirsutum
  unsure (1)..(90): unsure at all Xaa locations
  Clone ID: LIB3147-057-Q1-K1-C5.pep
EAPSNGKKAEYTEDGLSVDVKLPIKHVLSRELKLYFDKIVDIXMNKSVSILFKQALLSLETDSGLHPLVLYCTCFIADEVARNLNNFPLM

SEQ ID NO: 94419 - protein, 71 aa, Gossypium hirsutum
  Clone ID: LIB3147-057-Q1-K1-D4.pep
PTHPVSINFYKRFYFTMASIYLMGGLYTEGESQISPLKFHHMFCHMPHHFHHTISEKVQRFFIHISKFLTS

SEQ ID NO: 94420 - protein, 141 aa, Gossypium hirsutum
  unsure (1)..(141): unsure at all Xaa locations
  Clone ID: LIB3147-057-Q1-K1-E2.pep
VKPAGPTRPGCPTFSVYFFFTLHVIDFLSGLYAKESXFLGIELLNEPSAAEVPLDTLVSYYKHCYEVVRKYSPSAYVIICQRIGSAYPLELYQADICSHNLVVDLHYYNLFDTFFVNLSAIDNIQFIYKSRETHLQTFNGA

SEQ ID NO: 94421 - protein, 82 aa, Gossypium hirsutum
  Clone ID: LIB3147-057-Q1-K1-E6.pep
SLLHSIILPQHFSLQRKKKKKKSEKKQVLKWLSYNIQRQRAAQIQPHRRRYHHLTQPLTQLLRPQTINPKLSLRVLLKNPRQ

SEQ ID NO: 94422 - protein, 53 aa, Gossypium hirsutum
  Clone ID: LIB3147-057-Q1-K1-F4.pep
IAKRNSHIVRTFITCLRHSSLRHFVFKPIIFYTIYKQLPNFSNLITICLQTFP

SEQ ID NO: 94423 - protein, 44 aa, Gossypium hirsutum
  Clone ID: LIB3147-057-Q1-K1-G5.pep
NYFFETFRLLLNKSYSNFNVFQSNVYNYIYCSNTTDNYNLHFLL

SEQ ID NO: 94424 - protein, 118 aa, Gossypium hirsutum
  Clone ID: LIB3147-058-Q1-K1-A10.pep
SSSFQQIHFVFSHFLVLITMAFVVQENSLRMSCDVEFNNALLISFLEESPNEEYDSKELETWMRSLEAEINPNPIGIQDLKMGPESLSDGKESNGTKPIDCEFQWNDLESMSSPSPNH

SEQ ID NO: 94425 - protein, 89 aa, Gossypium hirsutum
  Clone ID: LIB3147-058-Q1-K1-B11.pep
AFICHFYNIYFANTAGGRIIAKKVAEKILDSRELEFYKWDGELSQLLQNVRDKLNKVAENWSREDKNRCLGETEISFKFYREIVRLMLS

SEQ ID NO: 94426 - protein, 53 aa, Gossypium hirsutum
  Clone ID: LIB3147-058-Q1-K1-B12.pep
LKCRFKFNTIVCIHLFCYFCLVIFIIFITPAKQLTRLLRSKLVVRINYFGFQP

SEQ ID NO: 94427 - protein, 146 aa, Gossypium hirsutum
  Clone ID: LIB3147-058-Q1-K1-B2.pep
HSHLSFINPNASYNHKFPGLTLHASLISPSTPPSSREEAILQAKTCLSTCLEKPLNNPKLVGKLKKLKQPRFQVEIPLIDDCPSSLAQLALDIFKDMSLKKKGSLVEILVLWPDVRLKEAGIQTFESSSSFSHIEHIDLPSVSKNN

SEQ ID NO: 94428 - protein, 56 aa, Gossypium hirsutum
  Clone ID: LIB3147-058-Q1-K1-B5.pep
TLILCTLQYQFVELLNFNCWTVHYNVDIITALYSYLYHEPLLHVSACFKKLTYFHS

SEQ ID NO: 94429 - protein, 40 aa, Gossypium hirsutum
  Clone ID: LIB3147-058-Q1-K1-C1.pep
CCHNYSTLVIFVSWTPSACFCMFQEIDLFSFWSDLVWALK

SEQ ID NO: 94430 - protein, 73 aa, Gossypium hirsutum
  Clone ID: LIB3147-058-Q1-K1-C3.pep
PEQGSTKNSGDLIAVGADGRGGRIKVMRSANQSSMGDKENSVSAKRLKCGAKQNSFPSGGCLQIEHFFGKTHY

SEQ ID NO: 94431 - protein, 62 aa, Gossypium hirsutum
  Clone ID: LIB3147-058-Q1-K1-C4.pep
RAGIFFIFYEGIKLLVSTTHNAAYLFMVRFNNNISGFFFFSLASFTMHRIYIFWKGLPLLYT

SEQ ID NO: 94432 - protein, 59 aa, Gossypium hirsutum
  Clone ID: LIB3147-058-Q1-K1-D12.pep
KKIIIIDYGKFIATLSLSKNICHCSSNPQIDNENNEILESKLALNLKKKEENFCTKPTL

SEQ ID NO: 94433 - protein, 96 aa, Gossypium hirsutum
  Clone ID: LIB3147-058-Q1-K1-D2.pep
HPDSCPSPDLSYEALPTKNPTQFFFIKKKKKKKKKKKKKKKKKKKKKKKKKKKKKKKKKKKKKKKKKKKKGGGLLKEPNLTTPLLQKKIFFLGPLK

SEQ ID NO: 94434 - protein, 123 aa, Gossypium hirsutum
  Clone ID: LIB3147-058-Q1-K1-D5.pep
PTRPRTQLLQGHNTEVHSICWDTNGDFLASVSQDSVRVWSLASGECIHELNSSGNKFHSCVFHPSFPALLVVGGYQSLELWNTAENKCMTIPAHDCVISALTQSQVTGMVASGSYDKSVKIWK

SEQ ID NO: 94435 - protein, 40 aa, Gossypium hirsutum
  Clone ID: LIB3147-058-Q1-K1-E1.pep
VLILTTLSQCPLDPHKNESPSAFLAIGWSIDSHTSLRTRG

SEQ ID NO: 94436 - protein, 58 aa, Gossypium hirsutum
  Clone ID: LIB3147-058-Q1-K1-E5.pep
SLNIKIPDSFGFFKKKKKKKKKKKKKKKKKKKKKKKKKKKKKKKKKKKKKKKKKGGAV

SEQ ID NO: 94437 - protein, 58 aa, Gossypium hirsutum
  Clone ID: LIB3147-058-Q1-K1-F11.pep
YILIYLKKKKKKKKKKKKKKKKKQKKKEQPKNKTIAAVEKTNENEWHYPILSWEATLC

SEQ ID NO: 94438 - protein, 40 aa, Gossypium hirsutum
  Clone ID: LIB3147-058-Q1-K1-G11.pep
EVHLHYQYFKVHVQLLYLGSMLIVNEIRRHGNMAISYFFK

SEQ ID NO: 94439 - protein, 108 aa, Gossypium hirsutum
  unsure (1)..(108): unsure at all Xaa locations
  Clone ID: LIB3147-058-Q1-K1-G7.pep
KKIFNLQRRGSKIWFFKTGAPXFFFFFFFFLFFFFFFFFFFFFFFFFFFGGFFIFFFFFFFLNKKIYLLCKYGDHTSSHQYQTHHIEPLGTENHTCMHACMHIHIHTY

SEQ ID NO: 94440 - protein, 67 aa, Gossypium hirsutum
  Clone ID: LIB3147-058-Q1-K1-H12.pep
VNALYTYLDHEFFSEGDRSVRPLLVVVDVYECLWRVDNDWQSTHMKTLVHTGDGMRGCKHGRTRGSA

SEQ ID NO: 94441 - protein, 108 aa, Gossypium hirsutum
  Clone ID: LIB3147-058-Q1-K1-H2.pep
GISRADSKTAALCANLYSTTKSTTKAGKASKDANKPPKPANTSVSSMFEFIEQYQKQHTKDHSNDTVGTAGGNKWKNLSETLNQPYIHPDDDQAVEREVDFETYIKTH

SEQ ID NO: 94442 - protein, 71 aa, Gossypium hirsutum
  unsure (1)..(71): unsure at all Xaa locations
  Clone ID: LIB3147-058-Q1-K1-H4.pep
RTRGRTRGRTLWCKFPYAGHGELAKTASGIPPXFSVFCLTWDVPRVKQKDKPVCDFLPFPCPKLAPPMQSN

SEQ ID NO: 94443 - protein, 122 aa, Gossypium hirsutum
  unsure (1)..(122): unsure at all Xaa locations
  Clone ID: LIB3147-058-Q1-K1-H7.pep
VKDKSTLFPLGWIHTHPTQTCGMXSDDLHTHYSYQIMLPEAIAIVMAHTDTFSPHGIFHLSDPSGVIIIRNCQQRGFHPHEEPVDGTPIYEHXSHVFMNPKIKIDVVDLQCGKIVLNQTEKK

SEQ ID NO: 94444 - protein, 113 aa, Gossypium hirsutum
  Clone ID: LIB3147-059-Q1-K1-A3.pep
LVTLVGFCAENSNRLLVYEYMANGSLDQWIFNKNQEPALGWQIRKKIILDIAKGLAYLHEECNQKILHLDIKSQNILLDENFNAKVSDFGLSNLIGRDQSRADAWADAWADAW

SEQ ID NO: 94445 - protein, 88 aa, Gossypium hirsutum
  unsure (1)..(88): unsure at all Xaa locations
  Clone ID: LIB3147-059-Q1-K1-A7.pep
ELTGCDPTQSRNWLDRGWLVSHPSLSIIXSQPAQKRDSRLHFFGLXXFKGXXLLGSQSFGEXGTXLCXLEPTLSVLPGCXTLXSIGMH

SEQ ID NO: 94446 - protein, 66 aa, Gossypium hirsutum
  Clone ID: LIB3147-059-Q1-K1-B1.pep
FLFVTLFFFSFILCNWLVLLFYYYLPLFYFLLLYCYSCYHVHYYSIMQISTVITILYVIGQICPGL

SEQ ID NO: 94447 - protein, 49 aa, Gossypium hirsutum
  Clone ID: LIB3147-059-Q1-K1-B12.pep
KIFFFRNFFFFFFFYSFFFFLAIEFEHSNFKAETSFSNLSPEELSVTSS

SEQ ID NO: 94448 - protein, 68 aa, Gossypium hirsutum
  Clone ID: LIB3147-059-Q1-K1-B4.pep
GRPKPSAKGRFFEPEKEVRRNLPEARKEVRNFAVAFLLKSIEGVQNWKAYLAAGFSLKSGMKPHELVF

SEQ ID NO: 94449 - protein, 110 aa, Gossypium hirsutum
  Clone ID: LIB3147-059-Q1-K1-C12.pep
ANPKSDSSLKTAAQAIYYEFGGTDAESNGAYHLLLKEDDIEGLLETDHINDLIPQNNTVFIKVFKADEKTDESTLLTEALTEKPSIGTVIAAGPATVHEAGNLEPLSVSP

SEQ ID NO: 94450 - protein, 111 aa, Gossypium hirsutum
  Clone ID: LIB3147-059-Q1-K1-C4.pep
LPSVATATYNSMSYAPNGAGVKFPNHKEDHSNSITIGVSDEHIGLVLGRGGRNIMEISQVSGARIKISDRGDFMSGTTDRKVTITGSQRAIHQAESMILQKVANASERVMD

SEQ ID NO: 94451 - protein, 102 aa, Gossypium hirsutum
  Clone ID: LIB3147-059-Q1-K1-C9.pep
WRLQNKTKDYSCARVVKEGETLSSISKVYELSVHSIAAANKNIVDINLVFQGQLLNIPSSSLLDTQLDRAKKSRLWQSIRALKAPSGQKFFTMITSHCLIKC

SEQ ID NO: 94452 - protein, 95 aa, Gossypium hirsutum
  unsure (1)..(95): unsure at all Xaa locations
  Clone ID: LIB3147-059-Q1-K1-D11.pep
RNDRRVHSFSHAYAHASFYAYGGQVLHALERKITDASQLNYDYKNRLATWGVTYVPIXRRQEDVSYPYCTARLFHTQDGALIALCDIAFVRAYTT

SEQ ID NO: 94453 - protein, 82 aa, Gossypium hirsutum
  Clone ID: LIB3147-059-Q1-K1-D4.pep
ELIKDKIEAQIEVKAKEQEEKEVIAQQNMYAQLLPLALPAPPMPGMGGPTMGGGFAPPPPPMGGMGMPPMPPYGMPPIGSSY

SEQ ID NO: 94454 - protein, 70 aa, Gossypium hirsutum
  unsure (1)..(70): unsure at all Xaa locations
  Clone ID: LIB3147-059-Q1-K1-D7.pep
RFWGWXRXLXLXXXCRXXPXGXXXXPXCXPXASXXWPPXRXXRSSPCXXPPPSCXXXXLDLGXGSXSXXA

SEQ ID NO: 94455 - protein, 51 aa, Gossypium hirsutum
  unsure (1)..(51): unsure at all Xaa locations
  Clone ID: LIB3147-059-Q1-K1-E1.pep
FFXAVFXXXLALXXXGXFSGXXPLPXXLGXPXCVXSXLXAASLVALAFPSS

SEQ ID NO: 94456 - protein, 55 aa, Gossypium hirsutum
  Clone ID: LIB3147-059-Q1-K1-F12.pep
SRTPVRDTRVQTRARTRGRTRGRTRGVPFFLILIIIYSPHFFNNNNTIDFEPNKN

SEQ ID NO: 94457 - protein, 125 aa, Gossypium hirsutum
  unsure (1)..(125): unsure at all Xaa locations
  Clone ID: LIB3147-059-Q1-K1-G4.pep
DSLMCGTDAPISASRMLGEXLVKPGGTYMLITHSEPSARMPHMNPAPRVWDIYLCTLHTPGFKRTAGCXSSTDVLLAAXPITAKGLLPADFVLEDPDSHFIYVCKKMDDTQLRNIPTYPLTSEIL

SEQ ID NO: 94458 - protein, 49 aa, Gossypium hirsutum
  Clone ID: LIB3147-059-Q1-K1-G6.pep
GFHLPLKVGKFLERRIVGGFFVLKQIGKRGFFSKRFNLVKARFFQLKRF

SEQ ID NO: 94459 - protein, 52 aa, Gossypium hirsutum
  unsure (1)..(52): unsure at all Xaa locations
  Clone ID: LIB3147-059-Q1-K1-G8.pep
KKQLMPLLLWRNTKTYLQLTGIYSSTITRGAQTVIKSLIIYLSIIIXXXXNX

SEQ ID NO: 94460 - protein, 106 aa, Gossypium hirsutum
  unsure (1)..(106): unsure at all Xaa locations
  Clone ID: LIB3147-059-Q1-K1-H3.pep
MEQVFAEYSRLLATELEKXRQNYESLLAEAKGKRDSTIAEAVEKAVTSEMQDIQSKLDKCTEEKNALAEINRKLIKDQQVWHVKVKEIEEREASESRLMDEKILDL

SEQ ID NO: 94461 - protein, 60 aa, Gossypium hirsutum
  Clone ID: LIB3147-059-Q1-K1-H9.pep
HASVGWSAASCGMERMRCASPNRNRHFASLGGSAVARIIILFKQGGQPNKALGSLIATDH

SEQ ID NO: 94462 - protein, 85 aa, Gossypium hirsutum
  unsure (1)..(85): unsure at all Xaa locations
  Clone ID: LIB3147-060-Q1-K1-A10.pep
YKALYVRNXPSTVAASEIEPEFSNFGTMIPDCVFIPNRKDIVLVXILLLEPENILTFHNTIXACPIQYAVTQVYIYKRRPNITVT

SEQ ID NO: 94463 - protein, 62 aa, Gossypium hirsutum
  Clone ID: LIB3147-060-Q1-K1-A2.pep
HASAGLREMFTSMDTDNSGAVTFDELKAGLRRYGSTLKDTEIRDLMDAADVDNSGTIDYGEF

SEQ ID NO: 94464 - protein, 128 aa, Gossypium hirsutum
  Clone ID: LIB3147-060-Q1-K1-A3.pep
KMSESSSKIPNVTTKDPPCMSTIKAHDKEEQQIEAQQTSHKEITRYFEEEEPDQIEARSVDIVTTRPDLSDRVTMNTMISPLKGENISYGSLPRQPVCKADKYGDCIKPVGEDNRPCTVYNRCKRDNH

SEQ ID NO: 94465 - protein, 48 aa, Gossypium hirsutum
  Clone ID: LIB3147-060-Q1-K1-A5.pep
NSEHVTHLICSQPKLETQPYNNKEKITVSDVTKSDISFTKYSQIKFTL

SEQ ID NO: 94466 - protein, 79 aa, Gossypium hirsutum
  unsure (1)..(79): unsure at all Xaa locations
  Clone ID: LIB3147-060-Q1-K1-B10.pep
TTRPEVAYFHLAPSNDSVRSGTINTQYHLXDLCKNVYGECIYPDDDMTNIYYXGTKIARSKNRFTNGIQDHCTILSNKH

SEQ ID NO: 94467 - protein, 50 aa, Gossypium hirsutum
  Clone ID: LIB3147-060-Q1-K1-B6.pep
NRKISGNHGGAWDCFRNLGNKHCTISGRVYVTCSVIRVIVQQNLKLQKTP

SEQ ID NO: 94468 - protein, 69 aa, Gossypium hirsutum
  unsure (1)..(69): unsure at all Xaa locations
  Clone ID: LIB3147-060-Q1-K1-C4.pep
WGPKKKKILSTPRGVNLGFLKRPPLXXFFFFFFFFFFFFFFFFFFFXFFFFFFFFFFFFFFFFFFFFFG

SEQ ID NO: 94469 - protein, 52 aa, Gossypium hirsutum
  Clone ID: LIB3147-060-Q1-K1-C5.pep
LFHLQSTRQDHRIKKEKNEETMVIIIQNSNMQCNYLWAGNNENLLPPIIEFS

SEQ ID NO: 94470 - protein, 53 aa, Gossypium hirsutum
  Clone ID: LIB3147-060-Q1-K1-C6.pep
IHNLVSKALLVSHSLLLKSNFLTGKVPDPDKTVFLLGSDTCLIEDSLIERSSG

SEQ ID NO: 94471 - protein, 40 aa, Gossypium hirsutum
  Clone ID: LIB3147-060-Q1-K1-C8.pep
STPCGVLLCNFWISHVMLENVSVYCTGHLQIQPSNIVYEL

SEQ ID NO: 94472 - protein, 82 aa, Gossypium hirsutum
  Clone ID: LIB3147-060-Q1-K1-D1.pep
MIFHLAGPSSGQNYNKENDNEATTHDIYANAIINYDSEGSVILYVGNNISGCHMDTFFTFGAVFGGNITTLLNVTNMIAQLL

SEQ ID NO: 94473 - protein, 103 aa, Gossypium hirsutum
  Clone ID: LIB3147-060-Q1-K1-D7.pep
PRVRLHVMSVGTAVTALSRTLAWFRQQMLFSGISPSRIDIVTGWGRRSRVTGSSLVRQAVQDLLSIFSFPFFTENGNSGCFIGCGEPLNRWLLQSYVERMHLL

SEQ ID NO: 94474 - protein, 63 aa, Gossypium hirsutum
  Clone ID: LIB3147-060-Q1-K1-D9.pep
YQKLRLLALINKTTTTLCFRSMFLRHLVSTINTSMIACQKVRASVVRHLVIGHALVFSSLLWV

SEQ ID NO: 94475 - protein, 82 aa, Gossypium hirsutum
  Clone ID: LIB3147-060-Q1-K1-E2.pep
FPTLSIINYAHRDDYNSFGCGHLCEGFNTFGWRVHCVSLAPLTIVVQRWAEAIRSHVRWSSAATIGDHFRRNTCPTDGSHVQ

SEQ ID NO: 94476 - protein, 61 aa, Gossypium hirsutum
  Clone ID: LIB3147-060-Q1-K1-E6.pep
EFVHSVAHVPSCLVLGSEGRGLSEKSQLKCELVSIPMTGKFESLNVSVAGGIFLYMLQPKN

SEQ ID NO: 94477 - protein, 43 aa, Gossypium hirsutum
  Clone ID: LIB3147-060-Q1-K1-F12.pep
KCLYSIQSFILSMWIRNFMVMGCALDYAISCKSRRAISWKFIR

SEQ ID NO: 94478 - protein, 55 aa, Gossypium hirsutum
  unsure (1)..(55): unsure at all Xaa locations
  Clone ID: LIB3147-060-Q1-K1-F2.pep
PTLPPTLSPTLXPTLPSIFFKSHRTHLIISPFNPLSTFINPPILNQLLIIQSLSS

SEQ ID NO: 94479 - protein, 127 aa, Gossypium hirsutum
  unsure (1)..(127): unsure at all Xaa locations
  Clone ID: LIB3147-060-Q1-K1-F7.pep
TAPGILEVMXSPLAGTDLRSYVMSGGGLTLKNFKPKFMRKRCFLIFPVQGSERKGLVSVEVKKKKGEYDMKLLAVDIPMASGPDQRLFLIGDEEEYKVGGGLISMLRDPVVKAMAATNEFDDLDQID

SEQ ID NO: 94480 - protein, 39 aa, Gossypium hirsutum
  Clone ID: LIB3147-060-Q1-K1-F9.pep
RVNNTFKRILFGIFFKFPLKRIELEVFQVWKEELFGGLS

SEQ ID NO: 94481 - protein, 29 aa, Gossypium hirsutum
  unsure (1)..(29): unsure at all Xaa locations
  Clone ID: LIB3147-060-Q1-K1-G1.pep
VCGSXALKQDSGSDNFRYIYCQCTSDHDP

SEQ ID NO: 94482 - protein, 63 aa, Gossypium hirsutum
  Clone ID: LIB3147-060-Q1-K1-G11.pep
NFGSSSSLFLSCNLTKNKGFDNFSSHLLRCLKFLYINKKKKKGLSFYMIQALLTLSLQSYNLF

SEQ ID NO: 94483 - protein, 57 aa, Gossypium hirsutum
  Clone ID: LIB3147-060-Q1-K1-G3.pep
ISKLKFYCFNTMRILLTEKRDFELQWNLANTTKLRKQMVNDRMHACKFDQTKTTTMP

SEQ ID NO: 94484 - protein, 48 aa, Gossypium hirsutum
  Clone ID: LIB3147-060-Q1-K1-H1.pep
KYSVASKTWSENNGVEAICLEIYHPIKIRSHNYFCCLKFVCLPDYYMY

SEQ ID NO: 94485 - protein, 56 aa, Gossypium hirsutum
  Clone ID: LIB3147-060-Q1-K1-H10.pep
IYKINIILNYCSFFFFFFFNTKYNHENYSNNYRHCFAASKKNAIAKQTSMNLHNVD

SEQ ID NO: 94486 - protein, 63 aa, Gossypium hirsutum
  Clone ID: LIB3147-060-Q1-K1-H12.pep
TPPFISNNDNFNLGLSSYTQPLDPHPAMDNSLKEAYSLFMTKLFLHFMHRSEKHRRVRPLDPF

SEQ ID NO: 94487 - protein, 57 aa, Gossypium hirsutum
  Clone ID: LIB3147-060-Q1-K1-H6.pep
STMYAVERLFNNFSIHFEEPVICFCGLQWLLGNTTSLSCLSALYNKVARALNANRKV

SEQ ID NO: 94488 - protein, 50 aa, Gossypium hirsutum
  Clone ID: LIB3148-001-P1-K1-A9.pep
LNLVNQIEGLCVCMIGGVIVDVLDMHHVTVDLVSNAIGAFYLYFLTYKCQ

SEQ ID NO: 94489 - protein, 43 aa, Gossypium hirsutum
  Clone ID: LIB3148-001-P1-K1-B11.pep
KSTISAYTKKTYHSGITCHPSGIYPYLYLTKPESQNYMFSLNY

SEQ ID NO: 94490 - protein, 60 aa, Gossypium hirsutum
  unsure (1)..(60): unsure at all Xaa locations
  Clone ID: LIB3148-001-P1-K1-B4.pep
HRRLSLLRQCVSDSKSPGDPKLIDAFELSEEEGEDVLFKEAWLTYXWRRAKVHWIEEDIA

SEQ ID NO: 94491 - protein, 67 aa, Gossypium hirsutum
  unsure (1)..(67): unsure at all Xaa locations
  Clone ID: LIB3148-001-P1-K1-B6.pep
HASERSSTXISANAQRKVAREIKTARAFGLMPFITMGTKSFVFXRSMEVVNKDYEYDAFDDMTSAMD

SEQ ID NO: 94492 - protein, 46 aa, Gossypium hirsutum
  Clone ID: LIB3148-001-P1-K1-C12.pep
SHQLERKIQNVQMVHSKVNLWMSLQTIYRNLIGDRTAKEPSMYRHF

SEQ ID NO: 94493 - protein, 68 aa, Gossypium hirsutum
  unsure (1)..(68): unsure at all Xaa locations
  Clone ID: LIB3148-001-P1-K1-C2.pep
DAWANGFKKFVLHNVGGLELLMMHNRTXSAEIAHDVSTKKRKEIVERAAQLDIVVTNKLAWLRSQYDE

SEQ ID NO: 94494 - protein, 46 aa, Gossypium hirsutum
  Clone ID: LIB3148-001-P1-K1-C9.pep
RVSNQKKKKKPTLFKLYHICRIVCQTILNSDFRGCLICKYRMQAIS

SEQ ID NO: 94495 - protein, 150 aa, Gossypium hirsutum
  Clone ID: LIB3148-001-P1-K1-D10.pep
RVLHASEECVAVNDGAVLVRAETCPDLKIGNDRTEIIDGGMGGLDGKTAKLASPPCKELVKTGSSIPGPDTDKKQKRCHMEPVVNSISMSTREGLTDSGLSPPSTKAGGATVQILKRPNCGFGAFLGNSATKKKSDIGKKNEENKLEQIR

SEQ ID NO: 94496 - protein, 67 aa, Gossypium hirsutum
  Clone ID: LIB3148-001-P1-K1-E10.pep
PQPASGLSSALLAKYPDMHQVSQNASITYIPSMYIHKDQHALDVTKSTIDSYSASLDLPTTPKVMVL

SEQ ID NO: 94497 - protein, 51 aa, Gossypium hirsutum
  Clone ID: LIB3148-001-P1-K1-E12.pep
RFLKTQLSLLAACMKIMFHKNQNLNKQQNSITIDKQNSDSLKNPNLQILPL

SEQ ID NO: 94498 - protein, 63 aa, Gossypium hirsutum
  Clone ID: LIB3148-001-P1-K1-E9.pep
KRVRGIFTNQGSSIAAHLKCEDFLKPNTVSFRFYMLLPVPCFSFSCFLGIGIIFGALDEVHHS

SEQ ID NO: 94499 - protein, 37 aa, Gossypium hirsutum
  unsure (1)..(37): unsure at all Xaa locations
  Clone ID: LIB3148-001-P1-K1-F1.pep
GSPRSECGNHSLIVYSSLKRFLSICSTSLRMFRGXPX

SEQ ID NO: 94500 - protein, 50 aa, Gossypium hirsutum
  Clone ID: LIB3148-001-P1-K1-F2.pep
MFGSARSGIAGETCAICLEDYNDGELLKVTSCQHDFHSSWVESWMTNGGT

SEQ ID NO: 94501 - protein, 126 aa, Gossypium hirsutum
  Clone ID: LIB3148-001-P1-K1-F9.pep
APRSQTQTPLFMASLQGALPSVPPSSGLLRTSSLGTPSSAWMPPQSLPYASGIPSQSLPYASALPQRPYLGAQLPGNLLSSSHQAGGIGSESSYGFINTDQHVARRFLAPVTPQSFSSDRRGNPFG

SEQ ID NO: 94502 - protein, 114 aa, Gossypium hirsutum
  Clone ID: LIB3148-001-P1-K1-G10.pep
MSTTPNKITSTDGCDRRQATRLQRRAPACLHISSAASWNIAIPLSSPLACSPPSIDRRTTDRTEEPPPRQEQQQRQIQKTEPEKLVFKMWQHSAAPLCYEPASIVPSIVPDYMY

SEQ ID NO: 94503 - protein, 87 aa, Gossypium hirsutum
  Clone ID: LIB3148-001-P1-K1-G11.pep
VGPRLPIKPGLPYDPIFSLCPRNPQFEFGFISPPLLQVSFIHSFLIALGFPVLLPPFHPFLNFSPPLFSIFKSRPAWFLYHYFHSVG

SEQ ID NO: 94504 - protein, 111 aa, Gossypium hirsutum
  unsure (1)..(111): unsure at all Xaa locations
  Clone ID: LIB3148-001-P1-K1-H12.pep
TMMLSLTGQQHSEKVSENCGAVWKSLGIYTDADTKALEQFIDVFKDENLRPGSFILXSISGQGSLTIDHCKDSXVPEGRNAMIENRLLDNSELEYIIWKNGDASAADESLS

SEQ ID NO: 94505 - protein, 59 aa, Gossypium hirsutum
  Clone ID: LIB3148-002-P1-K1-A7.pep
WNVLYSRTPSKASILTKKRFFYEYKKKVCLLFYYIMHKTCGPPKEDETSCTYKRNTRRS

SEQ ID NO: 94506 - protein, 116 aa, Gossypium hirsutum
  Clone ID: LIB3148-002-P1-K1-B12.pep
ELSEHLGIRRLNERLSHPAGQDSVESIFPRDNPKNTRFSINFFTSIGLGGITENLREYLKNMPRLIMQQQEPASESESGDESGSFSSSDSESASSEPESDSSSSDEGERRMKKRKK

SEQ ID NO: 94507 - protein, 46 aa, Gossypium hirsutum
  Clone ID: LIB3148-002-P1-K1-B7.pep
RRRGSDSGSMDYANSDAWSAAYSTVAAGAAVVAGLGLLAYLRKAGN

SEQ ID NO: 94508 - protein, 46 aa, Gossypium hirsutum
  Clone ID: LIB3148-002-P1-K1-B8.pep
LQTLILLFLFFFFFFFFFFFFFFFFFFFFFFFFFFLNLQLELISLI

SEQ ID NO: 94509 - protein, 143 aa, Gossypium hirsutum
  Clone ID: LIB3148-002-P1-K1-C7.pep
LTDNEMIPCVPNTLIRSVHDLYGEEQQDAMLLWLEEHGRRLENGIIKVRKEGDDRSINLFPEVPPLCVTTVTNGVQVRASAVFVPEFSDVLDEAEKFMFAYSIRMSLLPEGCVINGMTFGSCQLNRKHWIIRADEEVVFKCDD

SEQ ID NO: 94510 - protein, 110 aa, Gossypium hirsutum
  Clone ID: LIB3148-002-P1-K1-D4.pep
MSKTNLCYLVLLLILLPSSYFLPLVLAKSRNPITDSEIKKKKSECYADIDSGLWGGHCKSSSIAKENCALKCLSPACYELIYESDPLEEGEKDYIRSQEFKYCMYKLSLG

SEQ ID NO: 94511 - protein, 84 aa, Gossypium hirsutum
  unsure (1)..(84): unsure at all Xaa locations
  Clone ID: LIB3148-002-P1-K1-D5.pep
TLQASILENKSITEALLFCCLSFFNNLMAFHQAFSTGGMGLHLQALIAQXASXVTDSVGCPSLGSLQRVIFTWAQTPEMMGSEC

SEQ ID NO: 94512 - protein, 73 aa, Gossypium hirsutum
  Clone ID: LIB3148-002-P1-K1-E6.pep
ILVPLKRPPFCFFFFFFFFFFFFFFFFFFFFFFFFFFLIVRMQVYFVRNFNQNTYMSKQHKTHYHHNLYTWFF

SEQ ID NO: 94513 - protein, 74 aa, Gossypium hirsutum
  Clone ID: LIB3148-002-P1-K1-E7.pep
IRYRFCINFPGKEKKEEDDNYDINMCSHFLHIQRNLKFFNGGIQSRETTVKYGSLALDVHHRSIKTGRVGGRVG

SEQ ID NO: 94514 - protein, 54 aa, Gossypium hirsutum
  Clone ID: LIB3148-002-P1-K1-G2.pep
IFIDVLGISDINVYFQLILSTLLIHFQLWMFSCSVIPLSGTLCFSKSIQNGVHK

SEQ ID NO: 94515 - protein, 76 aa, Gossypium hirsutum
  Clone ID: LIB3148-002-P1-K1-G4.pep
IEWITTVLSIKKKRLWFESFEVKRFPPGHIITRVYDINIKRGNWIKFILCKSSISMAGPPSIPCFGGFWFFLSSLR

SEQ ID NO: 94516 - protein, 46 aa, Gossypium hirsutum
  unsure (1)..(46): unsure at all Xaa locations
  Clone ID: LIB3148-002-P1-K1-H12.pep
IGFRKIFEDQSSRHXNGVIIYWATKQLQAQTNVKINFFYLRMIVCI

SEQ ID NO: 94517 - protein, 49 aa, Gossypium hirsutum
  Clone ID: LIB3148-002-P1-K1-H5.pep
FTTTIYYISIIIYAFKVQKSKNRSPTWKYRFNMLKDSARLTVITNADEV

SEQ ID NO: 94518 - protein, 44 aa, Gossypium hirsutum
  Clone ID: LIB3148-002-P1-K1-H7.pep
LVLMFHLVGTCYYFQYVPVTICHCRPQDCISSIWVLVDNVRFAV

SEQ ID NO: 94519 - protein, 85 aa, Gossypium hirsutum
  Clone ID: LIB3148-002-P1-K1-H9.pep
RIRRVKIQCISIRTSSPVACRLSATSTNKISQFLFFFSATLMKHNYRWCVMFLGLSFLSLSLSQVQLFQTINFPRNQMIYTYLRS

SEQ ID NO: 94520 - protein, 29 aa, Gossypium hirsutum
  unsure (1)..(29): unsure at all Xaa locations
  Clone ID: LIB3148-003-P1-K1-A6.pep
LLEXYIHPTHHPLNGSNTKAARHTKAHVH

SEQ ID NO: 94521 - protein, 41 aa, Gossypium hirsutum
  Clone ID: LIB3148-003-P1-K1-B1.pep
IQGFNYEVQAIMMNHDAAVDVIIQLKFKTTMHDWSKCEYKL

SEQ ID NO: 94522 - protein, 62 aa, Gossypium hirsutum
  unsure (1)..(62): unsure at all Xaa locations
  Clone ID: LIB3148-003-P1-K1-B2.pep
GDQYQTVTLVNTMVVHHDRCSNMLSGRNXFIRRSVVRYVQLPSDGVNIESLYGATRREACGS

SEQ ID NO: 94523 - protein, 72 aa, Gossypium hirsutum
  Clone ID: LIB3148-003-P1-K1-B6.pep
VTWYLKIAAGIESGSSRPGHLVATTLSVRHIYEIAKIKQSDPYCQYMSLESICKSIIGTASTMGIKVVKDLD

SEQ ID NO: 94524 - protein, 65 aa, Gossypium hirsutum
  Clone ID: LIB3148-003-P1-K1-C1.pep
YVHTYTMVASREFIVAYRNVQSRKWDRILLCPGTTRGQLFEFYFVKIKVSQHHMICSIVVGWVHC

SEQ ID NO: 94525 - protein, 70 aa, Gossypium hirsutum
  Clone ID: LIB3148-003-P1-K1-C12.pep
NPILSLNVAQNRGPKMVSASGECQKILEQARTAPGLVSHTTDPCAQPPRHQVPPYTRSFSTFATGSSLLR

SEQ ID NO: 94526 - protein, 55 aa, Gossypium hirsutum
  unsure (1)..(55): unsure at all Xaa locations
  Clone ID: LIB3148-003-P1-K1-C3.pep
LVRRFLLQFNPVFXTILTLAHNCNPRFESRVILEYIYDTFNQNPILPQDPIHIPN

SEQ ID NO: 94527 - protein, 94 aa, Gossypium hirsutum
  Clone ID: LIB3148-003-P1-K1-C5.pep
FYLFFFFFDVRQYYQYPIYTFNIKVTKLLNIYLISFFYGKRIYIYKITRKILYTKFTIYIADSRNGFFFFLNLSWMKQFNGTTIVLTKVNERIP

SEQ ID NO: 94528 - protein, 56 aa, Gossypium hirsutum
  Clone ID: LIB3148-003-P1-K1-C9.pep
CVNSRCAIFLYSHPHRGYSVVFETLWLYILVLVAKKFFEIFQNVYTIFEGIAILHS

SEQ ID NO: 94529 - protein, 128 aa, Gossypium hirsutum
  unsure (1)..(128): unsure at all Xaa locations
  Clone ID: LIB3148-003-P1-K1-D11.pep
PTRSSQYREPGVLLWRGFTWQEFADQCFGNKADYGKGRQMPIHYGSKKHNFCTISSPIATQLSQAAGIAYSLKMDNKKACVVSYIXDGGTSEGYFHAGLNFAAVMEAPVIFFCRNNGWAISTNVSEQF

SEQ ID NO: 94530 - protein, 61 aa, Gossypium hirsutum
  Clone ID: LIB3148-003-P1-K1-D9.pep
LNNKYRYTYVFIYVYVNNLTASATQSKPWNFTVYYKPIPNTNRLVNVTYLRRLTHVQVTLI

SEQ ID NO: 94531 - protein, 104 aa, Gossypium hirsutum
  unsure (1)..(104): unsure at all Xaa locations
  Clone ID: LIB3148-003-P1-K1-E12.pep
TGRDRPGXQSGVSADPKHGKGNGVNAEAXAQNTRAAEVRQVTDEETGTXATNRERQSRKEERLSNVLKGGNRARLAKTIASQRGTHTDRRLHQMMRADRDYEQT

SEQ ID NO: 94532 - protein, 130 aa, Gossypium hirsutum
  unsure (1)..(130): unsure at all Xaa locations
  Clone ID: LIB3148-003-P1-K1-E4.pep
GLKKMGEIELAVRFACPSLXPDTCSAYGQPLLPRMHYLRPLGVAQQEALRGAATKMVAQWLARSEPPLGQEVVKYMLDADSHTWSMRKSKANWFRIVAVLAWAVGLAKWLDNIRRWKNPVTTVLVHVLYL

SEQ ID NO: 94533 - protein, 50 aa, Gossypium hirsutum
  Clone ID: LIB3148-003-P1-K1-F12.pep
MMLLQIFLFFPGLEYVNGLSFFLIYSIIYLMSLVPYLVVAVITFHEVRRI

SEQ ID NO: 94534 - protein, 52 aa, Gossypium hirsutum
  Clone ID: LIB3148-003-P1-K1-F2.pep
NRKVLQGGLKLRSQIINSRVDYFHFIFGKSITIWKDQIVFVLIRYYARRDLL

SEQ ID NO: 94535 - protein, 138 aa, Gossypium hirsutum
  Clone ID: LIB3148-003-P1-K1-F8.pep
HASAHASGASYGSFTLVETFSDKLLSWFPYYYHFKFAFLVWLQLPSTEGAKQIYKNHLRPCLLKHQARVDQLMCIASTEMARFITAHQKEFRFVRAMMIKIIGSDPKVSGTEPAEPRSLPAINDETRTTANPESDNGD

SEQ ID NO: 94536 - protein, 76 aa, Gossypium hirsutum
  Clone ID: LIB3148-003-P1-K1-G6.pep
EQIVQSYFQEMFLSENQTNYERIRSGIERCISEDDNRNLIAKYTKEEGRLYLECILRRHLVKMVFLLFFIRNVGLL

SEQ ID NO: 94537 - protein, 119 aa, Gossypium hirsutum
  Clone ID: LIB3148-003-P1-K1-H1.pep
EKIGFDLCELCYNSPATIPGRFREQHKPDHQFKIVQPLSIRDLMLRLNSEQSDDDDDGGLDASEHMDGASHTPGMQADESHGVSQEPEDISPLIFSVDVSLDHEDNSEDPSDNISSGLT

SEQ ID NO: 94538 - protein, 57 aa, Gossypium hirsutum
  Clone ID: LIB3148-003-P1-K1-H7.pep
QSIKIPLFKSRPLPPKYPFLRPLSYNPILFILVSLNYKNLAHYNQHLLLLKPCHYPS

SEQ ID NO: 94539 - protein, 112 aa, Gossypium hirsutum
  unsure (1)..(112): unsure at all Xaa locations
  Clone ID: LIB3148-004-Q1-K1-A10.pep
LLFFFFLFIFFFFFXMTLYFTKKFGCWIFPTKLKSKFGELLKISCLLLLIYIAGGVEKVEHIFKYYKKSIKIWKLMNFRWPTMLPNSNINDWTTQFFYNHSNQLGRVFADAW

SEQ ID NO: 94540 - protein, 99 aa, Gossypium hirsutum
  Clone ID: LIB3148-004-Q1-K1-A3.pep
KPLYSAKRGFSQLSFFLPILAKFIERGPFFLILGKQYILSFFFPFFFFFFFFFFFFFFFFFFFFFFFFFFFFFFFFFFFGQSQHRLFPTLTLSISLNIP

SEQ ID NO: 94541 - protein, 55 aa, Gossypium hirsutum
  Clone ID: LIB3148-004-Q1-K1-A4.pep
HVTARLNLNSSWYHDTNNTETKACYNQVQQKELHKRFDILVFFDHCLLQSLVLGS

SEQ ID NO: 94542 - protein, 50 aa, Gossypium hirsutum
  Clone ID: LIB3148-004-Q1-K1-B1.pep
PIGKITKVIPPKKEERKKKHYWSKSLTKQLKQMIFSIVFNKFALPSYVLH

SEQ ID NO: 94543 - protein, 139 aa, Gossypium hirsutum
  Clone ID: LIB3148-004-Q1-K1-B10.pep
RKLKVAETTPDSWFGKMVCHASQGCLRCVEWTIKSVNRNAYIMIAITGKSFCRSSAIATELIMNNILRLVRVNVIGDVILFLGKLFVSLSSAVFGFLVLDTHKYSSGHNKLSSPLLPVLVCWTLGYVVATLFFAVVEMS

SEQ ID NO: 94544 - protein, 61 aa, Gossypium hirsutum
  unsure (1)..(61): unsure at all Xaa locations
  Clone ID: LIB3148-004-Q1-K1-B3.pep
XXRVVWTPFNFNFNFCFXSLKXXCVLVCVXNFXFQFYXXQLLNAXFAAPPXSXXLRPSEWG

SEQ ID NO: 94545 - protein, 49 aa, Gossypium hirsutum
  Clone ID: LIB3148-004-Q1-K1-B4.pep
KKKKKKKKKINFKKKKKKKRKEKKKKKKKKKKKKKKKKKKKKKKKGRPF

SEQ ID NO: 94546 - protein, 46 aa, Gossypium hirsutum
  Clone ID: LIB3148-004-Q1-K1-C10.pep
YMNTFRRQLIDSRLWKCTICESFLIHLRNKCSRNMYNCSFWLKQIK

SEQ ID NO: 94547 - protein, 141 aa, Gossypium hirsutum
  Clone ID: LIB3148-004-Q1-K1-C2.pep
KSFLEALSVINRDSRSLPNKISRSLPHQSFLKDEIEEEVECILSVSAEMKQIFWDLLPDHELDEEFADAYGEGLEGSDDDSCIEDSGCYENDWKMVNKDLESCMSHSVKSIERDEVIQDVKMDPEYSSSNAKSSEDKNRVK

SEQ ID NO: 94548 - protein, 47 aa, Gossypium hirsutum
  Clone ID: LIB3148-004-Q1-K1-D2.pep
KQFFFFFFLFFFYFFFFFFFFFFFFFFFFFYLFFFFFFFKAKETIYN

SEQ ID NO: 94549 - protein, 39 aa, Gossypium hirsutum
  Clone ID: LIB3148-004-Q1-K1-D3.pep
GKGSFRYIFFAEIKFQISLKWGISGANYKSPNTTTGANY

SEQ ID NO: 94550 - protein, 59 aa, Gossypium hirsutum
  Clone ID: LIB3148-004-Q1-K1-D4.pep
ASVLNRYLNKRHIDFWLTYVGQNFQELINFSFPSLITLITIISYMVEYMNYPCTTPDAW

SEQ ID NO: 94551 - protein, 55 aa, Gossypium hirsutum
  Clone ID: LIB3148-004-Q1-K1-D9.pep
ITITKYMVFIIIMDFLNFLAFYVGDFFKAFLKSWYTIVSRKILIIIAKVPIPNKV

SEQ ID NO: 94552 - protein, 56 aa, Gossypium hirsutum
  Clone ID: LIB3148-004-Q1-K1-E11.pep
MWIVKKKVSYFNFGDFIFLFMMSHAFFFFFFFFFFVFFFFFFFFFFFFFFFFFFSY

SEQ ID NO: 94553 - protein, 59 aa, Gossypium hirsutum
  Clone ID: LIB3148-004-Q1-K1-E8.pep
NSFFSFFLFFFFFFFLFWFFFFFYFFFESNPPFINSILKPVVCSSPPKETIHVFHFCST

SEQ ID NO: 94554 - protein, 73 aa, Gossypium hirsutum
  Clone ID: LIB3148-004-Q1-K1-F2.pep
NFNLCTTIYIVFSLLACVGYVFFLSPVFLFFFFFFFFFFFISRKQIINENLLNFNSSVCGFSFCYISKITAIG

SEQ ID NO: 94555 - protein, 61 aa, Gossypium hirsutum
  Clone ID: LIB3148-004-Q1-K1-G4.pep
DAWASAYYRGAVGALLVYEVSRRQTFDSIGRWLNELQSKNHNRKTKHLYYFRRYKTTQKRK

SEQ ID NO: 94556 - protein, 36 aa, Gossypium hirsutum
  Clone ID: LIB3148-004-Q1-K1-G7.pep
CYRNLLGEDLGPLDSKELDQLEHQLEASLKQIRSTK

SEQ ID NO: 94557 - protein, 78 aa, Gossypium hirsutum
  Clone ID: LIB3148-004-Q1-K1-H12.pep
EIQPSPNFNYTFYSENKNIQKQIFLQLQYKSKQKKHKNKTIVLKYPKRTPFHLSFQMGFNDNPSKDHLFCQTLNQSML

SEQ ID NO: 94558 - protein, 53 aa, Gossypium hirsutum
  Clone ID: LIB3148-004-Q1-K1-H5.pep
IWSPLFFFFFFFFFFFFFFFFFFFFFFFFFFSLPFFFFRRETQILITTNHQMF

SEQ ID NO: 94559 - protein, 58 aa, Gossypium hirsutum
  Clone ID: LIB3148-004-Q1-K1-H7.pep
KRIKHQSGFCKFPCSYSRKQTLISHGNYCNFNENGFSKILTGPSPEFDRKSVFTSAAS

SEQ ID NO: 94560 - protein, 41 aa, Gossypium hirsutum
  Clone ID: LIB3148-005-Q1-K1-A11.pep
FFLLVQPISIFDSMVVLNNSLKFNVFVRINTFIDSQFTRSY

SEQ ID NO: 94561 - protein, 96 aa, Gossypium hirsutum
  Clone ID: LIB3148-005-Q1-K1-A4.pep
YKGEREENFNKSKEVDLLDESSEKLENVDWEDVITILDDNEWPSKTPSFQETMKEYRFELKKFAEKVMQVMDENLGLPKGYIRKALNDGDGDNAFF

SEQ ID NO: 94562 - protein, 48 aa, Gossypium hirsutum
  Clone ID: LIB3148-005-Q1-K1-A9.pep
STVFVVNRDFGIVYELRDHQQAYHTIDCFLWYFTKLKFELMACIVWIK

SEQ ID NO: 94563 - protein, 76 aa, Gossypium hirsutum
  Clone ID: LIB3148-005-Q1-K1-B2.pep
EIEASFEASKFLPVHATNKSVEPVEVMPLLPDFERYHYQFVMVAFYNAPTADSEILSKLSWLCTLLILIEVHFFNV

SEQ ID NO: 94564 - protein, 60 aa, Gossypium hirsutum
  Clone ID: LIB3148-005-Q1-K1-B3.pep
EGKLVRSFFILHQLEKGRCAKRLLRLETPVFYQSRCCKTADKLFNYGYIKKYLFCCMPAS

SEQ ID NO: 94565 - protein, 137 aa, Gossypium hirsutum
  Clone ID: LIB3148-005-Q1-K1-B9.pep
MIPSIPTHSNVSTPANQDHLYLSPPPPSQQQQFHPQQFQQQQQQQRMLQQQQQQQQQQQQVQQNQQQQSLASHFHLLHLVENLADTIDNGSRDQHSDALVNELNNHFEKCQQLLNSIAASINSKSMTVEGQKEKAGG

SEQ ID NO: 94566 - protein, 46 aa, Gossypium hirsutum
  Clone ID: LIB3148-005-Q1-K1-C3.pep
PTRPENCAGPSCGNPYKYRDSKSKLPLCSLQCYKAIQKQQMAETTC

SEQ ID NO: 94567 - protein, 68 aa, Gossypium hirsutum
  unsure (1)..(68): unsure at all Xaa locations
  Clone ID: LIB3148-005-Q1-K1-C5.pep
FFVYQRLWLKMSLFYFIVLFLFYFFXFVYLIISLYLFFLHFFLFYFFIFFFSLTFFFFFFSFFIFFFF

SEQ ID NO: 94568 - protein, 51 aa, Gossypium hirsutum
  Clone ID: LIB3148-005-Q1-K1-D2.pep
TEFGSLLVVQKPDTVSTCDTLCLLVLRCYLVTTATTFPLRTRGRTREPTRG

SEQ ID NO: 94569 - protein, 68 aa, Gossypium hirsutum
  Clone ID: LIB3148-005-Q1-K1-D4.pep
VPLQSLHCSWLEGSPFSLRCNKPCPLEPVPQSLNGRHTSRDQVGPFHPRVPCSLGTTQQYYLRAHTCL

SEQ ID NO: 94570 - protein, 42 aa, Gossypium hirsutum
  Clone ID: LIB3148-005-Q1-K1-D6.pep
QDPFSFDIFGGRFLELVLTSWGGASMGSFKYYVKVSRYNQNL

SEQ ID NO: 94571 - protein, 66 aa, Gossypium hirsutum
  Clone ID: LIB3148-005-Q1-K1-D9.pep
NLLYLQFMFLVYVILFYFILIFFFFFCIFIFFSIFHFIIFFKLFFSFFLFFILIYFIYFFFFYFFF

SEQ ID NO: 94572 - protein, 66 aa, Gossypium hirsutum
  Clone ID: LIB3148-005-Q1-K1-F7.pep
TKVVMAYWTSTKYQITGGLRSCSKTWFKRTMGTGSSMTLPMCQIRRVLNWTGRSCQINNILLNAII

SEQ ID NO: 94573 - protein, 53 aa, Gossypium hirsutum
  Clone ID: LIB3148-005-Q1-K1-F9.pep
MEDVRRKAAPSFLKGFNKPFWLYKARSLAGKLEKSIPPPFLLIEIYIHSCIMS

SEQ ID NO: 94574 - protein, 84 aa, Gossypium hirsutum
  Clone ID: LIB3148-005-Q1-K1-G1.pep
ATKTFSRLKSQQERWREIIFFIFCFLAALNYQELIMLTAFQNHKNVKYFSLAMEMNIASLLKSERTGHANYSILTHPALRKLWL

SEQ ID NO: 94575 - protein, 79 aa, Gossypium hirsutum
  Clone ID: LIB3148-005-Q1-K1-G5.pep
YQPKSRYSSGNAAYDWMISLYDIRLTRPISYILPYTMDIIATDFFQVCIPCSLPRDSSRYFFFLYFSRMLSSETLRTRG

SEQ ID NO: 94576 - protein, 60 aa, Gossypium hirsutum
  Clone ID: LIB3148-005-Q1-K1-H1.pep
DLIHKVYRVKTFSYKTIYTYYLKNLRNKGQIHFLALLMLDSSQLLNFHVFSFVMRLFSLI

SEQ ID NO: 94577 - protein, 93 aa, Gossypium hirsutum
  Clone ID: LIB3148-005-Q1-K1-H2.pep
LKVLCSSLCKHKDCFKKKKREGKKKKKKKKKKKKKKKKKKKKKKKKKKKKKKKKKKKKKKKKKKKGGAPFKESNFTSPCLQRNSFFLGQPKLN

SEQ ID NO: 94578 - protein, 43 aa, Gossypium hirsutum
  Clone ID: LIB3148-005-Q1-K1-H5.pep
EQAAVVGISCIKEIIASHSRNYCCNKDDIILYSPVSNKLIGFL

SEQ ID NO: 94579 - protein, 41 aa, Gossypium hirsutum
  Clone ID: LIB3148-005-Q1-K1-H9.pep
TKFVPLILRSPRKNGITDYGSIIIPQGRNAEGGFCCLRTRG

SEQ ID NO: 94580 - protein, 81 aa, Gossypium hirsutum
  Clone ID: LIB3148-006-Q1-K1-A10.pep
LDNLRRLSVTTDQIISAKGWVVNTLIQRWLMDATTTFFSISSLRRLHEVWRCLVQTPGFMAPHSDFLCEILHPFQSPRTRG

SEQ ID NO: 94581 - protein, 43 aa, Gossypium hirsutum
  Clone ID: LIB3148-006-Q1-K1-A3.pep
VFFFVVFFFFLSGRWNEIYISRCWLNQMVLQSKRIGSWLRKVG

SEQ ID NO: 94582 - protein, 35 aa, Gossypium hirsutum
  Clone ID: LIB3148-006-Q1-K1-A5.pep
LLFVFTCFCDRKLLIVCWFHELCKFRMSQFISYLL

SEQ ID NO: 94583 - protein, 87 aa, Gossypium hirsutum
  Clone ID: LIB3148-006-Q1-K1-B1.pep
ITNAKVSPLSPSKFFYAPPFNTLHIFYCFLLIPGFFFFFFFFFFFFFFFFLNEMLSFIISNLQSSLNFVLIVTSKIQKEKAKTMSAW

SEQ ID NO: 94584 - protein, 60 aa, Gossypium hirsutum
  Clone ID: LIB3148-006-Q1-K1-B2.pep
DWAWAHLGLYITLNSPDFLGDGMLLPASPNRPWVYFSFKSSSFYHLSYLIISYQTKKAIE

SEQ ID NO: 94585 - protein, 120 aa, Gossypium hirsutum
  Clone ID: LIB3148-006-Q1-K1-B7.pep
KSGFLHVILHCDLCLKIFENNEDTTKENENNGDNSRRFECHYCCRNFPTSQALGGHQNAHKRERQHAKRAHLQSAMVHTSLSDAHIYGLVNYRLGSAPTPPITYPSWNSSFTRSTSRFYG

SEQ ID NO: 94586 - protein, 69 aa, Gossypium hirsutum
  Clone ID: LIB3148-006-Q1-K1-B8.pep
VEADAQIKDMTFIAEYTGDVDYIKNRENDDCDSMMTLLLATNPSESLVICPDKCGNIARFINGINNHTP

SEQ ID NO: 94587 - protein, 59 aa, Gossypium hirsutum
  Clone ID: LIB3148-006-Q1-K1-C3.pep
PRVRPIGCQTLINIDHIARRWATLEVRNTPTNIRDLLIFLLPLQLNNFVFFIIQRKHRN

SEQ ID NO: 94588 - protein, 55 aa, Gossypium hirsutum
  Clone ID: LIB3148-006-Q1-K1-C5.pep
TAKKGITIFPGKRTDTQNRAKNKLRTLETVSFHFNSIGNFHYRYKCLASQIPHNL

SEQ ID NO: 94589 - protein, 57 aa, Gossypium hirsutum
  Clone ID: LIB3148-006-Q1-K1-C6.pep
PPPNKLNSPPPHLFFIPFHFFFFPFCFFFIFFPFFFFFFFFFFFFFFFFFNSSSCFN

SEQ ID NO: 94590 - protein, 104 aa, Gossypium hirsutum
  unsure (1)..(104): unsure at all Xaa locations
  Clone ID: LIB3148-006-Q1-K1-D11.pep
TRNEKQNLTATKSIKIDIFMGLXRPLPVSQASIKPMMRTFPSKFQNYYIYRGSNPSDERGGAVNPKGDLESWCRTGXXSGCPNPNAQSMICWESDSCFIFLTSL

SEQ ID NO: 94591 - protein, 63 aa, Gossypium hirsutum
  Clone ID: LIB3148-006-Q1-K1-D4.pep
VGKQGEHIPRTREEVQIMAEVHMPRNCKQGDNSLKLPSAHSGSGIYLNSSITDNDRWTGQTSA

SEQ ID NO: 94592 - protein, 93 aa, Gossypium hirsutum
  unsure (1)..(93): unsure at all Xaa locations
  Clone ID: LIB3148-006-Q1-K1-D5.pep
RDHATPYFLYQATHRQTTSREFTILFQLQHPRNPKHADNSXKQPTTQPGPDTTLKTRTTTITIHPTHEHNQPPNPNITLPDLHTIYCLFTFLL

SEQ ID NO: 94593 - protein, 74 aa, Gossypium hirsutum
  unsure (1)..(74): unsure at all Xaa locations
  Clone ID: LIB3148-006-Q1-K1-D6.pep
EHDWTEKSDXYEWMKTDMAWVYRSKTPXLVFTGHRPMYSSLGADDQFLETVXPLLLNNKVHLVLYXHVHIYVRT

SEQ ID NO: 94594 - protein, 66 aa, Gossypium hirsutum
  Clone ID: LIB3148-006-Q1-K1-E12.pep
FGGPKKNLKFCRCGEVNLGFLKRGPHFIFFFFVCMCLLVLVFFRLAALFFFFFFFFPLFFFFFFFF

SEQ ID NO: 94595 - protein, 50 aa, Gossypium hirsutum
  Clone ID: LIB3148-006-Q1-K1-E2.pep
KGRPLFFFFFFFFFFFFFFFFFFFFFFFFFFFNFFFFFFFFFFFFFYPTS

SEQ ID NO: 94596 - protein, 64 aa, Gossypium hirsutum
  Clone ID: LIB3148-006-Q1-K1-E4.pep
SCLQLFAFVKTLPILSFFFSSLNLSTWYLEKAFMMKKTDRIGVVIFCPIVVQFCGGCVADCVIL

SEQ ID NO: 94597 - protein, 77 aa, Gossypium hirsutum
  Clone ID: LIB3148-006-Q1-K1-E5.pep
PNPSPPPPACPSCASPCSSWRPPPCSGCPSPPKQVVPYFIYSYKNPPPSESAATNAHSLLVSATLVILWGTLSLFSN

SEQ ID NO: 94598 - protein, 112 aa, Gossypium hirsutum
  Clone ID: LIB3148-006-Q1-K1-E8.pep
LIILQLQGWQVQLFSTPPAVFSPEFPFQLLHSVLFGVLTITSSEIIITRFSEYILYMIQYNTNSIKEEKNKERMIKKVQKMGKDKKYSFFFFHCNSCLKVLQKQIKHFLRHF

SEQ ID NO: 94599 - protein, 81 aa, Gossypium hirsutum
  unsure (1)..(81): unsure at all Xaa locations
  Clone ID: LIB3148-006-Q1-K1-F1.pep
NAGLITVVRRGDHNMPEYMRVIWRVMWRVLWWFNRMSNPKKAPKHVLIHILVQNNIEINIXICMMLCMVLKXXXKKKKKFY

SEQ ID NO: 94600 - protein, 74 aa, Gossypium hirsutum
  unsure (1)..(74): unsure at all Xaa locations
  Clone ID: LIB3148-006-Q1-K1-F12.pep
GXVRKKGKXRXEXFKEKKTFRKRGKKKKRVNTNKKATTKNKKKKKSQKRLTNHLHNKHRKHTMNVKACQNICII

SEQ ID NO: 94601 - protein, 40 aa, Gossypium hirsutum
  unsure (1)..(40): unsure at all Xaa locations
  Clone ID: LIB3148-006-Q1-K1-F2.pep
TPXPPTPCRLTPXPYSIAEPGALXRGSQALAVTLCMTDVX

SEQ ID NO: 94602 - protein, 48 aa, Gossypium hirsutum
  Clone ID: LIB3148-006-Q1-K1-F6.pep
FLFFFFFFYFFIFFFFFFFFYFFYFFFFFFFLFFFLNKYLIFRNPTQT

SEQ ID NO: 94603 - protein, 41 aa, Gossypium hirsutum
  Clone ID: LIB3148-006-Q1-K1-G1.pep
LTYMRARFEKVVGSKDSEALCMINPDGAPGPELSIFFVRAR

SEQ ID NO: 94604 - protein, 62 aa, Gossypium hirsutum
  unsure (1)..(62): unsure at all Xaa locations
  Clone ID: LIB3148-006-Q1-K1-G7.pep
CTCYTCRNHSRAYINHLLSVHVMLAQILLEIHNTHHFLGFFRLIRDAINAGRFEXFRREFVQ

SEQ ID NO: 94605 - protein, 56 aa, Gossypium hirsutum
  Clone ID: LIB3148-006-Q1-K1-G8.pep
YWMPSMQAYLNNVPGNIIKNCTKFIRLFFGVKKKSYFFDHLKIPLYFLIHKIFLFF

SEQ ID NO: 94606 - protein, 91 aa, Gossypium hirsutum
  Clone ID: LIB3148-006-Q1-K1-H12.pep
RPMRPVAFVNLCNGRRWCCLAVKTCVSVPSLDLCELFIPEYSHFIGCQLSISKKKKKKKKKKKKKKARKKEVQKIPLLPAGEKNNSVGYNK

SEQ ID NO: 94607 - protein, 61 aa, Gossypium hirsutum
  Clone ID: LIB3148-006-Q1-K1-H5.pep
ENTISLLPSSIINKIVSKHPPCGWDMDDFPEWVWNKGHSFSMQFPYEALTGNTASGVDKIW

SEQ ID NO: 94608 - protein, 105 aa, Gossypium hirsutum
  Clone ID: LIB3148-006-Q1-K1-H6.pep
HAFASSEADMPSIPLGDPSVQNPLYGCMQYSSKLQSTRQVDPPTSSRTFIKVYKSRSVGRSLDISRFNSYHELREELAQMFGIEGKLEDPLRSSWQLVFVDREND

SEQ ID NO: 94609 - protein, 50 aa, Gossypium hirsutum
  Clone ID: LIB3148-006-Q1-K1-H9.pep
IDAKGLVSGSSKLQEFLKFAASSDFVLTDKVSSLCSRVEALTTQFPIPGV

SEQ ID NO: 94610 - protein, 34 aa, Gossypium hirsutum
  unsure (1)..(34): unsure at all Xaa locations
  Clone ID: LIB3148-007-Q1-K1-A10.pep
CSYFFYFFLFLFFFFFFFFFFFFFFFFFFXNFYL

SEQ ID NO: 94611 - protein, 80 aa, Gossypium hirsutum
  Clone ID: LIB3148-007-Q1-K1-A11.pep
CLQKRADVKLQELPAVLGACCVLHNICELRNEEMEPELKIEISDDEVVPENNLRSMVAVQARDYIAHNLLHHGLAGTGFL

SEQ ID NO: 94612 - protein, 62 aa, Gossypium hirsutum
  Clone ID: LIB3148-007-Q1-K1-A7.pep
RRRTRDPASSISNLNFKFDKKYLISIYKISFKICLKKSHFDFKKNSFKKFYFHFSISFHLNL

SEQ ID NO: 94613 - protein, 37 aa, Gossypium hirsutum
  Clone ID: LIB3148-007-Q1-K1-A8.pep
RPRVRWPAAALLKVEMTLIKFDKCSVRPKKPKKKRFF

SEQ ID NO: 94614 - protein, 53 aa, Gossypium hirsutum
  Clone ID: LIB3148-007-Q1-K1-A9.pep
GSSQYAIAMSLKRSRTIFAGNFKKLLLVHLKKLVAAGMLVKGYASYKLSFAWS

SEQ ID NO: 94615 - protein, 79 aa, Gossypium hirsutum
  Clone ID: LIB3148-007-Q1-K1-B12.pep
PTRPRQYHLYFNEFCFFGYCILIYRSLHWNVLKPQLLFRHVTALCQGCRKPHPWGDGMRFFLVDSCTSKSASASPCNSV

SEQ ID NO: 94616 - protein, 96 aa, Gossypium hirsutum
  Clone ID: LIB3148-007-Q1-K1-C11.pep
MLSPKLAHRFGGYLEEEAIQSYTEYLKDIESGAIENVAAPAIAIDYWRLPKDARLKEVITVIRADEAHHRDVNHFASDIHFAGKELKDAPATVGYH

SEQ ID NO: 94617 - protein, 51 aa, Gossypium hirsutum
  unsure (1)..(51): unsure at all Xaa locations
  Clone ID: LIB3148-007-Q1-K1-C4.pep
LLEILGNAINWFALPLKEVHKLFQXRELIPPHKPEFIPVYQHHFFYSITHF

SEQ ID NO: 94618 - protein, 57 aa, Gossypium hirsutum
  unsure (1)..(57): unsure at all Xaa locations
  Clone ID: LIB3148-007-Q1-K1-D4.pep
RXRXAXRCPLRLLKSTLPHLYRTWCTKXEAPKXTQGYHHFKLDVQSPMIPNKHYVFI

SEQ ID NO: 94619 - protein, 30 aa, Gossypium hirsutum
  Clone ID: LIB3148-007-Q1-K1-D8.pep
LELFMSRVGSTRIRENYIQIELFMSRVGLT

SEQ ID NO: 94620 - protein, 82 aa, Gossypium hirsutum
  unsure (1)..(82): unsure at all Xaa locations
  Clone ID: LIB3148-007-Q1-K1-D9.pep
KTKHPNKTILQSPISPKPFNLTQFINGQSEPNIGKAPETLKVSGTPAPQLARXGFPRTASQRPASSPYASTSIKPVKRKINA

SEQ ID NO: 94621 - protein, 77 aa, Gossypium hirsutum
  Clone ID: LIB3148-007-Q1-K1-E1.pep
ETLHKLTNCAMDVTVSTSDNKNGIEVSQNMISTSRVDGLNYWLRYWYSPEHFLTASLALGDSDLSSLLIFSPTTNSL

SEQ ID NO: 94622 - protein, 99 aa, Gossypium hirsutum
  Clone ID: LIB3148-007-Q1-K1-E8.pep
RTKVAMAVPNMVDMVVVVVVRLKGARWNLWFNPNLDTCPLTRDMSTRAIGSVTGTATSGTCRVTQYLVILLNTCSMTRTLILGPLFEEELIFNNLKVYF

SEQ ID NO: 94623 - protein, 107 aa, Gossypium hirsutum
  Clone ID: LIB3148-007-Q1-K1-F2.pep
SQNPKILLRCLLFPNQPNKAKWIMTPKSKAFALLSLIFPSGRQSQMNYRSTLALSNFCFRHQPIYSIVLIPRNRISSSRNLEKSSFLFAFNFLTNRTILCSLKTPIM

SEQ ID NO: 94624 - protein, 28 aa, Gossypium hirsutum
  Clone ID: LIB3148-007-Q1-K1-F4.pep
LIKARFILGKSLYFVVRYLQFSSLLNWC

SEQ ID NO: 94625 - protein, 40 aa, Gossypium hirsutum
  Clone ID: LIB3148-007-Q1-K1-F5.pep
LASFYNPGGDAVIYSAPAFVEKEALGKNKQGYPKFVVGEG

SEQ ID NO: 94626 - protein, 78 aa, Gossypium hirsutum
  Clone ID: LIB3148-007-Q1-K1-F9.pep
KANRRDYSFFSIVKNKLFFFVFFFVIFFLVFFFFFFFFFCLFLHVFLKGLLFFRPLLHYHSYKSLPKSWRWVDRDRTV

SEQ ID NO: 94627 - protein, 72 aa, Gossypium hirsutum
  unsure (1)..(72): unsure at all Xaa locations
  Clone ID: LIB3148-007-Q1-K1-G9.pep
IITAILGAXILAEKIHLESSLFSIIIGTRLYTVVSDKTIYWLFAFNNSINEPIMHIFSFSIESPIFKLLSVV

SEQ ID NO: 94628 - protein, 35 aa, Gossypium hirsutum
  Clone ID: LIB3148-007-Q1-K1-H1.pep
KAKELEVYKTQCHAPVFTARNPQIKAKGQISPPSG

SEQ ID NO: 94629 - protein, 61 aa, Gossypium hirsutum
  Clone ID: LIB3148-007-Q1-K1-H3.pep
QSDSFFFLSFLFTIPNLGKMHPLLLQHLKTSVLHWTSYAKRKSPIPNNSQKIFHMDNIDPA

SEQ ID NO: 94630 - protein, 47 aa, Gossypium hirsutum
  unsure (1)..(47): unsure at all Xaa locations
  Clone ID: LIB3148-007-Q1-K1-H9.pep
KQWEEKEKAWMEREAAMQVKKEQREKAEAXRKVEGKRCSKRHDMVSL

SEQ ID NO: 94631 - protein, 70 aa, Gossypium hirsutum
  Clone ID: LIB3148-008-Q1-K1-A11.pep
RPSLCLNFGVRTIKQMGEPGRRVNCLMTTRYLLMLLYPASHEQVTSSQFSEQKRVRFAYPITLYVQICRL

SEQ ID NO: 94632 - protein, 69 aa, Gossypium hirsutum
  unsure (1)..(69): unsure at all Xaa locations
  Clone ID: LIB3148-008-Q1-K1-A2.pep
KRMEGVTKRYATPLFHPFQFQFFSQXSSLKVKIIXXGSIRFGSFLFCGEKKCGFFFNIMVDHSVIAHFR

SEQ ID NO: 94633 - protein, 58 aa, Gossypium hirsutum
  Clone ID: LIB3148-008-Q1-K1-B2.pep
MCHMCSLGAISIFDTVRSIALSIEFSLPASPFYDIVHYSSVFSTYLHRRAHCEMSIYP

SEQ ID NO: 94634 - protein, 57 aa, Gossypium hirsutum
  Clone ID: LIB3148-008-Q1-K1-B7.pep
VFSLEIPFRFRFQRSKRNLLAYSQGKSSLSLFSFVYKRNDERSKEINRKKMKKLKEN

SEQ ID NO: 94635 - protein, 85 aa, Gossypium hirsutum
  Clone ID: LIB3148-008-Q1-K1-B8.pep
PRVRPRVRPRVRPRVRVHLLDDYKELWNVGSEWYNETTLLNGGKPVEFDGYMRAVVDTEVLYRAKTRVETFYNLTKDCKDGINTC

SEQ ID NO: 94636 - protein, 77 aa, Gossypium hirsutum
  Clone ID: LIB3148-008-Q1-K1-B9.pep
FYFGGPIKKFLRWKQGEVNFDPFKGPPPFFFFFFFFFFFFFFFFFFFFFFFFFFFFFFFFFFFFFIFPFFFGILKTL

SEQ ID NO: 94637 - protein, 42 aa, Gossypium hirsutum
  Clone ID: LIB3148-008-Q1-K1-C11.pep
KKGAMLITLNLLLLQTFNKKLQSKYIVLPKSLSKACVSTQSY

SEQ ID NO: 94638 - protein, 70 aa, Gossypium hirsutum
  Clone ID: LIB3148-008-Q1-K1-C6.pep
LNKTSDIRFHATFHTKYCSQEIELLERLDRVRCKICKTVIARRSDMLVMSTDGPMGAYVNSYGYVHEVMT

SEQ ID NO: 94639 - protein, 38 aa, Gossypium hirsutum
  Clone ID: LIB3148-008-Q1-K1-C7.pep
FVFIPGSCVFKDVFHGVMQIYMKCMTDSSPIRTRKMAL

SEQ ID NO: 94640 - protein, 41 aa, Gossypium hirsutum
  Clone ID: LIB3148-008-Q1-K1-C9.pep
GQESIISIECYGIGIVMNRTYESCSIQVLTLMATKQARSST

SEQ ID NO: 94641 - protein, 122 aa, Gossypium hirsutum
  unsure (1)..(122): unsure at all Xaa locations
  Clone ID: LIB3148-008-Q1-K1-D2.pep
SEAGKKLYTRGDFAESKISNLDGYLLKKVGLFPDLLERKVMRHFEEGDQVSALVTGEFYTKKDLFPGFGRPFVFNAEVLLKVGRTSEAKDSARVALKSPWWTLGCTYXDVASIAQWEDEQIE

SEQ ID NO: 94642 - protein, 71 aa, Gossypium hirsutum
  Clone ID: LIB3148-008-Q1-K1-D8.pep
KLRDYFIGGSFTNANLCKIFKTFITSIVYPLKTIYLTSLFLLFNTASLINVMATLKNKEINFPFIHTLFFE

SEQ ID NO: 94643 - protein, 130 aa, Gossypium hirsutum
  Clone ID: LIB3148-008-Q1-K1-E10.pep
SLTQKADLNLGVWAKTNVGCNSFNMHQTLKTNCYPLASEGLRNMYFPYSEFLKTVQEPTMSSYACPLPRGNVPFNASSIRTGVGVIVDGFRKPNQLNEHKPLENIPSPASENNSRNQQDDSFKRNVAGCK

SEQ ID NO: 94644 - protein, 45 aa, Gossypium hirsutum
  Clone ID: LIB3148-008-Q1-K1-E4.pep
SELSQVHYMVKFPLSYVDTIGVCFSAFNQNLVSYLATLAGPRTRG

SEQ ID NO: 94645 - protein, 80 aa, Gossypium hirsutum
  Clone ID: LIB3148-008-Q1-K1-E7.pep
KIFLGNLSNNRKYFTQIHPNTRKANHSQKSKSFFRNYFLENILLANKRRFESNRIYKRDNISMHRSHALSINTKMKHLNL

SEQ ID NO: 94646 - protein, 63 aa, Gossypium hirsutum
  Clone ID: LIB3148-008-Q1-K1-E8.pep
SHISIGSITFVYTIQPKFLLIKESPYFSISSGKIYLMLKGLWTPIPNRLLFYIKPSSFRSDAW

SEQ ID NO: 94647 - protein, 118 aa, Gossypium hirsutum
  Clone ID: LIB3148-008-Q1-K1-F1.pep
GNFDNYEEYMYLLAIAILSTLYTGIQALIHVNALWNVKQILNQRISAMVDFVGDQVMSYLLISSVSAAIPLTNRMREGQDNAFTDSSASAISMSFFAFLTLAISAGVSGYKLSTQSYI

SEQ ID NO: 94648 - protein, 54 aa, Gossypium hirsutum
  Clone ID: LIB3148-008-Q1-K1-F12.pep
KERTDERKLIRQFIRIHIYNQHLTEKKRPPYVILHVFFLNLALNIFLIEFTSRT

SEQ ID NO: 94649 - protein, 68 aa, Gossypium hirsutum
  Clone ID: LIB3148-008-Q1-K1-F4.pep
TKCIKYTLVITNIYYYLGSNVNVQLGFIYCHLCHLYLFKHIGHLSSEQRANLLIKLSRSWPTRPPTRP

SEQ ID NO: 94650 - protein, 67 aa, Gossypium hirsutum
  Clone ID: LIB3148-008-Q1-K1-F7.pep
KFILYFITKKIKDVEFKKWALHPKNYNFLHLLTSYFFKNYFFEFATSLFNFQFLNILRLTIKNFFLN

SEQ ID NO: 94651 - protein, 75 aa, Gossypium hirsutum
  Clone ID: LIB3148-008-Q1-K1-F9.pep
PTRPVEMCRGVQHPIRGLFLRSYLAQISRDKLPDIGSEYEGDADTVMDAVDFVLQNFTEMNKLWVRMQHQVSWCL

SEQ ID NO: 94652 - protein, 66 aa, Gossypium hirsutum
  Clone ID: LIB3148-008-Q1-K1-G4.pep
YRYPKKKIKDGHGVRNDFGPYKTDSPFFFMFFVLFYFLLNSYLSFARFIHFFFLIKNSFFFFRTRG

SEQ ID NO: 94653 - protein, 99 aa, Gossypium hirsutum
  Clone ID: LIB3148-008-Q1-K1-H10.pep
PTRPPTRPAKRVERALSKIAGADREINKKCKSNNDIKGSSSWVPHPKSGIYFPKGHEWVMDDVPDRAASFSSSYWVRSVDGVDKPESSVHDEHYSHANM

SEQ ID NO: 94654 - protein, 50 aa, Gossypium hirsutum
  Clone ID: LIB3148-008-Q1-K1-H2.pep
RLNRDKKRKVAGNPSQPPQDTAQLKCGLDKRTLSCRHCSIISNLFLCELQ

SEQ ID NO: 94655 - protein, 47 aa, Gossypium hirsutum
  Clone ID: LIB3148-008-Q1-K1-H7.pep
SHGIKKPPVVKHGHSKLDLLNPTPHFFFLHACVFNFPLSFYFPPFFF

SEQ ID NO: 94656 - protein, 55 aa, Gossypium hirsutum
  Clone ID: LIB3148-009-Q1-K1-A5.pep
NPGRGRHFWFHYRRVITFVCLCFSPPLFFFLCALKLKFLFFFFFFFFFINNMPGI

SEQ ID NO: 94657 - protein, 64 aa, Gossypium hirsutum
  Clone ID: LIB3148-009-Q1-K1-A6.pep
PRVRPRVRNINQVASIVMEAESEQEAAKAVVEAATASWKKKFPSPKVDDCTVVCLFFHKKQKPS

SEQ ID NO: 94658 - protein, 51 aa, Gossypium hirsutum
  Clone ID: LIB3148-009-Q1-K1-A9.pep
SNWCEFKYHQNITSVTTWTVCVQYLIQVNLQWLSLHYLIKQETESVMANMS

SEQ ID NO: 94659 - protein, 70 aa, Gossypium hirsutum
  Clone ID: LIB3148-009-Q1-K1-B1.pep
GSMASVGRYKALVDLRQSKDAQGISLAGFISWLIWRSAYLTRVVSWRNRFYVAVNWATTLVFGRDDSRIG

SEQ ID NO: 94660 - protein, 104 aa, Gossypium hirsutum
  Clone ID: LIB3148-009-Q1-K1-B4.pep
PITKTRLDSGNNNSHYEECYTRRARIPFLLAKKKKKIMVASSDHHHHHHHHHHANIALKRSKSTTAPRRGRFLDGEVDNGGGFSPRKRSGFWSFLYLSSKSHSS

SEQ ID NO: 94661 - protein, 68 aa, Gossypium hirsutum
  unsure (1)..(68): unsure at all Xaa locations
  Clone ID: LIB3148-009-Q1-K1-B6.pep
FNWGGPKVCHFKKGAPFGQLILIKGTLKKNYIFCKEALLNLCIFKTAGRIYFFFFPLPFFFFSXRPTN

SEQ ID NO: 94662 - protein, 110 aa, Gossypium hirsutum
  Clone ID: LIB3148-009-Q1-K1-C10.pep
EILDAALLNMRIHGRIAVCGMVSLHSISDPKGIHNLYCVVPKRIKMQGFLQSDYLDKFPEFLEHVTKNFKEGKIVYIEDMNDGLESGPAAFVGLFSGQNIGKQVICVARD

SEQ ID NO: 94663 - protein, 27 aa, Gossypium hirsutum
  Clone ID: LIB3148-009-Q1-K1-C12.pep
KDWFYQPMHGSYKLIPNKAKCKFRVLM

SEQ ID NO: 94664 - protein, 111 aa, Gossypium hirsutum
  unsure (1)..(111): unsure at all Xaa locations
  Clone ID: LIB3148-009-Q1-K1-C6.pep
HASGSILDDTGFSFVKCKVTGAGALYLGRAWGPFSRVVFAYTYMDNIILPKGWYNWGDPNREMTVFYGQYKCTGPGASFAGRVSWSRELTDEEAKPFISLSFIDGSEWIXL

SEQ ID NO: 94665 - protein, 94 aa, Gossypium hirsutum
  unsure (1)..(94): unsure at all Xaa locations
  Clone ID: LIB3148-009-Q1-K1-D10.pep
XXXXFXXXFFFFXFXFXXXALKWKILSNYVFLVNLRENGNAHLTSKFQSNNRISFLRHLNTKSCLSSLATKLTHLCRLSRIIAQLKKNNDVVAF

SEQ ID NO: 94666 - protein, 60 aa, Gossypium hirsutum
  Clone ID: LIB3148-009-Q1-K1-D3.pep
LKKKYQNPNFFPSLIIPSSVTLFLLLCSFNILFFFILIIIYLFFFLYLFIIKPILPTLHI

SEQ ID NO: 94667 - protein, 55 aa, Gossypium hirsutum
  Clone ID: LIB3148-009-Q1-K1-D4.pep
QYKIFYFFFFFFFFFFFFFFFFKTPQFIILFFLTNILYFETYLRQHVFYMKSKLI

SEQ ID NO: 94668 - protein, 117 aa, Gossypium hirsutum
  Clone ID: LIB3148-009-Q1-K1-D7.pep
GLEDYALHGIENPDLRYDQTLSYPGQVNNSLTCDADISQTFGDEDHLGYFDGDLHSQGLGLESQADLQTAVDGFLVQRTVADPAKTRWTKVFSVLKWFSIKRKVKEKFLGLRYGTGL

SEQ ID NO: 94669 - protein, 135 aa, Gossypium hirsutum
  unsure (1)..(135): unsure at all Xaa locations
  Clone ID: LIB3148-009-Q1-K1-E3.pep
GDVICHGDAKIVKEGYKSFPSGHTSWSFAGLCFLSLYLSGKLRAFNRGGNVSKLCIVIFPVLAAVLVGISRVDDYWHHWTDVFAGALIGTSMAAFCYLQFFPCPHYEDGWAPHAYXKMCGRSDESESTVRSSSKN

SEQ ID NO: 94670 - protein, 124 aa, Gossypium hirsutum
  Clone ID: LIB3148-009-Q1-K1-F1.pep
VIRHGSPVGCEAVEKAYEGEDEHEENASIKREFSDFDLQVHVVNSSEEFDFGTKRVASSDSFETEAKEEVEKAVDKFQSGHVSDPGMRRAEFWASPMLKRSCSDLERRNVLREVADHFPPSQSF

SEQ ID NO: 94671 - protein, 75 aa, Gossypium hirsutum
  unsure (1)..(75): unsure at all Xaa locations
  Clone ID: LIB3148-009-Q1-K1-F12.pep
IAHHFRKKKKKKKKKKKKKKKKKKKKKKKKKKKPQKKKKKKKKXXXXKKKKKKKKKKXGGRPFKRTKFYFPCLAK

SEQ ID NO: 94672 - protein, 53 aa, Gossypium hirsutum
  Clone ID: LIB3148-009-Q1-K1-G2.pep
MKLVWSPETASKAYIDTVKSCELHHESGVAELVSAMAAGWNARFIVETWSQGG

SEQ ID NO: 94673 - protein, 96 aa, Gossypium hirsutum
  Clone ID: LIB3148-009-Q1-K1-G4.pep
VSVTSHTMADDMHMRLLYLENRVAFARLLFPSEAKLAMDIAHAERTSEFSGLSSKGSNGNLSQVDLNETPVMQKKRLLAKMEALMKTVEMGRRYFP

SEQ ID NO: 94674 - protein, 86 aa, Gossypium hirsutum
  unsure (1)..(86): unsure at all Xaa locations
  Clone ID: LIB3148-009-Q1-K1-G6.pep
PPFFLXPSGKIINVRQRQSFSCPHGFFXPGSGMKAGPPFFFFFFLDNRRSSFTIQTGPIKVHQAMPFTNKKNHAFKQVLFYAGASS

SEQ ID NO: 94675 - protein, 110 aa, Gossypium hirsutum
  unsure (1)..(110): unsure at all Xaa locations
  Clone ID: LIB3148-009-Q1-K1-H11.pep
NLKKKKKKKSEQKKFKNTNTYIRGAPSIGSNLSSPFMRRYFSSLGPPKSISLPDFIHRPYWKNPPVTQLXRLAENPLFTNWRNNXKARPTRPSQNYPTLNGKWDPPLNPH

SEQ ID NO: 94676 - protein, 79 aa, Gossypium hirsutum
  Clone ID: LIB3148-009-Q1-K1-H4.pep
INPVSFSFLPVTGLSSSSPVSPLSEPHASSTDPHQPFGPSPFIILFYLLFIIYYFYYTVITSLLLLLLLLGFILLLCLV

SEQ ID NO: 94677 - protein, 57 aa, Gossypium hirsutum
  Clone ID: LIB3148-009-Q1-K1-H6.pep
AVHGTDGEVKWEFFKRAGSFFFFFFFFVFFYFLIKISFFFIFFFFFKTKITFIIGVR

SEQ ID NO: 94678 - protein, 78 aa, Gossypium hirsutum
  Clone ID: LIB3148-009-Q1-K1-H7.pep
KKRLRNLVKEISLNHFLHHHQKNKKKIWFSGKNKSRAHDSHNSIQKTKLILPHPEKLQLLIMVFLFFLFFFMPPMLVL

SEQ ID NO: 94679 - protein, 48 aa, Gossypium hirsutum
  Clone ID: LIB3148-009-Q1-K1-H8.pep
EFLTRSQIDIEAKGSFIIFFNMAFNYSSFFFCNKSSNCKSHGSSVLGF

SEQ ID NO: 94680 - protein, 49 aa, Gossypium hirsutum
  Clone ID: LIB3148-010-Q1-K1-A11.pep
PWLKDSSRGRHFRYTTYMDALREMDDPLTEGLLFAMVTYHTGICVPRIC

SEQ ID NO: 94681 - protein, 61 aa, Gossypium hirsutum
  Clone ID: LIB3148-010-Q1-K1-B3.pep
FKVLFPASGQKTYERKFFLIYSPPTQKNSIKTKKINKQTNIHNLTCRPSSSYQSKPPFQAT

SEQ ID NO: 94682 - protein, 132 aa, Gossypium hirsutum
  Clone ID: LIB3148-010-Q1-K1-B9.pep
RYCDSVNGGIMNENYDPVERRLKGGKERNSKGSLKSSKSLQANNLHNLASGDAAGINKNTVSKQGKTGVAASSSEVRALSKEITDLKLSVDLLEKGRDFYFAKLRDIEILCQSTKVENHPMAVVIKKILYAA

SEQ ID NO: 94683 - protein, 38 aa, Gossypium hirsutum
  Clone ID: LIB3148-010-Q1-K1-C2.pep
SILDSSISASSKVLIFVYYVQKWKKNALAHVDICECCL

SEQ ID NO: 94684 - protein, 41 aa, Gossypium hirsutum
  Clone ID: LIB3148-010-Q1-K1-C4.pep
TNGFALNIKNSKSQLTIVQISSFSYEQMGEINCGYIFNAPK

SEQ ID NO: 94685 - protein, 45 aa, Gossypium hirsutum
  Clone ID: LIB3148-010-Q1-K1-D10.pep
LNNQTTTRDLSCVPYADIRDQFLTIEIDKIFNKMTNLSFDLKNMD

SEQ ID NO: 94686 - protein, 135 aa, Gossypium hirsutum
  Clone ID: LIB3148-010-Q1-K1-E9.pep
FLWGIGDVGAQYITHFTTNTRLQYKDSEQEFIIDWKRVAITSMFGFGFVGPAGHYWYEGLDRFIKLRLQLRPKSVKFVAAKVAMDGLIFGPFDLFVFFSYMGLSAGKSVPEVKADVKRDFIPALILEGGIWPIVQ

SEQ ID NO: 94687 - protein, 92 aa, Gossypium hirsutum
  Clone ID: LIB3148-010-Q1-K1-F11.pep
KKKKKKKKKILNKKKKKKKKRGGAKFRGPTIKKAGLRRQADYYCRPLGSTPWPLFYSALIRNTWAWPNFIFPQKIRFSPTSVFSRIPPLAPL

SEQ ID NO: 94688 - protein, 116 aa, Gossypium hirsutum
  Clone ID: LIB3148-010-Q1-K1-G12.pep
RASCDVDEETKKMVRYEVDMALALSAKGFAWSRALKHKLRLNYKDDDRVGDGHGEPVTKKPKTEHEEEERMMCLRKLIPGGKEMMADDEMLLSELGSYVSCLELQVNILRSMLQNN

SEQ ID NO: 94689 - protein, 43 aa, Gossypium hirsutum
  Clone ID: LIB3148-010-Q1-K1-H2.pep
LSLKILIYMYIIYIIVLQCFLLQAILNPKYYISSQNPNINHPN

SEQ ID NO: 94690 - protein, 129 aa, Gossypium hirsutum
  unsure (1)..(129): unsure at all Xaa locations
  Clone ID: LIB3148-010-Q1-K1-H8.pep
PPVRRIVRHIFDVHVINQERGNKRDTRSITVTTNLPKTCDNPTTGGLEIDPARKRNSLKRPGGLPPIGPSRVKSSPFISRRNSTSALDYEKFKIDNEVGLLRERLXIVQQGREKLNVPAGRKEREQVQM

SEQ ID NO: 94691 - protein, 71 aa, Gossypium hirsutum
  Clone ID: LIB3148-011-Q1-K1-A11.pep
NFLFFLYLLSFIFVLFSMLVKYRFLLSMKICQCSILDAEEWGMGLIIALTSHLFGARCRDDHQYPAGRKTT

SEQ ID NO: 94692 - protein, 119 aa, Gossypium hirsutum
  Clone ID: LIB3148-011-Q1-K1-A12.pep
PRVRQKCLGEAEGYLEPVEENEAILEAYVKSWVSGALDKAATRGSVAFTLVLHHLSSFVFSSHKSDKPLLRNKLVKSLLRDNARKKQHEGMMLQFIEYMKPSSVTKAEKEEGLTMESSN

SEQ ID NO: 94693 - protein, 57 aa, Gossypium hirsutum
  unsure (1)..(57): unsure at all Xaa locations
  Clone ID: LIB3148-011-Q1-K1-A4.pep
VDPIKQPTPSQAFDFNSFYPLKLPTLFFFFFFFSLFFFFFFFFFYIYFFFFFXRTRG

SEQ ID NO: 94694 - protein, 138 aa, Gossypium hirsutum
  Clone ID: LIB3148-011-Q1-K1-A5.pep
RLHREESPTKSQLHTLIDLNVGQVSMDFETEGPFVTETTQNSENLFAHTSFNQSEVTMQPDKVAEVNQQPVVHNRRQSTRNRPLTTKALEALECGFLSPKRKRTAAETPQINSQRIRSKPVVNATFKKEKAVETPQNS

SEQ ID NO: 94695 - protein, 61 aa, Gossypium hirsutum
  Clone ID: LIB3148-011-Q1-K1-A8.pep
GVKSKALCLVALNSTFFLTDKLAQILDLCGRLDPKAKDLLGFRLSTLFSFFFNFLIEECNF

SEQ ID NO: 94696 - protein, 71 aa, Gossypium hirsutum
  Clone ID: LIB3148-011-Q1-K1-B11.pep
LFLFFFFFFFCFFFFFFVHQDWVLPNSYINITIWMPPNIIRHNQAPINNKGKSLVIPPVNILVILENNIDR

SEQ ID NO: 94697 - protein, 86 aa, Gossypium hirsutum
  Clone ID: LIB3148-011-Q1-K1-B4.pep
LPNRTVCIVITNKLVLHFFWHIVRIPIIERKKKKKKKKKKKKKKKKKKKKKKKKKKKKKKKKKKKKKKKKKKKKKKKKKKKKGGPF

SEQ ID NO: 94698 - protein, 54 aa, Gossypium hirsutum
  Clone ID: LIB3148-011-Q1-K1-C11.pep
SAKGCVSRIFPHLGCIDPVGHISGWDDVFLLRGLVVNGTNHFFFSRAQAVRSWI

SEQ ID NO: 94699 - protein, 65 aa, Gossypium hirsutum
  Clone ID: LIB3148-011-Q1-K1-D12.pep
LHRNSRHHNRNHQVNKHSNRYDQRYLNRNKPPGKERHPSPIHGLSDNISRSMYVAPNVMNFLNSC

SEQ ID NO: 94700 - protein, 68 aa, Gossypium hirsutum
  unsure (1)..(68): unsure at all Xaa locations
  Clone ID: LIB3148-011-Q1-K1-D3.pep
KQKIMTTTTNKKLINKTKSTSQILFHCLSNNVKILNGCXQVSKLSNKPSWIITPKSKAFALLSFIFPS

SEQ ID NO: 94701 - protein, 137 aa, Gossypium hirsutum
  Clone ID: LIB3148-011-Q1-K1-D6.pep
PRVRQYLGGIPKSPEAIFHYNRDDLKGLPFKFPKTVIRDVVRSPMVEAQCSVQLCFPVVLKNGTMVEEIHCVGFLSKLIETKIVQVLRFKHGQIYSACVSGFLGGNKPSRTGDVRGDVSINFSCDPEISSKLVDLAL

SEQ ID NO: 94702 - protein, 51 aa, Gossypium hirsutum
  Clone ID: LIB3148-011-Q1-K1-D7.pep
NEVNKCFWEGWICNVLTHVVSLAMFKESSLSLFVKKKKKKNKKKKKIKKNL

SEQ ID NO: 94703 - protein, 76 aa, Gossypium hirsutum
  Clone ID: LIB3148-011-Q1-K1-D8.pep
IKAWTLYGLFVSQFGDVETPLEDGDFIGQTVEQYLRSRYGFRHEFLGVVVAVILGFTVLFASIFTVSIKVFNFQRR

SEQ ID NO: 94704 - protein, 67 aa, Gossypium hirsutum
  Clone ID: LIB3148-011-Q1-K1-E10.pep
ENLCTCCLAAHTQFTSKTVYLLPYSSSCCNAYSPQHYFCLNPTHFFHHHQYNKRRPQHRNQLAHLRF

SEQ ID NO: 94705 - protein, 133 aa, Gossypium hirsutum
  Clone ID: LIB3148-011-Q1-K1-F10.pep
AGSGFRMLWNSVKSFLDPKTTAKINVLGNKYHSKLLEIIDESELPDFLGGTCTCADKGGCMLSDKGPWKDPEIIKMVQGGAHKGSKKSQDESTEEKTTSEDKTEFPKSMPASEAVAAEPVPDAPIKQSDNSFE

SEQ ID NO: 94706 - protein, 136 aa, Gossypium hirsutum
  unsure (1)..(136): unsure at all Xaa locations
  Clone ID: LIB3148-011-Q1-K1-F4.pep
MMTRVLPELAHRSYKQWVLGEVLWSFLLFVITFFNSSLMFSIFKXFFFLALFIWRLXLFYFFFCIIINFIFLFFYFSSFCYIICFYYYMFLSIFFFKFYFLYFHMIAIYIFFWLLLLSLFFYSLLSFIYFLFIYSF

SEQ ID NO: 94707 - protein, 104 aa, Gossypium hirsutum
  Clone ID: LIB3148-011-Q1-K1-F6.pep
KKKKKKKKPKKKKKKKKKKKKKKKKKKKKKKKKKKKKKKKKKKKKKGRPFKRTKFNYPVLATKNFFYGAPKIKSTARVLKTWEWKKPWVTQIKSLGKKSPFPKL

SEQ ID NO: 94708 - protein, 48 aa, Gossypium hirsutum
  Clone ID: LIB3148-011-Q1-K1-F8.pep
PTRPANRFLTLILSSIQSGFLFHGVSFLGPPQNLTSNQATFFSFSTHQ

SEQ ID NO: 94709 - protein, 41 aa, Gossypium hirsutum
  Clone ID: LIB3148-011-Q1-K1-G12.pep
VQTFLKLTIFFTSMEVTAEGVSQIMLLASHCIKTTPQCFVT

SEQ ID NO: 94710 - protein, 38 aa, Gossypium hirsutum
  Clone ID: LIB3148-011-Q1-K1-G8.pep
NSLEMYVIKNFAWSLKILPRRIIVGIVRRNFMRRLGII

SEQ ID NO: 94711 - protein, 44 aa, Gossypium hirsutum
  Clone ID: LIB3148-011-Q1-K1-G9.pep
PTRPLCFKMRSKAGNGTIYICIDGTGFEEVSCFCLLLYFLFHVS

SEQ ID NO: 94712 - protein, 43 aa, Gossypium hirsutum
  Clone ID: LIB3148-012-Q1-K1-A2.pep
VYRITIILQLYRNIIVCCSFFPKSVNVLYSRPTSQDRQTFASS

SEQ ID NO: 94713 - protein, 102 aa, Gossypium hirsutum
  Clone ID: LIB3148-012-Q1-K1-A5.pep
PLSLGFDSTCRGLNHHLFDGFGAPMATGPCQRRTRPRRSGTGYVSIVRRLCWCWRGRGCWRVRSEAGGCTAPGGCGTKQGLGFLNFGLSIGPIGPSGFWVRH

SEQ ID NO: 94714 - protein, 74 aa, Gossypium hirsutum
  Clone ID: LIB3148-012-Q1-K1-A8.pep
LSLLSEGWSGSPHARSSLSTGLLQTTPFRSLSDISSGNNSIYENKKSCDRASLCDDVLSSTLVSSTLIPSVIRS

SEQ ID NO: 94715 - protein, 109 aa, Gossypium hirsutum
  unsure (1)..(109): unsure at all Xaa locations
  Clone ID: LIB3148-012-Q1-K1-B11.pep
LPQGDYYPKACHVGFGLVLGEYGMRLLTPNTEVVRLVDLLDDAKIRCXATLIEHGLGEEWTEEEIASTADALGYGAVKYADLKNIRLTNYTLNCDHMLNDNKAFRKVPQ

SEQ ID NO: 94716 - protein, 126 aa, Gossypium hirsutum
  unsure (1)..(126): unsure at all Xaa locations
  Clone ID: LIB3148-012-Q1-K1-B12.pep
DQVFIGLVWKYVGFGDYSIRSGYRVXLQIPYRVLITTCLSLRLARTFTNFFDLXLTPKIKIHLWRLFSNFLPHYSNLSQRTLKVDVHCPLCMKAPEDMDHLLWSCDILHSVWVAFQIQTVSPADAW

SEQ ID NO: 94717 - protein, 151 aa, Gossypium hirsutum
  unsure (1)..(151): unsure at all Xaa locations
  Clone ID: LIB3148-012-Q1-K1-B4.pep
HASELYQLYFIFINLLTLPREERTFLYSHPTKIHRPWPDNFSSFISQNLQNLILLNYIYYYFKYILLFKISKLFFFFLXLIIFLYIIYIYFFFIFIYFYIFXYYSSFLIISILLCIILYPYYFFNYYIFKISLIIFRLLFIFSFFLLYFLF

SEQ ID NO: 94718 - protein, 39 aa, Gossypium hirsutum
  Clone ID: LIB3148-012-Q1-K1-B6.pep
SSFVDQLLRMFSFYVLCRFLFYLISEEWVSCFDYKSSTK

SEQ ID NO: 94719 - protein, 74 aa, Gossypium hirsutum
  Clone ID: LIB3148-012-Q1-K1-B8.pep
YLNHRAAELCVAACCIERSSCLGLLNGRANLKKGHALDFESMVVLIPICKDGSGTISPRVLMLYGNPIDCNFPA

SEQ ID NO: 94720 - protein, 140 aa, Gossypium hirsutum
  Clone ID: LIB3148-012-Q1-K1-C9.pep
RKSRRQSSSLQAESGLPRQKPRHKSHNLRQSDDQLSDISSDMRDLNHQGDDSSMQSESNMSMASYGDTEVTAQSYGKIEGTFSQEQETKQKNPAARLIEGDPKAEPPRTAPEQPSPVSVLDAAFYGDESPSPVKKTSKAF

SEQ ID NO: 94721 - protein, 30 aa, Gossypium hirsutum
  Clone ID: LIB3148-012-Q1-K1-D1.pep
KASTGLYMAFSLVLIVLSQIRGRAYPEETF

SEQ ID NO: 94722 - protein, 68 aa, Gossypium hirsutum
  Clone ID: LIB3148-012-Q1-K1-D12.pep
IVLVDEHERVSEDHQLVLTSKVQILGLPIDLSPMADKGIKEGVTWCRLTKQNGTTEQYYSDSTVADAW

SEQ ID NO: 94723 - protein, 32 aa, Gossypium hirsutum
  Clone ID: LIB3148-012-Q1-K1-D4.pep
SLLRIQRLALIGSVFHSHCEPHSLWCKCLNII

SEQ ID NO: 94724 - protein, 58 aa, Gossypium hirsutum
  Clone ID: LIB3148-012-Q1-K1-D9.pep
RTIILLFNRYSNKRSMVDRIHLTFDIMIMCTVLVWCKNHLYYSCYKAIIDIHYGCTKS

SEQ ID NO: 94725 - protein, 142 aa, Gossypium hirsutum
  unsure (1)..(142): unsure at all Xaa locations
  Clone ID: LIB3148-012-Q1-K1-E10.pep
QPSATPSGVPKCLYKEMGATLREGAPCVIISXDDEQILMWRGRDWKSMYGDTSSTLVPVKADISSGIDNSAKSSDDSGTPDAQRVVSSPKMMSLWRRAIESNKALLLEELALCPDALLEKVEEFEGMSLAIEHSCEALVLSS

SEQ ID NO: 94726 - protein, 41 aa, Gossypium hirsutum
  Clone ID: LIB3148-012-Q1-K1-E12.pep
WMYERNTIHIFFINTLNYYSCFFFVCLSTVLVFLPISALKA

SEQ ID NO: 94727 - protein, 111 aa, Gossypium hirsutum
  Clone ID: LIB3148-012-Q1-K1-E3.pep
YSIYRPLQQGMIKSVEENLITAKLSYYLKAFCTILILHKTISTATISNTQYIVFLALMLPSIPSDTLMLILFSARIMDALMLLALSPAVTDYDFLHTVYQHYISDLYDYVS

SEQ ID NO: 94728 - protein, 93 aa, Gossypium hirsutum
  Clone ID: LIB3148-012-Q1-K1-E5.pep
IDTVWPRISITMKIYEIVIINLIHILNRFGLPGFFSLGKLVWAIGKGTVLVRKPGYGADRTEYACSARAMTSPPFKDVTSSRRKAAELAAVES

SEQ ID NO: 94729 - protein, 44 aa, Gossypium hirsutum
  Clone ID: LIB3148-012-Q1-K1-E7.pep
ITISLVIKYKKRSNCKHTHININNLSVIPHCHLTAPYSTDRSRH

SEQ ID NO: 94730 - protein, 68 aa, Gossypium hirsutum
  Clone ID: LIB3148-012-Q1-K1-E8.pep
NRRCCPKDLIEWARLPSLPTSLTKLLRIAKIDFKCSLCFVFLGNERLNFFFYFTPTDEGDSYKQIIHD

SEQ ID NO: 94731 - protein, 38 aa, Gossypium hirsutum
  Clone ID: LIB3148-012-Q1-K1-F1.pep
RNSFFFCSGINDNEGILFLKSFMLILDSFLFFFFLFFF

SEQ ID NO: 94732 - protein, 61 aa, Gossypium hirsutum
  Clone ID: LIB3148-012-Q1-K1-F10.pep
HFRSHSLSRISLTNSHHHTLFFSCETNNSSLYYYDCRTPFAQIIFSFPHMMFFRKRPFLSN

SEQ ID NO: 94733 - protein, 60 aa, Gossypium hirsutum
  Clone ID: LIB3148-012-Q1-K1-F4.pep
HGIAFNPFFQSGWGSIKQFLLLKPLPESYFPRQPLKCLPTQSKHLLLKPDIMTENSPRLL

SEQ ID NO: 94734 - protein, 61 aa, Gossypium hirsutum
  Clone ID: LIB3148-012-Q1-K1-F6.pep
LALQAQPNMESNSLFINGCIAPPRTSSCHVAHAETQKKGQLDNDGNTNGVPVLLSCMCGQT

SEQ ID NO: 94735 - protein, 42 aa, Gossypium hirsutum
  Clone ID: LIB3148-012-Q1-K1-F7.pep
IYYVPKVIYLRLIILEYLFITTINFYICIVYLIWDIKCEREI

SEQ ID NO: 94736 - protein, 94 aa, Gossypium hirsutum
  Clone ID: LIB3148-012-Q1-K1-G12.pep
LIKPFFKTKTQKKKKEIFQKKKPPIHIQKKSFKPTPSFKPPIHPYHLSFSSQLPHYLSNPFLHLPSSILTNPFNPLIQSSHLLFQHTISTSLTF

SEQ ID NO: 94737 - protein, 49 aa, Gossypium hirsutum
  Clone ID: LIB3148-012-Q1-K1-G2.pep
KSGYSKLLGAKVKDISYYVTVSPYKNVKSPAFYGINSTYLKKSNIKLKI

SEQ ID NO: 94738 - protein, 42 aa, Gossypium hirsutum
  Clone ID: LIB3148-012-Q1-K1-G6.pep
VRRHEFSVQILASFTPQRSNREEHMYLHRFLQNASIAITIAY

SEQ ID NO: 94739 - protein, 138 aa, Gossypium hirsutum
  Clone ID: LIB3148-012-Q1-K1-H10.pep
MINQRRELGFSDKSDLLSRFMATMIDDDQYLRDIVVSFLLAGRDTVASGLTSFFWLLSQNPKVEFAIRDELEKVTAGISPSDDQDFVMFDQMREMHYLHAALCESLRLFPPVQLDSKFAQHDDVLPDFTFVRKGTRVT

SEQ ID NO: 94740 - protein, 48 aa, Gossypium hirsutum
  Clone ID: LIB3148-012-Q1-K1-H12.pep
KQLQKLMWSNIVMSCGCGYCIFFGLDTMSWNAQLPNMIYCLYQILFLF

SEQ ID NO: 94741 - protein, 36 aa, Gossypium hirsutum
  Clone ID: LIB3148-012-Q1-K1-H3.pep
KYERRICSIQRVPKFCNEIMQTSEPSFILLQDNPSE

SEQ ID NO: 94742 - protein, 60 aa, Gossypium hirsutum
  Clone ID: LIB3148-012-Q1-K1-H5.pep
IQAANFYRLLQNDSLRGSDHMLLYTTSFYNKTIVVLTTCCLIHWHANNLSTRVKLTKLLH

SEQ ID NO: 94743 - protein, 55 aa, Gossypium hirsutum
  Clone ID: LIB3148-012-Q1-K1-H7.pep
PPWGFSTFLHSQKKKQYKVVDYKRYLKPKGWKVIPSSRYIHHNPVFFPKPQEFDP

SEQ ID NO: 94744 - protein, 63 aa, Gossypium hirsutum
  Clone ID: LIB3148-012-Q1-K1-H9.pep
HASERKGTPAGGPLAIPHNHGLYPTTQPPPMAVGLPPSFIPNGVGIHGNGHVNGAVGPWFNHA

SEQ ID NO: 94745 - protein, 77 aa, Gossypium hirsutum
  Clone ID: LIB3148-013-Q1-K1-A1.pep
LTRDMLRRGTICQWDTGADSGGGTTALDPETCITVLKEANGAVYETLFCLKITAVITFMLSMEHSYVNFGSNDGYDL

SEQ ID NO: 94746 - protein, 97 aa, Gossypium hirsutum
  Clone ID: LIB3148-013-Q1-K1-B4.pep
SFNVSLKSIQRRLEIASRAFFLETTKDVSKVNRHKHSQTDSKIINCFKFLMLKNPKLVHHKSNESTLYKLRGLFPIPYVLLVRLGPVQNLILKMKTI

SEQ ID NO: 94747 - protein, 138 aa, Gossypium hirsutum
  Clone ID: LIB3148-013-Q1-K1-B8.pep
KETLRLHPPAPLLVPRETTEDCVVGDYEIPAKTRVIINAKSIGTDPKYWENPHDFQPDRFMKSSVDFKGQHLEFLPFGVGRRGCPGMSFAIMLLQLMVANFLYRFDWELPERMSVEDVDMEEELGITVFKKTPLLLVP

SEQ ID NO: 94748 - protein, 59 aa, Gossypium hirsutum
  Clone ID: LIB3148-013-Q1-K1-B9.pep
WIHHVTLSGHRLLSELNYILYIILFKILGCLWIVDCIIAFFDYVDFVGLPTRILATTIP

SEQ ID NO: 94749 - protein, 59 aa, Gossypium hirsutum
  Clone ID: LIB3148-013-Q1-K1-C10.pep
KGRPFFFFFFFFFFFFFFFFFFFFFFFFFFFFFFFFFFFFFFFFFFFLQKQNYIYRQKL

SEQ ID NO: 94750 - protein, 66 aa, Gossypium hirsutum
  Clone ID: LIB3148-013-Q1-K1-C11.pep
FRVLCTIKPLVKKQRKKSAQNLDGPLWPEKQKSRGPTNYNMRQTGEESIVAEATKLYIKRGGWWAV

SEQ ID NO: 94751 - protein, 44 aa, Gossypium hirsutum
  Clone ID: LIB3148-013-Q1-K1-D12.pep
FIIVYFDTVYQVYLYTIYKGKKKKKKKKKNIKDKKLKKQKHAKL

SEQ ID NO: 94752 - protein, 75 aa, Gossypium hirsutum
  Clone ID: LIB3148-013-Q1-K1-D5.pep
GYLAPNPWHVSFSYARALQNTCLKKWEGGPENVKVAQDVLLVSAKANSLAQLGKYMGEGWSEEAKQGMFVKGYVY

SEQ ID NO: 94753 - protein, 39 aa, Gossypium hirsutum
  Clone ID: LIB3148-013-Q1-K1-D6.pep
HCVFFKMEFLYAVPVFLFFLFRVYNEMNSSKNELFFTQC

SEQ ID NO: 94754 - protein, 52 aa, Gossypium hirsutum
  unsure (1)..(52): unsure at all Xaa locations
  Clone ID: LIB3148-013-Q1-K1-E1.pep
ICLLMNYATRSKTSAFKIVFNSTSHVRVVYFFLFCAGVVLISINEDQCFYGX

SEQ ID NO: 94755 - protein, 80 aa, Gossypium hirsutum
  Clone ID: LIB3148-013-Q1-K1-F11.pep
NTRSGGPNSMSREVHHNKVVPASPHQNASMLPMDGNQVGLNSYGNGIIKTNGFHEKGVNDVEKPNKWRKHRYCCFGFNSG

SEQ ID NO: 94756 - protein, 127 aa, Gossypium hirsutum
  Clone ID: LIB3148-013-Q1-K1-F12.pep
GFIEPKKIELNFADIDGLRRKLSNKLSASRDGNETEWEVGECLGMWWRHDFETLLCPYLPPTVKKPKECTKLFLVRLPESRKFIVPENLKLLAVPLSQVHENHKTYGTVISGVPQLLSKYSINIIDI

SEQ ID NO: 94757 - protein, 111 aa, Gossypium hirsutum
  Clone ID: LIB3148-013-Q1-K1-F2.pep
AASAGTRYNVPLINSLVLYVGMQAIQQLQSRVPHAQATANTVPMSVFLVSAALDIFQSLIGDLDTEGRYLFLNAIANQLRYPNSHTHYFSFILLYSFAEANQEIIQEQITR

SEQ ID NO: 94758 - protein, 63 aa, Gossypium hirsutum
  Clone ID: LIB3148-013-Q1-K1-F4.pep
QKIQVKQSEKSQFKYTNGNQQNFVETQDFMIKLIQRSSNNALNNLGPSISFGNHMSITIKKKN

SEQ ID NO: 94759 - protein, 110 aa, Gossypium hirsutum
  unsure (1)..(110): unsure at all Xaa locations
  Clone ID: LIB3148-013-Q1-K1-F6.pep
MGVKGWAAXAAHPSGYYPERFVTRMKXASVILVLDSERWMKAEERTADLIACIQPDSPSESRRNAVADYVQRLIAKCFPCQVFTFGSVPLKTYLPDGDIDLTAFSKNQNL

SEQ ID NO: 94760 - protein, 58 aa, Gossypium hirsutum
  Clone ID: LIB3148-013-Q1-K1-G1.pep
KISYLGLLFIKQDAQIGILSQFKKLRYINVFGNQTVEIIQEAITGDSPTRKTRNRTLR

SEQ ID NO: 94761 - protein, 49 aa, Gossypium hirsutum
  Clone ID: LIB3148-013-Q1-K1-G10.pep
PTRPPTRPVCFKDPPFPWAALSFSAVGFLALSYVYAKRDKLFRNKRKQF

SEQ ID NO: 94762 - protein, 59 aa, Gossypium hirsutum
  Clone ID: LIB3148-013-Q1-K1-G11.pep
PTRPETAMQRVLKRHISTGKPPDVAQWRIDYNDRPNAEFIMKSKKNADLVIKSIDFFQR

SEQ ID NO: 94763 - protein, 33 aa, Gossypium hirsutum
  Clone ID: LIB3148-013-Q1-K1-G12.pep
LDVSVLIKDSVTQVCHLTLLLSLDVIFCSGFLW

SEQ ID NO: 94764 - protein, 75 aa, Gossypium hirsutum
  Clone ID: LIB3148-013-Q1-K1-G3.pep
RNICLYVKRAVEVVVTSKGKEVESKTETSQLQKKKMEIRKDVKGKIIYNDGKKEIINVLLNENIVHISYTRFYII

SEQ ID NO: 94765 - protein, 55 aa, Gossypium hirsutum
  Clone ID: LIB3148-013-Q1-K1-G4.pep
SNLNFLWNFVLLLTDLVLSNKLVLYDLENQTIGLSTIVSIMLLFLSRLLYKFCTN

SEQ ID NO: 94766 - protein, 44 aa, Gossypium hirsutum
  Clone ID: LIB3148-013-Q1-K1-G6.pep
CFYTSFLQIFMYTTQRYKRNEIKKFESVFFFRSSLWKWTYRSRR

SEQ ID NO: 94767 - protein, 55 aa, Gossypium hirsutum
  Clone ID: LIB3148-013-Q1-K1-G8.pep
EHIMIGITIVFQMHFHKNKQICIWIRLLKTSVNSIICYICRIDRCIVLRKAYHLT

SEQ ID NO: 94768 - protein, 64 aa, Gossypium hirsutum
  Clone ID: LIB3148-013-Q1-K1-H11.pep
EIEINIFMITNISPLQESCKSTMANKRRTPPIHCFFLFFLFTSETLMINQRTKHLSSLIFRTRG

SEQ ID NO: 94769 - protein, 94 aa, Gossypium hirsutum
  Clone ID: LIB3148-013-Q1-K1-H4.pep
VRANNPVMHSKFKLVELDLFFVREKVVDGSLLVGHVSGQDQVADMLTKPLAVGLFDKFRKRLGVASIAEDIMQKQGTSRSRSHVKDKKQLVQSS

SEQ ID NO: 94770 - protein, 66 aa, Gossypium hirsutum
  Clone ID: LIB3148-013-Q1-K1-H7.pep
LNSTSILVTGDKILATLFQCPPYFQSNNKNNSTLIFRSGETTKENFTYHSMFDQRKIPPWLLANPQ

SEQ ID NO: 94771 - protein, 38 aa, Gossypium hirsutum
  Clone ID: LIB3148-014-Q1-K1-A10.pep
SFCFDSKNIFPCFFLQYTTKLCIYIKSQFKANHPHNNQ

SEQ ID NO: 94772 - protein, 81 aa, Gossypium hirsutum
  Clone ID: LIB3148-014-Q1-K1-A7.pep
NMNCNLTNLIGKESCKGKQSYAHFNTTKKKKKKKEEEEEEEEKLKPIFAIPSPFFPITVTTKLYPSAENLALHPAKKPDAW

SEQ ID NO: 94773 - protein, 94 aa, Gossypium hirsutum
  unsure (1)..(94): unsure at all Xaa locations
  Clone ID: LIB3148-014-Q1-K1-B1.pep
FLLAGFYLFCYXRVKIILKKKKKKKKKKKKKKKGRKKKKNKKIKTSANNGGVPFLGPLFFYLLAVFLPRFFVAPPCCNPSEFSSNSPFLTLLFS

SEQ ID NO: 94774 - protein, 52 aa, Gossypium hirsutum
  Clone ID: LIB3148-014-Q1-K1-B10.pep
AISNRTLDCRSPREVVASFNILCFFWHMDLKFVGNFQGVPMHYRLLNFLFYA

SEQ ID NO: 94775 - protein, 32 aa, Gossypium hirsutum
  Clone ID: LIB3148-014-Q1-K1-B11.pep
LCVPINRFIYAALLGITLWHVLLLPDFYRTRG

SEQ ID NO: 94776 - protein, 90 aa, Gossypium hirsutum
  unsure (1)..(90): unsure at all Xaa locations
  Clone ID: LIB3148-014-Q1-K1-B4.pep
ADLQNLMNEAAILAARRDLKEISKDEISDALERIIAGPEKKNVVVSXEKKKLVAYHEAGHALVGALIPEYDPVAKISIISRGQAGGLTFF

SEQ ID NO: 94777 - protein, 51 aa, Gossypium hirsutum
  Clone ID: LIB3148-014-Q1-K1-C3.pep
QININNTTMRIPSHNFKANKCNFNDYFNLVNIGHLRLRRCYLTHPKSRTNG

SEQ ID NO: 94778 - protein, 57 aa, Gossypium hirsutum
  Clone ID: LIB3148-014-Q1-K1-D1.pep
LFINYKGNRHVPKKVCSLGNSYCMHNHILFPLIIFFGVSTDNYFCCVVITDKRDPKT

SEQ ID NO: 94779 - protein, 92 aa, Gossypium hirsutum
  Clone ID: LIB3148-014-Q1-K1-D10.pep
KNQNVHLYRPFTNQNTDQISPLTQYPSPSQNPNPTILKLFNNSTLAPQALRRCLHVLASGCTTPETGVPYHRPYLLPSTPLTTPAKEKTNKE

SEQ ID NO: 94780 - protein, 32 aa, Gossypium hirsutum
  Clone ID: LIB3148-014-Q1-K1-D11.pep
ASSALPSGVHIISDHPIVFIFSDRSNVPPVFI

SEQ ID NO: 94781 - protein, 66 aa, Gossypium hirsutum
  Clone ID: LIB3148-014-Q1-K1-D12.pep
DLRFRHSREIKTIIILSSYISNNVHVNRVRIQLTFVCNICTNFIIKKMLTLCFVLMNSESKHCSQK

SEQ ID NO: 94782 - protein, 23 aa, Gossypium hirsutum
  Clone ID: LIB3148-014-Q1-K1-D8.pep
YYKFQIFLIQTFTNSYTIINQPN

SEQ ID NO: 94783 - protein, 89 aa, Gossypium hirsutum
  unsure (1)..(89): unsure at all Xaa locations
  Clone ID: LIB3148-014-Q1-K1-E1.pep
QGVRTWRGFWNLTNPGAVSHNEILEXMYKTYIDPNFQWTNFTLEEQAKVIVAPRSNNEMDASKLKKEFHELLPIKESLIKYVFEPNKRT

SEQ ID NO: 94784 - protein, 51 aa, Gossypium hirsutum
  Clone ID: LIB3148-014-Q1-K1-E12.pep
IKKYFISFGKHETGAQTCLETCLFSKLQGSIVELPGLEITYETRVVYNIHP

SEQ ID NO: 94785 - protein, 50 aa, Gossypium hirsutum
  unsure (1)..(50): unsure at all Xaa locations
  Clone ID: LIB3148-014-Q1-K1-E7.pep
LMFIYLGLCLMLYQIHGPPARTGRVGVRHERHEWARRVGVRVGRPGSSXP

SEQ ID NO: 94786 - protein, 56 aa, Gossypium hirsutum
  Clone ID: LIB3148-014-Q1-K1-F1.pep
PTLPKNKKGGFSLAFFPSQRGGNVEQGLLYPAYLFCLVSASQSVDRYLSFPLSSTF

SEQ ID NO: 94787 - protein, 142 aa, Gossypium hirsutum
  Clone ID: LIB3148-014-Q1-K1-F10.pep
KSAESELNKGNGRLKYWLDEWVDTQVTKSKELEDLDSVWTSNRKPMEENRAKHLRLKTSPRPYHYNSEGLESPVVPVPRRSFHKKQCSLGEDNSFPTSPVVPPYMAATQSARAKVRSLSSPKVKPGSFETQSESYSPYKNKL

SEQ ID NO: 94788 - protein, 97 aa, Gossypium hirsutum
  Clone ID: LIB3148-014-Q1-K1-F12.pep
PDVSTYLYNRTEALAGDWYCVAMNCGAHNYASRPNCYRCGTIKTDYGGYTVMGSESSAPPGWKTGDWMCTRYGCGVHNYASRLECFKCKTPRDFGGA

SEQ ID NO: 94789 - protein, 143 aa, Gossypium hirsutum
  Clone ID: LIB3148-014-Q1-K1-G6.pep
VDIYRKKYKAKQHGSVGVSFNVIWFEPETNSTEDIEAAQKAQDFQLGWFLDPLMFGDYPSSMLTQVGSWLPRFTKAESALLKGSLEFVGVNHYTTFYARENKTNLIGSILNDTVSDSGAFTLPFKHGKPIRDKANSILLYIGP

SEQ ID NO: 94790 - protein, 60 aa, Gossypium hirsutum
  Clone ID: LIB3148-014-Q1-K1-H10.pep
IKFSFHNTPPFILHSLERTPFFFFFCRPFFFFFFFFFFFFFFFFFFFFFFSKIKCKISLY

SEQ ID NO: 94791 - protein, 42 aa, Gossypium hirsutum
  Clone ID: LIB3148-014-Q1-K1-H12.pep
STRSPTRTIYLGLILAYRHSALNGITPVPSFHYERLYKHVIR

SEQ ID NO: 94792 - protein, 104 aa, Gossypium hirsutum
  Clone ID: LIB3148-014-Q1-K1-H4.pep
RTTCFATTTLTIDNKSAASSSSSQPQEALVLELRPRKKRVTWKEGTVDNEFMNKKSSKICCIYHKEKPFDEDDSDDDCHDHHHHPSHGNDFSNDGRRLNPSNST

SEQ ID NO: 94793 - protein, 32 aa, Gossypium hirsutum
  Clone ID: LIB3148-015-Q1-K1-A12.pep
KSIILHYNCWSVIPFYTIILANQQILNLHLRS

SEQ ID NO: 94794 - protein, 52 aa, Gossypium hirsutum
  Clone ID: LIB3148-015-Q1-K1-B2.pep
AYTFISVPPYPNHLFFVLTGPIAYSVGVFPPSPFISHNTHVYGCMYNEPRHP

SEQ ID NO: 94795 - protein, 62 aa, Gossypium hirsutum
  Clone ID: LIB3148-015-Q1-K1-B4.pep
FGLRNKIYKSYLVTQILLSRTENTRALQRIIATANCLQFWRPAQRKNNKNGPKLWLIFAASP

SEQ ID NO: 94796 - protein, 39 aa, Gossypium hirsutum
  unsure (1)..(39): unsure at all Xaa locations
  Clone ID: LIB3148-015-Q1-K1-C2.pep
LRPEFLPSQCMLNDIFPLNAQFSLCXKKKKKKKKKILFG

SEQ ID NO: 94797 - protein, 52 aa, Gossypium hirsutum
  Clone ID: LIB3148-015-Q1-K1-D10.pep
SRAWMAMKQEHTTSAGLKVMLKKKKKNSIYIHMVFLHDEFFYCQVLSQGWKE

SEQ ID NO: 94798 - protein, 56 aa, Gossypium hirsutum
  unsure (1)..(56): unsure at all Xaa locations
  Clone ID: LIB3148-015-Q1-K1-D3.pep
IYSVGEVFNIFCSLRYRNYFLTSLYLLECLKYVVHEINGNFLHFAAXKKKKKKKKK

SEQ ID NO: 94799 - protein, 39 aa, Gossypium hirsutum
  Clone ID: LIB3148-015-Q1-K1-D6.pep
MRNNSVIVKKNKKKKKKKKKKKKKNKIIILYIIKIIIKI

SEQ ID NO: 94800 - protein, 40 aa, Gossypium hirsutum
  Clone ID: LIB3148-015-Q1-K1-D8.pep
HASGLVRPYPRRAFNDEESSLTLNELGLTSKQEALFLELI

SEQ ID NO: 94801 - protein, 106 aa, Gossypium hirsutum
  Clone ID: LIB3148-015-Q1-K1-E1.pep
DAWADAWVRIIENSDVTLDIVFFNCLVDAYGRMGCFAEMKGVLEMMKQKGYKPDKITYRTMIKAYSISGMTSHAKELRNLVESAAGSSLGMPKPDFRQPEYYRSYS

SEQ ID NO: 94802 - protein, 76 aa, Gossypium hirsutum
  Clone ID: LIB3148-015-Q1-K1-E3.pep
DTSEETIMSPMMNCSPHHLEAELKANIESNLNLDYIMPVWLASYISSFTPTETSYEDTYKMCKLLLANILTNSLNE

SEQ ID NO: 94803 - protein, 113 aa, Gossypium hirsutum
  Clone ID: LIB3148-015-Q1-K1-E7.pep
PRVRIGLQVSSSSLDVGVVPDGSTMTDISNPYGRGPESTHQTVQLSPADREARVLRYREKRKNRKFEKTIRYASRKAYAEMRPRIKGRFAKRTDIEVEVDRSNMYGFGVVPSF

SEQ ID NO: 94804 - protein, 52 aa, Gossypium hirsutum
  Clone ID: LIB3148-015-Q1-K1-F10.pep
SMKTISIFIKDGGKTRTGRAQPQRNQVNPKRSFKPKKKKKMKLRMYYRGRVG

SEQ ID NO: 94805 - protein, 61 aa, Gossypium hirsutum
  Clone ID: LIB3148-015-Q1-K1-G11.pep
ISLYYIIFFRNKIRSYKILLNSIMIVNYHRPKRLIKTCSILKIGDILYMEFFLLVLFKERE

SEQ ID NO: 94806 - protein, 72 aa, Gossypium hirsutum
  Clone ID: LIB3148-015-Q1-K1-G5.pep
VIFHFKNSLIRRLTDMYAWEVGPNVDSSAQGVYVTNSRIPSFETLDLFRVELRYYKHLFQCVCPIQIRYVSW

SEQ ID NO: 94807 - protein, 64 aa, Gossypium hirsutum
  Clone ID: LIB3148-015-Q1-K1-G7.pep
RNEPSARVYIFLCRCSQQGRVTASVVAPVSDYDTEGKKPTTSGKPFSSSLFPFFVFVLIDSYKK

SEQ ID NO: 94808 - protein, 36 aa, Gossypium hirsutum
  Clone ID: LIB3148-015-Q1-K1-G9.pep
YITWELRAALQSKREFDLESQFFFGIKKKKILINIY

SEQ ID NO: 94809 - protein, 126 aa, Gossypium hirsutum
  unsure (1)..(126): unsure at all Xaa locations
  Clone ID: LIB3148-015-Q1-K1-H2.pep
PTRPARVLVAAPFLAFVTTHILYLNFYTFDYGWNMKVCVAIGVAQLLIWAIWVGITHHPSRWKLWVVVVGGGLAMLLEIYDFPPYQGFFDAHAIWHATTIPLTCLWWSFIRDDAXFRTSILLKKAN

SEQ ID NO: 94810 - protein, 60 aa, Gossypium hirsutum
  Clone ID: LIB3148-015-Q1-K1-H8.pep
KYNDVFHCKSHIYIHQKSNGVSIYFFMVIYIPCIYDVMELNYHVKNLWSWFSIILCNFFP

SEQ ID NO: 94811 - protein, 56 aa, Gossypium hirsutum
  Clone ID: LIB3148-016-Q1-K1-A2.pep
HNHPLEDTLLGPPPMGPHFSPPSITRLYPFLGPLKKLFPPLFSQKQIVETPSLPHH

SEQ ID NO: 94812 - protein, 83 aa, Gossypium hirsutum
  Clone ID: LIB3148-016-Q1-K1-B12.pep
PVTRPSGTEDLRVLLEGANCMFSPFASAVKYNRVLPFYILTATFLNPFQLGPAKNDAHKGRGYCPVSPSCLKRILFQSSITCL

SEQ ID NO: 94813 - protein, 64 aa, Gossypium hirsutum
  Clone ID: LIB3148-016-Q1-K1-B2.pep
ISIQLIQLHFFKPIIDRFPIQLGRFGLASLFESQIMSQKFLIKLEFELVIIRDQLSLIIALDKR

SEQ ID NO: 94814 - protein, 45 aa, Gossypium hirsutum
  Clone ID: LIB3148-016-Q1-K1-B3.pep
TLPTWLSYKTMYLYQKLNERKHCQLSKQSIYIMLCNGLMTFILYL

SEQ ID NO: 94815 - protein, 33 aa, Gossypium hirsutum
  unsure (1)..(33): unsure at all Xaa locations
  Clone ID: LIB3148-016-Q1-K1-B8.pep
MERKKGMRQRFTRADSWXSSVSWRMVLSFKHFN

SEQ ID NO: 94816 - protein, 100 aa, Gossypium hirsutum
  Clone ID: LIB3148-016-Q1-K1-C1.pep
YTIYSKKKKKKKKGRKKKEEREKKKKKKKKKKKKKKKKKKKKKKKKKKKKKKKRGGAFLRDQILLPVVCKIKIFYWGPQNKIPGPGFKNAGTGKTLGIPN

SEQ ID NO: 94817 - protein, 81 aa, Gossypium hirsutum
  Clone ID: LIB3148-016-Q1-K1-C5.pep
KKFPIIFIFLKYPALALKKLPIYPFHSLQREVGLVFCVSNFKGQGVCTGGTMQSILYTQRSSSEGSQPLADAWADAWADAW

SEQ ID NO: 94818 - protein, 46 aa, Gossypium hirsutum
  Clone ID: LIB3148-016-Q1-K1-D1.pep
NRPPFCVVVPISFLFCRFFFISFFGFLILLFFSFLFFFFLENKLSS

SEQ ID NO: 94819 - protein, 94 aa, Gossypium hirsutum
  Clone ID: LIB3148-016-Q1-K1-D12.pep
GLQIISTPVQHQLLREGHLLEESCVISVELLFLFCIYHFLFLFFFFFFFFFFFFFFFFFAQECHYVVSHWLNKPIYRLACEMMIGGSNSIFLSF

SEQ ID NO: 94820 - protein, 32 aa, Gossypium hirsutum
  Clone ID: LIB3148-016-Q1-K1-E12.pep
MYQISCRREIQICSNEKPTLRFQISTSIMNYN

SEQ ID NO: 94821 - protein, 100 aa, Gossypium hirsutum
  Clone ID: LIB3148-016-Q1-K1-E2.pep
MGEETLDTMNLDLNLGPTPETGSGSVSNEGLGWDASVNNRFNRIREAVRRRRWRWQQVQFPAATQNLSVELDQLMVNLDNACTLQAGEGSIIPEERTSDV

SEQ ID NO: 94822 - protein, 56 aa, Gossypium hirsutum
  Clone ID: LIB3148-016-Q1-K1-E6.pep
LIFLSVNERAQCKKKNACWVFEIGRIILIIISSICFTEKVYGSSPYSPIFSNFLFY

SEQ ID NO: 94823 - protein, 45 aa, Gossypium hirsutum
  unsure (1)..(45): unsure at all Xaa locations
  Clone ID: LIB3148-016-Q1-K1-E7.pep
HTFVHSTVIFYQPPXPTPACFKRTRGLPKTLHNPSYLINVSLHHK

SEQ ID NO: 94824 - protein, 77 aa, Gossypium hirsutum
  Clone ID: LIB3148-016-Q1-K1-F10.pep
LWIKKKKKKKKKKKKKKKKKKKKKKKKKKKKKKKKKKKKKKKKKKKKKKKKGGGPFKGPNFTSRCLQVKNFFLGPPK

SEQ ID NO: 94825 - protein, 35 aa, Gossypium hirsutum
  Clone ID: LIB3148-016-Q1-K1-F11.pep
QDYHLFLLSRINTSDAHLFIICVSRLSVHEPRIIG

SEQ ID NO: 94826 - protein, 134 aa, Gossypium hirsutum
  Clone ID: LIB3148-016-Q1-K1-G3.pep
HASADAWGEKPDEDTIENLISSGESESFLQRAIQEQGRGQIMDTISEIQERHDAVKEIEKNLIELHQIFLDMAALVEAQGQQLNDIESHVAHASSFCRRGTEQLQEAREHQKNSKKWMCIAILAAILLIIVILI

SEQ ID NO: 94827 - protein, 49 aa, Gossypium hirsutum
  Clone ID: LIB3148-016-Q1-K1-G7.pep
LSHDYQEMYNLHYRCITHCSIHRCCHQGSSHIRRFHVQTHAEIGLRLCA

SEQ ID NO: 94828 - protein, 114 aa, Gossypium hirsutum
  Clone ID: LIB3148-016-Q1-K1-H4.pep
YESQLSLNFQRAYYMLFHNIRVSIICVGPHNQIYPRVVCIHMHPPTYIISYWPYKYLYPHRERFYQSARKPLFLVLPRILLVVNWFWLTPIRLPQALPIVSVCNQRPFCSIPNM

SEQ ID NO: 94829 - protein, 112 aa, Gossypium hirsutum
  Clone ID: LIB3148-016-Q1-K1-H9.pep
YASDPQVVYVVKGSGEVQIVGLQGKLVLNTKVETGQLFVVPKLFMVAISADENGLELISIVTSTRAIMGEMGSKNSVFNTSPSILQVSLNVSSELNQQFIEIMETGTIIVTP

SEQ ID NO: 94830 - protein, 59 aa, Gossypium hirsutum
  Clone ID: LIB3148-017-Q1-K1-A1.pep
LIAHCSSGSYVIRMVLCGDVLTREWYCFSINYYSSGALSCSSMLGALNITQRKGKTVFM

SEQ ID NO: 94831 - protein, 133 aa, Gossypium hirsutum
  Clone ID: LIB3148-017-Q1-K1-A10.pep
DLTWTEIQSLKPKMYSRFEQNSGLERNPEAKNKGKLISLGDFLGFAKTKPVGVLINIENARYLASKMHLDVVDAVTKTLKNASLEKKQVMIQSDDSAVLSKFKGESGYKRLLRFEEISGVSKQAAEEVKKYAD

SEQ ID NO: 94832 - protein, 76 aa, Gossypium hirsutum
  Clone ID: LIB3148-017-Q1-K1-A2.pep
SLVAWNKGLIYSLVNEDQAQRIISIPIFETSTEDLLVWKYEGSGEYSVKSGYRVLATDYLQNINYINSTADIYKIF

SEQ ID NO: 94833 - protein, 60 aa, Gossypium hirsutum
  Clone ID: LIB3148-017-Q1-K1-A6.pep
VKLMKKILLEACSPISCLLLFFNFYLGRSYSRGDLMNETFIVNHLHSFNEKDTVREISPA

SEQ ID NO: 94834 - protein, 117 aa, Gossypium hirsutum
  Clone ID: LIB3148-017-Q1-K1-B1.pep
GKGVYFQAYLLLNQTAHRVVVRQGNFIMVNPGFFLFHIFVFVQHFLFYSIALIVYFSTSIYKQIFFCFFFLYFLFFFFFFFFLFFFFFLANSPSILQFLYSKWKWGTSIKTTVSGGI

SEQ ID NO: 94835 - protein, 34 aa, Gossypium hirsutum
  Clone ID: LIB3148-017-Q1-K1-B10.pep
NTVLYSKYAGNDFKGNDGSNYIALRASDVMAVLS

SEQ ID NO: 94836 - protein, 48 aa, Gossypium hirsutum
  unsure (1)..(48): unsure at all Xaa locations
  Clone ID: LIB3148-017-Q1-K1-B12.pep
NFNYFIKIYFFFFFFFFFFFFXXLNLPIPNITLVILRPTDQVSLSLFN

SEQ ID NO: 94837 - protein, 47 aa, Gossypium hirsutum
  Clone ID: LIB3148-017-Q1-K1-B4.pep
VISKKIGNLWSNLTEAEKQVYQEKGMKDERYGTEMLEYRSSHDSTPQ

SEQ ID NO: 94838 - protein, 51 aa, Gossypium hirsutum
  Clone ID: LIB3148-017-Q1-K1-B7.pep
RVLLGFNYSCILLINRLAFYTLRGWNKKRVFVFFQICVRQIFYSRVILLLL

SEQ ID NO: 94839 - protein, 88 aa, Gossypium hirsutum
  Clone ID: LIB3148-017-Q1-K1-B9.pep
THPFGLLPSFQTIKIVFILTAPFYSPRNFLCGLYISKPRIPPWGVLYYLICPMAWTGYGLNTFQYGHYQRSIKIPGVKPDPSIKWYLK

SEQ ID NO: 94840 - protein, 103 aa, Gossypium hirsutum
  unsure (1)..(103): unsure at all Xaa locations
  Clone ID: LIB3148-017-Q1-K1-C10.pep
NIYFFFNTFYILYFSYILTPFLLFYSILLLFIYLTYFLIYYNQLYFFFFSFTYYFFSIFSXIYNIIFYFFLFIIFFFSSLILYFIIFNYYFLFFILYLIFSII

SEQ ID NO: 94841 - protein, 139 aa, Gossypium hirsutum
  Clone ID: LIB3148-017-Q1-K1-C11.pep
PVGKRGSLLYGLLGTGKSSLVAAMANYLKFDIYDLGLTSVRSDAELRRTLLSTTNRSILLIEDIDCSSEVLERQMRNKNKKLPDRTGQLTLSGILNCIDGLWSSCGDERIIVFTTNYKDRIDPALLRPGRMDLHINMSY

SEQ ID NO: 94842 - protein, 74 aa, Gossypium hirsutum
  Clone ID: LIB3148-017-Q1-K1-C6.pep
VKFDSFKRPPLFFFFFFFFFFFFFFFFFFFFFFFFFFFFFFFFFFFFFFSFFGVEQYPTTTITQNTGMPFRTRG

SEQ ID NO: 94843 - protein, 55 aa, Gossypium hirsutum
  Clone ID: LIB3148-017-Q1-K1-D3.pep
TQRVKLCIFGLVPWSCPLSQGLGLSDHRVMEPQRFEEAKVGITELESKDYIAVKR

SEQ ID NO: 94844 - protein, 73 aa, Gossypium hirsutum
  Clone ID: LIB3148-017-Q1-K1-D6.pep
FIFFFFFFFFFFFFFFFFFFFFFFFFLKKIPNLKLSIQKNKESYNVRITATFGCNFEPSLAGSYNVKTKKLNQ

SEQ ID NO: 94845 - protein, 62 aa, Gossypium hirsutum
  Clone ID: LIB3148-017-Q1-K1-E12.pep
PRVRPRVRLIPSMNFIYTLFGILVLLNSASFVFLLHLLYSLFLTRMGMKTSLRLPRWFKKAI

SEQ ID NO: 94846 - protein, 97 aa, Gossypium hirsutum
  unsure (1)..(97): unsure at all Xaa locations
  Clone ID: LIB3148-017-Q1-K1-F6.pep
CGFDSVCCICYIRWTIFFWHTRLGHTSISRLNKMLNLPCTVLNSDSIQQCPMCPLAKQTRLSFPISTSRVDIGFSLFHIDLXGPYRVSTHSGHRYFF

SEQ ID NO: 94847 - protein, 72 aa, Gossypium hirsutum
  unsure (1)..(72): unsure at all Xaa locations
  Clone ID: LIB3148-017-Q1-K1-F9.pep
CFSFLVFFFFSPFFFFFFFFFFFFFFFFFFFFFFFFFFFFFXNSKTCYAHTQYSCSNINQIQMIEQGCLKKN

SEQ ID NO: 94848 - protein, 97 aa, Gossypium hirsutum
  Clone ID: LIB3148-017-Q1-K1-G11.pep
RWGSEFMIGQKNPHPPNLIFSSEKLKSVCSKKLTIIPAKSYQKHTNRTPTKQPCRLLQYAVHNFRSNIYTTFKKGKNSVKEQNMVKESTFRDPSPST

SEQ ID NO: 94849 - protein, 38 aa, Gossypium hirsutum
  Clone ID: LIB3148-017-Q1-K1-G9.pep
TKFLRWSTIARSLPGRTDNEIKNYWRTHIKKKAKPDAW

SEQ ID NO: 94850 - protein, 36 aa, Gossypium hirsutum
  Clone ID: LIB3148-017-Q1-K1-H10.pep
GPTDASVNYLNFLEMVLTLSYLIFTMAMKGMTMRWT

SEQ ID NO: 94851 - protein, 46 aa, Gossypium hirsutum
  Clone ID: LIB3148-017-Q1-K1-H11.pep
KSYLFCMYAYVTLVFIPSFVFLLFFFKYKISFFPTRPRTGGLGRAF

SEQ ID NO: 94852 - protein, 49 aa, Gossypium hirsutum
  Clone ID: LIB3148-017-Q1-K1-H5.pep
MEYISMRSTPKINLSTSGKVHQRSFVNSPSAFHTIAMHVRDHDMVRGME

SEQ ID NO: 94853 - protein, 37 aa, Gossypium hirsutum
  Clone ID: LIB3148-018-Q1-K1-A1.pep
SLQEHESSLPSFKHARSRTGGFIDPLASRARVDERVG

SEQ ID NO: 94854 - protein, 141 aa, Gossypium hirsutum
  unsure (1)..(141): unsure at all Xaa locations
  Clone ID: LIB3148-018-Q1-K1-A11.pep
MLMKRRGVHSGLVVKGEEGALSVTTRLLSASTSKGLPVNHCSGFRSVGMESACEVDGVXRPSFRLEVNAMDYGFEPTDTXPRTNRSVSKNIELGLAALXGEKGPAYDRIVLNAGIVDHLLGCDGAEDVXLALERAKEAIDS

SEQ ID NO: 94855 - protein, 114 aa, Gossypium hirsutum
  Clone ID: LIB3148-018-Q1-K1-A5.pep
LFFFWSPIKKILISKQREKNFEPFKGPPPFFFLYIFIIYYLKYFYFFNFFFLFFFFFFFFFIINFFFFFFFFFFFFAHNELFFSPLFIIQTNHTHGLSLNDRKSTANFKFYLAR

SEQ ID NO: 94856 - protein, 60 aa, Gossypium hirsutum
  Clone ID: LIB3148-018-Q1-K1-B10.pep
GRVREAEVYPTDDFRGLNDFGMIIKKRKKREKKKKRADEKKRKKAKKHKHAKTKLFYRET

SEQ ID NO: 94857 - protein, 109 aa, Gossypium hirsutum
  Clone ID: LIB3148-018-Q1-K1-B11.pep
ENLSSVEVESVLYNHPAINEAAVVARPDEYWGETPCAFVSLKNELTQKPSEQDIIQYCRAKLPHYMVPKTVVFKEELPKTSTGKIQKFALRDMAKALGPSSSSSRLSRM

SEQ ID NO: 94858 - protein, 150 aa, Gossypium hirsutum
  Clone ID: LIB3148-018-Q1-K1-B5.pep
ETNMFLFGFVDLIEGSVSETIKRVTKLQDARIQVAYEKLFTDTAIEQYISMDLGREVDLNMLKKMSTEYEVAKRKAIEEAGKVVDVQNIKHISENEEPLSEIVEKIDASWKNQREAFYQRTGLTPQNPAEPQQLQLQLKEGDAENNDADE

SEQ ID NO: 94859 - protein, 58 aa, Gossypium hirsutum
  Clone ID: LIB3148-018-Q1-K1-B7.pep
NDNTIDLSIPNQNQDKELSKNKAYFPVRGFFLLGLAIASTPPSIEANRLCRKIHCCFS

SEQ ID NO: 94860 - protein, 50 aa, Gossypium hirsutum
  Clone ID: LIB3148-018-Q1-K1-B8.pep
PFGSEPIKPIYNQIHIHHFTSSPSHIIQSSSTHYTTFDTSKISLSHSHIN

SEQ ID NO: 94861 - protein, 73 aa, Gossypium hirsutum
  Clone ID: LIB3148-018-Q1-K1-C8.pep
MSDHTYGHPYPPPGGYRYNQGPPPPVMAPPQYYGAPPPPPRREPGFLEGFLAALCCCCLLDDCCCDPSVIIVD

SEQ ID NO: 94862 - protein, 107 aa, Gossypium hirsutum
  unsure (1)..(107): unsure at all Xaa locations
  Clone ID: LIB3148-018-Q1-K1-D10.pep
YYLSFDFFQYYLYFFFYLIKLLNLIHFLFSKYEYLFFYIFFFSFLYFYSLFFFIXILFPFLIFYSSYFYILFFYIFFFIFLYIIFYYLLFFFLNFFFFFNLILLYLF

SEQ ID NO: 94863 - protein, 74 aa, Gossypium hirsutum
  Clone ID: LIB3148-018-Q1-K1-E5.pep
MMRMGGDEINGGLLDQTVQVELSNMHSRSDNGFGALDWQGNEDQGLFDLPNDVDKTYWSQTQWTDQDHHGLYLP

SEQ ID NO: 94864 - protein, 81 aa, Gossypium hirsutum
  unsure (1)..(81): unsure at all Xaa locations
  Clone ID: LIB3148-018-Q1-K1-E6.pep
IGWEXGKKESLFKAFEDPELXXMDXDAXXNQXPFSXGHRAVENPPEYXHAXTFXGRARHERIQAPVPQGQKGAYKHIXXXR

SEQ ID NO: 94865 - protein, 58 aa, Gossypium hirsutum
  Clone ID: LIB3148-018-Q1-K1-E7.pep
IEKLQKFYHLKRSPPLSHLIFFIFILYTIPPLLIHPSLIFFFFLFYNIIFFFFFFFFF

SEQ ID NO: 94866 - protein, 33 aa, Gossypium hirsutum
  Clone ID: LIB3148-018-Q1-K1-F1.pep
LFDPRVSRFAYLEREACDKLLYDSFPYMEIENG

SEQ ID NO: 94867 - protein, 90 aa, Gossypium hirsutum
  Clone ID: LIB3148-018-Q1-K1-F11.pep
EENSNTVNCTNLWDFDKLVNMLVIHKRDFAWNLVLGVKKGFYKSGYYFVVHNCKLEYLNSVCFIDSSASCFFFLRAMETKFFEVHSCPSQ

SEQ ID NO: 94868 - protein, 34 aa, Gossypium hirsutum
  unsure (1)..(34): unsure at all Xaa locations
  Clone ID: LIB3148-018-Q1-K1-F12.pep
DFQLGQXQLERDILPMVPCADMLXRTRSASHPGN

SEQ ID NO: 94869 - protein, 48 aa, Gossypium hirsutum
  Clone ID: LIB3148-018-Q1-K1-F2.pep
HACVYINLCEPNSIYLFAPRVSMFVYEELASGDELLSDSFPYKVIENG

SEQ ID NO: 94870 - protein, 63 aa, Gossypium hirsutum
  Clone ID: LIB3148-018-Q1-K1-F8.pep
QFLLNFPHAAITYFDFYLFKYSLISQCIKHVFKHPFKTFCCHCWKYNYNIDLCVFYPNVNNTF

SEQ ID NO: 94871 - protein, 89 aa, Gossypium hirsutum
  Clone ID: LIB3148-018-Q1-K1-G10.pep
KKGKYRGELFLLKKRMPSQDLICGISGFIGGNRSTYLSTWTIVHIISFLYLHYSLFFIRMCYMMIYFYVSILLQFVAFFYILHFLTFFS

SEQ ID NO: 94872 - protein, 39 aa, Gossypium hirsutum
  Clone ID: LIB3148-018-Q1-K1-G4.pep
VIKKLVTGGSLQVIDHAHSRMDQLDKIELTEVNINARVG

SEQ ID NO: 94873 - protein, 94 aa, Gossypium hirsutum
  unsure (1)..(94): unsure at all Xaa locations
  Clone ID: LIB3148-018-Q1-K1-H12.pep
SKGFFQLFFVFKAXHLSVCSIFPSMGITLLSLCSSSIFGLHPSFLWLPSFLLWFLFAGPTKYYGLYGQVPCATLLYHSSQGQLNALVETNGRTA

SEQ ID NO: 94874 - protein, 51 aa, Gossypium hirsutum
  Clone ID: LIB3148-018-Q1-K1-H8.pep
RECTQIVKTINEGMIEEGIFGCILSVGLQASHCTIRRSYNFSAILLFCTQW

SEQ ID NO: 94875 - protein, 69 aa, Gossypium hirsutum
  Clone ID: LIB3148-019-Q1-K1-A1.pep
WLPKRAMFSQGKILQKSYACLSRLVEDDRLIWACDKTSEYTIQSGYKTLIGQHITDNNVTNTIEIYKKI

SEQ ID NO: 94876 - protein, 97 aa, Gossypium hirsutum
  unsure (1)..(97): unsure at all Xaa locations
  Clone ID: LIB3148-019-Q1-K1-A10.pep
HASGTKLGRPKLIVAPMVDKSELPFRMLCXKYGAEAAYTPMLHSRIFNENPKYRSEEFTTCKEDRPLFVQFCANDPDILLEACRRVESHCDYVDINL

SEQ ID NO: 94877 - protein, 87 aa, Gossypium hirsutum
  unsure (1)..(87): unsure at all Xaa locations
  Clone ID: LIB3148-019-Q1-K1-A4.pep
ENPEAMEEDVEDEVAEIKPAHFEESMKFARXSVSDADIRKYQAFAQTLQQSRGFGSEFRFAETGSRTAASDPFAAAAGGADEDDLYS

SEQ ID NO: 94878 - protein, 59 aa, Gossypium hirsutum
  unsure (1)..(59): unsure at all Xaa locations
  Clone ID: LIB3148-019-Q1-K1-A7.pep
ELQNIPDIYLHVQTNNEDAINLYKEFGFEITETIKKYYTNIDPXDCFVLTSEEITIKSW

SEQ ID NO: 94879 - protein, 53 aa, Gossypium hirsutum
  Clone ID: LIB3148-019-Q1-K1-B10.pep
AIRPFKTHFKTTYSSKPILISYLSPFIYKTISYHISWLTTKFFFIPIPYHHYH

SEQ ID NO: 94880 - protein, 47 aa, Gossypium hirsutum
  Clone ID: LIB3148-019-Q1-K1-B4.pep
QFIGPNVQNQTNLNDPSSWANLRNKGPCGTIIVRNPNLRCLHALSFF

SEQ ID NO: 94881 - protein, 108 aa, Gossypium hirsutum
  Clone ID: LIB3148-019-Q1-K1-B6.pep
PRVREGSPWYKELPKTNMGLETGHCQVFTESENVGRTLDLSVLRSYEELHGKLANMFGVESSDMLSNVFYHDAAASVKHTGDEPFSEFLKTARRLTVLTDSGSDNMGR

SEQ ID NO: 94882 - protein, 88 aa, Gossypium hirsutum
  unsure (1)..(88): unsure at all Xaa locations
  Clone ID: LIB3148-019-Q1-K1-B8.pep
PPPEKVSILGIPLLAEEKSEVILLKFLRAXDFKVKDAFTMIKNTVSWRKEFGIETLLDEDLGNELEKVVFMQGFDKEGHPVCYNVYGE

SEQ ID NO: 94883 - protein, 119 aa, Gossypium hirsutum
  unsure (1)..(119): unsure at all Xaa locations
  Clone ID: LIB3148-019-Q1-K1-C10.pep
PTFTAEGFELIAATNHLGHFXLSRLLLDDKKQSDYPSKRLINVGXSITGNTNTWAGNVPPKANLVDLRRLTCXLNGLNSSSMIDRRDWDGAXAYKDCILCHMLTMQDIHRRLHEVTGIT

SEQ ID NO: 94884 - protein, 58 aa, Gossypium hirsutum
  unsure (1)..(58): unsure at all Xaa locations
  Clone ID: LIB3148-019-Q1-K1-C11.pep
EHKYEXFQQMSDDPMKQVSQGFXKSLQDVKHNXRYKNPDADRQVRDISSREHIAQFLL

SEQ ID NO: 94885 - protein, 44 aa, Gossypium hirsutum
  Clone ID: LIB3148-019-Q1-K1-C12.pep
NTWFKQTTTITTNIKEHTHIIFNLLFQHYSYYYFSPRPATIPLY

SEQ ID NO: 94886 - protein, 44 aa, Gossypium hirsutum
  Clone ID: LIB3148-019-Q1-K1-C7.pep
PRSHSSTLDRRGCEIHMAKLSIWPHFAFDIYVFCMKELRCCSGL

SEQ ID NO: 94887 - protein, 64 aa, Gossypium hirsutum
  Clone ID: LIB3148-019-Q1-K1-C8.pep
SSQSSKKLEAEWFPWLDPMTKGFFGLCRTGIKSKRENGNQFGVTLALLAAVQAENGKGKGTIRQ

SEQ ID NO: 94888 - protein, 128 aa, Gossypium hirsutum
  Clone ID: LIB3148-019-Q1-K1-D1.pep
MVQSKKFRGVRQRQWGTWVSEIRHPLLKRRVWLGTFETAEEAARAYDEAAILMSGRSAKTNFPVPKNQTGDENTTTCNALSSILSEKLRKCCKIPSPPSLTCLRLDTENSHIGVWQRRAGSRSDSCWV

SEQ ID NO: 94889 - protein, 68 aa, Gossypium hirsutum
  unsure (1)..(68): unsure at all Xaa locations
  Clone ID: LIB3148-019-Q1-K1-D3.pep
RGLVLMCQMLSMXXKLSSMVLWMAQIQSTMVFGFVXGLISNFFFWVGSGYFFLFNRDNFFFFIFKFLF

SEQ ID NO: 94890 - protein, 46 aa, Gossypium hirsutum
  Clone ID: LIB3148-019-Q1-K1-D6.pep
ALLLRVHPRQLRALQILPSLSFIASFPEASLIWLKNQVSSITGRVG

SEQ ID NO: 94891 - protein, 73 aa, Gossypium hirsutum
  Clone ID: LIB3148-019-Q1-K1-E12.pep
PTRPVLWVIAWIFLFIYFFADMFNHFDEVKKIFPLGFYSLLTVPPVLGLMNVVWFWKIVKGLIKTISKARHRE

SEQ ID NO: 94892 - protein, 41 aa, Gossypium hirsutum
  unsure (1)..(41): unsure at all Xaa locations
  Clone ID: LIB3148-019-Q1-K1-E5.pep
XAETTXKXGVYIRLRGKSTXXDHHSYIWDHLIRIXRXXEGG

SEQ ID NO: 94893 - protein, 83 aa, Gossypium hirsutum
  Clone ID: LIB3148-019-Q1-K1-E9.pep
HNQSLNPPKCNHLKIKGDIVPDILETVHLMKYISPVHYFFLWALMCVQEQKLICTIARCFFTAKKKKKKKNKNHLNKKKKKKN

SEQ ID NO: 94894 - protein, 134 aa, Gossypium hirsutum
  Clone ID: LIB3148-019-Q1-K1-F2.pep
EILKRVQNGEVKCMRRNTSGVDDKACLEMSHSFNVETATGTGERIAENTPLSPVAESPIKNESRDTFTYDKVIPMVDKGIDACWPKLMADESFAILKDSYHMKDDGKVVTTGMGNNVFGGIMAFVMGIMTMLRL

SEQ ID NO: 94895 - protein, 74 aa, Gossypium hirsutum
  Clone ID: LIB3148-019-Q1-K1-F3.pep
GSAKHSTPKQLHALLKLLPKTHLYHLFPNLLLITIPSIPLLMTNLFLLYTNLFKLTFLNIFHIKISPIFIRFLP

SEQ ID NO: 94896 - protein, 96 aa, Gossypium hirsutum
  Clone ID: LIB3148-019-Q1-K1-F4.pep
GASHARGKKRKRKRKKNPINLISSFMRGAASAPHSSGLNSNYGGVNQDAAFPPLRYGVQSWGRGMYGGEGARVRRLVMCGERARGRHCCDAGNPCC

SEQ ID NO: 94897 - protein, 47 aa, Gossypium hirsutum
  Clone ID: LIB3148-019-Q1-K1-F7.pep
SYRCMHQKIFYKESPKPLRHTSFYHSSSNRKHKKVKKNNLIYTHASI

SEQ ID NO: 94898 - protein, 52 aa, Gossypium hirsutum
  Clone ID: LIB3148-019-Q1-K1-F9.pep
YSFGMLCLLFTPSPKGPESRWMRHFICGQNYQNGYTKIPLLISLVLEDLIKY

SEQ ID NO: 94899 - protein, 63 aa, Gossypium hirsutum
  Clone ID: LIB3148-019-Q1-K1-G11.pep
GWDLAEKCCCNLCASILYLIFTVGKAYIEVQNLFISGTKRSKYLKKNFQQFFFEYWKSIGENF

SEQ ID NO: 94900 - protein, 83 aa, Gossypium hirsutum
  Clone ID: LIB3148-019-Q1-K1-H10.pep
KTKEPLWSSFPLSNQAIQRRLNLRATPIAAEWKKIRPPGMASCRRCTRVEAQHARGRPWVRLRRCWLLKARVRVWVFWARVRV

SEQ ID NO: 94901 - protein, 78 aa, Gossypium hirsutum
  Clone ID: LIB3148-019-Q1-K1-H3.pep
PTRTLLAIPIFTVASESAFTMGKKVITRLRSSLKPKTVQAVVRLDDRMRANEFSSEIVCKNDDDDDDDDEDDVSSVAF

SEQ ID NO: 94902 - protein, 79 aa, Gossypium hirsutum
  unsure (1)..(79): unsure at all Xaa locations
  Clone ID: LIB3148-020-Q1-K1-A9.pep
LHCLFWQVGSVKFFAQCPFERFDPWNPPIXPNRYVVTFLNSSTYPLNEKSLCSPDTLPGAKTREIEKKRQTKQENLKTC

SEQ ID NO: 94903 - protein, 98 aa, Gossypium hirsutum
  unsure (1)..(98): unsure at all Xaa locations
  Clone ID: LIB3148-020-Q1-K1-B5.pep
MTTEQKKKLLWGSKKSTPAEESGHRWDTALFGDRERQEKFNKLMSEVALVPMADXDVKVEHKADNQDAEKQRELQLDLEKQYTAGLRRRDGRTVGLGL

SEQ ID NO: 94904 - protein, 115 aa, Gossypium hirsutum
  Clone ID: LIB3148-020-Q1-K1-B7.pep
PRVRMACANNDRAAVIEMSQRLGFLTGKESEVMLEAHVQAGFVVGLPFSKSGGYDFRSTNITQSISNLGATMLRHRLTPPPDEAYSLHRKLSGAFLACIKLRACVPCREFVLDVY

SEQ ID NO: 94905 - protein, 88 aa, Gossypium hirsutum
  Clone ID: LIB3148-020-Q1-K1-C2.pep
MKSTRQTQNSIFIQNIEFQMIFIYSCGNTRDHALHLRVCVVQFNNLMLPLYVPCLEGRVMTNQRFGMCPLWRHFLWSERGSSVRPRVR

SEQ ID NO: 94906 - protein, 44 aa, Gossypium hirsutum
  Clone ID: LIB3148-020-Q1-K1-C7.pep
QHIYLYNILLTVGDLAYKITVGCELDKGSWFTYTTSNLPSATFN

SEQ ID NO: 94907 - protein, 38 aa, Gossypium hirsutum
  Clone ID: LIB3148-020-Q1-K1-C8.pep
LLRIIFFNRFDPHHLVWFTLLFTMVVYLQQQTSRSDAW

SEQ ID NO: 94908 - protein, 64 aa, Gossypium hirsutum
  Clone ID: LIB3148-020-Q1-K1-D1.pep
ACVTILMYMTHKLFKFTNNLTSISHTLNKDNIFLKNISPIKTKKTNVFQPNYFSSHFNVRHPNS

SEQ ID NO: 94909 - protein, 98 aa, Gossypium hirsutum
  Clone ID: LIB3148-020-Q1-K1-D2.pep
DMGQNNKNNNVGKHALLGVGSLFSHFKHGIGATSAVSLTIHKMSLLCSGSLVFALPSTPTLQTWSPVCSFFNTILQFADNIYVYIYCIYRTTIVYFCH

SEQ ID NO: 94910 - protein, 110 aa, Gossypium hirsutum
  unsure (1)..(110): unsure at all Xaa locations
  Clone ID: LIB3148-020-Q1-K1-D3.pep
TLENYRKDYYQEGSHVYEELNVLEAFRKALTTWSRWIDANVNPMKTMVFFRGYSASHFSGGQWNSGGACDNETNPIKNEKYLTPYPSKMLVLEXVLKGMKTHVTYLNVTR

SEQ ID NO: 94911 - protein, 94 aa, Gossypium hirsutum
  Clone ID: LIB3148-020-Q1-K1-D8.pep
KKKKKHKNFLYKNNNPKKRGPVLSYLKLLTTKLTHYFHLKSPHSPTLPSTLSRLPLSFPHPIFLSTHPFSKPPHPHPNSSFRNPFPTSLPTPYI

SEQ ID NO: 94912 - protein, 103 aa, Gossypium hirsutum
  Clone ID: LIB3148-020-Q1-K1-E11.pep
VPENLDSVAEFEAPASPTSSYSQAFPTEEDFAKEPAVVPSQLHLTVLGTDDQDGASSSKPQHVVLNHLFIEKGWASQSVVALGYTHRFESKYVTVVLYKPLKR

SEQ ID NO: 94913 - protein, 108 aa, Gossypium hirsutum
  unsure (1)..(108): unsure at all Xaa locations
  Clone ID: LIB3148-020-Q1-K1-E2.pep
PRVRPRVRLAAGTGSFIKILADFSGSQNYNSYMTHSMAKGYQVGKVLFRPYEDVLGIGHSMGWSSILIPGSGEPNFDSWVANPFETSKQRREKEVHSLLDKLXPETIM

SEQ ID NO: 94914 - protein, 64 aa, Gossypium hirsutum
  Clone ID: LIB3148-020-Q1-K1-E8.pep
SVHIIKGNKVYSTVNQIIEQAQSHSITARISFRTKLTDCEANEHLFECRGEIFVAEIDFEINFP

SEQ ID NO: 94915 - protein, 97 aa, Gossypium hirsutum
  Clone ID: LIB3148-020-Q1-K1-E9.pep
MCNLLQINRLPPEVVKYFTDPNAVDPPDMELLYPFVESALPLAYGVLGVLLFHELGHFLAAFPKKVKLIISFFISNITFGSSGAITQFKSILPGRST

SEQ ID NO: 94916 - protein, 64 aa, Gossypium hirsutum
  Clone ID: LIB3148-020-Q1-K1-F7.pep
YIEPIRQVCIPASTSLAASSIMDLQSAELGHHNRWQYTHIINKVSTAVFEEDSRNFYPGSDIRI

SEQ ID NO: 94917 - protein, 43 aa, Gossypium hirsutum
  Clone ID: LIB3148-020-Q1-K1-F8.pep
KMVWGRCSTSLSGFRAEISCSVAGGITLWSGLLTFKMGVGLSD

SEQ ID NO: 94918 - protein, 60 aa, Gossypium hirsutum
  Clone ID: LIB3148-020-Q1-K1-G6.pep
GKLVLPVTTQTEYFSHFPMVVDFTVCKALYACTNYILASVGICNSKIQFNSVVWRLNYAH

SEQ ID NO: 94919 - protein, 70 aa, Gossypium hirsutum
  Clone ID: LIB3148-020-Q1-K1-H3.pep
KTRGIELEIGGLIKKDNQVKGCGNKLGIFKRGARLVFCVYFFVLTYLVSPFFVLFVYKIKIFFFFSLNFF

SEQ ID NO: 94920 - protein, 56 aa, Gossypium hirsutum
  Clone ID: LIB3148-020-Q1-K1-H5.pep
AIKIVFRLNNVYISRLQFFCFLLEAKNLMFHNCIEYFQEITIIIPKSSLVEEIQNP

SEQ ID NO: 94921 - protein, 100 aa, Gossypium hirsutum
  Clone ID: LIB3148-020-Q1-K1-H6.pep
MEVSTTIKAKNKKQAEPDIDFTKALDNEMPDIFAPPQNLKSLLLPSNRAPCNTKLPEDCHYQPEDLVKLFLMPNKIVMFTTSLLLNIIAGSGTVTLVLLK

SEQ ID NO: 94922 - protein, 62 aa, Gossypium hirsutum
  Clone ID: LIB3148-020-Q1-K1-H7.pep
KINRSIIIYFNKIFLACQTCQSSNILLIPSMYTLRNKDRQKKKIYVYKKDSPMEKLTLLRFL

SEQ ID NO: 94923 - protein, 54 aa, Gossypium hirsutum
  Clone ID: LIB3148-021-Q1-K1-A11.pep
LVSFKKPALFFFFFFFFFFFFFFFFFFFFFFFFFFKQMGVDCCFYKMCEMANII

SEQ ID NO: 94924 - protein, 98 aa, Gossypium hirsutum
  Clone ID: LIB3148-021-Q1-K1-A12.pep
AAVLNGILLFGCSRGGAITRPANPLWLMHGGSFLPGILVQLLCPPGVGTPFWTDCRIRSYSFRTRPEASNGWLLTRKITAAVTRKSFRFLILVYMAQC

SEQ ID NO: 94925 - protein, 64 aa, Gossypium hirsutum
  unsure (1)..(64): unsure at all Xaa locations
  Clone ID: LIB3148-021-Q1-K1-B1.pep
NTFKPRRRGSIQKKKRKMELEITSRKFRLDFFVFCISVCLICVRLYCLCPKRDLQSKINSXIAE

SEQ ID NO: 94926 - protein, 79 aa, Gossypium hirsutum
  Clone ID: LIB3148-021-Q1-K1-B5.pep
LKTITTQLTNKILSLNTFKQLHQLFYSTQLLTTPTLYTNVTANHPHNRQNSQHSTAFLIFSNHANTIQKYPPLYLKPFN

SEQ ID NO: 94927 - protein, 73 aa, Gossypium hirsutum
  Clone ID: LIB3148-021-Q1-K1-B6.pep
SLLGFFLLWCLFVMVGCRYVVYLFFLLRFPMINHWVPGFCFLWRWVLFAELVLFSFRLVGSCHPFYFRRAGGD

SEQ ID NO: 94928 - protein, 51 aa, Gossypium hirsutum
  Clone ID: LIB3148-021-Q1-K1-B7.pep
PFIPGLMCSISCWICLDSFRSNQIAFIRNSLQQHHSKNKKYRFTYMHSAKN

SEQ ID NO: 94929 - protein, 76 aa, Gossypium hirsutum
  Clone ID: LIB3148-021-Q1-K1-C11.pep
KGKYLDRSLALAPGGHMKRTECVTSLWMIGRMPLVRLYEAGIAATVVWDPECTINRLTSLIIAQSAVEIIAHCSIS

SEQ ID NO: 94930 - protein, 73 aa, Gossypium hirsutum
  Clone ID: LIB3148-021-Q1-K1-C7.pep
KKLFYFKLILSVCITQLQYMIFQPKYSFLCRQPSSLSIVVVFISLSVALERIAVYRHKNPNDLPSSYSVLMNV

SEQ ID NO: 94931 - protein, 57 aa, Gossypium hirsutum
  Clone ID: LIB3148-021-Q1-K1-C8.pep
NFRLVQQCTQIQLHGHFSKEANPDCLFSHCYMNNKTRHVHIRMYVEQKRCFTVQAVG

SEQ ID NO: 94932 - protein, 82 aa, Gossypium hirsutum
  Clone ID: LIB3148-021-Q1-K1-D1.pep
GFEKSSPDASEQEPAVLVDSEIPGGAKLLEKLQGSISVDEKVFLAAADAVKTAMCNLLIKKQYSDEKREFRKRTRNDRKSKQ

SEQ ID NO: 94933 - protein, 52 aa, Gossypium hirsutum
  Clone ID: LIB3148-021-Q1-K1-D5.pep
EHHLWIIFVYSKCNIQAQQYHNDKPWDYCGTTTRLTVSNLCTNMSHIYTNSN

SEQ ID NO: 94934 - protein, 78 aa, Gossypium hirsutum
  Clone ID: LIB3148-021-Q1-K1-D8.pep
TSTYPNIADINQSYAFSINFPPKTPPAPPPAPPPAPPPIPPPFPPPKPPPAPPPAPPPAPPPAPMPPPFPPPAPPPIP

SEQ ID NO: 94935 - protein, 133 aa, Gossypium hirsutum
  Clone ID: LIB3148-021-Q1-K1-E1.pep
RTRGHGLKKAAVTNAPRPNAELMISKLGLKDFFDVVIVGSECEHAKPYPDPYLKALELLKVSKDHTFICEDSASGIRAGVAAGMPVVGLTTRNPENVLMEANPTMLVKDYEDPKLWSALEELDKKGDSLKTAT

SEQ ID NO: 94936 - protein, 78 aa, Gossypium hirsutum
  Clone ID: LIB3148-021-Q1-K1-E9.pep
KGGKGKGRPLFLIHPYLRFHASSYFFFFFTYLNLFGRPFTTNCLAEPSLSPPNLPSLDIPFSFAGLFTNRPARIRLPY

SEQ ID NO: 94937 - protein, 62 aa, Gossypium hirsutum
  Clone ID: LIB3148-021-Q1-K1-F1.pep
HNLHAYFYIISISKTIKITDHNNTLFPDALGHYMTQFIHFTNSVALKITINLYADTHDQLTT

SEQ ID NO: 94938 - protein, 141 aa, Gossypium hirsutum
  unsure (1)..(141): unsure at all Xaa locations
  Clone ID: LIB3148-021-Q1-K1-F11.pep
VNEKRKRRKRRRFVKEEKEAKKRQRLADDFTRLLHTYKEITASSDWEESKPLFEESQEYRSIAEESFRREIFEEYITHLQEKAKEKERKREEEKAKKEKDREEKDKRKEKEKERKEKGREREREKGKXRSKKDETDSEKLD

SEQ ID NO: 94939 - protein, 62 aa, Gossypium hirsutum
  Clone ID: LIB3148-021-Q1-K1-F12.pep
YRVRLAAFKLIESNQKTSSCGDFKDKLILLDHHKYVFATQKSILHILHMLCPMVIYKHEKQT

SEQ ID NO: 94940 - protein, 93 aa, Gossypium hirsutum
  Clone ID: LIB3148-021-Q1-K1-F7.pep
HASADIAECCVFGLPDKDYGEAVSAIVVLDSEQKRKQEESNSAFSLEELCNWAKDKLAPYKLPTRLMLWDSLPRNAMGKVNKKELKRQLGSEK

SEQ ID NO: 94941 - protein, 75 aa, Gossypium hirsutum
  unsure (1)..(75): unsure at all Xaa locations
  Clone ID: LIB3148-021-Q1-K1-F8.pep
XEDDVASFMSLLFFFYFFFFFFFFFFFFFFFFFFKTKWTPYCPIDYLGIYVRTCSHICSHLHIIHHIWYIFGRVV

SEQ ID NO: 94942 - protein, 34 aa, Gossypium hirsutum
  Clone ID: LIB3148-021-Q1-K1-G1.pep
RLDYLTAGSGVEIINVISKGDNILLSLYILYLSS

SEQ ID NO: 94943 - protein, 34 aa, Gossypium hirsutum
  Clone ID: LIB3148-021-Q1-K1-G10.pep
NKLIGLLSHYLDFLNLIHDNVASNLFVLFYPRFS

SEQ ID NO: 94944 - protein, 44 aa, Gossypium hirsutum
  Clone ID: LIB3148-021-Q1-K1-G12.pep
GRVGEPIRLLFNHTCQESFFCLAEQSTINYLKNLGKKKKNIKGI

SEQ ID NO: 94945 - protein, 63 aa, Gossypium hirsutum
  Clone ID: LIB3148-021-Q1-K1-G8.pep
SQMGLHTLVATMGHRLAASIVVRKGPYIANHIVNAADLYELMIIRSQAQYVKSLSTHVKNSEQ

SEQ ID NO: 94946 - protein, 59 aa, Gossypium hirsutum
  Clone ID: LIB3148-021-Q1-K1-H1.pep
TLTLLLAITFLFITSFLYFFLFFFFFFEQNHNQLTFHYQATSVVRSKSNHLVVTQPMFY

SEQ ID NO: 94947 - protein, 68 aa, Gossypium hirsutum
  unsure (1)..(68): unsure at all Xaa locations
  Clone ID: LIB3148-021-Q1-K1-H11.pep
FILFXFFXXXTSYIXMYIQIEKSICPLISWIRKRPTTNSANEIHIMYIQARNVYQIKEALRGPFYILF

SEQ ID NO: 94948 - protein, 89 aa, Gossypium hirsutum
  Clone ID: LIB3148-021-Q1-K1-H2.pep
ENWYYDIVLVMKETNGCIEVLMLERVDGFNSVFRVQAKGGSNVAAEISWVDQLRFSHQIPFFELTEERNGSLRGCWELDPAALPVHYFS

SEQ ID NO: 94949 - protein, 59 aa, Gossypium hirsutum
  Clone ID: LIB3148-021-Q1-K1-H4.pep
LCSLDEAIVLRHVRAFADGELRFYKSMGAFIGLNHLSTALFWSLGVISTTYNIACMIFR

SEQ ID NO: 94950 - protein, 82 aa, Gossypium hirsutum
  Clone ID: LIB3148-021-Q1-K1-H7.pep
IFVITFVLVIPSFLRSCCNTEISLNFKVPVQLHLDLLALLLVRLMNLKLMLILYIHRRYDFVYINYCILLSITEAVITKWFW

SEQ ID NO: 94951 - protein, 85 aa, Gossypium hirsutum
  Clone ID: LIB3148-022-Q1-K1-A1.pep
KVFSCLGIILRGAAVLGVPCFFFSFLRLYIFFFLAPILFSRPVVFHPYFLENPWLYQLYCLRNKFLFPLWVLLFWALFLFFFFQF

SEQ ID NO: 94952 - protein, 121 aa, Gossypium hirsutum
  unsure (1)..(121): unsure at all Xaa locations
  Clone ID: LIB3148-022-Q1-K1-A12.pep
QQQHFTSSSGPGDSPGTSRGNGLWSRSGASPXVAAASSLGLFTGLGSTTSSGASSPVDWSSGSSMGQLDYTNIDWSLNRGLSSSPSPGGIWLGSSTSPMKSIHMYYPNTNGLSAKPAMRLT

SEQ ID NO: 94953 - protein, 79 aa, Gossypium hirsutum
  unsure (1)..(79): unsure at all Xaa locations
  Clone ID: LIB3148-022-Q1-K1-A2.pep
HQEIKKCKKCKANQNGFRXRYVIMVCLCSPRVFVFFLFIFFVIFYVVLVLLKIKTKWHSLILGLKIKNVEDRIGVAVTP

SEQ ID NO: 94954 - protein, 100 aa, Gossypium hirsutum
  Clone ID: LIB3148-022-Q1-K1-A4.pep
NNEQFECLNNGRWDDRMSAVIPDEEIFYTVGFLHLSGFDTWKAFEDQNKDIMRFCNKTGIMLKQYLPHYSTKEEWVHHFGSKWKVFQHRKYQFDPRMLLS

SEQ ID NO: 94955 - protein, 57 aa, Gossypium hirsutum
  Clone ID: LIB3148-022-Q1-K1-A7.pep
CQKKLRNLDKMGIKVMPRLKVGIDLRTYNKIISVGQCEVAAAQSSSLSSDMAISSES

SEQ ID NO: 94956 - protein, 67 aa, Gossypium hirsutum
  Clone ID: LIB3148-022-Q1-K1-B11.pep
THLFTAYVSNTSIYKLTIKSKQLQVLQICFRRQFSCSGAAESHSSLTPSSGTKAMQKQPYASQSCKI

SEQ ID NO: 94957 - protein, 91 aa, Gossypium hirsutum
  unsure (1)..(91): unsure at all Xaa locations
  Clone ID: LIB3148-022-Q1-K1-B2.pep
KTKFKIKRGAPFRDSNLTNPSLQHNTFSLLKPKSNPLPVFXKLRTWKTPAIPKINRFEKNPLFASCRNTKKARTNRLSKHFPILNGKRNPP

SEQ ID NO: 94958 - protein, 52 aa, Gossypium hirsutum
  Clone ID: LIB3148-022-Q1-K1-B8.pep
TNLKSVQMIFIFFQIFCPIQSAFYWFNGYCINSIFLRYQLNWLDKVYPQCRS

SEQ ID NO: 94959 - protein, 81 aa, Gossypium hirsutum
  unsure (1)..(81): unsure at all Xaa locations
  Clone ID: LIB3148-022-Q1-K1-C12.pep
IKAGIKISKRIDIMKEAPFSPHHIKKSLVSEVYRLINLYFSSQFLNIIEXQVCGICFLKISTHILFFFFVLKFNFFFFLMK

SEQ ID NO: 94960 - protein, 91 aa, Gossypium hirsutum
  Clone ID: LIB3148-022-Q1-K1-D10.pep
NLIFFNPLIQDTQADKIKSINEHIRSYLILQNNGATSCYQNGCFASTGFESETDSITVASSIDPSLSSSSGTSPFSFATVESDSSSFFPNN

SEQ ID NO: 94961 - protein, 42 aa, Gossypium hirsutum
  Clone ID: LIB3148-022-Q1-K1-D7.pep
KSLPLMKYLKDTQNLCLHDQSQKYNQHTKLNVSLVTTLHGQG

SEQ ID NO: 94962 - protein, 56 aa, Gossypium hirsutum
  Clone ID: LIB3148-022-Q1-K1-E11.pep
SRYRYAEKQHSALREPGIAALGGLTNNTTKGELHKKHWLIPIYTRLVRADSSTTRT

SEQ ID NO: 94963 - protein, 30 aa, Gossypium hirsutum
  Clone ID: LIB3148-022-Q1-K1-E4.pep
SRKYCVSTRSSDEKLTLASGGRAQNKSIHF

SEQ ID NO: 94964 - protein, 56 aa, Gossypium hirsutum
  Clone ID: LIB3148-022-Q1-K1-E9.pep
DPSQGCHCNHLFTIRRKKMILGNSWLIYKGERTLTNPLLCVTQLMYMLNNKCLAYV

SEQ ID NO: 94965 - protein, 34 aa, Gossypium hirsutum
  Clone ID: LIB3148-022-Q1-K1-F11.pep
IFVICLTRFSLMCDHHLYEMVISLSLSIKWKPKL

SEQ ID NO: 94966 - protein, 51 aa, Gossypium hirsutum
  Clone ID: LIB3148-022-Q1-K1-F4.pep
RIQLDSGKPFSMAFQKVIFYICQNLHPLTLSNIFLRIMLSKGGYLNIQYPF

SEQ ID NO: 94967 - protein, 72 aa, Gossypium hirsutum
  Clone ID: LIB3148-022-Q1-K1-G11.pep
LIHRNGILQTEKITYNSLKKFAYIYVCKPRPQVIICDPLLLTIVCFIRTRALATTANSGFLCPLSTLGYNHG

SEQ ID NO: 94968 - protein, 35 aa, Gossypium hirsutum
  Clone ID: LIB3148-022-Q1-K1-G4.pep
QQIKQANWIGSFQANFYFLSLVSFFKTKAVSKAKN

SEQ ID NO: 94969 - protein, 61 aa, Gossypium hirsutum
  Clone ID: LIB3148-022-Q1-K1-G9.pep
FHFYCYENKRDLDKPKQYFLDLQCLSCVSTLNKRKGNCFFYYITIILIIFLFLFILLIFCI

SEQ ID NO: 94970 - protein, 57 aa, Gossypium hirsutum
  Clone ID: LIB3148-022-Q1-K1-H2.pep
VARSRKFNTFIAQSALHATHGPGEVESMTSMRNCVFDGEVLELTTSLATTGINTRSV

SEQ ID NO: 94971 - protein, 58 aa, Gossypium hirsutum
  Clone ID: LIB3148-022-Q1-K1-H7.pep
NSNSIFDTRHGESSEAFRRVRGLCLEEEKERHAMDDISAICLFFHSSHHEVNLVTTSK

SEQ ID NO: 94972 - protein, 109 aa, Gossypium hirsutum
  unsure (1)..(109): unsure at all Xaa locations
  Clone ID: LIB3148-022-Q1-K1-H8.pep
PRVRGRVGATLGDFPAPMSLCAITSFIGLVITXIVQLFKNHGAEWGWPLVSVLDLVGYSLLGGAVSGACVSFNGWAMKKRGPVLVSMFCPIGTVITVVLSFITLGQTIS

SEQ ID NO: 94973 - protein, 62 aa, Gossypium hirsutum
  Clone ID: LIB3148-023-Q1-K1-B6.pep
HPCINNLITTLYGNQPINHAPKDLTNGSVSASILTTHLQNLFQQTSLQQGLIVNLLNSLQSA

SEQ ID NO: 94974 - protein, 37 aa, Gossypium hirsutum
  Clone ID: LIB3148-023-Q1-K1-B8.pep
RVMCSRCLSWVRPGFSSQKVVKTGASNLFLGGPIEEL

SEQ ID NO: 94975 - protein, 89 aa, Gossypium hirsutum
  Clone ID: LIB3148-023-Q1-K1-C10.pep
VYLGRAKGKYSTVVFAQTYLSRTIVPAGWTDWSYQGGPDHLFHAEYKCHGPGADTFGRVHWAKQLTDEEAKYWTSIEFINGNVWLPAWL

SEQ ID NO: 94976 - protein, 49 aa, Gossypium hirsutum
  unsure (1)..(49): unsure at all Xaa locations
  Clone ID: LIB3148-023-Q1-K1-C9.pep
LFFFFYFIIFYIYFLYFYFFFFFFFFFFFFFFFFXALNSFLIITCHSQR

SEQ ID NO: 94977 - protein, 49 aa, Gossypium hirsutum
  Clone ID: LIB3148-023-Q1-K1-D7.pep
APKRFVQYLLICGSKGFPSYAHKFKCNSQATSINISTFNIYIFTTISKC

SEQ ID NO: 94978 - protein, 41 aa, Gossypium hirsutum
  Clone ID: LIB3148-023-Q1-K1-D9.pep
RHITIFNFDVDRTTLYDLGSYTTRITSISLNAHEYSCCCIF

SEQ ID NO: 94979 - protein, 104 aa, Gossypium hirsutum
  unsure (1)..(104): unsure at all Xaa locations
  Clone ID: LIB3148-023-Q1-K1-E8.pep
AGMVHSMVITXDGALFYWVAVDSHLRCQQLYSLSEKTIVSISAGXKNWAVTATAINYFYMLNGKKSFYKTFVPTQILLLLLNIVSKMNHIFLLLLYFFFLFYFF

SEQ ID NO: 94980 - protein, 59 aa, Gossypium hirsutum
  unsure (1)..(59): unsure at all Xaa locations
  Clone ID: LIB3148-023-Q1-K1-E9.pep
PVLXXGYKNQKFTFVFFFSHKQKAETINLKEPSKVIVVFLFTRVFHLVLCFDFIFFFIP

SEQ ID NO: 94981 - protein, 60 aa, Gossypium hirsutum
  unsure (1)..(60): unsure at all Xaa locations
  Clone ID: LIB3148-023-Q1-K1-F10.pep
CSVPRLQYDIEVMVFVAXXMNYVTVCRVPLYVSHLMQTPLYEDVHIDELLCYYIMHLRIS

SEQ ID NO: 94982 - protein, 112 aa, Gossypium hirsutum
  Clone ID: LIB3148-023-Q1-K1-F5.pep
MESMEAKLPQNPPHKTHKLVLCAQICLRIVAISTAFAATWTIVNAKETVVVFGLQFDARYTYSSAFKFFAFANAIACGFTSLSLMFVLLIFRHGRFTPSNFFFLFLHDFVMM

SEQ ID NO: 94983 - protein, 59 aa, Gossypium hirsutum
  Clone ID: LIB3148-023-Q1-K1-F9.pep
SATHKVSFLFLFFCQSINHDRQSLAQEAHCQGNRIQKRCRHYQPRLWPGWINLPCLRGD

SEQ ID NO: 94984 - protein, 52 aa, Gossypium hirsutum
  Clone ID: LIB3148-023-Q1-K1-G12.pep
FLYFYFFLFFFFYFFFFFFFFFFFFFGFFFFFFFFFFFFFFFFFFFFLLIQQ

SEQ ID NO: 94985 - protein, 86 aa, Gossypium hirsutum
  Clone ID: LIB3148-023-Q1-K1-G4.pep
NIILDSAQRALRSWDIISAMIKSQVFGMIISIVSCAWGVTTMGGAKGVGESTTSAVVISLVGIFMADFALSYCFFQGAGDSLKNCV

SEQ ID NO: 94986 - protein, 58 aa, Gossypium hirsutum
  Clone ID: LIB3148-023-Q1-K1-G7.pep
SLIFFSVCTMCYQVDLEFEYLHLNYFHFQAEIFSDQFSCNKINSIIVFVIIELQESCT

SEQ ID NO: 94987 - protein, 84 aa, Gossypium hirsutum
  Clone ID: LIB3148-024-Q1-K1-A10.pep
NYLFKNYINNKILIIFFFFFKKQEHIIYNNMGKSKQKRNVNHPPNLNKLNMLGNLLKALNINDNQPHIVVNKEAKSIPNSKLNL

SEQ ID NO: 94988 - protein, 84 aa, Gossypium hirsutum
  unsure (1)..(84): unsure at all Xaa locations
  Clone ID: LIB3148-024-Q1-K1-A2.pep
NKPKAQQITQNLTHISQPNIQNKTQAHIIPRPNTNKTKKEMRNPASGKPAPQACLRAPHVAQKRVVGHTTSPRSGRVGPAXPFR

SEQ ID NO: 94989 - protein, 89 aa, Gossypium hirsutum
  Clone ID: LIB3148-024-Q1-K1-A4.pep
IPGRTKASAHASDESLIEQELETNCTEHPDPDLLIRTSGELRVSNFLLWQLAYTELFFAQELWPDFRKDEFVDALSSYQQRQRRYGGRH

SEQ ID NO: 94990 - protein, 68 aa, Gossypium hirsutum
  Clone ID: LIB3148-024-Q1-K1-A6.pep
CFRLLRFPFLVLSSLGPFCKSGLRIWSLGICICLGYSGIRPDLFFYYYFGLVFIKGCKWTIWTLFRFI

SEQ ID NO: 94991 - protein, 52 aa, Gossypium hirsutum
  Clone ID: LIB3148-024-Q1-K1-A9.pep
QRSSRTWSLWNRLVGIDRYIIQLVRVHFAFVHWQGNSMDASLAMVSYLKFGG

SEQ ID NO: 94992 - protein, 41 aa, Gossypium hirsutum
  Clone ID: LIB3148-024-Q1-K1-B1.pep
QRKLFSAKASPIKLCQLYLCDVPGLWTMDSLLARCRIKRIC

SEQ ID NO: 94993 - protein, 60 aa, Gossypium hirsutum
  Clone ID: LIB3148-024-Q1-K1-B11.pep
GAKDIEDNIILINRGAVVVDSRDLGSFSFFLNVGTIIMFRCYSLFFMQLREFLFFSFLTA

SEQ ID NO: 94994 - protein, 67 aa, Gossypium hirsutum
  unsure (1)..(67): unsure at all Xaa locations
  Clone ID: LIB3148-024-Q1-K1-B3.pep
HGGIRAVDLAYDLIQQGEMRQICKCCSEIFREFLIFWVLMCLCWRFLFAKVTRLSHRHYKCRERLXV

SEQ ID NO: 94995 - protein, 62 aa, Gossypium hirsutum
  Clone ID: LIB3148-024-Q1-K1-B4.pep
PSPKASGSLVLKHVPPQSMVAGTPAQVIGSIDEQDPSLTMNHDATKEFFKHLAVSFRDGRSK

SEQ ID NO: 94996 - protein, 36 aa, Gossypium hirsutum
  unsure (1)..(36): unsure at all Xaa locations
  Clone ID: LIB3148-024-Q1-K1-B5.pep
FVCKFVSYASLALKQKLLNFSKSFIQKIINEYFLSX

SEQ ID NO: 94997 - protein, 87 aa, Gossypium hirsutum
  Clone ID: LIB3148-024-Q1-K1-C7.pep
PTRPLVFEVYFQGYRQASWWERRTTVPPFSIGFLFLQGFLVKLLGRFNLCLEMNVVSEKTSGYLVDNGNARKALLVIWCLCYVGFII

SEQ ID NO: 94998 - protein, 49 aa, Gossypium hirsutum
  Clone ID: LIB3148-024-Q1-K1-C8.pep
YKRMQSLAQSAIVVTSGDIPTVASIGSGYSLPVDCVRKCLILSVLSKSD

SEQ ID NO: 94999 - protein, 79 aa, Gossypium hirsutum
  Clone ID: LIB3148-024-Q1-K1-C9.pep
YFFSINHRHFQPDTYFNTHLTTPRNLIEAYLLNIYKRFFQHNLQKIYCLSNHTYIFSQDTKKKTSKKIIKYLCFILESQ

SEQ ID NO: 95000 - protein, 48 aa, Gossypium hirsutum
  Clone ID: LIB3148-024-Q1-K1-D1.pep
NHSYVMFICNNHIKRFTFLGNDEPNLLSIRKCPFRLSRKLGLKTSGRV

SEQ ID NO: 95001 - protein, 73 aa, Gossypium hirsutum
  Clone ID: LIB3148-024-Q1-K1-D10.pep
KAGKEIKFGGPKKKLISWKQGEVNFDSLKRAPPFFFFKFFFFFFFFFFFFFFFFFFFFFFFFFSFFFFFFFFF

SEQ ID NO: 95002 - protein, 72 aa, Gossypium hirsutum
  unsure (1)..(72): unsure at all Xaa locations
  Clone ID: LIB3148-024-Q1-K1-D8.pep
LKIKILYFKYXXXAENTTCNINQTVWTEQLSYCNLYVRRQHLQSMQDERKKKPKKMHFMDENPQSVVIIKAL

SEQ ID NO: 95003 - protein, 75 aa, Gossypium hirsutum
  Clone ID: LIB3148-024-Q1-K1-E12.pep
AIYIIHMILSPIRDRIMNQIIQHSYKREEENFLTQNSSRNLIQKLYNLYHCGPFFRSFTATHTRNSKILLNLFLN

SEQ ID NO: 95004 - protein, 137 aa, Gossypium hirsutum
  unsure (1)..(137): unsure at all Xaa locations
  Clone ID: LIB3148-024-Q1-K1-E2.pep
IFIXAILQSIPTCAMSCFFLPKTLCIGLEGIIAKFWWQKNKSKKGIHWCAWKDVCLPKDLGGLGFRSLNKFNVALLAKQGWRLFNYPNSLLAQVLKAKYFPRTNFLNASLGNLPSLTSRSIWSTKKLMLDGLCWRVG

SEQ ID NO: 95005 - protein, 63 aa, Gossypium hirsutum
  unsure (1)..(63): unsure at all Xaa locations
  Clone ID: LIB3148-024-Q1-K1-E7.pep
HTQQVLNTLDWESHQMSICFSLYHSIITVFEQNCSPQNTERAERNKLTSTSLKKKKKKKKXXX

SEQ ID NO: 95006 - protein, 56 aa, Gossypium hirsutum
  Clone ID: LIB3148-024-Q1-K1-E9.pep
LWKFKHTIKHTLITSKTQFSSTIKQCYQIYSSRTSGSKRGRTRGRTSKRTRGRTRG

SEQ ID NO: 95007 - protein, 88 aa, Gossypium hirsutum
  Clone ID: LIB3148-024-Q1-K1-F11.pep
PTRPEANGGEEKKGKVEEQGNEQLVKDTYSSKTRLYTDQCTAFASNLNIRAIDEDLKQFFSDVGGVTAIRILHDKFTGKSRVSLSVSL

SEQ ID NO: 95008 - protein, 59 aa, Gossypium hirsutum
  Clone ID: LIB3148-024-Q1-K1-F2.pep
TTQLTYTYILPYNFFIFQPKLNLLPFYLHTNYFKNPFLPQLNTTYTKSPFPNFPNFQKS

SEQ ID NO: 95009 - protein, 65 aa, Gossypium hirsutum
  Clone ID: LIB3148-024-Q1-K1-G10.pep
SFYIVRPFFFFFFFFFFFFFFKASTKGNFKIQGPLGSPCHPPPTKAPQLRDSLTLLIIKTRFFSK

SEQ ID NO: 95010 - protein, 56 aa, Gossypium hirsutum
  Clone ID: LIB3148-024-Q1-K1-G5.pep
IISIFSNVFQAASTALGFHHLETELYGCYHPHKVALTIGDEKCIKHCILQAINKAS

SEQ ID NO: 95011 - protein, 142 aa, Gossypium hirsutum
  Clone ID: LIB3148-024-Q1-K1-G6.pep
RTRPPTRPPTRSPTRPEIAEWKTAPPLSSDVEIGSYLFDFLFAAQDASTSLLLWVVTLLDSHLDVLRRVREEVSRIWSPESDTLISAEQLREMKYTQTVAREVIRYQPPAALVPHIAMKDFPLTESYTIPKGTIVFPSVYES

SEQ ID NO: 95012 - protein, 81 aa, Gossypium hirsutum
  Clone ID: LIB3148-024-Q1-K1-G7.pep
CISRVKKKKKKKKKKKKKKKKKKKKKKKKKKKKKKKKKKKKKKKKKKKKKKKKKKGGAPLKEPKLITPALQIKTFFFGPPK

SEQ ID NO: 95013 - protein, 55 aa, Gossypium hirsutum
  Clone ID: LIB3148-024-Q1-K1-H5.pep
LGPEWNGRTDPSEIGVLVGKGGFYGNVFRMTPPRCFTKEDADFLVDAMDYTMGKM

SEQ ID NO: 95014 - protein, 46 aa, Gossypium hirsutum
  unsure (1)..(46): unsure at all Xaa locations
  Clone ID: LIB3148-024-Q1-K1-H6.pep
XGEFSVRSAYKLLQNSLLDSRSYLLQAESKKFTANYGVYSFPQKLQ

SEQ ID NO: 95015 - protein, 35 aa, Gossypium hirsutum
  Clone ID: LIB3148-025-Q1-K1-A1.pep
KYQDPSFLAFTKNTLTVYEKSVIVQRKATPFPGSR

SEQ ID NO: 95016 - protein, 62 aa, Gossypium hirsutum
  Clone ID: LIB3148-025-Q1-K1-A7.pep
QTPNVLPKNHNPFIPQVTFFTLSLFKFLIFLIIYFPFFFFFFFFFFYLPFIFFFFFKKFFFF

SEQ ID NO: 95017 - protein, 47 aa, Gossypium hirsutum
  Clone ID: LIB3148-025-Q1-K1-B1.pep
TVLCLVWSHSQIDDLWLWRMSDSSTITTSFVLVGFFFLIFFPSHHIL

SEQ ID NO: 95018 - protein, 77 aa, Gossypium hirsutum
  Clone ID: LIB3148-025-Q1-K1-B8.pep
LDIISSPLLSLYSPAERLISTQPFPKSDRDQRSKAHRRCERDITPVMKTRRRATWYVGANVEQGARVWRRRSRLRRK

SEQ ID NO: 95019 - protein, 64 aa, Gossypium hirsutum
  Clone ID: LIB3148-025-Q1-K1-C12.pep
PNKKLLKKKKKKKKKKKKKKKKKRGAGCDPPVLPRVRPLLPPWHGGAQTFYLASKSNHKFNVGY

SEQ ID NO: 95020 - protein, 43 aa, Gossypium hirsutum
  Clone ID: LIB3148-025-Q1-K1-C7.pep
WVNNLIYITLKNKGFERELRNNMTQILQVSIISWGGGCGLKVD

SEQ ID NO: 95021 - protein, 54 aa, Gossypium hirsutum
  Clone ID: LIB3148-025-Q1-K1-D9.pep
WNLMMHGTNFPCRFLSNFFFFTFPFNQAPLYTNQSNIERVFCNLLDSDSNEEEK

SEQ ID NO: 95022 - protein, 72 aa, Gossypium hirsutum
  Clone ID: LIB3148-025-Q1-K1-E11.pep
GTSDSSGGEDGESTTLCHFKSRSPSTLSPSSLFAFIFFPPPPLSQFLLLYHSSIHQLNKIPMRSSTTTVHLK

SEQ ID NO: 95023 - protein, 46 aa, Gossypium hirsutum
  Clone ID: LIB3148-025-Q1-K1-E2.pep
SVLMPGEETPTFIAHPTPALLPCPPDRVLRPLHQQSQSIGVPSSLS

SEQ ID NO: 95024 - protein, 69 aa, Gossypium hirsutum
  Clone ID: LIB3148-025-Q1-K1-E6.pep
NPVNVECIQDSTMSLSSSKVSATAHTKATITKKDIIKRKLMRWGFQPLLTHLIKIIMQQSNDIISISGL

SEQ ID NO: 95025 - protein, 70 aa, Gossypium hirsutum
  Clone ID: LIB3148-025-Q1-K1-E9.pep
SWIKKKKKKKKKKKKKKKKKKKKKKKKKKKKKKKKKKKKKKKKKKKKKKKRGAHLKEPNFTTASSGKKTF

SEQ ID NO: 95026 - protein, 60 aa, Gossypium hirsutum
  unsure (1)..(60): unsure at all Xaa locations
  Clone ID: LIB3148-025-Q1-K1-F1.pep
METEIRLVKFGMADVWWTLLGTAIPAVIAGQVFRLRKKHAXEQRLKSARGREMCSDDIFI

SEQ ID NO: 95027 - protein, 110 aa, Gossypium hirsutum
  Clone ID: LIB3148-025-Q1-K1-F2.pep
GGTPPLSRPCKCSVRQGKRALSQSLKAWLRKCFPWQSNLVSSPLLFFSGRGFIKSFFFEIKGLFTKFIFPACPRLVSFVSFVFFFLFLIFFFKFPPFFFFFFLNNFFFFF

SEQ ID NO: 95028 - protein, 83 aa, Gossypium hirsutum
  Clone ID: LIB3148-025-Q1-K1-F5.pep
LSWNITTFSSQRQLSEDLHLYIHIYKYMFLYLIRSNIWHLPRSTSSFPIIHLMHFPICKYIFKRSFVKFVIVPKKKYINFSCS

SEQ ID NO: 95029 - protein, 52 aa, Gossypium hirsutum
  Clone ID: LIB3148-025-Q1-K1-F6.pep
MCYKQIPTDLGFIPLRVCPFCQSSLDSAFSLSRVIDPQYQNLRLYTSKPGSP

SEQ ID NO: 95030 - protein, 108 aa, Gossypium hirsutum
  Clone ID: LIB3148-025-Q1-K1-G1.pep
VEELEPFKNHQNMLAGLDYVVALKSDVFVYTYDGNMAKAVQGHRRFENFKKTINPDRMNFVKLVDDYDEGNISWKKFSSKVKKLHKDRDGSPYYRESGEFPKLEESFY

SEQ ID NO: 95031 - protein, 103 aa, Gossypium hirsutum
  Clone ID: LIB3148-025-Q1-K1-G8.pep
TFLTHTSEVALSDEQLAAMEKLKMKHKAQDEKERLERERLKEGVDESEATNWGDNIIYVSSGELRGASIPEPLTSRKETGGALWDIFRREDVPKLEAYLSGRV

SEQ ID NO: 95032 - protein, 84 aa, Gossypium hirsutum
  Clone ID: LIB3148-025-Q1-K1-H11.pep
PRVRKDIVYWIYNKLKTKETLVEAVDPKISMASKEDAIKVLRIAVHCTAKIPALRPSMRKVVQMLEEAEPCKLTDIIVHEKGEK

SEQ ID NO: 95033 - protein, 60 aa, Gossypium hirsutum
  unsure (1)..(60): unsure at all Xaa locations
  Clone ID: LIB3148-025-Q1-K1-H9.pep
KRPPHFFLFYFFFFFFFFFFFFFFFFFFFFFFFFFFFFFFFFFFFFFFFFFXPTKISLHL

SEQ ID NO: 95034 - protein, 78 aa, Gossypium hirsutum
  Clone ID: LIB3148-026-Q1-K1-A7.pep
ASGILEVFPAVFLSKAAYVIHGRVSGHSGHQIQALAIMELREVIPHGMCMTTIILWRIMDGPLTEVCNRVHLQCLGKN

SEQ ID NO: 95035 - protein, 52 aa, Gossypium hirsutum
  Clone ID: LIB3148-026-Q1-K1-B9.pep
AYFEFYIGFYHGFNKCFKSCLRSISLTISIVHFLVQNMMQPITECLTECKSE

SEQ ID NO: 95036 - protein, 34 aa, Gossypium hirsutum
  Clone ID: LIB3148-026-Q1-K1-C2.pep
LEIHLNMPIVVLKVDTSIYRYKQITQLTSFEIPF

SEQ ID NO: 95037 - protein, 66 aa, Gossypium hirsutum
  Clone ID: LIB3148-026-Q1-K1-C6.pep
IFNNFITGLKLDNTKLTKVIYAYKSFTVNKNKNKKTNSFHKHYNNNQRIKRKSFHTKLKEIKKSEF

SEQ ID NO: 95038 - protein, 94 aa, Gossypium hirsutum
  unsure (1)..(94): unsure at all Xaa locations
  Clone ID: LIB3148-026-Q1-K1-E12.pep
IGRDYRVQGTIIPLGQWVPKVAADAYVAPKFVLAXQVTVNDGASVWDGCVLWGDLNKNNRGFCSILQERCVIHAPWFSTAWFLAETSIWRILVL

SEQ ID NO: 95039 - protein, 73 aa, Gossypium hirsutum
  Clone ID: LIB3148-026-Q1-K1-E2.pep
FTLTNEPIGVSWSEVLDAQKSSGWHSSTSAEMDEDKWPSDASVNRYEAGSDMQVPAPLATWCMAAVNTTWRAC

SEQ ID NO: 95040 - protein, 51 aa, Gossypium hirsutum
  Clone ID: LIB3148-026-Q1-K1-E6.pep
VRPRVRPRVRKIFFKKKKENKKKKKNIKKKRAPNKKKKKLINTSIQQTWPS

SEQ ID NO: 95041 - protein, 42 aa, Gossypium hirsutum
  Clone ID: LIB3148-026-Q1-K1-F1.pep
YKVQKKLPIGYIYARGKYPSHLYSTGFVVFNQIVIKTGNSHL

SEQ ID NO: 95042 - protein, 134 aa, Gossypium hirsutum
  Clone ID: LIB3148-026-Q1-K1-F2.pep
HASGGFFINRDRIPGYWIWFHYLSLVKYPYEAVLQNEFENPAKCFVRGIQIFDNSPLGAVPPAMKVRLLQSLSNTLGMRITSSTCMTTGLDILKQEGITDLSKWNCLLITVAWGFLFRILFYFSLLLGSKNKRS

SEQ ID NO: 95043 - protein, 48 aa, Gossypium hirsutum
  Clone ID: LIB3148-026-Q1-K1-F6.pep
LLFVCVPISFIQSSIRGLHSAMVCWGIALMVNYERAVTYSELLLPLNE

SEQ ID NO: 95044 - protein, 75 aa, Gossypium hirsutum
  Clone ID: LIB3148-026-Q1-K1-F8.pep
PTRPHELFGCDDFIKQEMEKNCRASSGSKSDGSGRRMKEVACPICTVHLQVQVPSSGSETIECGVCQHPFLVSAH

SEQ ID NO: 95045 - protein, 50 aa, Gossypium hirsutum
  Clone ID: LIB3148-026-Q1-K1-G1.pep
KLPPERHAQQHPLYRIRLSKWHLNGFAKTPSTGQSYNGLNLTNNPIPLCS

SEQ ID NO: 95046 - protein, 125 aa, Gossypium hirsutum
  Clone ID: LIB3148-026-Q1-K1-G11.pep
TADFISTWHFSKARRSTLPSPPDPIDLSMLAETSVAFPLAILTNLTMKESLAPISSGKSFLRVSEQSLVLLTLGQISLTMSEYLVAFSKGKKERKIKKDRATATFLVMMGFIIFTSSYGFFPDAW

SEQ ID NO: 95047 - protein, 76 aa, Gossypium hirsutum
  Clone ID: LIB3148-026-Q1-K1-G5.pep
QMSSEPRYTISIYTLLVRTKVVKLKRVYSATLIFVLKLVSILYMLGSWLLALCIQVLVAYFYCDIMPIFLYKHSIL

SEQ ID NO: 95048 - protein, 110 aa, Gossypium hirsutum
  unsure (1)..(110): unsure at all Xaa locations
  Clone ID: LIB3148-026-Q1-K1-H1.pep
ELLTKIDTQSVMELEKEPKIVPNCYASMVTMIATIPTAVETVSEYPPLXRSVVRDIRHNMRVSVINSVVKNDPTDAPATASAAKNNCEIIGEIIVSIFISALVTYLDNGL

SEQ ID NO: 95049 - protein, 32 aa, Gossypium hirsutum
  Clone ID: LIB3148-026-Q1-K1-H12.pep
DEELDTLINGTIAGGGVIPHSHKSLINKSSKE

SEQ ID NO: 95050 - protein, 62 aa, Gossypium hirsutum
  Clone ID: LIB3148-026-Q1-K1-H3.pep
KKNYTYKINTYKKKKIKNFNLIIKIQNYFRAPPFKNPKFTSPSIQRIISFLGPPKSISLPPF

SEQ ID NO: 95051 - protein, 86 aa, Gossypium hirsutum
  unsure (1)..(86): unsure at all Xaa locations
  Clone ID: LIB3148-026-Q1-K1-H5.pep
NIRPPFICIFFIFLFFYFFFXFFLLLFFFFFXFFYFFWGYKFXCFIDQMDDAPTKYIIQXIYNLQKLIRFKAGPNYWRDCEHSQFR

SEQ ID NO: 95052 - protein, 57 aa, Gossypium hirsutum
  Clone ID: LIB3148-027-Q1-K1-A2.pep
PLTLNPHTFGSIIRFKNQGPRPGNLIGSTGIKLLLCSTMLKGSGPIYIYVYNEGGNA

SEQ ID NO: 95053 - protein, 34 aa, Gossypium hirsutum
  Clone ID: LIB3148-027-Q1-K1-A8.pep
PRVRVENLKRPKRVVQCGRCHLLGHSQKKCTMPI

SEQ ID NO: 95054 - protein, 49 aa, Gossypium hirsutum
  Clone ID: LIB3148-027-Q1-K1-A9.pep
LRQVCVGVGTQFDEVGVKLGSAGMGDWSLFIKLANPTSVKRKVRGCSHS

SEQ ID NO: 95055 - protein, 39 aa, Gossypium hirsutum
  Clone ID: LIB3148-027-Q1-K1-B1.pep
LLLKYVGWWLLKLLWFMHYAPGICTLYIFNLRNSVLLLF

SEQ ID NO: 95056 - protein, 107 aa, Gossypium hirsutum
  unsure (1)..(107): unsure at all Xaa locations
  Clone ID: LIB3148-027-Q1-K1-B11.pep
YTLRFCIVYVYLTFLLFFIVFFFFHKFFVLVTLYFFFLFFFLLFLFFYYLYLFCIYFLFYIFFLIFXFFLFFFSLSYLFICFFFFYFLFYYIFYNYLLYFYNILFFF

SEQ ID NO: 95057 - protein, 63 aa, Gossypium hirsutum
  Clone ID: LIB3148-027-Q1-K1-B12.pep
ASHNGDHNDNNSDSLQRFLSSLQTYVSVFIHISPNSKHFNRTGSLKLIPDGVLYNFSSPASVI

SEQ ID NO: 95058 - protein, 63 aa, Gossypium hirsutum
  Clone ID: LIB3148-027-Q1-K1-B2.pep
SSDASRISRAVALMNYCPVIGLTIMGAEVELFCHRSLIPNCILFHKCDDLKLFIPIAISFSSS

SEQ ID NO: 95059 - protein, 54 aa, Gossypium hirsutum
  unsure (1)..(54): unsure at all Xaa locations
  Clone ID: LIB3148-027-Q1-K1-B3.pep
CMRAENYSFYNMVLQYDPSVFLLLCWLFYCGPPLXXXTRXYXNVTKCGIHQRGR

SEQ ID NO: 95060 - protein, 111 aa, Gossypium hirsutum
  Clone ID: LIB3148-027-Q1-K1-B8.pep
RPRVRIAKFLACDWARDNMGVNIVTPGVIKTPHTLPYFEGNKELLETTMSRTPLARFGKPEEVSAMVAFLCLPAASYVTGQLICVDGGMTVNGIYFPKQIRKHHEPCYRIK

SEQ ID NO: 95061 - protein, 43 aa, Gossypium hirsutum
  Clone ID: LIB3148-027-Q1-K1-C1.pep
IFFFFFFFFFFLLKQLLYNLGNHALSYVMSRKYFIIGIQSYTM

SEQ ID NO: 95062 - protein, 101 aa, Gossypium hirsutum
  Clone ID: LIB3148-027-Q1-K1-C11.pep
DISSFGLLGQISLNFNLSDLAADFSPSSRFFLSICMGTCICPVAHIFCVHPCLHCESVLDIILDLANVGGLLCVPYLKYFLQVINKDFAPVPLVYSFMKIT

SEQ ID NO: 95063 - protein, 98 aa, Gossypium hirsutum
  unsure (1)..(98): unsure at all Xaa locations
  Clone ID: LIB3148-027-Q1-K1-C6.pep
SKEDDVRKYVYTYRRTFTAKXAGKKVSKAPKIQRLVTPLTLQRKRGRIAEKKKRIAKAKSEAAEYHKLLATRLKEQLERRIEKLAKRRSKLSSAAAKP

SEQ ID NO: 95064 - protein, 72 aa, Gossypium hirsutum
  unsure (1)..(72): unsure at all Xaa locations
  Clone ID: LIB3148-027-Q1-K1-C9.pep
ASFYPSHNPIFIFPKINFICGPVHMHMXTPXLTSAVKKYMGLXSRXHFHHIARPSKRATWNRNNTLSLRLYR

SEQ ID NO: 95065 - protein, 86 aa, Gossypium hirsutum
  unsure (1)..(86): unsure at all Xaa locations
  Clone ID: LIB3148-027-Q1-K1-D12.pep
LKYFYLFIESSFFFLLIFRNVILFYFLXFKYYFNKILIXYFFIIIIIYIIILFFIIYLYFYIIYNYFLIILIYILFYSLYLLIFNF

SEQ ID NO: 95066 - protein, 39 aa, Gossypium hirsutum
  Clone ID: LIB3148-027-Q1-K1-E11.pep
ALCHHCRYNLDCRVRILLSNTSFVVFNAVESSLPLSLVF

SEQ ID NO: 95067 - protein, 121 aa, Gossypium hirsutum
  Clone ID: LIB3148-027-Q1-K1-E3.pep
LSLFLIFFPISFLLILQLESLRNLVTFVNFFHFFMKRMELRRCKEFSRAKWRRRRRRWTGDSGDRGSRSVRTKVKKLQRLIPGAKGLKPDWLFLKTADYILQLRLQVNILQALSKIYGPSH

SEQ ID NO: 95068 - protein, 61 aa, Gossypium hirsutum
  Clone ID: LIB3148-027-Q1-K1-E6.pep
SMKNSFPHTIHAYECTNTRNERGCRDLYTKEWLLIILIYCSDTSFFSKYSCLHTGTRISRS

SEQ ID NO: 95069 - protein, 78 aa, Gossypium hirsutum
  Clone ID: LIB3148-027-Q1-K1-F12.pep
PDSNSTFQVASVNFTAKAERTRIAFYSVYYNTRTDDMSSLCGPVVDDVRVWYSWASRNEVQVLLGLGLSFWAYLLVLV

SEQ ID NO: 95070 - protein, 39 aa, Gossypium hirsutum
  Clone ID: LIB3148-027-Q1-K1-F5.pep
DKNGAAIEAIKQWRILTPNTNYNVVKITAANLHIQISEK

SEQ ID NO: 95071 - protein, 86 aa, Gossypium hirsutum
  Clone ID: LIB3148-027-Q1-K1-F6.pep
YTHFSLLLQMVLNAIGMHLSYLILFLLLTLTLKTTLHYFHYIPFHLKSSHMKLSRSIGDMDVGEFIVPVPYVKQVKELERRKEELE

SEQ ID NO: 95072 - protein, 128 aa, Gossypium hirsutum
  unsure (1)..(128): unsure at all Xaa locations
  Clone ID: LIB3148-027-Q1-K1-F9.pep
LGRLPTILQSLQTLEIYYCKRLVVSISCFPLLRKIWVEGCEELVDEGSLSVQKVTSFKSLCVSNISNFNISAERIMLRFANSERFNVSGWKELGSLSQIXLRLVGHRFISIADCPQLVSLETEEERLQ

SEQ ID NO: 95073 - protein, 73 aa, Gossypium hirsutum
  unsure (1)..(73): unsure at all Xaa locations
  Clone ID: LIB3148-027-Q1-K1-G1.pep
RPXKTKCELRCNISHMHHKPRDCGTNAPSSGYLAHNKTSPRKWCPWVNSFLKAHYLSCEGLQIQAQISSEKTN

SEQ ID NO: 95074 - protein, 48 aa, Gossypium hirsutum
  Clone ID: LIB3148-027-Q1-K1-G11.pep
GFMCLQGGICLSSMGRPVSCERAVAWKVVNDEENAHCICFTFINWSFV

SEQ ID NO: 95075 - protein, 46 aa, Gossypium hirsutum
  Clone ID: LIB3148-027-Q1-K1-H2.pep
PTRPLIFLVPLYDKFFVPGARKITGHESGISPLQRIGSGLFSLNLF

SEQ ID NO: 95076 - protein, 44 aa, Gossypium hirsutum
  Clone ID: LIB3148-027-Q1-K1-H5.pep
DHQCKDNLYFFDKLVIVTDVTPSNQSIISFSITERKLIEIGRVG

SEQ ID NO: 95077 - protein, 29 aa, Gossypium hirsutum
  Clone ID: LIB3148-027-Q1-K1-H9.pep
GWPSFPSHLHIETINNISYIALLQEQTQK

SEQ ID NO: 95078 - protein, 74 aa, Gossypium hirsutum
  Clone ID: LIB3148-028-Q1-K1-A1.pep
LILQSSNFNDFVNGSFIDSLPSTTKEMTLISSAAYLSLPLDASAFLYINILCLRSHGFNKYQYETVFFFPCFVC

SEQ ID NO: 95079 - protein, 62 aa, Gossypium hirsutum
  unsure (1)..(62): unsure at all Xaa locations
  Clone ID: LIB3148-028-Q1-K1-A12.pep
EFKYLYXSMFXTLPSVXAYFKFNLXYVITIXFIQFFXGIFXLNIIXXYLYIKIVGFKLYLIE

SEQ ID NO: 95080 - protein, 41 aa, Gossypium hirsutum
  Clone ID: LIB3148-028-Q1-K1-A2.pep
TGIEWPDRPMRFKCSDPRTCSEVVKHYDYQIYAVDFRQFLL

SEQ ID NO: 95081 - protein, 35 aa, Gossypium hirsutum
  Clone ID: LIB3148-028-Q1-K1-A5.pep
AARLLVCLYIYMHRYRYIKNPGINTTHKKRAPLAI

SEQ ID NO: 95082 - protein, 45 aa, Gossypium hirsutum
  Clone ID: LIB3148-028-Q1-K1-A6.pep
NNICVYTFFSLPENQWQRYQKKGHNSTILYLNITHYKSTAMMRPK

SEQ ID NO: 95083 - protein, 65 aa, Gossypium hirsutum
  Clone ID: LIB3148-028-Q1-K1-A9.pep
PTRPKTSPHLWIEKTLLLLWEDYYACMYMMRLQSAYESFTGYMKYTDCFQKKKKKKKKKKKKRGG

SEQ ID NO: 95084 - protein, 46 aa, Gossypium hirsutum
  Clone ID: LIB3148-028-Q1-K1-B6.pep
YANKPSNHFQITISSFKYKYDHRLNLGTCHILKKNYTNIAKSRISG

SEQ ID NO: 95085 - protein, 52 aa, Gossypium hirsutum
  Clone ID: LIB3148-028-Q1-K1-B7.pep
PPTTRVDTFATRRHGAAPCSQPSITVYAESNSHCMKLHPIICICVWYKIASD

SEQ ID NO: 95086 - protein, 56 aa, Gossypium hirsutum
  Clone ID: LIB3148-028-Q1-K1-B8.pep
NKKIGTSLINLLQAEEIVRFPYDRYSSLIYTILFFYTPAPAVFLVVTKVFTANNDD

SEQ ID NO: 95087 - protein, 86 aa, Gossypium hirsutum
  unsure (1)..(86): unsure at all Xaa locations
  Clone ID: LIB3148-028-Q1-K1-B9.pep
NLILLKGPPPIFIFFVFLFXXXFFFLYFXXFFFFFFFFFFFFFFFFFFFFFFFXIKYTILINNLVVGQICLVRANKKQNKKNQKIL

SEQ ID NO: 95088 - protein, 115 aa, Gossypium hirsutum
  Clone ID: LIB3148-028-Q1-K1-C10.pep
RLNTGLELLNMSIEVEQRLRGVSLPFIILQGEDDKVTDKTVSQQLYDVASNSDKTLKLYPGMWHGLLYGETPENTEIVFSDIIDWLNQKFELRNSRLERELKHQNDEIFISKDIF

SEQ ID NO: 95089 - protein, 47 aa, Gossypium hirsutum
  unsure (1)..(47): unsure at all Xaa locations
  Clone ID: LIB3148-028-Q1-K1-C11.pep
ARVCDLLMIYPKFGGHILEAXSIRMXACGTTVXVECXSMFXPEHRFL

SEQ ID NO: 95090 - protein, 58 aa, Gossypium hirsutum
  Clone ID: LIB3148-028-Q1-K1-C4.pep
AYYNRIFSIRCLFYCLFLRCFLLSLLRVSFALQVSEGWWYGRRSPVVEAVVACGGWLR

SEQ ID NO: 95091 - protein, 66 aa, Gossypium hirsutum
  Clone ID: LIB3148-028-Q1-K1-D1.pep
KRFISREVSEKKPPIFLICGPLLFFFFFFFFFFFFFFFFFFFFFFFFFFFFFFFFFFFFFFLKFET

SEQ ID NO: 95092 - protein, 72 aa, Gossypium hirsutum
  Clone ID: LIB3148-028-Q1-K1-D2.pep
YKITLAWEELHTAQAKISVKIKKKIVVTCMENPFLTLPHNFYRLDAEHIGKVQNSSSQKHSNHLLYSYQIFR

SEQ ID NO: 95093 - protein, 85 aa, Gossypium hirsutum
  Clone ID: LIB3148-028-Q1-K1-D4.pep
IYVDNAAYRSFIYKKFNVSPVDMESAAVALICMQQRVPFIIIRALSDLAGGGSAESNEIDTFISLASNNSVNVVVEFIKRLVSDH

SEQ ID NO: 95094 - protein, 59 aa, Gossypium hirsutum
  Clone ID: LIB3148-028-Q1-K1-E11.pep
KIEQSCISRTKKKKKKKTKKGIICICISDSTFLILTIDYNRNLNLKIVLEQVYKYNHLF

SEQ ID NO: 95095 - protein, 80 aa, Gossypium hirsutum
  Clone ID: LIB3148-028-Q1-K1-E2.pep
IARIHASSINTSTQLAPPPNPPPAPAPPPPPRPPPAPNPNPAPPPIPPPNPPPCPPPLPAPAPPPNPAPPPKPPPNLGRR

SEQ ID NO: 95096 - protein, 98 aa, Gossypium hirsutum
  Clone ID: LIB3148-028-Q1-K1-E3.pep
VPTRFIIHGLICSFFFFCLLLLLLLLLFVFRSTLYVRSGRFVCFAKKKKKKKKKKKKKKKKKKKKKKKKKKKKKKKKKKKKKKKKKKKKKKKKKGGPF

SEQ ID NO: 95097 - protein, 86 aa, Gossypium hirsutum
  unsure (1)..(86): unsure at all Xaa locations
  Clone ID: LIB3148-028-Q1-K1-E5.pep
NLSSPTTKLYLGKTTKERLGRKHVNASFCSFFFGXLFFFFFFFFFFFFFFFFLVNRITLYLLGLILKSQSAFIKGRNINHKYPAGL

SEQ ID NO: 95098 - protein, 73 aa, Gossypium hirsutum
  Clone ID: LIB3148-028-Q1-K1-E7.pep
MKLRTDVLALIKQEELERAYNVAKLAIHILEAQVTRKVQFATDSNSMGLAAKPLVRLKCHQMLQGKEMMQRNL

SEQ ID NO: 95099 - protein, 52 aa, Gossypium hirsutum
  Clone ID: LIB3148-028-Q1-K1-E9.pep
SRATELTSSQVKNSLLVLIQHNCVQAFTLDQTGEHGDGASFGSPLNPTSKSD

SEQ ID NO: 95100 - protein, 40 aa, Gossypium hirsutum
  Clone ID: LIB3148-028-Q1-K1-F2.pep
LLINFFNRDYLFLKYLIPHACMPGPIVICLELDILKTFLS

SEQ ID NO: 95101 - protein, 61 aa, Gossypium hirsutum
  Clone ID: LIB3148-028-Q1-K1-F3.pep
PTRPLLCEEVFACNSVGVESRTNRAWRLLAWIVYQACDSSAKCKGGGSGIDSGRPLRWLNM

SEQ ID NO: 95102 - protein, 50 aa, Gossypium hirsutum
  Clone ID: LIB3148-028-Q1-K1-F4.pep
CLSSITYCKPSTTLLALYIIIHFLSYRFIFSVQVVFQIFYRRKIPLVKII

SEQ ID NO: 95103 - protein, 31 aa, Gossypium hirsutum
  Clone ID: LIB3148-028-Q1-K1-F7.pep
NITLVLELKYSTRDSVKYCELSKNLCMIYIR

SEQ ID NO: 95104 - protein, 54 aa, Gossypium hirsutum
  Clone ID: LIB3148-028-Q1-K1-G2.pep
SKYSPIHNNIFYIIISKPQRGVKRGFSLYIYTGILQNMVSVPIPFFRDPQIISP

SEQ ID NO: 95105 - protein, 83 aa, Gossypium hirsutum
  Clone ID: LIB3148-028-Q1-K1-G7.pep
MYRNFTPLGIVISAVDSKKKKKKKKKKKKKKKKKKKKKKKKKKKKKKKKKKKKKKKKKKKNKKRGGPFKGSNFTSRGFQINSF

SEQ ID NO: 95106 - protein, 51 aa, Gossypium hirsutum
  Clone ID: LIB3148-028-Q1-K1-G9.pep
ISISLHEDNNLVLTILASVDHSSHVSHFYLKLNFGRLCNHSFKLYKEISIS

SEQ ID NO: 95107 - protein, 52 aa, Gossypium hirsutum
  Clone ID: LIB3148-028-Q1-K1-H11.pep
FFKSFLCLVIFPLTDMQSRSLFNYCYPKSEVKVLVMKKMTTGLMVEVLSEVP

SEQ ID NO: 95108 - protein, 95 aa, Gossypium hirsutum
  Clone ID: LIB3148-028-Q1-K1-H12.pep
KKKKKKKKGRKKKKKKKKKNKKTKTSYIKNPSFLYTSIQFNPSPPYKFHFLLLPPHFTSPPAFFPTPYLGNPCLSPTYSPCTPSPFPHLPYFQKA

SEQ ID NO: 95109 - protein, 119 aa, Gossypium hirsutum
  Clone ID: LIB3148-028-Q1-K1-H2.pep
RSPRVARVGTSFTRTDSVLPATTTASRESRLRRLVRRVNSTTTGLTRSDSLVQSPVGGENSQQRARGIRVEGAAPAGQIPDWSRSEKSTEIWRRSEAHMTEPMMVEEGRIRYEFGNNAG

SEQ ID NO: 95110 - protein, 78 aa, Gossypium hirsutum
  Clone ID: LIB3148-028-Q1-K1-H3.pep
RPKFFCPVFPTYYFFFGAPKLNSRARLFTTVARENPGVSQFYSLGKNSLFPRWGKKKKAHPLPLFKKVPHFFGQMAPP

SEQ ID NO: 95111 - protein, 69 aa, Gossypium hirsutum
  Clone ID: LIB3148-028-Q1-K1-H4.pep
STIIPSKTRIRSNFCKGDRAKNTRSEIYIIDFYLKKWIPVTNLSEHTLFWGLSQSFSLLESSLEGIKRN

SEQ ID NO: 95112 - protein, 80 aa, Gossypium hirsutum
  Clone ID: LIB3148-028-Q1-K1-H5.pep
KKYCWITTRFFKLEGMRNSVDAKRFLKERNNLFESQAVLYIFLFFFIVFFFLFFVFFIFYKFLALVFFFSPLIDMLKLSG

SEQ ID NO: 95113 - protein, 141 aa, Gossypium hirsutum
  Clone ID: LIB3148-028-Q1-K1-H9.pep
PRVRFSVKPSEATYVNALSCCANLEKQGGFYQGRQIHGYIFRNEGVMNVFMGTALIDFYGKRGHLEFAFRVFNQMLDREVCTWNAMISSLTCNGREKEALDLFEKMKEDGMCPNEVTFVAVLTACARTKRVEVGLQFFQSM

SEQ ID NO: 95114 - protein, 51 aa, Gossypium hirsutum
  Clone ID: LIB3148-029-Q1-K1-A1.pep
NLVALADFTTVEAEHEAVMICHLKVETSFAIGIYVSDSKVKFEAYTCHCCA

SEQ ID NO: 95115 - protein, 59 aa, Gossypium hirsutum
  unsure (1)..(59): unsure at all Xaa locations
  Clone ID: LIB3148-029-Q1-K1-A10.pep
SIRIRVLDWYCISTGIVLERIDLAPRVNDVIKAPLSRPXYALPVLSDGCLSNPNSILFY

SEQ ID NO: 95116 - protein, 103 aa, Gossypium hirsutum
  Clone ID: LIB3148-029-Q1-K1-A11.pep
HASGVPQSIESALEKAGLTASNIDWLLLHQANQRIIDAVATRLEFPPEKVISNLANYGNTSAASIPLALDEAVRSGKVKPGHTIAAAGFGASLTWGSAVIRWG

SEQ ID NO: 95117 - protein, 89 aa, Gossypium hirsutum
  Clone ID: LIB3148-029-Q1-K1-A7.pep
NSDPCNYLIQIEIKEFYRKLWGLQLPSKITVTIWRISWDFIPNLANLRYRRVIANDRCLRCCSWVEDSPYIFRQCPRMTIQFDAVFDNS

SEQ ID NO: 95118 - protein, 38 aa, Gossypium hirsutum
  Clone ID: LIB3148-029-Q1-K1-B1.pep
IQNTFSEDIVQKILQIPLAETAHNDFQAWKAELCGEFS

SEQ ID NO: 95119 - protein, 37 aa, Gossypium hirsutum
  Clone ID: LIB3148-029-Q1-K1-B4.pep
SKLSNNQPDKNDALIGSKTTKKKNKEGKKNKKTHRNR

SEQ ID NO: 95120 - protein, 66 aa, Gossypium hirsutum
  Clone ID: LIB3148-029-Q1-K1-B5.pep
VMERVREVGERLGYRVERGKRGVMGLGKGRVVVVVEVVEVAQVFVLVEVKVMDGGVEFEEWQWVDL

SEQ ID NO: 95121 - protein, 76 aa, Gossypium hirsutum
  Clone ID: LIB3148-029-Q1-K1-B6.pep
ITNFFSIIYQIIHSSQKSLSSLCLQSYKENTEHPYLKGFSLDQKQLNTFPILKYINTPSNLTGFLNICSINQCRPS

SEQ ID NO: 95122 - protein, 68 aa, Gossypium hirsutum
  Clone ID: LIB3148-029-Q1-K1-B9.pep
SLVVWILLKLFGPCFFVFKRSFSLSCPLSLLVNFICIFVIFFFIKLLNEQLCLLKRYGKKKLKPRTYI

SEQ ID NO: 95123 - protein, 50 aa, Gossypium hirsutum
  Clone ID: LIB3148-029-Q1-K1-C1.pep
KGPPLFFFFFFFFFFFFFFFFFFFFFFFFFFFFFFFFFFFIEVYKIKKKK

SEQ ID NO: 95124 - protein, 51 aa, Gossypium hirsutum
  Clone ID: LIB3148-029-Q1-K1-C3.pep
KKREGWKEAYKKGGPFKTDDRLFFFFFFYPFFFFFYFFFKKFFFFFFFFFF

SEQ ID NO: 95125 - protein, 82 aa, Gossypium hirsutum
  Clone ID: LIB3148-029-Q1-K1-C4.pep
GGIRQSLNQSRCFKIITKKKNNPRTKIRCQYRKTRSRGMEEFLMPKPFKFYARLSYFFYKTPLFFFFFFFLKKIFFLFFLIF

SEQ ID NO: 95126 - protein, 48 aa, Gossypium hirsutum
  Clone ID: LIB3148-029-Q1-K1-C5.pep
AINEGIEREMVSALDLEEECYEQTLNTKDRLEGLAAFAERRKPIYTGE

SEQ ID NO: 95127 - protein, 43 aa, Gossypium hirsutum
  Clone ID: LIB3148-029-Q1-K1-C6.pep
TRIRTCRVWFQNARITCSMFEGWCLIEVSTYKEWNFQTLAACV

SEQ ID NO: 95128 - protein, 42 aa, Gossypium hirsutum
  unsure (1)..(42): unsure at all Xaa locations
  Clone ID: LIB3148-029-Q1-K1-D10.pep
LKRPPLLTFHPFFLFFPLLFLSPKIWLFFHSSNYDPLFAFXX

SEQ ID NO: 95129 - protein, 63 aa, Gossypium hirsutum
  Clone ID: LIB3148-029-Q1-K1-D11.pep
LLTLLNYTNIWLFSYHLLKEHKKTSCKLGTIKREADEQYQALQISGYQGKDQKKKKKKGGARD

SEQ ID NO: 95130 - protein, 53 aa, Gossypium hirsutum
  unsure (1)..(53): unsure at all Xaa locations
  Clone ID: LIB3148-029-Q1-K1-D12.pep
NSKCKKNFFLNFKYVXXFFFGFFFFFFFFFFYFFFFFFFFFFFFFFFFEENSI

SEQ ID NO: 95131 - protein, 124 aa, Gossypium hirsutum
  Clone ID: LIB3148-029-Q1-K1-D5.pep
KKKGSRVTTITEQADSSAAAQEVGPELVAEPLNAKSKSFVGTHEYLAPEVISGQGHGSAVDWWTLGVFLYEMLYGRTPFKGENNEKTLINILKQPLSFPRISVKSGKEFEDMVKVQDLINKLVV

SEQ ID NO: 95132 - protein, 60 aa, Gossypium hirsutum
  Clone ID: LIB3148-029-Q1-K1-D7.pep
ISFDLVIYFLLFLVFYFLCLLFLFFFFFNKSNQLDFLKRLILKLFQFYNSLQNINYLKYM

SEQ ID NO: 95133 - protein, 96 aa, Gossypium hirsutum
  Clone ID: LIB3148-029-Q1-K1-E11.pep
PRVRAEATRRMLVRKRLSSKINYDALEKLFDDPVTEKPKKQRIESNSDEKGEKASKIGKEGDLEDEYNDNDDDGYGGIFYGDTEYEYEDNYDYDGY

SEQ ID NO: 95134 - protein, 145 aa, Gossypium hirsutum
  unsure (1)..(145): unsure at all Xaa locations
  Clone ID: LIB3148-029-Q1-K1-F1.pep
KISYFLRPLWESPPKSFHDIPHYYHENVSMEKLCKLHGWGIREFPRRVYDAVLFSNEVDILTIRWQELYPYITQFVLLESNSTFSGIPKPMVFASHRDQFXFVEPRLTYGTIGGRFKKGENPXIEEAMQRVALDQLLKIAGITDD

SEQ ID NO: 95135 - protein, 101 aa, Gossypium hirsutum
  Clone ID: LIB3148-029-Q1-K1-F9.pep
INIRGSQKKKLILRRNASVNFVLFFDTHQYIFFFFFFFFWEKEILLYIFLARKVNEICCYKGNWKRTFYKALKRTHLTHKIRTRENDQTRKRGRTSGRTRG

SEQ ID NO: 95136 - protein, 125 aa, Gossypium hirsutum
  Clone ID: LIB3148-029-Q1-K1-G11.pep
SGSCRLKRPATRPLTSHPRLKVFFRTISPRHYRNGDWNTGGTCNNTIPLTNGSEVLQDGSNDKVVESAVRGTKVKLLDITAISELRDEAHMSGYSIRPTQSVNDCLHWCLPGIPDTWNEILIAQI

SEQ ID NO: 95137 - protein, 55 aa, Gossypium hirsutum
  unsure (1)..(55): unsure at all Xaa locations
  Clone ID: LIB3148-029-Q1-K1-G12.pep
AFIDTLCRLNTCNEACQFHLEVKKKKLYXLAFPLCPKQHFPKICCYIHLARPRYH

SEQ ID NO: 95138 - protein, 85 aa, Gossypium hirsutum
  Clone ID: LIB3148-029-Q1-K1-G2.pep
MKLQSHFPPCKSTKAKKSGLLSKKTRKLSSLTGQKIGVGDRKPVTGKPKGPVIACVPIKLVFSRINEAVNGSARLTHRPLTSRNP

SEQ ID NO: 95139 - protein, 60 aa, Gossypium hirsutum
  Clone ID: LIB3148-029-Q1-K1-G3.pep
INFPLLRVHSLGSFNEPPFFFFLYFFFFFFFFFFFFFFFFYFFFFFFFFAATGLQFYLEL

SEQ ID NO: 95140 - protein, 104 aa, Gossypium hirsutum
  Clone ID: LIB3148-029-Q1-K1-G4.pep
PRVRLNGGAPLPSDELIDRRRFLSKTVRSVPVNIPLHQRSTIVFDYGGDLDEDREIVPPHVILERRIAAKTAFSVCTGNGRTLKGRDLSQVRNSILRLTGFLEV

SEQ ID NO: 95141 - protein, 53 aa, Gossypium hirsutum
  Clone ID: LIB3148-029-Q1-K1-H11.pep
SLKKWCFTIHWQKILTLNVSNKNLKKSFCILQQYKPFFLLKNRRHKSYFFYST

SEQ ID NO: 95142 - protein, 68 aa, Gossypium hirsutum
  unsure (1)..(68): unsure at all Xaa locations
  Clone ID: LIB3148-029-Q1-K1-H12.pep
SKGLSTLDPGLGSVIILYKSCLCIPASCNFEIRLVTARAPNILLASGKEAAISFCLNIAAFXLKWDMN

SEQ ID NO: 95143 - protein, 68 aa, Gossypium hirsutum
  Clone ID: LIB3148-029-Q1-K1-H3.pep
TNIHVFRRTTILISYKYILGRGHWSVAFPSQGSCISTSSGPHLGKMHASITSTHIFYMQLPPYIQNSD

SEQ ID NO: 95144 - protein, 37 aa, Gossypium hirsutum
  Clone ID: LIB3148-029-Q1-K1-H4.pep
LPRVWAPPILPRLSTMLRSPMTFFFEKIPFLIMKRSA

SEQ ID NO: 95145 - protein, 72 aa, Gossypium hirsutum
  Clone ID: LIB3148-029-Q1-K1-H8.pep
GIEFDPIESTTACKGIFGPGAAPKNPGKVFTDRKTVENFSAHGNNGRKFLLPAIWNPTTSTWWTITSRYFST

SEQ ID NO: 95146 - protein, 83 aa, Gossypium hirsutum
  unsure (1)..(83): unsure at all Xaa locations
  Clone ID: LIB3148-030-Q1-K1-A10.pep
PTRPIFLVAXSELALVERLIDRKTESEEELLVTIATAREEVKRVKRYDSVVDKAKGKLEEAVNLVGSIIDAEKAKVRQREPII

SEQ ID NO: 95147 - protein, 65 aa, Gossypium hirsutum
  Clone ID: LIB3148-030-Q1-K1-A11.pep
KGRPLLFFFYFFFFIFFFFFFLILFFFFYFFFFIIYLFFFFFFFFFFFFFFFSKQVNFTLLSDAW

SEQ ID NO: 95148 - protein, 51 aa, Gossypium hirsutum
  unsure (1)..(51): unsure at all Xaa locations
  Clone ID: LIB3148-030-Q1-K1-A4.pep
XXXXKKIAFAIKYFKKKSSLGFWVYWSNRKNLDIEQMLNKRTKIYYNPDAW

SEQ ID NO: 95149 - protein, 66 aa, Gossypium hirsutum
  Clone ID: LIB3148-030-Q1-K1-A5.pep
MNHKSNLKRQIPQQINLKKKKQIHVLDTVIYTRDSQWTYISFCINLKTTTLFFLLPSTNHTLRITT

SEQ ID NO: 95150 - protein, 51 aa, Gossypium hirsutum
  Clone ID: LIB3148-030-Q1-K1-B5.pep
IIFLLKDIGEDYKCCTWKVTGVAFPFFMRMSVELLTLYLAIHLRTPLNFFF

SEQ ID NO: 95151 - protein, 50 aa, Gossypium hirsutum
  Clone ID: LIB3148-030-Q1-K1-B6.pep
RKLDPLNGAPLFFLFCVIFVFFNFFFFFTFFFFFFFFFFIFFFFFFFFFF

SEQ ID NO: 95152 - protein, 50 aa, Gossypium hirsutum
  Clone ID: LIB3148-030-Q1-K1-C1.pep
SAIVQTRIYYWIGNSKILYEFAPIGFFSLSNRYIKLFYLVIGGSSLILYF

SEQ ID NO: 95153 - protein, 43 aa, Gossypium hirsutum
  Clone ID: LIB3148-030-Q1-K1-C10.pep
FNDLRLHMGCYTMKWNAVLIHQGPTRDGDRGIRRGGVLQAIQC

SEQ ID NO: 95154 - protein, 76 aa, Gossypium hirsutum
  Clone ID: LIB3148-030-Q1-K1-C2.pep
LEMARQAQMNSQHTQSLTEISWGNQIRTYVLNPYRLVKDLRTNYEVSDPDSVLEGDLDSFILSYLSASLDKGEGEQ

SEQ ID NO: 95155 - protein, 67 aa, Gossypium hirsutum
  Clone ID: LIB3148-030-Q1-K1-C6.pep
GVPFSNPGGELFGKANGVGLFGNTPTGRKGMSCQGIKLGNHRVFPGRKLLKAGPLIDVVSPQRKAIF

SEQ ID NO: 95156 - protein, 70 aa, Gossypium hirsutum
  Clone ID: LIB3148-030-Q1-K1-D10.pep
LSTHLSVSASLFLSPKTWQYLDYNNDDTPNAWLGERLRKAGDPPLGFGVGQVSNLISHPRVRGRVGERVG

SEQ ID NO: 95157 - protein, 56 aa, Gossypium hirsutum
  Clone ID: LIB3148-030-Q1-K1-D12.pep
HTLLTSPATANQVAENAKNPIQWKAKFAAAMVKMGQLDVLTGSEGEIRANCRVIKS

SEQ ID NO: 95158 - protein, 108 aa, Gossypium hirsutum
  Clone ID: LIB3148-030-Q1-K1-D7.pep
SSLEVAFSFFCLHKIVQWVQCDKCEAWQHQICALFNGRRNDGGQAEYTCPNCYITEVERGERKPLPQSAVLGAKDLPRTILSDHIEQRLFRRLKQERQERARVQGKSY

SEQ ID NO: 95159 - protein, 80 aa, Gossypium hirsutum
  Clone ID: LIB3148-030-Q1-K1-D8.pep
LNMGVSLSFKTLLRTLIVLGFIIIGTLQQEGQVKDLGKGKSTLVHQRLDLYYISRRRVSYGPDPIHNKRAGNSRRPPRQA

SEQ ID NO: 95160 - protein, 62 aa, Gossypium hirsutum
  Clone ID: LIB3148-030-Q1-K1-E10.pep
SGYSIHWQEFLHRRIASAPASPRIITSGRCRGCVEAAKFFNYCKVPTYPPPPPPLPPYIESM

SEQ ID NO: 95161 - protein, 56 aa, Gossypium hirsutum
  Clone ID: LIB3148-030-Q1-K1-F3.pep
KGPPLFFLGGFIFFFFFFFFFFFFFFFFFFFFFFFFFFFFFFFFFWILEFVFILNL

SEQ ID NO: 95162 - protein, 122 aa, Gossypium hirsutum
  unsure (1)..(122): unsure at all Xaa locations
  Clone ID: LIB3148-030-Q1-K1-F7.pep
PTRPAKYEKLVDTEATQLDEINSLKVMVADKDEKIRIHEQLCRELQKEANELKANLEKTKKEHDVKVSELEEKLKAKEKEVGKMINKVEEMANSMTXXKLRKXXLRSAPQLDDSPXTHRSRS

SEQ ID NO: 95163 - protein, 74 aa, Gossypium hirsutum
  Clone ID: LIB3148-030-Q1-K1-G11.pep
ATRSPTRPGHPFTGICISNATIELTKKPKKIQWNCTEIAGVSSDVTPKPCNLLKDLRSQNTCNVPEDDLPIVKF

SEQ ID NO: 95164 - protein, 135 aa, Gossypium hirsutum
  Clone ID: LIB3148-030-Q1-K1-G5.pep
KLDPNSSNKTDFVMPLLGDKKDPKPLGKPKKVSASPQKEKVSGNNPSLTSNPKSDKTMKENKAKKNNVGGGNNLNSANTVKRGYTNKDKEKKKTTKSNVIGNDSKSEIDDTCAGIASRCEDQNSLIACVKGFGTG

SEQ ID NO: 95165 - protein, 69 aa, Gossypium hirsutum
  Clone ID: LIB3148-030-Q1-K1-H10.pep
GLENENHHWTDLLKHDSTFRPPGISYLDGLSSSYCKHCLEFDIEAQSLTVYGMVADYSLARKSTQHDCN

SEQ ID NO: 95166 - protein, 58 aa, Gossypium hirsutum
  Clone ID: LIB3148-030-Q1-K1-H12.pep
YQLRQINQIYLSISSINLGLMNWCTIRLPFGIICPDIPLEASIPKFLGLFNLVQFITI

SEQ ID NO: 95167 - protein, 46 aa, Gossypium hirsutum
  Clone ID: LIB3148-030-Q1-K1-H3.pep
WSEALNKRLGTKGLDLSDILVEIEKRGSSFDQLLTVPEQDDWIYSD

SEQ ID NO: 95168 - protein, 62 aa, Gossypium hirsutum
  Clone ID: LIB3148-030-Q1-K1-H6.pep
LKRSCCLKKKKKEKKKKKKKKKKKKKKKKKKKKKKKKKKKKKKKKKKKKKKKKKKKKRGGPF

SEQ ID NO: 95169 - protein, 45 aa, Gossypium hirsutum
  Clone ID: LIB3148-030-Q1-K1-H9.pep
STFWPGNSHPPCSKRNRIVRPRKYLHSVLSAMILSSRHYKKWLWT

SEQ ID NO: 95170 - protein, 67 aa, Gossypium hirsutum
  Clone ID: LIB3148-031-Q1-K1-A1.pep
ICFQIVEQHVFYKQDVYASFKHHKVPVSTRTPKERSSKLSVIMAKHTRDSVDSTQQGIRECRGEGFF

SEQ ID NO: 95171 - protein, 41 aa, Gossypium hirsutum
  Clone ID: LIB3148-031-Q1-K1-A8.pep
LKPSPFFFFLIIHSASPILSKLLIKFIDLSFFKTGPNPNPN

SEQ ID NO: 95172 - protein, 51 aa, Gossypium hirsutum
  Clone ID: LIB3148-031-Q1-K1-B1.pep
FVFPSPVLSSSANRMFIRLLSIKRFQFQPAHRRTGFLKRFSNNGKTHPGFG

SEQ ID NO: 95173 - protein, 63 aa, Gossypium hirsutum
  Clone ID: LIB3148-031-Q1-K1-B10.pep
NWEALFCHVFLYLFIILLGKGKKGVSNPIFLLIFCIIFFWWVFIGCRFELLVNYMHRFVVHIK

SEQ ID NO: 95174 - protein, 67 aa, Gossypium hirsutum
  Clone ID: LIB3148-031-Q1-K1-B2.pep
TKSLIVTLIFASIFYVGGWIFLQRLSSGWQYPTLATIIGSVAIVVHIFIEFTKMPPPKIKATQICTQ

SEQ ID NO: 95175 - protein, 42 aa, Gossypium hirsutum
  Clone ID: LIB3148-031-Q1-K1-B7.pep
KVALSSQEILAYHRGRTYKRLGGGGLKGSKFLSRCLQRSIFF

SEQ ID NO: 95176 - protein, 41 aa, Gossypium hirsutum
  Clone ID: LIB3148-031-Q1-K1-C1.pep
LILIKISPVMMILYHESVLLFCRLKYNNGLLPIVIIIIMIS

SEQ ID NO: 95177 - protein, 45 aa, Gossypium hirsutum
  Clone ID: LIB3148-031-Q1-K1-C11.pep
IIVFINSTRRKIFLRGLTRSNAHPMKNPCLVAMKRPIHGCLPTRP

SEQ ID NO: 95178 - protein, 55 aa, Gossypium hirsutum
  Clone ID: LIB3148-031-Q1-K1-C3.pep
FNLPWKAANSPSAALLCSVYKSCKPSILAGAPKWGPNLAFPLISGLIRISLRGVC

SEQ ID NO: 95179 - protein, 53 aa, Gossypium hirsutum
  Clone ID: LIB3148-031-Q1-K1-C9.pep
STLSDPPWVTSRSYCHCSYMRLIVTEGHGIVIETALSYNQNCAVGRAAGQNAL

SEQ ID NO: 95180 - protein, 64 aa, Gossypium hirsutum
  Clone ID: LIB3148-031-Q1-K1-D11.pep
LDWKYDAVFIVKPIIFFFLQDCCNSQACFCIFHKKKKKKKQSRMMFGFCKKNNLTYICMQQHNS

SEQ ID NO: 95181 - protein, 97 aa, Gossypium hirsutum
  Clone ID: LIB3148-031-Q1-K1-D12.pep
HVLVFDYVPTNVIRYTQHNSEKAQQTGWGEDLTVYEHIFIFFCMLAIKKGHSDICKEQVFRIKKKRDFACHGTLNTAGVGVTPSVTPSIGRALTPGS

SEQ ID NO: 95182 - protein, 54 aa, Gossypium hirsutum
  Clone ID: LIB3148-031-Q1-K1-D6.pep
HETKMLRRTSLYSYAKPTFSHIHLCCPTPKLVNFGAAQKALLCGTAPLNVLNCY

SEQ ID NO: 95183 - protein, 66 aa, Gossypium hirsutum
  Clone ID: LIB3148-031-Q1-K1-D9.pep
SQVLIIINCPARINCIVQIYIYIYIHLSPGMSSTLNCLFSFLSALFRKPVVTKQGNETFLETCSGI

SEQ ID NO: 95184 - protein, 100 aa, Gossypium hirsutum
  unsure (1)..(100): unsure at all Xaa locations
  Clone ID: LIB3148-031-Q1-K1-E11.pep
KGPPPFIFFSIHNLIFFLLFFGIQNHLFFSILNEWSFTIFDGSFXTESSHTYTYVYVCIGGYIFSTILRSYYKPFLNQINILEYKVQFSTSSIASSIIMQ

SEQ ID NO: 95185 - protein, 111 aa, Gossypium hirsutum
  Clone ID: LIB3148-031-Q1-K1-E8.pep
IVIHTFSGILFKIDLAKGCEVNLIEVVGGSLAFGDGLDLISPTKLVVAWNPSGRLVESSDGWETVSVVAKFKGPIHRLSTAATENDGKVYLNHLVGMVYPQKTHALVEAAF

SEQ ID NO: 95186 - protein, 83 aa, Gossypium hirsutum
  Clone ID: LIB3148-031-Q1-K1-E9.pep
NFPKQDCDRFLLIKILNMKRKIHFSFVMQSHDFIIRHTHGKVALLFPDAGKACRRLACGNSFVPSSICSSPTAEFFFLRAEFT

SEQ ID NO: 95187 - protein, 50 aa, Gossypium hirsutum
  Clone ID: LIB3148-031-Q1-K1-F1.pep
FFLIFFFFFFFFFFLIIFFFFFFFFLKNDSFLNFRRNPIETTCSILHQHI

SEQ ID NO: 95188 - protein, 40 aa, Gossypium hirsutum
  Clone ID: LIB3148-031-Q1-K1-F11.pep
KERTLLEIIFTMEMEKERQEEDVISAKYYLLYIIAYVMYE

SEQ ID NO: 95189 - protein, 30 aa, Gossypium hirsutum
  Clone ID: LIB3148-031-Q1-K1-F2.pep
HMKNMTYFFIDEYVDNPFCPGPFNLFIYNK

SEQ ID NO: 95190 - protein, 78 aa, Gossypium hirsutum
  Clone ID: LIB3148-031-Q1-K1-F7.pep
IKSLFSKTASTMRRVAVPHRGRLCSSRPHPLGTGLVGTSSYIYYVLFIFIVLLGLKNEGQRQFYYNGKRAKSTKDGDK

SEQ ID NO: 95191 - protein, 54 aa, Gossypium hirsutum
  unsure (1)..(54): unsure at all Xaa locations
  Clone ID: LIB3148-031-Q1-K1-F9.pep
TDLIGLXSFHILILIDTSLLMLDVINPLICFGLKSIQVCYFYNVIINFSLKRTI

SEQ ID NO: 95192 - protein, 57 aa, Gossypium hirsutum
  Clone ID: LIB3148-031-Q1-K1-G4.pep
KVVEGEMEDAMENLNLMDEEEDAFQEDEGAVGRVNQLCLVGRCLTDSVVHFPSLRNT

SEQ ID NO: 95193 - protein, 66 aa, Gossypium hirsutum
  Clone ID: LIB3148-031-Q1-K1-G6.pep
IMVERVSCIGRGFFCLPVVARMLCVCMWDSSVSLVAVRVCFFFFSFFLFGCFVVFFQLQIYDIINK

SEQ ID NO: 95194 - protein, 129 aa, Gossypium hirsutum
  Clone ID: LIB3148-031-Q1-K1-H11.pep
AIFNKPLATSVAISSSDSGEAATSSVSTSAKAEVGPSTFSESSPTELLNFSTSVSTLDTKLGSVIILFKSCPCIPASCNFEIMLVIARAPNIPTASGDAASFSFCPTTYWIESTKANENATNKTFRTRG

SEQ ID NO: 95195 - protein, 30 aa, Gossypium hirsutum
  Clone ID: LIB3148-031-Q1-K1-H8.pep
FGLLKFNCYFSAPLFFLGYQQLLQTRQELN

SEQ ID NO: 95196 - protein, 62 aa, Gossypium hirsutum
  Clone ID: LIB3148-032-Q1-K1-A1.pep
TGFHFTCTKFGSNQIPGCWKKLTKFVLVGDKLNFSFLNRRKKIWLIYKKMGNNGKGLKWGVY

SEQ ID NO: 95197 - protein, 39 aa, Gossypium hirsutum
  Clone ID: LIB3148-032-Q1-K1-A10.pep
DVHTGTVYLYAGFSKPFRHVYENGACWSSIVLCLSPLNK

SEQ ID NO: 95198 - protein, 66 aa, Gossypium hirsutum
  Clone ID: LIB3148-032-Q1-K1-A11.pep
TKSHGRTHWARLPRVFNDNRERVKQAALNLYYTRDAAMYFQTFAKRRADNALFLQIMPELKRPRVS

SEQ ID NO: 95199 - protein, 72 aa, Gossypium hirsutum
  Clone ID: LIB3148-032-Q1-K1-A8.pep
GTDAISHGDTMLVESNYRGIRHHTGRSWGMFYILPADELSKPMHTLHTDDKTQDSFMVATYPVRCRELRSGE

SEQ ID NO: 95200 - protein, 98 aa, Gossypium hirsutum
  unsure (1)..(98): unsure at all Xaa locations
  Clone ID: LIB3148-032-Q1-K1-B10.pep
FGKGIGSGPFSFTPTGKKGFFCQTIYFGKPQVFPSTSFLIRGPVLLFWVPKRRXICFQKRARKILFFLKPPPFFFFFFPLSFRFIFFFYYSFSIFLFF

SEQ ID NO: 95201 - protein, 32 aa, Gossypium hirsutum
  Clone ID: LIB3148-032-Q1-K1-B11.pep
GRSLTYFSCFFMIHVLTEEFNVRHLDSNERPS

SEQ ID NO: 95202 - protein, 99 aa, Gossypium hirsutum
  Clone ID: LIB3148-032-Q1-K1-B3.pep
HASAHASGLLQLIPNLVYYENWTVIDGDHIELADETKIFLREKGHELRAKSSGAIVQFVVQALQKDIERGRKFGKDSYIFHGTLTAVSDPRKDGKPAAV

SEQ ID NO: 95203 - protein, 38 aa, Gossypium hirsutum
  Clone ID: LIB3148-032-Q1-K1-B4.pep
DRLLSHLSFCQRRGLNCDHNHEVLSCTNRGKCYKLSLC

SEQ ID NO: 95204 - protein, 36 aa, Gossypium hirsutum
  Clone ID: LIB3148-032-Q1-K1-B5.pep
ILCYPFSLVKKLYIINVHGSKQYPFFRLKFYIFEKN

SEQ ID NO: 95205 - protein, 61 aa, Gossypium hirsutum
  Clone ID: LIB3148-032-Q1-K1-C10.pep
RTRLEPNPPIQSNYLMPLYITMSSKGDRGWSKNEHKLCSLLQAKCGTVFFFLIIRLTQSMR

SEQ ID NO: 95206 - protein, 38 aa, Gossypium hirsutum
  Clone ID: LIB3148-032-Q1-K1-C2.pep
RTILFYFRIIFSLFLFLFLLIILKIIIFFHLIIKMVMI

SEQ ID NO: 95207 - protein, 63 aa, Gossypium hirsutum
  Clone ID: LIB3148-032-Q1-K1-C6.pep
LQSRHNHVEIFPPWVVKGNNRLTKDQVGLKIAKFLKNYHPGLVVRPFDTKNGQKPYFLTAHEP

SEQ ID NO: 95208 - protein, 68 aa, Gossypium hirsutum
  Clone ID: LIB3148-032-Q1-K1-C9.pep
FVTTWVALIQRLIQFEIVKFNKYVALNPNNIVLLTRMNSNIAPPGYHMLFVKYNGGPRRRSRWVGMLH

SEQ ID NO: 95209 - protein, 35 aa, Gossypium hirsutum
  Clone ID: LIB3148-032-Q1-K1-D10.pep
FDCKHVALTPSPNTISTQIHKPLARTAQTQKRTRG

SEQ ID NO: 95210 - protein, 51 aa, Gossypium hirsutum
  Clone ID: LIB3148-032-Q1-K1-D2.pep
TSQSVRCVLWQAVLVLHNYELPFFKLRSFSEMPPAVIRSVQTTMLWKYKLN

SEQ ID NO: 95211 - protein, 60 aa, Gossypium hirsutum
  Clone ID: LIB3148-032-Q1-K1-D5.pep
RFRLPVNVIITVWQIFHNLTPNKHNLSNTRLACPQCIRGVESLEHEVCHRHFALSFGTCR

SEQ ID NO: 95212 - protein, 98 aa, Gossypium hirsutum
  Clone ID: LIB3148-032-Q1-K1-D6.pep
LIPNSRYMYKCFLYNKPYIYFLFYLIFIFFSLPAINSQTPPPQSFSTFLMFFFFSFHSLSIQILPSQTKHCLPLNLPQCAHVYSTPPPNYNNNNNYHQ

SEQ ID NO: 95213 - protein, 114 aa, Gossypium hirsutum
  unsure (1)..(114): unsure at all Xaa locations
  Clone ID: LIB3148-032-Q1-K1-D9.pep
PTRSGTRGFGLEDCLEGIMCFETLNPTHKNTXSSMTRTTTXLLGSDYATTGVAHISVIFDIICHFVDPKPGATLSITPIDCTPQDSAIELALKIAKINPXRTXFFDDSVRNIQA

SEQ ID NO: 95214 - protein, 45 aa, Gossypium hirsutum
  Clone ID: LIB3148-032-Q1-K1-E10.pep
YLRDYYSIMLDYGLIILVMWKASQCTNVSVQKLVVLEIEVSEPRF

SEQ ID NO: 95215 - protein, 45 aa, Gossypium hirsutum
  Clone ID: LIB3148-032-Q1-K1-E3.pep
KILVSSSNYNAKKQSSKETKKHITTTNTTFSKPIIWSQAQMTTLA

SEQ ID NO: 95216 - protein, 32 aa, Gossypium hirsutum
  Clone ID: LIB3148-032-Q1-K1-E4.pep
TFHLICTSLPRICKGYSIFFIVTDTFCSSTST

SEQ ID NO: 95217 - protein, 41 aa, Gossypium hirsutum
  Clone ID: LIB3148-032-Q1-K1-E7.pep
FQKLDCTFKTENLKLEHGKREVLHMIVKSVTELRYGIHNVL

SEQ ID NO: 95218 - protein, 64 aa, Gossypium hirsutum
  Clone ID: LIB3148-032-Q1-K1-E8.pep
IFNLEHIRVLRTAIHQLAMQTEHNQLLFCHARLIIKTFVYMFVSLLNNHPYVVVEASKMKKEIS

SEQ ID NO: 95219 - protein, 45 aa, Gossypium hirsutum
  Clone ID: LIB3148-032-Q1-K1-F1.pep
RVGYCDCGIVQMWKAGSGFSIIWFQRLSFEAQIWIIYLVMLLAYI

SEQ ID NO: 95220 - protein, 78 aa, Gossypium hirsutum
  unsure (1)..(78): unsure at all Xaa locations
  Clone ID: LIB3148-032-Q1-K1-F10.pep
VVFRPCFKVISELPLVNHNRGYIGELDNVDDHRSVKIVVELNXRMNNCGVIMPRCDVXFNRVNXWTAKLLSFRQFGIH

SEQ ID NO: 95221 - protein, 79 aa, Gossypium hirsutum
  Clone ID: LIB3148-032-Q1-K1-F2.pep
IINLFDADSVVVQSKESETESSKYPTQKRSRRTWDELEPASSLSDTTTEEDIAFCLMTLSRGQWKSKVAQHDDIDDEEE

SEQ ID NO: 95222 - protein, 43 aa, Gossypium hirsutum
  Clone ID: LIB3148-032-Q1-K1-F3.pep
KKNLIFLQLTKTKGKSSFVQKPSPLLMLRKLNYLSVLLQPQYC

SEQ ID NO: 95223 - protein, 51 aa, Gossypium hirsutum
  Clone ID: LIB3148-032-Q1-K1-F6.pep
ASGAIAGHLLATSIAILGGAFLANYISEKLVGYLGGALFLVFAVATFFGVF

SEQ ID NO: 95224 - protein, 49 aa, Gossypium hirsutum
  Clone ID: LIB3148-032-Q1-K1-F7.pep
VFLATEKVSMRNTNHRPTKFLSPTINSVSSTSAIIGSLEQKLLISCSQG

SEQ ID NO: 95225 - protein, 28 aa, Gossypium hirsutum
  Clone ID: LIB3148-032-Q1-K1-F9.pep
VKIESKVTSTSSQIIDKFHPKLPGRVAV

SEQ ID NO: 95226 - protein, 48 aa, Gossypium hirsutum
  unsure (1)..(48): unsure at all Xaa locations
  Clone ID: LIB3148-032-Q1-K1-G11.pep
TVLELGDQRLPPMMKFLRGKXXDFRVDGGGCGHPLREASIERKKKILF

SEQ ID NO: 95227 - protein, 38 aa, Gossypium hirsutum
  Clone ID: LIB3148-032-Q1-K1-G5.pep
AGVIVWACRLLFPALGLGICSYLFSRWPGKIGLIRTRG

SEQ ID NO: 95228 - protein, 93 aa, Gossypium hirsutum
  unsure (1)..(93): unsure at all Xaa locations
  Clone ID: LIB3148-032-Q1-K1-G9.pep
FCLANSADSYLGNPTNTSGVFPNMXKFADTCEIPVDRITKKEDLXEAICKMFETSVPNFLDVIIPHQEHVLPIIPTGGTFKDVITEGDGRTKY

SEQ ID NO: 95229 - protein, 132 aa, Gossypium hirsutum
  Clone ID: LIB3148-032-Q1-K1-H10.pep
HASDDTESVPPIAILAGLHYAAITDIAWSYDARYLALSSQDGYCTLVEFEKEEQGVPIPLAEPKIMNVEGTSSIVQKPDDVVIEVNDPVTVDNRTVECAEKREGKQASPSLANTPIVNKPAKRRITPMAIDP

SEQ ID NO: 95230 - protein, 50 aa, Gossypium hirsutum
  Clone ID: LIB3148-032-Q1-K1-H11.pep
EVSSFLIQGWVLPVPHSTILTVFSTRLEIPMPTSVHDMIILSQLSQPRPG

SEQ ID NO: 95231 - protein, 39 aa, Gossypium hirsutum
  Clone ID: LIB3148-032-Q1-K1-H2.pep
DPHYNNPFVATFNCVLKKKKKKKKKKKKKKKRGKATYKN

SEQ ID NO: 95232 - protein, 119 aa, Gossypium hirsutum
  Clone ID: LIB3148-032-Q1-K1-H3.pep
MGICSSSQYTTKADNRLTWPPPTTTKIIYPDGNLQQLIQPIKASVVLSQNPSCFLCNSELMYVNSCLSQVPGDEQLQLDQIYFLMPLSMSQAPLSLEELCSLAIKAGAALSRLNDAYSH

SEQ ID NO: 95233 - protein, 65 aa, Gossypium hirsutum
  Clone ID: LIB3148-032-Q1-K1-H5.pep
KPNTRTLTLTLLINFSLPLDLLDECTNGSDNSTTPHITYIYVKAHPSLDQQWLILKIICCNFEKQ

SEQ ID NO: 95234 - protein, 83 aa, Gossypium hirsutum
  Clone ID: LIB3148-032-Q1-K1-H6.pep
VILGITPDSSNECGCNVLVYPRYVSYPMNACQSDPIQPLHIGQCYMCQHVLARTILDSFSQTSPASCHHDTVLYISYSIFFAS

SEQ ID NO: 95235 - protein, 72 aa, Gossypium hirsutum
  Clone ID: LIB3148-033-Q1-K1-A2.pep
MNLGGPKKKIFLAKKGKKKLEPLKRPPHLYLLFIFIYFFFFILFFYFIPPPFFFFFFFFNIKFFFYFFFFFF

SEQ ID NO: 95236 - protein, 52 aa, Gossypium hirsutum
  Clone ID: LIB3148-033-Q1-K1-A5.pep
DTNNYTLIFDLWLQGKYSLKGGRQLAGADNTCSSLQAKQRPIMSENLHMLDE

SEQ ID NO: 95237 - protein, 70 aa, Gossypium hirsutum
  Clone ID: LIB3148-033-Q1-K1-A6.pep
KWSEVYAFFSKKKKKKKKKKKKKKKKKKKKKKKKKKKKKKKKKKKKKKKIKKKTEDRKKNKKKKKKGGAG

SEQ ID NO: 95238 - protein, 37 aa, Gossypium hirsutum
  Clone ID: LIB3148-033-Q1-K1-B11.pep
HASGKVVWQGMTEEFTTSTNPIVRQFASGNLDGPIRY

SEQ ID NO: 95239 - protein, 73 aa, Gossypium hirsutum
  Clone ID: LIB3148-033-Q1-K1-B12.pep
FGTNKKKKKKKKKKKKKKKKKKKKKKKKKKKKKKKKKKKKKKKKKKKGGGRLKKSKLTSPGLQRKNFFLGQPK

SEQ ID NO: 95240 - protein, 55 aa, Gossypium hirsutum
  Clone ID: LIB3148-033-Q1-K1-B2.pep
ICLGGRMPSLYLFINPKTKNSLSFFHSPTPMLTYSLRHSLQLLWLCHLLLLYHYP

SEQ ID NO: 95241 - protein, 91 aa, Gossypium hirsutum
  unsure (1)..(91): unsure at all Xaa locations
  Clone ID: LIB3148-033-Q1-K1-B4.pep
XVHPPXYYXANXHXXSFFLXXYHXTSRPGYXXFXXSQFSQLPRIFXKEETPRTRSSXPSKAESPFYNQTHLVWGNXGRAWADGAWRRXRXI

SEQ ID NO: 95242 - protein, 43 aa, Gossypium hirsutum
  Clone ID: LIB3148-033-Q1-K1-B8.pep
RKVNPQYYLPTQGLIFFTFSHNTTKHHDFIIKHSMKTVKPNLK

SEQ ID NO: 95243 - protein, 46 aa, Gossypium hirsutum
  Clone ID: LIB3148-033-Q1-K1-C3.pep
SLPLQMKHYNVNLNTISYSLSLKVLLDLLPPTSIVCAIKFGAIKFI

SEQ ID NO: 95244 - protein, 32 aa, Gossypium hirsutum
  Clone ID: LIB3148-033-Q1-K1-C5.pep
KFSDIKSWYYKNLNLNNAYMYLIQQFISQFLK

SEQ ID NO: 95245 - protein, 65 aa, Gossypium hirsutum
  Clone ID: LIB3148-033-Q1-K1-C6.pep
NTYKLYLHLFFFNTKTLYLIFFTYFYLYSLKFLSNVLHYSILSFTLKLKHNYSMVSKKFNSLFIF

SEQ ID NO: 95246 - protein, 53 aa, Gossypium hirsutum
  Clone ID: LIB3148-033-Q1-K1-C7.pep
HLKYLPFFFHQNARIFFHKQNFSKTCLKRLFFILIFQRPFGVITFSGCLRIPL

SEQ ID NO: 95247 - protein, 64 aa, Gossypium hirsutum
  Clone ID: LIB3148-033-Q1-K1-D11.pep
LSMLTICFAENMFLYVDLYIATVTNPIKIISFSVFKKKKKKKKKKKKKKKIKKYKILKFLIFKK

SEQ ID NO: 95248 - protein, 59 aa, Gossypium hirsutum
  Clone ID: LIB3148-033-Q1-K1-D3.pep
CSIVYFAFINKQLLKCCLEYHIGYAVCHVNIRVIANDYGLAVRLENVSGDALLGLTPAF

SEQ ID NO: 95249 - protein, 65 aa, Gossypium hirsutum
  Clone ID: LIB3148-033-Q1-K1-D5.pep
HASGSVLLHPSSLSSSSDSPYLRPWYLNANKVMAQHEDDGITRQPGFKYSPVEGGDMLYKRGIIT

SEQ ID NO: 95250 - protein, 54 aa, Gossypium hirsutum
  Clone ID: LIB3148-033-Q1-K1-D9.pep
MNSSLGKFVCDYKINVFKMLVFSLLLFFFCFFFGGGTQLKLGIHILVLIQIVHQ

SEQ ID NO: 95251 - protein, 76 aa, Gossypium hirsutum
  Clone ID: LIB3148-033-Q1-K1-E1.pep
DKMKHTRAGHVSVSNIHIQIRVHKANRQRTLPVYNLRSKLSNALQNFMQTAIRECQGSVALAATFFRCSFPTTRIW

SEQ ID NO: 95252 - protein, 73 aa, Gossypium hirsutum
  Clone ID: LIB3148-033-Q1-K1-E10.pep
CVESNNMPYNAIQCFMSVIFVESNYFWVQVWKGPLFNTKKFILVLYILESNILIPVPLVYSKKVKKMLVVLLK

SEQ ID NO: 95253 - protein, 55 aa, Gossypium hirsutum
  Clone ID: LIB3148-033-Q1-K1-E12.pep
SMDVITINGLSSFDRYHVYVYALSTSPSSRLHFYVGRCFIPEYFGVFLNSFLNLF

SEQ ID NO: 95254 - protein, 72 aa, Gossypium hirsutum
  unsure (1)..(72): unsure at all Xaa locations
  Clone ID: LIB3148-033-Q1-K1-E2.pep
EKGFFYFPFFKNFSVAFPLNETFAIIKTSPVSHFFFFFFFFFFFFFFFFFFFFFFFFFFFFFXFASKISNKI

SEQ ID NO: 95255 - protein, 101 aa, Gossypium hirsutum
  unsure (1)..(101): unsure at all Xaa locations
  Clone ID: LIB3148-033-Q1-K1-E3.pep
XTRKFQLSEYNSNTTNNYKKFYKLLWDILPSKIKIHMWRLIKDYVPHFNNLIKRSLRVVNVCPLRKEAPEDPDHLLWFCGALRQLWQSLNLSIDLSRNTLM

SEQ ID NO: 95256 - protein, 64 aa, Gossypium hirsutum
  Clone ID: LIB3148-033-Q1-K1-E5.pep
FLIGEMLSKDLYQKKKKKKKKKKKKKKKKKKKKKKKKKKKKKIKKKKKKKKYKKKKKKKWGGSL

SEQ ID NO: 95257 - protein, 86 aa, Gossypium hirsutum
  Clone ID: LIB3148-033-Q1-K1-E6.pep
FGAPKKKFFSCQHGEQKFGPLKRPPPFFYFFIYFYFFMFYVFYFFVFLIFFYFCFFFFFFFFFFFFFFFFSEICYICLMHMLSLRF

SEQ ID NO: 95258 - protein, 48 aa, Gossypium hirsutum
  Clone ID: LIB3148-033-Q1-K1-E7.pep
IATEISRLLYLHFLGVPYHFPIVSVKRPMVVDHLLQNKAFLRFLLISF

SEQ ID NO: 95259 - protein, 86 aa, Gossypium hirsutum
  Clone ID: LIB3148-033-Q1-K1-E8.pep
ASLVALRNNSFRMFSNEDVTIGAWMLAMNVNHEDNRALCEPECTQSSVAVWDIPKCSGLCNPEKKMLELHQIDACSKSPTLPSDDD

SEQ ID NO: 95260 - protein, 142 aa, Gossypium hirsutum
  Clone ID: LIB3148-033-Q1-K1-F1.pep
PTRPEIRIENSNSQPESSGSMSELQISGRKYNSNRAEERLSFSICQKLVQLMHGNIWVVQNPQGSAQSMALVIRFQLRPSISITINELGESSDQPCSNSLFKGLQVLLADDDDLNRAVTRKLLEKLGCSVSAVTSGFECLTS

SEQ ID NO: 95261 - protein, 78 aa, Gossypium hirsutum
  Clone ID: LIB3148-033-Q1-K1-F10.pep
TQFLARAHIYSKIKHKTAQNTSQVTNGPTLIGPISENLGFSYVSRSSSGHQQPPRTMHDHRLAHGSPHICALCSHVSM

SEQ ID NO: 95262 - protein, 67 aa, Gossypium hirsutum
  unsure (1)..(67): unsure at all Xaa locations
  Clone ID: LIB3148-033-Q1-K1-F12.pep
MNCGMSFARCFNNDSPYPNELTGAILGGPNKQDMFRNLXFEXTYTNPSPYLNSLAAAGFANLTCPKY

SEQ ID NO: 95263 - protein, 76 aa, Gossypium hirsutum
  Clone ID: LIB3148-033-Q1-K1-F5.pep
LDDPCDPKENFRILGPDACVAHTPRLALPVWPTWPDPKPIRLCGTTRPIWPSLCGLNGLTHTVTWSCLEHSHTFVK

SEQ ID NO: 95264 - protein, 65 aa, Gossypium hirsutum
  Clone ID: LIB3148-033-Q1-K1-F7.pep
QANKNKAHILNKKKKKKKKKKKKKKKKKKKKKRKGDKKKKRKKTRAKKSKKTTKKPPKKKTRGRR

SEQ ID NO: 95265 - protein, 85 aa, Gossypium hirsutum
  Clone ID: LIB3148-033-Q1-K1-G1.pep
MNEHHSCLSLKKKKKKKKKKKKKKKKKKKKKKKKKKKKKKKKKKKKKKKKKKKKKKKKKKKKKKGGALLKDQIYFPCCWKFFFFF

SEQ ID NO: 95266 - protein, 66 aa, Gossypium hirsutum
  Clone ID: LIB3148-033-Q1-K1-G3.pep
DGVGESIGSPSGEVGGPVKVILVEVPKKQSCRMGTHALEFFTTPMAVFFFFFLFIIFFFCFFFFLN

SEQ ID NO: 95267 - protein, 52 aa, Gossypium hirsutum
  Clone ID: LIB3148-033-Q1-K1-G5.pep
HKKKKKKMKKKKKKKEKKKKKKKKKKKRMNKIKKKKKIKKKKKNKKKKKKEK

SEQ ID NO: 95268 - protein, 78 aa, Gossypium hirsutum
  Clone ID: LIB3148-033-Q1-K1-G6.pep
KGGLAININIEQKMKSQNLCCKDGLPAMNLCLILEILLSSAVTKSASFQSQGRRGCKDLCCPNSLLLLKYSSTTGLVI

SEQ ID NO: 95269 - protein, 49 aa, Gossypium hirsutum
  Clone ID: LIB3148-033-Q1-K1-G8.pep
IRQSYNPDLWKNRIKTEIKITSKRNLNSNESKIKLRKNYPLNYFEQSYL

SEQ ID NO: 95270 - protein, 49 aa, Gossypium hirsutum
  Clone ID: LIB3148-033-Q1-K1-G9.pep
GLFETFPVAEIVVNQPLFNYKKPQFCCLVVSPESVFGFVTKEMKIIVLN

SEQ ID NO: 95271 - protein, 42 aa, Gossypium hirsutum
  Clone ID: LIB3148-033-Q1-K1-H4.pep
HACEKKKNKRFICISNKKWLPRPATFMGRSYLSSQYADKLLI

SEQ ID NO: 95272 - protein, 84 aa, Gossypium hirsutum
  unsure (1)..(84): unsure at all Xaa locations
  Clone ID: LIB3148-033-Q1-K1-H6.pep
DTFCSEFDLWHKRLGHPCTKILFQVLRSCNISLNKFTPPRVCVPRQLGKSHKLVFDNSKTVYTSPFQLVVSDLWXQSPISSKGY

SEQ ID NO: 95273 - protein, 50 aa, Gossypium hirsutum
  Clone ID: LIB3148-033-Q1-K1-H7.pep
NGPPLFFFFFFFFIFFFFFFFFFFFFFFFFFFFFFFFFFFFFFLAKYILF

SEQ ID NO: 95274 - protein, 79 aa, Gossypium hirsutum
  Clone ID: LIB3148-034-Q1-K1-A2.pep
ATRSATRSSTLPDFWSIKTMWRFCFIVMKLASLFLGCPFKHSPFIPFSHLSIRVNCAIYINIFRYCLLMSVKKKKNSSE

SEQ ID NO: 95275 - protein, 58 aa, Gossypium hirsutum
  Clone ID: LIB3148-034-Q1-K1-A4.pep
KKRRLLTRAFEVPTLLSRYSKFNSPAIGFPSSHSGKPLFLPFLMGFHLISLSSSAVIP

SEQ ID NO: 95276 - protein, 41 aa, Gossypium hirsutum
  Clone ID: LIB3148-034-Q1-K1-A6.pep
FFFLSLTKTLSSIENKVHVKVVLSTIISNQQKRSKADELIP

SEQ ID NO: 95277 - protein, 48 aa, Gossypium hirsutum
  Clone ID: LIB3148-034-Q1-K1-A8.pep
FVDMLAREWNVGYLVVGLVVRNVKNALPLCCMLSFLNKNFVCKGVFSS

SEQ ID NO: 95278 - protein, 55 aa, Gossypium hirsutum
  Clone ID: LIB3148-034-Q1-K1-B10.pep
NFFIYKKQKTLYRFVLILTKAPTHILNKISLTFIFHSDTKRNFAPLYFPIQGTKL

SEQ ID NO: 95279 - protein, 69 aa, Gossypium hirsutum
  Clone ID: LIB3148-034-Q1-K1-B4.pep
NMIFYPLCFSYNCRLVMKCPSINVIQYVEANHLSFRYCVLPHPTPLPPGPEKKLYLIRSKLGFYLVWTI

SEQ ID NO: 95280 - protein, 61 aa, Gossypium hirsutum
  unsure (1)..(61): unsure at all Xaa locations
  Clone ID: LIB3148-034-Q1-K1-B9.pep
XKNKTKILWGLTLFSEIHYLGIQNCGYCLSLFKILSNLVCLTLLLFYNLQLPHHNFFFRSP

SEQ ID NO: 95281 - protein, 36 aa, Gossypium hirsutum
  Clone ID: LIB3148-034-Q1-K1-C7.pep
PRVRPRVRRNLSIMMRRRSTEILYMNQNEKCLLIQG

SEQ ID NO: 95282 - protein, 88 aa, Gossypium hirsutum
  Clone ID: LIB3148-034-Q1-K1-D1.pep
FNFCHPKKRILRCIDVYINFDFLKRPPLFFFFFFFFFFFFFFFFFFFFFFFFFFFFFFFFFFFFFFKQTPISHILYDNNVRTRGRTRG

SEQ ID NO: 95283 - protein, 57 aa, Gossypium hirsutum
  unsure (1)..(57): unsure at all Xaa locations
  Clone ID: LIB3148-034-Q1-K1-D10.pep
KNYPIVLEKRFKIWHLKAHTHSKFLNRSXRLEVSHVCSHKISNQINSPSVVRGKIIA

SEQ ID NO: 95284 - protein, 74 aa, Gossypium hirsutum
  unsure (1)..(74): unsure at all Xaa locations
  Clone ID: LIB3148-034-Q1-K1-D5.pep
SQTSQDDNKCRXHSVSGTVWLPSRTYDVSTSYQSPSSMXSLISSIGTHEPSYVFPLTLNHQRAVHSPMGHLTII

SEQ ID NO: 95285 - protein, 47 aa, Gossypium hirsutum
  Clone ID: LIB3148-034-Q1-K1-E11.pep
PPTPTHSYTYPFLQSINYTSLQTSICIVLFKKHPLNNQQKKPITILN

SEQ ID NO: 95286 - protein, 62 aa, Gossypium hirsutum
  Clone ID: LIB3148-034-Q1-K1-E7.pep
RTRPAKGKLADIDGMKTKMILWIKVSCITSDGSKLYVSAGITKTRNRDAYEVNRDGIGVDKF

SEQ ID NO: 95287 - protein, 135 aa, Gossypium hirsutum
  Clone ID: LIB3148-034-Q1-K1-E9.pep
REIIVEENQDMSGEIGGGEGPDGIHKRDNVVQPKRKVGRGRPKGSKNKPKSSDEKLGLSSEQQTFPVNIIGGYFVDKGFGLVRTAHVREEDMVMPVEAVTCGDAIVKKIDGRRWNRGRPKSSKNKRKRPYVLMKN

SEQ ID NO: 95288 - protein, 51 aa, Gossypium hirsutum
  Clone ID: LIB3148-034-Q1-K1-F8.pep
SQSSGWKLPGTIFNFGDNIEELSSWIEGLVSLALKRRPPLSLVFIYYVKLF

SEQ ID NO: 95289 - protein, 120 aa, Gossypium hirsutum
  Clone ID: LIB3148-034-Q1-K1-G1.pep
HASAGNKADTNNGTSCSSAGRISRRWVFLKDFLRSKSEGTNNNNNNSKLWSTISFSPAKEKKPGSNKTNGVVHESKNKRPSKTKAVNGIGKKRVPPSPHDLHYTAYKTQAEEMRKKTFCL

SEQ ID NO: 95290 - protein, 80 aa, Gossypium hirsutum
  Clone ID: LIB3148-034-Q1-K1-G7.pep
MKMGSLKKEEEMGQIGEESKEAIVYVNGVRKVLPDGLAHLTLLEYLRGNNIFVPFFLVFLESIIGEKNRKAFFFPLFFFL

SEQ ID NO: 95291 - protein, 52 aa, Gossypium hirsutum
  Clone ID: LIB3148-034-Q1-K1-G8.pep
IASEFTMDLPYRTWVDDLYNRISLWSTSLLLLVANILADVDTWANFILLHIN

SEQ ID NO: 95292 - protein, 65 aa, Gossypium hirsutum
  Clone ID: LIB3148-034-Q1-K1-H12.pep
GGSNSQLRWAIFWKGERGGPFFFFPNWQKGKFFQSHLIWVPPGFSKPHVFKTRASNLILGAPKKK

SEQ ID NO: 95293 - protein, 48 aa, Gossypium hirsutum
  unsure (1)..(48): unsure at all Xaa locations
  Clone ID: LIB3148-035-Q1-K1-A10.pep
ISSISEQTEMCHSXPAGFYGCGAQQLQPAPDRVSFWPYLKEKFYRTRG

SEQ ID NO: 95294 - protein, 57 aa, Gossypium hirsutum
  Clone ID: LIB3148-035-Q1-K1-A11.pep
HNTKVLWGLTVFSVLHYLNMQNCGYFYHYSRFCPILFVELCISYKFGTGNYKLVFNF

SEQ ID NO: 95295 - protein, 106 aa, Gossypium hirsutum
  unsure (1)..(106): unsure at all Xaa locations
  Clone ID: LIB3148-035-Q1-K1-A12.pep
VGFLKRAGLFFFFFGWRFFVGKIKQYIPWLFYRQKSLFISQLCASMKTPFXFEMNGIRVQFKFNVATNTNLMDNLFNESLRLLGKVWVPLAEFLVLPLTLVSFGRV

SEQ ID NO: 95296 - protein, 69 aa, Gossypium hirsutum
  Clone ID: LIB3148-035-Q1-K1-A4.pep
ATSPCPSKIYPFLFISGAAVFSKPAVNTHFFLHPSLSSIKKKAKKKRKIFTKDKKVCYFSKVYRTHLGF

SEQ ID NO: 95297 - protein, 102 aa, Gossypium hirsutum
  Clone ID: LIB3148-035-Q1-K1-A6.pep
LHTHIAFHIIIFNPAQFTIWIGTSYHVSIELPAKIRNPFRILSFPRRMFTSLYPCFASSYITHLLRLMHIHFRMYIRHVDRPLFSSFEVNHAQASSISFGIV

SEQ ID NO: 95298 - protein, 129 aa, Gossypium hirsutum
  unsure (1)..(129): unsure at all Xaa locations
  Clone ID: LIB3148-035-Q1-K1-A7.pep
HAFGVWKKNFLKNGGKWKNRDVLDMNTPPWWYRKGFKQQWNYVNDERRMTKDNDRMTAYRTAQTTWAKXVDSHVDTNRTKVICHGITASHYNGXEWNEPRERKCCKEMEPFNESSAYTVGLPEAAYVDK

SEQ ID NO: 95299 - protein, 49 aa, Gossypium hirsutum
  Clone ID: LIB3148-035-Q1-K1-A8.pep
LTFGKVKRFGLFHYSVSCPKGHFFQVYYFWSTHVFPFLAVFLHRPFNFF

SEQ ID NO: 95300 - protein, 121 aa, Gossypium hirsutum
  Clone ID: LIB3148-035-Q1-K1-A9.pep
MAGGGGKTADAQFFHLLSNLLHQVEALTNQEEVELRSKIEALGLEVTKVPSMSTHRLDELEIARELDKLSAKLDGVDEMISSAMAADPQVRSLLSGTADLWMPVITANADERHNLAASIST

SEQ ID NO: 95301 - protein, 58 aa, Gossypium hirsutum
  Clone ID: LIB3148-035-Q1-K1-B3.pep
SPKTAPPFELVFSLNVLFEPPQHILLSFCIYFIYLLYYFFLFFFFNNLPAITGFISFY

SEQ ID NO: 95302 - protein, 100 aa, Gossypium hirsutum
  unsure (1)..(100): unsure at all Xaa locations
  Clone ID: LIB3148-035-Q1-K1-B5.pep
HKYKTQCAALHHGDCENTVVTQINSVAQHIPFARCRDIEKRRTESAFQHMRTLYVECDTRCVAAYNAPGVGGTRTVTATLLRALXPALLAFFPFFIATCA

SEQ ID NO: 95303 - protein, 57 aa, Gossypium hirsutum
  Clone ID: LIB3148-035-Q1-K1-C11.pep
KKKKKQSGRVNLKKTPNKPPAPFIDPTQLTPSSPLNNSAPRSHNFNLPALIIHHYIF

SEQ ID NO: 95304 - protein, 37 aa, Gossypium hirsutum
  Clone ID: LIB3148-035-Q1-K1-C12.pep
PTRPVGNLVGIKLLLSTIRRTSLQRGSTMANFHINSS

SEQ ID NO: 95305 - protein, 104 aa, Gossypium hirsutum
  Clone ID: LIB3148-035-Q1-K1-C5.pep
NQLIAQFIKPSFLSLNWHPQIPHIIKPRFYTRESGKYLYLRKYDQFPKHPLLECKVAMWRITRISWPTHEYDSRRLTAQTTAKLHQHNATTNETIETSPKRGKF

SEQ ID NO: 95306 - protein, 92 aa, Gossypium hirsutum
  Clone ID: LIB3148-035-Q1-K1-C6.pep
EQFNCISLAIFNLHYRFPNLLYPLVPTGRSSHFRKIFRFFFFLVFFFLFFFFFFYNREMLFFLQLLISVYQITKYWWNRGLRGNFVNGVIYI

SEQ ID NO: 95307 - protein, 38 aa, Gossypium hirsutum
  Clone ID: LIB3148-035-Q1-K1-C8.pep
KKKKKRPNSIRSSMVLLALDQGIINEMINRMDNSSSER

SEQ ID NO: 95308 - protein, 60 aa, Gossypium hirsutum
  Clone ID: LIB3148-035-Q1-K1-E12.pep
SKYLISITPLSKVIVQVHNISPHKSINFLIHAFFLILSLFYLFYLFSFFFFIYFFFFFFF

SEQ ID NO: 95309 - protein, 75 aa, Gossypium hirsutum
  Clone ID: LIB3148-035-Q1-K1-E4.pep
PTDLCTPTLDSSSPQYPSPLKTPLKFLAIPSKTISTILFPSPDLPSAPAVANGFLGKVNTQPSKLRLPTFIKPFF

SEQ ID NO: 95310 - protein, 85 aa, Gossypium hirsutum
  unsure (1)..(85): unsure at all Xaa locations
  Clone ID: LIB3148-035-Q1-K1-F11.pep
NYGCRFPYSPCILICGMMYATFIPTKIQKKKKKKKKKKKKKKKKKKKKXKXXGAADLKEPGVPSQASNLITLLYKKINLIYWPPI

SEQ ID NO: 95311 - protein, 101 aa, Gossypium hirsutum
  Clone ID: LIB3148-035-Q1-K1-F12.pep
HASGVLKLNSMRNGDHWKNSDVLVFNTWLWWYRRGLKQQWDYVNDEGRITKDIDRMTAFRTALTTWAKWVDSDVDTNRTKVIFQGICPSHYNGSEWNEPRV

SEQ ID NO: 95312 - protein, 122 aa, Gossypium hirsutum
  Clone ID: LIB3148-035-Q1-K1-F2.pep
LAMGYAKGKLTFFLGDVDSVVDLIPADMVVNAIIVAMVAHASNQPSETIYQVGSSMRNPVKYHSLQDFGYRYFSKKPWINKNGKAVIVGKIRVMDSMASFHRYMALRYLLPLKGLEFANTAF

SEQ ID NO: 95313 - protein, 57 aa, Gossypium hirsutum
  Clone ID: LIB3148-035-Q1-K1-F3.pep
VFVAWAQNVKQLKCLKAATGSSIQENSEHHPSAAIQMVRVLRNASATDEIHPAHVTY

SEQ ID NO: 95314 - protein, 46 aa, Gossypium hirsutum
  Clone ID: LIB3148-035-Q1-K1-F6.pep
GNSELGGNREEIQGRVVLLTGTYWDELLLKKTHVCSTPSRLETVIL

SEQ ID NO: 95315 - protein, 134 aa, Gossypium hirsutum
  unsure (1)..(134): unsure at all Xaa locations
  Clone ID: LIB3148-035-Q1-K1-G10.pep
NSRFKRVCVFCGSSPGKNPSVQLAAIQLGQQLVERDIDLVYGGGSIGLMGLVSQAVFDGGRHVLGVIPKTLMPKELTSETVGKVKTLSRMHQRKTXIARQAYAFIALPSGYXTLEELLEVITWAQLGIHDKPVG

SEQ ID NO: 95316 - protein, 71 aa, Gossypium hirsutum
  Clone ID: LIB3148-035-Q1-K1-G3.pep
PRVRHKTQRATSRTCSLLFCGELWRGPLIEDAPNVKMEDMVYRNAVLCLLSMKPETCIKYCIALSKLIDLS

SEQ ID NO: 95317 - protein, 95 aa, Gossypium hirsutum
  unsure (1)..(95): unsure at all Xaa locations
  Clone ID: LIB3148-035-Q1-K1-G4.pep
ESPDTKNNVQAKIHDTEGLPPDQQRLIFAGKQLADGLTVPDYNMQTEYTLHLVSCLXSXMHILVKTITGQTITLEVDSYYTIDNVNVKILDKESI

SEQ ID NO: 95318 - protein, 44 aa, Gossypium hirsutum
  Clone ID: LIB3148-035-Q1-K1-G6.pep
PSKVMAFPLICHPTIFYFIPNLWCINFRVFSLCFFILRPLQLKY

SEQ ID NO: 95319 - protein, 24 aa, Gossypium hirsutum
  Clone ID: LIB3148-035-Q1-K1-G7.pep
SLFYQFKDLTQKKRVNPSMKCFRY

SEQ ID NO: 95320 - protein, 96 aa, Gossypium hirsutum
  Clone ID: LIB3148-036-Q1-K1-A7.pep
LKLTCLGPDLGDYQQVQYTVPPYVWFGAFPTKDFHISSDGRAAIAEPRDAECHYSLVGCTCAPAFQFQDFELRKHSELVSTFPNYEPIISFLTNTD

SEQ ID NO: 95321 - protein, 30 aa, Gossypium hirsutum
  Clone ID: LIB3148-036-Q1-K1-A8.pep
HASGFSFQFPFIFTLIFKVVSFIIFNLCAD

SEQ ID NO: 95322 - protein, 38 aa, Gossypium hirsutum
  Clone ID: LIB3148-036-Q1-K1-A9.pep
TSNLMIWLLPLVANLRFYYLYIQFFTFNRQKKVIHNLR

SEQ ID NO: 95323 - protein, 52 aa, Gossypium hirsutum
  Clone ID: LIB3148-036-Q1-K1-B12.pep
MAPPQIKENFLSFQVGGIFFFFIIFAFFFFFFFFFFFFFFFFFFFFFFFFFF

SEQ ID NO: 95324 - protein, 57 aa, Gossypium hirsutum
  Clone ID: LIB3148-036-Q1-K1-B8.pep
IKESNNYHSSTRAYSKRIKSCKDGFSHLTRKTLVITLVPIRKQAMKMLTVNEQANTP

SEQ ID NO: 95325 - protein, 51 aa, Gossypium hirsutum
  Clone ID: LIB3148-036-Q1-K1-C10.pep
SPICFDESCGLALVNNLIIYCIGGFLWAHLNAILEKLDHEELNQLKIICPL

SEQ ID NO: 95326 - protein, 55 aa, Gossypium hirsutum
  Clone ID: LIB3148-036-Q1-K1-C12.pep
QIITFLSQEGYLCILVFKSFDFCSFHKLNQNQAFISSDSTGFSAITIVISLISCS

SEQ ID NO: 95327 - protein, 40 aa, Gossypium hirsutum
  Clone ID: LIB3148-036-Q1-K1-C3.pep
HPFHAHSSKESITLATWFKRAVYQRGFPQYRVKQAIISEL

SEQ ID NO: 95328 - protein, 91 aa, Gossypium hirsutum
  unsure (1)..(91): unsure at all Xaa locations
  Clone ID: LIB3148-036-Q1-K1-D9.pep
TEFTCDGDTSSTPSHYVIFWEIKPKEGNINNKNXKNLDTKVMGQCCSKMEDSSHCTYRMCMKENMIAALEIMVVIQRSIESLMKYCVTQRS

SEQ ID NO: 95329 - protein, 54 aa, Gossypium hirsutum
  Clone ID: LIB3148-036-Q1-K1-E3.pep
PFNGWVFGMIRGIVGLLLVLRLSKRLSHLRVWFVIRSLCFQSGCSSTPPCFSLS

SEQ ID NO: 95330 - protein, 147 aa, Gossypium hirsutum
  Clone ID: LIB3148-036-Q1-K1-E8.pep
PTRPATFQCPITGLEFNGKYKFFALRNCGHVVSAKALKEVKSSACLVCHKEFVESDKMVINGSEEEMAALRERMEEEKSKIVKEKKKRGIDVVDGKKDCGKLEGNEKLENGKKLNNGGVKKFRATDVAPANATKEVYASLFTSSKKS

SEQ ID NO: 95331 - protein, 104 aa, Gossypium hirsutum
  Clone ID: LIB3148-036-Q1-K1-E9.pep
SGRVFDPPVDLIKSMHSRVKAMFPIRLFKHSPALAFQTTLLPPLCYPHASPRRVWTCATDQDLRTEASLSFSGVLYRLRNPYSPPDGTSTSKQRADKNQTCLSR

SEQ ID NO: 95332 - protein, 73 aa, Gossypium hirsutum
  Clone ID: LIB3148-036-Q1-K1-F8.pep
NNKNIRVRPFILITALFSFLYLSIWPYFRFEIETVEDEKSDLQNRLREEIEGNTKLSQCGKTKEDIARVSTMS

SEQ ID NO: 95333 - protein, 59 aa, Gossypium hirsutum
  Clone ID: LIB3148-036-Q1-K1-F9.pep
PTRPIRNLTLSSKRRINQLLLNLKVAFEKAFSLVMPSELSDCNVHITEHHSARIAYTSN

SEQ ID NO: 95334 - protein, 73 aa, Gossypium hirsutum
  Clone ID: LIB3148-036-Q1-K1-G1.pep
LQSLFNHRIGKGISNPMNWYIKDEWPIHLSKSSVQGDQTKITQYNISARATEQNKNGRLWDHQIMLLFSFLNF

SEQ ID NO: 95335 - protein, 58 aa, Gossypium hirsutum
  Clone ID: LIB3148-036-Q1-K1-G10.pep
NWNSDHCATSIFDLHRSCPKCSYELCLSCCKEIREGILSVRDDVPYGYRDRGWDYMHG

SEQ ID NO: 95336 - protein, 82 aa, Gossypium hirsutum
  unsure (1)..(82): unsure at all Xaa locations
  Clone ID: LIB3148-036-Q1-K1-G2.pep
LNILTKILXLTMLKIFFTIIKVHKCLHNHLPETRAAVPLEKKKKKKPNPETTIFGHPFFRKKSEKKTPWVPPKRPHSLKASE

SEQ ID NO: 95337 - protein, 59 aa, Gossypium hirsutum
  unsure (1)..(59): unsure at all Xaa locations
  Clone ID: LIB3148-036-Q1-K1-G4.pep
WVFILWLLLTLGVGGLRDQSLRTGACDGIGFLWGLLDLFCGLGXMPMLRGNALVFLRLL

SEQ ID NO: 95338 - protein, 52 aa, Gossypium hirsutum
  Clone ID: LIB3148-036-Q1-K1-H1.pep
ISQNFQFGPLLLLVFQFSLICLLTRILILQLHTSIPLPYNFVLPYRIFILQT

SEQ ID NO: 95339 - protein, 48 aa, Gossypium hirsutum
  Clone ID: LIB3148-036-Q1-K1-H2.pep
LHNLCFCKQILKCIIFCWIVLVSNHFRRLSISHIIMYSIVFTHKYNNI

SEQ ID NO: 95340 - protein, 70 aa, Gossypium hirsutum
  Clone ID: LIB3148-036-Q1-K1-H3.pep
HASGSSQLARCLWTNTQDMGHVKESAALVAKLLGLVEPSQAPKEVVGLSILPRSVTRRSSSWKNVIPPLL

SEQ ID NO: 95341 - protein, 148 aa, Gossypium hirsutum
  Clone ID: LIB3148-036-Q1-K1-H5.pep
KSFIDLLLKPSEEDLKCWPHSFEFRLRVSLAADGSLALISRIRNVNGKPFSFSFAYHTYLSVSDISEVRIEGLETLDYLDNLCQKERFTEQGDAITFESEVDRVYLSTPNVVAVLDHERKRTYVIRKDGLPDVVVWNPWEKKSKSMVD

SEQ ID NO: 95342 - protein, 68 aa, Gossypium hirsutum
  unsure (1)..(68): unsure at all Xaa locations
  Clone ID: LIB3148-037-Q1-K1-A11.pep
SFKTAAPXFFFFFFFFFFFFFFFFFFFFFFFFFFFGKKKEAPIVIPKHMSINSQEPKTFKYSSMEHVP

SEQ ID NO: 95343 - protein, 71 aa, Gossypium hirsutum
  Clone ID: LIB3148-037-Q1-K1-A3.pep
LLFPTQYLVSCMAAVNYQHRKSYQVYWNKDDDSVCHIFLIKVLTKEYLRIHLSFSMRVPKSVSLIMSGRVG

SEQ ID NO: 95344 - protein, 55 aa, Gossypium hirsutum
  Clone ID: LIB3148-037-Q1-K1-A6.pep
NNKKGRCYLNSGMSVENGYCLSFFFPFHVSKGSLEDHVMFTQLRVQVLSTGMYST

SEQ ID NO: 95345 - protein, 112 aa, Gossypium hirsutum
  Clone ID: LIB3148-037-Q1-K1-B1.pep
ALYILRSLYDSYSESQENKVRCIICYFQRICLQMPTGSVLFELKLLSLEYHPWQSFLSYPYADFWTKSNIPLCPFQVHSSGLIEDHAIEALEVDFANKYLGGGALHKGCVQV

SEQ ID NO: 95346 - protein, 81 aa, Gossypium hirsutum
  Clone ID: LIB3148-037-Q1-K1-B10.pep
NKLALAQNIIQNKAHKPITEQNRYYMFMQKPNHIQPYTPPYQPYTMWGDNSTHPTATHHRICSMAARTDNVTESPDTADAW

SEQ ID NO: 95347 - protein, 58 aa, Gossypium hirsutum
  unsure (1)..(58): unsure at all Xaa locations
  Clone ID: LIB3148-037-Q1-K1-B12.pep
HHESRLFIVKKKKKKKKKKKKKKKKKKKKKKKKKKKKKKKKXKXKKKKKKKKKGGGPF

SEQ ID NO: 95348 - protein, 67 aa, Gossypium hirsutum
  Clone ID: LIB3148-037-Q1-K1-B2.pep
PTRPNFEWTLGFTIRFGLHHVDFTTLKRTPRGSATWYKQFIANHTAEKILMPQHYPGNQLGQHFNTI

SEQ ID NO: 95349 - protein, 142 aa, Gossypium hirsutum
  unsure (1)..(142): unsure at all Xaa locations
  Clone ID: LIB3148-037-Q1-K1-B9.pep
HASEHDLHFLTKIFQLTSMPAFATDGMSRRERANVFCEAICAVDATDISANSIRDFLLPSIQNLLRDPDTLDPAHKEALEIILKERSGGTFDALSKVMGAHIGIPSSMTSIFGEGGLLGKKESTAPTSXVGSSRAWASSAHG

SEQ ID NO: 95350 - protein, 135 aa, Gossypium hirsutum
  Clone ID: LIB3148-037-Q1-K1-C12.pep
HASINHFKAINVHMACSFRLCLVVNNGVKDCSLVISVSRDCCAPRFLVSSHLALEISLQRNQHSQLQFLSELQCQSSMYCLPYHRLSLDELPIEKNLVSRIPCGSIDQTVLDPSNLGQELLYHAINNRTRGRTRG

SEQ ID NO: 95351 - protein, 46 aa, Gossypium hirsutum
  Clone ID: LIB3148-037-Q1-K1-C6.pep
HKSGKRFGFWGRDPPPPIYVAPQSNPHPKFIVTVQRLSERGSTEFG

SEQ ID NO: 95352 - protein, 88 aa, Gossypium hirsutum
  Clone ID: LIB3148-037-Q1-K1-C7.pep
FEFDQTFFDSYEFDGVEFLASANWIFKCFLQSLEDIELTGFQSSSWGSEFLVRFMRFLLNNTKVLKKVTIYEQGGTLLESWQFSGPNM

SEQ ID NO: 95353 - protein, 56 aa, Gossypium hirsutum
  Clone ID: LIB3148-037-Q1-K1-C9.pep
PYSQTENLRTNDSINLAPIKQHPIPYFCIYMFVPFYPLFLFFFFLFKFFFFFFFFF

SEQ ID NO: 95354 - protein, 32 aa, Gossypium hirsutum
  Clone ID: LIB3148-037-Q1-K1-D10.pep
HSNPIMYSYSHILRHLIHSDRVIKAKRPFPKH

SEQ ID NO: 95355 - protein, 63 aa, Gossypium hirsutum
  unsure (1)..(63): unsure at all Xaa locations
  Clone ID: LIB3148-037-Q1-K1-D4.pep
FPEAPPTYRKSASPFSPEPLLIQPIIAIEPPRXVXXQQKKEEAASSINPQIIKHLQSEHMYIY

SEQ ID NO: 95356 - protein, 49 aa, Gossypium hirsutum
  Clone ID: LIB3148-037-Q1-K1-D5.pep
NQHPQKEITFTCILRMEHETKLKTYANSLKAKLHITIMDITSTMIGRVG

SEQ ID NO: 95357 - protein, 98 aa, Gossypium hirsutum
  Clone ID: LIB3148-037-Q1-K1-E12.pep
MLYNSSKPQKVLGCICICKKKKKKKKKKKKKKKKKKKKKKKKKKKKKKKKKRPAKKKKKKKKNAGKQKKKFFKRAAGALFKGPIFNTAFIKKTLFLNS

SEQ ID NO: 95358 - protein, 46 aa, Gossypium hirsutum
  Clone ID: LIB3148-037-Q1-K1-E3.pep
FNFSINFSRIMFVCFGYFNLYIWLPLFLLNRSVVGALQYICLRTRG

SEQ ID NO: 95359 - protein, 44 aa, Gossypium hirsutum
  Clone ID: LIB3148-037-Q1-K1-E7.pep
LTGKMISWTSKCCHSFFLSQYWSFDFQMTLVCCKTNRQGDKHHF

SEQ ID NO: 95360 - protein, 89 aa, Gossypium hirsutum
  Clone ID: LIB3148-037-Q1-K1-E8.pep
PRVPKEQVTAMQDAADIIGAHGAGLTHIVSATPNTVILEIISSFFRRPHFQLIAQWKGLEYHAINLDGSYANPGVVIDRLNKIMRSLGC

SEQ ID NO: 95361 - protein, 99 aa, Gossypium hirsutum
  Clone ID: LIB3148-037-Q1-K1-F12.pep
RFSNMVGSQLINTLCSKIGRFPRADCRVLEDIDALIDKDLPEMKLRCVMAYEEEGEGIVSEIGNSILEALVHETAADFEFCFAGFNFQKSRLLELNGAV

SEQ ID NO: 95362 - protein, 73 aa, Gossypium hirsutum
  Clone ID: LIB3148-037-Q1-K1-F7.pep
HASASHPSMVEEEEEEDLGWDEIEDLSSIDDKKETHGGSPSSNRDELRKRLSTAEEEEDLSWDIEDDDEPIKA

SEQ ID NO: 95363 - protein, 60 aa, Gossypium hirsutum
  Clone ID: LIB3148-037-Q1-K1-G10.pep
PTRPVENPLFRELAERSGDQNDAVINVPCEVVLFEHLLWMLENADPQPESLEELVEFYAC

SEQ ID NO: 95364 - protein, 69 aa, Gossypium hirsutum
  Clone ID: LIB3148-037-Q1-K1-G11.pep
VYLNIYNQNCDLCLKKKKKKKKKKKKKKKKKKKKKKKKKKKKKKQKKKKKKKKKKKRGARFKGSKFPPR

SEQ ID NO: 95365 - protein, 34 aa, Gossypium hirsutum
  Clone ID: LIB3148-037-Q1-K1-G12.pep
IKKNLFFGRSKRIQAGGRVIANVLLLIYCNTKFN

SEQ ID NO: 95366 - protein, 85 aa, Gossypium hirsutum
  Clone ID: LIB3148-037-Q1-K1-G3.pep
MQILVGTLTGMTITLEVASYDTIDNVQAKVRDTAGIPPDLQRVIFVGKQLAYGRTLVDYDIQKEFTLHLRLRIRSGMQILVRTMI

SEQ ID NO: 95367 - protein, 76 aa, Gossypium hirsutum
  unsure (1)..(76): unsure at all Xaa locations
  Clone ID: LIB3148-037-Q1-K1-G4.pep
NLGPLKGPPLFYIFILGIRIFFIFFYFFVFFFCFFFFFFLFFFFFFFFFFFFXIMPRTLFRQRIRVKSVTCIYVYK

SEQ ID NO: 95368 - protein, 64 aa, Gossypium hirsutum
  Clone ID: LIB3148-037-Q1-K1-H12.pep
YMNWEITSYKPQARVCFIWEIQASPLTEPSINGNPKLLYCIDTSFHSFSGCSFLCSPARIKLCF

SEQ ID NO: 95369 - protein, 112 aa, Gossypium hirsutum
  Clone ID: LIB3148-037-Q1-K1-H7.pep
VAKEMRENGTVCGIDGPVTGITFSADSGKKKILLLKPKDREAPNVPEGASEQQGASSPVVNSPGSSASRQGQRRKAGGKLIRSILLRNEAGQNQSSAAVQPQQKTQSPDTVK

SEQ ID NO: 95370 - protein, 64 aa, Gossypium hirsutum
  Clone ID: LIB3148-037-Q1-K1-H8.pep
HCLEKSDTIIITIWAYDIKHSLLRQLISVLPYYYNIIIIGFNEIDAIMHVEDKIHPESGAPRNG

SEQ ID NO: 95371 - protein, 92 aa, Gossypium hirsutum
  Clone ID: LIB3148-038-Q1-K1-A4.pep
MAVSSIDTQNPPSKATAPIEIHCVKCESCGFTEECTLAYILRVRERYQGRWICGLCIEAVKDEALRSDTLISTEEALDRHIKFCNQFKASSS

SEQ ID NO: 95372 - protein, 61 aa, Gossypium hirsutum
  Clone ID: LIB3148-038-Q1-K1-B4.pep
RNAANLTFNHVFEGIDRVVIVWMLSIETEARVSGLVNSFIISKSSFGRTQIECKFLPIFSS

SEQ ID NO: 95373 - protein, 63 aa, Gossypium hirsutum
  Clone ID: LIB3148-038-Q1-K1-B5.pep
FKGRKCGKGQRFPTSKLLHHRPLNEFTARQKKMSNGESIRKEDGGQKKGSPLKSGDRIPYFFF

SEQ ID NO: 95374 - protein, 49 aa, Gossypium hirsutum
  Clone ID: LIB3148-038-Q1-K1-C12.pep
FFMYGRFTPMSSILHSATLSNTYNLVGTILSAWIVYMARPSCPIHQCIF

SEQ ID NO: 95375 - protein, 105 aa, Gossypium hirsutum
  Clone ID: LIB3148-038-Q1-K1-C8.pep
ASVTQTVFDQNPVAIFGVSKVLLPREIFGKDSAGVTSKPGNAVVGTTVQPPETSPSPENSAGFSGPASHLSSPPGFREEITSKGGRYRMQSCIVTVCCIGLVLVV

SEQ ID NO: 95376 - protein, 96 aa, Gossypium hirsutum
  Clone ID: LIB3148-038-Q1-K1-D10.pep
DMKTEINVVLPVLEARSAEDIDLAFKQLHEGADVEEVIVPSMIVEPQDDTDNKSKLPVVEARSLKELHNAVQQGRESDPAKLPHSSGVNNAGGSRP

SEQ ID NO: 95377 - protein, 54 aa, Gossypium hirsutum
  Clone ID: LIB3148-038-Q1-K1-D2.pep
LDLHLMNNLIFLFPSFLIHKYFFTVISFPYVEVQNMYIFHLTKRERFHLKKQND

SEQ ID NO: 95378 - protein, 47 aa, Gossypium hirsutum
  Clone ID: LIB3148-038-Q1-K1-E10.pep
FVFPLCFPNQNSLLVCILCYLSERECSESCVFTIKNLLNTTRWSTGF

SEQ ID NO: 95379 - protein, 76 aa, Gossypium hirsutum
  Clone ID: LIB3148-038-Q1-K1-E11.pep
HLDKYQRWYLCFFGCTSHECFRFIKLFSFFGNHKDHFLILFSASKSDLISIVSYNKFMVKLPKWSLYYRLKCLLEN

SEQ ID NO: 95380 - protein, 39 aa, Gossypium hirsutum
  Clone ID: LIB3148-038-Q1-K1-F10.pep
RLFSLFINTIKLISARKMLHYSVPYFVRSEAYFVLFRYG

SEQ ID NO: 95381 - protein, 38 aa, Gossypium hirsutum
  Clone ID: LIB3148-038-Q1-K1-F12.pep
RNEWPDRPTRPGILADITLLSTLRKDSNSTRYSRYASL

SEQ ID NO: 95382 - protein, 129 aa, Gossypium hirsutum
  Clone ID: LIB3148-038-Q1-K1-F2.pep
ELLQRMPRCRWGFFHVVNNDYTHWKMYAIGGSMHPTIISQGNRFIAPHDPNAKEVTYRLYASESEWKNWIWRSEGDVLLNGAIFRTSGPLSPPHLKFNRKEMIKSKPGAYVRRLTRFAGTLNCKKRIKC

SEQ ID NO: 95383 - protein, 84 aa, Gossypium hirsutum
  Clone ID: LIB3148-038-Q1-K1-F6.pep
IFNDITLLSQLRKDGHSSVYSGAGPKLIDCRHWRLAGMPDTWNQLLYAAFFSKLSYSFSYSVGRKVTYSLTTTLVVSYGKGIKG

SEQ ID NO: 95384 - protein, 75 aa, Gossypium hirsutum
  Clone ID: LIB3148-038-Q1-K1-G3.pep
LGWLFIMMGVILLVSSTRLMRHLSWPLQNLIPSGADRNFSLRKTGSHRVKDPSPAAVIPATTLHHLIPTPAKEKA

SEQ ID NO: 95385 - protein, 48 aa, Gossypium hirsutum
  Clone ID: LIB3148-038-Q1-K1-G5.pep
IWKLDRCSLNFLEAVTAQGGKGRNRGVSCLNVIGWANWATFISGLGRV

SEQ ID NO: 95386 - protein, 74 aa, Gossypium hirsutum
  Clone ID: LIB3148-038-Q1-K1-G9.pep
ALSLLTTSLGNYLSSFILTLVTYFTTKGGQIGWISDNLNEGHLDYFFWLLAGLSFLNMLVYTLCASRYKQKKAS

SEQ ID NO: 95387 - protein, 80 aa, Gossypium hirsutum
  unsure (1)..(80): unsure at all Xaa locations
  Clone ID: LIB3148-038-Q1-K1-H6.pep
RSVVQVLVPEHSSDTRKIGNLRTTIRRVTWHFSPSSLTRRGQIGELEFIRAPIFFGTMSVEXGEHXLMAILEAKSVRAHF

SEQ ID NO: 95388 - protein, 94 aa, Gossypium hirsutum
  unsure (1)..(94): unsure at all Xaa locations
  Clone ID: LIB3148-039-Q1-K1-A1.pep
LLPFESGNHGVLSVSKLPIHVDXSLHPDIRDRVFFLEGNHMHSSIQKVPALVLDCEPNIDFSRDIEAKRQYALQVAKSLDLVKKKKEISPTKAG

SEQ ID NO: 95389 - protein, 56 aa, Gossypium hirsutum
  Clone ID: LIB3148-039-Q1-K1-A11.pep
KKKKKKKKKKKKKKKKKKKKKKKKKKGGKKKKKKKKRRKEKKKKKGKKKKKKGAPL

SEQ ID NO: 95390 - protein, 42 aa, Gossypium hirsutum
  unsure (1)..(42): unsure at all Xaa locations
  Clone ID: LIB3148-039-Q1-K1-A2.pep
WVGFIIKVALATPTFNXKYLPTQILAYTLITFSTRNPRINNH

SEQ ID NO: 95391 - protein, 53 aa, Gossypium hirsutum
  Clone ID: LIB3148-039-Q1-K1-A3.pep
KESILMMAEEDDTRSGHTTKSHPDFILFFFSFLRSVNKINFSLSICKFQLFLF

SEQ ID NO: 95392 - protein, 32 aa, Gossypium hirsutum
  Clone ID: LIB3148-039-Q1-K1-A4.pep
VLGLGLKIGSTININIVFYFSSIVFAHKPKCM

SEQ ID NO: 95393 - protein, 50 aa, Gossypium hirsutum
  Clone ID: LIB3148-039-Q1-K1-A6.pep
VVKGLGHLIDLVYDFIFIIIFCFDFRYGPRQIWAYTLITFSTRKPRINSN

SEQ ID NO: 95394 - protein, 95 aa, Gossypium hirsutum
  Clone ID: LIB3148-039-Q1-K1-B11.pep
LQGEFAPWEPTSALYEFVSSALKEPCLEFELLDPVIVKLRVIPSFPAAGEKGRTLEEEDLVPSALIRFKPVETDSVVFTGLSNELLEISEPLVTN

SEQ ID NO: 95395 - protein, 83 aa, Gossypium hirsutum
  Clone ID: LIB3148-039-Q1-K1-B4.pep
PRVRNNEAAGRAESLPILLCHGEGDDVVPYKFGEKSSRALTSKGFKDMTFKSYNGLGHYTIPEEMEEVCAWLTSKLGLNGRST

SEQ ID NO: 95396 - protein, 74 aa, Gossypium hirsutum
  Clone ID: LIB3148-039-Q1-K1-B5.pep
ISKRLVFMDRHKLFDSSNLALHLQSLFGGICKLIGILSKNIIFSFTIHFFNWHCITHFFQIIFRQLQCQGPNVA

SEQ ID NO: 95397 - protein, 87 aa, Gossypium hirsutum
  Clone ID: LIB3148-039-Q1-K1-C10.pep
PKVFPITPVLKSGQVILFWWPHKKIFILDGRGSKIWFFKRGAPFFFFFFFFFFFFFFFFFFFFFFFFFFFFFFFFFFFFFFFFPFFF

SEQ ID NO: 95398 - protein, 69 aa, Gossypium hirsutum
  Clone ID: LIB3148-039-Q1-K1-C8.pep
VAAKASNPYRQFINLKTLTHCFYYLLYCYLDMGLNCISIEGTHSTCCKLHTSAYWFTKVNRKGTIRTRG

SEQ ID NO: 95399 - protein, 137 aa, Gossypium hirsutum
  Clone ID: LIB3148-039-Q1-K1-C9.pep
TKLVKIGSVPVLLSMVKSGHMTGRVFLILCNLASGSDGRAAMLDSGAVDCLVKLLKGSELDEPTREGCVAVLYGLSQAGLRFKGLAKAAGAVEELAKVERTANGLTREKARKMSEMLKRGSEEEQEEVDWEALLDSG

SEQ ID NO: 95400 - protein, 106 aa, Gossypium hirsutum
  Clone ID: LIB3148-039-Q1-K1-D1.pep
PRVRPRVRPRVRLQNKSRALQLLRAKLYEIKVREQQELIRNQRKSQVGTGARAEKIRTYNYKDNRVTDHRLKMNFELTSFLEGDIENAVQACSAIEQKELLEELAE

SEQ ID NO: 95401 - protein, 73 aa, Gossypium hirsutum
  Clone ID: LIB3148-039-Q1-K1-D12.pep
LHENISSSFVAEAHTGLEAIKLVTSMGLFSVIIKGDSKTVIKKCKSQEVDKSVLGAIIRDTQRKRDSLQDVIF

SEQ ID NO: 95402 - protein, 85 aa, Gossypium hirsutum
  unsure (1)..(85): unsure at all Xaa locations
  Clone ID: LIB3148-039-Q1-K1-E1.pep
PRXRKEVPQTASETXMSGWLRKNVXEGKYVVDKAXSXMVENIVKNKAIKLGDELVLECQPXRLGGRKNLNRKAYLECLALYWKVK

SEQ ID NO: 95403 - protein, 49 aa, Gossypium hirsutum
  Clone ID: LIB3148-039-Q1-K1-E3.pep
LSAASYIGHLDLSYNHLCGRIPAGAPFDHLEASSFMYNDCLCGKPLRAC

SEQ ID NO: 95404 - protein, 75 aa, Gossypium hirsutum
  Clone ID: LIB3148-039-Q1-K1-E6.pep
LSLKSLEFFFSCQSRDRKIKDVVSNGESSCKWKRFFKLRSMYVNILQQITSTLFSTFETFSFFLLFIILLLYFFR

SEQ ID NO: 95405 - protein, 43 aa, Gossypium hirsutum
  Clone ID: LIB3148-039-Q1-K1-E7.pep
NNVAFSATGRTSTGTPIAARVGIRLRWLKLPSKLYFSPNETLV

SEQ ID NO: 95406 - protein, 49 aa, Gossypium hirsutum
  Clone ID: LIB3148-039-Q1-K1-F12.pep
STDSIYFLLIILIGLVDDMLNKCVLHFECDPKCQRFTKASMVCESHNIG

SEQ ID NO: 95407 - protein, 57 aa, Gossypium hirsutum
  Clone ID: LIB3148-039-Q1-K1-F9.pep
HASADLLPHWIRTRKYQQLSRWAQGGPAISFLVKVVEMEMKRYPSLISLVLEELLKD

SEQ ID NO: 95408 - protein, 122 aa, Gossypium hirsutum
  unsure (1)..(122): unsure at all Xaa locations
  Clone ID: LIB3148-039-Q1-K1-G11.pep
TKRAINCANTFSKTLQGLAQGGAKLGAXVTEHEIKQSMAASDAAINYTMYIAETMPVTMLINRKHRDQHLHHSYQHFNKYITMYKMIQDLQQSILHYGMHDGENINEIIYDDDGDIDCEIYY

SEQ ID NO: 95409 - protein, 40 aa, Gossypium hirsutum
  Clone ID: LIB3148-039-Q1-K1-G12.pep
FINLILKIDRTETWPFFGVPNKWIEIVCLYTDHKVNSESF

SEQ ID NO: 95410 - protein, 43 aa, Gossypium hirsutum
  Clone ID: LIB3148-039-Q1-K1-G3.pep
ITMDKLIVDMTNIIGQTVLLSSLLQLYICTKIKKEIDHHHFYY

SEQ ID NO: 95411 - protein, 51 aa, Gossypium hirsutum
  Clone ID: LIB3148-039-Q1-K1-G7.pep
TKVNSSLSFKHKNRVEHKKKKIDVHLQDGTYLSAYSLCRIPAFRSYHVLYN

SEQ ID NO: 95412 - protein, 57 aa, Gossypium hirsutum
  Clone ID: LIB3148-039-Q1-K1-H2.pep
TAPPFFFFFFFFFFFFFFFFFFFFFFFFFFFFFFFFFFFFAFPSCAKGLTFFLILWH

SEQ ID NO: 95413 - protein, 49 aa, Gossypium hirsutum
  Clone ID: LIB3148-039-Q1-K1-H9.pep
AAPFLNFSLLFFFFYFFFFFFFFFFFYFFFYFFLCTRSSFIQLLNKLNY

SEQ ID NO: 95414 - protein, 46 aa, Gossypium hirsutum
  Clone ID: LIB3148-040-Q1-K1-A4.pep
LLYFQLFVNISAGLYCLFNSVHNCCPPISCVFMFLLEIETCSLMII

SEQ ID NO: 95415 - protein, 110 aa, Gossypium hirsutum
  unsure (1)..(110): unsure at all Xaa locations
  Clone ID: LIB3148-040-Q1-K1-A6.pep
HAYAGVRTNVCTNGDKKGQVLAMELVLNTMHYTIQYMHDELFYLRERQELMQDLTYATTCKMFWLLVVXLSLCLSQAGLQLWHLKTFFLKKKLMYVCKTIGLFPELLPNI

SEQ ID NO: 95416 - protein, 54 aa, Gossypium hirsutum
  Clone ID: LIB3148-040-Q1-K1-A8.pep
LQSMLTSSKPSFFPFLQLKAVITIQESRSKYSILELRRHLFWNSMETKWSNTSM

SEQ ID NO: 95417 - protein, 60 aa, Gossypium hirsutum
  Clone ID: LIB3148-040-Q1-K1-B11.pep
ATLLMPGFEMSEIKLYQYRGGSELLVEAGDQRRVISLPPQMQGKVGGAKFIERSLVITIR

SEQ ID NO: 95418 - protein, 43 aa, Gossypium hirsutum
  Clone ID: LIB3148-040-Q1-K1-B2.pep
GATVGEVIIQTPMYCEGHFVPRDSLKACNLANMLHELYGCTFI

SEQ ID NO: 95419 - protein, 50 aa, Gossypium hirsutum
  Clone ID: LIB3148-040-Q1-K1-B7.pep
HFIALVLRYLNSIYWPFFYNVLTGKTWPLLKIIGSEKIPLLPAEIIAKKT

SEQ ID NO: 95420 - protein, 47 aa, Gossypium hirsutum
  Clone ID: LIB3148-040-Q1-K1-C1.pep
QKSKVKLFIIINRHPLIFYSPLFWVKKKKKKKRRPVGVQDRKGWVVP

SEQ ID NO: 95421 - protein, 120 aa, Gossypium hirsutum
  Clone ID: LIB3148-040-Q1-K1-C12.pep
PVGFSHVEVFSPPSANDMHAGYPRFLSKHSHFMPHTTQNYPSRLGQQTAQRFNPGRSTGARGGEWNHMKVQLPPSFNSLGPRSPGNSTFSSGMPWGRRANHPVSNIPSGSRGKKDYGRIA

SEQ ID NO: 95422 - protein, 47 aa, Gossypium hirsutum
  Clone ID: LIB3148-040-Q1-K1-C4.pep
LSSIDTKKKKRISILLAAQTNLDINFERIIKTYSHGILIPLLYVKFI

SEQ ID NO: 95423 - protein, 36 aa, Gossypium hirsutum
  Clone ID: LIB3148-040-Q1-K1-C5.pep
NWLTFDTPASHGLIPVNFLVERLKLPVAAGRVGPPR

SEQ ID NO: 95424 - protein, 33 aa, Gossypium hirsutum
  Clone ID: LIB3148-040-Q1-K1-C7.pep
HASVQTPLSFLNSSLPYVLGLLNCNIHVSIPVT

SEQ ID NO: 95425 - protein, 60 aa, Gossypium hirsutum
  Clone ID: LIB3148-040-Q1-K1-C8.pep
PTRPPTRPPTRPPVQWFDHLHRRAMQVVEEGMISQDHYTVAWQAFKESLNKVRLVADKHV

SEQ ID NO: 95426 - protein, 61 aa, Gossypium hirsutum
  Clone ID: LIB3148-040-Q1-K1-D12.pep
ILNILNKLGFLKMDLSVSSIYLDRNLYKNAFDSSHLFRNFVQKRLRLHTQTPSNKHKPEFQ

SEQ ID NO: 95427 - protein, 139 aa, Gossypium hirsutum
  Clone ID: LIB3148-040-Q1-K1-D2.pep
PRVRNPDIFVHSIVNGSYNAPFFVTRFREALFHFSALFDMSETNISQEDNLRSMLEQKFYGQEIMNIVACEGTERVERPEAYKQWQVRSVRAGFTQLPLDPELMKKVRGKVKECYHSDFMVDVDGRWMLQGWKGRIIYA

SEQ ID NO: 95428 - protein, 98 aa, Gossypium hirsutum
  Clone ID: LIB3148-040-Q1-K1-D4.pep
REREYSSCSSLFILSSICSTPTGINFACNFRKLFLQWPLLAYSFSLSCTPPILNEFKIHGIWTHNSKNKPMLSYDPNNPCTYQRCMDYLNHNETLYCH

SEQ ID NO: 95429 - protein, 67 aa, Gossypium hirsutum
  unsure (1)..(67): unsure at all Xaa locations
  Clone ID: LIB3148-040-Q1-K1-D5.pep
GIDCVYQVETGKTISIVFEGIKCDVHLLVYELMEMESLIYMIFKVKLIIPNLYFHLICYIXIFTCFF

SEQ ID NO: 95430 - protein, 76 aa, Gossypium hirsutum
  Clone ID: LIB3148-040-Q1-K1-D8.pep
PRVRKREAMLQSLWKVNVVDIETTLSRVCLAVLQDPDASKDVLILRAKALKKLGSIFQGVKVRYSREDSLRHEIDC

SEQ ID NO: 95431 - protein, 48 aa, Gossypium hirsutum
  Clone ID: LIB3148-040-Q1-K1-E9.pep
LIGSPDDSSLGFLRSENARRYVRQLPQYPKQNFSTRFPNSSSGACDLL

SEQ ID NO: 95432 - protein, 71 aa, Gossypium hirsutum
  unsure (1)..(71): unsure at all Xaa locations
  Clone ID: LIB3148-040-Q1-K1-F6.pep
RKRVEEAQRRXALEQHQREEERYRELEELQRQKEEAMKRKKQQEEEERLNQMILLGKNKLRPKLSFALGSK

SEQ ID NO: 95433 - protein, 77 aa, Gossypium hirsutum
  unsure (1)..(77): unsure at all Xaa locations
  Clone ID: LIB3148-040-Q1-K1-F9.pep
ADRRGRPGLPILFTSARXXXAKEVNXRLFQWTIKTSKFHKFFNLLYINRNLIKQSTNFQDNTXIKKMFQLIYKYNLN

SEQ ID NO: 95434 - protein, 36 aa, Gossypium hirsutum
  Clone ID: LIB3148-040-Q1-K1-G11.pep
SLLLRETLCCTAIACGNTIHNREAMVGDSTMCGRVG

SEQ ID NO: 95435 - protein, 32 aa, Gossypium hirsutum
  unsure (1)..(32): unsure at all Xaa locations
  Clone ID: LIB3148-040-Q1-K1-G12.pep
HASAHRTITIHCLQVHRALSIYVRXTTYCLPK

SEQ ID NO: 95436 - protein, 75 aa, Gossypium hirsutum
  Clone ID: LIB3148-040-Q1-K1-H12.pep
VPKPNDTPKPVPGMSGAVEVPRPESVTVFEFGSVAATADKVTLAGYCPVSDDLEPCRWEILPANGSDAPQFRVVF

SEQ ID NO: 95437 - protein, 74 aa, Gossypium hirsutum
  Clone ID: LIB3148-040-Q1-K1-H5.pep
KALPRRTNLEIRKLSLHVDLPHKHKQFDNQLKRIWFKLRMLNPCAYIGIHMHILRKMQAMREINLEIKNKITFS

SEQ ID NO: 95438 - protein, 55 aa, Gossypium hirsutum
  Clone ID: LIB3148-040-Q1-K1-H6.pep
TALTGECYSISIPKPDSYWLHEKFSHISYCDYHVIRVLATRSKAQINATLNHYKN

SEQ ID NO: 95439 - protein, 80 aa, Gossypium hirsutum
  Clone ID: LIB3148-041-Q1-K1-A11.pep
HTNGLFLISRAHQLVMEGYNWCQEKNVVTVFSAPNYCYRCGNMAAILEIGENMDQNFLQFDPAPRQVEPDTARKTPDYFL

SEQ ID NO: 95440 - protein, 72 aa, Gossypium hirsutum
  Clone ID: LIB3148-041-Q1-K1-A3.pep
FVFIGNFPFCKSVGLSFECYPKTSQGSLCTTPIYKYSKSPSIHHTQASSVIAKAKGASLSLYDQCMGCMFLK

SEQ ID NO: 95441 - protein, 55 aa, Gossypium hirsutum
  Clone ID: LIB3148-041-Q1-K1-C2.pep
AAPLFFFFFFFFFFFFFFFFERIDFRNLIIKSKILGFPKYWLYNKCTYNVTGLQL

SEQ ID NO: 95442 - protein, 46 aa, Gossypium hirsutum
  Clone ID: LIB3148-041-Q1-K1-D10.pep
NHHLVSTCTLVLWVFLGSNDFVIFFLLKKLCLDYKQKCLNVKLPSY

SEQ ID NO: 95443 - protein, 36 aa, Gossypium hirsutum
  Clone ID: LIB3148-041-Q1-K1-E10.pep
INQLSNASGSYKTYNLIPNPALPIYIDCEGILMTSI

SEQ ID NO: 95444 - protein, 40 aa, Gossypium hirsutum
  Clone ID: LIB3148-041-Q1-K1-E12.pep
INQAGYKAFTHTNQAGCAFRVGYRMSGNRMHMVKIPGRVG

SEQ ID NO: 95445 - protein, 70 aa, Gossypium hirsutum
  Clone ID: LIB3148-041-Q1-K1-E7.pep
QRRWDRGGGWWRQVAASARVFPFYCFSLLVWARLVIWTDVIWVWVFVFVWLGFIGFWAVCLEIGFWVVGC

SEQ ID NO: 95446 - protein, 35 aa, Gossypium hirsutum
  Clone ID: LIB3148-041-Q1-K1-F11.pep
LFFFYFFFFFFFFFFFFFFFFFFFFFFFFFFFFFF

SEQ ID NO: 95447 - protein, 86 aa, Gossypium hirsutum
  unsure (1)..(86): unsure at all Xaa locations
  Clone ID: LIB3148-041-Q1-K1-F3.pep
RALNAHATGRRPHSHIQACATGWEGTNRMRALIRIITHRLAERGKRCMQGRYKIGVTTRDLSQITDVCKTDGPDEFEFRXXTNRRA

SEQ ID NO: 95448 - protein, 67 aa, Gossypium hirsutum
  Clone ID: LIB3148-041-Q1-K1-G10.pep
SLIISSSQKNYYIKQIWDGCRNLACSWNIGWGFHCFFVFLQAAVSYMYEKSTCGRFFFFFKKTCDEY

SEQ ID NO: 95449 - protein, 56 aa, Gossypium hirsutum
  Clone ID: LIB3148-041-Q1-K1-G2.pep
DMPIPLFPCRFYPSFLFFFIVIEMSINPINSFLFWGYEVDAAGDCVIAAAKIKATQ

SEQ ID NO: 95450 - protein, 82 aa, Gossypium hirsutum
  Clone ID: LIB3148-041-Q1-K1-G3.pep
VPNCGEGCIWKADLIISFGVWCIHRILDLSLMESRPELWGKYTYVLNRLQGVIDLAFSKHRSLVPPCFCLQIPVEYQQRLSP

SEQ ID NO: 95451 - protein, 45 aa, Gossypium hirsutum
  Clone ID: LIB3148-041-Q1-K1-G7.pep
TRHQVDNNKESVDAILNIFKQLYYGHRPLLQLIMAILSYLSHLDQ

SEQ ID NO: 95452 - protein, 49 aa, Gossypium hirsutum
  unsure (1)..(49): unsure at all Xaa locations
  Clone ID: LIB3148-041-Q1-K1-H7.pep
VTLFKTLHVGVPRLEALTPYTXFPFFFFFFFFFFFFFFFFFFAIRKELT

SEQ ID NO: 95453 - protein, 46 aa, Gossypium hirsutum
  Clone ID: LIB3148-042-Q1-K1-A1.pep
EEIRSVYSSLNCVPLGNDRKENQIYTRHPYVICVQPLHLIFKSKIK

SEQ ID NO: 95454 - protein, 59 aa, Gossypium hirsutum
  Clone ID: LIB3148-042-Q1-K1-A12.pep
NSKFNIPLISSIQSNPPGRSNKPLMKITTKVNISTSSTLQEPNRLTFYLNQTLTHVLLT

SEQ ID NO: 95455 - protein, 76 aa, Gossypium hirsutum
  Clone ID: LIB3148-042-Q1-K1-B12.pep
KTPSSRDHKIPAIQSCPPTPRKKPMMRMKRKVSELQFFETTRSEEVESFFGSNSYPFSTNNTAAHPPFKKRRCKSA

SEQ ID NO: 95456 - protein, 24 aa, Gossypium hirsutum
  Clone ID: LIB3148-042-Q1-K1-B4.pep
TKCHELDYFAISQVPVKVWDPLLL

SEQ ID NO: 95457 - protein, 77 aa, Gossypium hirsutum
  Clone ID: LIB3148-042-Q1-K1-C10.pep
YKRHEFECSEAHYTPIYVWVEKEIWVILSIMLKIANMIRKIVQKKNYGQKQYDYGFNLSTMSKSRHSRGTKTRTKPV

SEQ ID NO: 95458 - protein, 88 aa, Gossypium hirsutum
  Clone ID: LIB3148-042-Q1-K1-C6.pep
ASIEISNCQPVALILLASIGVWPRYGILDPHMTCIRSATPRQAIPLHMQRNRNTLFHTFSSFSKKVSSRIMTIHNFKALADFILRSRL

SEQ ID NO: 95459 - protein, 51 aa, Gossypium hirsutum
  unsure (1)..(51): unsure at all Xaa locations
  Clone ID: LIB3148-042-Q1-K1-C8.pep
VICIIFPCSHCYLFKDDMLCNISVNFCIYIYISFQSIKXXTNQQIHNLNGK

SEQ ID NO: 95460 - protein, 57 aa, Gossypium hirsutum
  Clone ID: LIB3148-042-Q1-K1-D11.pep
HASVISMRLILAQLAHCFDWELPDGMLPNELDMSEKFGLSLPRANHLLAKSTYRLIA

SEQ ID NO: 95461 - protein, 100 aa, Gossypium hirsutum
  unsure (1)..(100): unsure at all Xaa locations
  Clone ID: LIB3148-042-Q1-K1-D3.pep
VTMGVQDIQGEGFPDQFSGLADSLFLDLPQPWLAIPSGXNMLKQDGTLCCFSLCMEQVQRSCETLRSDFIEIXWTFEILLRMYEICEWKMDNDGNSIACS

SEQ ID NO: 95462 - protein, 89 aa, Gossypium hirsutum
  Clone ID: LIB3148-042-Q1-K1-E1.pep
SILKFRPPPLEVPTFLSLPSNPIPFFLGHPLFIPLPPCFHPLYCETPGFPQFNLFEYHPPFPSCPFSKKCPPPLPFPTIPPPYWLFPPP

SEQ ID NO: 95463 - protein, 75 aa, Gossypium hirsutum
  Clone ID: LIB3148-042-Q1-K1-E3.pep
HASDTVLVSTLNNACRKHMCTTLETRKQISSKQYLLKILHFNIWCSLFLGNYKLMISCLAHSVKFETFILLSFIN

SEQ ID NO: 95464 - protein, 112 aa, Gossypium hirsutum
  unsure (1)..(112): unsure at all Xaa locations
  Clone ID: LIB3148-042-Q1-K1-E4.pep
ASGRPVFFASFNPLTMVIVAIMSSFIFSEIMYLGRVIGAMVIVVGLYMVLWGKSKDQISSDSSNNTKDEIPISGDELQMATQTTTPIXNQDFVVLDLNKGDVSNQSSKNNPK

SEQ ID NO: 95465 - protein, 43 aa, Gossypium hirsutum
  Clone ID: LIB3148-042-Q1-K1-E5.pep
GFKFFFSTLNQYILVLLIRSGRRVTNSSSYPYELKARSINYLR

SEQ ID NO: 95466 - protein, 113 aa, Gossypium hirsutum
  Clone ID: LIB3148-042-Q1-K1-E6.pep
PTRPPRSKLGPAASGGERAAASAPPRKVGSGIRYRECQKNHAVSIGGHALDGCGEFMAAGDEGTLDALKCAACNCHRNFHRKETDGEGSSIYNPHHHHHHYQQQQHPQFSPYY

SEQ ID NO: 95467 - protein, 47 aa, Gossypium hirsutum
  Clone ID: LIB3148-042-Q1-K1-E7.pep
DYRIESHSHQHFMPIVTNNLNIQFFTLKFYYTRQSILHALLQNKEPP

SEQ ID NO: 95468 - protein, 53 aa, Gossypium hirsutum
  Clone ID: LIB3148-042-Q1-K1-F1.pep
LDSYVLMINVLTMIARMCFVIISSEFRLDEPIRHIMFNLFYDQCIFYFVYGYR

SEQ ID NO: 95469 - protein, 61 aa, Gossypium hirsutum
  unsure (1)..(61): unsure at all Xaa locations
  Clone ID: LIB3148-042-Q1-K1-F4.pep
GGHFFLISSXKLKNQEPRLYLFPXGNQFLXLYFMPVIEDPNLDKHGCLGFFKQVFLLALIY

SEQ ID NO: 95470 - protein, 62 aa, Gossypium hirsutum
  Clone ID: LIB3148-042-Q1-K1-H1.pep
GTYNGGLLSTEAGTIARVIADATITMAGFLGQSQLLNITLLPSLLICVISIAATCFTYNSLY

SEQ ID NO: 95471 - protein, 54 aa, Gossypium hirsutum
  Clone ID: LIB3148-042-Q1-K1-H10.pep
LPAYHNLLLISRVCNLVSLSTSYKPFLRITNSLYSFAIRPVHELSYQSKLKGLL

SEQ ID NO: 95472 - protein, 130 aa, Gossypium hirsutum
  unsure (1)..(130): unsure at all Xaa locations
  Clone ID: LIB3148-042-Q1-K1-H3.pep
DHIAAVEQQLVSERMRRKLNEVNIAAQAQLAPVQDHINFTLQQAYFKCAYECFDRTRKQEEISNCVEHCSVPVVNAQQHFENEMAKFQERLNRSLMVCQDKFESAKLQXKIKPMQSNEXESCVNQSIEDN

SEQ ID NO: 95473 - protein, 99 aa, Gossypium hirsutum
  unsure (1)..(99): unsure at all Xaa locations
  Clone ID: LIB3148-042-Q1-K1-H5.pep
RSTYGYCIFLGGYPVSWSSKKXHVVSRSTAEAEYRSVAHVTAEMTWIQSLLTELCVPNLPKALIXYDSSAAIAVVGNPVMHSKFKHVVVDIFXCFNWNQ

SEQ ID NO: 95474 - protein, 97 aa, Gossypium hirsutum
  Clone ID: LIB3148-042-Q1-K1-H9.pep
RGPHTMLTSTILQTLGLSSADELIGWTYADPSWARIAALVPVVVSCAEAGDEVANKILKEAVQELALSVKAVVQRLGLCGADRKNSFPLVMVGGVLE

SEQ ID NO: 95475 - protein, 92 aa, Gossypium hirsutum
  Clone ID: LIB3148-043-Q1-K1-A10.pep
SVMVDKKKNSGNCINLKTTERYSSSKVQNGSFQPFWFQPFGWEFTLKLRPPFGKTGGPMAALTFGKTFFGAIIFTGFGCACSNSHRESFWVQ

SEQ ID NO: 95476 - protein, 71 aa, Gossypium hirsutum
  Clone ID: LIB3148-043-Q1-K1-A3.pep
ILRSFLFNALHRQARHSAKGISQECSERGLTPVSYQVIPKLRWFGAVRDSEMATLLFLFLLIAISSRFISL

SEQ ID NO: 95477 - protein, 133 aa, Gossypium hirsutum
  Clone ID: LIB3148-043-Q1-K1-A8.pep
ENGQLHFIGSTIASLNGSSLLESCRVSSELNPDDYFFEWSTEMNGFTGNNSNKSWSKKLKQMKQSSITQKLKASREYLKSLFSKSACSDESCAKADVSKTKECANKYMKMGKKNPFGKVDKGRYKIFMKTIDR

SEQ ID NO: 95478 - protein, 130 aa, Gossypium hirsutum
  Clone ID: LIB3148-043-Q1-K1-B1.pep
PTRPPTRPAKDADSEATRLWHRRLGHAGEKALQTLAKQGLLKGANSCKLEFCEHCVLGKQTRVKFGSAIHNTKGILDYVHSDVWGPTKVASLGGMHYFVTFLDDYSRKVWVYLMKRKNEVLDAFLKWSLK

SEQ ID NO: 95479 - protein, 72 aa, Gossypium hirsutum
  Clone ID: LIB3148-043-Q1-K1-B10.pep
YSLSFYFCFFNLIFFYIFFLFFFFFFFFFFFFFFFSCKFTNILPTICFNIGKTGFTMNLLQTRLKNENRVEK

SEQ ID NO: 95480 - protein, 65 aa, Gossypium hirsutum
  Clone ID: LIB3148-043-Q1-K1-B11.pep
WKLKGNVHFKLHSQTLTTSKKKGNKKRVFTILSARAIQCDFFLERIWYFMYPKSVLHLMPMGKMF

SEQ ID NO: 95481 - protein, 56 aa, Gossypium hirsutum
  Clone ID: LIB3148-043-Q1-K1-B3.pep
PTRPAKSDIPILAQKYLHKEINLDGFITHEVNFQDINKAFDLLLEGKSLRCIIWMD

SEQ ID NO: 95482 - protein, 53 aa, Gossypium hirsutum
  Clone ID: LIB3148-043-Q1-K1-B5.pep
PTRPIGVDGLFTDFTESLHNFQEWTSPLSQKDSDSASKLVDKIALLISSYRKG

SEQ ID NO: 95483 - protein, 45 aa, Gossypium hirsutum
  Clone ID: LIB3148-043-Q1-K1-B6.pep
SLQCYLKCHFFKFITIHILLKKKKKLPSKDPSTSRASTLSSLYTT

SEQ ID NO: 95484 - protein, 40 aa, Gossypium hirsutum
  Clone ID: LIB3148-043-Q1-K1-B9.pep
YKYTNFLHIHETEITKSERHISIFMSPKNQYREIHTNPNR

SEQ ID NO: 95485 - protein, 63 aa, Gossypium hirsutum
  Clone ID: LIB3148-043-Q1-K1-C4.pep
MLFFVFGSNLFIYPLNCFVFISSFSLVFLFNIKIKMLKGGICFLFCPIFPYYFIPSHSCSKLF

SEQ ID NO: 95486 - protein, 52 aa, Gossypium hirsutum
  Clone ID: LIB3148-043-Q1-K1-C5.pep
NRPPLFFFFFFFFFFFFFFFFFFFFFFFFFFFFFFFFFFFFFFLDCNRRYRY

SEQ ID NO: 95487 - protein, 103 aa, Gossypium hirsutum
  Clone ID: LIB3148-043-Q1-K1-D2.pep
MVLSGRLTPQRGCRTGERSVEVSVLLNKIKKEDIMRFLELHHVKKFDVPFIAMYRKEQCLSLLDDFEKNEAENEDNDDVEQAGQLKWHKVLWIIKELDMWLLL

SEQ ID NO: 95488 - protein, 44 aa, Gossypium hirsutum
  Clone ID: LIB3148-043-Q1-K1-D4.pep
KEAFCYIYIIRILIIFNVFLFQFFRTMENIIHMMTLSIHHIQFL

SEQ ID NO: 95489 - protein, 64 aa, Gossypium hirsutum
  Clone ID: LIB3148-043-Q1-K1-D8.pep
PSKPTECNSLIVKFNTHTFEVSESLRMKAGQVNSGCFDALKLGAIPLPCSTKHYTVDPRTKQSV

SEQ ID NO: 95490 - protein, 49 aa, Gossypium hirsutum
  Clone ID: LIB3148-043-Q1-K1-D9.pep
TLRYLQASWMLLVYLLRQRGNSCVWTSFAFLCSFFFPLFLCQDLWLPFV

SEQ ID NO: 95491 - protein, 135 aa, Gossypium hirsutum
  Clone ID: LIB3148-043-Q1-K1-E10.pep
RDDNGESVNVNESNRKSAFETESCMEITFEDDGKTEYFDDDDDIFACLAAGDPVTLPSPKEKSLRKQASGSDSDFEWEEGVVEGKWDDVTPGMNAEHNLLNKESNINDDSEVEWEEEPSDAPKSSSGPVESGRVG

SEQ ID NO: 95492 - protein, 121 aa, Gossypium hirsutum
  Clone ID: LIB3148-043-Q1-K1-E4.pep
QFFFLLRTLHSRMGLLHWMTYIQFTFLFNTTSLLIKPLLSQLNLLQPHPPSTKYLNYNLKPSYLNIYHYHNVLLQNQPLLIMQKYHHLHQNTPPFHLSYMLFSYNIHFQIQTFLLLSFTFT

SEQ ID NO: 95493 - protein, 45 aa, Gossypium hirsutum
  Clone ID: LIB3148-043-Q1-K1-F1.pep
CEVIGHSEPHLKLEIRLWWVQVGGGPILTGQQLAKTLLFHFASII

SEQ ID NO: 95494 - protein, 85 aa, Gossypium hirsutum
  Clone ID: LIB3148-043-Q1-K1-F11.pep
TWLLFYQKKKKKKREKKKKKKKKKKKKKKKKKKKKKKKKKKKKKKKKKKKKKGGGRFKGPKFTSPAWQGNSFFLGPPNLISGPGF

SEQ ID NO: 95495 - protein, 44 aa, Gossypium hirsutum
  Clone ID: LIB3148-043-Q1-K1-F2.pep
TPKGKVYKTQQISVHYMQEKSNGKLYVGDGDFVNPQINKVAGYL

SEQ ID NO: 95496 - protein, 82 aa, Gossypium hirsutum
  Clone ID: LIB3148-043-Q1-K1-F6.pep
LNFNNIIILFNLLYISFIFFFIFFKLKIPFEKILYRRFCKFPWRKKNITTSMSGEENILANLQSEEVPINYYKRQLRILVLI

SEQ ID NO: 95497 - protein, 49 aa, Gossypium hirsutum
  unsure (1)..(49): unsure at all Xaa locations
  Clone ID: LIB3148-043-Q1-K1-G8.pep
MNGQHLNGLNITSNQSQSLTNACRGCGSXAGNGGYSRGGSSSIYGDRQG

SEQ ID NO: 95498 - protein, 41 aa, Gossypium hirsutum
  Clone ID: LIB3148-043-Q1-K1-G9.pep
ERLGLVEGNVQSIKMGIVHYIERAYDSFLVSKKKKCKIRGY

SEQ ID NO: 95499 - protein, 81 aa, Gossypium hirsutum
  Clone ID: LIB3148-043-Q1-K1-H12.pep
NPWQKKKNENERGWPCTFGLRIMTIWTYWIDDTGDVHWTVWFYLYVLNFGFWVLGPGRFGPLQLVPKLIYLYQIGTYDFFF

SEQ ID NO: 95500 - protein, 61 aa, Gossypium hirsutum
  Clone ID: LIB3148-043-Q1-K1-H5.pep
WSFDPRVRPRVRPRVRPGFILTSNIYIRVSISNCFRFSAVIAHVLLSFDQTFHTPARLDKG

SEQ ID NO: 95501 - protein, 92 aa, Gossypium hirsutum
  unsure (1)..(92): unsure at all Xaa locations
  Clone ID: LIB3148-044-Q1-K1-A3.pep
FGQNSVEVNMGFLEPQQHIWRPQRGLPERSVAILRASVFEHFLYPYPTDTDKHMLATQTGLSXKYVSNWFINARVRVLKPMVEEIHMLESKC

SEQ ID NO: 95502 - protein, 136 aa, Gossypium hirsutum
  Clone ID: LIB3148-044-Q1-K1-A6.pep
PTRPPTLPKQAFAKGSKKGAQQTSLKSKVGIFVALAMVLQRKPDALISVLPKLRENSKYQGQDKPPIFVWTIVQASKGDLAVGLYLWAHLLLPVLSRKNCNPQSRDLILQLVEWILSVSKARSILVNNAVRKGERL

SEQ ID NO: 95503 - protein, 69 aa, Gossypium hirsutum
  unsure (1)..(69): unsure at all Xaa locations
  Clone ID: LIB3148-044-Q1-K1-B2.pep
MEGVVRLVSFKGGAGIFFFFFFFFFFFFWFVFFFFFFFLFFVFFFLXWFFFFKEDLYIIALDDNNNIHI

SEQ ID NO: 95504 - protein, 77 aa, Gossypium hirsutum
  Clone ID: LIB3148-044-Q1-K1-B5.pep
TANRPARLDGQYNFIAFFFQMTQSQNKTNPFFSCFFFPIISLQISDFMKLDSFNNAISLSNLLFPQCFEIKFTTMFF

SEQ ID NO: 95505 - protein, 63 aa, Gossypium hirsutum
  Clone ID: LIB3148-044-Q1-K1-C10.pep
PTRPVTEFITLDNILFFKRERKKKKKNKKKKKKKKKTCIQYKRVRSSYTSMLSSSFLYSNTFI

SEQ ID NO: 95506 - protein, 49 aa, Gossypium hirsutum
  Clone ID: LIB3148-044-Q1-K1-C12.pep
IFFFFFFFFFFFFFETEDSFYQSFWNYYIIYRSNSGKKRLTQSYPNAAP

SEQ ID NO: 95507 - protein, 92 aa, Gossypium hirsutum
  unsure (1)..(92): unsure at all Xaa locations
  Clone ID: LIB3148-044-Q1-K1-D10.pep
TSYDQYRGLHCSHLSLLITIIPLIVLHVLPEDVSRSEFGLRCLDGCRSCICIETRLKMCPRRVKRLVLSKKNVTNTVGVSGRVGRAGFSEXG

SEQ ID NO: 95508 - protein, 56 aa, Gossypium hirsutum
  unsure (1)..(56): unsure at all Xaa locations
  Clone ID: LIB3148-044-Q1-K1-D2.pep
XXFFFXXFFXXXRTXKQGSFYKGLNFECXNCQTTVSRRVQTILNYKXLSXRSRVTX

SEQ ID NO: 95509 - protein, 87 aa, Gossypium hirsutum
  Clone ID: LIB3148-044-Q1-K1-D3.pep
PTRPRASNYGFCNLKKCENNIRALDSPCANIRMEIGWPHGVPFVHPHDLPNKAKIGFLEAYEPGWTATHDMDLSLMEPAQTSQQYCN

SEQ ID NO: 95510 - protein, 65 aa, Gossypium hirsutum
  unsure (1)..(65): unsure at all Xaa locations
  Clone ID: LIB3148-044-Q1-K1-D9.pep
RQDLSVLXWKNQQFLETAYTIYSHITQLVSLVYTNTHLNIQQDEVCSASTKALITSIHTIPCNKT

SEQ ID NO: 95511 - protein, 63 aa, Gossypium hirsutum
  Clone ID: LIB3148-044-Q1-K1-E12.pep
HASGYSYFMFSVSYIQCCGCNLLSKLFAILAASPINYNKLYLNNLLGFQVIKFFIFMFVAFFC

SEQ ID NO: 95512 - protein, 59 aa, Gossypium hirsutum
  Clone ID: LIB3148-044-Q1-K1-E5.pep
PPVRMKTGYFFFTRVRFGWGWDQSKGLVIWSFKGGFSCGLVLNYNLKVVANDSYIVMQV

SEQ ID NO: 95513 - protein, 139 aa, Gossypium hirsutum
  Clone ID: LIB3148-044-Q1-K1-F1.pep
PTRPPTRPATFFMLATGTGIAAFRSFLWKMFFEKHDDYKFNGLAWLFLGVPTSSSLLYKEEFEKMKEKNPENFRLDFAVSREQTNEKGEKMYIQTRMAEYAKELWELLKKDNTFVYMCGLRGMEKGIDDIMVSLAAADG

SEQ ID NO: 95514 - protein, 65 aa, Gossypium hirsutum
  Clone ID: LIB3148-044-Q1-K1-F4.pep
RTRGVGRDMSICLFPPAKNGVGPCCILVLVVIDQLLYLSVQPVFPLKQSVVWIKKRNLLEMPGGS

SEQ ID NO: 95515 - protein, 73 aa, Gossypium hirsutum
  Clone ID: LIB3148-044-Q1-K1-G12.pep
PNTLHKILNMKLNLLHIKSTYKKICFKISIVSFNKIHLSKKIDLPVSPHRCPFTSKPFKWKHHVVLQTCQYKE

SEQ ID NO: 95516 - protein, 136 aa, Gossypium hirsutum
  Clone ID: LIB3148-044-Q1-K1-G2.pep
LANNPSDINFLFPRLSSRVWGAETVTGYDLQPDVNALGLGFSSGIVSSDTGDGDYRNGFNTNPTKQIQDVVTSNALLPCYSNIFGSTSTTTAPTIASLLASTLYQHKFMKCGVKNSSLPNQLQALSPFQDLQMTCN

SEQ ID NO: 95517 - protein, 52 aa, Gossypium hirsutum
  Clone ID: LIB3148-044-Q1-K1-G4.pep
KYSSHPATKPQKLSIQNKVVANWLDKSDFVCNIPGLVIRGPPYISLFWAHGP

SEQ ID NO: 95518 - protein, 68 aa, Gossypium hirsutum
  Clone ID: LIB3148-044-Q1-K1-G5.pep
VPLDDGIDDECSHFWLNPILGEVMEVFKPGAFVLQCGADSLSGDRLGCFNLSIKGHAECVKFMRSFNV

SEQ ID NO: 95519 - protein, 44 aa, Gossypium hirsutum
  Clone ID: LIB3148-044-Q1-K1-G9.pep
SVPSVNFGFFLFKKFRVSSQTGLSTTFMQALQMTYTVHNENSPY

SEQ ID NO: 95520 - protein, 95 aa, Gossypium hirsutum
  Clone ID: LIB3148-044-Q1-K1-H1.pep
PRVRWETWRMVSVAFLVAALISVSVISVVAAVKSAKPVIIGLASALTTAIVPLGTWCNNSWKRNKEKIKMKKKLTAIMEIFGSSATTIWMLVEQL

SEQ ID NO: 95521 - protein, 40 aa, Gossypium hirsutum
  unsure (1)..(40): unsure at all Xaa locations
  Clone ID: LIB3148-044-Q1-K1-H10.pep
VGDNNDNGISSNGGKCMRWSSVRTSPTCFLGLPAIXPVHS

SEQ ID NO: 95522 - protein, 52 aa, Gossypium hirsutum
  Clone ID: LIB3148-044-Q1-K1-H2.pep
NFTHVFKNSLTRRKCLIFDNSKNRALSCWVAISRLFKIIKYPFRTSLMFSKF

SEQ ID NO: 95523 - protein, 79 aa, Gossypium hirsutum
  unsure (1)..(79): unsure at all Xaa locations
  Clone ID: LIB3148-044-Q1-K1-H4.pep
NGPPLFFFFFFFFFFFFXERLILLLRLKIIPGAYCILLRRANIKIRMVNWQVKKLLEAIGKRPKILREPGNFELSGNRD

SEQ ID NO: 95524 - protein, 57 aa, Gossypium hirsutum
  Clone ID: LIB3148-045-Q1-K1-A3.pep
PAATNNKLLHNYIALKKHIDIHYYNLISTLVYLATSYCRIILPRTFYHENCIHLSSG

SEQ ID NO: 95525 - protein, 61 aa, Gossypium hirsutum
  Clone ID: LIB3148-045-Q1-K1-A5.pep
HASERGSFVPISCMYKDLDGTSLSCKLSMAAEDQKLVSKYALLMKKRMELENHLVKKLGRY

SEQ ID NO: 95526 - protein, 66 aa, Gossypium hirsutum
  Clone ID: LIB3148-045-Q1-K1-B10.pep
VLLFIFLTPFNTSHTLYLNFMTRTFSIHAIFHTFIHSFGQHLMYQHVNLLLNLKNPFPYPFLLTTF

SEQ ID NO: 95527 - protein, 81 aa, Gossypium hirsutum
  Clone ID: LIB3148-045-Q1-K1-B3.pep
PTRPPTRPVAKQSSVLSRSLEKRIVPRALFAQELSSKGLVNDFKLSVLFDTSEKTFNKMFGDYFVKKAPELLKLYKENVEK

SEQ ID NO: 95528 - protein, 64 aa, Gossypium hirsutum
  Clone ID: LIB3148-045-Q1-K1-B5.pep
RTRGRTRGLEQVIFKKETGTDKRVDCNSFCLKGILLLHFLFLFHFPFSNSTYLSAPANAMGNNP

SEQ ID NO: 95529 - protein, 47 aa, Gossypium hirsutum
  Clone ID: LIB3148-045-Q1-K1-C6.pep
VDYIRLSLLGNSISFFTYLLTPFSPYSLYLFLIIKKKAVAAKKKKKN

SEQ ID NO: 95530 - protein, 88 aa, Gossypium hirsutum
  Clone ID: LIB3148-045-Q1-K1-C8.pep
ADALEVLGNESPKSIVKGRLANNRNMDNDNNGVENSSHLTSNILAERRILDFSECETPRKETENGKSSTTAATMSFSSPSFYLFKKSG

SEQ ID NO: 95531 - protein, 139 aa, Gossypium hirsutum
  Clone ID: LIB3148-045-Q1-K1-D8.pep
ATRPPRVRHSFATRPPRVRPRVRKLFREIKGVVGDGEEIKEDDLQKMPYLKAVILEGLRRHPPGHFVLPHCVTEDTVLGDYLVPKNGTINFMVAEMGWDPKVWEDPMAFKPERFMRNEQVFDITGSREIKMMPFGVGRK

SEQ ID NO: 95532 - protein, 47 aa, Gossypium hirsutum
  Clone ID: LIB3148-045-Q1-K1-D9.pep
SHKINNKSKLHIRHIKIADLTQNFGHCKTSKAQNLSTTDACGRARVF

SEQ ID NO: 95533 - protein, 53 aa, Gossypium hirsutum
  Clone ID: LIB3148-045-Q1-K1-E10.pep
THSYYCVKYKYLIGVYFRWYIIIFFIKHLLFTLLLTLKTILFIFKYLIIILFF

SEQ ID NO: 95534 - protein, 45 aa, Gossypium hirsutum
  Clone ID: LIB3148-045-Q1-K1-E12.pep
DCINSSQLHARMSGLPTPIIPNTDGARNSIGQREVKCTRLSMMNL

SEQ ID NO: 95535 - protein, 100 aa, Gossypium hirsutum
  Clone ID: LIB3148-045-Q1-K1-F12.pep
LILLNQGFSHTPSFLNPGHFFYFGGPIKKNFFFINGEINFGFFKRAAPFFFFFFFFFFFFFFFFFFFFFFFFFFFFFFFFFFFFFFFFFKPKVIYSNILF

SEQ ID NO: 95536 - protein, 53 aa, Gossypium hirsutum
  Clone ID: LIB3148-045-Q1-K1-F2.pep
FLYIFIIISKFIYIFFFFFFFFFFFFFFFFFFFFFFFFFFFFFFFFFFFFFLV

SEQ ID NO: 95537 - protein, 49 aa, Gossypium hirsutum
  Clone ID: LIB3148-045-Q1-K1-G1.pep
KREDEIIYILYLFIYYFLFYIFFNIFFFFIFFFFFFFFFFFFFFFFFKL

SEQ ID NO: 95538 - protein, 46 aa, Gossypium hirsutum
  Clone ID: LIB3148-045-Q1-K1-G12.pep
RGPPFFFFFFFFFFFFFFFFFFFFFFFFFFFFFFFFFFFFSDRSIY

SEQ ID NO: 95539 - protein, 61 aa, Gossypium hirsutum
  Clone ID: LIB3148-045-Q1-K1-G5.pep
SDNGNCLLMVCGAMISTKKRRKKKKKERVMVPLSLPTLFVIVPCNVCISLWQSIQRNSILN

SEQ ID NO: 95540 - protein, 42 aa, Gossypium hirsutum
  Clone ID: LIB3148-045-Q1-K1-G6.pep
NNDAFEMFRVLNFMRYDFYRLKKKNSRKDIRSVYPIFFVPLL

SEQ ID NO: 95541 - protein, 69 aa, Gossypium hirsutum
  Clone ID: LIB3148-045-Q1-K1-H1.pep
KIKKTPGAAPFKDPILPPPSFQSKTLFLGPPNSIPRPAFYHPRTGKTLAFPNLIPLQANPLFPAWVITK

SEQ ID NO: 95542 - protein, 75 aa, Gossypium hirsutum
  Clone ID: LIB3148-045-Q1-K1-H2.pep
LMVRRIMEGNHRMGMVIRDPAADAIADFACEVEITECEPLPDGRFVLEIESRRIFRILRSWDHDGYHMTHSSLWI

SEQ ID NO: 95543 - protein, 54 aa, Gossypium hirsutum
  Clone ID: LIB3148-045-Q1-K1-H3.pep
PTRPDIEQFEAFPVSVNCYLRCHIVVEKRVVVCINVDKKNTTECVFMYRILLDN

SEQ ID NO: 95544 - protein, 117 aa, Gossypium hirsutum
  Clone ID: LIB3148-046-Q1-K1-B10.pep
SHNKKHTTPPRITTNNLKQTKEKSREYHPNMTNIEIEKLEATKSVRKIQPCTIEILEPTSHCPKISSDRHQINPRSKSRSTLCLLYYTSSMLERRTTHFDSSPISISLKYVTKGGYT

SEQ ID NO: 95545 - protein, 113 aa, Gossypium hirsutum
  Clone ID: LIB3148-046-Q1-K1-B11.pep
HATQLLTLSSTPATRCLVRISDFVLLACLSSNGESTQVSHSSINWSDFPNDFLFGASTAAAQTAGSAKSRSKGPSVWDQYIREYPDIIIYTSHLYATADSYNRYKDDVSILKD

SEQ ID NO: 95546 - protein, 37 aa, Gossypium hirsutum
  Clone ID: LIB3148-046-Q1-K1-B2.pep
FGLENNQFRNHGLEVPQLQEEFSSQMPFQKQQPSPIL

SEQ ID NO: 95547 - protein, 65 aa, Gossypium hirsutum
  unsure (1)..(65): unsure at all Xaa locations
  Clone ID: LIB3148-046-Q1-K1-B3.pep
TQKVASFGLQGDAAPHLKALLXSWSPLRNWTLRSTETPLENPHTKGHPFTHXFMGFLXKGXKKIX

SEQ ID NO: 95548 - protein, 46 aa, Gossypium hirsutum
  Clone ID: LIB3148-046-Q1-K1-B8.pep
KKIIKKKKLYITLFYNKALISDGGIHFISKACSLDLLITHFGFSPL

SEQ ID NO: 95549 - protein, 53 aa, Gossypium hirsutum
  Clone ID: LIB3148-046-Q1-K1-C6.pep
FKSCQRFVNCKPHFMLSFSIKIKLLLLIFYHFTQYYFFFSYLCKSFIFYSFSF

SEQ ID NO: 95550 - protein, 105 aa, Gossypium hirsutum
  unsure (1)..(105): unsure at all Xaa locations
  Clone ID: LIB3148-046-Q1-K1-C8.pep
MVSTKNKLLAVVQQRDYWKNPVAKQINRVAEHPFFSRCRNKEEGSNDRSXQQLSMLNGXWDARCSGSLTAAVVVTTSMMTAIVGSVLAAAPFAFFPFFVTTFGCF

SEQ ID NO: 95551 - protein, 57 aa, Gossypium hirsutum
  Clone ID: LIB3148-046-Q1-K1-C9.pep
VPLPVLCSSFPLKKSLVLCSGSAPPVTSQETNLVARCRRVYCHAHDYHINFIQITGS

SEQ ID NO: 95552 - protein, 71 aa, Gossypium hirsutum
  unsure (1)..(71): unsure at all Xaa locations
  Clone ID: LIB3148-046-Q1-K1-D10.pep
SYHAIMCSLISKQRDRRHKIFYISELYKLARQLILTLTNGTRINTHTRIWFFLNFIKXKKKIKNKYLKNKK

SEQ ID NO: 95553 - protein, 56 aa, Gossypium hirsutum
  Clone ID: LIB3148-046-Q1-K1-D4.pep
VYFNCFLLVILIVYNIQQAHKKYELFLNKSIDHYEKKKKKKKKIKKKINKKYKYNK

SEQ ID NO: 95554 - protein, 71 aa, Gossypium hirsutum
  Clone ID: LIB3148-046-Q1-K1-D5.pep
NCRLLLSSISIQPIMASRGAISSRYFSGKSSAIRYVMGWPHRHVIRFRTPLHPSLHRGYPNLSYQTASTFQ

SEQ ID NO: 95555 - protein, 80 aa, Gossypium hirsutum
  unsure (1)..(80): unsure at all Xaa locations
  Clone ID: LIB3148-046-Q1-K1-D7.pep
PRLPSRAPAXXXVFFFFXXXXGTKRKGIGYWMSHWILTYCSYICNYRWADLPLWSCSSFFNLWSGPFVFLGVWLVDWFLD

SEQ ID NO: 95556 - protein, 82 aa, Gossypium hirsutum
  Clone ID: LIB3148-046-Q1-K1-E1.pep
GMRRLGFLSKQRGECVCISCHIPLVRPNHVCEQLEVKTVNAFYMYLPSYRNSIRPCLVGLLVASDVIWYSCNLTSHVTDFYK

SEQ ID NO: 95557 - protein, 118 aa, Gossypium hirsutum
  Clone ID: LIB3148-046-Q1-K1-E6.pep
LAISVSQGEIEEEKLDCYDVHCYAASRNEIEEEVRREGSFELERVEMFEIEREVQRGESYGTAVAMTVRAIQESMLYNHFGNGINLDALFNNYGKMIDQEMAKQEIKPITFLLVLKKL

SEQ ID NO: 95558 - protein, 42 aa, Gossypium hirsutum
  Clone ID: LIB3148-046-Q1-K1-E7.pep
TYLNPNNVIILYNLKFNTQTHPLSPDSIKNKTKTKYTVTIYS

SEQ ID NO: 95559 - protein, 120 aa, Gossypium hirsutum
  Clone ID: LIB3148-046-Q1-K1-E8.pep
HASETSSKDRCCHNLDLEPLASGSTPKVEDPADQLLSSNLQRGYGECSFSAAGLITYSGPIAYSGSLSHRSDSSTTSTRSFAFPILQSEWNSSPVRMAKAERRHYRKHRGWRQGFLCCRF

SEQ ID NO: 95560 - protein, 40 aa, Gossypium hirsutum
  Clone ID: LIB3148-046-Q1-K1-F12.pep
WLKLSLCFAKSKEERPLSIRFFNQNDSYPRKKHIIKAKLL

SEQ ID NO: 95561 - protein, 40 aa, Gossypium hirsutum
  unsure (1)..(40): unsure at all Xaa locations
  Clone ID: LIB3148-046-Q1-K1-F3.pep
VXXPRPSXPTPXXARSGEAAXALEGXPSXYVAAWACXTSX

SEQ ID NO: 95562 - protein, 75 aa, Gossypium hirsutum
  unsure (1)..(75): unsure at all Xaa locations
  Clone ID: LIB3148-046-Q1-K1-F6.pep
LCVXXRXXLSXTRVWRIRYGVRGVXRGDPXLTNXNQXXLGPINXNLMGLSFISNPHLXSLYHXEGTIXSSGSKWG

SEQ ID NO: 95563 - protein, 44 aa, Gossypium hirsutum
  Clone ID: LIB3148-046-Q1-K1-G6.pep
PKQECLIWIFIYIYTSGLVYVAIYCIICWFISIPPSNKRQINND

SEQ ID NO: 95564 - protein, 65 aa, Gossypium hirsutum
  unsure (1)..(65): unsure at all Xaa locations
  Clone ID: LIB3148-046-Q1-K1-G7.pep
ESFFFSXRMDVKPAGYYTDVRKVQKTVLSFXMPVLFWGASKLVAVGYGIKNLHIMLSIIYDSLFC

SEQ ID NO: 95565 - protein, 87 aa, Gossypium hirsutum
  unsure (1)..(87): unsure at all Xaa locations
  Clone ID: LIB3148-046-Q1-K1-H5.pep
PRNFYKLQFDPNIFSKLHFGPKNLSCVYDLIPLAATDPSCTYNGGGRXRPFLAHLLPSAKRTAAALKRARRTGRGRRKMKDAYAWLG

SEQ ID NO: 95566 - protein, 93 aa, Gossypium hirsutum
  Clone ID: LIB3148-047-Q1-K1-A2.pep
TTTSLPSFCCMVLMTGRPISIHLHMLVIPLRSIKWFDICIFFPNFSLGFFRSVFFLVPLHMLAIYIPSRIAVAILALLYEFTFSHPTLRLYLE

SEQ ID NO: 95567 - protein, 56 aa, Gossypium hirsutum
  Clone ID: LIB3148-047-Q1-K1-A3.pep
KYLFFCLFFFYKIFFFFFSFFFFFFFFFFFFFFFFHGRLLVYTLQKSPSSKDIFQA

SEQ ID NO: 95568 - protein, 52 aa, Gossypium hirsutum
  Clone ID: LIB3148-047-Q1-K1-A5.pep
FRSKKKKKKFFLKKKKKKKKERKNKREKKKKKKKKKKKKKKKKKKKKRGRPF

SEQ ID NO: 95569 - protein, 110 aa, Gossypium hirsutum
  Clone ID: LIB3148-047-Q1-K1-A7.pep
QKLAACGFADEAVEKWASASNLASLSLLAEPRLQGSLLKVTAFLFNQAKNIRVEEDREESSKENWSQTKMKMITSWLPLLCRGSNGSDVPVLSISERAELEKILEDAIEK

SEQ ID NO: 95570 - protein, 48 aa, Gossypium hirsutum
  Clone ID: LIB3148-047-Q1-K1-C1.pep
MSSPSKRREMDLMKLMMSDYKVEMINDGMQEFYVEFNGPKDSKKKSLL

SEQ ID NO: 95571 - protein, 38 aa, Gossypium hirsutum
  Clone ID: LIB3148-047-Q1-K1-C2.pep
MGFKLKMGVSPHPEKCLGLIPHPPPKFYDNNKMGSPLS

SEQ ID NO: 95572 - protein, 57 aa, Gossypium hirsutum
  Clone ID: LIB3148-047-Q1-K1-C5.pep
NLQPKSTKPNWKFDIFLNTSTNLLSKLFEICLGVLIFYLSNPVGIDHQCSVIKNGIK

SEQ ID NO: 95573 - protein, 90 aa, Gossypium hirsutum
  Clone ID: LIB3148-047-Q1-K1-C6.pep
ATQVGYMTSKGFMVPLLNSLVQISLLHPTSKEDFDFIAKSVAEDEDSRPLSFPSEGRNNGVPFVKSPLQGMFVHISLEMVNHWLVPVCTL

SEQ ID NO: 95574 - protein, 66 aa, Gossypium hirsutum
  Clone ID: LIB3148-047-Q1-K1-D1.pep
MTTVRLLMKQKLPPATIFPAFTCRVRVQYSCGKDRKSLTLPCDVWRMNGGGIAWRLDINAALCLGR

SEQ ID NO: 95575 - protein, 130 aa, Gossypium hirsutum
  Clone ID: LIB3148-047-Q1-K1-D10.pep
MVMVFGEITTKAKVNYEKIMRDTCRGIGFTSADVGLDADKCNVLVNIEQQSPDIAQGVHGHLTKKPEEIGAGDQGHMFGYATDETPELMPLTHVLATKLGAKLTEVRKNKTCPWLRPDGKTQVTVEYKND

SEQ ID NO: 95576 - protein, 64 aa, Gossypium hirsutum
  unsure (1)..(64): unsure at all Xaa locations
  Clone ID: LIB3148-047-Q1-K1-D12.pep
GFWAILGHCNGLFNYFNFGCFAGMAQAKIRLYNFYNFXXLNQIFIIKKKKKKKKKNAREGILYK

SEQ ID NO: 95577 - protein, 44 aa, Gossypium hirsutum
  Clone ID: LIB3148-047-Q1-K1-D3.pep
NIFKNPRPMIHVCIDCTWRLYLLYKFILMIFKIIRINLLIKIDL

SEQ ID NO: 95578 - protein, 137 aa, Gossypium hirsutum
  Clone ID: LIB3148-047-Q1-K1-D7.pep
EKLRRFALYLRAGGLTDVGLSYIGKYSPNVRWMLLGYVGESDAGLLAFSRGCPSLVKLEMRGCCFSEQAIAQAVMRLPSLRYLWVQGYRASPAGRDLLAMARPFWNIELIPARRVNMTNQVGEPVVVEHPAHILAYY

SEQ ID NO: 95579 - protein, 73 aa, Gossypium hirsutum
  Clone ID: LIB3148-047-Q1-K1-E1.pep
LLNLIFFFFFFSSTEISYKKKEITIMNTGPCIYITLLENHFLTEHEQAPFITTLHIIGFIKYAWPQPSSCTPG

SEQ ID NO: 95580 - protein, 67 aa, Gossypium hirsutum
  Clone ID: LIB3148-047-Q1-K1-E12.pep
KNGSFFQKKKKKKKRKKKEKKKKKKKKKKKKKKKKKKKKKKKKKKKKKKKKGGPLLKNQILLPRFSK

SEQ ID NO: 95581 - protein, 50 aa, Gossypium hirsutum
  Clone ID: LIB3148-047-Q1-K1-E3.pep
LLRCISHACGNTHYNPIYSNSRNKDNKKPKSTLVFDLMGPRRKIKIYAHG

SEQ ID NO: 95582 - protein, 51 aa, Gossypium hirsutum
  Clone ID: LIB3148-047-Q1-K1-E5.pep
KRLLNSLQPPFHSQNPRQYHKLSSDRTSSERPNSFNFLRYYYTLKYHCQKN

SEQ ID NO: 95583 - protein, 68 aa, Gossypium hirsutum
  Clone ID: LIB3148-047-Q1-K1-E7.pep
ILTRLTAKYQHECHIITKIKRSTLTVYIYFDLTSWHMRSKPRFVLFFFFSFFFLLNKLDFNVCYRMHG

SEQ ID NO: 95584 - protein, 49 aa, Gossypium hirsutum
  Clone ID: LIB3148-047-Q1-K1-F11.pep
LIFSIMHTCLMQKETNKHSYFINSHTLYTLHIDKGFASHNCRSKPLIIT

SEQ ID NO: 95585 - protein, 126 aa, Gossypium hirsutum
  Clone ID: LIB3148-047-Q1-K1-F3.pep
KINISLTISETSELKLSAGNGDCVLHMNPLVPEGNFFLNLPSYDKLLTPVNGAYFLIATIVILGGSWACCMFRKGRRHDGGIPYQELEMGLPESMQATEVETAEGWDQGWDSDWDEDKAVKSPMGR

SEQ ID NO: 95586 - protein, 44 aa, Gossypium hirsutum
  Clone ID: LIB3148-047-Q1-K1-F4.pep
HASGLYSTHSYNHGLSKYPLCLYPKRFVECDLNYEVHAGIDIVF

SEQ ID NO: 95587 - protein, 45 aa, Gossypium hirsutum
  Clone ID: LIB3148-047-Q1-K1-F9.pep
YYNVFVLIYDNAHYLSYFCSDLMHTTILVQCLSIIVSKWYELWTK

SEQ ID NO: 95588 - protein, 39 aa, Gossypium hirsutum
  unsure (1)..(39): unsure at all Xaa locations
  Clone ID: LIB3148-047-Q1-K1-G10.pep
EXPGCEPHAXPVLXXCILKLEICYASYLNLXVYKVRXGF

SEQ ID NO: 95589 - protein, 53 aa, Gossypium hirsutum
  unsure (1)..(53): unsure at all Xaa locations
  Clone ID: LIB3148-047-Q1-K1-G11.pep
LALPLRALNKPYHFLDFFLRQPIGRGPVFPKKNNXKKKKKKKKLINFKLIYNK

SEQ ID NO: 95590 - protein, 91 aa, Gossypium hirsutum
  unsure (1)..(91): unsure at all Xaa locations
  Clone ID: LIB3148-047-Q1-K1-G12.pep
KPGRPTRPGLACMYSCFFLXKMRNQYMVGRYTXPDGCLHLCCEVCALCQEYRELKSRGFDMYIGWHANMENMRNRAMQMSMPPVVEDGMKR

SEQ ID NO: 95591 - protein, 94 aa, Gossypium hirsutum
  unsure (1)..(94): unsure at all Xaa locations
  Clone ID: LIB3148-047-Q1-K1-G9.pep
HNLCISYILFFILNFFLIILYFFYFLFFXSFFYLYILFFPLIFYFIFIFLITFYFFFLYFPLYFFYFFFLFLIFFSFLFLFFYLLFLFIIYFFY

SEQ ID NO: 95592 - protein, 87 aa, Gossypium hirsutum
  unsure (1)..(87): unsure at all Xaa locations
  Clone ID: LIB3148-047-Q1-K1-H10.pep
NPGSLXWQLGFGRKNHPHYAQSLXDRAIXLLLTIDLHYXSXCSRNLERMXKFGGDMIPKKALQRNPFLKHPSPXXRVHCXSEDPMER

SEQ ID NO: 95593 - protein, 91 aa, Gossypium hirsutum
  unsure (1)..(91): unsure at all Xaa locations
  Clone ID: LIB3148-048-Q1-K1-A10.pep
MKIPKPISPFRLSSLLRTQKDPTLAFNLVKNPNPDLXSYDLIITKLGRVKMFQEMEQVLHQLKSDTRIVPEEIIFCNVIKFYGRAKLHERA

SEQ ID NO: 95594 - protein, 48 aa, Gossypium hirsutum
  Clone ID: LIB3148-048-Q1-K1-A12.pep
NTNFSFLINDKIHYFFFVYKKMGYTYFNNCMKNDDQDETMAVAAPENL

SEQ ID NO: 95595 - protein, 64 aa, Gossypium hirsutum
  Clone ID: LIB3148-048-Q1-K1-A3.pep
KKKKKKKKKKKKKKKKKKKKKKKKKKKKKKKKKKKKKKKKKKKKSKITKKKINKNKKIYGGGPL

SEQ ID NO: 95596 - protein, 60 aa, Gossypium hirsutum
  Clone ID: LIB3148-048-Q1-K1-A4.pep
SSLPKHSDSSFGFLTSLTTINMFFIKEYLPYNCSKCCNLQQSQRPTSAIHRTRGRTRGSA

SEQ ID NO: 95597 - protein, 71 aa, Gossypium hirsutum
  Clone ID: LIB3148-048-Q1-K1-A8.pep
ANMDFTVNIPKGVQVDWEAIVNFDANSFMDSVKSWLYPSLKISSSWKDFPDVTSTFATTGSVVAALSSYDD

SEQ ID NO: 95598 - protein, 59 aa, Gossypium hirsutum
  Clone ID: LIB3148-048-Q1-K1-B1.pep
NPLFLKKKKKKKKKKKKKKKKKKKKKKKKKKKKKKKKKKKKKKKKKKKKKKKKKKGGAL

SEQ ID NO: 95599 - protein, 77 aa, Gossypium hirsutum
  Clone ID: LIB3148-048-Q1-K1-B2.pep
TLPITPNRRLTYIVSPSVYSQPGVCEWSSIPHDQNDYCIIGNWTREIIAIKSIVKLMALDCSKFCHFLVLSCHISRI

SEQ ID NO: 95600 - protein, 123 aa, Gossypium hirsutum
  Clone ID: LIB3148-048-Q1-K1-B7.pep
NFNKTGMRPVVTTAWVVTVGAIKKTLSRLLILSVSMGYGVVRPTLGGLTSKVLLIGATYFVASELLDITEHVGTINDVSGRARLFLGLPDAFLDAFLILWILTSLSKTLEQLQAKRISVKLDI

SEQ ID NO: 95601 - protein, 53 aa, Gossypium hirsutum
  Clone ID: LIB3148-048-Q1-K1-B9.pep
PRVRKIYPVSKELFALSYDVVQKPDLRYFKFSPDGKKSPDVEIPLPVPTASII

SEQ ID NO: 95602 - protein, 47 aa, Gossypium hirsutum
  Clone ID: LIB3148-048-Q1-K1-C5.pep
RTELEKNNESTELIITRRSSITHKVHPHPSLDRAKTLLFAHLLKQPL

SEQ ID NO: 95603 - protein, 87 aa, Gossypium hirsutum
  Clone ID: LIB3148-048-Q1-K1-C8.pep
RQFRNSSFLQKRVKMGMSWILIKLGFFRVFHVNEFVYQWPVVCILVALFISYCFCMNAHVFFFFFIFFCPFFFLFFSSGIPTLEPFT

SEQ ID NO: 95604 - protein, 55 aa, Gossypium hirsutum
  unsure (1)..(55): unsure at all Xaa locations
  Clone ID: LIB3148-048-Q1-K1-C9.pep
TVDLRLYNTHVYNLIINLNIPQINVCLHEHDPLQFQIDEWIGFVFFSKXXXXKKI

SEQ ID NO: 95605 - protein, 91 aa, Gossypium hirsutum
  unsure (1)..(91): unsure at all Xaa locations
  Clone ID: LIB3148-048-Q1-K1-E1.pep
QAGGQPFRPPVRLETTCICVSCHLILSLARYGILMFEYVSFSFFSSLLPXRISYDLKLIIDLMHRRHPVLSYIFRAMLFGHHIFNKSWGYX

SEQ ID NO: 95606 - protein, 76 aa, Gossypium hirsutum
  Clone ID: LIB3148-048-Q1-K1-E6.pep
GRVLRVSNLGSLICAAPCFSFFCTICLIVPKCRAPNQEEIFYIFFLFFFSFLIFLFVLLFVSLPSAGERPNQMIKW

SEQ ID NO: 95607 - protein, 98 aa, Gossypium hirsutum
  Clone ID: LIB3148-048-Q1-K1-F10.pep
HASAHASAKYWLFMHFFSMDKYALDALLINEYSCLVSRCFLWYNETSTCMVTGADVLQKKGLHERQRWTNIYILVGFFVFYRLLCLLVLIRRVSRSKK

SEQ ID NO: 95608 - protein, 64 aa, Gossypium hirsutum
  unsure (1)..(64): unsure at all Xaa locations
  Clone ID: LIB3148-048-Q1-K1-F5.pep
IFFXKKATRFRRSPFLCFFNKIIFFKPLVRLHVGKHSLQYFSKHLLNSVFSNKHVYFLWPEGVG

SEQ ID NO: 95609 - protein, 55 aa, Gossypium hirsutum
  Clone ID: LIB3148-048-Q1-K1-F6.pep
DLNKVHCVQHPYIILYNMQFNVINAYSFYAVGIQIPCLNGTAAQQSFKSLFHLLS

SEQ ID NO: 95610 - protein, 46 aa, Gossypium hirsutum
  Clone ID: LIB3148-048-Q1-K1-F9.pep
LGNARDPLYFIRVVITEGVLASVILLYRSIQYHNMFTFVLLMNDLT

SEQ ID NO: 95611 - protein, 84 aa, Gossypium hirsutum
  Clone ID: LIB3148-048-Q1-K1-G10.pep
PTRPPTRPLLPHAVSCYFPKGVSVIGVQLENDVSRAPLVAICWILFLGLFFDFALDYFCFRLLFVWFFSLFVQTGLLRLITLWL

SEQ ID NO: 95612 - protein, 52 aa, Gossypium hirsutum
  Clone ID: LIB3148-048-Q1-K1-G6.pep
FIFFFFLFFFFIFFVKKNIIDIPALMVIKGQAKKQDCSPILTRLQKYQCIVH

SEQ ID NO: 95613 - protein, 49 aa, Gossypium hirsutum
  Clone ID: LIB3148-049-Q1-K1-A10.pep
MCIKSRTFKLAGSSCSKHCFHGHSHARCFSNDMLTAHKLTYIVPSFHNC

SEQ ID NO: 95614 - protein, 87 aa, Gossypium hirsutum
  Clone ID: LIB3148-049-Q1-K1-A3.pep
PHIFKHTHTAITFVKLVTFIPSKWGASLSLSLSVSFHIYYGRLRLGLSCYPYILLVLGGGRDLVYQSSIFISNDRNKLNSLKQNITY

SEQ ID NO: 95615 - protein, 67 aa, Gossypium hirsutum
  Clone ID: LIB3148-049-Q1-K1-A8.pep
VSGYLNLGLVFVILFSFLWEFFLLPFFTFEQEFSVISYLVQVNCIFTHFLYLQRCKDDPRKHLMKEM

SEQ ID NO: 95616 - protein, 68 aa, Gossypium hirsutum
  unsure (1)..(68): unsure at all Xaa locations
  Clone ID: LIB3148-049-Q1-K1-B11.pep
PLFSFCIFQEPETTYFAFMKALRKMRFNVXFGIPLHEXHWRYRNTTKRFFXFGSXFQAYAFITYEPYI

SEQ ID NO: 95617 - protein, 54 aa, Gossypium hirsutum
  Clone ID: LIB3148-049-Q1-K1-B8.pep
VEATPTQWTPMKRAKTSEDPYEPPQRLSFLLSVVVCLCQFNSSLPPWFFFLFFK

SEQ ID NO: 95618 - protein, 64 aa, Gossypium hirsutum
  Clone ID: LIB3148-049-Q1-K1-C12.pep
NFTSGGTGCIHMVTSHPQGKHLFMISILVCLFKFLLSAGQPCFISTTPPMCFLYCMVYIFFFCF

SEQ ID NO: 95619 - protein, 75 aa, Gossypium hirsutum
  Clone ID: LIB3148-049-Q1-K1-C4.pep
GPRFTTALYGPIRALLHGNYTHHSLNTWALDDLASMRLYPQVPGYPISGSFFFPSFFFSFFSLVFMFADNSRWIS

SEQ ID NO: 95620 - protein, 58 aa, Gossypium hirsutum
  Clone ID: LIB3148-049-Q1-K1-C6.pep
EDLMKCVPTISRKIAVCITRRANKKKLYLMFIVYFMEEPKEFRSKFYLYEHNSKTSTT

SEQ ID NO: 95621 - protein, 64 aa, Gossypium hirsutum
  Clone ID: LIB3148-049-Q1-K1-D1.pep
NIEMVMSYLLSSLVIKLTYFERNAFHLSTCLTVFQNQKHSLLSFVGYSNTWHNIINHKKTILHG

SEQ ID NO: 95622 - protein, 124 aa, Gossypium hirsutum
  Clone ID: LIB3148-049-Q1-K1-D11.pep
DSECEIQVSSHQSPFTSEGTPMALVEHTPKGIYGHITALVISFLTLFSIIRTMVLHLMKKSSVSDLTCNIPDQHVESTFKDETPPPSTAPRFTKGDLVSSGVRKLGDLKKKGEKLQSKRFEMPY

SEQ ID NO: 95623 - protein, 47 aa, Gossypium hirsutum
  Clone ID: LIB3148-049-Q1-K1-D12.pep
SHVFRYCLGCSQRALPNKVDCSTVASASFFTATMAIQSNSTCGTSIQ

SEQ ID NO: 95624 - protein, 37 aa, Gossypium hirsutum
  Clone ID: LIB3148-049-Q1-K1-D5.pep
YHSSFYFFLNIAILVFIFIFFKDFIFFFFQQSAITFK

SEQ ID NO: 95625 - protein, 48 aa, Gossypium hirsutum
  Clone ID: LIB3148-049-Q1-K1-D8.pep
RTRGPTHRNIDNKFSGKNYSSLALVDEEGLRYFKQQQITVYRLPLHDT

SEQ ID NO: 95626 - protein, 144 aa, Gossypium hirsutum
  Clone ID: LIB3148-049-Q1-K1-E1.pep
TDFIGLNQYTSRLVSHAKDSVEEGHFEKAQQVAKIVEWEDGEIIGEKAASEWLYIVPWGMRKVLNYISHTYNNPPIYIMENGMDDEMNENVPIPEMLEDKKRIEFYKGYLASVAQAIKDGVDVRGYCAWSLLDKLEWSHGYTKR

SEQ ID NO: 95627 - protein, 80 aa, Gossypium hirsutum
  Clone ID: LIB3148-049-Q1-K1-E12.pep
LPSRSNVERKSLSRPVLDPKCKYCSQDAYARLKPQVFVSVLYEKLSTSSHILVGVPIHALKRHYWARTLALGIIGSGAPT

SEQ ID NO: 95628 - protein, 71 aa, Gossypium hirsutum
  Clone ID: LIB3148-049-Q1-K1-E4.pep
KKKKKGRKNTELHNERKYTQQSNLTIYTMTVLIRKLYAIAWMVDWFQYLDTWGGRSLILTRFKTRLMRLQC

SEQ ID NO: 95629 - protein, 110 aa, Gossypium hirsutum
  unsure (1)..(110): unsure at all Xaa locations
  Clone ID: LIB3148-049-Q1-K1-E7.pep
MAEKNQLPRKPYYHTSDRPLWYPLAVASDWLDRCLLGDYRFDPFRLGKRSEYGPYDXNSLDQNLSKIMAGXIIVTRTEVADGKATPFQPHNKVFGLLRYREXELIHGLFS

SEQ ID NO: 95630 - protein, 42 aa, Gossypium hirsutum
  Clone ID: LIB3148-049-Q1-K1-F10.pep
YITIKVDATINFVFTGHKSVLLFCKHADCYLKHLIKILPVHI

SEQ ID NO: 95631 - protein, 141 aa, Gossypium hirsutum
  Clone ID: LIB3148-049-Q1-K1-F12.pep
LMHPPGCMNSARVFFFFYFLFFIFGWVFFFFFFSLFPNKDYFINHFGILHFQAMKLHFLPTRGWIFFFFLQQKVDCQRSQTRGGRYIYIFLFLFLSWGGFSFFGMKLYKALPEMIYLHIIFSIKNNHSHPIQIMPLKFPFL

SEQ ID NO: 95632 - protein, 63 aa, Gossypium hirsutum
  Clone ID: LIB3148-049-Q1-K1-F3.pep
HACGQASTHLLVPAFAAFNNVVAHQQQCREADFSKKKKENACLSDVSHPIGSCRRSLNSLRLV

SEQ ID NO: 95633 - protein, 122 aa, Gossypium hirsutum
  unsure (1)..(122): unsure at all Xaa locations
  Clone ID: LIB3148-049-Q1-K1-F4.pep
PTRAVGFADERVEERIADDDVGTIKGTTSTSAVSMILKGAHDYMLDEMDRALHDALCTVKWTLVSNTVVAGGGAVXAALSVYLEYLATTLRSREREATAELAKTPLIIPNVPAIDAAKDATE

SEQ ID NO: 95634 - protein, 94 aa, Gossypium hirsutum
  Clone ID: LIB3148-049-Q1-K1-F6.pep
LWYAYCLTCSIGLLSSFSIVKMFSWKNTANFLSRSSNLTSVSGKLHRWTSYIYRCPIQFSGKFFDIIDCFLGKNKLYLYKLLHLIQQRTKLLIE

SEQ ID NO: 95635 - protein, 86 aa, Gossypium hirsutum
  Clone ID: LIB3148-049-Q1-K1-F7.pep
HGVLIGMPVSLFDYGLLTSGGSFPGKRLPLFFPESVSLHQLLSNFIFGHHIFIDVLFSLTDKCLTLLIASWEKTNSIYTSFSVSYL

SEQ ID NO: 95636 - protein, 62 aa, Gossypium hirsutum
  Clone ID: LIB3148-049-Q1-K1-F9.pep
SRVSKNKLGSIFFYPNTGLWRGGFHFRLKSPAHLEKSSHVISIHSDRVALADQIITPRRITN

SEQ ID NO: 95637 - protein, 45 aa, Gossypium hirsutum
  Clone ID: LIB3148-049-Q1-K1-G5.pep
PRVRKDPRPYLNVIFSTVNRMKILGIYEKAQVLKSNKNKKEKYIS

SEQ ID NO: 95638 - protein, 40 aa, Gossypium hirsutum
  Clone ID: LIB3148-049-Q1-K1-G8.pep
GKKNYASLKQSDNAHQLKTFYKEEKKSFSIYKITNYRHYL

SEQ ID NO: 95639 - protein, 110 aa, Gossypium hirsutum
  Clone ID: LIB3148-049-Q1-K1-G9.pep
TVPNASGDPTFLTLLDTHNTNLGATEKDPQKSNHELTVKDSKYQKAVLSLYNGKAYLVVNVAYKCALTDKNYAHLTDLYNKFNGPGLEIYSFPCNQDLSQEPVTRQDAQE

SEQ ID NO: 95640 - protein, 91 aa, Gossypium hirsutum
  unsure (1)..(91): unsure at all Xaa locations
  Clone ID: LIB3148-049-Q1-K1-H1.pep
PTRPSLCWIRLGQAEHALTDARACKALKPDWPKACYKKRAALRLXQKFIEQLMAFTKVCQLAPKIKNLXNAFKETSETGKKVHGTHQKKSN

SEQ ID NO: 95641 - protein, 57 aa, Gossypium hirsutum
  Clone ID: LIB3148-049-Q1-K1-H12.pep
CDIHMGCKVDEMSIFYKYLNVLGLLRKFMRIVRSHLLGINSYVDMSSMCQSCYVSQP

SEQ ID NO: 95642 - protein, 42 aa, Gossypium hirsutum
  Clone ID: LIB3148-049-Q1-K1-H8.pep
QCLCHCPIGPIFLRPTSLFLFLYYQLSFTLTGETFFLLLSRL

SEQ ID NO: 95643 - protein, 65 aa, Gossypium hirsutum
  Clone ID: LIB3148-049-Q1-K1-H9.pep
HASGDVNELNYSNGFDSSPSPDQPPMDFSDEMLKEWTAAASTHCCHQSAASNLQSLPPFIENGIE

SEQ ID NO: 95644 - protein, 59 aa, Gossypium hirsutum
  Clone ID: LIB3148-050-Q1-K1-A10.pep
HASAHASGTNYVEGTCSSLGTHFGAPKLILSRLYCYCLYSPAYHYFISATLWCEMLDPW

SEQ ID NO: 95645 - protein, 73 aa, Gossypium hirsutum
  Clone ID: LIB3148-050-Q1-K1-A8.pep
EGRPFFIFFFFFILFIFINFFFFLFFFFFFFFFFFFFFFFTGRFIFHILFIFPFTLYGTTKDEKRQNRVPDAW

SEQ ID NO: 95646 - protein, 50 aa, Gossypium hirsutum
  Clone ID: LIB3148-050-Q1-K1-B12.pep
PTRPPGPIILLHWSGKGKPGLRLDSRKPCVVDHLWAPYDLYGSSDHSLEE

SEQ ID NO: 95647 - protein, 55 aa, Gossypium hirsutum
  Clone ID: LIB3148-050-Q1-K1-B3.pep
ITSDYLSNNKIKEDHDDDNDQAFIRETVTFTNSLFSLDTRSEIISLYLRKTGRVG

SEQ ID NO: 95648 - protein, 66 aa, Gossypium hirsutum
  Clone ID: LIB3148-050-Q1-K1-B4.pep
TVLALHGFVIMGYTKIFTFSYKPNQYCKMQFHSRLSYIVILSTFSCLGPYESSIIYSYSAAPLPFP

SEQ ID NO: 95649 - protein, 122 aa, Gossypium hirsutum
  Clone ID: LIB3148-050-Q1-K1-B6.pep
MRKSPKQEDSARFNAKLNTGNKSVKEPIRKKVIEAQPSSYKKIETVARQTPDRINQSVSSTRGDAKSNARRFHFKSGERAERRKEFYMKLEEKMHAKEAEMNQIQARTQEKTEAEIKQLRKK

SEQ ID NO: 95650 - protein, 43 aa, Gossypium hirsutum
  Clone ID: LIB3148-050-Q1-K1-C1.pep
LNIDDHKNFIVHQFNLTEKLFFLRQMYNLKTLKLGAQVKAQSL

SEQ ID NO: 95651 - protein, 86 aa, Gossypium hirsutum
  Clone ID: LIB3148-050-Q1-K1-C3.pep
FQFCFFHKAVKIRSKEKIVHGLKFEDSWCNDTKFLKEKMFNSFSNYFNSSSRKWLVDMALNFKKIFEEDAAKLKLSFTLKGIKKAL

SEQ ID NO: 95652 - protein, 36 aa, Gossypium hirsutum
  Clone ID: LIB3148-050-Q1-K1-C6.pep
TKWVIKFFIAKGFLSYKLSRFLINGPKQIETRGYVY

SEQ ID NO: 95653 - protein, 86 aa, Gossypium hirsutum
  unsure (1)..(86): unsure at all Xaa locations
  Clone ID: LIB3148-050-Q1-K1-C9.pep
GKPGLDCGARIFRNPRSFWGIPPIWATVWACNSGLGVGKWFWVSEFVLWVCIVFGLVSAFVIWTLTGLYYFFVXXKIIYFLFFINI

SEQ ID NO: 95654 - protein, 59 aa, Gossypium hirsutum
  Clone ID: LIB3148-050-Q1-K1-D1.pep
KKKKKKKKKKIKRATDLKRGSLQTHTCKRPTSFMVSPIFNPVSGRRTSYFLAILWVHPT

SEQ ID NO: 95655 - protein, 48 aa, Gossypium hirsutum
  Clone ID: LIB3148-050-Q1-K1-D10.pep
YFQGMPSKATPMAVEGSHVPVRATDRVPTSVSFLRNPLSNGLCCWFIC

SEQ ID NO: 95656 - protein, 113 aa, Gossypium hirsutum
  Clone ID: LIB3148-050-Q1-K1-D4.pep
HASATTPFIIKCGANSNSELVIKADAKVQEPKGGEIVRVVPRPSVLENMSLDEMKQIFSELPEALSLLALARTADGTRARYSRLYRTLAMKVPSLRDLVGELEKGGVLKDVNL

SEQ ID NO: 95657 - protein, 75 aa, Gossypium hirsutum
  Clone ID: LIB3148-050-Q1-K1-F11.pep
HASVSSSTFLGVAVILGLVVASMSPYVEAQSASPAPSPTSDGTSIDQGIAYVLMAVALVLTYLIHPLDSSSYTFF

SEQ ID NO: 95658 - protein, 121 aa, Gossypium hirsutum
  Clone ID: LIB3148-050-Q1-K1-F2.pep
PTRPVGNLRHKRLVNLIGCCAEGDERLLVAEYMPNDTLSKHLFHWEKQPLPWEMRLRVAYHIAQALEHCNAQGLKIYHDLNAYRVLFDEEGDPRLSSFGLMKNSRDGKSYSTNFAYTPSDF

SEQ ID NO: 95659 - protein, 124 aa, Gossypium hirsutum
  Clone ID: LIB3148-050-Q1-K1-F8.pep
MGFPVGFSAVLFPKPLLPTLTLLLYLRDFISALFLFLGFPDFLEPHVPPTHTADTGVPAARHRDTSITALLLRELLPVVKFSDLVDPPDSCAVCFYDFEREDEIRWLTNCRHVFHRSCLDRWMG

SEQ ID NO: 95660 - protein, 87 aa, Gossypium hirsutum
  Clone ID: LIB3148-050-Q1-K1-G1.pep
RKKHYWQFTYEHFYIILCLFYQKKKSYIALVETIQFMDTVLSYIRAYNPSIKEYVCNHSQYQIGFTSSVTVAESTPAGINLSDFIIG

SEQ ID NO: 95661 - protein, 44 aa, Gossypium hirsutum
  Clone ID: LIB3148-050-Q1-K1-G3.pep
KYIFFIFPKRVTERSTVSFHVSMGHILVQQMRQQIRALFMAVLL

SEQ ID NO: 95662 - protein, 49 aa, Gossypium hirsutum
  Clone ID: LIB3148-050-Q1-K1-G6.pep
DFRRLWSVLVVHFAHVTLTLNEICLRVKWTWAVIPSFYFVIICKYHTNK

SEQ ID NO: 95663 - protein, 55 aa, Gossypium hirsutum
  Clone ID: LIB3148-050-Q1-K1-G9.pep
KKGQWSEFRGRKHGTYKVARPCLLALDSFYNGRPFFFFFFFFFFFFFFFFFFFFF

SEQ ID NO: 95664 - protein, 56 aa, Gossypium hirsutum
  Clone ID: LIB3148-050-Q1-K1-H10.pep
IFKRGPPFFFFFYFFLFFFIFFFFFFFFFLFFFFFFPPFFFFFFFFIFFFFFIGRV

SEQ ID NO: 95665 - protein, 131 aa, Gossypium hirsutum
  Clone ID: LIB3148-050-Q1-K1-H9.pep
MEESGLRRFVRCNSGLGRKRIEISNEIEEFSPIDSPTKVPLLKRHCSERIKKMMMIDDCDEKSVLESLPQDVLVKIICGVDHEDLKQLFKVSKSIREITVIAKKMHFAYSTPRKVKAFRTSIDLEERSELK

SEQ ID NO: 95666 - protein, 49 aa, Gossypium hirsutum
  Clone ID: LIB3148-051-Q1-K1-A1.pep
ICKIFICSQIIGGTVFCFFFLANYLFIPNNFIPCHDSLKKKRNLTPRYL

SEQ ID NO: 95667 - protein, 34 aa, Gossypium hirsutum
  Clone ID: LIB3148-051-Q1-K1-A11.pep
SMACDIYIYVNGFHQSEINGSLNTLLHFLLFFYF

SEQ ID NO: 95668 - protein, 124 aa, Gossypium hirsutum
  Clone ID: LIB3148-051-Q1-K1-A2.pep
PTRPPTRPGLCWDPKTCACARLNGSDFPYVHRDGGRLIEAKHVVFECGPKCGCDPSCVNRTSQRGLKYRLEVFRTPKKGWAVRSWDFIPAGAPVCEYIGVLTRTEELDNVSENNYIFDIDCLQT

SEQ ID NO: 95669 - protein, 128 aa, Gossypium hirsutum
  Clone ID: LIB3148-051-Q1-K1-A3.pep
FFWGFLTLRPPFSPRPNFVRRDTSSTTPAKGKSPFFFLFRILSEKINKKNESLRMMNRKKKLFYSKNYRICSFKSFFFPLYSLLSKNPPLQNKSWPYIARKIKYQCRLSLFLFFWTLLSPCLQVYVRI

SEQ ID NO: 95670 - protein, 61 aa, Gossypium hirsutum
  Clone ID: LIB3148-051-Q1-K1-A6.pep
PRVRPRVRISISEKLLPAYRSFLGRFRSQIESGKHPENYIKYSAEDLETAVLDFFEGYPAS

SEQ ID NO: 95671 - protein, 36 aa, Gossypium hirsutum
  Clone ID: LIB3148-051-Q1-K1-A7.pep
TSIPSSIPKLNFLRLCITKVMACLVSHYLMTQYIFI

SEQ ID NO: 95672 - protein, 139 aa, Gossypium hirsutum
  Clone ID: LIB3148-051-Q1-K1-B4.pep
CNRPKIEVAKARDFLDENGFVFAVQKTSGMVKALTERWVLEGMEKMLSYCFDVLKEASESKLQIISVAGSPRFGVYGIDFGWGKPQKVVVVSIDKSGAISMAESRDGSGGVEIGLALNKHEMNNFSWLFPRYVKREGLF

SEQ ID NO: 95673 - protein, 114 aa, Gossypium hirsutum
  unsure (1)..(114): unsure at all Xaa locations
  Clone ID: LIB3148-051-Q1-K1-C1.pep
YLRTAILGQFKKLDKQFCVLMDTFQELEPEIVEYMSKFCLIKTVGPLFKYPEVPNNTIRCDIMKPDDCIEWLDSKPAASVIYISFGTGLYLKQEQVDEIAEALXATGISYLWVM

SEQ ID NO: 95674 - protein, 69 aa, Gossypium hirsutum
  Clone ID: LIB3148-051-Q1-K1-C2.pep
ATGEIWYKVCKIVYHISLFPLNSWRLGWWKLGFEYKAWRGFPSYSFSFVNRIHPCGSVIFFLFIEIHMD

SEQ ID NO: 95675 - protein, 55 aa, Gossypium hirsutum
  Clone ID: LIB3148-051-Q1-K1-C3.pep
LCKLILIHFFQPHHFFYFFFHLKFFFFFFFFFFFFFFFFFFFFFFTKFQLVSHKS

SEQ ID NO: 95676 - protein, 136 aa, Gossypium hirsutum
  Clone ID: LIB3148-051-Q1-K1-D1.pep
VIAQLVATLIAVYANWGFARIKGMGWGWAGVIWLYSVVTYIPLDLIKFAIRYVLSGKAWDNLLDNKTAFTTKKDYGKEEREAQWAAAQRTLHGLQPPETSNLFNEKSSYRELSEIAKHAKRRAEVARLEELNTLKG

SEQ ID NO: 95677 - protein, 59 aa, Gossypium hirsutum
  Clone ID: LIB3148-051-Q1-K1-D10.pep
YYKNTHHFIFFFFYFFFFFFYFFFFFFFFFFFFFFFFFFFFFANRCILSIHIVNRIQRT

SEQ ID NO: 95678 - protein, 62 aa, Gossypium hirsutum
  Clone ID: LIB3148-051-Q1-K1-D4.pep
CCSITSSFFSFDMKNQRSRPALFLKQSPPNYYTSSPQIYNLFSLPFIIVSPPFFFLHISYIF

SEQ ID NO: 95679 - protein, 73 aa, Gossypium hirsutum
  Clone ID: LIB3148-051-Q1-K1-D7.pep
KVMLLKTKLQFITSRCFSSLQRCKAAAIKPKHIDANNKFGIAKYPIYLQCKQKQAQPKLKHFTSSRLTFLYQI

SEQ ID NO: 95680 - protein, 96 aa, Gossypium hirsutum
  Clone ID: LIB3148-051-Q1-K1-D8.pep
RSKLLDRVVSVEYALRDDDERDGRYDSPRRGGNGRHGDSPYRRSPSPAYRRRPIPDYGRARSPVYDRYNGPAYDRHKSPEYGRYRSSRSPVRRSQT

SEQ ID NO: 95681 - protein, 107 aa, Gossypium hirsutum
  unsure (1)..(107): unsure at all Xaa locations
  Clone ID: LIB3148-051-Q1-K1-D9.pep
LAGTVDYTISELWKQYQAASTDNEKQTLTQIYTITAVVLEMTNAPVMVCPMLKKAYAIXLRIDTXTTRSYIETLEASVGTXAKALAIXNTDSLVSYPKHLAIQVLQV

SEQ ID NO: 95682 - protein, 64 aa, Gossypium hirsutum
  Clone ID: LIB3148-051-Q1-K1-E10.pep
CTPSQVVKVAKQHHALIISTPNSFFSIKMCIIQRAPKIPSDHPCAYKYNVILLIHYCYSITPID

SEQ ID NO: 95683 - protein, 94 aa, Gossypium hirsutum
  Clone ID: LIB3148-051-Q1-K1-E4.pep
AYADFVEWFVTVLLSIKWCSCLVEYVNSRNEKGTVNIQPDFKYGCVILHNFAGCSHDLGGRLRVLAMIWSRGTSCKVTCTRTIKTIPGFYLMFP

SEQ ID NO: 95684 - protein, 36 aa, Gossypium hirsutum
  Clone ID: LIB3148-051-Q1-K1-E8.pep
FMLVFCFSYFIFETYMLCFLFIMHYYFYYFIGCLLF

SEQ ID NO: 95685 - protein, 90 aa, Gossypium hirsutum
  Clone ID: LIB3148-051-Q1-K1-E9.pep
EGEMLTLARLPKRDTSVASSYYIHARTSKYRTHITLRLIVQSEVSYQLLDIREHLRRVQLQEHDAASPHWRSTLLSQPNPAMRAYCMLGK

SEQ ID NO: 95686 - protein, 57 aa, Gossypium hirsutum
  Clone ID: LIB3148-051-Q1-K1-F12.pep
TWKSYQIFAIYSGAFMDIYSFERSWSLIKLFPFFFYACFHVSQINFDSACSGHAKCI

SEQ ID NO: 95687 - protein, 59 aa, Gossypium hirsutum
  Clone ID: LIB3148-051-Q1-K1-F6.pep
RLLELCDSNSKRLLISQVKQKYIFFLKKKKKKKKRTANKKEKKRKKTGMRKKKTKKKGN

SEQ ID NO: 95688 - protein, 97 aa, Gossypium hirsutum
  Clone ID: LIB3148-051-Q1-K1-F8.pep
NTAREFYFCGPKKKQLRCQPPVVKFDFFKRPPPFFFFFFFFFFFFFFFFFFFFFFYFFFFFFFFFFFFFFIMEFNLNQLKKETDNILHNFQRLVFPF

SEQ ID NO: 95689 - protein, 56 aa, Gossypium hirsutum
  Clone ID: LIB3148-051-Q1-K1-G1.pep
NLKKYQLLPFDLNLYNYLLTKNHKHNVFTSPWTGPCSSQTLLLRSLLHVHLHRTRG

SEQ ID NO: 95690 - protein, 53 aa, Gossypium hirsutum
  Clone ID: LIB3148-051-Q1-K1-G3.pep
NLKPKKGPKLKPCLQQTLALAAATPPATSIHASYPRHVASVPCGCAKRFRLLR

SEQ ID NO: 95691 - protein, 51 aa, Gossypium hirsutum
  Clone ID: LIB3148-051-Q1-K1-G6.pep
FVATKPNHSICNFPCHVVPLIIISLKGSPSYLYINIDIKLTISYFQISSER

SEQ ID NO: 95692 - protein, 45 aa, Gossypium hirsutum
  Clone ID: LIB3148-051-Q1-K1-H10.pep
ASLHVIQSIKNHLFIQLPSNIYLNNPPTNSIRSSHIYKFIDPTSV

SEQ ID NO: 95693 - protein, 96 aa, Gossypium hirsutum
  Clone ID: LIB3148-051-Q1-K1-H6.pep
NGVLLPSNIFVYVRGFSAYYVFKITAHLINSRPPRIKDSLASAGKSSSAPQNRPHPGMFLASVGPRIMVYSQRQPTPIHCVQAIYYNSSRTFKYCL

SEQ ID NO: 95694 - protein, 40 aa, Gossypium hirsutum
  Clone ID: LIB3148-051-Q1-K1-H7.pep
YNIKPFLFILDIYFLIFSILFFLIFLKIIFFFKKRPKKNG

SEQ ID NO: 95695 - protein, 85 aa, Gossypium hirsutum
  unsure (1)..(85): unsure at all Xaa locations
  Clone ID: LIB3148-051-Q1-K1-H8.pep
PPPAPPPSPPPLPYPEAPPPYPPALAPPPPLPPPPPCPLAPSXPPPLPAPPPLPPPLPYPEAPPALALPPPLPPPAPHPCPPAPP

SEQ ID NO: 95696 - protein, 38 aa, Gossypium hirsutum
  Clone ID: LIB3148-051-Q1-K1-H9.pep
RSCTFIEVLSTFETIDFKGYNTLKGAAILKFFSHISRF

SEQ ID NO: 95697 - protein, 121 aa, Gossypium hirsutum
  Clone ID: LIB3148-052-Q1-K1-A6.pep
ANHRLKSEMRAEMDRFAREKKELSEQIQEVESQLEWLRLERDDEIAKLANEKKALQDRLHDAEAQLSQLKSRKRDELKRVVKEKNALAERLESAEAERKRFDEELKRYATENVTREEIRSH

SEQ ID NO: 95698 - protein, 42 aa, Gossypium hirsutum
  Clone ID: LIB3148-052-Q1-K1-A9.pep
SKLCMPLFLESYKIACIVQRHLIETMYYPVFRIIWLFNCHLL

SEQ ID NO: 95699 - protein, 61 aa, Gossypium hirsutum
  Clone ID: LIB3148-052-Q1-K1-B12.pep
RMHSLLFRFATRIFMTSAICFCSISFLIIKIFSHCVGSPRNPQTLSFQICLKQLSACDGPV

SEQ ID NO: 95700 - protein, 55 aa, Gossypium hirsutum
  Clone ID: LIB3148-052-Q1-K1-C2.pep
KTLVEANMKLIKVPKAPKDYDILAIPLTSSAMRMLRKRNGTPEEWRQYLFPTTDP

SEQ ID NO: 95701 - protein, 57 aa, Gossypium hirsutum
  Clone ID: LIB3148-052-Q1-K1-C5.pep
KTTYQPYPQTLSIKLSLRSKKPRNWHSIYMTGQLVGPHNRLLPSVSSVLLVRVGVRV

SEQ ID NO: 95702 - protein, 68 aa, Gossypium hirsutum
  Clone ID: LIB3148-052-Q1-K1-C6.pep
GGSGFNLGGPKKKLLRWKDGEVKLDPLKGAAFFFFFFFFFFFFFFFFFFFFFFFFFFFFFFFFFFFFF

SEQ ID NO: 95703 - protein, 45 aa, Gossypium hirsutum
  Clone ID: LIB3148-052-Q1-K1-C8.pep
FHFIPFWINQENFFFFPKKLIINLVSVGCLPKNVNLWWFFHYFNN

SEQ ID NO: 95704 - protein, 63 aa, Gossypium hirsutum
  Clone ID: LIB3148-052-Q1-K1-D6.pep
VCRNLRSASHFSEITEGLYMAAMFLGVINCQTAQPVVAIEGSVFYQKRATGLTFALPFALAQV

SEQ ID NO: 95705 - protein, 64 aa, Gossypium hirsutum
  Clone ID: LIB3148-052-Q1-K1-E11.pep
MAKSSFKLEHPLERRQDEAARIRAKYPDRVPVIVEKAERSDIPDIDKKKYLVPADLTVGQFVYV

SEQ ID NO: 95706 - protein, 81 aa, Gossypium hirsutum
  Clone ID: LIB3148-052-Q1-K1-E2.pep
FSTSSKQCFSLSSTKISSPLSVNPSPVQWLLSLIIVHNRQNYVPGFQWFSAYIFSELLMLITAGYLGGRNINTGRFKAANL

SEQ ID NO: 95707 - protein, 49 aa, Gossypium hirsutum
  Clone ID: LIB3148-052-Q1-K1-E5.pep
NYFSLLFFFFVSLLSLTFFLPFHSKVVPSIFLPLFLTINSLLPFISYND

SEQ ID NO: 95708 - protein, 44 aa, Gossypium hirsutum
  Clone ID: LIB3148-052-Q1-K1-E8.pep
YNHYANGSGWWDCVMEGVDSEEVGYGEVWEGVGSTTFGGIVDWH

SEQ ID NO: 95709 - protein, 37 aa, Gossypium hirsutum
  Clone ID: LIB3148-052-Q1-K1-F2.pep
TTFIRAFLPHEVHHDNGPKHVKAHHDSRHVTLTHASI

SEQ ID NO: 95710 - protein, 80 aa, Gossypium hirsutum
  Clone ID: LIB3148-052-Q1-K1-F3.pep
CKYGNGAAILEVDENLNKQFRVFKAAQHEEMCYNMKFGLRFSGITYGSRCVKIHHVNARAESSNKVIRRCRSQVDQIISC

SEQ ID NO: 95711 - protein, 112 aa, Gossypium hirsutum
  Clone ID: LIB3148-052-Q1-K1-F4.pep
MQPQYTWSQIPNKYTSKTKASIADIEVTLIETHANLRILLRKGPTQLSKLVAGFQSLFLSILHLNVTTLDPFVLYSISAKVDEGCQLSSVDDIARAVHHMIRIIEQDATALC

SEQ ID NO: 95712 - protein, 32 aa, Gossypium hirsutum
  unsure (1)..(32): unsure at all Xaa locations
  Clone ID: LIB3148-052-Q1-K1-F7.pep
TVSLKXXPVXNEILAIQHCLLTNYGTKYGYIN

SEQ ID NO: 95713 - protein, 35 aa, Gossypium hirsutum
  Clone ID: LIB3148-052-Q1-K1-F9.pep
VSGLEMFIGQAYEQFERFTGLPAPKEQFRRTMSKY

SEQ ID NO: 95714 - protein, 104 aa, Gossypium hirsutum
  unsure (1)..(104): unsure at all Xaa locations
  Clone ID: LIB3148-052-Q1-K1-G1.pep
QSSNHHSIWWPTMHKQRPDSTDEGSAQGNLERLYGGEGKWLVGTQPPSTVLAYSRSFWCSRLLIFFESNXVSRLGYRXRVRFGFIQLGLKKCIWTAFNLIYYLA

SEQ ID NO: 95715 - protein, 62 aa, Gossypium hirsutum
  Clone ID: LIB3148-052-Q1-K1-G11.pep
ASLKKKLKETCKRHHHGFSKRPTLFFFLFFYYFSFFLVFFIPFFIFFFIFLLNPQVYFFVCF

SEQ ID NO: 95716 - protein, 48 aa, Gossypium hirsutum
  Clone ID: LIB3148-052-Q1-K1-G3.pep
LILANLNSLIQNEPSNIIRQNFMPTHNNIYTHNQIPIHAIDLKILEDR

SEQ ID NO: 95717 - protein, 120 aa, Gossypium hirsutum
  Clone ID: LIB3148-052-Q1-K1-G5.pep
HAYVHAIDHVYVHAQNKKLTAQLLSLKAKDSNETRIKNENEGSWCSNGSENNYDMNLAIRPAATMTQLLHGSSKPSLQCLKLDQVVQQDQSLACHMFNQDGDEQQGFWPWADQSIKFSLN

SEQ ID NO: 95718 - protein, 39 aa, Gossypium hirsutum
  Clone ID: LIB3148-052-Q1-K1-G8.pep
NPVQLQHTSSHRSYYLTWKATIIVNKHVLNVNNVDGELG

SEQ ID NO: 95719 - protein, 41 aa, Gossypium hirsutum
  Clone ID: LIB3148-052-Q1-K1-G9.pep
LSLLPINGIFLVFLNYIVNVGFPLSRLFVVLQGINPLIPQI

SEQ ID NO: 95720 - protein, 32 aa, Gossypium hirsutum
  Clone ID: LIB3148-052-Q1-K1-H6.pep
NRNFCLCTIHNTYCQLNPEEFSKLVSLMSLWN

SEQ ID NO: 95721 - protein, 42 aa, Gossypium hirsutum
  Clone ID: LIB3148-053-Q1-K1-A1.pep
NLTRLKHETRNSNYLFENASCLEKSNNLIQLTRRSIFIIIIF

SEQ ID NO: 95722 - protein, 27 aa, Gossypium hirsutum
  Clone ID: LIB3148-053-Q1-K1-A12.pep
LPFVMLSDSIFASPVGQLALCFILVIS

SEQ ID NO: 95723 - protein, 91 aa, Gossypium hirsutum
  Clone ID: LIB3148-053-Q1-K1-A8.pep
LITSVWHSLISKRKMINNVKFIVVLNIRCEKGFSKDIIFTVTNICYNCVFLMRGNYSYPSLHGISRIFHRQRCFFVVELRAFLNLHAAYVE

SEQ ID NO: 95724 - protein, 52 aa, Gossypium hirsutum
  Clone ID: LIB3148-053-Q1-K1-B10.pep
SDQPSVKVAVTVDAPAVLKLVLERLMGVMMRMVVLCNQCECFFKTVSALSVD

SEQ ID NO: 95725 - protein, 79 aa, Gossypium hirsutum
  Clone ID: LIB3148-053-Q1-K1-B12.pep
FYFSRLYNKVSKVEEKVNSLGEIKNLDLNHESKEILTNVNNKLDQVINNNIEPNVDFGPLYYGHSNVILTLSEEEKHFF

SEQ ID NO: 95726 - protein, 85 aa, Gossypium hirsutum
  Clone ID: LIB3148-053-Q1-K1-B4.pep
PRVFPLPTFLNPGPFILFWGPHKKTFSLPARGSKLWSFKRAPPLFFFFFFFFFFFFFFFFFFFFFFFFFFFFFFFFFFFFFFFFF

SEQ ID NO: 95727 - protein, 88 aa, Gossypium hirsutum
  Clone ID: LIB3148-053-Q1-K1-B6.pep
SFKRAAPFFFFFFEKTSFNVHSYVCVHTCMHALSVQKISNAYFFFELGNVPIILIYSFHTFNTRHKVVKKKKEMILKITDQHSFFSSF

SEQ ID NO: 95728 - protein, 75 aa, Gossypium hirsutum
  Clone ID: LIB3148-053-Q1-K1-B7.pep
HASANMLKFAEACEIPAARMTKKEDLREAICKMLETPGPYFLDVIIPHQEHVLPIIPREGAFKDVITEGDGRTKY

SEQ ID NO: 95729 - protein, 49 aa, Gossypium hirsutum
  Clone ID: LIB3148-053-Q1-K1-C10.pep
TVHCAVSGLQDCFLGASQSCMCLWLWPLCHQWSRLFCSLSVTYMDQSYK

SEQ ID NO: 95730 - protein, 97 aa, Gossypium hirsutum
  Clone ID: LIB3148-053-Q1-K1-C2.pep
FFFFFFFFFFSWFFFFLPEEASKYSVYMDEQSEESKRIEEVLMKIPKEEVDTMRATGIDMIPRLTYAHPNASHSDVGFKNAVDVALQALAQHVRDKI

SEQ ID NO: 95731 - protein, 68 aa, Gossypium hirsutum
  Clone ID: LIB3148-053-Q1-K1-D1.pep
QIRVLKSLMGTAETQWHPCEWKTVTIIIISYHIYNKYIICLNTKCVLVFTFYPLDVIPFCCSDCIYIC

SEQ ID NO: 95732 - protein, 54 aa, Gossypium hirsutum
  Clone ID: LIB3148-053-Q1-K1-D11.pep
FLCPIALIKLLFFIQTNLVLSLVTLKCLIVEDERKMPLLKNKLMPKFELYTSSI

SEQ ID NO: 95733 - protein, 78 aa, Gossypium hirsutum
  Clone ID: LIB3148-053-Q1-K1-D4.pep
LNGFGLVTSQSGGGLSYPTWLGSNYKKKKKKKKKKKKKKKKKKKKKKKKKKKKKKKKKKKKKKKKKKKKKKKKKGGPF

SEQ ID NO: 95734 - protein, 52 aa, Gossypium hirsutum
  Clone ID: LIB3148-053-Q1-K1-D6.pep
SASRESVRRQVQVLNSLLVPAPLECCYNLDRVTGHRFWIKRLGCFICMETIF

SEQ ID NO: 95735 - protein, 48 aa, Gossypium hirsutum
  Clone ID: LIB3148-053-Q1-K1-D7.pep
ELNLHMNKLPHKQFSHIIIPLANQVRNLGFKMCEKNLLSLLITHSFHA

SEQ ID NO: 95736 - protein, 84 aa, Gossypium hirsutum
  Clone ID: LIB3148-053-Q1-K1-E11.pep
TRPRTKNFQLRFLTLALFPRAATASGKFGERLSSSPIEAITQGSASVISASLTPPPDFRPLSPPSIFPSPDFLQALAKEGKNHS

SEQ ID NO: 95737 - protein, 68 aa, Gossypium hirsutum
  unsure (1)..(68): unsure at all Xaa locations
  Clone ID: LIB3148-053-Q1-K1-E5.pep
XXRPRRSRVTALGGQIFVILFRXFCYEFCEXXGQKIGAILHYVEYAKSLYSSEDSRXXAIFFVRITIL

SEQ ID NO: 95738 - protein, 119 aa, Gossypium hirsutum
  Clone ID: LIB3148-053-Q1-K1-E6.pep
VTVLIIIFVALNEIFIILWWGLQTLTAGFAMIGRMGRGNSYTPSKLPPKPLEIWSYEGSPFCKIVREVLVELELPHTQRSCARGSPKRQILYEKAGHFQVPYLEDPNTGVQMFESAEIV

SEQ ID NO: 95739 - protein, 96 aa, Gossypium hirsutum
  unsure (1)..(96): unsure at all Xaa locations
  Clone ID: LIB3148-053-Q1-K1-E7.pep
MGKNQAYXAFQRARLGSFFAGPEKIKDCMXWHTARFGKIKTFYTVTWEEFKMKQKEDALRKGELXANTDQMMREYKAXFDAAWASKLSHGRNHFNC

SEQ ID NO: 95740 - protein, 37 aa, Gossypium hirsutum
  Clone ID: LIB3148-053-Q1-K1-F3.pep
NGIKGTFLIKRTPTYLPQRSIPSIKLCSVELKTFLLH

SEQ ID NO: 95741 - protein, 41 aa, Gossypium hirsutum
  Clone ID: LIB3148-053-Q1-K1-F6.pep
ITKILLQMQRNPSFIIYGNQKEHVSTMLSQSTIEESKIGYR

SEQ ID NO: 95742 - protein, 37 aa, Gossypium hirsutum
  Clone ID: LIB3148-053-Q1-K1-G10.pep
FFTLFFFFFFFFFFFFFFFFFFFFFFFFFFFFFKINK

SEQ ID NO: 95743 - protein, 55 aa, Gossypium hirsutum
  Clone ID: LIB3148-053-Q1-K1-G11.pep
MEGEVKFDSLKRAPLFFFFFFFFFFFSFFFFFFHFFFFFFFFFLIFFFFFFIFFF

SEQ ID NO: 95744 - protein, 57 aa, Gossypium hirsutum
  Clone ID: LIB3148-053-Q1-K1-G3.pep
NIFLYLFINKIFIFYFFFYYFFFFYFFFFFFFFFFFFFFFFFFFFEPHLQFQLFKVL

SEQ ID NO: 95745 - protein, 68 aa, Gossypium hirsutum
  Clone ID: LIB3148-053-Q1-K1-G4.pep
GILLKRCGKLCLADVSDVPPPPTNLRQCCWLEGYATRWSSMGYLEWRREIILIKPTKIFRVSCSLCMP

SEQ ID NO: 95746 - protein, 45 aa, Gossypium hirsutum
  Clone ID: LIB3148-053-Q1-K1-G5.pep
QHQSIKHTVTLYNSPPFFIYFFFPFFFFFFFFSFFFFFFFFRTRG

SEQ ID NO: 95747 - protein, 139 aa, Gossypium hirsutum
  Clone ID: LIB3148-053-Q1-K1-G6.pep
GKVITVSAKMLRKNLFFHLSHCHPSFSFNFFVSGHSCNCLTGQSLLDDQQIYSKPNYGTKPFSPSQRDHLRKSFAGVEAARVDEEDYEEDSSLAMSELFHGFLAIGTLGSDPNIPDPSTPTFAISVENITEKETEPTRP

SEQ ID NO: 95748 - protein, 105 aa, Gossypium hirsutum
  Clone ID: LIB3148-053-Q1-K1-G8.pep
YIVSNQSRSRNMTVFLVSSIHMPIDNGEIKNCPTSKSTFLKTPIFYIIVQSNTLFSSTRERGDRNGLPLTRIPKLLSCLKPNIIASDIQMYRRSQAVVLFCHQDQ

SEQ ID NO: 95749 - protein, 115 aa, Gossypium hirsutum
  Clone ID: LIB3148-053-Q1-K1-H6.pep
DLEGEETGEDFSKYINEIHLNYLNQGILTSYPLPNHDYHSNTNQSREISGSGWKTPPPPAPRSAAWDYLNFFDEIYERYELPYFSSKEVKDKGGVHEHLEAQAVKQVHGDEKSSA

SEQ ID NO: 95750 - protein, 107 aa, Gossypium hirsutum
  Clone ID: LIB3148-053-Q1-K1-H7.pep
TIRRGKIWEKRTGGAFLVIIKKAKRVFASKAIKLGKPGFFKTLRCKTQAIEIKLGGTKKKQLFCKQREGNLEPLKGPPRFFFIIYSFFILFFFFFIFLIFFFFYIFF

SEQ ID NO: 95751 - protein, 71 aa, Gossypium hirsutum
  Clone ID: LIB3148-054-Q1-K1-A12.pep
LNIGLFLSKGYSVSFLFCVDFDLLQLCLGNGQWCTWFICYSGEYSCCLLQSSLGLLLLSLDIGVYKMPVPI

SEQ ID NO: 95752 - protein, 61 aa, Gossypium hirsutum
  Clone ID: LIB3148-054-Q1-K1-A4.pep
KKKKKKKKKKKKKKKKKKKKKKKKETENIKKKKYKKNKLKKLPIKKKKKKKKGGPLKKKKF

SEQ ID NO: 95753 - protein, 83 aa, Gossypium hirsutum
  Clone ID: LIB3148-054-Q1-K1-A7.pep
LRDLTNSITNYINLSYGFYLGSIFLGENKYSITMMGYAEEHETTVLEVDLQIWSELNMGGGFHGPKLLSALMKYTKAVRVTNM

SEQ ID NO: 95754 - protein, 136 aa, Gossypium hirsutum
  Clone ID: LIB3148-054-Q1-K1-B6.pep
ADYDNLVKETDKLKEELTDKLLLEGKEKGKSELPDAKTSSQELPSEAAEGEESKVVPVMKSDYTEGVHSSVLLEGAGSSYPFEPDQSDLSQDEEDNLSKGLLHLPSCVFPKLQDIDYSDPPAGSCNFGFPLDDHAF

SEQ ID NO: 95755 - protein, 85 aa, Gossypium hirsutum
  Clone ID: LIB3148-054-Q1-K1-B7.pep
IPYFSVKIFSLSLYILLLGSELKKKKKKKKKKKKKKKKKKKKKKKKKKKNKKKKKKKSKSYKSKKRYKWEFVENNKKRKLKYKQK

SEQ ID NO: 95756 - protein, 45 aa, Gossypium hirsutum
  Clone ID: LIB3148-054-Q1-K1-B8.pep
KRPPLFFFFFFFFFFFFFFFFFFFFFFFFFFFFFFFFFFKEKHYT

SEQ ID NO: 95757 - protein, 90 aa, Gossypium hirsutum
  Clone ID: LIB3148-054-Q1-K1-C12.pep
PKIKPKYTHTQNPRPNTLWPDLNNFQKPRGFPECLQRRSHQGFPSAPRATPPSRSTLASAFVRAEPRHASPYPYLQQTTSPKQQKRKKIK

SEQ ID NO: 95758 - protein, 50 aa, Gossypium hirsutum
  Clone ID: LIB3148-054-Q1-K1-D10.pep
VRTYTEYAKKGMSSHRVRKRWEGRYHCSLALMNVLWTIYECTNCDWHDMK

SEQ ID NO: 95759 - protein, 66 aa, Gossypium hirsutum
  Clone ID: LIB3148-054-Q1-K1-D2.pep
AVDCRVKVLVFCWVESCELFLCQSILVAWFYTRFYALFVSELNCHFAWFFIIFENVNNIDGRPHAS

SEQ ID NO: 95760 - protein, 61 aa, Gossypium hirsutum
  Clone ID: LIB3148-054-Q1-K1-D6.pep
LERLVNLWPFHKNAAHTNGKVTNSFFIFPFLFVVLMMHLTFLFLLLLNITTKKCLTKTVFS

SEQ ID NO: 95761 - protein, 53 aa, Gossypium hirsutum
  Clone ID: LIB3148-054-Q1-K1-E12.pep
HASEALKACLTKKTFYVILLQGPVIIANDGKERFPKVRWKKSATLRENAMLLQ

SEQ ID NO: 95762 - protein, 35 aa, Gossypium hirsutum
  Clone ID: LIB3148-054-Q1-K1-E5.pep
FWLMFQLKQVFVIISPMLKQILGSMYLCYLDSGFG

SEQ ID NO: 95763 - protein, 79 aa, Gossypium hirsutum
  Clone ID: LIB3148-054-Q1-K1-E8.pep
SLFFFCFFLVFSFFFFSSIKTELIGRIDLIRLINQLLNSISTQLIVPFSCLPPPILLYWAIFVRALIKNQIVRESGRVG

SEQ ID NO: 95764 - protein, 64 aa, Gossypium hirsutum
  Clone ID: LIB3148-054-Q1-K1-F1.pep
AAISNGKDIVFCIDDFGEENFAFYLISLSDSVWVPGNRIHVWDQELRRDICPLEGLHMDANGRE

SEQ ID NO: 95765 - protein, 60 aa, Gossypium hirsutum
  Clone ID: LIB3148-054-Q1-K1-F3.pep
KRAESQLKYSTNLLHSNSMDYRIHKIKSVVTYSNNESDLDAGDLVNSMVKGMYIHHFLCI

SEQ ID NO: 95766 - protein, 71 aa, Gossypium hirsutum
  Clone ID: LIB3148-054-Q1-K1-G1.pep
VKSGFDLMADPLDCVFGYTAASEEIHHSTPSSMSSRAQSRAHRRANRRRRLHHQEASSSSHDNKYSKFYVM

SEQ ID NO: 95767 - protein, 48 aa, Gossypium hirsutum
  unsure (1)..(48): unsure at all Xaa locations
  Clone ID: LIB3148-054-Q1-K1-G4.pep
MSLIFFLSIFLIFSYKKFEITNXKKKKKKKKKKKTKNIKEKKKKIXKN

SEQ ID NO: 95768 - protein, 82 aa, Gossypium hirsutum
  Clone ID: LIB3148-054-Q1-K1-G8.pep
DRNRKQVKKMLFLLMVNPLLSLYVEFLIFLKVKIFFTRYLNLFIRKFCYNNMHKTLIYFSSTRKVLVIAVVSCFVVIHPLPK

SEQ ID NO: 95769 - protein, 51 aa, Gossypium hirsutum
  Clone ID: LIB3148-054-Q1-K1-H7.pep
IYLLLYNIKKILCQYPKNYNKICTKVIASNSTLTSCVRSDDKKESTKTKHH

SEQ ID NO: 95770 - protein, 59 aa, Gossypium hirsutum
  Clone ID: LIB3148-054-Q1-K1-H8.pep
IYLLICNIKKILCQYPKNYNKFCAPPIESMSRSRSCVSSDEKKESNKSKHHPNAWVGPG

SEQ ID NO: 95771 - protein, 75 aa, Gossypium hirsutum
  Clone ID: LIB3148-055-Q1-K1-A3.pep
ENLSPDLCVSTSSHFPWYSCVGKNAARVTAFFLSYGVFNSLEHGSHLLSQHTCTQFVSILFACFMLSISKPSDRE

SEQ ID NO: 95772 - protein, 127 aa, Gossypium hirsutum
  Clone ID: LIB3148-055-Q1-K1-A7.pep
MEENSLRVELHSQNDRPLTDPELDFLVAILGLLVNLVEKDEHNRSRLAAASVSLPDSEGLNEGSHMAVIPLLCAIFLANQGEDDGTGVLSWNDEAAMLQEEKEAEKMILEAYAALLLAFLSTESKST

SEQ ID NO: 95773 - protein, 84 aa, Gossypium hirsutum
  Clone ID: LIB3148-055-Q1-K1-B1.pep
MCFHSHPHFIRLFIDFHLWFFFFLFFFFFFFFIFFFFFFFFFFFFFFFFFFFFFFFSAPNRHKFFLQDGQTQRQQSYRIFSDAW

SEQ ID NO: 95774 - protein, 96 aa, Gossypium hirsutum
  Clone ID: LIB3148-055-Q1-K1-B10.pep
SGPKFTDAASAVKVALQKYLADELADGDLKIIAEPGRFFANSPFTLTTSVIGKRERAEVKEYWISDGISGSMNFLKYDHDEVICTPLIMTKPTCKE

SEQ ID NO: 95775 - protein, 83 aa, Gossypium hirsutum
  Clone ID: LIB3148-055-Q1-K1-B11.pep
LKKFTRNCGLNNYPLKSQLLSGEFPGTLFPTLLILSTGESLQMIDVSVVMLWAKDSLHIFHQCPGYLQEALKLNVDSSATLYG

SEQ ID NO: 95776 - protein, 39 aa, Gossypium hirsutum
  Clone ID: LIB3148-055-Q1-K1-B12.pep
KPKIRWKPHQKIQGQARFRQINLKPVLRLAFYHDIIFFL

SEQ ID NO: 95777 - protein, 39 aa, Gossypium hirsutum
  Clone ID: LIB3148-055-Q1-K1-B6.pep
LVCGVPLKKKKKKITKNCQGRAKKTLKFITKLVLELLKT

SEQ ID NO: 95778 - protein, 78 aa, Gossypium hirsutum
  Clone ID: LIB3148-055-Q1-K1-B9.pep
MAHHGHPPPTPDPFAPPPPGHPAPPPPDPFAPPPPGHPAPPAPDPFAPPPPGHPAPPTPDPFAPPMFGQTAPPAPPPY

SEQ ID NO: 95779 - protein, 60 aa, Gossypium hirsutum
  Clone ID: LIB3148-055-Q1-K1-C12.pep
HGAMHYILIPPFIQSSLFIIACNLVYYPKKHIWRHICLAIDSLIPMSCGINGIKLFIKLT

SEQ ID NO: 95780 - protein, 45 aa, Gossypium hirsutum
  Clone ID: LIB3148-055-Q1-K1-C6.pep
KYNKIQKMKICVNCNPCFDWKTYHHQLDPNQVDEKPNLNPSYPSC

SEQ ID NO: 95781 - protein, 39 aa, Gossypium hirsutum
  Clone ID: LIB3148-055-Q1-K1-C9.pep
GYKICYQYFILQYSQLGRVRGALESNLLLADLISRERSS

SEQ ID NO: 95782 - protein, 40 aa, Gossypium hirsutum
  Clone ID: LIB3148-055-Q1-K1-D2.pep
EKESASPLLKETHLFVKGREIKRYWDKILVACCNYFTTNN

SEQ ID NO: 95783 - protein, 54 aa, Gossypium hirsutum
  Clone ID: LIB3148-055-Q1-K1-D3.pep
SDRQHIRAPSGFSSFHTLISNSGSIKVFALTLLSLLFHIKTIYNFCPKRKYGWF

SEQ ID NO: 95784 - protein, 114 aa, Gossypium hirsutum
  unsure (1)..(114): unsure at all Xaa locations
  Clone ID: LIB3148-055-Q1-K1-D4.pep
KAPPQFFKSYFNYIFFCLIFLLIFFFFYLFFFFFFFFFFFFFFFFFFFFFFFFFFFXTLEHHFSNFILKIKKITKMVVPAMRKQILQTKDFNLLTLVIVNQNIVGPLKLKDGEG

SEQ ID NO: 95785 - protein, 41 aa, Gossypium hirsutum
  Clone ID: LIB3148-055-Q1-K1-D7.pep
FFLLLFFLFFFCFFFFSFFFFFFFFFFFFFFFFFFFFFFFM

SEQ ID NO: 95786 - protein, 42 aa, Gossypium hirsutum
  Clone ID: LIB3148-055-Q1-K1-D8.pep
STYPGNKFAIRSLKCSKQCYINSYHNCKILHVPATDSRKNKL

SEQ ID NO: 95787 - protein, 118 aa, Gossypium hirsutum
  unsure (1)..(118): unsure at all Xaa locations
  Clone ID: LIB3148-055-Q1-K1-E11.pep
PYKNATIFRHLTLGDFELQDGPVGVNDAELKERIIQHLAAAAAMGXRAHHILRREALRNTPSAQGRRPQYLVFYHSNDEPYSCGPISSLSSTQSEGEPVPTITVGSSSFPERTAGEEF

SEQ ID NO: 95788 - protein, 62 aa, Gossypium hirsutum
  Clone ID: LIB3148-055-Q1-K1-E12.pep
GVFVGRKRNEGAGYWGAQLLMFINLTGGKFWVRGGCNSYGLRRLSFFFFCFKQSHVLYGRVG

SEQ ID NO: 95789 - protein, 60 aa, Gossypium hirsutum
  Clone ID: LIB3148-055-Q1-K1-E3.pep
QHLSLSARSNMSLKGRQPKLYCLLYIPSFFVLFSSLNSSFISFTQQMMFAFLNMVKNILL

SEQ ID NO: 95790 - protein, 67 aa, Gossypium hirsutum
  Clone ID: LIB3148-055-Q1-K1-E6.pep
TENNWTMGVSCLTANSTKVSVSCMTTTFIQVYLLNILRRLLHFNFINMLKRLWLLNCGRQVNKTSFF

SEQ ID NO: 95791 - protein, 45 aa, Gossypium hirsutum
  Clone ID: LIB3148-055-Q1-K1-E9.pep
KGPPFFFFFFFFFFFYSFIFFIFFLFSFFFFFFFFKLIFYFFGRV

SEQ ID NO: 95792 - protein, 117 aa, Gossypium hirsutum
  Clone ID: LIB3148-055-Q1-K1-F1.pep
MLEGPSYLVSRDFPSSCEQESKWIYNTFHVTELARSKCQMEDGEDQMMRKVLKPLEGDENKGEKEDMSLAQFDCPDNHRHAGDHSETSLLIQQLGQDISINCLLRCSRSDYGAIASL

SEQ ID NO: 95793 - protein, 131 aa, Gossypium hirsutum
  Clone ID: LIB3148-055-Q1-K1-F11.pep
ENSSVNLPPGFRFYPTDEELVVHFLQRKAALLPCHPDVIPDLELYPHDPWELDGKALGEGNQWYFYSRGTQNRITGNGYWKPMGIEEDVINSRSKKVGMKKYLVFYIGEGRAAIKTNWIMQEYRLSKSDSS

SEQ ID NO: 95794 - protein, 86 aa, Gossypium hirsutum
  Clone ID: LIB3148-055-Q1-K1-F4.pep
PTRAVEMNKTIVKTRQWEQQQRMLVDLVGGEWTIMMGYDVLILFYAGTPLLYISMIVNELTLLLNMLICIATYCILEYACINKDKD

SEQ ID NO: 95795 - protein, 53 aa, Gossypium hirsutum
  Clone ID: LIB3148-055-Q1-K1-F6.pep
QVKKLNSWIHSTFIACLIHRTLLIQYTADNPVFDFCVFSSFFRHIPIQMIQIF

SEQ ID NO: 95796 - protein, 106 aa, Gossypium hirsutum
  unsure (1)..(106): unsure at all Xaa locations
  Clone ID: LIB3148-055-Q1-K1-F8.pep
HASAHASDPKPDPVEKETNGSALAGSGELPRQSLSKTKSTLWRMDLQALGGSYKIKRLKQQLLLLXRLTGKQETVEDTEGSHRNLMKGFLLTLSLLNKQDSRYHCL

SEQ ID NO: 95797 - protein, 64 aa, Gossypium hirsutum
  Clone ID: LIB3148-055-Q1-K1-F9.pep
WRRRVWTWRGMRNKRRDLVRLRRKGRKLLGLTHKCFPETPRDFWNSDRFDLGLTGFMVWVWYLG

SEQ ID NO: 95798 - protein, 97 aa, Gossypium hirsutum
  Clone ID: LIB3148-055-Q1-K1-G2.pep
PSMGDVLWNLEFALQLQESAEESGKGIGEMDMEEGSYEGTCKGKKDPNASLGFDGNITDSRSSGMSMSIGGRSLASEDLEGLTPSAVFSQIMNPKGR

SEQ ID NO: 95799 - protein, 45 aa, Gossypium hirsutum
  Clone ID: LIB3148-055-Q1-K1-G5.pep
LAGLYNGLSLILSVIYINAISLCNRDKKKKNKTNNTKTKKKIKNN

SEQ ID NO: 95800 - protein, 52 aa, Gossypium hirsutum
  Clone ID: LIB3148-055-Q1-K1-G7.pep
QSTIQRSPVLFAIAAFSKKLLILGIVAAQDSLGVEVNVYFDNIRRNLSYINI

SEQ ID NO: 95801 - protein, 51 aa, Gossypium hirsutum
  Clone ID: LIB3148-055-Q1-K1-H2.pep
KKGVMELILKVFFFLSGYKFMDIICWNKMTRFRSTLHLFIFIYIYKRLVQP

SEQ ID NO: 95802 - protein, 38 aa, Gossypium hirsutum
  Clone ID: LIB3148-055-Q1-K1-H3.pep
FLKMLYLCISVFPPFGQILVYHRLKYATGSCNFHKIRI

SEQ ID NO: 95803 - protein, 26 aa, Gossypium hirsutum
  Clone ID: LIB3148-055-Q1-K1-H4.pep
ADGAARRLARCYNLRVSDDSGPSTFH

SEQ ID NO: 95804 - protein, 61 aa, Gossypium hirsutum
  Clone ID: LIB3148-055-Q1-K1-H6.pep
NPPPFFFFFFFFFFFFFFFFFFFFFFFFFFFFFFFFFFFFSFLFNDVNIVNKNDLNDVNVD

SEQ ID NO: 95805 - protein, 41 aa, Gossypium hirsutum
  Clone ID: LIB3148-055-Q1-K1-H7.pep
FCYNYRNFVVYFNILYSSISPKVVKSLFPKPSIFIPFPLAF

SEQ ID NO: 95806 - protein, 44 aa, Gossypium hirsutum
  Clone ID: LIB3148-055-Q1-K1-H9.pep
PRVRGRVGFVPLAPTHANVVGVSLHYFVLDCNHWIRDVSDLGMV

SEQ ID NO: 95807 - protein, 57 aa, Gossypium hirsutum
  Clone ID: LIB3148-056-Q1-K1-A1.pep
LRELKQLKFINTIQYNFTLNISIFIQLLSKFQFSPETEANFISAKLIPYFHSISTLD

SEQ ID NO: 95808 - protein, 86 aa, Gossypium hirsutum
  Clone ID: LIB3148-056-Q1-K1-A6.pep
NVIQINLTEKFQRHYLSEILKNENKNRINSKIQKVQLNSIVHNQISKPVLTKKEQITKWSKPAMFFLLFYFTKTEFFKKARERGAE

SEQ ID NO: 95809 - protein, 55 aa, Gossypium hirsutum
  Clone ID: LIB3148-056-Q1-K1-A7.pep
GLQVIFQEISLSIFFLVLHLSLLLIIFSSSFFIFSLTFSLVLKQSLNKADRKDCN

SEQ ID NO: 95810 - protein, 53 aa, Gossypium hirsutum
  Clone ID: LIB3148-056-Q1-K1-A9.pep
ATRSTLPILSCVFTSMNLSTWYIEKAFMMKKTDRIGVVIFGPIVVQFCGRVCG

SEQ ID NO: 95811 - protein, 44 aa, Gossypium hirsutum
  Clone ID: LIB3148-056-Q1-K1-B10.pep
KQEGKNENHSKRNLKNNKVILEKYIQPEAHNLIHPIYTTSEHHP

SEQ ID NO: 95812 - protein, 53 aa, Gossypium hirsutum
  Clone ID: LIB3148-056-Q1-K1-B11.pep
LKIIILYIETYATCMLSFYITLEPFVHFHALVVCKFEQKDQRIYTTNNVWKSN

SEQ ID NO: 95813 - protein, 63 aa, Gossypium hirsutum
  Clone ID: LIB3148-056-Q1-K1-B5.pep
KKKKKKKKNKKKKKKKKKKKKKKKKKKKKKKKKKKKKKKKKKKKNKKKKGGAFLRVQILFPVV

SEQ ID NO: 95814 - protein, 78 aa, Gossypium hirsutum
  unsure (1)..(78): unsure at all Xaa locations
  Clone ID: LIB3148-056-Q1-K1-C5.pep
RVPSQGKFLISSXELCWSAFLIQPQNCIKIIVFLSSTCHSSKKIKPQTPPPKKTNSKPTKPNSPLYCRLIMVPKTTKT

SEQ ID NO: 95815 - protein, 71 aa, Gossypium hirsutum
  Clone ID: LIB3148-056-Q1-K1-C8.pep
LIPLFECRPATLNDVQQIQVSRADILDYKTPSKLRLQRSKRNSTAYSCVIEHVSDVAWWINARHGMVVPGA

SEQ ID NO: 95816 - protein, 29 aa, Gossypium hirsutum
  Clone ID: LIB3148-056-Q1-K1-D10.pep
GKCSYLLFSKPKKLQGNNLNVTYNHLFST

SEQ ID NO: 95817 - protein, 63 aa, Gossypium hirsutum
  Clone ID: LIB3148-056-Q1-K1-D2.pep
FKKAPRLLKIYCFFYYIVFLAFLLLFDFCSLMFSLHCFFFLTENSHTYTDVYVCIGGYIFILF

SEQ ID NO: 95818 - protein, 65 aa, Gossypium hirsutum
  Clone ID: LIB3148-056-Q1-K1-D3.pep
NRPPLFFFFFFFFFFFFFFFFFFFFFFFFFFFFFFFFFFFFFFFFFFFFLESTESQQIWPQLLDI

SEQ ID NO: 95819 - protein, 58 aa, Gossypium hirsutum
  Clone ID: LIB3148-056-Q1-K1-E1.pep
KHTGPNYYSLYQLVKKRKASRPIIIHTTKLKQIIPCKNITRSIKSLHNKKKLTTTTHA

SEQ ID NO: 95820 - protein, 40 aa, Gossypium hirsutum
  unsure (1)..(40): unsure at all Xaa locations
  Clone ID: LIB3148-056-Q1-K1-E3.pep
XXFFFFFFFFIXFFFFFFFFFFFFFFFFFFFFFFFFEMKA

SEQ ID NO: 95821 - protein, 56 aa, Gossypium hirsutum
  Clone ID: LIB3148-056-Q1-K1-F1.pep
TLNITILGIVLPPFLWFLVLEFALKTRIVVYLLTKMLLQLEKVALSFVCLYDWTQI

SEQ ID NO: 95822 - protein, 38 aa, Gossypium hirsutum
  Clone ID: LIB3148-056-Q1-K1-F11.pep
PKLDAISFILPSTLLQSVSLQMREVFPLLVNPRLYFFS

SEQ ID NO: 95823 - protein, 30 aa, Gossypium hirsutum
  Clone ID: LIB3148-056-Q1-K1-F2.pep
LRKFNFYCTSSGSLRCEYQTHKIFDPITMS

SEQ ID NO: 95824 - protein, 102 aa, Gossypium hirsutum
  Clone ID: LIB3148-056-Q1-K1-F5.pep
LDPSGVMKSETWDNFVSLCIKGYLASRRYMNGIINTVLLMLDSGLPCFSRGDPIGNLRKRFHPEMSEREAANFMKSVCVDAYNKWTTAGYDLIQYLQQGIEK

SEQ ID NO: 95825 - protein, 57 aa, Gossypium hirsutum
  Clone ID: LIB3148-056-Q1-K1-F6.pep
LNLLAAKPTLRVYFPLSTFLFDSPTTIMHGCLDSLIHSRKFGSQCLHKYNEVCDTRA

SEQ ID NO: 95826 - protein, 136 aa, Gossypium hirsutum
  Clone ID: LIB3148-056-Q1-K1-F7.pep
LQENEVEDHRGHWLSCFPESCTSLVSLNFACLKGEINLASLERLVARSPNLKSLRLNRMVPLDTLQKLLMRAPQLVDLGIGSYVDDPSSEVFSKLKTVIQLCNSIRSLSGFLEVAPCCMSAIYPICENLTFLNLSY

SEQ ID NO: 95827 - protein, 73 aa, Gossypium hirsutum
  Clone ID: LIB3148-056-Q1-K1-F8.pep
KKIKNSQARVRKIGTLKPTAPIYSGCNRTIEWQFSEFKNINKRAFQLIKKFKIQLLKPHLKHSKHLFLKNKNF

SEQ ID NO: 95828 - protein, 66 aa, Gossypium hirsutum
  Clone ID: LIB3148-056-Q1-K1-G11.pep
MILFVRHGPLLSLAHLVDQTAGRIIITLCELSFYVTGPIPYFVTLMHFIDRICIFFLKSAKNLFLI

SEQ ID NO: 95829 - protein, 70 aa, Gossypium hirsutum
  Clone ID: LIB3148-056-Q1-K1-G5.pep
NYQHDGADALKVQSFVTLSCNLIAFLWWILNSIKCQRFYNVLIGKTLVYPNFMSLNDISFLLFCVIQKMA

SEQ ID NO: 95830 - protein, 108 aa, Gossypium hirsutum
  Clone ID: LIB3148-056-Q1-K1-G6.pep
KKGKLSKPINWGNPRVSQTNSCKKTATEIKLGAPKKKEKRRQQGEENLDTIKRPPPCSLVQTLHACFVFLLILTALLLSFFLLFYKVSPPFIFIFLIQSSILFNFFKI

SEQ ID NO: 95831 - protein, 47 aa, Gossypium hirsutum
  Clone ID: LIB3148-056-Q1-K1-G9.pep
TLLKVTYFVVETTGFMRLTFFELSFDVIEPIFFYKTIMYFMARVCIF

SEQ ID NO: 95832 - protein, 67 aa, Gossypium hirsutum
  Clone ID: LIB3148-056-Q1-K1-H10.pep
SIEPSSFSTSARYLVNGQIFSRAQSFVYFYYKRDIQHTIACSAGLTFQSIQNRIIAASCRILNEFCE

SEQ ID NO: 95833 - protein, 58 aa, Gossypium hirsutum
  Clone ID: LIB3148-056-Q1-K1-H6.pep
NKRTNANANLGPIKTQPRKINPIINIYQPHLNNIFFFFIFKKNFPFPHSIFFFFLKCT

SEQ ID NO: 95834 - protein, 111 aa, Gossypium hirsutum
  unsure (1)..(111): unsure at all Xaa locations
  Clone ID: LIB3148-056-Q1-K1-H7.pep
MTTRFKRKRKKRGHVSPGHGLICKHMKHSGGCVNVLSMHHHRILFDKYHPGYFSKVGMRYFHRLRNKLXCPIVYIDMLWSLIPEDVEAKATKDAPPMIDVTQFGYFKVLCK

SEQ ID NO: 95835 - protein, 60 aa, Gossypium hirsutum
  Clone ID: LIB3148-057-Q1-K1-A1.pep
LAKKRKKFSSFISGRISTLAPSSVRIMRRPYRDILWLLDPLAYTRLERLIWDGALPKILI

SEQ ID NO: 95836 - protein, 51 aa, Gossypium hirsutum
  unsure (1)..(51): unsure at all Xaa locations
  Clone ID: LIB3148-057-Q1-K1-A10.pep
EGLGGXFXXXANSEMLTWLIKSQLGTSICSNSHFVPLAVLPISHKNEQRFN

SEQ ID NO: 95837 - protein, 62 aa, Gossypium hirsutum
  Clone ID: LIB3148-057-Q1-K1-A11.pep
PFLPLYYGYQLIHQALMFNHYHVVYITYNYHIAMTTSIGHRAYIQHTCHITNHAWQTNIITL

SEQ ID NO: 95838 - protein, 62 aa, Gossypium hirsutum
  Clone ID: LIB3148-057-Q1-K1-A6.pep
TKHPPFFKTSNLNAHHMPLRTGFKKKRPRPFTFFHLSPVEEAPHRYNTKCGGRFSTPILTNP

SEQ ID NO: 95839 - protein, 43 aa, Gossypium hirsutum
  Clone ID: LIB3148-057-Q1-K1-A8.pep
FTLQRLTNFSFHSPSMQIVTPVINLFIENNMSCEISPGRVELL

SEQ ID NO: 95840 - protein, 68 aa, Gossypium hirsutum
  unsure (1)..(68): unsure at all Xaa locations
  Clone ID: LIB3148-057-Q1-K1-B10.pep
RDLINMYMVAGRVGKCKEVCEEATMAGFSLNKRTLLNLSKLDPFLFCIITSFPXXNXKKKKYWFILLT

SEQ ID NO: 95841 - protein, 34 aa, Gossypium hirsutum
  Clone ID: LIB3148-057-Q1-K1-B2.pep
HTLCFIVAVFLLSMGYLYKDGVLGSQTTFLCLYL

SEQ ID NO: 95842 - protein, 74 aa, Gossypium hirsutum
  Clone ID: LIB3148-057-Q1-K1-B3.pep
RYTQNGNKAIHSIEDHEARPVLADIPKSFHWSPQKLLTATHTLQNIPLSQHMQTLTNLLNKITRSDKVVKKKCG

SEQ ID NO: 95843 - protein, 46 aa, Gossypium hirsutum
  Clone ID: LIB3148-057-Q1-K1-C10.pep
IWIWMDGARLVYFFISYYSIIIVSNFTVIAVFTLTTNKCNVHLNPP

SEQ ID NO: 95844 - protein, 54 aa, Gossypium hirsutum
  Clone ID: LIB3148-057-Q1-K1-C3.pep
NNSNIVGLILCVNFAHFNIFCLIQLFQLHIREYIVNKFTQAIDLFKSHGKDQNK

SEQ ID NO: 95845 - protein, 49 aa, Gossypium hirsutum
  Clone ID: LIB3148-057-Q1-K1-C6.pep
FLYTPPHKYPNFLNPFYSQFTFFFFPPNLIPSPFLLKNENRKTPRYPNT

SEQ ID NO: 95846 - protein, 65 aa, Gossypium hirsutum
  Clone ID: LIB3148-057-Q1-K1-C7.pep
RRRPKRPKSLCNACGVSGKSGGRFPDYRPRASPTLIPSVHSNSHLKVLQMMTKCQKPDAPQMIPQ

SEQ ID NO: 95847 - protein, 83 aa, Gossypium hirsutum
  Clone ID: LIB3148-057-Q1-K1-D1.pep
GERMNGVDLPQWGASIVKEEWTYEVFELEVMNDASSISDELLNTLKLALHCVDPSPSARPEVQQVLHQLEEISADTPASSTPP

SEQ ID NO: 95848 - protein, 85 aa, Gossypium hirsutum
  Clone ID: LIB3148-057-Q1-K1-D2.pep
ISIESKTVMKPLAQYIRPSRGPIIQPKGNVSPNPSVMISAAEMVIAHSRPFSKQVHRAQTLKTLDYVTAAPKGRTSTSSFPGMAT

SEQ ID NO: 95849 - protein, 70 aa, Gossypium hirsutum
  Clone ID: LIB3148-057-Q1-K1-D4.pep
NPAELDNWLGEVNPNSRVGVPTAYAVPSLGKAAVGDTFQFERLSYFTIDKDSTAEKLVFNRTVTLKDTYK

SEQ ID NO: 95850 - protein, 42 aa, Gossypium hirsutum
  Clone ID: LIB3148-057-Q1-K1-D7.pep
IVTADELDPPSDLYSFPISTSGKDLEYIMICVMTPFSPGPIN

SEQ ID NO: 95851 - protein, 66 aa, Gossypium hirsutum
  Clone ID: LIB3148-057-Q1-K1-D8.pep
HVRWRGHTRLNTGAIFRELSTDQETFWEAVWKAASASIAESTIVNDFDYMCYSIGYENTLQTYFRP

SEQ ID NO: 95852 - protein, 64 aa, Gossypium hirsutum
  Clone ID: LIB3148-057-Q1-K1-D9.pep
IFNFSNPRSNPGLLLLQNMKEVESFQGWTRLNPGKTLVSDSASTALLGSDAWADAWADAWADAW

SEQ ID NO: 95853 - protein, 65 aa, Gossypium hirsutum
  Clone ID: LIB3148-057-Q1-K1-E1.pep
REHLSSRLNKWRSERQFLIYGPRAKLAHNTYHDISLYLSLMCRWGKSTNPMEDPVRHLVLCTVHT

SEQ ID NO: 95854 - protein, 47 aa, Gossypium hirsutum
  Clone ID: LIB3148-057-Q1-K1-E10.pep
LRGRSYTYDCLLGFVTYQNEYIHRYDPSVEERFRLDWYCLVYYWLAG

SEQ ID NO: 95855 - protein, 100 aa, Gossypium hirsutum
  Clone ID: LIB3148-057-Q1-K1-E12.pep
QPWQSMISGFLAGTAGPVCTGPFDVVKTRLMAQSRDGGEVKYKGLVHAIRTIYAEEGLRALWKGLLPRLMRIPPGQAIMWAVADQIIGLYERRYFHSAAL

SEQ ID NO: 95856 - protein, 48 aa, Gossypium hirsutum
  Clone ID: LIB3148-057-Q1-K1-E3.pep
KDVRIKSICSSKWMIRKIVSEICFSSSVILDSFQNFCRYAIEREYQHL

SEQ ID NO: 95857 - protein, 101 aa, Gossypium hirsutum
  Clone ID: LIB3148-057-Q1-K1-E4.pep
QTEKRDFVFLSCVLFIISSYLRPGKKSAKGGFLRKQKTENLNTDTKIFLNTKVFLFYFILLCWCSSFFYFLLYIFSFYFSFFKIKRREERETYLFPPAPPS

SEQ ID NO: 95858 - protein, 51 aa, Gossypium hirsutum
  Clone ID: LIB3148-057-Q1-K1-E8.pep
ILWFFLFYFIFFLLVFIFFFFFFYIFFFFFFFFFFFFFFFFFLEQIMFPSQ

SEQ ID NO: 95859 - protein, 81 aa, Gossypium hirsutum
  Clone ID: LIB3148-057-Q1-K1-E9.pep
KNKKKKLKKKKKKKKKGEKKKKKREKKKKKKKKKKKKKKKKKKKKKKKGGGPFKEPNFISPSFQRKIFFLGPPKLNSWPGF

SEQ ID NO: 95860 - protein, 116 aa, Gossypium hirsutum
  Clone ID: LIB3148-057-Q1-K1-F9.pep
QPDKETNPTTTSRPQACDNVIHVIRHSSFRVGNEQPVMEKVDTGVQNVDVGKLINVVRDESDTRNVTSPMTLRSSNVPDYPGIKEMDVRNSISSSPKLDSPDPTKPSSSLTDEETP

SEQ ID NO: 95861 - protein, 26 aa, Gossypium hirsutum
  Clone ID: LIB3148-057-Q1-K1-G11.pep
KFWKLIYYPIIKLIPSNKGKLCFCLC

SEQ ID NO: 95862 - protein, 74 aa, Gossypium hirsutum
  Clone ID: LIB3148-057-Q1-K1-G12.pep
PRVRRLVKTVLKEAAQKREMRYSDLNKIDRGVRRHFHDDITVIVVFLDPHLINGSSCYNSPMSIKGGGRLASLC

SEQ ID NO: 95863 - protein, 53 aa, Gossypium hirsutum
  Clone ID: LIB3148-057-Q1-K1-G4.pep
RLVLFCFVLVWDYLLLGNPFNLLLHYKKNNTNVCVKIKKENYYNKLTSSTMQF

SEQ ID NO: 95864 - protein, 101 aa, Gossypium hirsutum
  Clone ID: LIB3148-057-Q1-K1-G5.pep
RKIQTGRILEFHCRLYFFREPLSRTSRRTCRSAEHLTFFCSLHYRASLRVLISEVLWRMSIELSGIPWWVIIEFVFIQLPRHSSLLHPPEEWTEEWTDAWA

SEQ ID NO: 95865 - protein, 80 aa, Gossypium hirsutum
  Clone ID: LIB3148-057-Q1-K1-H1.pep
RFFSVTPNLNNCPPFYNTPNIKNPTLPHYLTFTKIPLFPIRVIIKKTPPIPLSKNFSTLIKKKKPPSLTLFLQMIFFFPP

SEQ ID NO: 95866 - protein, 69 aa, Gossypium hirsutum
  unsure (1)..(69): unsure at all Xaa locations
  Clone ID: LIB3148-057-Q1-K1-H11.pep
AGYPLKTRLEFKFAENKKNVNHLISSNPSELVVKHYIQPHIIFETTHMNNKYVWLPSRXAWADGVVSTR

SEQ ID NO: 95867 - protein, 57 aa, Gossypium hirsutum
  Clone ID: LIB3148-057-Q1-K1-H2.pep
FREESSFFNWSIYVSPLFCYFYLYFFFFFFFFFFFFFFFFFFFFFLFALSNPRYSLF

SEQ ID NO: 95868 - protein, 48 aa, Gossypium hirsutum
  Clone ID: LIB3148-057-Q1-K1-H5.pep
KIGVYCYFYFKNYRHFYYVRMVYQICEDIMYLMIMEHFPGPRFLNFCI

SEQ ID NO: 95869 - protein, 129 aa, Gossypium hirsutum
  Clone ID: LIB3148-057-Q1-K1-H6.pep
DAWADAWVQKEIHSKIMEIGKKHNETGSKDLLQVMIEGSKGGIGPSITADQFIVDNCKDICIPASEITAVSAIWGLMLLASHPEWQTRIRGEVSEPCKGGVLSFDVLHKMKALKMVVLEVLRLYPATAF

SEQ ID NO: 95870 - protein, 50 aa, Gossypium hirsutum
  unsure (1)..(50): unsure at all Xaa locations
  Clone ID: LIB3148-057-Q1-K1-H9.pep
TKINATCNYICVNDNKHKHKHEHIIYCEDLISXXKKKKKKKKKKXKKGGG

SEQ ID NO: 95871 - protein, 40 aa, Gossypium hirsutum
  Clone ID: LIB3148-058-Q1-K1-A2.pep
YLTLSDFSTKQEVFLIMKAGPVITRLSLHVYSNKIMGTVS

SEQ ID NO: 95872 - protein, 69 aa, Gossypium hirsutum
  Clone ID: LIB3148-058-Q1-K1-A4.pep
PTRPVREDFLRLKKIHGCNKRAIEKQLAAAKDLVEDKFAENIFLHKGISINAAYNLLSAVRENDDDIIF

SEQ ID NO: 95873 - protein, 33 aa, Gossypium hirsutum
  Clone ID: LIB3148-058-Q1-K1-A5.pep
IIPGYNPPRIFIPLWYISTWISVNAQLKLTRIH

SEQ ID NO: 95874 - protein, 70 aa, Gossypium hirsutum
  unsure (1)..(70): unsure at all Xaa locations
  Clone ID: LIB3148-058-Q1-K1-A6.pep
PTRSPTRAAAHPDPALLLTKHQRVDVDDNCEGVGKEESLMRKPXWSLIYFPQTNSPGISLGQMLNNKEME

SEQ ID NO: 95875 - protein, 59 aa, Gossypium hirsutum
  Clone ID: LIB3148-058-Q1-K1-A7.pep
PPQRAPPKFKIFTQSGLENAVLRLPLLPRPESLLPITISLFPRVCSYTFFLGNQAATGS

SEQ ID NO: 95876 - protein, 59 aa, Gossypium hirsutum
  Clone ID: LIB3148-058-Q1-K1-A8.pep
SDSFHFIYLFTFVPLSFSLVFFFLFFFFFFFFFFFFFFKLKITNKKKRGQHWFSSKLVE

SEQ ID NO: 95877 - protein, 65 aa, Gossypium hirsutum
  unsure (1)..(65): unsure at all Xaa locations
  Clone ID: LIB3148-058-Q1-K1-B11.pep
FCITKPFPPLYVPIFLGFNFLVSVLLNYILLENLKHVFFVFDLLNDIPFIFQKGKFLWFLLXKNK

SEQ ID NO: 95878 - protein, 34 aa, Gossypium hirsutum
  Clone ID: LIB3148-058-Q1-K1-B2.pep
PASAVVEGINQAYTPLEMKQNICRIGNAIRVLTS

SEQ ID NO: 95879 - protein, 61 aa, Gossypium hirsutum
  Clone ID: LIB3148-058-Q1-K1-B3.pep
KRGRARLLRLVVGGFGLLVLSMSITCFSSKNPPLSIFGKCNGHPLILDYTSYVYILNPTGR

SEQ ID NO: 95880 - protein, 43 aa, Gossypium hirsutum
  Clone ID: LIB3148-058-Q1-K1-B4.pep
QPYYHAVEATKAVKPILSEYYSSEGAPVYKAIFKEAMDCIYVE

SEQ ID NO: 95881 - protein, 88 aa, Gossypium hirsutum
  unsure (1)..(88): unsure at all Xaa locations
  Clone ID: LIB3148-058-Q1-K1-B6.pep
XIFLIIVFFFFFFFFFFFFFFFFFFFGLICNFCTKIYSTKRKYLPHIQSSIKNKLSPRIPGRPKFINIYMHINRKRASTLSMEIPLYL

SEQ ID NO: 95882 - protein, 67 aa, Gossypium hirsutum
  Clone ID: LIB3148-058-Q1-K1-B7.pep
IIVYFLEQNGSGEEDHGVVDVFIGNNLNAYGRGSNPATIYLPGTGKKSLSSMQPRRRKLLPTTLNRL

SEQ ID NO: 95883 - protein, 135 aa, Gossypium hirsutum
  Clone ID: LIB3148-058-Q1-K1-C10.pep
HASAGMRPVGPPMPNCFVPMVQQGQCPRGRRGTVPVQQAQQPVSLMQQPMLPRGEVYRYPPGHKMPEVAPSNVPGGMLSIPYDMGSMPVRDAGSGQPMPVTALATSLANAAPEQQRTMLGESLYPLVERLERDAA

SEQ ID NO: 95884 - protein, 75 aa, Gossypium hirsutum
  Clone ID: LIB3148-058-Q1-K1-C2.pep
IQTTYSESVFKVQQASYYMQERYAFLCFFQAKTQAKKGIFTLTVRIRHLVCDADQDCFVFDLSQKIVGAMPRIMQ

SEQ ID NO: 95885 - protein, 79 aa, Gossypium hirsutum
  Clone ID: LIB3148-058-Q1-K1-C3.pep
HASEKNFKTSPQPSPFRPRGPAAGHRADRRQRRCRRMRRSEGERSGFFNPVARPFIDQALLSLKPRGKPPKAAIPVHFR

SEQ ID NO: 95886 - protein, 51 aa, Gossypium hirsutum
  Clone ID: LIB3148-058-Q1-K1-C6.pep
VHYPCHCAFDFQTEVWAIARGSASHTKCLILTVRGNGPFFACVLAWKNHQT

SEQ ID NO: 95887 - protein, 43 aa, Gossypium hirsutum
  Clone ID: LIB3148-058-Q1-K1-C7.pep
RRMRPSDYVLIIGSRKSDHIKLPRIENFFDQLTGARVFSKIDL

SEQ ID NO: 95888 - protein, 80 aa, Gossypium hirsutum
  Clone ID: LIB3148-058-Q1-K1-D11.pep
GSEEEAREHIKKLIDAAWKNMNKDQMAAKSLSSRMFFETAMNLARVSMLVYQNDDGHGIEDGEPKERALRLFIQSVPLPK

SEQ ID NO: 95889 - protein, 48 aa, Gossypium hirsutum
  Clone ID: LIB3148-058-Q1-K1-D3.pep
SSNRPLRHLSYTRTPSSLRLAENTIKPSSTPHIGNLIVFGNYSNPRFM

SEQ ID NO: 95890 - protein, 62 aa, Gossypium hirsutum
  Clone ID: LIB3148-058-Q1-K1-D4.pep
TMLHDIKQGVLHDIVIIYGRLKCMIDLAAIGTSLESPFKKNPELLSIDVMARQKSCSARDYN

SEQ ID NO: 95891 - protein, 139 aa, Gossypium hirsutum
  Clone ID: LIB3148-058-Q1-K1-D5.pep
KIADMIDGEIASLVPGWRRGPGIDESPRFSNQNFCHNCASNRTSTGSLLDFLTHNGGVKDSRVLQCCRTGCASMHGRFEEITFQVEESEHCVTDGAPNESSQSDNLHYQEIWDQHENHELRQRNSDEEFDKSDQSFLAN

SEQ ID NO: 95892 - protein, 86 aa, Gossypium hirsutum
  Clone ID: LIB3148-058-Q1-K1-D9.pep
HFKRKGGGEGYAGIQVFLHYNMREEILQWNYNLYNQPRYKVSLYPTIWQAKGEICDLKQQSKTNQSIETPVSKAAKSRTREIQDRF

SEQ ID NO: 95893 - protein, 58 aa, Gossypium hirsutum
  Clone ID: LIB3148-058-Q1-K1-E11.pep
WGKSKDGENPETDVKCNGLQELPITGNAKSITDDDDDINGPTKIVTIPVSNTPFTQGT

SEQ ID NO: 95894 - protein, 137 aa, Gossypium hirsutum
  Clone ID: LIB3148-058-Q1-K1-E4.pep
TDLYFHHPHHQPPQFTPYFRPPTGFLHMAGQQRPLALPSISGGGGGHSREDQDDVSNQGSSRKRFRTKFTQEQKEKMLALAERLGWRIQKQDEAIVQQFCNETGVKRHVFKVWMHNNKNTLDNGALRQSGDMQCNTM

SEQ ID NO: 95895 - protein, 63 aa, Gossypium hirsutum
  Clone ID: LIB3148-058-Q1-K1-E6.pep
KEVKDCRLKEMVHGVQHQGSFFGAGSGFGRLTASFRPSNDTLDSLAILEVEPDSIPSFGLLCS

SEQ ID NO: 95896 - protein, 42 aa, Gossypium hirsutum
  Clone ID: LIB3148-058-Q1-K1-E7.pep
NLSLLNRPPGVFFFFFSFFFFFFFFFFFFFFLYFFFFFFFFF

SEQ ID NO: 95897 - protein, 72 aa, Gossypium hirsutum
  Clone ID: LIB3148-058-Q1-K1-F12.pep
DNINQDSFSQLSETDQELRTNTLKEIDYYSEKSLVGTECIQESHLWHRIHLTYLLISLTSKAQRGTHSLCNM

SEQ ID NO: 95898 - protein, 83 aa, Gossypium hirsutum
  Clone ID: LIB3148-058-Q1-K1-F6.pep
FTHILIHKNNQIEYSQSIVTPTNKLTAHSAVASYTNKQHYESKNTNRNHSTTTSASSSASSISSSSLSHSPSCSHCSSSSNSS

SEQ ID NO: 95899 - protein, 35 aa, Gossypium hirsutum
  unsure (1)..(35): unsure at all Xaa locations
  Clone ID: LIB3148-058-Q1-K1-F7.pep
SLICMKLLIIGLIKXSFWSGPVLPIFTAFLGDDDF

SEQ ID NO: 95900 - protein, 52 aa, Gossypium hirsutum
  Clone ID: LIB3148-058-Q1-K1-G8.pep
ELENVSDLIDGIHKMWKVEVVTHTFQLDIAQRILQIPLATIDSEPTRPRTRG

SEQ ID NO: 95901 - protein, 83 aa, Gossypium hirsutum
  Clone ID: LIB3148-058-Q1-K1-H12.pep
MADLPSFSTKEFYWLASCFCGIITCKLVYDITGFISPFCFKGYGKLSDKEKMEWNNRCNFVLCSFLLFPFSCIKICSKYNLLS

SEQ ID NO: 95902 - protein, 94 aa, Gossypium hirsutum
  Clone ID: LIB3148-058-Q1-K1-H3.pep
ICIATSHFINFRSKFYFLFLFLFHVYLILVLFKCLSFFFFFFLRNDGFLRKSNEHTFKTNPFESKVSCQILQGFGFWNPNTPISFSTSSDKIYA

SEQ ID NO: 95903 - protein, 137 aa, Gossypium hirsutum
  Clone ID: LIB3148-058-Q1-K1-H5.pep
GDWILPDLTIQGSIKLNSNLQTFANTFYFSYATKRTRKILGVTVPSGILGIHPMLFIRVLQMSLYRYPTDVPPPYKGYRDEDWQDNDGALNTISMTHPRLPIEHPSCSIVNDSDCQPLQPGIWYYKIVEADHIFFIL

SEQ ID NO: 95904 - protein, 57 aa, Gossypium hirsutum
  Clone ID: LIB3148-058-Q1-K1-H6.pep
MVTKVSSILGPESPETEPSNVEKWDSPAKYQADIKREKRKMKGRPLWTQFVCCSSAN

SEQ ID NO: 95905 - protein, 48 aa, Gossypium hirsutum
  Clone ID: LIB3148-058-Q1-K1-H7.pep
GYDHFHLIVKKKQKDSSLHDPCLIARKLAAFWSYTSKSNLCSVCSLSL

SEQ ID NO: 95906 - protein, 85 aa, Gossypium hirsutum
  Clone ID: LIB3148-059-Q1-K1-A1.pep
AQSCPSVVDGETITIDSIVGYKYVGISCIATPWREYIEKQDNLVPARGHYRSVINIYSPGDCLKISDSCPSMSSKYQQQFLRTRG

SEQ ID NO: 95907 - protein, 54 aa, Gossypium hirsutum
  Clone ID: LIB3148-059-Q1-K1-A12.pep
MMVMIKQRHWSINTEISTPSPPFIHHHNMTKQKSSIPPSSIYLQTNCLSPKKQK

SEQ ID NO: 95908 - protein, 54 aa, Gossypium hirsutum
  Clone ID: LIB3148-059-Q1-K1-A4.pep
ILFIIIFNIYIKLFTFHLNLLILLSKTIFQLSKHLNLKINKKISKQNTFQPAQI

SEQ ID NO: 95909 - protein, 61 aa, Gossypium hirsutum
  Clone ID: LIB3148-059-Q1-K1-A8.pep
SFLCHNQLPLSPITVHLHTSVNLSLFLRFTNSQNVQVRIAIVILNPATLDLPTRESGPHYR

SEQ ID NO: 95910 - protein, 39 aa, Gossypium hirsutum
  Clone ID: LIB3148-059-Q1-K1-B10.pep
EWAQTDSFNILSSKTLCTEVMATPQDTKIETDLILKMSI

SEQ ID NO: 95911 - protein, 94 aa, Gossypium hirsutum
  Clone ID: LIB3148-059-Q1-K1-B4.pep
MHASRTFKKELSRKFVRRSVTLATFFGATSGSRNVFLLEPFRVLLNSEFEDLFRKKDTFERCAPWILYYFYILGINFVLQCFFVVNLIMCACNF

SEQ ID NO: 95912 - protein, 40 aa, Gossypium hirsutum
  Clone ID: LIB3148-059-Q1-K1-B5.pep
MLHFKNQVMFLSLYLRGVSHNFSTKRDRFIILKVSNNPHK

SEQ ID NO: 95913 - protein, 27 aa, Gossypium hirsutum
  Clone ID: LIB3148-059-Q1-K1-B7.pep
KSTFIYRISNSTFTKNKNLKPTLQYLK

SEQ ID NO: 95914 - protein, 43 aa, Gossypium hirsutum
  Clone ID: LIB3148-059-Q1-K1-D4.pep
MTIQCKVCMQTFICTTSEVKCKEHAEAKHPKSDIFACFPHLKK

SEQ ID NO: 95915 - protein, 132 aa, Gossypium hirsutum
  Clone ID: LIB3148-059-Q1-K1-D6.pep
MKVTLVFNHFGEGLIERMPRVRIGYAHVANNKYDEWKMYAIGGSANPTIFSEGNNFVAPDNRSSKQVTKREATNWQNWKWQSSKDVFINGAYFVPSGYGSSAPLYTRVQSFTVAPGYMVPVLTSNAGPLRCL

SEQ ID NO: 95916 - protein, 117 aa, Gossypium hirsutum
  Clone ID: LIB3148-059-Q1-K1-D7.pep
SKIAVGCNHLKDTNATAIDKAYPCDIMQRGRVRVHLKKENGTLWNPFITSRKHLIHQVPVLVPTHRERTKKQESTSTSIAAAGSYKPWMGGRKKRLFSYCLINRMLVIIPFNISNFA

SEQ ID NO: 95917 - protein, 91 aa, Gossypium hirsutum
  Clone ID: LIB3148-059-Q1-K1-E12.pep
IIRNPPKRITSAYISNSIRFNLKSNQFFLLIIDLKFSGIDNQNKWIYQRFWISNTFQKAALPQGVVAIKNGLDRPVFGLENRCGVNLTGLR

SEQ ID NO: 95918 - protein, 99 aa, Gossypium hirsutum
  Clone ID: LIB3148-059-Q1-K1-E8.pep
PRVRLLPKLPPLLCHRVEEIRRSRKRAVADSGEDLISQNDNSNESNGSQKLSSVQTNDSNNNNNRERRSQSLKVGNVDGPLNCPSSTNLQILHYTFGQG

SEQ ID NO: 95919 - protein, 65 aa, Gossypium hirsutum
  Clone ID: LIB3148-059-Q1-K1-E9.pep
PRFLLLPKLSSLLCHRVEEGGRIIKRAAAYSGEDLISQNDNINESNGSQKLSFVQTNDSINNNNR

SEQ ID NO: 95920 - protein, 37 aa, Gossypium hirsutum
  Clone ID: LIB3148-059-Q1-K1-G1.pep
FFRVNFPGYSWIQYTGIFGYLLVNNVCVHVLMQRCTL

SEQ ID NO: 95921 - protein, 47 aa, Gossypium hirsutum
  Clone ID: LIB3148-059-Q1-K1-G10.pep
MFCPHNYISAASYVNLILSSSMLIWYKLNTGVYTYTETCDHLSLDNP

SEQ ID NO: 95922 - protein, 91 aa, Gossypium hirsutum
  unsure (1)..(91): unsure at all Xaa locations
  Clone ID: LIB3148-059-Q1-K1-G12.pep
PRVRILELCGVLHAHTGWKRTDMRGIKKKKLWLNSKXKKKKKKKKKKKKKKKKKKKKKKKKKKKKKKKKKKKKKKKKKKKKXGGPFLKSPN

SEQ ID NO: 95923 - protein, 39 aa, Gossypium hirsutum
  Clone ID: LIB3148-059-Q1-K1-G2.pep
VIMSFLFGLSIIFSEKKIETKISVASKFLSCYRVFVVLN

SEQ ID NO: 95924 - protein, 114 aa, Gossypium hirsutum
  Clone ID: LIB3148-059-Q1-K1-G3.pep
RCGIRGSATTSAHASAHAKGIVLDKIGIEAKQPNSAIRKCARVQLIKNGKKIAAFVPNDGCLNYIEENDEVLIAGFGRKGHAVGDIPGVRFKVVKVSGVSLLALFQEKKEKPRS

SEQ ID NO: 95925 - protein, 62 aa, Gossypium hirsutum
  Clone ID: LIB3148-059-Q1-K1-G5.pep
RISHLSNPAFTFNLKGIRPATLSKYKASMGSAIVKSILRHRYIWNIKPVFINGFIDHMNRRC

SEQ ID NO: 95926 - protein, 90 aa, Gossypium hirsutum
  Clone ID: LIB3148-059-Q1-K1-G6.pep
TEQNSQRRKGFLHPLRYPISNSGERIARKMQEISLMKPISNGDQWWELIREDDLPSLDQETDPDLLLLLLKYKVHILMEMMKLFTNGSPK

SEQ ID NO: 95927 - protein, 90 aa, Gossypium hirsutum
  unsure (1)..(90): unsure at all Xaa locations
  Clone ID: LIB3148-059-Q1-K1-H10.pep
IIEDKLNISKYLSWTFCSCMYGKRKPDPDFYLAVVEHLKVDPASCIFVDDRIKNVEAAVXVGITGLQFKNSDLLRQDLLRLGVDIAIDAQ

SEQ ID NO: 95928 - protein, 73 aa, Gossypium hirsutum
  Clone ID: LIB3148-059-Q1-K1-H12.pep
WEGKDETPRSCLVTNKTNQIRSKSTICLLLFSEQITTEEPENFRPSMKQPNHIHTQTHPIRSIIKPLQTFVSS

SEQ ID NO: 95929 - protein, 40 aa, Gossypium hirsutum
  Clone ID: LIB3148-059-Q1-K1-H3.pep
RETHCFKFNPKKNYENIIKDILIVANLGSRLLLLLFEKCQ

SEQ ID NO: 95930 - protein, 74 aa, Gossypium hirsutum
  Clone ID: LIB3148-059-Q1-K1-H6.pep
RIEPGIADGTVNSCCKRNKTSDHYPKAGISRYCSKGSVSCYQGAVDINSRMKRETRSRTRTHQKSGMYSPAHLS

SEQ ID NO: 95931 - protein, 48 aa, Gossypium hirsutum
  Clone ID: LIB3148-059-Q1-K1-H7.pep
LSRCNAHILATIIRLHEPNLIFPTCPSHALEEDAMLLESFIYYPGNQL

SEQ ID NO: 95932 - protein, 73 aa, Gossypium hirsutum
  Clone ID: LIB3148-059-Q1-K1-H9.pep
PRVRPRVRPLLLPRIRALLRASNIHFYEPPPKAPTSPLFGPMLPATVADLHLLLSNAPSNITRYFWALSIYEV

SEQ ID NO: 95933 - protein, 52 aa, Gossypium hirsutum
  Clone ID: LIB3135-023-Q1-K1-H2.pep
QGDKKGGEKQGFEVGCVTKSYLIGVVVVDNRISYISPFGIAFCVDMDYDVKD

SEQ ID NO: 95934 - protein, 78 aa, Gossypium hirsutum
  unsure (1)..(78): unsure at all Xaa locations
  Clone ID: LIB3135-023-Q1-K1-H5.pep
GKVAYKLSLPSSARIHPTFHVLQLKKHIGTAVSAPTLPPIGSDGALLKSPVRILDRRLVKXGNQAAVEVLVEWADTFP

SEQ ID NO: 95935 - protein, 55 aa, Gossypium hirsutum
  Clone ID: LIB3135-024-Q1-K1-A12.pep
SFLCSSIDGLLYVIIILFYSFMSIRGKDFHFRFTVIPTHYIIHIYILVMSVKDKS

SEQ ID NO: 95936 - protein, 92 aa, Gossypium hirsutum
  Clone ID: LIB3135-024-Q1-K1-A3.pep
MLKKPIIKLLGVRVASNLEKYLGLPMMVGQKNTWAFANFIRWFRRRTKVRVCAIYLWGERSLLSRFYKLYQFTLCNILPCRKRSIVYLEKHL

SEQ ID NO: 95937 - protein, 94 aa, Gossypium hirsutum
  Clone ID: LIB3135-024-Q1-K1-A6.pep
VETCLQHVMLVMYVKKNKIMSMAMKKRVWAHPYAFVAADDHPLTAAAAADSQLGGDVQVVVLAAATAACSPHFIDGGYTTGMYSGCSLSLSRRG

SEQ ID NO: 95938 - protein, 67 aa, Gossypium hirsutum
  Clone ID: LIB3135-024-Q1-K1-A7.pep
GTEKIATDTDNMLCIETNTCMPCHTSSYRLLTPNCKRRARYIESSMMHQHPSVLNADLSHMYYRRLA

SEQ ID NO: 95939 - protein, 61 aa, Gossypium hirsutum
  Clone ID: LIB3135-024-Q1-K1-B1.pep
HLLLRYTPSPPNTFKTTTPPHRCHSLTALTLLSSCHSKLDMLSPSSVAHTIIGRGIITQRR

SEQ ID NO: 95940 - protein, 63 aa, Gossypium hirsutum
  Clone ID: LIB3135-024-Q1-K1-B10.pep
IMMIDIHSVTMTFSTKENQFVGNDQTVEEVGYPFICKYMYGHTFLNSGWSCHHIQWTRLLVLR

SEQ ID NO: 95941 - protein, 61 aa, Gossypium hirsutum
  Clone ID: LIB3135-024-Q1-K1-B12.pep
QISFLLPVFFFFFIMFYNFVTNCSLYSENIYSKLPYNSIVFILHSFTMYFLTSLINIICGR

SEQ ID NO: 95942 - protein, 102 aa, Gossypium hirsutum
  unsure (1)..(102): unsure at all Xaa locations
  Clone ID: LIB3135-024-Q1-K1-B2.pep
LKNCFVYEKFGFCSLFSLYLDCIPPIQWFIWVFIPENTAKPLFCCAFSAGMATWGELGGAARVEVNAVCGEGCWRRHQXGFFLPKMLRFWALLGLRFGGLFL

SEQ ID NO: 95943 - protein, 45 aa, Gossypium hirsutum
  unsure (1)..(45): unsure at all Xaa locations
  Clone ID: LIB3135-024-Q1-K1-B4.pep
VGVWFSQGALFLKGFFXRDKEIKMSGFSVSNYTWICLASTYDAYK

SEQ ID NO: 95944 - protein, 51 aa, Gossypium hirsutum
  Clone ID: LIB3135-024-Q1-K1-B6.pep
VRRFLRESERSREKIIRRESTRGGHFTASCLYNLLRLSDLSDIMTTSRRLA

SEQ ID NO: 95945 - protein, 46 aa, Gossypium hirsutum
  Clone ID: LIB3135-024-Q1-K1-C11.pep
MDFIASRTTDYKHPMIFFNTLAVLELVIAKFPNMHKVPIFGMNADK

SEQ ID NO: 95946 - protein, 64 aa, Gossypium hirsutum
  Clone ID: LIB3135-024-Q1-K1-C12.pep
IYLQHFLFHPYLIHIQYFISIMYNLILNFHFTFCCTPNISIHAYSFNYDLTTVTLTNPCICSGL

SEQ ID NO: 95947 - protein, 74 aa, Gossypium hirsutum
  Clone ID: LIB3135-024-Q1-K1-C4.pep
PLLFSLGGSLPCYLELRLVLLLSDLLAYVAVLHHQADPAIAADALRFNLHPPKWQLLVIDYWIFVASSIHLVAT

SEQ ID NO: 95948 - protein, 62 aa, Gossypium hirsutum
  Clone ID: LIB3135-024-Q1-K1-C6.pep
VAVIVIKDLRSFFYLRYPAFDRSTYASYLTRLLKFKKVMYGRITELTCSFLIACLMHPSNLC

SEQ ID NO: 95949 - protein, 53 aa, Gossypium hirsutum
  Clone ID: LIB3135-024-Q1-K1-C7.pep
SLGTRKQNYLEPFWGGAFDQANRLTIRQGIQLYFPVFECSYICIDHKEIIHID

SEQ ID NO: 95950 - protein, 65 aa, Gossypium hirsutum
  Clone ID: LIB3135-024-Q1-K1-D11.pep
LPGVKESYESSEVKEKSEPLLLPVKIRVPVANESTPLVFSVDRLDSTLPVRKPYQKWRLSPISQC

SEQ ID NO: 95951 - protein, 134 aa, Gossypium hirsutum
  Clone ID: LIB3135-024-Q1-K1-D12.pep
EKNAVASVMILSDCHDGQGQSNPTNQNLPVVSTTRLAHSDIPVHTFGFGSCTHAPNNDAFCKIVNGLLSVVVQDVRLQLGFSSGSAPTEISSAYSLTTRPALIGSNSVRVGDLHLGEEKDLLVELKVPVTTRGS

SEQ ID NO: 95952 - protein, 83 aa, Gossypium hirsutum
  unsure (1)..(83): unsure at all Xaa locations
  Clone ID: LIB3135-024-Q1-K1-D4.pep
MSSSGRKITLKSSYCESFXVEEAVALESQTIKHIIDDYCADNGIPFPNVTSKILAIVIHYWPIHVTAPKTDHRSGDYELKRLD

SEQ ID NO: 95953 - protein, 86 aa, Gossypium hirsutum
  Clone ID: LIB3135-024-Q1-K1-D5.pep
SNHLTHLYLPQHQYTPALTHAKVPLKTTLPIKIKPDQNQHSISHQLTLEPTSNKRFQSLYHQQQILIKITQHIFSSLSRHKKSHHK

SEQ ID NO: 95954 - protein, 70 aa, Gossypium hirsutum
  Clone ID: LIB3135-024-Q1-K1-E11.pep
HISVHHLCLSSTLNFNFLHLFVCICRKYKPIQSMGSINTLYTHLRIKENSMSKKKIICPLTFFKNALNLF

SEQ ID NO: 95955 - protein, 95 aa, Gossypium hirsutum
  Clone ID: LIB3135-024-Q1-K1-E12.pep
YFFFFDIVFFFIRKCVFSEDIGVINRNLYYKQAHHYVSKKQSNHDESDTIARIRSAAAWHDFVFLYSFLCFCVANFDFFAYEAYVSFVTGVSVKL

SEQ ID NO: 95956 - protein, 75 aa, Gossypium hirsutum
  unsure (1)..(75): unsure at all Xaa locations
  Clone ID: LIB3135-024-Q1-K1-E2.pep
ARRRIAQPTSRAPAWMDGGPCNYTLSRDSTTRRSEAGNTQVHMGDTPPREXNNKGLSRKDIGVLPLPYLSATARA

SEQ ID NO: 95957 - protein, 56 aa, Gossypium hirsutum
  Clone ID: LIB3135-024-Q1-K1-E6.pep
KRARVPSKNNFKLNKKLYLSNLPTPNLIPLGPPLLNNPTLLTRSCNIIPFLYFHLQ

SEQ ID NO: 95958 - protein, 101 aa, Gossypium hirsutum
  unsure (1)..(101): unsure at all Xaa locations
  Clone ID: LIB3135-024-Q1-K1-E8.pep
VHFRYAERTSXIFISFNNRTPLLPYDHFYFTPIYKYLNNAILINSSNKTSNKSLFIYSLNLFNFQHLIPTLYTFHIYFNHIFYHNALHTINNKFSSFITTN

SEQ ID NO: 95959 - protein, 136 aa, Gossypium hirsutum
  Clone ID: LIB3135-024-Q1-K1-F10.pep
PTRPPTRPPELRPKAQEVWHHPLFWSSEMRLSFLREASDRVELEDRKSASEVLNELESIAAVALDGKWDEKLEPAFLNNIGHYRRYKFDSVRDLLRVIRNKQNHYREIPQDIQELLGPLPEGFDGYFSSRFPKLLI

SEQ ID NO: 95960 - protein, 42 aa, Gossypium hirsutum
  unsure (1)..(42): unsure at all Xaa locations
  Clone ID: LIB3135-024-Q1-K1-F3.pep
TISNXRYHTPHLNWLRKKTTLFDQKDRQSRNEKKLSKNITPS

SEQ ID NO: 95961 - protein, 127 aa, Gossypium hirsutum
  unsure (1)..(127): unsure at all Xaa locations
  Clone ID: LIB3135-024-Q1-K1-F4.pep
NKHGFHLLVRECGTNLNLPXGDVSPADVYFEAGXKGTLSFATNDDTNLNLQKEHMFRPLFETLDYRGIQRYRTTMNSKSCGXLEGYIDDDGPTLTDRPGQFHMGPIRVVPKCTISGFRTKALTSSSE

SEQ ID NO: 95962 - protein, 52 aa, Gossypium hirsutum
  Clone ID: LIB3135-024-Q1-K1-F6.pep
YPFNDIRKDSPKKTSMKSLVKRFIKLIIYQHLIPTLYTLYVYLKYVLTGYAL

SEQ ID NO: 95963 - protein, 82 aa, Gossypium hirsutum
  unsure (1)..(82): unsure at all Xaa locations
  Clone ID: LIB3135-024-Q1-K1-G10.pep
PTLXPTPPSFFTFSFNQFRSISYPIKLTCSNLLAHCLPRPSSLCQPPPTVPSLIQSILPTLSLMHLWLNKVNLRPSLLGSSS

SEQ ID NO: 95964 - protein, 120 aa, Gossypium hirsutum
  Clone ID: LIB3135-024-Q1-K1-G12.pep
KLHDAALPKALEELETKLGEVKYSMHYLNISYAERRNNPEKYGFKEANIACCGSGPYRGMFSCGGRRGVTKYELCSDPNDYLFFDSDHLTEKACKQIAQLMWSGTPNITGPYNLKALFEV

SEQ ID NO: 95965 - protein, 43 aa, Gossypium hirsutum
  Clone ID: LIB3135-024-Q1-K1-G6.pep
SISRDSEECASVSGRFIQVYKVYMWESVILRGNDCDRVGSIHR

SEQ ID NO: 95966 - protein, 43 aa, Gossypium hirsutum
  Clone ID: LIB3135-024-Q1-K1-G7.pep
IPGRAQASGKTWCEKTQSLNLWLTDRCIGGGIHHPEQDAHFVS

SEQ ID NO: 95967 - protein, 62 aa, Gossypium hirsutum
  Clone ID: LIB3135-024-Q1-K1-H5.pep
GDDCYYYFSMHIKSFALSDLNRNGSGPNDNHLVTTIGLFFYVDYACMYSQYSYCIQTTYLLY

SEQ ID NO: 95968 - protein, 123 aa, Gossypium hirsutum
  unsure (1)..(123): unsure at all Xaa locations
  Clone ID: LIB3135-024-Q1-K1-H9.pep
HSFPPYFISFTRPXNQVLXNIQAPHPPHNKSLEXDFSHHTTVYFHKLLLPLLTSYTYXIYHVNMTLSKTQANLLHEKISNKSYIDNDVITLFATTSNAHINATLNHYKNEYXNDINNDLISDP

SEQ ID NO: 95969 - protein, 110 aa, Gossypium hirsutum
  unsure (1)..(110): unsure at all Xaa locations
  Clone ID: LIB3135-025-Q1-K1-A2.pep
VNSDVIKMFSCGKFTGLRELGAXDACVKTLYPLLQDGFGSNEWEWFQNSLWDLRRTAEELSQGLDNLFKAVAGYFKIVSTGGYALLWNLKTSVGVPNSMLGRKVKEQALR

SEQ ID NO: 95970 - protein, 37 aa, Gossypium hirsutum
  Clone ID: LIB3135-025-Q1-K1-A4.pep
FDFQLFFFFLMQKRQLFNREIWYLEMNRIQLTVTLTA

SEQ ID NO: 95971 - protein, 98 aa, Gossypium hirsutum
  unsure (1)..(98): unsure at all Xaa locations
  Clone ID: LIB3135-025-Q1-K1-A5.pep
MLLMSRRATWNVEPLEDIEGAKPVGHKITEPXLPYHPMIDDDAALTSTGRMFNDCLIDVAAAELCSALKDVASSSRKTTAQSGGWTSSDDEADPMDHD

SEQ ID NO: 95972 - protein, 88 aa, Gossypium hirsutum
  Clone ID: LIB3135-025-Q1-K1-A6.pep
DFKIPTYNSEHIIYTNSYSARERSNMPWVSPDKLQIFRFQALRRPTISNLQQSINRDWCILHGVILPFTILIKRPIARVARPGPSIPV

SEQ ID NO: 95973 - protein, 80 aa, Gossypium hirsutum
  Clone ID: LIB3135-025-Q1-K1-A8.pep
ATTRQVISLISTHHLHKHIRIRGVATYCYKSTSADTPTKLTKAIHLEAHMGWPKRALNNVKCVELKAKLALGSIVKTTFV

SEQ ID NO: 95974 - protein, 87 aa, Gossypium hirsutum
  Clone ID: LIB3135-025-Q1-K1-B10.pep
LEPFITITNRKRKKHHKRTPDLLARVENSNPLGRKKVVMIAMNAASNQDIVLLDAVLFPRVILCFHTRTSHITWHLPSTSKTSLQIA

SEQ ID NO: 95975 - protein, 60 aa, Gossypium hirsutum
  Clone ID: LIB3135-025-Q1-K1-B7.pep
LLIEFQQINNQKRKEGSKTFRKPFLSFAFIRLLLSRFTNNIQRSFFSRLLSRVTLLTLSC

SEQ ID NO: 95976 - protein, 44 aa, Gossypium hirsutum
  Clone ID: LIB3135-025-Q1-K1-B9.pep
KQSQRRFLCIEKIKFQHELFLCICPVHLKFNFQLSPSSKITYAW

SEQ ID NO: 95977 - protein, 110 aa, Gossypium hirsutum
  Clone ID: LIB3135-025-Q1-K1-C3.pep
DTTEKISQHDVSDIIGRYINDNNLTNPAKKKRVLCDERLYSIFGRKTISRIKVYDLLETHYAENQDAWDDDFFFSSEEENLGEEKKSLRLEKKNYQKKRGFETPKSCFAA

SEQ ID NO: 95978 - protein, 80 aa, Gossypium hirsutum
  Clone ID: LIB3135-025-Q1-K1-C5.pep
TPNQNLILCDILRSWRRPIEEGFCSTISRISHICRPLELNLYGLPVSSTKSLCTVLNRTSCSKHPLPYLNMLGINTSFLP

SEQ ID NO: 95979 - protein, 49 aa, Gossypium hirsutum
  Clone ID: LIB3135-025-Q1-K1-C6.pep
LKFNQFLGRQFVCPGIHNIRALSRDANAAVHSLALELIHVLHGSPPLLL

SEQ ID NO: 95980 - protein, 30 aa, Gossypium hirsutum
  Clone ID: LIB3135-025-Q1-K1-C8.pep
GIEGPTQATRPHHYLIMPSYSSNNSYSIFW

SEQ ID NO: 95981 - protein, 46 aa, Gossypium hirsutum
  Clone ID: LIB3135-025-Q1-K1-C9.pep
PAIFILAGKQVYFSRFDNISYYIYGFSLIFCHKAMLFWARLTFLCI

SEQ ID NO: 95982 - protein, 57 aa, Gossypium hirsutum
  Clone ID: LIB3135-025-Q1-K1-D10.pep
KQKTLKKIKVWVDDLEQPKFLSRGCNILNLLLGPQNSFNWPSLDHFHGWKHPGVTQF

SEQ ID NO: 95983 - protein, 72 aa, Gossypium hirsutum
  Clone ID: LIB3135-025-Q1-K1-D11.pep
CYLGEWKQLQQCCFLQQLFAPFWIYSIVQKTDINRSSYNTVFMLLFRGRSPCPFQIWGRESGTSRTRGRTRG

SEQ ID NO: 95984 - protein, 63 aa, Gossypium hirsutum
  Clone ID: LIB3135-025-Q1-K1-D6.pep
SAGQSSEVRCHYRKASTSNVRVAKLGCQNQAPPICFSGRFLIEIKRYDLLFFGRVGWVGNSIP

SEQ ID NO: 95985 - protein, 59 aa, Gossypium hirsutum
  Clone ID: LIB3135-025-Q1-K1-E11.pep
MLYEVISILEQEGAEVVSSTFSTAGGKTFHTLHAQAKLSRVGVETTRVCQRLQELIKSY

SEQ ID NO: 95986 - protein, 82 aa, Gossypium hirsutum
  unsure (1)..(82): unsure at all Xaa locations
  Clone ID: LIB3135-025-Q1-K1-E5.pep
VIEKISPAAIGRVNSNTGCHLKKGQKTREKFEKTLSVLMGALDFEXFCDVDMVIHAAIHNVLLKLHIFSDLEKYCAPHCILA

SEQ ID NO: 95987 - protein, 106 aa, Gossypium hirsutum
  Clone ID: LIB3135-025-Q1-K1-E7.pep
HAFGWFLMAYFFVAYLGVVRRKEWPHFFTFHVVMGMLLEIALQVIGTVSRWMPLAIYWGKIGMHFWTAVAFAYLFTVLECIRCALAGMYADIPFACDAAYIQIPYD

SEQ ID NO: 95988 - protein, 54 aa, Gossypium hirsutum
  Clone ID: LIB3135-025-Q1-K1-E9.pep
EEHLIKTTTFMPTFPVRHAQHLRRKKMLKSPDSLRDQRRKEMQHGGLWTSALFG

SEQ ID NO: 95989 - protein, 99 aa, Gossypium hirsutum
  Clone ID: LIB3135-025-Q1-K1-F2.pep
ISFAAAEDVGFIYNGFRSAKLNLDGIAELTSNGLLKLTNKTVQETGHAFYPHPVDFKNSTNGSVFSFSCTFVFAILTEYPTLSGHGIAFVIAPTKSLPG

SEQ ID NO: 95990 - protein, 57 aa, Gossypium hirsutum
  Clone ID: LIB3135-025-Q1-K1-F3.pep
KVFQQQEHLDLNNHVIVCFSFSCVQPMTTNESLFNLENCSQCSHLLQKVLPTRLMRA

SEQ ID NO: 95991 - protein, 56 aa, Gossypium hirsutum
  Clone ID: LIB3135-025-Q1-K1-F7.pep
FASKQTHHCSFWNSSNISMLSLFHLILFCCNQLSFSCRWIHNERQVQFFLRNFPTS

SEQ ID NO: 95992 - protein, 92 aa, Gossypium hirsutum
  Clone ID: LIB3135-025-Q1-K1-F8.pep
PTRTPSSQQINLCNNKLTGIGPKSLLRFPSLMLEGNNVSFERMPPHTSPFGAPYGEPYTTSKKSMRLGETALSRIIIACCILALVALVSFEI

SEQ ID NO: 95993 - protein, 59 aa, Gossypium hirsutum
  unsure (1)..(59): unsure at all Xaa locations
  Clone ID: LIB3135-025-Q1-K1-G1.pep
MNIKTHNNPYTYIYNIKNHIFSYDKLTDKLESEXKEKVATAVKESLYWLHDYHNVDLVY

SEQ ID NO: 95994 - protein, 152 aa, Gossypium hirsutum
  Clone ID: LIB3135-025-Q1-K1-G12.pep
PTRPLVLMMNKERVQTRGVKVDESVKTGCTYMKVKFDENGKLKMETVKESAEDSLLSSELNLAVLKEARIFHFNSEVLTSPSMRSTLFKAIAWSKKFGGLIFFDLNLPLPLWRSRDKTREVIKKAWNKADIIEVSRQELEFLLDEEYYERKR

SEQ ID NO: 95995 - protein, 38 aa, Gossypium hirsutum
  Clone ID: LIB3135-025-Q1-K1-G2.pep
INIYLTFFLITELAYSVVVTEKCDVYSFGVLALEILMG

SEQ ID NO: 95996 - protein, 62 aa, Gossypium hirsutum
  Clone ID: LIB3135-025-Q1-K1-G4.pep
ITSKGGNPCKRREPSISIARFTIMDRSETHYYYYYYYYYSVLIKDLPLKKKKTKKKKKKGEQ

SEQ ID NO: 95997 - protein, 39 aa, Gossypium hirsutum
  Clone ID: LIB3135-025-Q1-K1-G6.pep
VVLRDCHVLAWLAGAIYLPPSIGGDCDLPLYVYINERVV

SEQ ID NO: 95998 - protein, 132 aa, Gossypium hirsutum
  Clone ID: LIB3135-025-Q1-K1-G9.pep
RRRLFRVGEVKNLVYLHGALCEALRLYPPAPFNHKEPVKPDILPSGHPVHPKTKILFSVYSMGRMKSIWGEDCYEFKPERWINERGEIKHESSYKFLSFGAGPRICLGKETSFIQMKAVASALIYNYRIHVM

SEQ ID NO: 95999 - protein, 67 aa, Gossypium hirsutum
  Clone ID: LIB3135-025-Q1-K1-H11.pep
FIYPSGPFKKNSTTLYPTKLHIFNLLLSFSHLSYILILYSSLYLLILSNITKPLYISKPYQFKILSS

SEQ ID NO: 96000 - protein, 61 aa, Gossypium hirsutum
  unsure (1)..(61): unsure at all Xaa locations
  Clone ID: LIB3135-025-Q1-K1-H8.pep
MAAGAADGLIWSLYXGCISGNEISIERQTYHKNCRCALHDKSRGNCPRSIAKSKNLSDAIR

SEQ ID NO: 96001 - protein, 76 aa, Gossypium hirsutum
  Clone ID: LIB3135-026-Q1-K1-A1.pep
KKIPLHLFGFWAYIAKYIFCATVYFCYLCFCLLDVVFVYFAGHEESTGRNHCHFGATSVKESSSGVVHAEGAHGGG

SEQ ID NO: 96002 - protein, 45 aa, Gossypium hirsutum
  Clone ID: LIB3135-026-Q1-K1-A11.pep
HKPDKKFGMRNVMCVLTIKDAVEHACARACSWADICSVIARDGVV

SEQ ID NO: 96003 - protein, 83 aa, Gossypium hirsutum
  Clone ID: LIB3135-026-Q1-K1-A12.pep
FFKTAAPFFLFFFFFFFFFFFFFFFFFFFFFFFFFFFFFFFFFFFFFFFVKQGKKQEVLFLTFGSVPLAIQFPLAITQLYNVL

SEQ ID NO: 96004 - protein, 137 aa, Gossypium hirsutum
  Clone ID: LIB3135-026-Q1-K1-A6.pep
KKMIKWCPGPGCENAIDFVAGSENLDVSCLCSHSFCWNCTQDAHRPVDCETVTKWMSKNSSESENVNYILAFTKPCPKCKRPIEKNMGCSHMTCRAPCLYEFCWLCLGDWKNHGTCNRFKGNPEEEKREKAKQYVMK

SEQ ID NO: 96005 - protein, 46 aa, Gossypium hirsutum
  Clone ID: LIB3135-026-Q1-K1-A7.pep
GICNPIIAKMYQGGAGGDVRRGGGAEMPNGGGSGGSGAGPKIEEVD

SEQ ID NO: 96006 - protein, 139 aa, Gossypium hirsutum
  unsure (1)..(139): unsure at all Xaa locations
  Clone ID: LIB3135-026-Q1-K1-B1.pep
IDFDIELGSTQYWDDLARYLXAYSNNGRKVYLTAAPQCPFPDSFLGTALNTGLFDYVWVQFYNNPPCQYTSGNINNLVNSWNRWTSSIKAGNIFLGLPAAPAAAGSGYIPPNVLTSQILPVIKRSSKYGGIMLWSKFFD

SEQ ID NO: 96007 - protein, 71 aa, Gossypium hirsutum
  Clone ID: LIB3135-026-Q1-K1-B3.pep
SETVEATYVPDAEKRTVESEKNMEAHNKIQAEGPKDEHLNHSHKSLRRMMRIMINNASDTRTMTNRNVRCG

SEQ ID NO: 96008 - protein, 58 aa, Gossypium hirsutum
  Clone ID: LIB3135-026-Q1-K1-C1.pep
SSTLTLRRHPSDTDNKLCLGTPLAKIMPLPDLFIYQSYFKSVYKSTLLKHSLVPNFFI

SEQ ID NO: 96009 - protein, 144 aa, Gossypium hirsutum
  Clone ID: LIB3135-026-Q1-K1-C11.pep
NLTSQHKPTNYPKLYKKPNVANIKLKPNNYLDAKKTSLAVPTAALLSTFELPALAVTGVNNEPDLITVIIQLGIIAFGYFLIVPPIIMNWLRIRWYRRNLLEMYLQFMCVFLIFPGLLLWAPFLNFRKFPRDKVLKYPWDTPKD

SEQ ID NO: 96010 - protein, 72 aa, Gossypium hirsutum
  Clone ID: LIB3135-026-Q1-K1-C2.pep
HACGETRNTDMQCMNRIDTGKKKYKLEKAKIAAGGGPSKRFSFDKLDQLIVPTEKTVDNVDTRRLWWQCEKH

SEQ ID NO: 96011 - protein, 37 aa, Gossypium hirsutum
  Clone ID: LIB3135-026-Q1-K1-C4.pep
GFLSSPVQSKPNRISKGNSNERAIRYKLLRDVWMNSE

SEQ ID NO: 96012 - protein, 52 aa, Gossypium hirsutum
  unsure (1)..(52): unsure at all Xaa locations
  Clone ID: LIB3135-026-Q1-K1-D9.pep
LLLFFSFHRKWQLETLLKPPLKRTIVRWLLKQPMLMLXYKRPNMDIVDTGAF

SEQ ID NO: 96013 - protein, 49 aa, Gossypium hirsutum
  Clone ID: LIB3135-026-Q1-K1-E1.pep
SPTRSPTRSPTRPRDFDRERAGGEAKVWGENWREKKRANAIGSFDSTNG

SEQ ID NO: 96014 - protein, 45 aa, Gossypium hirsutum
  Clone ID: LIB3135-026-Q1-K1-E10.pep
YPTSINVTCLTCHYPLILPFHQYFKFPPKPSYIQRITYDIQIPPY

SEQ ID NO: 96015 - protein, 48 aa, Gossypium hirsutum
  Clone ID: LIB3135-026-Q1-K1-E6.pep
TTSCRRCSFFFFFEKISSKRPAADKKKIEDAIEQALHWCDGNQLAEAD

SEQ ID NO: 96016 - protein, 86 aa, Gossypium hirsutum
  unsure (1)..(86): unsure at all Xaa locations
  Clone ID: LIB3135-026-Q1-K1-F2.pep
PTRPLDRFDSILPPCHVAIXGVVASKPTAITNAXGFFTAKNKMLVNVTADHQIIYRADLTSLLQTFSKIVDNAESHTLYMILRFMQ

SEQ ID NO: 96017 - protein, 86 aa, Gossypium hirsutum
  Clone ID: LIB3135-026-Q1-K1-F3.pep
PTRSKMFMYSSVASILTICMWHAPECFNSFQMKLNFTVLHLKDLKTLLLSNIHRELCRHITRLLSTCLHNTSWTRTVYTFLKVVVS

SEQ ID NO: 96018 - protein, 66 aa, Gossypium hirsutum
  Clone ID: LIB3135-026-Q1-K1-F4.pep
RDNLYILHTIYNHYYNSIYSKIIHLQSFLFILILLLSFIFSYLLFLILNLTIFSFIFIVLLSFLLF

SEQ ID NO: 96019 - protein, 57 aa, Gossypium hirsutum
  Clone ID: LIB3135-026-Q1-K1-F5.pep
IACGLDAQYFSTAHLGRDAHLNEPYAHEHACDVDSNIAQYVVAGYPVWRKLTCWIDT

SEQ ID NO: 96020 - protein, 110 aa, Gossypium hirsutum
  Clone ID: LIB3135-026-Q1-K1-G4.pep
PQDSVTATGGHLLHRQLLRKRFVFLRRSTFPAPRPKTLWGPIRGLMIRRFSKKTPLPHSPRKGRRFHLQEGSKMGVLRSPRTVTPSLVPHEPDSHYGRILRAKENGEAGA

SEQ ID NO: 96021 - protein, 67 aa, Gossypium hirsutum
  Clone ID: LIB3135-026-Q1-K1-H2.pep
IPIYKCCTQYPNQFLCDPNFPFVPFLIFKIIKLTYFFIFSYFSTYFYYFCLFFIYNILIPLFLAFFF

SEQ ID NO: 96022 - protein, 72 aa, Gossypium hirsutum
  Clone ID: LIB3135-026-Q1-K1-H3.pep
KLKPKHLSHSVLPPILPICFTQCCFIRFHFIAYFFFLPLNLLHSFQQFYLLLLLYTLIFIFFIILLTPCRFL

SEQ ID NO: 96023 - protein, 96 aa, Gossypium hirsutum
  Clone ID: LIB3135-026-Q1-K1-H5.pep
TQFSNWFLLFSLSAMANNIISMRTPTKVSHLSDSYQFTIRTLIYPYPFFRIFTTHGSAAINPVYTYCNYMILSSSTSGFINFSYVVETRAPNHILK

SEQ ID NO: 96024 - protein, 140 aa, Gossypium hirsutum
  Clone ID: LIB3135-026-Q1-K1-H6.pep
GTEWPDRRVRENGRGKITLTSSVAWVKRVAGRRRLPKQDIAASSATLLTYGSYGLGVHGSKLDIDPFCIGPYFATMVDDFFIVLYNMLKSRPEVSEIHYVKDAKVLLMRFEFDGISINLPFVQLKVLVVLKGARKHKDLS

SEQ ID NO: 96025 - protein, 72 aa, Gossypium hirsutum
  Clone ID: LIB3135-027-Q1-K1-A10.pep
NTPIQPITNKLLPLIPNTSCHQQIISIYTNIRHLIDHRCRFCATSVASVRLWCTVHLKSGMSNYIYSLIESE

SEQ ID NO: 96026 - protein, 42 aa, Gossypium hirsutum
  Clone ID: LIB3135-027-Q1-K1-D10.pep
PHKYSLLPTDPYQRAIGRFWGDFVDKKIYRLQSGKVLTTYGE

SEQ ID NO: 96027 - protein, 74 aa, Gossypium hirsutum
  unsure (1)..(74): unsure at all Xaa locations
  Clone ID: LIB3135-027-Q1-K1-D12.pep
XSLRGKPVEELLCKQQNEIXAIEHTXSLMPCEDTVTSFSRKADTVFVKHHYLGKALSRWPLDALXKLCAFLVRC

SEQ ID NO: 96028 - protein, 98 aa, Gossypium hirsutum
  Clone ID: LIB3135-027-Q1-K1-E10.pep
LRRLNLYPHRMDMIVTYLKHKYHNMPMVLTSNGYREVIKAHSTIDQLLHYEERIDFMDRHLDALSTTVQRRAHVKGYFAWSMLDNFEQDSCYTLKLGV

SEQ ID NO: 96029 - protein, 57 aa, Gossypium hirsutum
  Clone ID: LIB3135-027-Q1-K1-E11.pep
LEGRKGIFSFEVVKLRLVILFFVYFIKDFFFFYECLLNFFFFILVKKFFFFIIFFFF

SEQ ID NO: 96030 - protein, 95 aa, Gossypium hirsutum
  Clone ID: LIB3135-027-Q1-K1-E12.pep
VNLPNFISMSRLLSGALLGWMIVNEMFGLAFVGLAISGATDWVSNWMCGFVKGTSPSFAHCSFWLFVFLDICPFSAALYQKAPFPGLQWKKWLDF

SEQ ID NO: 96031 - protein, 142 aa, Gossypium hirsutum
  Clone ID: LIB3135-027-Q1-K1-E9.pep
KNSSKSSKNGAKSSDGEKGNGLAPYLGKFKSMRTVSKEGYASFMDYKILEKATNKFHHGNILGEGGFGCVYKAQFNDSSYAAVKKLDCASQDAEKEYENEVGLLCRFKHSNIISLLGYSSDNDTRFIVYELMENGSLETQLH

SEQ ID NO: 96032 - protein, 35 aa, Gossypium hirsutum
  unsure (1)..(35): unsure at all Xaa locations
  Clone ID: LIB3135-027-Q1-K1-F10.pep
VCAFRLAFAFCLPALXCLRFRLALRVSFRVXGRVV

SEQ ID NO: 96033 - protein, 67 aa, Gossypium hirsutum
  Clone ID: LIB3135-027-Q1-K1-F11.pep
NHSLRTHQLPFIPNKLPTYSFSLCSQITLHHFPTFPPRSSKQLHASTRTSSLNLFPDSTTRQSLTTL

SEQ ID NO: 96034 - protein, 42 aa, Gossypium hirsutum
  Clone ID: LIB3135-027-Q1-K1-G9.pep
MRIYELEKLIKDYCYMSRYVMLKILNIIKWIICKIEEVGSSV

SEQ ID NO: 96035 - protein, 102 aa, Gossypium hirsutum
  unsure (1)..(102): unsure at all Xaa locations
  Clone ID: LIB3135-027-Q1-K1-H10.pep
MKAILGGETMDIPCGVSIKVKANAIDDVRTRWKLTHHFXHLNLVSHLMKDQQTGTHKLTIETWLVFKMTTAVILTAFRHDENINHSASLXYLFKMRVTYPHF

SEQ ID NO: 96036 - protein, 103 aa, Gossypium hirsutum
  unsure (1)..(103): unsure at all Xaa locations
  Clone ID: LIB3135-027-Q1-K1-H12.pep
MAASNSENYLKTEVSSSGESEQPQTQSIRMPSMEXIPAHEVWNNFAVRSVPSRVMGGILGFIMGMVLAALYNPELHDLMIGTPQLLFNLKQMGSINLRSAKTF

SEQ ID NO: 96037 - protein, 75 aa, Gossypium hirsutum
  Clone ID: LIB3135-028-Q1-K1-A11.pep
EFYRLNCQIDATPVAQNQHRGSLKCQPSTQTNTRVELFIAMGSSSRCLKLMSHLSIMIEVKKVRTRMVESCRRCT

SEQ ID NO: 96038 - protein, 52 aa, Gossypium hirsutum
  Clone ID: LIB3135-028-Q1-K1-A12.pep
LLYHITIWIDLYFPHFLHYILTQQSFLSYYNVTPINHDLLSNFLSYPRHHAI

SEQ ID NO: 96039 - protein, 57 aa, Gossypium hirsutum
  Clone ID: LIB3135-028-Q1-K1-A3.pep
EKGRRLIPSLKQVQPSSLSTYSCYPDPANQPSSRRSAHSIGRILEIPITSKGEKPHE

SEQ ID NO: 96040 - protein, 71 aa, Gossypium hirsutum
  Clone ID: LIB3135-028-Q1-K1-A6.pep
TIYKYKFPPPTPPSPPKGPYKCKCPPPLPSPPKHPYNDKSPTPPPSSPPKHSYMYKSPPPPLPPKHHYKYT

SEQ ID NO: 96041 - protein, 51 aa, Gossypium hirsutum
  unsure (1)..(51): unsure at all Xaa locations
  Clone ID: LIB3135-028-Q1-K1-A8.pep
MSALDATRAKLALGVLYFNKAXAWDKICRAIQYGSKFLNDGQPGTSQNVDK

SEQ ID NO: 96042 - protein, 76 aa, Gossypium hirsutum
  Clone ID: LIB3135-028-Q1-K1-B11.pep
PTRPKIKLMFVYMLYHSTIWDGGYGHGAVVFMVSHLASLAFDNVTPIYQGLRGIYWPDLFHVAIEITVHLTNSIAI

SEQ ID NO: 96043 - protein, 78 aa, Gossypium hirsutum
  Clone ID: LIB3135-028-Q1-K1-B5.pep
ARVRRRVRARVRANITHRHFPGLTCTSWDGIICFCYIVAWLPESVSLVYQEPYTMYLKTSQSIRKCELLLHGLCMQHS

SEQ ID NO: 96044 - protein, 68 aa, Gossypium hirsutum
  Clone ID: LIB3135-028-Q1-K1-B7.pep
TVSETIGHPPLCRNSNLQPPSLIRPPGATSTPAPPYASRQVLAHALYPVPAINQDIQSSKKQEKIFYF

SEQ ID NO: 96045 - protein, 32 aa, Gossypium hirsutum
  Clone ID: LIB3135-028-Q1-K1-C1.pep
KYIKPLHLLIMPCNLAANLVHQILKKKGGRGE

SEQ ID NO: 96046 - protein, 129 aa, Gossypium hirsutum
  unsure (1)..(129): unsure at all Xaa locations
  Clone ID: LIB3135-028-Q1-K1-C10.pep
TRNERNKVVLLLQIARFIMKTGSRLWSGKKPFITIPHMGPSEHLLPCRCEVERANDWLKPNVILDAFYARATTMSGTCAKHLNNFANQEQRHAQLSTDLSXAVVGHVQLIIAYKLHLKLQQDIPGKGVK

SEQ ID NO: 96047 - protein, 39 aa, Gossypium hirsutum
  Clone ID: LIB3135-028-Q1-K1-C2.pep
VLKHEQARSQCTHLRSNHQSKGLKDSRGRVDGRVSERVG

SEQ ID NO: 96048 - protein, 46 aa, Gossypium hirsutum
  Clone ID: LIB3135-028-Q1-K1-C4.pep
QLIGIQFPTHPLDSTHVITLKRVSYCACRIQTLAILIENRSYDRIN

SEQ ID NO: 96049 - protein, 142 aa, Gossypium hirsutum
  Clone ID: LIB3135-028-Q1-K1-C5.pep
SNDAPALNKAAICFAVPDGTDTARSASDIVLTEPGLNVIISADLTSRCIFQRMKNYTIYAVSITIRIGLGFMLIALIWQYDFSPFMVLIIAILNDGSIMTIFKDRVKPSPLPDSWKLKENLVTGIVLESYLALITGIFFWAM

SEQ ID NO: 96050 - protein, 57 aa, Gossypium hirsutum
  Clone ID: LIB3135-028-Q1-K1-C7.pep
LNIIILTTPGLQTASLHFQSAPKAFKLKGFFSHTLPANSTANIPYNIITFTNCKNSN

SEQ ID NO: 96051 - protein, 95 aa, Gossypium hirsutum
  Clone ID: LIB3135-028-Q1-K1-D1.pep
GEILTYITVKRIHVCMYVCMVILSNHLFAIFGCFFFFLLRIPEDNKYFTTEVKYFITSYPSVGGMHNHPPFNSKIMYSMQDVVVYKTTMQQMFLL

SEQ ID NO: 96052 - protein, 69 aa, Gossypium hirsutum
  Clone ID: LIB3135-028-Q1-K1-D3.pep
GSGKMTYPLLDVKTTTSSSKPDIHGASLRLQTHHTAIKPELAISAHDKQRGAANVDVRTRAYCATNNTP

SEQ ID NO: 96053 - protein, 101 aa, Gossypium hirsutum
  unsure (1)..(101): unsure at all Xaa locations
  Clone ID: LIB3135-028-Q1-K1-D4.pep
QLLLCICLGRSGREIETTLFSRSGTGNICVEKSVLPKGDSLQIQEVWNDYLEEEFVLILKIVDAYNYDAIDTEIPXVVLRPVGTFKNVSAYSYQTLKDNED

SEQ ID NO: 96054 - protein, 72 aa, Gossypium hirsutum
  Clone ID: LIB3135-028-Q1-K1-D5.pep
FIPSPVLPSGFFNLLSTLTITPLIISFLSTSNNPLFTNFYFSFIFTSYNNKITLTIIYPVTIPLYDVIILLT

SEQ ID NO: 96055 - protein, 87 aa, Gossypium hirsutum
  unsure (1)..(87): unsure at all Xaa locations
  Clone ID: LIB3135-028-Q1-K1-D7.pep
GKITFITITTSFLITTNLRNVWRIITQRRLLLAKAAKGAQVDSVQMSGXRKTEGNNCLXRLCLAAAAAAICSVAVISIFRCLNVVSH

SEQ ID NO: 96056 - protein, 56 aa, Gossypium hirsutum
  Clone ID: LIB3135-028-Q1-K1-E10.pep
YLLYSTIIVSYSPELLMDNGTVNHTSYDPDKVHAVPVDYLPVYIIYNRNEPKRTRG

SEQ ID NO: 96057 - protein, 43 aa, Gossypium hirsutum
  Clone ID: LIB3135-028-Q1-K1-E2.pep
NDVSHLDIHTQIDGVPSGITYGENTWADAKAYNEPLARLTWLF

SEQ ID NO: 96058 - protein, 95 aa, Gossypium hirsutum
  Clone ID: LIB3135-028-Q1-K1-E3.pep
LMHLEVVILAFIIHSFLSQMIATLLGTPLAVCFSSDSPGGGHLPLPSPGPYAPASSNNSDADSFSNNVILQSWPTTERARQSPASAETGTLVNKP

SEQ ID NO: 96059 - protein, 46 aa, Gossypium hirsutum
  Clone ID: LIB3135-028-Q1-K1-E4.pep
FVHPYVNGVVLWVLEEQWFAHPIVLPTALQASYKNNYKPHRSRCVL

SEQ ID NO: 96060 - protein, 85 aa, Gossypium hirsutum
  Clone ID: LIB3135-028-Q1-K1-E5.pep
LIRCVTQGFRQLSQWERIGPTTPKLQLEMTRSTCTSLIALELELLKTPTISSFFFLNYFLCFFFFLLNLKVEKSSLKQKRERGAY

SEQ ID NO: 96061 - protein, 59 aa, Gossypium hirsutum
  Clone ID: LIB3135-028-Q1-K1-E6.pep
RIPITPTKTKLRVSRSTCTGLLMSTLARVRTCTMMPLLLFTHLLCLPLYRLNLIVEKPI

SEQ ID NO: 96062 - protein, 147 aa, Gossypium hirsutum
  unsure (1)..(147): unsure at all Xaa locations
  Clone ID: LIB3135-028-Q1-K1-E9.pep
PRVRRVCIVVLACVAGSSAAGSAFNVRATYHLYNPQNINXNLTAASALCITWDANKSLAWRQTYGWTAFXGPAGPQRQAACCRCLMLTNTHTGTQAMVRIDDQCSNGRLDTDTYVFNQLDTNGHGNAESHLDANYEFVNCGDLTHNL

SEQ ID NO: 96063 - protein, 75 aa, Gossypium hirsutum
  Clone ID: LIB3135-028-Q1-K1-F2.pep
NEIDPSLTIPTVNFVSITIMILDKCSTIVWFSPTIYSRTSKYPACSAQVIHSDDTAPEANTFSMPIARPNASMIA

SEQ ID NO: 96064 - protein, 55 aa, Gossypium hirsutum
  Clone ID: LIB3135-028-Q1-K1-F3.pep
PDGNPVPIGLRHSGIRGDDMIRACHTFRNPGVQFLKKPDDCFAYIKDPDSYWIEI

SEQ ID NO: 96065 - protein, 65 aa, Gossypium hirsutum
  Clone ID: LIB3135-028-Q1-K1-F4.pep
HASGVVCGTDIPIGYGFAYVRGSLAFSTFCPQFAYYDALINLFEICGVVLVSSTPNMSFYNFNFT

SEQ ID NO: 96066 - protein, 88 aa, Gossypium hirsutum
  unsure (1)..(88): unsure at all Xaa locations
  Clone ID: LIB3135-028-Q1-K1-F6.pep
STFTFKEYTAVHVEQVAKSNPEAPLDKVXFLNYETLTKFGATFNVTIPNTGQYVAIXGLRADTLVAADXARVSISYKIIGVYLNPKLF

SEQ ID NO: 96067 - protein, 56 aa, Gossypium hirsutum
  Clone ID: LIB3135-028-Q1-K1-G3.pep
DITNPTDSPICLVTPHSINHCISGTMFTIITGLISTPITTSSPIRKCYRSNQWVRV

SEQ ID NO: 96068 - protein, 83 aa, Gossypium hirsutum
  Clone ID: LIB3135-028-Q1-K1-G5.pep
GQRDRGRDHFFNSRKGYERRPASPPLPPPQLPPRGRPRDMRERSRSPIRGAPPPKEYRRDIYMERGREDLRGGAGRDRIGGPY

SEQ ID NO: 96069 - protein, 116 aa, Gossypium hirsutum
  unsure (1)..(116): unsure at all Xaa locations
  Clone ID: LIB3135-028-Q1-K1-G7.pep
MEGKEEDVRLGANMFPERQPIGTADQSQYDMDYTEPPPAPLFEPSELTSXSFYRAGIAEYVATFLYLYISVLTVMGVAKDKTKCTTSGIQGIACAFGGMIIALVYCTAGISRGHIN

SEQ ID NO: 96070 - protein, 141 aa, Gossypium hirsutum
  Clone ID: LIB3135-028-Q1-K1-H11.pep
QTQPLFMQPQPPPPPEETQTLFMQSPPQKETQAQVTQPLFMRRSPRNTDKDGNAALEGEEQLGLKNKSPEQNRPAEPTWRKQMSQIGLAGSSQVNRTGSVGSSQISQASEVNRPQPIRMSQINQTGTDSSSHFNWDEPTRT

SEQ ID NO: 96071 - protein, 45 aa, Gossypium hirsutum
  Clone ID: LIB3135-028-Q1-K1-H2.pep
GRGASWLLNQLYITLYSSMNRKNSKRLDPDFFNSCDALENAVILC

SEQ ID NO: 96072 - protein, 80 aa, Gossypium hirsutum
  Clone ID: LIB3135-028-Q1-K1-H4.pep
NLAAEFTASFPFFWPIPMYSMPLSNFIVKTKSKPCMISLSPPSYIQHLNLQERDGHVASGCSVSVGTIFFSSLKENHAIS

SEQ ID NO: 96073 - protein, 76 aa, Gossypium hirsutum
  Clone ID: LIB3135-028-Q1-K1-H9.pep
PRVRFQVLPLRQFGSWGPEITSKFDPTKDTYVLCHHGMRSLQVAKWLQTQGFRKIFNISGGIHAYATKVDPSVPTY

SEQ ID NO: 96074 - protein, 92 aa, Gossypium hirsutum
  Clone ID: LIB3135-029-Q1-K1-A1.pep
RCRKQQFSARFPNMSAGAVDLLEKMLVFDPDRRITVDEALSHPYLASLHDINDEPVCARPFIFDFEQLSCSEDHIKELIWRESVKFNPHPIH

SEQ ID NO: 96075 - protein, 95 aa, Gossypium hirsutum
  Clone ID: LIB3135-029-Q1-K1-A10.pep
VHFFNASIQIIYMFFFSSQSLLMFQYLKKKKREREFFSLLSLSLFFQLLFLKSCLFFPQKYRKRKKEKKRTQNPTFKVTFVTFFTFTPCFILSIN

SEQ ID NO: 96076 - protein, 50 aa, Gossypium hirsutum
  Clone ID: LIB3135-029-Q1-K1-A8.pep
HIMRNLCNCLSKKKKKGKNKKIKKKKKNKKNNNNVQNLKHQITNEIDNLK

SEQ ID NO: 96077 - protein, 124 aa, Gossypium hirsutum
  Clone ID: LIB3135-029-Q1-K1-B10.pep
PTRPASSSTVMKAENGQSSSSSSSSSKKRGRRATTILTLPQPRPHQPKERSPLTIATLRLVKEKAEKRGKRTSRAVSVRHFDNTDINYYWLLPGWVAEERYVPSGQKGLGRDYKYYYDPPGHMY

SEQ ID NO: 96078 - protein, 77 aa, Gossypium hirsutum
  Clone ID: LIB3135-029-Q1-K1-B11.pep
LHILMGRHDTRPYDLCRGAAYRMYTTVGPCCCSGHLYLHVLLLRIIRHRGVSKTYFGRCCVADIRELGLRARRRWYN

SEQ ID NO: 96079 - protein, 41 aa, Gossypium hirsutum
  Clone ID: LIB3135-029-Q1-K1-B2.pep
CYCSSGSARYFASSAANQAILQECIRATALMLIVRVDVRVG

SEQ ID NO: 96080 - protein, 132 aa, Gossypium hirsutum
  unsure (1)..(132): unsure at all Xaa locations
  Clone ID: LIB3135-029-Q1-K1-B3.pep
PRVRKDPDRVEAFHGLVMAYSESGQKLKELEKRIEGAMEKCKNEKKNKDFRDFKLLIAQILVIEGRHSXAMKVYEGLVKEEPXDFRPYLCMGIIYTLLKKKAEAEKQFEKFRKLVTKNHPYKEYXCDNMIRT

SEQ ID NO: 96081 - protein, 50 aa, Gossypium hirsutum
  Clone ID: LIB3135-029-Q1-K1-B4.pep
DNTLIQLPLFCTTNHRNSIPNSISPSMYHNPCSSVKRVLNGIVMKLTTLD

SEQ ID NO: 96082 - protein, 76 aa, Gossypium hirsutum
  unsure (1)..(76): unsure at all Xaa locations
  Clone ID: LIB3135-029-Q1-K1-B8.pep
QSWTAQWVKSDNSCLGDIIAIRVHHLLAXLAYAGLLEETFLKVYAQMFAEHQETLMMDLALALAVLINLAVMIDPP

SEQ ID NO: 96083 - protein, 85 aa, Gossypium hirsutum
  Clone ID: LIB3135-029-Q1-K1-C2.pep
LYSLPLSYSTFRDTILYSRKSLTVNEAYDSLTSYDKMKHLMVKTDSQGEGLIVCGRQDRNADDDRGRTQERNSRGKSKGISKSLK

SEQ ID NO: 96084 - protein, 98 aa, Gossypium hirsutum
  Clone ID: LIB3135-029-Q1-K1-C3.pep
FLVGYTIRLLMMIGAGHRNRILAANLRVYPSLHIEVKLIPSARRNDTLNMNVISYRTRSKGRLRIKRENNQNSGETDVVEDYSDDEFLVFSINNSKVS

SEQ ID NO: 96085 - protein, 97 aa, Gossypium hirsutum
  Clone ID: LIB3135-029-Q1-K1-C4.pep
GGRAKGRLHRWDFETEEEWATYNEQKEAMPKAAFQFGVKMQDGRKTRKQNKDQKLNNELHKINKILARKKMEKESGGGEGGSHSDDVQPGKKLRISG

SEQ ID NO: 96086 - protein, 61 aa, Gossypium hirsutum
  Clone ID: LIB3135-029-Q1-K1-C6.pep
PTRTPTRPSTRTLTRTFKRRVSFVHLWLLYSFLYGYISSNLYPTDAQIVVCYGMLGISLPR

SEQ ID NO: 96087 - protein, 55 aa, Gossypium hirsutum
  Clone ID: LIB3135-029-Q1-K1-C8.pep
FGRPMCSHRVTTLLLEEITPFHITGPILRSLRCFTRVALPFLLLSSSASHWCTTM

SEQ ID NO: 96088 - protein, 75 aa, Gossypium hirsutum
  Clone ID: LIB3135-029-Q1-K1-C9.pep
LILAIIQHHLSFILTLAWAASFTVHECIYAKRSIISFVMQQQNLNLIYDATTDHYQTILIQYMNTQLSPQNITHS

SEQ ID NO: 96089 - protein, 63 aa, Gossypium hirsutum
  Clone ID: LIB3135-029-Q1-K1-D10.pep
EMIVYCAVDICWGPVSTLLGARRCDGSNNRYCIVEKRVTQICQVARNVLIMLWIALAHHRTRL

SEQ ID NO: 96090 - protein, 70 aa, Gossypium hirsutum
  Clone ID: LIB3135-029-Q1-K1-D12.pep
PFTSNSMEVRTTMCGRYLHWGGSHVSLWMTMGPTNPSLPYFRNTLLTIFLDIQSCHHHSLLYSINSADAW

SEQ ID NO: 96091 - protein, 95 aa, Gossypium hirsutum
  unsure (1)..(95): unsure at all Xaa locations
  Clone ID: LIB3135-029-Q1-K1-D3.pep
PTRALIHTEPFLEHAMALTCEMRPAFTVLHDIALSRDLKTSLSVIAGLWVLPIVASSSNFMTLTYIGTVLLHTVPVLYEKYXDKADPFAENAMPE

SEQ ID NO: 96092 - protein, 78 aa, Gossypium hirsutum
  unsure (1)..(78): unsure at all Xaa locations
  Clone ID: LIB3135-029-Q1-K1-D6.pep
KKLKYTTXVLLMISLRLYTQPRLLIRRSIDNDVLGKNPIKXGEDIFIYGWNLHRMTSMSHDAETLNPERWPLDLPNPN

SEQ ID NO: 96093 - protein, 46 aa, Gossypium hirsutum
  Clone ID: LIB3135-029-Q1-K1-E11.pep
NGPPLFFFFFCFPFFFFFFFFFFFFFFFFFFFFFFFCFFFFFLNEK

SEQ ID NO: 96094 - protein, 52 aa, Gossypium hirsutum
  Clone ID: LIB3135-029-Q1-K1-E12.pep
ELAEWSSGENDSDAVINVSCEVVLFEHLLWMLENADPHQPESLAELVEFYAC

SEQ ID NO: 96095 - protein, 74 aa, Gossypium hirsutum
  Clone ID: LIB3135-029-Q1-K1-E6.pep
HLSYNILWHFKDLGGTLIRISIFIIHHQSIKLSFYVTHNYKRIPYHRQVKLLTERYAHYMPMFLSNRDRHHSLL

SEQ ID NO: 96096 - protein, 117 aa, Gossypium hirsutum
  Clone ID: LIB3135-029-Q1-K1-E7.pep
QAYLLIYERATSKACSKNESIKTTIIHELAYNEFSEHDSYFHALDQQLNQEAAILDWTKSSGHALIGIRHSANYEKYYDEDGTNYQNVGGNMSTLLENARASSVAAAFLRTKKHSCQ

SEQ ID NO: 96097 - protein, 64 aa, Gossypium hirsutum
  Clone ID: LIB3135-029-Q1-K1-F2.pep
MQSPANSTKDNSGYGRAKKILLRWDSSASEVGRESMIFGTDRQEPDFYLQAVDEIHRSLSTDAW

SEQ ID NO: 96098 - protein, 73 aa, Gossypium hirsutum
  Clone ID: LIB3135-029-Q1-K1-F3.pep
NLLNINHIFMLLINILLKNLLAYTHPYLSATLYIESDTCRTMNNITPYIAKILKKVCSNMSNFSVRSPCVFCN

SEQ ID NO: 96099 - protein, 36 aa, Gossypium hirsutum
  Clone ID: LIB3135-029-Q1-K1-F7.pep
NIGSSCIHMGVRTYNGGQTIYFLNTLLREIITLFTL

SEQ ID NO: 96100 - protein, 91 aa, Gossypium hirsutum
  unsure (1)..(91): unsure at all Xaa locations
  Clone ID: LIB3135-029-Q1-K1-G11.pep
FIRRDAYALRSDAHNLYPSFYALTIHFMVGFNTKLPTDEYFIXENQEKLRLLLDIYEDRLSKNKYLAGDFLSLADLNHLPFTQFLWLQIAR

SEQ ID NO: 96101 - protein, 67 aa, Gossypium hirsutum
  Clone ID: LIB3135-029-Q1-K1-G12.pep
IEIMRFQPGILNQFIALSKCDSNCLTESKNPSTAESKVFLQECKRRPISKGNIHKNRKCYLLPFGAP

SEQ ID NO: 96102 - protein, 56 aa, Gossypium hirsutum
  Clone ID: LIB3135-029-Q1-K1-G2.pep
LSILSWHSHRLHRVMRPCCSKTCFLTALSVFSFSFTIPAEVFLRFGQSYGPGELQG

SEQ ID NO: 96103 - protein, 80 aa, Gossypium hirsutum
  unsure (1)..(80): unsure at all Xaa locations
  Clone ID: LIB3135-029-Q1-K1-G4.pep
KKKKHCSFKTTQMNSRTFSFKVPXKWFLLLTLKYFVIDAFFFLEKKTITNLTQISKNTNNLKMKSTKPRINKDMEEASSP

SEQ ID NO: 96104 - protein, 46 aa, Gossypium hirsutum
  Clone ID: LIB3135-029-Q1-K1-H10.pep
FRLFAFFFFFFFLRKILRENSTVSLFTYYSIKPTMFITINQNEINN

SEQ ID NO: 96105 - protein, 133 aa, Gossypium hirsutum
  unsure (1)..(133): unsure at all Xaa locations
  Clone ID: LIB3135-029-Q1-K1-H11.pep
NTNPQEKHNLYISEAELQMHQAQTPLWAKPEIYFQSMVMDDINMADENAFVGEVEIEMLLTRMIGTRKKSLVPVFDYLQSFKFQQARVPTVDSNNNGCLLHQRSGLSENGRLSCRSISGSLNCMTENGDAXDE

SEQ ID NO: 96106 - protein, 67 aa, Gossypium hirsutum
  unsure (1)..(67): unsure at all Xaa locations
  Clone ID: LIB3135-029-Q1-K1-H12.pep
MLDFLTDKDVLPHGFTKAYAAHLKRSHXIELALLTDVEKTAQLKELPSYEPHWLFIRTAFMATNTYF

SEQ ID NO: 96107 - protein, 71 aa, Gossypium hirsutum
  Clone ID: LIB3135-029-Q1-K1-H8.pep
VLCISINVASEPSWRNNILHMTIVLLAYHILRTLSESSNRTRYQPTTVLSLSAPMSMVHDLNSCRSVFWIR

SEQ ID NO: 96108 - protein, 129 aa, Gossypium hirsutum
  Clone ID: LIB3135-029-Q1-K1-H9.pep
RKFSASTNEWLSKLHATEDFCTWQRIIRLDAIRANTEWMPYSVSQAAVSDRRARRLAKAVGLKDYDHLEPYVILHAARLGTMLEAYALYDPEIDYCHGMSDLLCPIIAVMPDDYEAFWCFAGFMKKARH

SEQ ID NO: 96109 - protein, 46 aa, Gossypium hirsutum
  Clone ID: LIB3135-031-Q1-K1-A10.pep
NWSRLVLICPMLCMFVGYLQSLSCTWFCSCHSTKLWAIHCFLFLQL

SEQ ID NO: 96110 - protein, 63 aa, Gossypium hirsutum
  Clone ID: LIB3135-031-Q1-K1-A12.pep
SGNLNLHTPKELRESLHGHLYESLCMLYQRNIIVKCKWPNLKINERSTSRSKKKKNKKKKINF

SEQ ID NO: 96111 - protein, 89 aa, Gossypium hirsutum
  Clone ID: LIB3135-031-Q1-K1-A4.pep
MRSGFDLRGKKSGCQYSTIVIITPFFFSMKWIVVMMMALAASLLVLPLLLPSLPPPPSMLLFVPVLIMILLLFLALSPSQAPTAITTAV

SEQ ID NO: 96112 - protein, 101 aa, Gossypium hirsutum
  Clone ID: LIB3135-031-Q1-K1-A5.pep
MESTATIFLMSSQFAVLTRRDTVWLIFEKLSLADLAPASCVCKDLDAASCEDDLGGETVHASWQLLEVMGKPKSRSFWRDKGIGKFAISHGFICFVRQYVI

SEQ ID NO: 96113 - protein, 42 aa, Gossypium hirsutum
  Clone ID: LIB3135-031-Q1-K1-A9.pep
IRSYFFNLMYNLFISLFFTCNYLIEHLSNKLHLIENIPHHPH

SEQ ID NO: 96114 - protein, 112 aa, Gossypium hirsutum
  Clone ID: LIB3135-031-Q1-K1-B1.pep
PRVRGLSADPETFARNRELKVMPCIWAVLGALGCVFPELLAMNGVKFGEAVWFKGGSHIYKAGGLDYLGYPSLIHGSSILAIWARQDILRGADHGYRVAGGPLREVTDPLFP

SEQ ID NO: 96115 - protein, 88 aa, Gossypium hirsutum
  Clone ID: LIB3135-031-Q1-K1-B11.pep
SSKPLPLPHFLPPPSSPCGQPAMLLSTSPAFIFHFPPFRLSLSKSTLHQSMTAFIFLSRRLQEPLLFLRYKEAVDQKQEKRSDAYKNW

SEQ ID NO: 96116 - protein, 63 aa, Gossypium hirsutum
  Clone ID: LIB3135-031-Q1-K1-B2.pep
RNLHLCERWLRIEEGYDFLITRYHCFLGPCRYYPVEDSTGTVNINAAVWSCLLDFSLGLALCV

SEQ ID NO: 96117 - protein, 38 aa, Gossypium hirsutum
  Clone ID: LIB3135-031-Q1-K1-B3.pep
NKIQLEISATVKLPRVFVTPLSRINYLITKNRRIKKLG

SEQ ID NO: 96118 - protein, 53 aa, Gossypium hirsutum
  Clone ID: LIB3135-031-Q1-K1-C1.pep
PTRPPWLMIKLEAMEEDRARLRQLRKNRVVAVTCIRGALLEATPRRFSWIMKF

SEQ ID NO: 96119 - protein, 141 aa, Gossypium hirsutum
  Clone ID: LIB3135-031-Q1-K1-C3.pep
LQITWRTNGGEPGRLQTQQILGTPISCKEIELQILEIPSLINLDKSFLVHLNLLNHTDRELGPFDVRLSQNSAHEEKNVMINGLQTILLPQVEAFGTTDFHLSLIATKLGVQIISGITVFDTKDKKTYDPLPDVEIFVESD

SEQ ID NO: 96120 - protein, 147 aa, Gossypium hirsutum
  unsure (1)..(147): unsure at all Xaa locations
  Clone ID: LIB3135-031-Q1-K1-D12.pep
RTRGQPPPGMKFKCXPAVIAARAALAKTAFAKSLRPQSLPTKVLVIGMLGMAANVPLGIWREHTKKFSPSWFVAVHAAVPFIAMLRKSVLMPKTAMAFTIAASILXQVIGSRAERYRLKAVSAKQLHIRESSVSVGAAQQLDVVSFK

SEQ ID NO: 96121 - protein, 88 aa, Gossypium hirsutum
  Clone ID: LIB3135-031-Q1-K1-E12.pep
PRVRPRVRTRQIGTSKRPEWDAPFGLRCFPDMLFFLFIEYFATRLSRPGAAAFVDSPRRNSLLPLTVLSGGEGFKTLCEGKAVKVVDH

SEQ ID NO: 96122 - protein, 114 aa, Gossypium hirsutum
  Clone ID: LIB3135-031-Q1-K1-E4.pep
GFQFQVSIFQLRVLYCFVKVDMGAEEGTRNGEGAEIGEEIKCFKSEPVNNGFGSLFVNDSGDGSSGASESLRTYKRRRQLRSTSNIEVQDGGRASTDQMESSAWRLSYEYEQKV

SEQ ID NO: 96123 - protein, 142 aa, Gossypium hirsutum
  unsure (1)..(142): unsure at all Xaa locations
  Clone ID: LIB3135-031-Q1-K1-E6.pep
PRVREICHGACYLRRALRXLCLVLNNIVQQVRGLINRSGKGDSTSELHRQATRDLESAVSAWHSSFCRLMKFQRDFIHSIHGWFKLTLRPVSNDNVDRNGKTDLSDVYAIXDECELALERVPDTVASXAFKSFINGRHVIFC

SEQ ID NO: 96124 - protein, 109 aa, Gossypium hirsutum
  Clone ID: LIB3135-031-Q1-K1-E7.pep
PTRPFLSYNQKWKDSHEELSMKAYEEEAEEFKMKFIYSHIASTEREEGVVGLWLHSLNHRNYPDLRAGSGDSVEGKKSPKVDDKADTVEEDSNVVEKNGDTTEMQSAEE

SEQ ID NO: 96125 - protein, 49 aa, Gossypium hirsutum
  Clone ID: LIB3135-031-Q1-K1-F11.pep
VVVMWVLVVGFGFGGWASMTNFVRQIDTFGLFAKCYQCKPPTPAAAQHH

SEQ ID NO: 96126 - protein, 52 aa, Gossypium hirsutum
  unsure (1)..(52): unsure at all Xaa locations
  Clone ID: LIB3135-031-Q1-K1-F9.pep
VYTPQFLTTPWEKDKVNHGGNFNWVVPPAKLRNPHPAIKGHLQVNYTPLXRV

SEQ ID NO: 96127 - protein, 106 aa, Gossypium hirsutum
  unsure (1)..(106): unsure at all Xaa locations
  Clone ID: LIB3135-031-Q1-K1-G1.pep
LGDNIRYRQMLRSTAAAMYVYAAFAAEYSRSASSIMVVGXMYEFPALKSVLHAAISSPFMAKAYAGLQAVQLGISLGAQSPYHNSTFRASYINDATHHQSIVWADA

SEQ ID NO: 96128 - protein, 86 aa, Gossypium hirsutum
  unsure (1)..(86): unsure at all Xaa locations
  Clone ID: LIB3135-031-Q1-K1-G10.pep
SSDINNPRNFIAKIARYNSGGNIHKRRTISDELQPIKIEMAKRNKQGIWNYTNPGGXSHNEILEMYKTNIDPNAQWANITSKEQAK

SEQ ID NO: 96129 - protein, 98 aa, Gossypium hirsutum
  Clone ID: LIB3135-031-Q1-K1-G7.pep
DPCTLILLSIVISRIHITGYSPLGSPGTGTIKKEVLKHPVLNMVAEKLGKSPAQVALRWGLQMGHSVLPKSTNETRIKENFDVFDWSIPEELFSKFAE

SEQ ID NO: 96130 - protein, 157 aa, Gossypium hirsutum
  Clone ID: LIB3135-031-Q1-K1-H1.pep
HPGSGSSAQTQTAGESEAPAITGATPSGPLSSRDEASPFPSSQNTSASGSTVSPLDRRGFSFNNRSTSSNSSLPNQEEAGPSELQSFSESIKSRLNAVSLRYRESISKSTRGWKERLFSRSSSMSDIGNEVRREVSAGIASVSRMMERLEINGNSRE

SEQ ID NO: 96131 - protein, 47 aa, Gossypium hirsutum
  Clone ID: LIB3135-031-Q1-K1-H10.pep
FGQFADFCSPEVVFEVKLDDFNIYGSSNRSICDVYLLCFLKDPFLHL

SEQ ID NO: 96132 - protein, 53 aa, Gossypium hirsutum
  Clone ID: LIB3135-031-Q1-K1-H2.pep
LHFILGSFLHFFKVATLSELKDVDMTESPGLTNLKATPLEVLITPRLDSKLYV

SEQ ID NO: 96133 - protein, 60 aa, Gossypium hirsutum
  Clone ID: LIB3135-032-Q1-K1-A11.pep
NGDCPEKTCCIDSVFSPQSYYGRLIHNQYLFAFKGAQSWDGKFGPHINKKSAPPQGMKSE

SEQ ID NO: 96134 - protein, 118 aa, Gossypium hirsutum
  unsure (1)..(118): unsure at all Xaa locations
  Clone ID: LIB3135-032-Q1-K1-A2.pep
KTNKKFGIQGVGQXLFMISFESEEDLETVLEGQPWLFRKQLILFDQLSKSMARDQIRLVSSPFWIKTGPYLPEFDKKDLLHAVGVTFGGVLRSEILGEFCRLRVKLNVQRPLRRGIFV

SEQ ID NO: 96135 - protein, 64 aa, Gossypium hirsutum
  Clone ID: LIB3135-032-Q1-K1-A5.pep
TTRAPTRALKQQILLNRTIVCEILPAKKFYRAEEYYQQNLAKGGRFGFKQSAEKGCNDPIRCYG

SEQ ID NO: 96136 - protein, 52 aa, Gossypium hirsutum
  Clone ID: LIB3135-032-Q1-K1-A8.pep
ALEFLFIKSGMIKIFKHFKSHLLCIFQGIFAVLGLISKCFFLFLFLFQMYSA

SEQ ID NO: 96137 - protein, 127 aa, Gossypium hirsutum
  Clone ID: LIB3135-032-Q1-K1-B1.pep
HASAHASGYNVALGTARGITYLHEECRDCIVHCDIKPENILLDENFNAKVSDFGLAKLINPKDHRYRTLTSVRGTRGYLAPEWLANLPITSKSDVYSYGMVLLEIVSGRRNFDVSADTNRKKFSVWA

SEQ ID NO: 96138 - protein, 86 aa, Gossypium hirsutum
  Clone ID: LIB3135-032-Q1-K1-B10.pep
RSPKTLAKMLGTVICVGGAISMALLKGPKLINTQLLPPKSLFSPGGENWLLGCLFLLGSSFFWSLWMVFQVPISESCPDHLYSSTW

SEQ ID NO: 96139 - protein, 60 aa, Gossypium hirsutum
  Clone ID: LIB3135-032-Q1-K1-B11.pep
LQTEIDFPSNPFSPHGMTKDFGGKDCVFITFGPLNNAMPMAPPTQITVHSILAKVFGLRT

SEQ ID NO: 96140 - protein, 73 aa, Gossypium hirsutum
  Clone ID: LIB3135-032-Q1-K1-B9.pep
KTSVLDSFLKVHLPFVYPLDFVSKVEESYEILELFALEERRHGEREDFVLLIWIVKEVSTADLVITPFLAFGL

SEQ ID NO: 96141 - protein, 60 aa, Gossypium hirsutum
  Clone ID: LIB3135-032-Q1-K1-C10.pep
EQADGRIGFQTYLTNNKKGASQNLLLTSCWLFIRCALARFCYSESFFKYPKKVRVITNSR

SEQ ID NO: 96142 - protein, 103 aa, Gossypium hirsutum
  Clone ID: LIB3135-032-Q1-K1-C6.pep
RRDRHRDRRHRYMTTLVNIWTITMVNYEAVHHIIVRFRIPFRLRKREKPKLGLHAERVGGTCVLYVLIVVDVVETSFVEYEHISLGTVNIACTTLCLDAYFVE

SEQ ID NO: 96143 - protein, 70 aa, Gossypium hirsutum
  Clone ID: LIB3135-032-Q1-K1-D10.pep
ILDSRIGKLIRIFRSRLSYQHYIYQHTNTSCYETFDSSPLFPSHQNRVNILFLPLSAAKIKIYLFTSNYR

SEQ ID NO: 96144 - protein, 94 aa, Gossypium hirsutum
  Clone ID: LIB3135-032-Q1-K1-D12.pep
LRIIHRDLKASNILLDVEMNPKISDFGMARIFGGNQNEAITIRVVGTYGYMSPEYAMEGLFSVKSDVYSFGVLLLEIVSGRRNTSFRSSDYTSL

SEQ ID NO: 96145 - protein, 86 aa, Gossypium hirsutum
  Clone ID: LIB3135-032-Q1-K1-D6.pep
LLWLGMEASGGDDREGGDEIGLLAEELVQLSVKGSLVVPSSKPTLICTVWAGKLYNPDSFRAHMKSLWKTRKKFEIRWVGQTYFWS

SEQ ID NO: 96146 - protein, 62 aa, Gossypium hirsutum
  Clone ID: LIB3135-032-Q1-K1-D7.pep
ALNFEHTHQHSIYNDGAGEDTSHIKRRARIYDEAEEEGPQPKRMHTVFIFIMGRPAKKQLLW

SEQ ID NO: 96147 - protein, 90 aa, Gossypium hirsutum
  Clone ID: LIB3135-032-Q1-K1-D8.pep
AASMNGGVKSGGFTSGLSMFPPEKRPQLEKPMPVSDALYIPSTTHFNPLQQLAINNMPLAPLTGMQPMSQGNQISSSLCFCYTFPFFYCK

SEQ ID NO: 96148 - protein, 113 aa, Gossypium hirsutum
  Clone ID: LIB3135-032-Q1-K1-E1.pep
VVYNKGLLLSFEDESGKCWCFRYSYWNSSQSYVLTKGWSRYVKEKQLDAGDIILFQRHRLDAERLFIGWRRRGAALDGGNAELGNNSGGVRGGDNSWWSSKRGLYQGNPYPGH

SEQ ID NO: 96149 - protein, 73 aa, Gossypium hirsutum
  Clone ID: LIB3135-032-Q1-K1-E10.pep
PTRPATRSAELSQTPLAMGPSQPTTDAFVRHGRFTTLRFLLHLRLLRDEEEPMADLRGKVSPFSLLLFAFGIK

SEQ ID NO: 96150 - protein, 35 aa, Gossypium hirsutum
  Clone ID: LIB3135-032-Q1-K1-E11.pep
SVLAPLAHSALSPVTVLSSSCALCANDCLCLSSLA

SEQ ID NO: 96151 - protein, 124 aa, Gossypium hirsutum
  unsure (1)..(124): unsure at all Xaa locations
  Clone ID: LIB3135-032-Q1-K1-E12.pep
TRPDLVCCMLESLLCLEDQGLNYVEFLAAXVGIQTEKLENLRLSIAKGSPMWETLDLCINVVDGKSLELLVPRLANLVPSGVGLNTMVGVATFINLLFQKVVVGIKPYINMLLRSLFPVVKKRK

SEQ ID NO: 96152 - protein, 48 aa, Gossypium hirsutum
  Clone ID: LIB3135-032-Q1-K1-E3.pep
TTRAPKRPGIVVTNWIPLRLREQDDELEADGALYLTRHDVNSQGGPCR

SEQ ID NO: 96153 - protein, 143 aa, Gossypium hirsutum
  Clone ID: LIB3135-032-Q1-K1-E5.pep
ETEVWNSGKSTVLQVLLSLQALVLNEKPYFNEAGYDKQLGRAEGETNSVSYNENAFLVTCQSMLYILRHPPKHFEALVKEHFSRRAKTILSACNAYMEGAPVGFALECGKNGHNVNLKERSTGFKIMLAKAFPKALGMHFLIR

SEQ ID NO: 96154 - protein, 63 aa, Gossypium hirsutum
  Clone ID: LIB3135-032-Q1-K1-E6.pep
RKDSHAFRFSTTNKSKLYFVTTRTGKMKALLLLGGAENEQNERKMTTAIQYSKESFLKCLSWP

SEQ ID NO: 96155 - protein, 64 aa, Gossypium hirsutum
  Clone ID: LIB3135-032-Q1-K1-E9.pep
PRVRIDYTRHPSAASSALVELTTHLDFFKERRSQLIEQLHNLDLNYGTSSQEFLYKPSSSPPWN

SEQ ID NO: 96156 - protein, 88 aa, Gossypium hirsutum
  Clone ID: LIB3135-032-Q1-K1-F12.pep
HKQRLTLGFLISLMALCAKRASRLFKKLKPKHNNLASGTPRFYEPKSPLKSSLRSPMPNQFLATISHKAITLVNRKNIGGGNGKHVEE

SEQ ID NO: 96157 - protein, 140 aa, Gossypium hirsutum
  Clone ID: LIB3135-032-Q1-K1-F2.pep
DAWADAWVCRKNCSPRLIITAVIGAVFRFFVGVSFPSVSLYKIRNFPLSLGPSVGGATSESKQFYMVGSSESYRANIYKIYDPTNPHGAETLPPAIVVPETDLYLRRLWGEPSQDLEKKPKYLVTFTVGIDQMNNTDKCV

SEQ ID NO: 96158 - protein, 50 aa, Gossypium hirsutum
  Clone ID: LIB3135-032-Q1-K1-F6.pep
SLWLSFIRLGNIKYFLPCPFFISTTRIGRLPHQVESIEQKKVDVGTKVAD

SEQ ID NO: 96159 - protein, 64 aa, Gossypium hirsutum
  Clone ID: LIB3135-032-Q1-K1-G5.pep
ACGWRSDGGNRRPHTFRRWGVQVSIMSDLPWTKLALVTTHVPMLRHLLLKLLVSLGGGTTQQVP

SEQ ID NO: 96160 - protein, 77 aa, Gossypium hirsutum
  Clone ID: LIB3135-032-Q1-K1-H4.pep
SHTGNKHSFCKSTDTILLLGVYPLTRIDRQLAKPCQTQTHHCCHSAMPLSFTGMQGHGLNIKPKQRSRDAPATRCAT

SEQ ID NO: 96161 - protein, 59 aa, Gossypium hirsutum
  Clone ID: LIB3135-032-Q1-K1-H9.pep
GRVGKPYVLFKRQEQITRCYSTYNLMCANISINTQVICIYSQEIDIFWKGPKKKKKILK

SEQ ID NO: 96162 - protein, 45 aa, Gossypium hirsutum
  Clone ID: LIB3135-033-Q1-K1-A11.pep
KLLTSYQVIDCLPKKKKKKKKKKKKKKKKKKKKKKKGRPLYKKQI

SEQ ID NO: 96163 - protein, 52 aa, Gossypium hirsutum
  Clone ID: LIB3135-033-Q1-K1-A12.pep
AITAALFLKQFVDEKVQWMHIDLAGPVWNDKKRVATGFGIATLVEWVLKNSS

SEQ ID NO: 96164 - protein, 56 aa, Gossypium hirsutum
  Clone ID: LIB3135-033-Q1-K1-A5.pep
NRRNKLDENPEGKRKRLKTEKGSTRRPGPKHKKRPPYGKTRMGPGNARGPEKEDLK

SEQ ID NO: 96165 - protein, 129 aa, Gossypium hirsutum
  Clone ID: LIB3135-033-Q1-K1-A6.pep
KVVIDANTGRSKGYGFVRFGDETERSQAMNEMNGAYCSSRPMRIGAATPRKSSGYQQQYSLQGGYASNGNSTQSDGDSSNTTIFVGGLDPNVTEGDLRQPFSQYGEIVSVKIPVGKGCGFVQYAKRNNA

SEQ ID NO: 96166 - protein, 46 aa, Gossypium hirsutum
  Clone ID: LIB3135-033-Q1-K1-B1.pep
MCIYRRVNAFAFFLYFFLFLFFFFFFFFFFFFFFFFFFFLIIKTVL

SEQ ID NO: 96167 - protein, 61 aa, Gossypium hirsutum
  Clone ID: LIB3135-033-Q1-K1-B10.pep
GTSHADAHAFDAFKSNPFDEDALRAIQLWYDASLCYRGYTPDNPAQLSGKIYDMMGMALVG

SEQ ID NO: 96168 - protein, 122 aa, Gossypium hirsutum
  Clone ID: LIB3135-033-Q1-K1-B11.pep
PTRPFSRRKTLILFSRKKHTTNNKPNKTSKMDLDDLGELDGSSQANTRTTKFAPKSSKFAPKLKSTSKPKPEPSSKQEPQDSAPKPQPPPVEAVSKKKENDEEDVKPPMVAEPKAEQSISNG

SEQ ID NO: 96169 - protein, 106 aa, Gossypium hirsutum
  Clone ID: LIB3135-033-Q1-K1-B3.pep
PCRVLSFGLETASTFLDFNTRETLTFVSSLFDHPTTGSVSVQQALNIRFEPSEFSLKPSKFSVNGGGLDISPLGRSSGSLLANQSATVSSIVRVALGRNAVPDRQC

SEQ ID NO: 96170 - protein, 50 aa, Gossypium hirsutum
  Clone ID: LIB3135-033-Q1-K1-B6.pep
HGKYLCPISDPNAFITFCSTRVFCYNRALNHTPCGVIKHLPRTSHILHQK

SEQ ID NO: 96171 - protein, 76 aa, Gossypium hirsutum
  Clone ID: LIB3135-033-Q1-K1-C4.pep
ATRPSEQIWSYPYIILWIQPARRLMHWTINKGDKKSPGLRKNEMFQRNRRCYRFRYGWGRMILAIYNHTDTVRQNF

SEQ ID NO: 96172 - protein, 54 aa, Gossypium hirsutum
  Clone ID: LIB3135-033-Q1-K1-C6.pep
AIPPFFPMGCPTENSAAVYEVPLVILLLTMSPFEPQFSTRKNVHRHTACVIERV

SEQ ID NO: 96173 - protein, 42 aa, Gossypium hirsutum
  Clone ID: LIB3135-033-Q1-K1-C8.pep
GGWTTSMSSKETQTRHERLHFRMQTLFLEMKLIQSIILKPVH

SEQ ID NO: 96174 - protein, 46 aa, Gossypium hirsutum
  Clone ID: LIB3135-033-Q1-K1-D11.pep
PRVLGALPRSLTLDSLHPSLGRGSSGNSFRFVAIRTSPCFPNETID

SEQ ID NO: 96175 - protein, 91 aa, Gossypium hirsutum
  unsure (1)..(91): unsure at all Xaa locations
  Clone ID: LIB3135-033-Q1-K1-D2.pep
RDNLMERTTNLVCDQGPTLFEGLDHINEPKRTSDKPVRLPLXDAYIIVGIGTYPGGPDETHALTSVIDRTFETYGLTTWSDLIQSHHGTLT

SEQ ID NO: 96176 - protein, 145 aa, Gossypium hirsutum
  Clone ID: LIB3135-033-Q1-K1-D4.pep
QQTLNPPLSNLVSTISSYEGNVLLAAIISLLLVILFVLLLHLYAKWFLAHARQRSRSSSTLSHVFPHDRFRHFHAFSFDNNASDSSPSKGLDPSLISSIPLFVFKLDEHSDNNNNNNKKYGLHNLDCVVCLSPFEDNDVGRNLPK

SEQ ID NO: 96177 - protein, 91 aa, Gossypium hirsutum
  Clone ID: LIB3135-033-Q1-K1-D6.pep
PVRQTLAYRIPSLFCNTSPAHIGGHDDRHALYKPSYKLVRKQLLDDYRKVGIASQTGSRKETGALTWDSRTMCRNQCSDLRRLYLSNAPPT

SEQ ID NO: 96178 - protein, 50 aa, Gossypium hirsutum
  Clone ID: LIB3135-033-Q1-K1-D9.pep
NPFLIFSMHNLFKYKRWLFIAGKIRIKIKRNLFSFLFCYFSIVFCYCCFS

SEQ ID NO: 96179 - protein, 59 aa, Gossypium hirsutum
  unsure (1)..(59): unsure at all Xaa locations
  Clone ID: LIB3135-033-Q1-K1-E10.pep
VKKCAVDXKRIRVRSITMNTFQRSSLTRIHTWVEFPCPLQFSYPNPAKKAMSHSKSKTT

SEQ ID NO: 96180 - protein, 75 aa, Gossypium hirsutum
  Clone ID: LIB3135-033-Q1-K1-E11.pep
VNQRLEEPMSFKRQSSNVLPNPSLLAFILSIPYCFSCAKRISLKSPPANQGHELFLRNRVIKSDVYTLLITFGAS

SEQ ID NO: 96181 - protein, 49 aa, Gossypium hirsutum
  Clone ID: LIB3135-033-Q1-K1-E12.pep
YTIPYVIHFLHELLINTMAISMKEAPLLPSFLKRSHCYAPFVTMELSKT

SEQ ID NO: 96182 - protein, 67 aa, Gossypium hirsutum
  Clone ID: LIB3135-033-Q1-K1-E3.pep
VGISDYVPTDDFTIQNKDGLYRRVLNTTVEYLDELNMLKNLTGSAMAGALGLYNADSSHIAAAIYIF

SEQ ID NO: 96183 - protein, 52 aa, Gossypium hirsutum
  Clone ID: LIB3135-033-Q1-K1-E4.pep
FRKEREIYLRHRRRRFMSIHQKKLVSILFLLCKYTVPNSTQTSKWWSWERFY

SEQ ID NO: 96184 - protein, 106 aa, Gossypium hirsutum
  Clone ID: LIB3135-033-Q1-K1-E8.pep
LFNICSHPSSTCGQCMAVQGLQYLDRSAVSRLPASHCIWCGRRFMCSFWFFCQVLVLLLALASDTFFLYASLSGLYACCVGQGLVTKLPSGWRTAPPEHPSSLLAM

SEQ ID NO: 96185 - protein, 125 aa, Gossypium hirsutum
  unsure (1)..(125): unsure at all Xaa locations
  Clone ID: LIB3135-033-Q1-K1-F10.pep
SLKSHIDVEIQDDKGKHRWLFTGFYGAPDVRNKVETWDLLRRLGRNNSLPWLVGGDFNDILFAHEKQXGIPREKAKTEGFRRTLEDCLLEDIGFSSPWFTXKKGRILEWNIRERIDRGVATDTWL

SEQ ID NO: 96186 - protein, 115 aa, Gossypium hirsutum
  Clone ID: LIB3135-033-Q1-K1-F2.pep
AHIFPSPVFFKTHHLSSGACVSGQHRFMYSIIKIWFLSQVYLQPTKEVLVSTCADPKSKELYACYVIKRVVQRPLSGVIAKTVAAMLPLIVHGRARQCRSRLHAPIFIPQAMFLT

SEQ ID NO: 96187 - protein, 80 aa, Gossypium hirsutum
  Clone ID: LIB3135-033-Q1-K1-F3.pep
VKMSMLPRNAFLLVHATSGKDGCQLRAYWTKSDGLSILKRCGSNSNFRNIIDLEKARMGSNWLDTLEGGKFMEHTERSFT

SEQ ID NO: 96188 - protein, 51 aa, Gossypium hirsutum
  Clone ID: LIB3135-033-Q1-K1-F5.pep
IVFCAFMHYLFQFLFPDSNVAYDDSVDLKNIFWLAALPCYSSLGLIAAGWS

SEQ ID NO: 96189 - protein, 65 aa, Gossypium hirsutum
  Clone ID: LIB3135-033-Q1-K1-F6.pep
IDVYDGRPHKRNCLDISQPCRELGSTHGITNQTHSPLLSGAENVQHPHFPRFMRVDLRQNPDGCY

SEQ ID NO: 96190 - protein, 100 aa, Gossypium hirsutum
  Clone ID: LIB3135-033-Q1-K1-F7.pep
SKTPPPFLFLELHLCLVNGLFGGMSAFFQRQVCAHRLLFFFLLTMPECSFFRVRLRLSCEYSCPTRCRASCRLSPPTYMLALLSLCSHFNIILFAALLSG

SEQ ID NO: 96191 - protein, 150 aa, Gossypium hirsutum
  unsure (1)..(150): unsure at all Xaa locations
  Clone ID: LIB3135-033-Q1-K1-G1.pep
PRVRPRVRSNSCKSVNKVVAKPPYFLYGNVVNLPYDGWVKISQFLYGIEPEFVNTQSFSAFNRNEGYVHNLPAENRFHILPKSPLTIQDAIPNTKKWWPSWDPRKQLNCMGSEVLGASKLCARLGNMLADSRGLLSSDQXKYILRQCQIS

SEQ ID NO: 96192 - protein, 53 aa, Gossypium hirsutum
  Clone ID: LIB3135-033-Q1-K1-G2.pep
WRVPYIFSFLGKPKLTSYSLPNSGGEPPFLFQLITQNRAFFTIFQKEKSLDIL

SEQ ID NO: 96193 - protein, 127 aa, Gossypium hirsutum
  unsure (1)..(127): unsure at all Xaa locations
  Clone ID: LIB3135-033-Q1-K1-G4.pep
ASTSLDPLHNDRAINITGERDAKKYVPAIGYYILKKNPQLPVSLRVNFRGDTICAVLTHPVTRVTSHADISYYXGLINYRQNGELEEAHWXASELIKIGNWGEATNARSKVLSKLHNIFGLSPLFDF

SEQ ID NO: 96194 - protein, 43 aa, Gossypium hirsutum
  Clone ID: LIB3135-033-Q1-K1-H6.pep
LGPENPADLYLLIKTAGAFSKHHVRSMLDYASINHVDLCREQN

SEQ ID NO: 96195 - protein, 51 aa, Gossypium hirsutum
  unsure (1)..(51): unsure at all Xaa locations
  Clone ID: LIB3135-034-Q1-K1-A1.pep
IFILCGWQMCNELGVDGGPAAXEAIPKRDLAKKHISSKLHGKLPEIEVRQS

SEQ ID NO: 96196 - protein, 59 aa, Gossypium hirsutum
  unsure (1)..(59): unsure at all Xaa locations
  Clone ID: LIB3135-034-Q1-K1-A12.pep
VCPKVLSFCRFLATHESYAHPTYKLKLIEYDKTEYXTDVFCRARWSGAPHRVLETPFFL

SEQ ID NO: 96197 - protein, 53 aa, Gossypium hirsutum
  Clone ID: LIB3135-034-Q1-K1-A6.pep
KDMGFILKPLYVYKKILLSAISSILKCMLNRLQIQINKEMAKIERQNASYCIY

SEQ ID NO: 96198 - protein, 48 aa, Gossypium hirsutum
  Clone ID: LIB3135-034-Q1-K1-A8.pep
FKTKLSFGLGRWICVFAFRLKLTGLSEGHIPMPIPEYTGASRNIIDNH

SEQ ID NO: 96199 - protein, 94 aa, Gossypium hirsutum
  unsure (1)..(94): unsure at all Xaa locations
  Clone ID: LIB3135-034-Q1-K1-B10.pep
RPLVRPRVRYHVHTLGPNQCCSAVCQLIEASIETAWSLVRRFDNPXAYKNFLKSCHVIVGDCDVGTLRKVHVISGLPAVFITERLEILDEERHV

SEQ ID NO: 96200 - protein, 67 aa, Gossypium hirsutum
  Clone ID: LIB3135-034-Q1-K1-B9.pep
MNPSCRHLSSNQAPSKHSFPPLLFKSSISFPRIRPKFDETKVKALISFYLRSPFYTVRFYDMWYIMS

SEQ ID NO: 96201 - protein, 77 aa, Gossypium hirsutum
  unsure (1)..(77): unsure at all Xaa locations
  Clone ID: LIB3135-034-Q1-K1-C12.pep
NGHHFQSTSGIVARNNEPIILLSCSKIHXEVASAFTVETFACRKAVQIGIEMQWPENIIEGNWLKASWIYRKPKENR

SEQ ID NO: 96202 - protein, 48 aa, Gossypium hirsutum
  Clone ID: LIB3135-034-Q1-K1-C2.pep
SFEPNTPKSQHLLSLLVAVVHRINQEQALRELADTTHEDRTGEAASAP

SEQ ID NO: 96203 - protein, 43 aa, Gossypium hirsutum
  Clone ID: LIB3135-034-Q1-K1-C4.pep
MGKTRGMGAALLLRTHRRMHMWSVRSYMKSNLGYEWKKPFAGS

SEQ ID NO: 96204 - protein, 34 aa, Gossypium hirsutum
  Clone ID: LIB3135-034-Q1-K1-C9.pep
REVILEAIRAKSYPKEYTGSLFCSLSTLKKNQKS

SEQ ID NO: 96205 - protein, 57 aa, Gossypium hirsutum
  Clone ID: LIB3135-034-Q1-K1-D10.pep
TTITVSPIQAQSSFKETLAAAASSAAATKAILRACRTTLDACSASPRLQLASVRRSC

SEQ ID NO: 96206 - protein, 74 aa, Gossypium hirsutum
  Clone ID: LIB3135-034-Q1-K1-D11.pep
NWEAARKMVAGRFINSYSTKDWMLGVAFRASLLTNGLAGLQPVDVQGIENVSHASYNFFHLAVHRANSLKFSSG

SEQ ID NO: 96207 - protein, 79 aa, Gossypium hirsutum
  Clone ID: LIB3135-034-Q1-K1-D4.pep
MTTQMKELEDPMALITQMYPCIYTQVAPQQGEISKPRRRQKKNKGGESGAATAAETAKKRKLSQEQVDLLELNFGNEHK

SEQ ID NO: 96208 - protein, 78 aa, Gossypium hirsutum
  Clone ID: LIB3135-034-Q1-K1-D5.pep
HYQVGPGSLTANRIKAFSNKGIMRCSGISPQSMVSIVGGKMDATMLLFLQMLQLELENPNWQKKKKTPWRKLTTNIYP

SEQ ID NO: 96209 - protein, 123 aa, Gossypium hirsutum
  Clone ID: LIB3135-034-Q1-K1-D7.pep
FQSLSALLWRAVTRARKLPASKTTTFRMAVNCRHRLNPKMDPLYFGNAIQSIPTYASAGDVTSRDIRWCAEQLNESVKAHDDETVRLFICNWEKDPRCFPLGNFDGASMTMGSSSRFSMFDND

SEQ ID NO: 96210 - protein, 87 aa, Gossypium hirsutum
  Clone ID: LIB3135-034-Q1-K1-E10.pep
PTRSACMITLRQAFCDAALTISMCFYRFTDDYIAHTSTQKKRINGFSIYILNCHTATLWYWSHSQGCCEYCRFPHLINNMDDASEPS

SEQ ID NO: 96211 - protein, 62 aa, Gossypium hirsutum
  unsure (1)..(62): unsure at all Xaa locations
  Clone ID: LIB3135-034-Q1-K1-E2.pep
RATDIISVDRGSERPAVFQTLMFVACGRTLNXPENGAVGLLRNGHCHVCQAAVATVLRGGSL

SEQ ID NO: 96212 - protein, 43 aa, Gossypium hirsutum
  Clone ID: LIB3135-034-Q1-K1-E3.pep
GNYFINPAQNLPNLLPQESFPNENLTLLADTDAGGCIFGLMIK

SEQ ID NO: 96213 - protein, 70 aa, Gossypium hirsutum
  Clone ID: LIB3135-034-Q1-K1-E5.pep
GSLVKEIDIKGVKKMIEEGKVGGGMIPKVNCCIRSLAQGVTTASIIDGRVEHSVLHEIMTDEGAGTMITG

SEQ ID NO: 96214 - protein, 63 aa, Gossypium hirsutum
  Clone ID: LIB3135-034-Q1-K1-E6.pep
NPVIDNWHLLSLDLLSDPVRPVASIGALILVRPTNCTDLQLALCNPFTRQFRYLPMSNIRRTN

SEQ ID NO: 96215 - protein, 55 aa, Gossypium hirsutum
  Clone ID: LIB3135-034-Q1-K1-E9.pep
IWLQDAIEECRKLCGGHGYLSNNGLPELFAVYIPTCTYEGDNVVLLLQVARFLMK

SEQ ID NO: 96216 - protein, 50 aa, Gossypium hirsutum
  Clone ID: LIB3135-034-Q1-K1-F1.pep
GYNRDVYQYQGPGHSSRQCLSPPMLKHASRDLTLRRCSPTPSFVHYNDAP

SEQ ID NO: 96217 - protein, 36 aa, Gossypium hirsutum
  Clone ID: LIB3135-034-Q1-K1-F3.pep
ILSCPAATALRRSSLSYKVSMTALSDHSIHCMTIEC

SEQ ID NO: 96218 - protein, 77 aa, Gossypium hirsutum
  Clone ID: LIB3135-034-Q1-K1-F4.pep
TLFRRINIPKKRNRKNKARKSWFFFYSKLKPSFHFGLFQLPLYLMAMEPNFFEQESHFESDGDISLKNKWNPIPEPT

SEQ ID NO: 96219 - protein, 125 aa, Gossypium hirsutum
  Clone ID: LIB3135-034-Q1-K1-G1.pep
KYEVVLKAEPFAYAPKTPYKECEKPKPKPTPAPYYYTSPPPPSPTYAYKSPPPPPYYYKSPPPPSPTYVYKSPPPPPYYYKSPSPPSPSPPSPYYYKTPPPSSSLPPPPYYYKISTPPIPLTPSP

SEQ ID NO: 96220 - protein, 69 aa, Gossypium hirsutum
  Clone ID: LIB3135-034-Q1-K1-G12.pep
SLVIKYRPILKIFTRKCGTYTCLRNSKLQCGKFCGIPSPLFSNLKMRRVMVEDQCIRCHQGEGDSNHVF

SEQ ID NO: 96221 - protein, 112 aa, Gossypium hirsutum
  unsure (1)..(112): unsure at all Xaa locations
  Clone ID: LIB3135-034-Q1-K1-G4.pep
RETFIGEIIGAIFMGGDHHNLKPTIEEMPIKVIAEGDESMDGQILIDNKQEKSVKVLKNGDTMAYHHLFADLMGHQNQSAGLGSXDEQKKMVSSPPNEMECEITLVICENKS

SEQ ID NO: 96222 - protein, 78 aa, Gossypium hirsutum
  Clone ID: LIB3135-034-Q1-K1-G7.pep
MGEEQQGIQIPRIKLGTEGLEVSKLGFGCMGLTGGYSCPVSEEVGISIIKHAFHRGITFFDTSDIYGPKTNEILGGKA

SEQ ID NO: 96223 - protein, 42 aa, Gossypium hirsutum
  Clone ID: LIB3135-034-Q1-K1-H1.pep
VDLSSAITTFIMVVLFCFVLQESLSCRFFPVFMKLQLLCYYQ

SEQ ID NO: 96224 - protein, 63 aa, Gossypium hirsutum
  Clone ID: LIB3135-034-Q1-K1-H2.pep
GAFRCGMLYTVAIDFARCSTVRLCSLRGLAHYCMHVSLSYSLSTTMLSSIRWTFSHRPRRTRG

SEQ ID NO: 96225 - protein, 56 aa, Gossypium hirsutum
  Clone ID: LIB3135-034-Q1-K1-H6.pep
MGYGGYGHSLRSPSFKSVSGSQFGLERQSNYSSCCTESLGGEMSPSSTSDLRRWLR

SEQ ID NO: 96226 - protein, 47 aa, Gossypium hirsutum
  Clone ID: LIB3135-035-Q1-K1-A1.pep
MRRCLVDHELQSPDIDLQPLAKLIPTFVEPLSMNVSANHHPHPAGGP

SEQ ID NO: 96227 - protein, 100 aa, Gossypium hirsutum
  Clone ID: LIB3135-035-Q1-K1-A2.pep
MTANKEENVPIISHQSRLSQCCCMCGDSGLTHELFQCTVCHFRSQHRYCSNLYPKADSYEVCNWCLNQKADSKSQNSSNSSPSCKDNSEDDGKNQKKGDQ

SEQ ID NO: 96228 - protein, 71 aa, Gossypium hirsutum
  Clone ID: LIB3135-035-Q1-K1-A3.pep
AHALDVLLGSLSVTRTSCEDGTETTDIIDENAPIIWHLSRLFQCWCVCRDHAFTYEPLQCTSCHIRSEQRY

SEQ ID NO: 96229 - protein, 96 aa, Gossypium hirsutum
  Clone ID: LIB3135-035-Q1-K1-A6.pep
PPYNENVYGFIAENKKGKYKEFLLFFLFVVLSFLHLCVGRKVRSSVVERRCAGDEDEELQCLLSRVFALQLKLVSVLGRLGQGYFWATWVNSGFGF

SEQ ID NO: 96230 - protein, 59 aa, Gossypium hirsutum
  unsure (1)..(59): unsure at all Xaa locations
  Clone ID: LIB3135-035-Q1-K1-B11.pep
PLVRITSSAGRRVYLDYIKKYETSERRHXHIHGHIIACFRVMEGDHVIIGPRIPLGRTV

SEQ ID NO: 96231 - protein, 92 aa, Gossypium hirsutum
  unsure (1)..(92): unsure at all Xaa locations
  Clone ID: LIB3135-035-Q1-K1-B4.pep
CHWVTLCESISTRALLEHSRFRVALMVREAYGLNQSPERALMLWNQHSVXAELTEEYVAEXVAVAHTLAXMLIELARLYKDIVAASGEQSQS

SEQ ID NO: 96232 - protein, 72 aa, Gossypium hirsutum
  Clone ID: LIB3135-035-Q1-K1-C12.pep
FNRELEFFIIRNAGAFSANRGGDVTKFLIGVVAVKTRGPRQIGAIVLHMTRQKIEVSKRTRGTPRILRSSST

SEQ ID NO: 96233 - protein, 53 aa, Gossypium hirsutum
  Clone ID: LIB3135-035-Q1-K1-C3.pep
SMLNHPICEFGINCQFSNGITSRVLTEVVSLMLRELLLEVCLVTSLNSNLDDV

SEQ ID NO: 96234 - protein, 49 aa, Gossypium hirsutum
  Clone ID: LIB3135-035-Q1-K1-C5.pep
LVHIQKPVSSMGRCEIIDPQCRVVQGPTSLLLTWISVERTKTVARTYSL

SEQ ID NO: 96235 - protein, 88 aa, Gossypium hirsutum
  Clone ID: LIB3135-035-Q1-K1-D2.pep
RLLGIPIMARLNLALLVIVFVLIYQVPSMQSRKLFNGEMKAAVISPKDNLVPSDVPKKPTTDKDSIMADNERLFSVHLGKIDRLLQSA

SEQ ID NO: 96236 - protein, 47 aa, Gossypium hirsutum
  Clone ID: LIB3135-035-Q1-K1-D5.pep
WLRPELNRLPLVCVKAAIHGPRQMCSYLGWSTILDSVCASNNASYLT

SEQ ID NO: 96237 - protein, 39 aa, Gossypium hirsutum
  Clone ID: LIB3135-035-Q1-K1-D7.pep
GALSLHSISFYLKISKSRDGVPGNFPDCNFVFRRNMKVS

SEQ ID NO: 96238 - protein, 68 aa, Gossypium hirsutum
  Clone ID: LIB3135-035-Q1-K1-E1.pep
HASGWPRRARVVVASLEKTEEGGWGTVKSIKTWKRLDDKHLTAIDGEVLWSKKHTGTRRKKHINGSPA

SEQ ID NO: 96239 - protein, 48 aa, Gossypium hirsutum
  Clone ID: LIB3135-035-Q1-K1-E9.pep
VWEKIEYDLIIKKLCSSSHLFLMACRNLIYYALSMQCSMISFEFKAQL

SEQ ID NO: 96240 - protein, 107 aa, Gossypium hirsutum
  Clone ID: LIB3135-035-Q1-K1-F1.pep
AHASARMYQACPDPNHLELYPQGEAQQDMPIFSLVPHKNGIYAIEFSSSITALQAFFVSVTIISCRKSSGFPEFGDLPEGKLIKETMLNGSLEMDNIHTVVLGTMPA

SEQ ID NO: 96241 - protein, 122 aa, Gossypium hirsutum
  unsure (1)..(122): unsure at all Xaa locations
  Clone ID: LIB3135-035-Q1-K1-F9.pep
MGLESNACIDSQYLSDHYADEPDSWQQGNADDCYEGDNALLRSGDEWDQTRYACNDVTGVRTWLEDLGFGRYAGIFEMHEVDQETLPLLTLDDLKEMGVFAVXHRRKLYTAIQQLRGGNAFS

SEQ ID NO: 96242 - protein, 48 aa, Gossypium hirsutum
  Clone ID: LIB3135-035-Q1-K1-G11.pep
RPKVPIQRTNSIAHLLLDIIPIGDSEFRIFLALYFYLDGLYSFIYLDF

SEQ ID NO: 96243 - protein, 47 aa, Gossypium hirsutum
  Clone ID: LIB3135-035-Q1-K1-G12.pep
NVTLYEMQVYDHYSSTSESRGQDPSSTLAKGLYKCEVGSIHPGTQSR

SEQ ID NO: 96244 - protein, 81 aa, Gossypium hirsutum
  Clone ID: LIB3135-035-Q1-K1-G5.pep
IVQFYFFFSFILFFFLSSQFFFFFFFSIGNNNNEEVSSISKPTLSIVIHAYICKICNIHIQLAFEANYKHNDEEPNAWRTR

SEQ ID NO: 96245 - protein, 111 aa, Gossypium hirsutum
  Clone ID: LIB3135-035-Q1-K1-H1.pep
HASESVYAPEPFDVGRILQVEIIYDGQLIVLTTAGAIDPAAGLGNYVEALVRKHDIEFNVVVSQMNGADHPSESIHVLHVGKMRMKLCKGKTTIVKEYYSSSMQLCGVRGG

SEQ ID NO: 96246 - protein, 64 aa, Gossypium hirsutum
  Clone ID: LIB3135-035-Q1-K1-H2.pep
EAQSRGVDAVADTVPKITALTGTRRRTHGKPEKQQPATLSWHGTKNQEPAAFNGNNRRTCLGAS

SEQ ID NO: 96247 - protein, 58 aa, Gossypium hirsutum
  Clone ID: LIB3135-035-Q1-K1-H9.pep
SAKIDSSLSDTDTKKAAVEAAKNALSKGKISHLLLELHLTFLSFVLLIDVVWVFIFVS

SEQ ID NO: 96248 - protein, 72 aa, Gossypium hirsutum
  Clone ID: LIB3135-036-Q1-K1-A12.pep
KKKKKKKKKKKKKKGGGQKKGTKQTPACERRHSASMAPPKINSPAVDKQRTDRKNPGPTQLNRLAKQPPSAS

SEQ ID NO: 96249 - protein, 86 aa, Gossypium hirsutum
  Clone ID: LIB3135-036-Q1-K1-A2.pep
KNPKSGASNRGAAKDIAVRSEGRAPARTYTIRAREEAESPDVITCTFSIHDLTVVALIDSGSTHLYICMELIPHIGMVVESIEFVI

SEQ ID NO: 96250 - protein, 146 aa, Gossypium hirsutum
  unsure (1)..(146): unsure at all Xaa locations
  Clone ID: LIB3135-036-Q1-K1-A7.pep
DWAMTELIMNSKVLXKAQADIRKVVWDRRVVLETELPHLDYMIAGIKETWRLHPPAPVLLPRECMEDVTIDRFDIPTKTRIFVSVWAIGRDPESWENAECFAPERFVHSSIDFKGQNFELIPFGAGRRSCPVITLGTVSSEKALAQ

SEQ ID NO: 96251 - protein, 57 aa, Gossypium hirsutum
  Clone ID: LIB3135-036-Q1-K1-B11.pep
HKKRGPSTRCCFRCQFDLPWPPNKYLHATHSQCWPDSGCTAIPSIRKHTICSIRRVT

SEQ ID NO: 96252 - protein, 83 aa, Gossypium hirsutum
  Clone ID: LIB3135-036-Q1-K1-B4.pep
DSVGMGIFHGLLFAHRSLFLFVLKNWNMSVVPVRLIFQDALVSRCWRTRCKYRLQVKETPPPVEAIDRTTGKGVPFMFFFFFR

SEQ ID NO: 96253 - protein, 99 aa, Gossypium hirsutum
  Clone ID: LIB3135-036-Q1-K1-B9.pep
SHTRECPLALSAPFQYKVIFIAFPSKLKNEFFLFSDDPCHHQPRSALCASYVSQDHLFSYHMENENGISLVYPLNDNLCHFVEVNSYETVSDAWANAWA

SEQ ID NO: 96254 - protein, 47 aa, Gossypium hirsutum
  Clone ID: LIB3135-036-Q1-K1-C1.pep
GQAYAFLQAFGLLKPFILEGYLLFEVRKCMETYYLWNLTNTAMVYNL

SEQ ID NO: 96255 - protein, 89 aa, Gossypium hirsutum
  Clone ID: LIB3135-036-Q1-K1-C11.pep
WVQSLSVLLQSNRMGYQGCMLELKGHALRHLSFEGYTQKIRASPSTTTSRKPISSPNMTVCRHAFASAVVGSLVLPSGCPTQLLAGPVL

SEQ ID NO: 96256 - protein, 94 aa, Gossypium hirsutum
  Clone ID: LIB3135-036-Q1-K1-C12.pep
MLRQFWRKRGYYRQVRREKGEGVVPKGYVPVMVGREEEGAKFFIHIDMFENDYFVSLLEMIAVEVGYENPGILRIPCHTQCFTHILNQISRINT

SEQ ID NO: 96257 - protein, 140 aa, Gossypium hirsutum
  Clone ID: LIB3135-036-Q1-K1-C2.pep
QTYALPGWMVQSNRAVRYIGSNHYADPECKRAEELVFGKEGIISQMVETTPNKLYSLTFSLGHARDKCKEPLAVMAFAGDQARNFHYTPDSNSTFQVASVNFTAKAERTRIAFYSVYYNTRTDDMSSLCGPVVDDVRVWF

SEQ ID NO: 96258 - protein, 91 aa, Gossypium hirsutum
  Clone ID: LIB3135-036-Q1-K1-C3.pep
ILFVSLSQCKSLYTLLSVPLSKISHRKLIWVSAGPVEHFSQVMHQMKQWNQVRHRRRLSNEYYPAPHVPCQVEGHQLMHSESVCQQAYAWA
